United States Patent Application Publication US 2017/0114356 A1 - sequence listing, part 54

SEQ ID NO: 72831 - DNA, 5379 bp, Zea Mays
tcgggtcccctcaaatcaatcgatcacacgcgtcccgccccattcggccattcccagccttcgagaggtcgccgccgccggtcgctgctccgccgactcggggatgccaccggcggtagcgcccgcctcgccgcgccaagaccctagcggctccagtctttccgccgcagccgccgcggcttccatggcgaacccggtcctagggcttggcctcgcgccaccgggcgctgagccctccgccggaacgccaccgtcttcacgccgcgcgccgcgcttggccaagcggcgccacgcgcccgcctcctcccgtttccgcgcggcgcaggcctcagtcggaacatggaacccgtttggcggcggcggcggtacggatggacagactcgaggttttgtgtttggtgctgcttccccagtgagccagcagccttcggagccagcagtggagatatcttcatccagtgaggcgcccttcgtgtttcagagtgtgagggagaaccttcctcggtttgaggagggattgtctggttcatcaatgctccctgataagatggggaagctgaacctgcgcacatcaggtgaggttggcgatggtctcggtcaggggagggatcgaaaggatggaagttcagcatttggtgttgatatatctggtttgttttctaacaaggaagataatgggctccaggagaagcttacacagttgaatttaggccacagagaacccttgcaaagtgagaagagggatagtgctaatggtgtgccacaagcatttgtgtttggatgtaatggagctgggagttttgctgattgtaagaacacagttgcctctggtgcacagtcagatgatcctagttcagtttgtggcactgatgcaaaagctatggctgggaagtcgacgcaattcaatataggcagtcaagcaccttcctggggtggagggattgagggtactaatggagcaccagaagctttcacgtttcaaagtaccgcagtaagtggtcatgtggataatataaacaatgttgtctccggtgccaataccagtgccaatacaagttcgtccactgttgctaaaggtgtgggtgatgtagatttgcttccagaaaagttaacacggttgaatataggaagtgacatgcccttgcatgagtcgaaaagtggttatcagcccaaagtgtttagagcagtccaagggacaatttttggaaatgaaacaagcagcacatcagataggagcagtgaattcctctctgcaaatagcaatacttctagttcaagcagtgatttgttctctacagcaaatagcaacacttctaattcagctaatggcacttactgttttcctccagagaagacaccagatttgaatgcaggagagggagtcatgtcggagagcttggaaagtgatagttctaactgtccaccacaaacctttttatttgaaagaaatgaaacccgaagctctgtttcacactctgcaagcatagccatggatgacggtggcaattttgtcaatcacaaaaatactgacacctgtagttcagctcgtggtacatttgattatgcaggtgctctcccagagaagatgacgaaattaaatataggatgcagaaattcataccatagcaggaaagatgaaactgctactgaaccaccagaagtatttgtatttgggtgtaatgtttctagcttttcttctacccatactgcaagtaaatcacatgatcccacgactcctgaattttgttttcaaagtaaagcagaggcaacttcaggatatggggctgttccccaaaccaaagttcaggagtcatacttgtttacgactttgaataattcttgtagtccctctacttttgagaatgcagttcctgctttcagttttgggacaatggatgcagaaatagaaactgctccagatgatcatttttctgtcaaacaggatttgcctgggttttccagggagaccttatttggtttagacagtataaaatctgcatacaaggacaaaagggaagcacacaaaggcaaaatgaaaaataaaaggccaactaggctaaagcaacatgctcagctccatcaggttatttctaaggaagcctgtaacgatggaaaatcatcagatttagcaggtgactattcaccaatggattgttcgccatatcctgcagaagctgaacatgtgccaacagaggcatatgtggcttctggtcagcccgttcacattggtgatagtgttatctcaaactggaacaccagctgtgctgaagatgatgtagtttctgcaaccgagcacttgattattgatgtaaacctaccaatgtttggagatgaaggtagaggaccgaaactagatgcatctgagagcaattttggtagcagcttttctagttttcaaggagatcaaagtaatggaccacagcattctttcactaatattgggcaagactgtaacgataatacctacagaactccccatgattttgttgagcctcctgcttttcaatcaagctcatcaaatttcagtgggctgaactttagattcggtgtgtcatcctctccacaaatctctgcagcagcacaaagacgtaacacaagaaggaagttaagaacaaagggcagtctggcatcgaaaccttcaactatcggctcttttgaacagtcaaaatcttcacaagatactaagggcatgcggtttttctgtgaaacaagcaaaaatgaagacccagtgaaagagcaaccgtcaagaaagtcttctacttctgcggccttggaggcttgtgaaacctggcgtactagtggaaataaagcctatgaaaatgggcactttgctactgcagaggattattatacccgtggaataaactctgttacccactatggtgtttctggacattgttctcgcgcattgatgctgtgttacagcaaccgtgcagctacaagaatgtcgcttggcatgatgtgggaagcacttcaagattgtttgactgctacatcaattgaccccacctttcttaaagctaaagttagagctgccaattgccatcttgcattgggcgatcttgaagatgcattaaaggagttacatggcctgtttgaacagtaacactgggagttcttctgaccctaaaaatattagccgaggcttctgatggcctggaaagagtcaagagagtgatcgattgggtatccctgtgcaaggaacttattgagaaaaaaacatctcctgaagcaacaaaagccttagaattgatctccaatgcattgcacatatgtccatattcagacagcctcaaggagatgaaggcagaggcattgctgatgctacgaagatacgaagaagtgattcaactatgtcaggagtctgtaaatccgactgaaagaaagccagctttattcaaagataatggagaaccaaagaattccagtctctttgaacaaacacacttctctggaaggtattggcggccctatctcatttgcaagtcttatttcctttcaggcaagctggatgaggctgtcgaattattaaagaaacatgagcaagtcacacctgtcaaagaaagtgacgtgaacacatatcaagaaaatttctcatcattgtcagcgattataagagaactactttcccttaaggctgctggaaatgaatcatttcaagctgctgcgtatcaagcactcggtcaagttactgatgcaatagctgattgttcacttgccatggttcttgatacaaattaccccaaggcaatttcaagacgagccaccttatacgagatgataagggattatggacatgctgctaatgatttaaggaagctaatctcacttcttgaaaagaaagtcaatgtgtctggaatatcaccaaaagcttttaacaagcataaagatatcaagcaagcacatgcgaggctttcacacatacatgctgaagcaaaaaacgatacccccctgaatttgtatttaatcttgggagtggagccatcctgctcttcagcagatattaagaaggcataccggaaagctgcattgagacatcacccagacaaggctgctcaattattagtaaggaacgagaatgctgaagatggattttggagggatgttatcaaggaagtctatgcagatgcggatcatctgttcaaaacaattggggaggcatataatgttctttctgacccggacaagcgtcaagagtacgactttgaagagaatctaagaaatgctcggagagtatcgagttcaaggagcatgcgtaggtcacctgaacataactacagcgacagaggctttaatccacggcagtggcagtcaagcagagcatcacgttggtacagcaaatcagacgattactggtaaagaaggcactacggcgtggtcatgtggtgagaagcaacttttgcaactatgtcatgtgtggagcaaatgcctccttgcaccaaagatgggatgggatgcacctgccttcccttaggtgccggtgctaatgcaccagccttgcagtcagcagctttcctgtttgtttgctgcgtttctttttcagaggatggaaatattaggattgatcaattggggatctgggatgattgcttgacactggtagcgtcgtgacttgactagcacaggaaatatggaggattaggaagtggtatatcaaatagtcttttgttggcctggtgatgtctgaacactgactgcttgggagtggctggcatgatggtatctgctctgaagtcaaaacactgagaacaacatcaaaggttagaaatctgggtaaagatgtcagtttgtccaataggtacaggcattcttttgctgaatgcatggcccgctgtcgtaagtttacagcagatcagctgaaagaaaaagagacaggctcttctgtttggcgcgtgcgcgtgcagttttgttctgttgtttccttattaccaaatgatgtagcgttggaaagagtgggtacatattgtgactgcccaatgttgaaatctcgtaacatttatttattctttattactagacttgttagcctaatgttggaagcattttgagataatcaaggttccttcaaagcaagaagaggatctggttatggtaccgtttcgtttgtaaccatggtaccgtggagattcttttgattcgattctcgattgtgctagttcaaagttcttagtggttaaaaaatcagaaatatttgaagcttttagcaggattttggctttttttcacataaaatcggattataaggggaaacgagccatatgtgaagtgcatgttctctcatgttgcttatgataaaaatatttggatgacttgaacccgcccatggtttttttacggaacgccagggagccgtactattttttaaagcttagccctgac

SEQ ID NO: 72832 - DNA, 2444 bp, Zea Mays
caattccccataatttctatacattttttttaaattagaaacttttgctgtgatctacgggctcagcaaagctgcccattttttcaactagacaacttatggagttatcctgtgcaatcaagcagattggtttgattcagagagtgatcgattgggtatccctgtgcaaggaacttattgagaaaaaaacatctcctgaagcaacaaaagccttagaattgatctccaatgcattgcacatatgtccatattcagacagcctcaaggagatgaaggcagaggcattgctgatgctacgaagatacgaagaagtgattcaactatgtcaggagtctgtaaatccgactgaaagaaagccagctttattcaaagataatggagaaccaaagaattccagtctctttgaacaaacacacttctctggaaggtattggcggccctatctcatttgcaagtcttatttcctttcaggcaagctggatgaggctgtcgaattattaaagaaacatgagcaagtcacacctgtcaaagaaagtgacgtgaacacatatcaagaaaatttctcatcattgtcagcgattataagagaactactttcccttaaggctgctggaaatgaatcatttcaagctggtagatattcagatgctgtcaaacagtattcagcagctttggcatgtaatagtgaatcgcgcgcattttcagctgtctgtttttgcaatcgcgcagctgcgtatcaagcactcggtcaagttactgatgcaatagctgattgttcacttgccatggttcttgatacaaattaccccaaggcaatttcaagacgagccaccttatacgagatgataagggattatggacatgctgctaatgatttaaggaagctaatctcacttcttgaaaagaaagtcaatgtgtctggaatatcaccaaaagcttttaacaagcataaagatatcaagcaagcacatgcgaggctttcacacatacatgctgaagcaaaaaacgatacccccctgaatttgtatttaatcttgggagtggagccatcctgctcttcagcagatattaagaaggcataccggaaagctgcattgagacatcacccagacaaggctgctcaattattagtaaggaacgagaatgctgaagatggattttggagggatgttatcaaggaagtctatgcagatgcggatcatctgttcaaaacaattggggaggcatataatgttctttctgacccggacaagcgtcaagagtacgactttgaagagaatctaagaaatgctcggagagtatcgagttcaaggagcatgcgtaggtcacctgaacataactacagcgacagaggctttaatccacggcagtggcagtcaagcagagcatcacgttggtacagcaaatcagacgattactggtaaagaaggcactacggcgtggtcatgtggtgagaagcaacttttgcaactatgtcatgtgtggagcaaatgcctccttgcaccaaagatgggatgggatgcacctgccttcccttaggtgccggtgctaatgcaccagccttgcagtcagcagctttcctgtttgtttgctgcgtttctttttcagaggatggaaatattaggattgatcaattggggatctgggatgattgcttgacactggtagcgtcgtgacttgactagcacaggaaatatggaggattaggaagtggtatatcaaatagtcttttgttggcctggtgatgtctgaacactgactgcttgggagtggctggcatgatggtatctgctctgaagtcaaaacactgagaacaacatcaaaggttagaaatctgggtaaagatgtcagtttgtccaataggtacaggcattcttttgctgaatgcatggcccgctgtcgtaagtttacagcagatcagctgaaagaaaaagagacaggctcttctgtttggcgcgtgcgcgtgcagttttgttctgttgtttccttattaccaaatgatgtagcgttggaaagagtgggtacatattgtgactgcccaatgttgaaatctcgtaacatttatttattctttattactagacttgttagcctaatgttggaagcattttgagataatcaaggttccttcaaagcaagaagaggatctggttatggtaccgtttcgtttgtaaccatggtaccgtggagattcttttgattcgattctcgattgtgctagttcaaagttcttagtggttaaaaaatcagaaatatttgaagcttttagcaggattttggctttttttcacataaaatcggattataaggggaaacgagccatatgtgaagtgcatgttctctcatgttgcttatgataaaaatatttggatgacttgaacccgcccatggtttttttacggaacgccagggagccgtactattttttaaagcttagccctgac

SEQ ID NO: 72833 - DNA, 2388 bp, Zea Mays
atggagttatcctgtgcaatcaagcagattggtttgattcagagagtgatcgattgggtatccctgtgcaaggaacttattgagaaaaaaacatctcctgaagcaacaaaagccttagaattgatctccaatgcattgcacatatgtccatattcagacagcctcaaggagatgaaggcagaggcattgctgatggtttgtatttctttttcttttggctcgttgcctcgttccatgaattattaagagcgcctatacttcaatgaatcataagagcatttatactaacaaataaccagggaatgccttcttttgtcatatatttatctcttgctactaatgtcatcgctgcactgaacagctacgaagatacgaagaagtgattcaactatgtcaggagtctgtaaatccgactgaaagaaagccagctttattcaaagataatggagaaccaaagaattccagtctctttgaacaaacacacttctctggaaggtattggcggccctatctcatttgcaagtcttatttcctttcaggcaagctggatgaggctgtcgaattattaaagaaacatgagcaagtcacacctgtcaaagaaagtgacgtgaacacatatcaagaaaatttctcatcattgtcagcgattataagagaactactttcccttaagctgcgtatcaagcactcggtcaagttactgatgcaatagctgattgttcacttgccatggttcttgatacaaattaccccaaggcaatttcaagacgagccaccttatacgagatgataagggattatggacatgctgctaatgatttaaggaagctaatctcacttcttgaaaagaaagtcaatgtgtctggaatatcaccaaaagcttttaacaagcataaagatatcaagcaagcacatgcgaggctttcacacatacatgctgaagcaaaaaacgatacccccctgaatttgtatttaatcttgggagtggagccatcctgctcttcagcagatattaagaaggcataccggaaagctgcattgagacatcacccagacaaggctgctcaattattagtaaggaacgagaatgctgaagatggattttggagggatgttatcaaggaagtctatgcagatgcggatcatctgttcaaaacaattggggaggcatataatgttctttctgacccggacaagcgtcaagagtacgactttgaagagaatctaagaaatgctcggagagtatcgagttcaaggagcatgcgtaggtcacctgaacataactacagcgacagaggctttaatccacggcagtggcagtcaagcagagcatcacgttggtacagcaaatcagacgattactggtaaagaaggcactacggcgtggtcatgtggtgagaagcaacttttgcaactatgtcatgtgtggagcaaatgcctccttgcaccaaagatgggatgggatgcacctgccttcccttaggtgccggtgctaatgcaccagccttgcagtcagcagctttcctgtttgtttgctgcgtttctttttcagaggatggaaatattaggattgatcaattggggatctgggatgattgcttgacactggtagcgtcgtgacttgactagcacaggaaatatggaggattaggaagtggtatatcaaatagtcttttgttggcctggtgatgtctgaacactgactgcttgggagtggctggcatgatggtatctgctctgaagtcaaaacactgagaacaacatcaaaggttagaaatctgggtaaagatgtcagtttgtccaataggtacaggcattcttttgctgaatgcatggcccgctgtcgtaagtttacagcagatcagctgaaagaaaaagagacaggctcttctgtttggcgcgtgcgcgtgcagttttgttctgttgtttccttattaccaaatgatgtagcgttggaaagagtgggtacatattgtgactgcccaatgttgaaatctcgtaacatttatttattctttattactagacttgttagcctaatgttggaagcattttgagataatcaaggttccttcaaagcaagaagaggatctggttatggtaccgtttcgtttgtaaccatggtaccgtggagattcttttgattcgattctcgattgtgctagttcaaagttcttagtggttaaaaaatcagaaatatttgaagcttttagcaggattttggctttttttcacataaaatcggattataaggggaaacgagccatatgtgaagtgcatgttctctcatgttgcttatgataaaaatatttggatgacttgaacccgcccatggtttttttacggaacgccagggagccgtactattttttaaagcttagccctgac

SEQ ID NO: 72834 - DNA, 1340 bp, Zea Mays
tttagtatagttacgcagcggatttgagagacccatatcagaaattgtctacacagcacaagcagtaacttctttacagcgataacagttgcggtgacaaacaagagggtggaacgaagattcaataggaaagaaaacacgacgcagtcatgctgccaggaccccaccaagaacactgtcacctccctgtccttatgtcaagacaaagatatgtccatacagctgcttctaaaatagctcatcttcatccaaaaaatcaaaaatcaaactcacctgtcgcctgcaaagtcgatttgtcaaatccatgtcagcaatgcaacaaagggtaccgcactgaagtcgctcatcaaaacacatttgaggccaacatggctgagttctcaggtccatgataaattaactataaagtttgcacgatagctaacttatggccttacagccaatttggaagtttttgaacggaataaaggtgcagcgaaacattacttttcccttctggtaatgaatgaattacatgctttaacaactcagaaaaaagcaccagtatcttgcaacagcctgcctactctgcatgtcttctgtgcgagaatcacaatttaagatgattattgtgtggtcaattagtttgaaattagctgcgcctttatttttttcgaacaagcaggagagttgcgtatcttttttatcaaaaggtgaaatagggaaaagaaatcccaaaacaaaaacctcaacccctcactcccccattataaataaaatcaagggaaagaacaggggagaagtcacacctccacacaacccagattaccactaatcttgttgtaaggctaccaggaaagaaataccctcagcaccagccaaactccagaatagtgcctcttcctttgctagaagagcctttagggctgatttggtgaccagggatcccgaggggaagaaatcctcttgctattcaaaattgaattgcgaggggattcctcccccatggatcctctagggatccctaatcaccaaattagcccttaggaggctaggattttccccatcgattctataatataatactcccaccgtcccaaaatagtatttgttttagctattggtttttatgtctatattaaaattgatgatgatgaatctagacatatatataaaacacatacataaagtattgtatgaatccgatactttcttaaaacaaattttaatttgggacatagggagtataatataatattccaaacatgtcaagggatttagctgttatttatggtagaaacagaatttgaggctcaaaggtaatattcacaaacttgaccaaaaaagattatcttacccac

SEQ ID NO: 72835 - DNA, 1139 bp, Zea Mays
acaacacctaaattgtaacgcctccagcgaaacccaaaaccctcccaccaaatttcaatgacgccgtcgaaaccccctggcaagcgccgccgttcggctccacctccgcgcttgccctcacccgctccacccgtggcgctctcgccgccgggcttcgtcgccgaccgcgccgaggccgcggcgcgcgtggagcgcctcctgcggtaccagttctgcgaccgcgcccttctagaggaggccctgacccaccaatccttctcggatggcgctctctcttaccagcggctcgagttcgtcggcgacgccgctctcggcctagccttctctaacttcctatacctcaccaaccccaccctcgggcccggcgcgctctccacgctccgcgccgccaacatctctaccgagaagctcgcgcgcgtcgccgtccggcacgacctctacccgctgctccggcgcaagtgcccccgcctcgacctactagtaggccagttcattgagtcagtgaagcaagaactaatgcatgaccttgccactgcaccgtatggtggtagcgtggttaaagctcccaaggtgcttgcagatattgttgaggccatcgctgctgcagtctacgttgattgcaaatttgaccttgagaagctttggaaggttacaaggtggctctttgagccaattatcacagcagaaacaatagatgagcaacctgtgactacattgcatgagttatgccaaaaacatggcaaagttgcacagttcaagacatggcagaaggatgggatgatcgtggtaaatgtatttgttggtggggagatggttggacttggttcctcggagcagaaggtaattgctaagctgaatgctgcacgagatgcactgggcaagcttattggtggtgcaaagcagcaagtgttgatcaattgtgccgccaatggattggtggatgacattgcagagcttagggagtgtaaacagaaacttattgagcagtgcatcagaaaacattggccaaaacctatctttaagggagggagtcagccggctagggatagctaccgcttcttccagacacggtgccagcctgccagggtgtggccggctctgggcctcactgggccctcattctttagccatggatcgac

SEQ ID NO: 72836 - DNA, 1011 bp, Zea Mays
acaacacctaaattgtaacgcctccagcgaaacccaaaaccctcccaccaaatttcaatgacgccgtcgaaaccccctggcaagcgccgccgttcggctccacctccgcgcttgccctcacccgctccacccgtggcgctctcgccgccgggcttcgtcgccgaccgcgccgaggccgcggcgcgcgtggagcgcctcctgcggtaccagttctgcgaccgcgcccttctagaggaggccctgacccaccaatccttctcggatggcgctctctcttaccagcggctcgagttcgtcggcgacgccgctctcggcctagccttctctaacttcctatacctcaccaaccccaccctcgggcccggcgcgctctccacgctccgcgccgccaacatctctaccgagaagctcgcgcgcgtcgccgtccggcacgacctctacccgctgctccggcgcaagtgcccccgcctcgacctactagtaggccagttcattgagtcagtgaagcaagaactaatgcatgaccttgccactgcaccgtatggtggtagcgtggttaaagctcccaaggtgcttgcagatattgttgaggccatcgctgctgcagtctacgttgattgcaaatttgaccttgagaagctttggaaggttacaaggtggctctttgagccaattatcacagcagaaacaatagatgagcaacctgtgactacattgcatgagttatgccaaaaacatggcaaagttgcacagttcaagacatggcagaaggatgggatgatcgtggtaaatgtatttgttggtggggagatggttggacttggttcctcggagcagaagagcttagggagtgtaaacagaaacttattgagcagtgcatcagaaaacattggccaaaacctatctttaatcacaacatctacattgtgatgttgccttgactacggggatgttttagtcttcgacttctcaggttgatcatctgctatgcttctatttcgactttaggcg

SEQ ID NO: 72837 - DNA, 1418 bp, Zea Mays
acaacacctaaattgtaacgcctccagcgaaacccaaaaccctcccaccaaatttcaatgacgccgtcgaaaccccctggcaagcgccgccgttcggctccacctccgcgcttgccctcacccgctccacccgtggcgctctcgccgccgggcttcgtcgccgaccgcgccgaggccgcggcgcgcgtggagcgcctcctgcggtaccagttctgcgaccgcgcccttctagaggaggccctgacccaccaatccttctcggatggcgctctctcttaccagcggctcgagttcgtcggcgacgccgctctcggcctagccttctctaacttcctatacctcaccaaccccaccctcgggcccggcgcgctctccacgctccgcgccgccaacatctctaccgagaagctcgcgcgcgtcgccgtccggcacgacctctacccgctgctccggcgcaagtgcccccgcctcgacctactagtaggccagttcattgagtcagtgaagcaagaactaatgcatgaccttgccactgcaccgtatggtggtagcgtggttaaagctcccaaggtgcttgcagatattgttgaggccatcgctgctgcagtctacgttgattgcaaatttgaccttgagaagctttggaaggttacaaggtggctctttgagccaattatcacagcagaaacaatagatgagcaacctgtgactacattgcatgagttatgccaaaaacatggcaaagttgcacagttcaagacatggcagaaggatgggatgatcgtggtaaatgtatttgttggtggggagatggttggacttggttcctcggagcagaagattagaaaaagaaggtggccctgcacatgaaaggaactttgtgtgttctgttcaggtagatacccaaactggcacttttgtaaccataggtgaatctatgtcaagagttaaggatgcagagaattcggctgcgcataagatggtcgaactattgttgaaattgtgagatatattcatgtacatggctagatctttggtatacctctttcgagaaacaatttgttcaaggatacctattatggtagctttgtcattacatggatagatctttagccctctcgagaaacaatttgttcaagtacacctattatggtagctttgtcatagtgtgggtcatgtcatctagttaatacggtttataattgagcatttatctcaaatcatgtctttttataatgcatgattctagacaacttagttttagaatagggtaaggagacgggtttaactatcaaaaccaatgcctatatagttattgttttgtactgtcctgttttacattaatattatataaaatatcatgaagcgtggaatattttgtggatttgatatttggattatttcaaataaggagagct

SEQ ID NO: 72838 - DNA, 1596 bp, Zea Mays
acaacacctaaattgtaacgcctccagcgaaacccaaaaccctcccaccaaatttcaatgacgccgtcgaaaccccctggcaagcgccgccgttcggctccacctccgcgcttgccctcacccgctccacccgtggcgctctcgccgccgggcttcgtcgccgaccgcgccgaggccgcggcgcgcgtggagcgcctcctgcggtaccagttctgcgaccgcgcccttctagaggaggccctgacccaccaatccttctcggatggcgctctctcttaccagcggctcgagttcgtcggcgacgccgctctcggcctagccttctctaacttcctatacctcaccaaccccaccctcgggcccggcgcgctctccacgctccgcgccgccaacatctctaccgagaagctcgcgcgcgtcgccgtccggcacgacctctacccgctgctccggcgcaagtgcccccgcctcgacctactagccagttcattgagtcagtgaagcaagaactaatgcatgaccttgccactgcaccgtatggtggtagcgtggttaaagctcccaaggtgcttgcagatattgttgaggccatcgctgctgcagtctacgttgattgcaaatttgaccttgagaagctttggaaggttacaaggtggctctttgagccaattatcacagcagaaacaatagatgagcaacctgtgactacattgcatgagttatgccaaaaacatggcaaagttgcacagttcaagacatggcagaaggatgggatgatcgtggtaaatgtatttgttggtggggagatggttggacttggttcctcggagcagaaggtaattgctaagctgaatgctgcacgagatgcactgggcaagcttattggtggtgcaaagcagcaagtgttgatcaattgtgccgccaatggattggtggatgacattgcagagcttagggagtgtaaacagaaacttattgagcagtgcatcagaaaacattggccaaaacctatctttaaattagaaaaagaaggtggccctgcacatgaaaggaactttgtgtgttctgttcaggtagatacccaaactggcacttttgtaaccataggtgaatctatgtcaagagttaaggatgcagagaattcggctgcgcataagatggtcgaactattgttgaaattgtgagatatattcatgtacatggctagatctttggtatacctctttcgagaaacaatttgttcaaggatacctattatggtagctttgtcattacatggatagatctttagccctctcgagaaacaatttgttcaagtacacctattatggtagctttgtcatagtgtgggtcatgtcatctagttaatacggtttataattgagcatttatctcaaatcatgtctttttataatgcatgattctagacaacttagttttagaatagggtaaggagacgggtttaactatcaaaaccaatgcctatatagttattgttttgtactgtcctgttttacattaatattatataaaatatcatgaagcgtggaatattttgtggatttgatatttggattatttcaaataaggagagct

SEQ ID NO: 72839 - DNA, 1223 bp, Zea Mays
agttcccatctttctgaagttttgtgatcttttggatctttttctttcttagcaaaagcaaattatctgtaagcttgacacattgttcagttctgactcaagttcatagtaaacacttcttttaattgtcatgttgtgagtgtctcatctcgatttgatattttctttgtaccaaatgttttgatgactgtttgtcctgaccatgccatatgcaggtaggccagttcattgagtcagtgaagcaagaactaatgcatgaccttgccactgcaccgtatggtggtagcgtggttaaagctcccaaggtgcttgcagatattgttgaggccatcgctgctgcagtctacgttgattgcaaatttgaccttgagaagctttggaaggttacaaggtggctctttgagccaattatcacagcagaaacaatagatgagcaacctgtgactacattgcatgagttatgccaaaaacatggcaaagttgcacagttcaagacatggcagaaggatgggatgatcgtggtaaatgtatttgttggtggggagatggttggacttggttcctcggagcagaagagcttagggagtgtaaacagaaacttattgagcagtgcatcagaaaacattggccaaaacctatctttaaattagaaaaagaaggtggccctgcacatgaaaggaactttgtgtgttctgttcaggtagatacccaaactggcacttttgtaaccataggtgaatctatgtcaagagttaaggatgcagagaattcggctgcgcataagatggtcgaactattgttgaaattgtgagatatattcatgtacatggctagatctttggtatacctctttcgagaaacaatttgttcaaggatacctattatggtagctttgtcattacatggatagatctttagccctctcgagaaacaatttgttcaagtacacctattatggtagctttgtcatagtgtgggtcatgtcatctagttaatacggtttataattgagcatttatctcaaatcatgtctttttataatgcatgattctagacaacttagttttagaatagggtaaggagacgggtttaactatcaaaaccaatgcctatatagttattgttttgtactgtcctgttttacattaatattatataaaatatcatgaagcgtggaatattttgtggatttgatatttggattatttcaaataaggagagct

SEQ ID NO: 72840 - DNA, 1200 bp, Zea Mays
gccagccgtctccttatccctgcgatgccgctcacctgggctcatcttccagccgccctccgcccagcagcagagcacaccatcctctcaactcggatccccaagccctcgcctccagctcttgccacggcatccatcccctgttcggacctccacccggccgcgtcctcgccggtggccagcgccgctgcatcgcccttcctagcgtcggccttggcaccgcttccccgagcgccccagtcgagctcgcccatcctctgctctagccctttctccacgccgtcgctgagctcgcccctcccctcagccatggacacgacgacctgcagcccttcttggtggccaagcccatcttcctgctcgcgccccctctttttccacctctgcgcgtatcagctcgtccaacccccatggtgtttcctccctctcggctcccttgctccctccccatggcgttccccctggatgttggtgatctgttccccacggtgcaggcaaatgttctttccctccctgcagcagcaccttggtggttgtcgagcagcacgtcgcgcttgcgcagcctcggtcacgacgttgttcaccccggtgtcatgtgttcgccgaaatgcctaaacatgtagtctgtcgtcgtcgtatccacagtcaattttagtcatggggaacttggtacagccatccatggtatcagaatatgacctgggaggagaaggggacctgttcaaagctccagaagccatcatcgaggaaccgctgctcctgaactgtctgtctgattctgttcatttgttgctgtgtaggctgggcttgtgccaagcttgaatcctcttgtgaaggagtttctcaatgctgctgatgacaagcggaaggaagtcctctctaaaatagaagaggatgttgctaagctcagcggttctgcagccaactaagaagctacaagtgaatgccgaggagagcagcgatgacttggctaacccaccgaaggtagaggagaagcttggtgctgtccctcatggcctgtccaccgactctgaggttgcccagagggaagccgagtctatctctaggaagactctcaggagctcagccgagaagtttgagttccaagctgaggtttccagactcatggacatcatcatcaactcactctacagcaacaaggatatcttcctgagggagctcatatctaatgcctctgat

SEQ ID NO: 72841 - DNA, 426 bp, Zea Mays
gagattcaggtagatttcaatgttgagagctgttttttttctgttgggcaacgctttagaatcagacctcaaggcatctggtctatgcttatgcagattaagttggacaaagagaagaaaatcctctccattcgggataggggtattggtatgacaaaggaagatcttattaagaaccttggaacgattgctaaatctggcacttcaggaacaggagctgctcgagtctcttgtcgaagctgatacggaactgccaggccaatgctcgttgtggtttgaaacctttgttcgatatatagtctgaactctgaattgatgcagagaaggcaggaaagagctaagaagatggaagaaaagaaagtgtatctgcaactatacgaagcaatggaggcgttggtcaagatcaatctggagaccaacaagatc

SEQ ID NO: 72842 - DNA, 252 bp, Zea Mays
aagaaaatcctctccattcgggataggggtattggaacaggagctgctcgagtctcttgtcgaagctgatacggaactgccaggccaatgctcgttgtggtttgaaacctttgttcgatatatagtctgaactctgaattgatgcagagaaggcaggaaagagctaagaagatggaagaaaagaaagtgtatctgcaactatacgaagcaatggaggcgttggtcaagatcaatctggagaccaacaagatc

SEQ ID NO: 72843 - DNA, 367 bp, Zea Mays
ggggtattggtatgacaaaggaagatcttattaagaaccttggaacgattgctaaatctggcacttcaggtactgccttttcatctttccagctgattactgcactcataatatttgtttatgagtgcaggaacaggagctgctcgagtctcttgtcgaagctgatacgtttgtctgtttttcaccaggaactgccaggccaatgctcgttgtggtttgaaacctttgttcgatatatagtctgaactctgaattgatgcagagaaggcaggaaagagctaagaagatggaagaaaagaaagtgtatctgcaactatacgaagcaatggaggcgttggtcaagatcaatctggagaccaacaagatc

SEQ ID NO: 72844 - DNA, 128 bp, Zea Mays
gattgctaaatctggcacttcagagaaggcaggaaagagctaagaagatggaagaaaagaaagtgtatctgcaactatacgaagcaatggaggcgttggtcaagatcaatctggagaccaacaagatc

SEQ ID NO: 72845 - DNA, 196 bp, Zea Mays
  misc_feature (1)..(1): n is a, c, g, or t
natgaatcatttactaaaagctcccttttgtatacatccaaagacaggccgtgtttgtgttccgattgaccccagtaactgtgatgattttgatcctgcggctgttccgactctatcacagcttttaggagagctgaatgctactggttttcagacagatcctgaaaataaagtaaaggcgttctagtgccaagat

SEQ ID NO: 72846 - DNA, 889 bp, Zea Mays
atgaatcatttactaaaagctcccttttgtatacatccaaagacaggtaaaactcaagatgtgttaaattcctgtattagtttgtaatgtgataataaggtggcaggctcttatgctcaggagcgggtggcatgtccttttgaacatctagattcaataacagatgcagtcccttaaaatccttgacattgttgatttagtttattctaacagctgcaggaataatgtttgtcacacaatgttccctattgctcacaactgactcttcttccaggccgtgtttgtgttccgattgaccccagtaactgtgatgattttgatcctgcggctgttccgactctatcacagcttttaggagagctgaatgctactggttttcagacagatcctgaaaataattgggaaagaacgtcccttgggaaatccatcagttttttcagaacttccttcctgcacccattgctgaaagcatgcaaggaggaactggaaagtgcatatagcgcgaagcttcagcagtccaagaattccttggactggtaaaatctacgcatgtttctgcctctgttttatcatcagcccccgttcggccctccctgagcatccaacgggtaacatggacctggtgctaggtggaatatctatgacgctgccaacccgtgttgcatgcctgggatgcatgcaaccatgtcagtttgaagttgcgtcttaggattcatgttaacatggaacaagtccgagtacatgctttgtggtatttttacctttggattagtttattaggttgaagggttataatgacggtcaaacactcgaaaatggatgcatggagatctgcctcggtcatttcatgcaagttcgttgctcagcagataactggggctgcttggtt

SEQ ID NO: 72847 - DNA, 769 bp, Zea Mays
agatttgcagatgcactgcagaagcagagcacaaaagaaatccatccgtctcattgcttccgcttgttcaccaaacaaaaccgaagccacactccaccgctctcctccccaatcagctatgctcgcccaccgcttcctcctcctcgtcgtcgtcgccgcggctgcggcgagcggcatcgcctccgctaagccgacggcgtacgaagccctcgccgactacgacttccccccggggatccttcccaagggcgtggtcgcctacacggtcgacaacgccacgggcgccttcacggccacgctcgatgcctccgcgtccggcgcgggatcctccatctgcgagttctccatcgagggctcctactcgctacgctaccagaccaagatcaccggcaagatctcccccgaccacctcaccgacctccagggtgtctccgtcaaggtcctcttcttttggctcaacatcgtcgaggtcacccgccatggcgataatctcgagttctccgtcggcatcgcctccgcggacttcgggattgacaacttcctcgagtgcccaacctgtggctgcgggttcgactgcaacgacctgctcatgctccagaaggcgggggcagccaccgccaggctgcgcctgcgaggtgccttctagaattccactcatgcaaatccaggatgggatatggcttggtcgtgtgaacttgacggacagggacagtgcatgcgtcagtcgtgctgcaggccctgcagcatcctgtgcttgagcatctcaaag

SEQ ID NO: 72848 - DNA, 2967 bp, Zea Mays
ggtgtcgatcagcagggccggacgatgatggacgtggagtaccacgaggctacgggatggagtgcagcgacttcatgagagcatgtgggatgaagctggccacagcagggtatggcgtgtttggtatcgattatgagggccacggcaagtccatgggtgccaggtgctacatccacaagtttgagagcctcgtggccgactgcgacatgttcttcaagtccatctgtgacatggagggatacaggaacaagagccggtttctatacggcgagtccatgggcggagccgtggctctactgctgcacaggaaggatccgaccttctgggacggtgcagttcttgtggcgccaatgtgcaagatatcggagaaagtgaagccgcacccggtggtggtcaccctgctaactcaggtggaggagatcatccccaagtggaagatcgtccccaccaaggacgtcatcgactccgcattcaaggaccccgtcaagcgcgagaagatcaggaagaacacgctcatctaccaggacaagccccggctgaagacggcgctggagcttctcaggaccagcatggatgtggaagacagtctgtcagaggtgaggatgccgttcctcgtcctgcacggcgaggccgacgcggtgaccgaccccgaggtcagccgcgccctctacgagcgcgcggccagcgccgacaagaccatgaagctctacccggggatgtggcacggcctcaccgccggcgagcctgacgacaacgtggagctggtgttctccgacatcgtctcgtggctcgacaagcgcagtcgccactgggaacccgacgagcgggtgagaagggctccgccggagcctgagaacaagcgccgcgtcaccagcagcagcagtcaacggcccggcagcttcctctgcggactaggctgccgctgccggcaacaccagcaacagtgtagtaggatgtagatatggaaaacgcttgctttttcctcctcctttaagttgttgacaaagaactgagaaaagtcatggtctcaacaaagatcttgttccatcctaagaactgtgtttctttgttctagtatagtttctgggagcaggataggcattctccgcgtgtcaacaaagaaagaactagacccaccaaagcagggcacacttgcaaaagcaaacaaaaaaaagtgagctataccatatatatgatgctatgctctcaacaaagaattagatcatccaggtttatccccaacggttcaactggaattttttttgtatagctaatggctgagcgaactgagagagaaaaaatacaggagaaagaatagcattacagcatcaaccaaggtatttcagcgacacattcccgacgaactacatggccatagcttttgtcagtaaggagaggagggtcgaccaagcagctagaagcaggccaccaaaaatttccaagtcccgtgctcctcttccgtcctagccttgctggtttccggtggtggcagccgcggtgtcttggtcgccgaagatgcgcttgcggaagtcggtgaccatgaggggaaggccctcgcggagggggatcttcggctcccacccaaggagctccttggcacggccgatgtcgggcttgcgcttgtgtgggtcgtcctgggtgttctgacggaactcgatccgtgcgttggggtcgatggtgtcctggacaaccttggcaagctccagcatggtgaactcgccggggttgcccaggttaaatggtcctacatgctcgccttccatcagcttcatcagaccctcgacctgggagaagacccacaaatcagtacaatgaatgcaaagaataatagattcccttgtaatgaatagttcgagcatcccacttgctggctaggccactaagccaccggaaaaaaaaaatcaaatctggtactctggcagtgatgttgaatcgagtgtctcttatttttttttcaatatatgttgagtagaggtagacttgccagatcagaaacatattggaaactcctggtttgctttccatcaccataaaccgtcaagggctccttcctcagtgcctgcaaccataaccgcacgtagtaagtttttagttgtcatcttttgggttctgtaactaagataaacagcagtgtacatattatttacctgagcaacgaagttactgacaacacggccatcgtcaatgcacatgcgagggccatatgtgttgaagatacgtgcgatcctaacctggaaacaacaagaaatcaccaagatgaatctacttcatcgcagacgaaatgaaattccaaccgaccaaaccgacatttttggattgcgacttacctcaaggttggcaccacggtggtaatccatggtcaacgtttcggctgtacgcttgccctcatcgtaacagctcctgacacctgtcattcagaaatcgtacccatcagtaaaactctgcagagagcaggcaagagcttgcctactctgtaaagaagccgtcgagtatccaacggccaacaaatgctatgtaaatagctcaacaaacttcattcattgttttaggtgcaatggttggtgggcgtttggttaggcatagttggtcaagtatagttgtgttctcctattgctttattgaaaaggatttgcacctcaaagtggccctcttggagcaaattccaccaaccaacattgtccttttccaccaaaaagaaccaaaacatgcaagagacccaccaagttaagattccatagccagcatctccaagatacccttttgcatattgcttatacaagacttctttcatgcaacagtaagcttcaagtctggaccagcactgttttctgaaaagggctcattcctgcttactacagctcggattaaaaaaaaataataaagatttgacaacgtagagccttcctgtttgcaacagtacattgtccagcttgcaattccctcctccctctctttttcttggttttg

SEQ ID NO: 72849 - DNA, 3227 bp, Zea Mays
ggtgtcgatcagcagggccggacgatgatggacgtggagtaccacgaggagtacgtgaggaacgcgaggggcgtgcagctcttcacctgcgtctggctgccggcgccgtcctccgcgcccaccaaagcgctcgtcttcctctgccatggctacgggatggagtgcagcgacttcatgagagcccggccagggggggttgcttttgcttgaccactaacggaaggtacttttcataaagaggtctgctgcaagtggcaatgcaaagccacccaacagcgaattccctggtgttctttgtatcatttggcgcataaatttaaataacatgtgggatgaagctggccacagcagggtatggcgtgtttggtatcgattatgagggccacggcaagtccatgggtgccaggtgctacatccacaagtttgagagcctcgtggccgactgcgacatgttcttcaagtccatctgtgtttgaactcttctgcagacatggagggatacaggaacaagagccggtttctatacggcgagtccatgggcggagccgtggctctactgctgcacaggaaggatccgaccttctgggacggtgcagttcttgtggcgccaatgtgcaagatatcggagaaagtgaagccgcacccggtggtggtcaccctgctaactcaggtggaggagatcatccccaagtggaagatcgtccccaccaaggacgtcatcgactccgcattcaaggaccccgtcaagcgcgagaagatcaggaagaacacgctcatctaccaggacaagccccggctgaagacggcgctggagcttctcaggaccagcatggatgtggaagacagtctgtcagaggtgaggatgccgttcctcgtcctgcacggcgaggccgacgcggtgaccgaccccgaggtcagccgcgccctctacgagcgcgcggccagcgccgacaagaccatgaagctctacccggggatgtggcacggcctcaccgccggcgagcctgacgacaacgtggagctggtgttctccgacatcgtctcgtggctcgacaagcgcagtcgccactgggaacccgacgagcgggtgagaagggctccgccggagcctgagaacaagcgccgcgtcaccagcagcagcagtcaacggcccggcagcttcctctgcggactaggctgccgctgccggcaacaccagcaacagtgtagtaggatgtagatatggaaaacgcttgctttttcctcctcctttaagttgttgacaaagaactgagaaaagtcatggtctcaacaaagatcttgttccatcctaagaactgtgtttctttgttctagtatagtttctgggagcaggataggcattctccgcgtgtcaacaaagaaagaactagacccaccaaagcagggcacacttgcaaaagcaaacaaaaaaaagtgagctataccatatatatgatgctatgctctcaacaaagaattagatcatccaggtttatccccaacggttcaactggaattttttttgtatagctaatggctgagcgaactgagagagaaaaaatacaggagaaagaatagcattacagcatcaaccaaggtatttcagcgacacattcccgacgaactacatggccatagcttttgtcagtaaggagaggagggtcgaccaagcagctagaagcaggccaccaaaaatttccaagtcccgtgctcctcttccgtcctagccttgctggtttccggtggtggcagccgcggtgtcttggtcgccgaagatgcgcttgcggaagtcggtgaccatgaggggaaggccctcgcggagggggatcttcggctcccacccaaggagctccttggcacggccgatgtcgggcttgcgcttgtgtgggtcgtcctgggtgttctgacggaactcgatccgtgcgttggggtcgatggtgtcctggacaaccttggcaagctccagcatggtgaactcgccggggttgcccaggttaaatggtcctacatgctcgccttccatcagcttcatcagaccctcgacctgggagaagacccacaaatcagtacaatgaatgcaaagaataatagattcccttgtaatgaatagttcgagcatcccacttgctggctaggccactaagccaccggaaaaaaaaaatcaaatctggtactctggcagtgatgttgaatcgagtgtctcttatttttttttcaatatatgttgagtagaggtagacttgccagatcagaaacatattggaaactcctggtttgctttccatcaccataaaccgtcaagggctccttcctcagtgcctgcaaccataaccgcacgtagtaagtttttagttgtcatcttttgggttctgtaactaagataaacagcagtgtacatattatttacctgagcaacgaagttactgacaacacggccatcgtcaatgcacatgcgagggccatatgtgttgaagatacgtgcgatcctaacctggaaacaacaagaaatcaccaagatgaatctacttcatcgcagacgaaatgaaattccaaccgaccaaaccgacatttttggattgcgacttacctcaaggttggcaccacggtggtaatccatggtcaacgtttcggctgtacgcttgccctcatcgtaacagctcctgacacctgtcattcagaaatcgtacccatcagtaaaactctgcagagagcaggcaagagcttgcctactctgtaaagaagccgtcgagtatccaacggccaacaaatgctatgtaaatagctcaacaaacttcattcattgttttaggtgcaatggttggtgggcgtttggttaggcatagttggtcaagtatagttgtgttctcctattgctttattgaaaaggatttgcacctcaaagtggccctcttggagcaaattccaccaaccaacattgtccttttccaccaaaaagaaccaaaacatgcaagagacccaccaagttaagattccatagccagcatctccaagatacccttttgcatattgcttatacaagacttctttcatgcaacagtaagcttcaagtctggaccagcactgttttctgaaaagggctcattcctgcttactacagctcggattaaaaaaaaataataaagatttgacaacgtagagccttcctgtttgcaacagtacattgtccagcttgcaattccctcctccctctctttttcttggttttg

SEQ ID NO: 72850 - DNA, 3082 bp, Zea Mays
ggtgtcgatcagcagggccggacgatgatggacgtggagtaccacgaggagtacgtgaggaacgcgaggggcgtgcagctcttcacctgcgtctggctgccggcgccgtcctccgcgcccaccaaagcgctcgtcttcctctgccatggctacgggatggagtgcagcgacttcatgagagcatgtgggatgaagctggccacagcagggtatggcgtgtttggtatcgattatgagggccacggcaagtccatgggtgccaggtgctacatccacaagtttgagagcctcgtggccgactgcgacatgttcttcaagtccatctgtgtagtttgaactcttctgcagacatggagggatacaggaacaagagccggtttctatacggcgagtccatgggcggagccgtggctctactgctgcacaggaaggatccgaccttctgggacggtgcagttcttgtggcgccaatgtgcaagatatcggagaaagtgaagccgcacccggtggtggtcaccctgctaactcaggtggaggagatcatccccaagtggaagatcgtccccaccaaggacgtcatcgactccgcattcaaggaccccgtcaagcgcgagaaggaagaacacgctcatctaccaggacaagccccggctgaagacggcgctggagcttctcaggaccagcatggatgtggaagacagtctgtcagaggtgaggatgccgttcctcgtcctgcacggcgaggccgacgcggtgaccgaccccgaggtcagccgcgccctctacgagcgcgcggccagcgccgacaagaccatgaagctctacccggggatgtggcacggcctcaccgccggcgagcctgacgacaacgtggagctggtgttctccgacatcgtctcgtggctcgacaagcgcagtcgccactgggaacccgacgagcgggtgagaagggctccgccggagcctgagaacaagcgccgcgtcaccagcagcagcagtcaacggcccggcagcttcctctgcggactaggctgccgctgccggcaacaccagcaacagtgtagtaggatgtagatatggaaaacgcttgctttttcctcctcctttaagttgttgacaaagaactgagaaaagtcatggtctcaacaaagatcttgttccatcctaagaactgtgtttctttgttctagtatagtttctgggagcaggataggcattctccgcgtgtcaacaaagaaagaactagacccaccaaagcagggcacacttgcaaaagcaaacaaaaaaaagtgagctataccatatatatgatgctatgctctcaacaaagaattagatcatccaggtttatccccaacggttcaactggaattttttttgtatagctaatggctgagcgaactgagagagaaaaaatacaggagaaagaatagcattacagcatcaaccaaggtatttcagcgacacattcccgacgaactacatggccatagcttttgtcagtaaggagaggagggtcgaccaagcagctagaagcaggccaccaaaaatttccaagtcccgtgctcctcttccgtcctagccttgctggtttccggtggtggcagccgcggtgtcttggtcgccgaagatgcgcttgcggaagtcggtgaccatgaggggaaggccctcgcggagggggatcttcggctcccacccaaggagctccttggcacggccgatgtcgggcttgcgcttgtgtgggtcgtcctgggtgttctgacggaactcgatccgtgcgttggggtcgatggtgtcctggacaaccttggcaagctccagcatggtgaactcgccggggttgcccaggttaaatggtcctacatgctcgccttccatcagcttcatcagaccctcgacctgggagaagacccacaaatcagtacaatgaatgcaaagaataatagattcccttgtaatgaatagttcgagcatcccacttgctggctaggccactaagccaccggaaaaaaaaaatcaaatctggtactctggcagtgatgttgaatcgagtgtctcttatttttttttcaatatatgttgagtagaggtagacttgccagatcagaaacatattggaaactcctggtttgctttccatcaccataaaccgtcaagggctccttcctcagtgcctgcaaccataaccgcacgtagtaagtttttagttgtcatcttttgggttctgtaactaagataaacagcagtgtacatattatttacctgagcaacgaagttactgacaacacggccatcgtcaatgcacatgcgagggccatatgtgttgaagatacgtgcgatcctaacctggaaacaacaagaaatcaccaagatgaatctacttcatcgcagacgaaatgaaattccaaccgaccaaaccgacatttttggattgcgacttacctcaaggttggcaccacggtggtaatccatggtcaacgtttcggctgtacgcttgccctcatcgtaacagctcctgacacctgtcattcagaaatcgtacccatcagtaaaactctgcagagagcaggcaagagcttgcctactctgtaaagaagccgtcgagtatccaacggccaacaaatgctatgtaaatagctcaacaaacttcattcattgttttaggtgcaatggttggtgggcgtttggttaggcatagttggtcaagtatagttgtgttctcctattgctttattgaaaaggatttgcacctcaaagtggccctcttggagcaaattccaccaaccaacattgtccttttccaccaaaaagaaccaaaacatgcaagagacccaccaagttaagattccatagccagcatctccaagatacccttttgcatattgcttatacaagacttctttcatgcaacagtaagcttcaagtctggaccagcactgttttctgaaaagggctcattcctgcttactacagctcggattaaaaaaaaataataaagatttgacaacgtagagccttcctgtttgcaacagtacattgtccagcttgcaattccctcctccctctctttttcttggttttg

SEQ ID NO: 72851 - DNA, 3062 bp, Zea Mays
ggtgtcgatcagcagggccggacgatgatggacgtggagtaccacgaggagtacgtgaggaacgcgaggggcgtgcagctcttcacctgcgtctggctgccggcgccgtcctccgcgcccaccaaagcgctcgtcttcctctgccatggctacgggatggagtgcagcgacttcatgagagcatgtgggatgaagctggccacagcagggtatggcgtgtttggtatcgattatgagggccacggcaagtccatgggtgccaggtgctacatccacaagtttgagagcctcgtggccgactgcgacatgttcttcaagtccatctgtgacatggagggatacaggaacaagagccggtttctatacggcgagtccatgggcggagccgtggctctactgctgcacaggaaggatccgaccttctgggacggtgcagttcttgtggcgccaatgtgcaagatatcggagaaagtgaagccgcacccggtggtggtcaccctgctaactcaggtggaggagatcatccccaagtggaagatcgtccccaccaaggacgtcatcgactccgcattcaaggaccccgtcaagcgcgagaaggaagaacacgctcatctaccaggacaagccccggctgaagacggcgctggagcttctcaggaccagcatggatgtggaagacagtctgtcagaggtgaggatgccgttcctcgtcctgcacggcgaggccgacgcggtgaccgaccccgaggtcagccgcgccctctacgagcgcgcggccagcgccgacaagaccatgaagctctacccggggatgtggcacggcctcaccgccggcgagcctgacgacaacgtggagctggtgttctccgacatcgtctcgtggctcgacaagcgcagtcgccactgggaacccgacgagcgggtgagaagggctccgccggagcctgagaacaagcgccgcgtcaccagcagcagcagtcaacggcccggcagcttcctctgcggactaggctgccgctgccggcaacaccagcaacagtgtagtaggatgtagatatggaaaacgcttgctttttcctcctcctttaagttgttgacaaagaactgagaaaagtcatggtctcaacaaagatcttgttccatcctaagaactgtgtttctttgttctagtatagtttctgggagcaggataggcattctccgcgtgtcaacaaagaaagaactagacccaccaaagcagggcacacttgcaaaagcaaacaaaaaaaagtgagctataccatatatatgatgctatgctctcaacaaagaattagatcatccaggtttatccccaacggttcaactggaattttttttgtatagctaatggctgagcgaactgagagagaaaaaatacaggagaaagaatagcattacagcatcaaccaaggtatttcagcgacacattcccgacgaactacatggccatagcttttgtcagtaaggagaggagggtcgaccaagcagctagaagcaggccaccaaaaatttccaagtcccgtgctcctcttccgtcctagccttgctggtttccggtggtggcagccgcggtgtcttggtcgccgaagatgcgcttgcggaagtcggtgaccatgaggggaaggccctcgcggagggggatcttcggctcccacccaaggagctccttggcacggccgatgtcgggcttgcgcttgtgtgggtcgtcctgggtgttctgacggaactcgatccgtgcgttggggtcgatggtgtcctggacaaccttggcaagctccagcatggtgaactcgccggggttgcccaggttaaatggtcctacatgctcgccttccatcagcttcatcagaccctcgacctgggagaagacccacaaatcagtacaatgaatgcaaagaataatagattcccttgtaatgaatagttcgagcatcccacttgctggctaggccactaagccaccggaaaaaaaaaatcaaatctggtactctggcagtgatgttgaatcgagtgtctcttatttttttttcaatatatgttgagtagaggtagacttgccagatcagaaacatattggaaactcctggtttgctttccatcaccataaaccgtcaagggctccttcctcagtgcctgcaaccataaccgcacgtagtaagtttttagttgtcatcttttgggttctgtaactaagataaacagcagtgtacatattatttacctgagcaacgaagttactgacaacacggccatcgtcaatgcacatgcgagggccatatgtgttgaagatacgtgcgatcctaacctggaaacaacaagaaatcaccaagatgaatctacttcatcgcagacgaaatgaaattccaaccgaccaaaccgacatttttggattgcgacttacctcaaggttggcaccacggtggtaatccatggtcaacgtttcggctgtacgcttgccctcatcgtaacagctcctgacacctgtcattcagaaatcgtacccatcagtaaaactctgcagagagcaggcaagagcttgcctactctgtaaagaagccgtcgagtatccaacggccaacaaatgctatgtaaatagctcaacaaacttcattcattgttttaggtgcaatggttggtgggcgtttggttaggcatagttggtcaagtatagttgtgttctcctattgctttattgaaaaggatttgcacctcaaagtggccctcttggagcaaattccaccaaccaacattgtccttttccaccaaaaagaaccaaaacatgcaagagacccaccaagttaagattccatagccagcatctccaagatacccttttgcatattgcttatacaagacttctttcatgcaacagtaagcttcaagtctggaccagcactgttttctgaaaagggctcattcctgcttactacagctcggattaaaaaaaaataataaagatttgacaacgtagagccttcctgtttgcaacagtacattgtccagcttgcaattccctcctccctctctttttcttggttttg

SEQ ID NO: 72852 - DNA, 5943 bp, Zea Mays
gcttgacaacgagcacagatttaagcatgtaatcagtgaataaaacagatgttaaattttaaacatcttcgtctgtcgcgatttcattatcgcatctgtttcgtctgtcacgagttcgacatcgtttttatctatccgggctcttccgaaattttcgtgatgttcggaacattgtcattccgaaaatcggtgcgttcggtggttatttaaaattcatcgctcgcgcaaatacgaatttggagcctcgatcgactcttgagatttttgtccccgacaaatgaatttgaactcgacgactaaaatatcgaatctaatctcgtccggtttgaacccgtctacagctcgctcccgtgacgatgctggcatcgtctccgggaactccgattgtgatgccgcattcggctctaacggtttaaaatttattcctttctaaagtatcgagtctagtgccagtttaaaaattaatcggtcaagacgagctaagattttcgtctaagtatttcgctcgatttaagtcatctctataaattcggtacatgcgctatttggggtaggcttttcaaataaatcgaaatcggaaccattgctggccaattatgtttcctgtttcaaaatccaagaaaaatctttctcacagtgttctctctccttatctcctcacgtacactacgcagatttttctagtcttcgttctcatccacgcacgggaggaaaatcttctctgcgcttctatccaccaccgctcaatcgtttgattttttttttcgcgcaagcttcttacctcctgcgcgcagattgcttcttcctgctgcacggcatgccggagaaagatatgtctctcagattttttcttctctaccgattgctttgctcctggcgtgattttttttctctgcgattgatctcatccctgcacggctctagtggaaaaatcccgccgcccctgggcgcttcaaaaatccagccgacgctcgcccctatcttcttcctcagcccagccgtcttcctgggcaaccgcgtctccttcttcctccccctgcgtccctgttcggttcctgcgcacgctgactccctgcgtcgcgagcttcagctcggattccccctcccatggctgccgagcagctcgccggaattccacgctcggtgcctggatctccctcctccctgcagctcgctctctctccctagctcgctcgctcctggccttcccctgccggcgcgcctgttccctggccgaagccacctggtcccaggtccggtcggccggctcagtttttcccagtgccgcgcgtcgtgcttccccttccagccgaccgaagctccagctccagccaggcgcgtccggctccctaggcgcttgaccatctgctcgcctgctttcctgccagtgctgcccagtgcctctctgctagccgcgcgcccctgtcttatttccctgcgcaccgtcgtgtcctcagctagccggctgcgacccctgctcggattttcccctatggccggaacctttttcctggccgcagctcagatctccggggccgcgagctcccctaagctcgccatggcgatttccacggctggcagctgaccttcctgtgtcgcgtcctgactttacccaatgcccggtcgagctctctgaccgccgcgccgtgaattttcctgcgcgcgtgtctccttgctcacgcgtcgccgtcgagttctctggtgtttgcgtgccatgaagttcctctagcgccgtggcttcccaattccatctagtcacgcgcgcgagttttcttcgcctcagccttagctcgtcggtcacgctcgtcagatgtgcgatcgaggacttcagctgaaggccgtcgtcagacaactaccaaatcgagttgtgatatggtgcgataattaatcacgtgatgcggaagatgactcaagtcgaccccaagcacgggctactccgcatggagatgctgatgaatgaacctgcctgatcaagtgttaggacaaggatgatcgtcaagtgatcgacgtctaacaaacactaacctagtgtttcttccaggcaagccccggtgcatttgccccttccttgtgttttaaatgctttttcaccttatctgatgcattaggtgataggagttgtgtgataaacaattgatgcattaccattccttggaaactccttaatcccggttttataaaaagaactgataatgcttagccctgcttagaaactgaaaaatcatttgttttcaaaaagaatgattgtggcacattggttatgggcctttcgtttcaaaaatcaaagcaaacttatggtgatgattccacttcggccggagtgggttcatcatttggaaaagagtacccctgccgggtaccaaaaatgggaaaatggttcgaatacatctagaccagacgttgagcggacatggtcgcccgtctgtgtcgattaaggaccgttcgatgtaggcctgatgaggtgagactttgcaactaaccacatgctccgataagcctgaacctggctattccatacgtgaaaagacaaccgcgcactgggcgtgggagatggtgggagtagcgtgtaccctcctggctagaggctggatggaggagtactgtgctcccgggtagcgcggaccggttcacgttgtggaggatctatgggaacggttgacatatgcaagggttaagtgctacatatgtcgtgtggttagggatccccagctgggtataatcggttcgaatcgtcgttgctcctcggttatggagactcgactcactgaccactcatcgtagttgacaagtgaaacatgattgtagttggttaaaagaaagctagataaggacaagtgaatgctctagattaggcaaatctagattcaggaaaagtactaaacttgtgaagtaaaattttggcataaggatttactattagtaagctcttctgcaaaacagagtctttgattcttgataagccataccttgactccctctagccagcatacccttgagagtcttttctttagtcgggtaagtcttgctgagtaattacgtactcagggttttattccctgttgtttttcaggtcatagttttgtgctgctgatggtggtgttaagtgccggtgggctcggccttcttataagtttaagtaacccttctatacttcttaatgaggatggtcccttgagctagcatatatatttcaaacttatacttttgcaatcactccgataaaataatgtaaaatttttgtaacttgtaaaatttggtaacaagatttccgctgcaaaaatattggtgtgtgtgatttgtgttacttaatcccacagttctggttgtaagtggtttatccggtgtccttggggcaatcggacggatcctgttaagttatctggtgcacatgcatagcagtctgaggtctttgagacaaggacaggtgcatgtggacccaataacttgggaggttctgccacagctggtatcggagcaggattaagtataatacggtcacatacgtattttaaaaacaaagttttggttttagaaaacctattttcaactaaacccattgtttggctttgaaaaactataatgctagcgacatcctctgttaagccctaaattaaggactattaggtggcttagtttaaaaccactaacccacaaccgggggtattgcatacatgtgtattgttatttttaaggccattcaattttgaatggatcgacgctcaaggtaaggtgagatgtgagagcatgaccgaacaaacgtcggtctagggaagtgcttaattgaagcgcttgaatatatacatgttctacatatgtatatatgaaggctgcgatgtggagtaattacttttccgggaatttagtaccccatggatgtgtatgggtatacagacatgggactactgagaagtgtaatgtacttgcaacgacgcacctacgctcaggtaagaaggtaagttaccataatgagttgccctatggttaaagtgtggcaacggcgcctatgcgtggctcggcgcttaatgatgagctggcctccatatagcaatatatggagtataaactgtgataaactgtcatgtgtgaattgcatcatgggcaaatgggttgtgatgaattttctgcaggtacactaacctcgaaaacgtaatgttggtgtgtgtgatttgtgttacttaatcccacggttctggttgtaagtggtttatccggtgtccttggggcaatcggacggatcctgttaagttatctggtgcacatgcatagcagtgtgaggtctttgagacaaggacaggtgcatgtggacccaataacttgggaggttctgccacaccctcagcatttaatgtgtcctgtccactctactggcaggcggcgcctaggccatcctgcagacggcgtgcctgtccagtctattgtcaaacagtatgcacgtgctacgaggtgcactgtgtccatcatcacttatacgttaccagggaagcttccccagcacgccgatactacgcagatctcggatgtcagggcgcaagaagatttctccagcaacaaacattagttgctccaagtattacatccgttatgttcctaggcccacatgtcggggcttggtacccatgtacgcgcccccttagctataaaaggggaggcatgcaacgttacaacacaggctaaaagacagactcagactgaggctcactcaggcacacttaaacgctcacaagttcatacaagcttaatacatcacacaatggagtagggtgttacgctccggcggcccgaaccactctaaatccttgtgtgttcttgtgttctccccatattccaactaacaagcaaaacgcttaggcccctcctcatcttaggatttagggcgggtgcattccgtcacccggccggagaatttcctctccgacagataagtttgaaaagaagaaaggggcagatgcgaagcgtattgctgatttagaatatgctctttctatgcaagtgggattgcacagatccgaggtgcaaggactggagaagaagcttgatgaaatcactaaaaagtttaatgtcgaacaagcaaaacgcgagatatctgatactaaacggttaagagttcagaaaaacgttgaggagcttcgtcaagcaaaagaggagtgctacaatgtcgccatggattgttgcaacaagctgaaaaacaattttgctaaagttggtgcattctgtactgagcagaaatttatctgtggtgatccttatggtggggttatcaggtggatcggtggcgaggctgaagcttttgatgaaatccttagtgacagaggagattttttttgccttcaacggcgctcgaggggctgtctcgcttcttgaaaaagctggttgcgagcatgcaaaggttgtaatttaagcataattcaccgtctcagcgaacgacatcaaggatccttcaaccgaagttattgctcttagcggaaaattttattctgaagtttggttgaaaggtggtcgagaaataatagatgaggctattaggaagaatgaggaagaatctcatactgctttagaagaagtaaggaaagctgaagaagccgcgccaatatttctcctcctccggagccgtacgaccctgaggctgatccagccttgaagggtgctcttgatgtaatcaaaatagttaatgaagctgttgatgaagctgtgaataggctcctgaacaaagctgctaatgaagtcttaaaagaagatgattagaccttgtttattaaaacattcgaagaacttttttatgttgttttcttatgtaagaaacaattgtcaactatatgtatatctgatgatgtaatctatttcttgttggagcgtgaaatctttgtacataccatttttgagcgagaggcggaaaacaccttcccttcttttcgcacttcctaaagaaaaaaatccctttttctg

SEQ ID NO: 72853 - DNA, 383 bp, Zea Mays
tctgcccccctcctcgcgcgctcggccagccatggcgcggcgccccctgctccttcctcgcgcagcagcagccgagcgtcccctccctgggccgacctcggccaagtccctgtccatggcgcgcatggagcagccctagggccagcgcccctgcgtgcgttcctccctaacgcccagaaatttcagcagggagctccttacactcatgctccagtgcctcgccgtggaatccccctctcctccctgctctggcatcaacacggccagggacacaaccagcggcagccttgctgttcacgtgtggcaccaaggaagaagaagacccctttgggtctatgacgtgtgggcccaaggcagggaccgagagatgatgatcgagcaac

SEQ ID NO: 72854 - DNA, 2082 bp, Zea Mays
ctaagccatcataaaagcctacttttcccatgcctctttcgtaaactcgaacgcagctgtgccattgcgagcacgattgcgtccaaactcggaatggcaaccccctagccgtccgatcgaccgccagccccgagtccgatcgaccgcggtctgcgccatcttgtcctcttcctcccttcctggacggctggagctggacctgctttattgattattgggtgcccacgcatcgggccgtgggaggcgggctctgtttcagcctcgtcagccgtgggcgatggcggcggcggctgggaaggcgcgggcggtgagcctggccgcggcggtgcgtgtggtggcggcgacggcgcggccggcgtctagcgcagccgcggcggcgggagtgggtgcgatggcattgatcgtgcagggggaggacacggccttcgggtctctggagtggtgggcgtacgcgggcatctcctgctttctcgtgctcttcgcagggatcatgtccgggctcacacttggactcatgtcgctcggcctcgtcgagctggagatcctccaacgcagcggcaccgacgtcgaaaaggctcaggctgctgccatccttccggttgttcaaaggcaacaccagcttcttgtcaccctgttgttgtgtaatgctgttgccatggagatcctggactgtgctcttgggcacaatgagtctgcactttttaggcgagctcagttgaaagctctagtttcaatccatagcaaagaggctggcaagggtggagagcttacccatgatgagactacaatcataagtggagccttggacctgaccgaaaagactgctgcagaagctatgacaccaattgagtcaactttctcactggatgtggattccaagttggattgggaagcaattggaaaaattcttgcccgtggtcatagtcgtgttcctgtatactctggaaaccctagaaacatcattggtctcctattggtgaagagtctattgactgttcgtgctgaaacggagacgccagttagtgctgtttcaattagaaggattccaagggttccttcagacatgcctctgtatgatatactgaatgagtttcagaaaggaagtagtcatatggctgctgttgtgaaggctaaacccaaaactgaaccaccccttgacaaaactgaaccaaacagggaagcagttggaccaacacaattgactgttcccttgttatctaatgctgaagaaagtgcagacaatgtggttgtggatatcgaaagaccacataacaggcagattaatgggaacacagcatcaaacgcagtgcctaggtcatcagaggatattgaggatggtgaggtcgttggaatcatcacacttgaggatgtattcgaagaactcctacaggaggaaatcgtggacgagactgatgaatatgttgatgttcataaaaggatccgagtagctgctgctgctgccgcatcatcggttgcaagggctccatccgttaggagattaacgggccaaaaggctgcaaaccttcagggagcacagaatcgccaaggacagcaacctcctggaattctcaagaaacctactgagggtgattcaaacccatcaaaacaagtgaaccttatggaacctcttctggaaaaggggaggtaactctaatggaacctcttctggaaaagaggaactctaaaatgcattgcgcaacgtagggaaccatgctggaagagcctatggttcttgctatattgtagcaagaggtaaatagagatgaactcattgttgcaaattccaacatgagcgaccgagcgatgtggttttggtgtcattatggacattacattagtgttgaattctttggatccccctccctttttttttgtgttttgggcttcgaaagtagagtcgccatttttgaatgtcaccgctaaccgcagtagcaagttagcaactgctttatatatgtgcttcaaattcgtcgattcctaggcttcatagttatgcataagatttttaaaaaaaatatcggaacggacatgcttggtgtgaaccagtataattctgttattaggaaaaggcttggagatttg

SEQ ID NO: 72855 - DNA, 1469 bp, Zea Mays
gaacacatgacaccgtgttttgcggctgtaaacacaagacagaagcagatcctggactgtgctcttgggcacaatgagtctgcactttttaggcgagctcagttgaaagctctagtttcaatccatagcaaagaggctggcaagggtggagagcttacccatgatgagactacaatcataagtggagccttggacctgaccgaaaagactgctgcagaagctatgacaccaattgagtcaactttctcactggatgtggattccaagttggattgggaagcaattggaaaaattcttgcccgtggtcatagtcgtgttcctgtatactctggaaaccctagaaacatcattggtctcctattggtgaagagtctattgactgttcgtgctgaaacggagacgccagttagtgctgtttcaattagaaggattccaagggttccttcagacatgcctctgtatgatatactgaatgagtttcagaaaggaagtagtcatatggctgctgttgtgaaggctaaacccaaaactgaaccaccccttgacaaaactgaaccaaacagggaagcagttggaccaacacaattgactgttcccttgttatctaatgctgaagaaagtgcagacaatgtggttgtggatatcgaaagaccacataacaggcagattaatgggaacacagcatcaaacgcagtgcctaggtcatcagaggatattgaggatggtgaggtcgttggaatcatcacacttgaggatgtattcgaagaactcctacaggaggaaatcgtggacgagactgatgaatatgttgatgttcataaaaggatccgagtagctgctgctgctgccgcatcatcggttgcaagggctccatccgttaggagattaacgggccaaaaggctgcaaaccttcagggagcacagaatcgccaaggacagcaacctcctggaattctcaagaaacctactgagggtgattcaaacccatcaaaacaagtgaaccttatggaacctcttctggaaaaggggaggtaactctaatggaacctcttctggaaaagaggaactctaaaatgcattgcgcaacgtagggaaccatgctggaagagcctatggttcttgctatattgtagcaagaggtaaatagagatgaactcattgttgcaaattccaacatgagcgaccgagcgatgtggttttggtgtcattatggacattacattagtgttgaattctttggatccccctccctttttttttgtgttttgggcttcgaaagtagagtcgccatttttgaatgtcaccgctaaccgcagtagcaagttagcaactgctttatatatgtgcttcaaattcgtcgattcctaggcttcatagttatgcataagatttttaaaaaaaatatcggaacggacatgcttggtgtgaaccagtataattctgttattaggaaaaggcttggagatttg

SEQ ID NO: 72856 - DNA, 1592 bp, Zea Mays
gtgttttgcggctgtaaacacaagacagaagcagatcctggactgtgctcttgggcacaatgagtctgcactttttaggcgagctcagttgaaagctctagtttcaatccatagcaaagaggctggcaagggtggagagcttacccatgatgagactacaatcataagtggagccttggacctgaccgaaaagactgctgcagaagctatgacaccaattgagtcaactttctcactggatgtggattccaagttggattggaccattacaagtagcagccccaattagtttcctgaagtgcattgatgggtacggagcttatgaagagcagagttccctgccacactccaaaggtagcattcatttgcaacaacctgcagtgccgcaggaacacaagggaagcaattggaaaaattcttgcccgtggtcatagtcgtgttcctgtatactctggaaaccctagaaacatcattggtctcctattggtgaagagtctattgactgttcgtgctgaaacggagacgccagttagtgctgtttcaattagaaggattccaagggttccttcagacatgcctctgtatgatatactgaatgagtttcagaaaggaagtagtcatatggctgctgttgtgaaggctaaacccaaaactgaaccaccccttgacaaaactgaaccaaacagggaagcagttggaccaacacaattgactgttcccttgttatctaatgctgaagaaagtgcagacaatgtggttgtggatatcgaaagaccacataacaggcagattaatgggaacacagcatcaaacgcagtgcctaggtcatcagaggatattgaggatggtgaggtcgttggaatcatcacacttgaggatgtattcgaagaactcctacaggaggaaatcgtggacgagactgatgaatatgttgatgttcataaaaggatccgagtagctgctgctgctgccgcatcatcggttgcaagggctccatccgttaggagattaacgggccaaaaggctgcaaaccttcagggagcacagaatcgccaaggacagcaacctcctggaattctcaagaaacctactgagggtgattcaaacccatcaaaacaagtgaaccttatggaacctcttctggaaaaggggaggtaactctaatggaacctcttctggaaaagaggaactctaaaatgcattgcgcaacgtagggaaccatgctggaagagcctatggttcttgctatattgtagcaagaggtaaatagagatgaactcattgttgcaaattccaacatgagcgaccgagcgatgtggttttggtgtcattatggacattacattagtgttgaattctttggatccccctccctttttttttgtgttttgggcttcgaaagtagagtcgccatttttgaatgtcaccgctaaccgcagtagcaagttagcaactgctttatatatgtgcttcaaattcgtcgattcctaggcttcatagttatgcataagatttttaaaaaaaatatcggaacggacatgcttggtgtgaaccagtataattctgttattaggaaaaggcttggagatttg

SEQ ID NO: 72857 - DNA, 3046 bp, Zea Mays
ctccctacaggctacagccaaacctcaaaccccagcggtcggtccaattcaaaaatcgaatcctgcgctccttccccaagctattcccaaactgccccacgtctcatcctcgcgagtcgcgacctcgcaagcctctccgacccccagctcaacgagatcgggcgagcgatcccctcttccccgaccaccagatcgcagcaatggagccggatccggtcgccgctggggcatcctcctcgccgccgccttcaccagcgccggccacgtccccgccgtggcaaacgcgagatgacgatgagccgggagcggtggattgcgcggatcccggaggagacctgaatcccgcgccgccgccgtcgcttcagcaggttgagaacgccgcggtgggcagcgaggtggagcaggaggaaccaaagaaggaggcgatggcaggagtaggggagactctccgcagcttcatggaggagtttggggatcaaggagaggactccattatcttgtcaccgcggctgaaggatattagtactcctgaccgccccgctgccctcggtttcctaggggagaagtataacaacctcatggagaggtacaagaagtacaagaagcaggtggtcaagtgttccgaggagtgtgaaccaagatataatggcctgaagaagaagtacacagacgagtgtgcagagaggcggcgtctgtacaatgagcttattgagctaagaggtaacattagggtgttctgcagatgcagacctctgagctccgatgaggtcaaccgtgggtgtttatctgttgttgagattgacccatcacaggagagtgagctgcagtttgtgcccagtgaaaaagaaaggaagccctttaagttcgatcatgtttttgggccagaggatgaccaagaggccgtcttttcagaaacagtgcatgttgttaggtcagtgatggatggttttaacgtatgcatctttgcatatgggcaaacaggaactgggaaaactttcacaatggaaggggttccagaaaataggggtgtaaattatcgggctttggaagaattgttcagaacgtcagagaaaagaagtgcatctgttgcatacacattttccgtaagcatcttggaagtttacaatgaaaagatcagagatcttcttgatgagagcaatgatcaatcaaaaaggttggatattaagcaaaatgctgatggaacacaagaagttcatggtttggttgaggctccagtttataacatagatgatgtgtgggagaaactgaagtttggtgctcaaaatagatctgttggctcaaccaattctaatgaactcagcagccgctcccacagtttggttagggtcactgttaggagcgagcatttggtgacttatcagaggagcagaagccacatgtggctggttgaccttgctggaagtgagagaatagctaaaactggggtagaaggagatcggctgaaagagtcacagttcatcaacaaatcactatctgccttgggtgatgttatatctgcccttgcctcaaaaaattcccatattccataccggaattccaagttgactcatttgctccaaagctctttaggcggcgattgcaagactctaatgttcgtgcagataagtccaagctctatggattcaggagaaactctcagttcactcaattttgccagtagagtccggactgtagaacatggccctgctcgtaagcaagtggatccagctgaaagtttgaagttcaagcagatgactgaaaaacttcggcacgaggaaaaggaaaatgcacagctgaaccaaagcttgcagctgatgcagctcaagtacgcttctcgtgagaatgtcttcaggacactaaacgaaaaggtgaaggatgctgaacaagcatgcagaaattatcagcaacggattagagagctggaaagtgaattaggcaatgagaaaagggtttctagggattctgctagatcctcaaggccgccacttgttcctacgagacagaagcagcctcacggaaggaacgcgccaccttcaggcccttctagatggaggctcaaagcccccacaatccacaacaaagagaacattccggtgatgatgaacaaatcaaatcctggggatgaccctaataaggctgttggcagagcaaggcgcgtttcacttactccggtgattcgacaaatccccatccagcccaagaggcggtcttcgatagcaatactaccatctgtgagagagcatctttctgtgctaaacgaaaagagagcagcgtctcgactgtcgcaagtcaacatgccaagaagatcagtcgcgacctttggtttgaatttgggtccaggaacaccccttgcaggacatggtggacctgttgacgccaccccagacggagcaaagttcaggagatttgatctaggaagcagcagcagcaagttcacgagccctcctccgaatgtcaccccgcagcggaagatgggaatggcaccggcgggaggtcctccaaacgcagccaagctgtgcttcagcatccagaaaagagttacgcctgcacatgttcgggcaaaacctggtatgggcatctttgacccagctcttcgtgagaatatggttgtggggagaaccggcaacgcgctgcgggtgctcaacggcaagaggagacagtccgttgtctaactctggtactgcaaacgtttggacgttcgaacggagctgcagtgtggtgagaatgatggtgcctttcagcttgttcttagtgaaaccgtgttaggacagaagatattcttctcagcatccgtaaatggattttgattggctcttactagttgataagaaagctatgttaacattgcccatggaagtcgttgattatatttgttcgtcacaaagaaagctatgttatggaagtcgtcgattgtatttttcgttactaagaaccgcttgctagtgcacttctaaaccatgttcacggaacacacccagattctgccgccgacataataataatgtttgttagtgatcgatcacaggttatggcaatcacattcccg

SEQ ID NO: 72858 - DNA, 2873 bp, Zea Mays
cccacgtctcatcctcgcgagtcgcgacctcgcaagcctctccgacccccagctcaacgagatcgggcgagcgatcccctcttccccgaccaccagatcgcagcaatggagccggatccggtcgccgctggggcatcctcctcgccgccgccttcaccagcgccggccacgtccccgccgtggcaaacgcgagatgacgatgagccgggagcggtggattgcgcggatcccggaggagacctgaatcccgcgccgccgccgtcgcttcagcagggtacagttgagaacgccgcggtgggcagcgaggtggagcaggaggaaccaaagaaggaggcgatggcaggagtaggggagactctccgcagcttcatggaggagtttggggatcaaggagaggactccattatcttgtcaccgcggctgaaggatattagtactcctgaccgccccgctgccctcggtttcctaggggagaagtataacaacctcatggagaggtacaagaagtacaagaagcaggtggtcaagtgttccgaggagtgtgaaccaagatataatggcctgaagaagaagtacacagacgagtgtgcagagaggcggcgtctgtacaatgagcttattgagctaagaggtaacattagggtgttctgcagatgcagacctctgagctccgatgaggtcaaccgtgggtgtttatctgttgttgagattgacccatcacaggagagtgagctgcagtttgtgcccagtgaaaaagaaaggaagccctttaagttcgatcatgtttttgggccagaggatgaccaaggaactgggaaaactttcacaatggaaggggttccagaaaataggggtgtaaattatcgggctttggaagaattgttcagaacgtcagagaaaagaagtgcatctgttgcatacacattttccgtaagcatcttggaagtttacaatgaaaagatcagagatcttcttgatgagagcaatgatcaatcaaaaaggttggatattaagcaaaatgctgatggaacacaagaagttcatggtttggttgaggctccagtttataacatagatgatgtgtgggagaaactgaagtttggtgctcaaaatagatctgttggctcaaccaattctaatgaactcagcagccgctcccacagtttggttagggtcactgttaggagcgagcatttggtgacttatcagaggagcagaagccacatgtggctggttgaccttgctggaagtgagagaatagctaaaactggggtagaaggagatcggctgaaagagtcacagttcatcaacaaatcactatctgccttgggtgatgttatatctgcccttgcctcaaaaaattcccatattccataccggaattccaagttgactcatttgctccaaagctctttaggcggcgattgcaagactctaatgttcgtgcagataagtccaagctctatggattcaggagaaactctcagttcactcaattttgccagtagagtccggactgtagaacatggccctgctcgtaagcaagtggatccagctgaaagtttgaagttcaagcagatgactgaaaaacttcggcacgaggaaaaggaaaatgcacagctgaaccaaagcttgcagctgatgcagctcaagtacgcttctcgtgagaatgtcttcaggacactaaacgaaaaggtgaaggatgctgaacaagcatgcagaaattatcagcaacggattagagagctggaaagtgaattaggcaatgagaaaagggtttctagggattctgctagatcctcaaggccgccacttgttcctacgagacagaagcagcctcacggaaggaacgcgccaccttcaggcccttctagatggaggctcaaagcccccacaatccacaacaaagagaacattccggtgatgatgaacaaatcaaatcctggggatgaccctaataaggctgttggcagagcaaggcgcgtttcacttactccggtgattcgacaaatccccatccagcccaagaggcggtcttcgatagcaatactaccatctgtgagagagcatctttctgtgctaaacgaaaagagagcagcgtctcgactgtcgcaagtcaacatgccaagaagatcagtcgcgacctttggtttgaatttgggtccaggaacaccccttgcaggacatggtggacctgttgacgccaccccagacggagcaaagttcaggagatttgatctaggaagcagcagcagcaagttcacgagccctcctccgaatgtcaccccgcagcggaagatgggaatggcaccggcgggaggtcctccaaacgcagccaagctgtgcttcagcatccagaaaagagttacgcctgcacatgttcgggcaaaacctggtatgggcatctttgacccagctcttcgtgagaatatggttgtggggagaaccggcaacgcgctgcgggtgctcaacggcaagaggagacagtccgttgtctaactctggtactgcaaacgtttggacgttcgaacggagctgcagtgtggtgagaatgatggtgcctttcagcttgttcttagtgaaaccgtgttaggacagaagatattcttctcagcatccgtaaatggattttgattggctcttactagttgataagaaagctatgttaacattgcccatggaagtcgttgattatatttgttcgtcacaaagaaagctatgttatggaagtcgtcgattgtatttttcgttactaagaaccgcttgctagtgcacttctaaaccatgttcacggaacacacccagattctgccgccgacataataataatgtttgttagtgatcgatcacaggttatggcaatcacattcccg

SEQ ID NO: 72859 - DNA, 1302 bp, Zea Mays
cgggcacccgccgaggcatttataagtacgagcgcccgggtgagccagagccccacacaccgtcttcctctgttttgccagggccaacgccattactagaagtctagaagagaggtggggaggcagagacgagaggcgtagggaattcgggggagagagagagaggcagggcggtgacgagcttggactggcgatcgcgggagcgatgacgacggcggccggcatgccggggtcgccggtgggctcggccgcggcggctggcggtcccgcggcgcccgaggtggcggccatggacgcggtgatcgggtggttccgcggcgagttcgcggccgcgaacgcgatgatcgacgcgctgtgcggacacctggcgcagatcggcggcggcggcggggccgagtacgaccccgtcttcgccgcgctccaccgccgacgcgccaactggttccccgtcctccacatgcagaagttctaccccgtcacggacgtcaacgccgagctgcgccgcgtcgcggccgcccgcgccgccgcggggccctgctgctactcggaggaggaggtcgcgtccacggtgatccacgatcccatggaagacctcccctctgaggcggagcccgaacccaggccggagcaccagcaggatcctatacaccaggatccggctccggaggccgaggaggctgacggcaccgtcatcaaccccgccttggagtgtcacgaggaggcggacgcgggggctgactcctcgggagattcgtcggagcggaaggccccctctacggaagacgacaccgtcccagacggacatcatactgatcaaggatctcaaggggaacacatcctaccagagagctatcccatctgctctgaccacgaggagtgcattgcccgtcctgagaggatcaagatccagaaaggtttcgtggccaaggaatccgtgaaggggcacatggcgagttccaacttcacaccactcggcaatctttctgtacaggactaggagatgctgttaatgtcgtgaaaggcttgaagatatatgaagatgtttttacaacatcggagatcatgaaggttgcagatttcatcaatgaaattcgtcaggctggcagaaatggagaactttcaggtcgtgccaagccatggtaacgtccgtccaaagtcgtgcacaacaaaatgttgatcctagtaagacctcaactgacctcttaagttcctgactatgctgacccccctccttaagaattgacatagaagatagaacccacaaactgggcactcttccattgcgttctggctgaaatcatc

SEQ ID NO: 72860 - DNA, 1246 bp, Zea Mays
cgggcacccgccgaggcatttataagtacgagcgcccgggtgagccagagccccacacaccgtcttcctctgttttgccagggccaacgccattactagaagtctagaagagaggtggggaggcagagacgagaggcgtagggaattcgggggagagagagagaggcagggcggtgacgagcttggactggcgatcgcgggagcgatgacgacggcggccggcatgccggggtcgccggtgggctcggccgcggcggctggcggtcccgcggcgcccgaggtggcggccatggacgcggtgatcgggtggttccgcggcgagttcgcggccgcgaacgcgatgatcgacgcgctgtgcggacacctggcgcagatcggcggcggcggcggggccgagtacgaccccgtcttcgccgcgctccaccgccgacgcgccaactggttccccgtcctccacatgcagaagttctaccccgtcacggacgtcaacgccgagctgcgccgcgtcgcggccgcccgcgccgccgcggggccctgctgctactcggaggaggaggtcgcgtccacggtgatccacgatcccatggaagacctcccctctgaggcggagcccgaacccaggccggagcaccagcaggatcctatacaccaggatccggctccggaggccgaggaggctgacggcaccgtcatcaaccccgccttggagtgtcacgaggaggcggacgcgggggctgactcctcgggagattcgtcggagcggaaggccccctctacggaagacgacaccgtcccagacggacatcatactgatcaaggatctcaaggggaacacatcctaccagagagctatcccatctgctctgaccacgaggagtgcattgcccgtcctgagaggatcaagatccagaaaggtttcgtggccaaggaatccgtgaaggggcacatggttaatgtcgtgaaaggcttgaagatatatgaagatgtttttacaacatcggagatcatgaaggttgcagatttcatcaatgaaattcgtcaggctggcagaaatggagaactttcaggtcgtgccaagccatggtaacgtccgtccaaagtcgtgcacaacaaaatgttgatcctagtaagacctcaactgacctcttaagttcctgactatgctgacccccctccttaagaattgacatagaagatagaacccacaaactgggcactcttccattgcgttctggctgaaatcatc

SEQ ID NO: 72861 - DNA, 1822 bp, Zea Mays
cgggcacccgccgaggcatttataagtacgagcgcccgggtgagccagagccccacacaccgtcttcctctgttttgccagggccaacgccattactagaagtctagaagagaggtggggaggcagagacgagaggcgtagggaattcgggggagagagagagaggcagggcggtgacgagcttggactggcgatcgcgggagcgatgacgacggcggccggcatgccggggtcgccggtgggctcggccgcggcggctggcggtcccgcggcgcccgaggtggcggccatggacgcggtgatcgggtggttccgcggcgagttcgcggccgcgaacgcgatgatcgacgcgctgtgcggacacctggcgcagatcggcggcggcggcggggccgagtacgaccccgtcttcgccgcgctccaccgccgacgcgccaactggttccccgtcctccacatgcagaagttctaccccgtcacggacgtcaacgccgagctgcgccgcgtcgcggccgcccgcgccgccgcggggccctgctgctactcggaggaggaggtcgcgtccacggtgatccacgatcccatggaagacctcccctctgaggcggagcccgaacccaggccggagcaccagcaggatcctatacaccaggatccggctccggaggccgaggaggctgacggcaccgtcatcaaccccgccttggagtgtcacgaggaggcggacgcgggggctgactcctcgggagattcgtcggagcggaaggccccctctacggaagacgacaccgtcccagacggacatcatactgatcaaggatctcaaggggaacacatcctaccagagagctatcccatctgctctgaccacgaggagtgcattgcccgtcctgagaggatcaagatccagaaaggtttcgtggccaaggaatccgtgaaggggcacatggttaatgtcgtgaaaggcttgaagatatatgaagatgtttttacaacatcggagatcatgaaggttgcagatttcatcaatgaaattcgtcaggctggcagaaatggagaactttcaggtgagactttcatattcttcaacaagcagatgaaaggaaacaagagggagatcatacagcttggtgtcccgttatttcaacctaccacagaggaagctaattgtcacacagaaccaatcccccttgtcctgcaggctgtcattgaccaccttgttctttggcaagcccccggtcagcggcgccatcatcggttatgccccgaccccgcagaccgtgctggcgcccgcggcctggggcatggccatgcgagcgcccgtcatgatggtggccgcagcgcctgcgaggcccatggtgatggcctcgttgggcaccggaggcggcaacatcagcaagtggatgagccgcagcggcaccggtgtgttcctgccgtggacggtcgggccgaagcggtacaacaagcaccttccgccgcgcatccagaagcgccggttctctgcgatgatgtcgcccatcgaggcgcagggctgaggacctgcccgacttcacgtcgccgtcgaacctgtgttttttttttttccttgagggctttcggtccgcctgtaatttagccgggtttgtgacttgtgacaatgtgagtgagtagcggtttagcggagttcagaaccggtagaggagtacgagcgtagggataggtgaaggcagaatcagggcagggttttccttttgttttcatcctgtccccctattttccgttccgagtaaaacttatggatgttgttgtcatacatgcatcagcagctgagtttggattcccc

SEQ ID NO: 72862 - DNA, 2156 bp, Zea Mays
cgggcacccgccgaggcatttataagtacgagcgcccgggtgagccagagccccacacaccgtcttcctctgttttgccagggccaacgccattactagaagtctagaagagaggtggggaggcagagacgagaggcgtagggaattcgggggagagagagagaggcagggcggtgacgagcttggactggcgatcgcgggagcgatgacgacggcggccggcatgccggggtcgccggtgggctcggccgcggcggctggcggtcccgcggcgcccgaggtggcggccatggacgcggtgatcgggtggttccgcggcgagttcgcggccgcgaacgcgatgatcgacgcgctgtgcggacacctggcgcagatcggcggcggcggcggggccgagtacgaccccgtcttcgccgcgctccaccgccgacgcgccaactggttccccgtcctccacatgcagaagttctaccccgtcacggacgtcaacgccgagctgcgccgcgtcgcggccgcccgcgccgccgcggggccctgctgctactcggaggaggaggtcgcgtccacggtgatccacgatcccatggaagacctcccctctgaggcggagcccgaacccaggccggagcaccagcaggatcctatacaccaggatccggctccggaggccgaggaggctgacggcaccgtcatcaaccccgccttggagtgtcacgaggaggcggacgcgggggctgactcctcgggagattcgtcggagcggaaggccccctctacggaagacgacaccgtcccagacggacatcatactgatcaaggatctcaaggggaacacatcctaccagagagctatcccatctgctctgaccacgaggagtgcattgcccgtcctgagaggatcaagatccagaaaggtttcgtggccaaggaatccgtgaaggggcacatggttaatgtcgtgaaaggcttgaagatatatgaagatgtttttacaacatcggagatcatgaaggttgcagatttcatcaatgaaattcgtcaggctggcagaaatggagaactttcaggtgagactttcatattcttcaacaagcagatgaaaggaaacaagagggagatcatacagcttggtgtcccgttatttcaacctaccacagaggaagctaattgtcacacagaaccaatcccccttgtcctgcaggctgtcattgaccaccttgttctttggcgtttaataccagaaagcaggaaaccaaacagtgtcatcatcaacttcttcgatgagggtcacttgtcactgacagcaacggcaactacaagggacctctcacactctcactaaagcaagggtccctattggtgatgcgtgggaacagtgccgacatggcgcgccacgtggtgtgcacgtcgtccaaccggcgcgtgagcatcacgtttgcaagggtgaggccatcgacgccggtggatctgagcccactcccgtcccccaccaaggccttgacgccctggcagccgcagccagccacggcctcccaggtgccggcgcccgcgtgcatgacgcagaagcccccggtcagcggcgccatcatcggttatgccccgaccccgcagaccgtgctggcgcccgcggcctggggcatggccatgcgagcgcccgtcatgatggtggccgcagcgcctgcgaggcccatggtgatggcctcgttgggcaccggaggcggcaacatcagcaagtggatgagccgcagcggcaccggtgtgttcctgccgtggacggtcgggccgaagcggtacaacaagcaccttccgccgcgcatccagaagcgccggttctctgcgatgatgtcgcccatcgaggcgcagggctgaggacctgcccgacttcacgtcgccgtcgaacctgtgttttttttttttccttgagggctttcggtccgcctgtaatttagccgggtttgtgacttgtgacaatgtgagtgagtagcggtttagcggagttcagaaccggtagaggagtacgagcgtagggataggtgaaggcagaatcagggcagggttttccttttgttttcatcctgtccccctattttccgttccgagtaaaacttatggatgttgttgtcatacatgcatcagcagctgagtttggattcccc

SEQ ID NO: 72863 - DNA, 1477 bp, Zea Mays
tcgagacttcagccgctagcgcggccgtcagggatcatactgatcaaggatctcaaggggaacacatcctaccagagagctatcccatctgctctgaccacgaggagtgcattgcccgtcctgagaggatcaagatccagaaaggtttcgtggccaaggaatccgtgaaggggcacatggttaatgtcgtgaaaggcttgaagatatatgaagatgtttttacaacatcggagatcatgaaggttgcagatttcatcaatgaaattcgtcaggctggcagaaatggagaactttcaggtgagactttcatattcttcaacaagcagatgaaaggaaacaagagggagatcatacagcttggtgtcccgttatttcaacctaccacagaggaagctaattgtcacacagaaccaatcccccttgtcctgcaggctgtcattgaccaccttgttctttggcgtttaataccagaaagcaggaaaccaaacagtgtcatcatcaacttcttcgatgaggatgaacattcgcagccctacttcaagcctccccatctggacaaccccatttgcactcttctgctgtctgaaactacgatggcatttggcaggtcacttgtcactgacagcaacggcaactacaagggacctctcacactctcactaaagcaagggtccctattggtgatgcgtgggaacagtgccgacatggcgcgccacgtggtgtgcacgtcgtccaaccggcgcgtgagcatcacgtttgcaagggtgaggccatcgacgccggtggatctgagcccactcccgtcccccaccaaggccttgacgccctggcagccgcagccagccacggcctcccaggtgccggcgcccgcgtgcatgacgcagaagcccccggtcagcggcgccatcatcggttatgccccgaccccgcagaccgtgctggcgcccgcggcctggggcatggccatgcgagcgcccgtcatgatggtggccgcagcgcctgcgaggcccatggtgatggcctcgttgggcaccggaggcggcaacatcagcaagtggatgagccgcagcggcaccggtgtgttcctgccgtggacggtcgggccgaagcggtacaacaagcaccttccgccgcgcatccagaagcgccggttctctgcgatgatgtcgcccatcgaggcgcagggctgaggacctgcccgacttcacgtcgccgtcgaacctgtgttttttttttttccttgagggctttcggtccgcctgtaatttagccgggtttgtgacttgtgacaatgtgagtgagtagcggtttagcggagttcagaaccggtagaggagtacgagcgtagggataggtgaaggcagaatcagggcagggttttccttttgttttcatcctgtccccctattttccgttccgagtaaaacttatggatgttgttgtcatacatgcatcagcagctgagtttggattcccc

SEQ ID NO: 72864 - DNA, 1290 bp, Zea Mays
cttatccgaaaaatcagcccgaaacccgtactcgctctcgccacggctccaaccgcactcggccctcgtctccgccactcggcgcggcgctatggcccctgccgcgcttctcccgctcgcccctttgccgcatcacccgaacccaccacggcgacccctatgccgctgcggggcctcacgccgcggcttcactgtccacaccgtcatcgccattgcctcggtctcggactccgcctccgaccccaccgcggccgcggaggcgacgtccccatctccgcccccctcgctgccaacgcaaacgccttcctctaaaccaggacccccggctttgggcggcatcgcgaacacgaggtcttggtcgcagtactacggcagcggcttctccatccgcgtgcctccgtccttcgacgacatcctcgagcccgatgactacaacgccgggatgacatactacggtgacaaggccaagccccgggcgtacgcggcccgctttgcatctccagatagggatgagctcatcagtgtggtgattaagccgtcaaatcagctcaaaatcacattcctagaggcaaaagatataactgatttgggaactctaaaagaggcatccaagatatttgtaccggctggtgcaaaaatattctcggctcgaacaattaaagttaaggaagaggaggatattaggacatattacttctatgaattcagtctggacaagcaacacgtagctctgatggctaccgtgaatagtgggaagacgtacattgccggcgctaccgctccagagatgaaatggggtgatgatggcgtgaagttacgttcggctgccgtatctctatcggtttcatgatttattgtgcagaagataacaactaaaaaaatgtgatacaactctcagattcagcggtacgcatagagggttctattactgttctagtcattgaaagaaggtaaatagttgggttagtcggcaaaagcaacaaaagcactggatgagactgcaaggtttcagtcaagtctgtaaacaattttggaagtggatatgtattgttatgaagactggcatcatgattgaaatttgataattgagttcttgtctgcctataactgatatgttcattctaaactgtgctgattgtataaacttggtcaaagttaaaacaatttgactttggacaaaaccaggacaagtgtattattataacatttcagctgtaccataggtcgtcccgtaccctgtcatgtagaggaatgttattgatgcaaagggaaaagagtaatgttgagaga

SEQ ID NO: 72865 - DNA, 1126 bp, Zea Mays
gaaaaatcagcccgaaacccgtactcgctctcgccacggctccaaccgcactcggccctcgtctccgccactcggcgcggcgctatggcccctgccgcgcttctcccgctcgcccctttgccgcatcacccgaacccaccacggcgacccctatgccgctgcggggcctcacgccgcggcttcactgtccacaccgtcatcgccattgcctcggtctcggactccgcctccgaccccaccgcggccgcggaggcgacgtccccatctccgcccccctcgctgccaacgcaaacgccttcctctaaaccaggacccccggctttgggcggcatcgcgaacacgaggtcttggtcgcagtactacggcagcggcttctccatccgcgtgcctccgtccttcgacgacatcctcgagcccgatgactacaacgccgggatgacatactacggtgacaaggccaagccccgggcgtacgcggcccgctttgcatctccagatagggatgagctcatcagtgtggtgattaagccgtcaaatcagctcaaaatcacattcctagaggcaaaagatataactgatttgggaactctaaaagaggcatccaagatatttgtaccgggtgatttctgttatcttagaattggatgctctggtgcaaaaatattctcggctcgaacaattaaagttaaggaagaggaggatattaggacatattacttctatgaattcagtctggacaagcaacacgtagctctgatggctaccgtgaatagtgggaagacgtacattgccggcgctaccgctccagagatgaaatggggtgatgatggcgtgaagttacgttcggctgccgtatctctatcggtttcatgatttattgtgcagaagataacaactaaaaaaatgtgatacaactctcagattcagcggtacgcatagagggttctattactgttctagtcattgaaagaaggtaaatagttgggttagtcggcaaaagcaacaaaagcactggatgagactgcaaggtttcagtcaagtctgtaaacaattttggaagtggatatgtattgttatgaagactggcatcatgattgaaatttgataattgagttcttgtctgcct

SEQ ID NO: 72866 - DNA, 1104 bp, Zea Mays
gaaaaatcagcccgaaacccgtactcgctctcgccacggctccaaccgcactcggccctcgtctccgccactcggcgcggcgctatggcccctgccgcgcttctcccgctcgcccctttgccgcatcacccgaacccaccacggcgacccctatgccgctgcggggcctcacgccgcggcttcactgtccacaccgtcatcgccattgcctcggtctcggactccgcctccgaccccaccgcggccgcggaggcgacgtccccatctccgcccccctcgctgccaacgcaaacgccttcctctaaaccaggacccccggctttgggcggcatcgcgaacacgaggtcttggtcgcagtactacggcagcggcttctccatccgcgtgcctccgtccttcgacgacatcctcgagcccgatgactacaacgccgggatgacatactacggtgacaaggccaagccccgggcgtacgcggcccgctttgcatctccagataggtaggtagggatgagctcatcagtgtggtgattaagccgtcaaatcagctcaaaatcacattcctagaggcaaaagatataactgatttgggaactctaaaagaggcatccaagatatttgtaccggctggtgcaaaaatattctcggctcgaacaattaaagttaaggaagaggaggatattaggacatattacttctatgaattcagtctggacaagcaacacgtagctctgatggctaccgtgaatagtgggaagacgtacattgccggcgctaccgctccagagatgaaatggggtgatgatggcgtgaagttacgttcggctgccgtatctctatcggtttcatgatttattgtgcagaagataacaactaaaaaaatgtgatacaactctcagattcagcggtacgcatagagggttctattactgttctagtcattgaaagaaggtaaatagttgggttagtcggcaaaagcaacaaaagcactggatgagactgcaaggtttcagtcaagtctgtaaacaattttggaagtggatatgtattgttatgaagactggcatcatgattgaaatttgataattgagttcttgtctgcct

SEQ ID NO: 72867 - DNA, 900 bp, Zea Mays
cggcgctatggcccctgccgcgcttctcccgctcgcccctttgccgcatcacccgaacccaccacggcgacccctatgccgctgcggggcctcacgccgcggcttcactgtccacaccgtcatcgccattgcctcggtctcggactccgcctccgaccccaccgcggccgcggaggcgacgtccccatctccgcccccctcgctgccaacgcaaacgccttcctctaaaccaggacccccggctttgggcggcatcgcgaacacgaggtcttggtcgcagtactacggcagcggcttctccatccgcgtgcctccgtccttcgacgacatcctcgagcccgatgactacaacgccgggatgacatactacggtgacaaggccaagccccgggcgtacgcggcccgctttgcatctccagatagctggtgcaaaaatattctcggctcgaacaattaaagttaaggaagaggaggatattaggacatattacttctatgaattcagtctggacaagcaacacgtagctctgatggctaccgtgaatagtgggaagacgtacattgccggcgctaccgctccagagatgaaatggggtgatgatggcgtgaagttacgttcggctgccgtatctctatcggtttcatgatttattgtgcagaagataacaactaaaaaaatgtgatacaactctcagattcagcggtacgcatagagggttctattactgttctagtcattgaaagaaggtaaatagttgggttagtcggcaaaagcaacaaaagcactggatgagactgcaaggtttcagtcaagtctgtaaacaattttggaagtggatatgtattgttatgaagactggcatcatgattgaaatttgataattgagttcttgtctgcct

SEQ ID NO: 72868 - DNA, 1137 bp, Zea Mays
gtgtagtgataccgtagtcacatctcatatatttggttttagttctattgagtctataacctttgtattctagagtcttccgccatgactctagtttgctattttactcttgctctactttcatcaactaacactacatcgttcgcaaaaagcatttaccaagagatatccccttgtgatcttatccatcaccaaggcaaagaggtaatgactcaaagatgacctttgatgtagtcttattctaattaggaagtcatttctcatttgtgtctctgttacttgttcgaacactagtcacaacatcgttgtactgtcattaatgagtcgaaggtattttgttgaaacactatgtttgttcgaagcccaccacacaatgttccttgatattttatcataagccttcttcaagtcaatgaaaaccatgtataggtccttgtgctcccacttgtcttattaagaaaaacagcttttatgggtgaccttccatgcatgaaaccaaattgtttcatagagatcctcattattacttttagttgatgcttgacaattctctctcatagcttcatagtatggctcgttaatttaattccttagtaattagtacaactttgaatatctccctttttttagattggtatcaatatgctctccactcgtcagctggtgcaaaaatattctcggctcgaacaattaaagttaaggaagaggaggatattaggacatattacttctatgaattcagtctggacaagcaacacgtagctctgatggctaccgtgaatagtgggaagacgtacattgccggcgctaccgctccagagatgaaatggggtgatgatggcgtgaagttacgttcggctgccgtatctctatcggtttcatgatttattgtgcagaagataacaactaaaaaaatgtgatacaactctcagattcagcggtacgcatagagggttctattactgttctagtcattgaaagaaggtaaatagttgggttagtcggcaaaagcaacaaaagcactggatgagactgcaaggtttcagtcaagtctgtaaacaattttggaagtggatatgtattgttatgaagactggcatcatgattgaaatttgataattgagttcttgtctgcct

SEQ ID NO: 72869 - DNA, 349 bp, Zea Mays
attcagaaacaatagacattgacatctcatctttagataaaagcacattaactaactcacctgcttggaacgtcatgttaggattagtttggaaacttaaatctcctctgggattcccagagattgagagaaaaatgagctatttttccacacaatccctaggaatcccgaatgagatttaagtttccaaactagcccttagtatgagattttgcaccagtttcaaatggaggatcatactctagctcatttccacaacattcttgttatcaccaaaacaaaattaaacaggtggatatccatgaatacctttttgttaccatcaaactaattggtcagaaaaggaagc

SEQ ID NO: 72870 - DNA, 404 bp, Zea Mays
ttttgaaaaaaatgcaaaaataacagaaaattcatacaatatccacaatacagaaacattaaatacacaattcacaaatagtccacaacataaaattggcgtccatacaaacataaagtccacaaatagtccatacaaacataaagtccactattagtccattacaacgcacaattcggcacaaagctaactccatcatatatcaggatcgttggagttgtgtccactacctccagaagcgaaaaactcgttgatgaagttgtgtaacatgtttgaattctaaagaaaaaagaagacattaataacggcatttgttacatgtatgaccactattcaaacaaattgtttctcaaactaacctctcctggagtagctccctcccctgcataagctcctcctggtgc

SEQ ID NO: 72871 - DNA, 1413 bp, Zea Mays
cacacgaaggtgaggcacagagaaatacaataaaacataataccacaaatttaataagtatcattagtgattacattatcggagtttcagaaataataaacataaattttaatgcagcggaaataactaacgaagaagaaccgagtaacatggcgaagcctggccacactactcctcctggtcctctcccgcggaagcaaaacccactcgaccatctatcccggtggcagggatgaaggctaagtcacaccagcaaccaatcatcctaaggagtacctgcaaaaaattgtgccacaagcaaggctgagtatactaatactcagctagacttacccggtgtgaggagtctactcctctacctctagacatgcagctgtttggctgtggggtttggttgccaaaagcactagccgagtctaaaaatcaagttttagcttttcaagttttagtatgatccttttaactagatgtgtacctagctagtcatacatggtatcaaacattttatcaatccacatcttttgccagtcacctcatttccacttattactcaatgcagtacaatggatcaagcagtctcattagctgcgagaagcagacgattcgaatcgagtttttatccttgcaaggtaaacctaaacacacgatatgtaggggcactccgtccccacacacatcaaccgtccccatcgattccctagcaacagatcagggctcaccgccttggcgtacaatgccccactgaccccgactggccgtcgtgcagtggccgcacttgtacccaccataaccggaatgggagacctcgtctcaggtcgcgtgaggggcaaagtctgcgggcaggttcactcaggtactaggcttaccgatttaccatatttctcggtatgtgtttagtacattcaaacgcttgacacaggtatccgcacgttaatccttattcctttttccatcttgtaaacaaccaatccccatggattgttgtccaccaactagtaatcctgacaatgtgaaagtgggtacaatcaattccctgatctcgcgcgagtgctagaaaaatcactcgtcttctaccgagaccctacttgagcaaagcaactactcgacctgtcatactagtattcatttcaaaggaatcctgagttcatgcaactagggtttcagccaactcctacacttaagtgcacagtacaagcctacaaacattaagtgcagtaaaatagcatatataacggttatgcataaaaccagggcttgcctttaatttaacacttggacagtgtttgctgggggggatactcgcttggcgagcatccactggttatgtccatccttccttgggtcgtccaccaactgcatcttgtggttggcaccacatcaatggctcgatcatcatctctcggtcctatatga

SEQ ID NO: 72872 - DNA, 436 bp, Zea Mays
tggctatctaacacagttattatgtctccatttcctcttcctcatgaccatatataatatatattattgttaaataaacgggcaaagagctgccacaaggaaggcgacgacctaatactatgccaacctgggcaaccagcgtcaagaagtatatacccagggccagacctgcccaacttgtctcacctgaaacatactacacaaatacctctggtttgtacaactacgaaggtgctcgccaaatagtagaagggcaccagacctgaataaatgcaagtccacaaccaggtctcttcagatgtagccatgttgtcgaggtgcatgcatgatgccggtgtagggcagggtacttcacgaaaacaacagggcagattatggcgccatagggtcgccagctgaaccagtgcgcatgtgtgtgtcggtcccgttagcttcc

SEQ ID NO: 72873 - DNA, 1099 bp, Zea Mays
tctcaaccactgaatggcaggagtttgcacctgaacgacaggagggtagggcgctggctggctacaggaagtataggacgacggtgtggggccgaaggaggatgaggagggcatagggggccgatgttgcagcagtgtctggtcggaggtcgtcgaggcgtcgtgcgtcgagtggcggcacctggtcggaggtcatcgaggtgtaggtgcgtcgatgcggcgcctggccggaggcggcgacggagagggcgaggctaagtcagaggtggccaggacaaggccagggcggcgcatggtcggagttaggctgcgtcactggatctagcgatgactggatggggtttgattgcagtttggataataggtgaggggactcattgtaaaagtgcagcagggatgggttatacacgttagatatagatccagttacgggcgtcgtggtttgcacagtttgcacgagacgtgcagtttgcacctgatctgcagctgcaggcctgcagcccccgagtccgaaatcgttggacggggaaaggaaagcgaaacaagccacgctaagcaagatgcaccgaaaccctcgcgccgtcatccgcgccgccgtctccctcacccgccggccccccgccgttcctgccgcggaggctctccaaaccctgcctaaagcgacgccctcgcctgcgcttggggcgtggcggccagaccaggcggtggggcctttgggtagcgtcagccgccgccgcgccttctcctcctccgcggcagagtatggcaaggatgtggacgaggtgaaccgcaagttcgcggaggcgcgggaggagatcgaggcggccatggagagcaaggagacggtctacttcaacgaggaggcctccatcgcgcgtgacgccgccaacgaggcgctcgctgctttcgacgcgcttttagcgcgcctcccgcccaccgacgccgacgcgctccgccgctccatggggctaaagatggaacaactgaaggccgagctcaagcagctcgaggactagccgactaggctgcggaaagaacctgaggtttttctcttcaaatcttaaggtgaaggaatgaagccatgtgaggtgatttaaag

SEQ ID NO: 72874 - DNA, 2383 bp, Zea Mays
atcacatcacgtcccgtctggtagggtaccgagaccaaaatccaccggaaagggaaaggaaagcacccaaaacacaggcggcgctcagcctccagctgtccgcctcccccacccggccacaccgttcgccacgcaccggaccaaccgaagctccaccaagctgcgcacgcaacgcaagcagaggaaatttccatagcctccttcctcgcatgagcttccgtccgggcacgtaagtttctcctgccccgcgccccgcgccccgcgcccctccgcgattcgacgccaccgaggttccccttgcttctgcggaatcgaggctaggttcttggttttgctgcgcgggagcattactagattctaggccgggaatgtagctcctgctgaatatttggaccgcgtgtttgctattttagtgtggggtagtgggccgatcggttcttggtctccagttatggtaaggcgttgacctgtgagcgcaacctgttcgttgatattactgaccggagcgccaatagagtcttgggtagtgaacctggagctgttgctactcttgtttccccatttcgtttcgaggaaagcgtggaaagagcttgctttggcttaggctcaggcccaggaccagaacttggtgtttatgcagtcgtagaatgtaacagcacagggcaaggaacctgagtggctctaatattttggatttggaatgacttcagtggttatcatatgtttcgtagatctgaaacaatgggctcaacttctgttatagagtaattgttagtatatatcgcaagcctggatggactcccttagatctagttcagttagagcagcgccagaaatatgcgttcaagttgataatcagtctaagattcctagtcaaacgagaatgcaagatgaacactcatactctcttagatctagttcagttagagtggctgttttcacatgtctgactatatagactgcatcgtttcctcatacataggataatgcatttggaacctactgacatttcatatggtgatggtgaatccattatatactatccatcatgaggaagatggccctttcaaatctgaagggtaaggcaaaatctaaatgccccaaatccattacagccaaagatcaccaaacctacagcaaacacttaacctgacaaaaaattattaaaccacaaatatagcatggcctccatccagaagtttacatgaaagatatcgataatttgtgcttacatgatcatgccaatgttaaacactgacaacagggtaaaagcgccttcaattttttctgtactgcatgtttattaattgagaaatccagtaagacatcatggtttgcatacactgagttgcctaagatatcaatttgttgaaatgtacttttctcctgcaaatttttcttttgagttttgacagattaggttcttttagattttcatgctaacatctcatgtatgatctgtgcaggtgccacatgagatgacatgttcttaacacctgttttcattaggcatttacaacagcagtgagatatctgcaaatgctgattagcttcaaggttattggttttatctttgccaaataactgtaatactgttgcagccaggggtttgcaccttggttttttatgaggggaggaagatcagatgaattttgtcgttgccaggcatgccttggtaagtacacactacttggagacgaagaaaatccacgattgtcaacatatgacagacggctcccctgctgtggctgtggaataggttggtcttgttttcttctaggtttcttgtgccctatcatttggtacgttgcagctcttctctattgctgcaagtactataatcgggatcctcgtgaacggactggactcgcagcttccgctgttctggcggttatcattacagctgtaactattgtaaccctgtctgttctgctgatatgttgtgtcaacaaacggttcttgaatagctgtgcagtttggcctaagtgatagcagcaagatatctattgcaaaacatcagcgttgaactactaactgaaatattctttagattctttagtcagtgcacttattgttggactgcaaaagggaaatcaacaaattatgtgtaacatgatccattatcacctgtgactgtacattacagattactggacctgtggaaattctgaagctatatgcagcaattccttctctcccctgaaacttttgaacaatgttgttactgataattggcctgatcagaacaatcagagttcagaacttgtatccaatctggctgaaattacatgagcagattaatctggaatggaaattgtgctgcattttttgttctttgactcttcggtactgatttcctttccgcctttattgcatatatcag

SEQ ID NO: 72875 - DNA, 1016 bp, Zea Mays
gggaaaggaaagcacccaaaacacaggcggcgctcagcctccagctgtccgcctcccccacccggccacaccgttcgccacgcaccggaccaaccgaagctccaccaagctgcgcacgcaacgcaagcagaggaaatttccatagcctccttcctcgcatgagcttccgtccgggcacgtgccacatgagatgacatgttcttaacacctgttttcattaggcatttacaacagcagtgagatatctgcaaatgctgattagcttcaaggaagatcagatgaattttgtcgttgccaggcatgccttggtaagtacacactacttggagacgaagaaaatccacgattgtcaacatatgacagacggctcccctgctgtggctgtggaataggttggtcttgttttcttctaggtttcttgtgccctatcatttggtacgttgcagctcttctctattgctgcaagtactataatcgggatcctcgtgaacggactggactcgcagcttccgctgttctggcggttatcattacagctgtaactattgtaaccctgtctgttctgctgatatgttgtgtcaacaaacggttcttgaatagctgtgcagtttggcctaagtgatagcagcaagatatctattgcaaaacatcagcgttgaactactaactgaaatattctttagattctttagtcagtgcacttattgttggactgcaaaagggaaatcaacaaattatgtgtaacatgatccattatcacctgtgactgtacattacagattactggacctgtggaaattctgaagctatatgcagcaattccttctctcccctgaaacttttgaacaatgttgttactgataattggcctgatcagaacaatcagagttcagaacttgtatccaatctggctgaaattacatgagcagattaatctggaatggaaattgtgctgcattttttgttctttgactcttcggtactgatttcctttccgcctttattgcatatatcag

SEQ ID NO: 72876 - DNA, 1084 bp, Zea Mays
ggaaaggaaagcacccaaaacacaggcggcgctcagcctccagctgtccgcctcccccacccggccacaccgttcgccacgcaccggaccaaccgaagctccaccaagctgcgcacgcaacgcaagcagaggaaatttccatagcctccttcctcgcatgagcttccgtccgggcacgtgccacatgagatgacatgttcttaacacctgttttcattaggcatttacaacagcagtgagatatctgcaaatgctgattagcttcaaggttattggttttatctttgccaaataactgtaatactgttgcagccaggggtttgcaccttggttttttatgaggggaggaagatcagatgaattttgtcgttgccaggcatgccttggtaagtacacactacttggagacgaagaaaatccacgattgtcaacatatgacagacggctcccctgctgtggctgtggaatagttttcttctaggtttcttgtgccctatcatttggtacgttgcagctcttctctattgctgcaagtactataatcgggatcctcgtgaacggactggactcgcagcttccgctgttctggcggttatcattacagctgtaactattgtaaccctgtctgttctgctgatatgttgtgtcaacaaacggttcttgaatagctgtgcagtttggcctaagtgatagcagcaagatatctattgcaaaacatcagcgttgaactactaactgaaatattctttagattctttagtcagtgcacttattgttggactgcaaaagggaaatcaacaaattatgtgtaacatgatccattatcacctgtgactgtacattacagattactggacctgtggaaattctgaagctatatgcagcaattccttctctcccctgaaacttttgaacaatgttgttactgataattggcctgatcagaacaatcagagttcagaacttgtatccaatctggctgaaattacatgagcagattaatctggaatggaaattgtgctgcattttttgttctttgactcttcggtactgatttcctttccgcctttattgcatatatcag

SEQ ID NO: 72877 - DNA, 2457 bp, Zea Mays
ccacaccccaccacattgcccggaggtccccccaatgtcggacggacgacgggttcacccacaccccctgctggcggatcccccccctcgcctgcctgcccgcgcgccaagaactccattcacctccccccacactgccaggagcttcgcccggcccccgggtgccggacggccaccaggttcacccgtgcctgctgccggcggattcccccctcccccggtggctaggagctccatctgtgttgtcgtcgtgtgctgctgggcgtctcccccaatggcgttacagcatgggcattagagaactctatgacggatggggagctactctggcgcgcgtcgttcaccccggcggtacctattctgacgcgtatggaaggttgccttcatgttcctcacgcaagggcaggtgccgctcagggggtgcctcactactacatctacgtccacgcgctatcggccaatttcaccttcgaatcaatcttctcccaacgccaaatacctaattgagtatactgcaatagagacaatgaaggcagatgggtttttgcagactcagactcaagtttgattgattgctatttgctaccaacaaaaaataggtctcgacaagaaagttttattgtacttcagatttgtatatatgatcaacatctctgtgtgcagtatgcttgagaatagctttaaggctgagtaacaaggtttgaagaaagttatttcattttttttctgaacatatattgtttgattcgtaatttagtttacatggtatgacatcatttatttttggtttaaactttagagtatatatgctaattgtatgctctagatcagtttaaaaaggatgcagatgtctagtcgtaataggccaatctacaaactttcatagcctgaagtttatgaacagtgaatacacatcggttctaacttctgtgtttgtaaagatgctaaaagtattctcgctctattaatgtcttcttaggtaaaatagatttgatttacatgtgccagtattttggaagcataatagacactgagcttcaaacgtttggtcaggttcatcatttttaatgcaccaacaccaatgagccccttctcagcacaatgaaattgtttacattatcttcagggccagtctacaaactttcacagcctgaagtttatgaacagttaatacacatcggttctaacttctgtgtttgtaaggatgctaaaagtactcagactctgttaatgtcttcttagataaaatagatttgatttataagtgccagtattttgggagcataatagacactaagcttcaaacgtttggtcaggttcatcatttttaatgcagcaacaccaatgagccccttctcagcacaatgacattgtttacatacaaagtacgtcaaaaggcaacgtctaagtaatatgttgatacacaaagcactgatccttagagacttcatccaacgagatagaaggttacatgtgcgttgttactatctcacgccaactcagacctctactggataacgttgcacaccatgcgactagacagacactaaatttgggtacctctacaaagcacttaatttattgtgcctctttcgaaaaaggttcttttctttcgtaattacctaaccactgctatactatactaacattttgaattcacatatacaaactcggcttcattactactgacggaacatccgaagcagaattttttgtgtcatggagatacaaattaaaagttagtttattgtaatttccaaaaaaacagcagagagcacttaacaaggcaagggagtatcaatttaaattatgctaccaaaattgtgttgaaaacttacttttacacaaatccttgaaattaacaaaaaaaattgtcttccttgttcactcactgagaacttgtggtgataacggtcccaggccagttgcgagcaacatatgggttgttctcgtgaaggaagttgaacacctcgtccaacagctgcaacagaaaagctcaaggtcaaatttcaaaaaaagaacgtgggcatgagcgtgcgcaatacactagtgttgggaccatgcttcgtcgccgaaggtcctgcaaaaagaaacagcttcggctgaagctgcttgaacatgatgccgaagacaccgttcacgaagcttcggagctacaacatatccgaagacgaagggtcgaaccgacttaaagatagaatgaccatttagcccataagggtctgagtcattgttgtaaacttttatgaggggcataattgtaattcctcatgagttgtgtcctgtgcctataaatagtgaacagtattcctttactgttcacggattcctgtaattgccaacgcatcactcgggaattattgtttgtcaaggcaaaggtataaatgtacctaaacattgtgttcagatattcaaaattcatttaacaagatatgtgaatgatgtcgtttattttca

SEQ ID NO: 72878 - DNA, 3528 bp, Zea Mays
attgcccggaggtccccccaatgtcggacggacgacgggttcacccacaccccctgctggcggatcccccccctcgcctgcctgcccgcgcgccaagaactccattcacctccccccacactgccaggagcttcgcccggcccccgggtgccggacggccaccaggttcacccgtgcctgctgccggcggattcccccctcccccggtggctaggagctccatctgtgttgtcgtcgtgtgctgctgggcgtctcccccaatggcgttacagcatgggcattagagaactctatgacggatggggagctactctggcgcgcgtcgttcaccccggcggtacctattctgacgcgtatggaaggttgccttcatgttcctcacgcaagggcaggtgccgctcagggggtgcctcactactacatctacgtccacgcgctatcggccaatttcaccttcgaatcaatcttctcccaacgccaaatacctagtaaggcaaggccacatctctatcatatatgaaagttggttctgtctatcatacactttcgttatgaaaatgtgtgtagctttcaaaaaagcccttcacgggcctgataaatcaaggattgattttatgagagaaataggtgccacaaatttctaccagaatttctacatattcatgaatgattttattgttgctaatgaatattgtaatagattgagtatactgcaatagagacaatgaaggcagatgggtttttgcagactcagactcaagtttgattgattgctatttgctaccaacaaaaaataggtctcgacaagaaagttttattgtacttcagatttgtatatatgatcaacatctctgtgtgcagtatgcttgagaatagctttaaggctgagtaacaaggtttgaagaaagttatttcattttttttctgaacatatattgtttgattcgtaatttagtttacatggtatgacatcatttatttttggtttaaactttagagtatatatgctaattgtatgctctagatcagtttaaaaaggatgcagatgtctagtcgtaataggccaatctacaaactttcatagcctgaagtttatgaacagtgaatacacatcggttctaacttctgtgtttgtaaagatgctaaaagtattctcgctctattaatgtcttcttaggtaaaatagatttgatttacatgtgccagtattttggaagcataatagacactgagcttcaaacgtttggtcaggttcatcatttttaatgcaccaacaccaatgagccccttctcagcacaatgaaattgtttacatgtatgcatttttttcttgctattgttatgaaaaaagcattatttctgaaatattgacttccaatttatgaaatattgatttccaatttctgatagtatcttcagggccagtctacaaactttcacagcctgaagtttatgaacagttaatacacatcggttctaacttctgtgtttgtaaggatgctaaaagtactcagactctgttaatgtcttcttagataaaatagatttgatttataagtgccagtattttgggagcataatagacactaagcttcaaacgtttggtcaggttcatcatttttaatgcagcaacaccaatgagccccttctcagcacaatgacattgtttacatgtatgcatttttttcttgctattgttatgaagaagctttatttctgaaatattgatttccaatttatgaaatattgattttaatttctgatagtacctttggtgcatttcttaacttctttattccagccttgggatactgtataatcttaccaaatgaacatagataggtctatgtttggtttatgttcattactgtcatttttctgttgtgtgctctgacaaggtggacttaacacaccctaatctactatgacaaacagagcagggcctgctgtagccaatgagttggatacagtggacacaatcacatcaattttgcggttcaattactttgcaaaaggttgtatatgcagcctctcttttgtagtcaactcttttataatggctaaacctagaatttcttttacgcaaactcgacatgatccaaatcagttgctcccagtcaggagctgatttgagtctagcgccaaatcacctcaaacttttatagcccaatttgtctctctgtgttggcatcatgagccatccgtcccattcagcttgatagcaggttatgacacagccaggcagaaacctggaaggattacccaggtctaaattggaccattgcatcagcacacatctcttgctctcgccctattttagatatattgttattttgttctcacacattcgtgctttgctccttgttttgcagttatgcatatatctaataaaagtggaaggataccatatgccacttttttctaatataagataacccttcatatttcatttttctcttaatgtaggacaactagatttatatactctccatagtagctgctcttgacagaaaagaaagcaacagaagtgccattcatacatgtcaaaagattaatttgcagcaataaattataattccacaggtctgaattgtgtgtacatacatacatgtaaaaaaataatttgcaaggacaggtaataattccacatgtccgacttggtgggttacacatcctactatccccttgtttgttttttaaataatctggtcggatgacaattctactatttgcttctatattttctccaaatctccccttctcttgttctgttacagcttgttaatatcacttgctgcagacaaagtacgtcaaaaggcaacgtctaagtaatatgttgatacacaaagatagaaggttacatgtgcgttgttactatctcacgccaactcagacctctactggataacgttgcacaccatgcgactagacagacactaaatttgggtacctctacaaagcacttaatttattgtgcctctttcgaaaaaggccagttgcgagcaacatatgggttgttctcgtgaaggaagttgaacacctcgtccaacagctgcaacagaaaagctcaaggtcaaatttcaaaaaaagaacgtgggcatgagcgtgcgcaatacactagtgttgggaccatgcttcgtcgccgaaggtcctgcaaaaagaaacagcttcggctgaagctgcttgaacatgatgccgaagacaccgttcacgaagcttcggagctacaacatatccgaagacgaagggtcgaaccgacttaaagatagaatgaccatttagcccataagggtctgagtcattgttgtaaacttttatgaggggcataattgtaattcctcatgagttgtgtcctgtgcctataaatagtgaacagtattcctttactgttcacggattcctgtaattgccaacgcatcactcgggaattattgtttgtcaaggcaaaggtataaatgtacctaaacattgtgttcagatattcaaaattcatttaacaagatatgtgaatgatgtcgtttattttca

SEQ ID NO: 72879 - DNA, 4482 bp, Zea Mays
cccggaggtccccccaatgtcggacggacgacgggttcacccacaccccctgctggcggatcccccccctcgcctgcctgcccgcgcgccaagaactccattcacctccccccacactgccaggagcttcgcccggcccccgggtgccggacggccaccaggttcacccgtgcctgctgccggcggattcccccctcccccggtggctaggagctccatctgtgttgtcgtcgtgtgctgctgggcgtctcccccaatggcgttacagcatgggcattagagaactctatgacggatggggagctactctggcgcgcgtcgttcaccccggcggtacctattctgacgcgtatggaaggttgccttcatgttcctcacgcaagggcaggtgccgctcagggggtgcctcactactacatctacgtccacgcgctatcggccaatttcaccttcgaatcaatcttctcccaacgccaaatacctagtaaggcaaggccacatctctatcatatatgaaagttggttctgtctatcatacactttcgttatgaaaatgtgtgtagctttcaaaaaagcccttcacgggcctgataaatcaaggattgattttatgagagaaataggtgccacaaatttctaccagaatttctacatattcatgaatgattttattgttgctaatgaatattgtaatagattgagtatactgcaatagagacaatgaaggcagatgggtttttgcagactcagactcaagtttgattgattgctatttgctaccaacaaaaaataggtctcgacaagaaagttttattgtacttcagatttgtatatatgatcaacatctctgtgtgcagtatgcttgagaatagctttaaggctgagtaacaaggtttgaagaaagttatttcattttttttctgaacatatattgtttgattcgtaatttagtttacatggtatgacatcatttatttttggtttaaactttagagtatatatgctaattgtatgctctagatcagtttaaaaaggatgcagatgtctagtcgtaataggccaatctacaaactttcatagcctgaagtttatgaacagtgaatacacatcggttctaacttctgtgtttgtaaagatgctaaaagtattctcgctctattaatgtcttcttaggtaaaatagatttgatttacatgtgccagtattttggaagcataatagacactgagcttcaaacgtttggtcaggttcatcatttttaatgcaccaacaccaatgagccccttctcagcacaatgaaattgtttacatgtatgcatttttttcttgctattgttatgaaaaaagcattatttctgaaatattgacttccaatttatgaaatattgatttccaatttctgatagtatcttcagggccagtctacaaactttcacagcctgaagtttatgaacagttaatacacatcggttctaacttctgtgtttgtaaggatgctaaaagtactcagactctgttaatgtcttcttagataaaatagatttgatttataagtgccagtattttgggagcataatagacactaagcttcaaacgtttggtcaggttcatcatttttaatgcagcaacaccaatgagccccttctcagcacaatgacattgtttacatgtatgcatttttttcttgctattgttatgaagaagctttatttctgaaatattgatttccaatttatgaaatattgattttaatttctgatagtacctttggtgcatttcttaacttctttattccagccttgggatactgtataatcttaccaaatgaacatagataggtctatgtttggtttatgttcattactgtcatttttctgttgtgtgctctgacaaggtggacttaacacaccctaatctactatgacaaacagagcagggcctgctgtagccaatgagttggatacagtggacacaatcacatcaattttgcggttcaattactttgcaaaaggttgtatatgcagcctctcttttgtagtcaactcttttataatggctaaacctagaatttcttttacgcaaactcgacatgatccaaatcagttgctcccagtcaggagctgatttgagtctagcgccaaatcacctcaaacttttatagcccaatttgtctctctgtgttggcatcatgagccatccgtcccattcagcttgatagcaggttatgacacagccaggcagaaacctggaaggattacccaggtctaaattggaccattgcatcagcacacatctcttgctctcgccctattttagatatattgttattttgttctcacacattcgtgctttgctccttgttttgcagttatgcatatatctaataaaagtggaaggataccatatgccacttttttctaatataagataacccttcatatttcatttttctcttaatgtaggacaactagatttatatactctccatagtagctgctcttgacagaaaagaaagcaacagaagtgccattcatacatgtcaaaagattaatttgcagcaataaattataattccacaggtctgaattgtgtgtacatacatacatgtaaaaaaataatttgcaaggacaggtaataattccacatgtccgacttggtgggttacacatcctactatccccttgtttgttttttaaataatctggtcggatgacaattctactatttgcttctatattttctccaaatctccccttctcttgttctgttacagcttgttaatatcacttgctgcagacaaagtacgtcaaaaggcaacgtctaagtaatatgttgatacacaaaggtaatccttctcatagcttctgctccaacatgttttgcgaatttattgcattattggtgtataaaaggactgaagttgtgttttgaatactatatgacaacacctttttgggttgaaatgtgtggaataatagcactgatccttagagacttcatccaacgaggtaattggcacttgccaaagcctgttctccatacgtgtaagactatttgtccgctgcatgatttgtgaagactaacattttattgtaccacttagtttatgtcttgcatgtgcattatgttatgtttatttctatataagtagtgttgatatcgccacttggattagcttcgttgagagaacattttataggtagtaggtaacacttacatcaccttcctttgcttacacgttgacagaacactttataggtagcagttgcattagcatgttttccttacatgtaaggcatcaccgatccgctgcatgatatgtggtgataatatgttatttagcctcttgaatacttaaacccattgctttgtgtgttccatgtgctttataatctatttatttaactatttacatatactgagagattactaggtcaacaatagatttattctatttacaataaccttctcttgcataacgcagatagaaggttacatgtgcgttgttactatctcacgccaactcagacctctactggataacgttgcacaccatgcgactagacagacactaaatttgggtacctctacaaagcacttaatttattgtgcctctttcgaaaaaggttcttttctttcgtaattacctaaccactgctatactatactaacattttgaattcacatatacaaactcggcttcattactactgacggaacatccgaagcagaattttttgtgtcatggagatacaaattaaaagttagtttattgtaatttccaaaaaaacagcagagagcacttaacaaggcaagggagtatcaatttaaattatgctaccaaaattgtgttgaaaacttacttttacacaaatccttgaaattaacaaaaaaaattgtcttccttgttcactcactgagaacttgtggtgataacggtcccaggccagttgcgagcaacatatgggttgttctcgtgaaggaagttgaacacctcgtccaacagctgcaacagaaaagctcaaggtcaaatttcaaaaaaagaacgtgggcatgagcgtgcgcaatacactagtgttgggaccatgcttcgtcgccgaaggtcctgcaaaaagaaacagcttcggctgaagctgcttgaacatgatgccgaagacaccgttcacgaagcttcggagctacaacatatccgaagacgaagggtcgaaccgacttaaagatagaatgaccatttagcccataagggtctgagtcattgttgtaaacttttatgaggggcataattgtaattcctcatgagttgtgtcctgtgcctataaatagtgaacagtattcctttactgttcacggattcctgtaattgccaacgcatcactcgggaattattgtttgtcaaggcaaaggtataaatgtacctaaacattgtgttcagatattcaaaattcatttaacaagatatgtgaatgatgtcgtttattttca

SEQ ID NO: 72880 - DNA, 2995 bp, Zea Mays
cccggaggtccccccaatgtcggacggacgacgggttcacccacaccccctgctggcggatcccccccctcgcctgcctgcccgcgcgccaagaactccattcacctccccccacactgccaggagcttcgcccggcccccgggtgccggacggccaccaggttcacccgtgcctgctgccggcggattcccccctcccccggtggctaggagctccatctgtgttgtcgtcgtgtgctgctgggcgtctcccccaatggcgttacagcatgggcattagagaactctatgacggatggggagctactctggcgcgcgtcgttcaccccggcggtacctattctgacgcgtatggaaggttgccttcatgttcctcacgcaagggcaggtgccgctcagggggtgcctcactactacatctacgtccacgcgctatcggccaatttcaccttcgaatcaatcttctcccaacgccaaatacctagtaagattgagtatactgcaatagagacaatgaaggcagatgggtttttgcagactcagactcaagtttgattgattgctatttgctaccaacaaaaaataggtctcgacaagaaagttttattgtacttcagatttgtatatatgatcaacatctctgtgtgcagtatgcttgagaatagctttaaggctgagtaacaagggccagtctacaaactttcacagcctgaagtttatgaacagttaatacacatcggttctaacttctgtgtttgtaaggatgctaaaagtactcagactctgttaatgtcttcttagataaaatagatttgatttataagtgccagtattttgggagcataatagacactaagcttcaaacgtttggtcaggttcatcatttttaatgcagcaacaccaatgagccccttctcagcacaatgacattgtttacatgtatgcatttttttcttgctattgttatgaagaagctttatttctgaaatattgatttccaatttatgaaatattgattttaatttctgatagtacctttggtgcatttcttaacttctttattccagccttgggatactgtataatcttaccaaatgaacatagataggtctatgtttggtttatgttcattactgtcatttttctgttgtgtgctctgacaaggtggacttaacacaccctaatctactatgacaaacagagcagggcctgctgtagccaatgagttggatacagtggacacaatcacatcaattttgcggttcaattactttgcaaaaggttgtatatgcagcctctcttttgtagtcaactcttttataatggctaaacctagaatttcttttacgcaaactcgacatgatccaaatcagttgctcccagtcaggagctgatttgagtctagcgccaaatcacctcaaacttttatagcccaatttgtctctctgtgttggcatcatgagccatccgtcccattcagcttgatagcaggttatgacacagccaggcagaaacctggaaggattacccaggtctaaattggaccattgcatcagcacacatctcttgctctcgccctattttagatatattgttattttgttctcacacattcgtgctttgctccttgttttgcagttatgcatatatctaataaaagtggaaggataccatatgccacttttttctaatataagataacccttcatatttcatttttctcttaatgtaggacaactagatttatatactctccatagtagctgctcttgacagaaaagaaagcaacagaagtgccattcatacatgtcaaaagattaatttgcagcaataaattataattccacaggtctgaattgtgtgtacatacatacatgtaaaaaaataatttgcaaggacaggtaataattccacatgtccgacttggtgggttacacatcctactatccccttgtttgttttttaaataatctggtcggatgacaattctactatttgcttctatattttctccaaatctccccttctcttgttctgttacagcttgttaatatcacttgctgcagacaaagtacgtcaaaaggcaacgtctaagtaatatgttgatacacaaagcactgatccttagagacttcatccaacgagatagaaggttacatgtgcgttgttactatctcacgccaactcagacctctactggataacgttgcacaccatgcgactagacagacactaaatttgggtacctctacaaagcacttaatttattgtgcctctttcgaaaaaggccagttgcgagcaacatatgggttgttctcgtgaaggaagttgaacacctcgtccaacagctgcaacagaaaagctcaaggtcaaatttcaaaaaaaggacgatgaccaatatagaagttatcttaacaatgacagactgtcatcaccacctaaaaagtatgtggcacaaagcacatataggatcaaggctagccaacttcacaaacttcaatcagattttactgaccctgaaaacgataaccattagatcgttgtgaattacatgaagaacgtgggcatgagcgtgcgcaatacactagtgttgggaccatgcttcgtcgccgaaggtcctgcaaaaagaaacagcttcggctgaagctgcttgaacatgatgccgaagacaccgttcacgaagcttcggagctacaacatatccgaagacgaagggtcgaaccgacttaaagatagaatgaccatttagcccataagggtctgagtcattgttgtaaacttttatgaggggcataattgtaattcctcatgagttgtgtcctgtgcctataaatagtgaacagtattcctttactgttcacggattcctgtaattgccaacgcatcactcgggaattattgtttgtcaaggcaaaggtataaatgtacctaaacattgtgttcagatattcaaaattcatttaacaagatatgtgaatgatgtcgtttattttca

SEQ ID NO: 72881 - DNA, 2953 bp, Zea Mays
cccggaggtccccccaatgtcggacggacgacgggttcacccacaccccctgctggcggatcccccccctcgcctgcctgcccgcgcgccaagaactccattcacctccccccacactgccaggagcttcgcccggcccccgggtgccggacggccaccaggttcacccgtgcctgctgccggcggattcccccctcccccggtggctaggagctccatctgtgttgtcgtcgtgtgctgctgggcgtctcccccaatggcgttacagcatgggcattagagaactctatgacggatggggagctactctggcgcgcgtcgttcaccccggcggtacctattctgacgcgtatggaaggttgccttcatgttcctcacgcaagggcaggtgccgctcagggggtgcctcactactacatctacgtccacgcgctatcggccaatttcaccttcgaatcaatcttctcccaacgccaaatacctagtaagattgagtatactgcaatagagacaatgaaggcagatgggtttttgcagactcagactcaagtttgattgattgctatttgctaccaacaaaaaataggtctcgacaagaaagttttattgtacttcagatttgtatatatgatcaacatctctgtgtgcagtatgcttgagaatagctttaaggctgagtaacaaggttcatcatttttaatgcagcaacaccaatgagccccttctcagcacaatgacattgtttacatgtatgcatttttttcttgctattgttatgaagaagctttatttctgaaatattgatttccaatttatgaaatattgattttaatttctgatagtacctttggtgcatttcttaacttctttattccagccttgggatactgtataatcttaccaaatgaacatagataggtctatgtttggtttatgttcattactgtcatttttctgttgtgtgctctgacaaggtggacttaacacaccctaatctactatgacaaacagagcagggcctgctgtagccaatgagttggatacagtggacacaatcacatcaattttgcggttcaattactttgcaaaaggttgtatatgcagcctctcttttgtagtcaactcttttataatggctaaacctagaatttcttttacgcaaactcgacatgatccaaatcagttgctcccagtcaggagctgatttgagtctagcgccaaatcacctcaaacttttatagcccaatttgtctctctgtgttggcatcatgagccatccgtcccattcagcttgatagcaggttatgacacagccaggcagaaacctggaaggattacccaggtctaaattggaccattgcatcagcacacatctcttgctctcgccctattttagatatattgttattttgttctcacacattcgtgctttgctccttgttttgcagttatgcatatatctaataaaagtggaaggataccatatgccacttttttctaatataagataacccttcatatttcatttttctcttaatgtaggacaactagatttatatactctccatagtagctgctcttgacagaaaagaaagcaacagaagtgccattcatacatgtcaaaagattaatttgcagcaataaattataattccacaggtctgaattgtgtgtacatacatacatgtaaaaaaataatttgcaaggacaggtaataattccacatgtccgacttggtgggttacacatcctactatccccttgtttgttttttaaataatctggtcggatgacaattctactatttgcttctatattttctccaaatctccccttctcttgttctgttacagcttgttaatatcacttgctgcagacaaagtacgtcaaaaggcaacgtctaagtaatatgttgatacacaaagcactgatccttagagacttcatccaacgagatagaaggttacatgtgcgttgttactatctcacgccaactcagacctctactggataacgttgcacaccatgcgactagacagacactaaatttgggtacctctacaaagcacttaatttattgtgcctctttcgaaaaaggttcttttctttcgtaattacctaaccactgctatactatactaacattttgaattcacatatacaaactcggcttcattactactgacggaacatccgaagcagaattttttgtgtcatggagatacaaattaaaagttagtttattgtaatttccaaaaaaacagcagagagcacttaacaaggcaagggagtatcaatttaaattatgctaccaaaattgtgttgaaaacttacttttacacaaatccttgaaattaacaaaaaaaattgtcttccttgttcactcactgagaacttgtggtgataacggtcccaggccagttgcgagcaacatatgggttgttctcgtgaaggaagttgaacacctcgtccaacagctgcaacagaaaagctcaaggtcaaatttcaaaaaaagaacgtgggcatgagcgtgcgcaatacactagtgttgggaccatgcttcgtcgccgaaggtcctgcaaaaagaaacagcttcggctgaagctgcttgaacatgatgccgaagacaccgttcacgaagcttcggagctacaacatatccgaagacgaagggtcgaaccgacttaaagatagaatgaccatttagcccataagggtctgagtcattgttgtaaacttttatgaggggcataattgtaattcctcatgagttgtgtcctgtgcctataaatagtgaacagtattcctttactgttcacggattcctgtaattgccaacgcatcactcgggaattattgtttgtcaaggcaaaggtataaatgtacctaaacattgtgttcagatattcaaaattcatttaacaagatatgtgaatgatgtcgtttattttca

SEQ ID NO: 72882 - DNA, 3267 bp, Zea Mays
cccggaggtccccccaatgtcggacggacgacgggttcacccacaccccctgctggcggatcccccccctcgcctgcctgcccgcgcgccaagaactccattcacctccccccacactgccaggagcttcgcccggcccccgggtgccggacggccaccaggttcacccgtgcctgctgccggcggattcccccctcccccggtggctaggagctccatctgtgttgtcgtcgtgtgctgctgggcgtctcccccaatggcgttacagcatgggcattagagaactctatgacggatggggagctactctggcgcgcgtcgttcaccccggcggtacctattctgacgcgtatggaaggttgccttcatgttcctcacgcaagggcaggtgccgctcagggggtgcctcactactacatctacgtccacgcgctatcggccaatttcaccttcgaatcaatcttctcccaacgccaaatacctagtaagactcagactcaagtttgattgattgctatttgctaccaacaaaaaataggtctcgacaagaaagttttattgtacttcagatttgtatatatgatcaacatctctgtgtgcagtatgcttgagaatagctttaaggctgagtaacaaggttcatcatttttaatgcaccaacaccaatgagccccttctcagcacaatgaaattgtttacattatcttcagggccagtctacaaactttcacagcctgaagtttatgaacagttaatacacatcggttctaacttctgtgtttgttcatcatttttaatgcagcaacaccaatgagccccttctcagcacaatgacattgtttacatgtatgcatttttttcttgctattgttatgaagaagctttatttctgaaatattgatttccaatttatgaaatattgattttaatttctgatagtacctttggtgcatttcttaacttctttattccagccttgggatactgtataatcttaccaaatgaacatagataggtctatgtttggtttatgttcattactgtcatttttctgttgtgtgctctgacaaggtggacttaacacaccctaatctactatgacaaacagagcagggcctgctgtagccaatgagttggatacagtggacacaatcacatcaattttgcggttcaattactttgcaaaaggttgtatatgcagcctctcttttgtagtcaactcttttataatggctaaacctagaatttcttttacgcaaactcgacatgatccaaatcagttgctcccagtcaggagctgatttgagtctagcgccaaatcacctcaaacttttatagcccaatttgtctctctgtgttggcatcatgagccatccgtcccattcagcttgatagcaggttatgacacagccaggcagaaacctggaaggattacccaggtctaaattggaccattgcatcagcacacatctcttgctctcgccctattttagatatattgttattttgttctcacacattcgtgctttgctccttgttttgcagttatgcatatatctaataaaagtggaaggataccatatgccacttttttctaatataagataacccttcatatttcatttttctcttaatgtaggacaactagatttatatactctccatagtagctgctcttgacagaaaagaaagcaacagaagtgccattcatacatgtcaaaagattaatttgcagcaataaattataattccacaggtctgaattgtgtgtacatacatacatgtaaaaaaataatttgcaaggacaggtaataattccacatgtccgacttggtgggttacacatcctactatccccttgtttgttttttaaataatctggtcggatgacaattctactatttgcttctatattttctccaaatctccccttctcttgttctgttacagcttgttaatatcacttgctgcagacaaagtacgtcaaaaggcaacgtctaagtaatatgttgatacacaaagcactgatccttagagacttcatccaacgagatagaaggttacatgtgcgttgttactatctcacgccaactcagacctctactggataacgttgcacaccatgcgactagacagacactaaatttgggtacctctacaaagcacttaatttattgtgcctctttcgaaaaaggttcttttctttcgtaattacctaaccactgctatactatactaacattttgaattcacatatacaaactcggcttcattactactgacggaacatccgaagcagaattttttgtgtcatggagatacaaattaaaagttagtttattgtaatttccaaaaaaacagcagagagcacttaacaaggcaagggagtatcaatttaaattatgctaccaaaattgtgttgaaaacttacttttacacaaatccttgaaattaacaaaaaaaattgtcttccttgttcactcactgagaacttgtggtgataacggtcccaggccagttgcgagcaacatatgggttgttctcgtgaaggaagttgaacacctcgtccaacagctgcaacagaaaagctcaaggtcaaatttcaaaaaaaggcacaacacatgtttgcatattcccgtgctctaaaagaatacagaggacgatgaccaatatagaagttatcttaacaatgacagactgtcatcaccacctaaaaagtatgtggcacaaagcacatataggatcaaggctagccaacttcacaaacttcaatcagattttactgaccctgaaaacgataaccattagatcgttgtgaattacatgaagaacgtgggcatgagcgtgcgcaatacactagtgttgggaccatgcttcgtcgccgaaggtcctgcaaaaagaaacagcttcggctgaagctgcttgaacatgatgccgaagacaccgttcacgaagcttcggagctacaacatatccgaagacgaagggtcgaaccgacttaaagatagaatgaccatttagcccataagggtctgagtcattgttgtaaacttttatgaggggcataattgtaattcctcatgagttgtgtcctgtgcctataaatagtgaacagtattcctttactgttcacggattcctgtaattgccaacgcatcactcgggaattattgtttgtcaaggcaaaggtataaatgtacctaaacattgtgttcagatattcaaaattcatttaacaagatatgtgaatgatgtcgtttattttca

SEQ ID NO: 72883 - DNA, 3445 bp, Zea Mays
cccggaggtccccccaatgtcggacggacgacgggttcacccacaccccctgctggcggatcccccccctcgcctgcctgcccgcgcgccaagaactccattcacctccccccacactgccaggagcttcgcccggcccccgggtgccggacggccaccaggttcacccgtgcctgctgccggcggattcccccctcccccggtggctaggagctccatctgtgttgtcgtcgtgtgctgctgggcgtctcccccaatggcgttacagcatgggcattagagaactctatgacggatggggagctactctggcgcgcgtcgttcaccccggcggtacctattctgacgcgtatggaaggttgccttcatgttcctcacgcaagggcaggtgccgctcagggggtgcctcactactacatctacgtccacgcgctatcggccaatttcaccttcgaatcaatcttctcccaacgccaaatacctaagacaatgaaggcagatgggtttttgcagactcagactcaagtttgattgattgctatttgctaccaacaaaaaataggtctcgacaagaaagttttattgtacttcagatttgtatatatgatcaacatctctgtgtgcagtatgcttgagaatagctttaaggctgagtaacaaggtttgaagaaagttatttcattttttttctgaacatatattgtttgattcgtaatttagtttacatggtatgacatcatttatttttggtttaaactttagagtatatatgctaattgtatgctctagatcagtttaaaaaggatgcagatgtctagtcgtaataggccaatctacaaactttcatagcctgaagtttatgaacagtgaatacacatcggttctaacttctgtgtttgtaaagatgctaaaagtattctcgctctattaatgtcttcttaggtaaaatagatttgatttacatgtgccagtattttggaagcataatagacactgagcttcaaacgtttggtcaggttcatcatttttaatgcaccaacaccaatgagccccttctcagcacaatgaaattgtttacattatcttcagggccagtctacaaactttcacagcctgaagtttatgaacagttaatacacatcggttctaacttctgtgtttgtaaggatgctaaaagtactcagactctgttaatgtcttcttagataaaatagatttgatttataagtgccagtattttgggagcataatagacactaagcttcaaacgtttggtcaggttcatcatttttaatgcagcaacaccaatgagccccttctcagcacaatgacattgtttacatgtatgcatttttttcttgctattgttatgaagaagctttatttctgaaatattgatttccaatttatgaaatattgattttaatttctgatagtacctttggtgcatttcttaacttctttattccagccttgggatactgtataatcttaccaaatgaacatagataggtctatgtttggtttatgttcattactgtcatttttctgttgtgtgctctgacaaggtggacttaacacaccctaatctactatgacaaacagagcagggcctgctgtagccaatgagttggatacagtggacacaatcacatcaattttgcggttcaattactttgcaaaaggttgtatatgcagcctctcttttgtagtcaactcttttataatggctaaacctagaatttcttttacgcaaactcgacatgatccaaatcagttgctcccagtcaggagctgatttgagtctagcgccaaatcacctcaaacttttatagcccaatttgtctctctgtgttggcatcatgagccatccgtcccattcagcttgatagcaggttatgacacagccaggcagaaacctggaaggattacccaggtctaaattggaccattgcatcagcacacatctcttgctctcgccctattttagatatattgttattttgttctcacacattcgtgctttgctccttgttttgcagttatgcatatatctaataaaagtggaaggataccatatgccacttttttctaatataagataacccttcatatttcatttttctcttaatgtaggacaactagatttatatactctccatagtagctgctcttgacagaaaagaaagcaacagaagtgccattcatacatgtcaaaagattaatttgcagcaataaattataattccacaggtctgaattgtgtgtacatacatacatgtaaaaaaataatttgcaaggacaggtaataattccacatgtccgacttggtgggttacacatcctactatccccttgtttgttttttaaataatctggtcggatgacaattctactatttgcttctatattttctccaaatctccccttctcttgttctgttacagcttgttaatatcacttgctgcagacaaagtacgtcaaaaggcaacgtctaagtaatatgttgatacacaaagcactgatccttagagacttcatccaacgagatagaaggttacatgtgcgttgttactatctcacgccaactcagacctctactggataacgttgcacaccatgcgactagacagacactaaatttgggtacctctacaaagcacttaatttattgtgcctctttcgaaaaaggccagttgcgagcaacatatgggttgttctcgtgaaggaagttgaacacctcgtccaacagctgcaacagaaaagctcaaggtcaaatttcaaaaaaaggcacaacacatgtttgcatattcccgtgctctaaaagaatacagaggacgatgaccaatatagaagttatcttaacaatgacagactgtcatcaccacctaaaaagtatgtggcacaaagcacatataggatcaaggctagccaacttcacaaacttcaatcagattttactgaccctgaaaacgataaccattagatcgttgtgaattacatgaagaacgtgggcatgagcgtgcgcaatacactagtgttgggaccatgcttcgtcgccgaaggtcctgcaaaaagaaacagcttcggctgaagctgcttgaacatgatgccgaagacaccgttcacgaagcttcggagctacaacatatccgaagacgaagggtcgaaccgacttaaagatagaatgaccatttagcccataagggtctgagtcattgttgtaaacttttatgaggggcataattgtaattcctcatgagttgtgtcctgtgcctataaatagtgaacagtattcctttactgttcacggattcctgtaattgccaacgcatcactcgggaattattgtttgtcaaggcaaaggtataaatgtacctaaacattgtgttcagatattcaaaattcatttaacaagatatgtgaatgatgtcgtttattttca

SEQ ID NO: 72884 - DNA, 4305 bp, Zea Mays
cccggaggtccccccaatgtcggacggacgacgggttcacccacaccccctgctggcggatcccccccctcgcctgcctgcccgcgcgccaagaactccattcacctccccccacactgccaggagcttcgcccggcccccgggtgccggacggccaccaggttcacccgtgcctgctgccggcggattcccccctcccccggtggctaggagctccatctgtgttgtcgtcgtgtgctgctgggcgtctcccccaatggcgttacagcatgggcattagagaactctatgacggatggggagctactctggcgcgcgtcgttcaccccggcggtacctattctgacgcgtatggaaggttgccttcatgttcctcacgcaagggcaggtgccgctcagggggtgcctcactactacatctacgtccacgcgctatcggccaatttcaccttcgaatcaatcttctcccaacgccaaatacctaactcagactcaagtttgattgattgctatttgctaccaacaaaaaataggtctcgacaagaaagttttattgtacttcagatttgtatatatgatcaacatctctgtgtgcagtatgcttgagaatagctttaaggctgagtaacaaggtttgaagaaagttatttcattttttttctgaacatatattgtttgattcgtaatttagtttacatggtatgacatcatttatttttggtttaaactttagagtatatatgctaattgtatgctctagatcagtttaaaaaggatgcagatgtctagtcgtaataggccaatctacaaactttcatagcctgaagtttatgaacagtgaatacacatcggttctaacttctgtgtttgtaaagatgctaaaagtattctcgctctattaatgtcttcttaggtaaaatagatttgatttacatgtgccagtattttggaagcataatagacactgagcttcaaacgtttggtcaggttcatcatttttaatgcaccaacaccaatgagccccttctcagcacaatgaaattgtttacatgtatgcatttttttcttgctattgttatgaaaaaagcattatttctgaaatattgacttccaatttatgaaatattgatttccaatttctgatagtatcttcagggccagtctacaaactttcacagcctgaagtttatgaacagttaatacacatcggttctaacttctgtgtttgtaaggatgctaaaagtactcagactctgttaatgtcttcttagataaaatagatttgatttataagtgccagtattttgggagcataatagacactaagcttcaaacgtttggtcaggttcatcatttttaatgcagcaacaccaatgagccccttctcagcacaatgacattgtttacatgtatgcatttttttcttgctattgttatgaagaagctttatttctgaaatattgatttccaatttatgaaatattgattttaatttctgatagtacctttggtgcatttcttaacttctttattccagccttgggatactgtataatcttaccaaatgaacatagataggtctatgtttggtttatgttcattactgtcatttttctgttgtgtgctctgacaaggtggacttaacacaccctaatctactatgacaaacagagcagggcctgctgtagccaatgagttggatacagtggacacaatcacatcaattttgcggttcaattactttgcaaaaggttgtatatgcagcctctcttttgtagtcaactcttttataatggctaaacctagaatttcttttacgcaaactcgacatgatccaaatcagttgctcccagtcaggagctgatttgagtctagcgccaaatcacctcaaacttttatagcccaatttgtctctctgtgttggcatcatgagccatccgtcccattcagcttgatagcaggttatgacacagccaggcagaaacctggaaggattacccaggtctaaattggaccattgcatcagcacacatctcttgctctcgccctattttagatatattgttattttgttctcacacattcgtgctttgctccttgttttgcagttatgcatatatctaataaaagtggaaggataccatatgccacttttttctaatataagataacccttcatatttcatttttctcttaatgtaggacaactagatttatatactctccatagtagctgctcttgacagaaaagaaagcaacagaagtgccattcatacatgtcaaaagattaatttgcagcaataaattataattccacaggtctgaattgtgtgtacatacatacatgtaaaaaaataatttgcaaggacaggtaataattccacatgtccgacttggtgggttacacatcctactatccccttgtttgttttttaaataatctggtcggatgacaattctactatttgcttctatattttctccaaatctccccttctcttgttctgttacagcttgttaatatcacttgctgcagacaaagtacgtcaaaaggcaacgtctaagtaatatgttgatacacaaaggtaatccttctcatagcttctgctccaacatgttttgcgaatttattgcattattggtgtataaaaggactgaagttgtgttttgaatactatatgacaacacctttttgggttgaaatgtgtggaataatagcactgatccttagagacttcatccaacgaggtaattggcacttgccaaagcctgttctccatacgtgtaagactatttgtccgctgcatgatttgtgaagactaacattttattgtaccacttagtttatgtcttgcatgtgcattatgttatgtttatttctatataagtagtgttgatatcgccacttggattagcttcgttgagagaacattttataggtagtaggtaacacttacatcaccttcctttgcttacacgttgacagaacactttataggtagcagttgcattagcatgttttccttacatgtaaggcatcaccgatccgctgcatgatatgtggtgataatatgttatttagcctcttgaatacttaaacccattgctttgtgtgttccatgtgctttataatctatttatttaactatttacatatactgagagattactaggtcaacaatagatttattctatttacaataaccttctcttgcataacgcagatagaaggttacatgtgcgttgttactatctcacgccaactcagacctctactggataacgttgcacaccatgcgactagacagacactaaatttgggtacctctacaaagcacttaatttattgtgcctctttcgaaaaaggttcttttctttcgtaattacctaaccactgctatactatactaacattttgaattcacatatacaaactcggcttcattactactgacggaacatccgaagcagaattttttgtgtcatggagatacaaattaaaagttagtttattgtaatttccaaaaaaacagcagagagcacttaacaaggccagttgcgagcaacatatgggttgttctcgtgaaggaagttgaacacctcgtccaacagctgcaacagaaaagctcaaggtcaaatttcaaaaaaaggcacaacacatgtttgcatattcccgtgctctaaaagaatacagaggacgatgaccaatatagaagttatcttaacaatgacagactgtcatcaccacctaaaaagtatgtggcacaaagcacatataggatcaaggctagccaacttcacaaacttcaatcagattttactgaccctgaaaacgataaccattagatcgttgtgaattacatgaagaacgtgggcatgagcgtgcgcaatacactagtgttgggaccatgcttcgtcgccgaaggtcctgcaaaaagaaacagcttcggctgaagctgcttgaacatgatgccgaagacaccgttcacgaagcttcggagctacaacatatccgaagacgaagggtcgaaccgacttaaagatagaatgaccatttagcccataagggtctgagtcattgttgtaaacttttatgaggggcataattgtaattcctcatgagttgtgtcctgtgcctataaatagtgaacagtattcctttactgttcacggattcctgtaattgccaacgcatcactcgggaattattgtttgtcaaggcaaaggtataaatgtacctaaacattgtgttcagatattcaaaattcatttaacaagatatgtgaatgatgtcgtttattttca

SEQ ID NO: 72885 - DNA, 3737 bp, Zea Mays
cccggaggtccccccaatgtcggacggacgacgggttcacccacaccccctgctggcggatcccccccctcgcctgcctgcccgcgcgccaagaactccattcacctccccccacactgccaggagcttcgcccggcccccgggtgccggacggccaccaggttcacccgtgcctgctgccggcggattcccccctcccccggtggctaggagctccatctgtgttgtcgtcgtgtgctgctgggcgtctcccccaatggcgttacagcatgggcattagagaactctatgacggatggggagctactctggcgcgcgtcgttcaccccggcggtacctattctgacgcgtatggaaggttgccttcatgttcctcacgcaagggcaggtgccgctcagggggtgcctcactactacatctacgtccacgcgctatcggccaatttcaccttcgaatcaatcttctcccaacgccaaatacctaattgagtatactgcaatagagacaatgaaggcagatgggtttttgcagactcagactcaagtttgattgattgctatttgctaccaacaaaaaataggtctcgacaagaaagttttattgtacttcagatttgtatatatgatcaacatctctgtgtgcagtatgcttgagaatagctttaaggctgagtaacaaggtttgaagaaagttatttcattttttttctgaacatatattgtttgattcgtaatttagtttacatggtatgacatcatttatttttggtttaaactttagagtatatatgctaattgtatgctctagatcagtttaaaaaggatgcagatgtctagtcgtaataggccaatctacaaactttcatagcctgaagtttatgaacagtgaatacacatcggttctaacttctgtgtttgtaaagatgctaaaagtattctcgctctattaatgtcttcttaggtaaaatagatttgatttacatgtgccagtattttggaagcataatagacactgagcttcaaacgtttggtcaggttcatcatttttaatgcaccaacaccaatgagccccttctcagcacaatgaaattgtttacattatcttcagggccagtctacaaactttcacagcctgaagtttatgaacagttaatacacatcggttctaacttctgtgtttgtaaggatgctaaaagtactcagactctgttaatgtcttcttagataaaatagatttgatttataagtgccagtattttgggagcataatagacactaagcttcaaacgtttggtcaggttcatcatttttaatgcagcaacaccaatgagccccttctcagcacaatgacattgtttacatgtatgcatttttttcttgctattgttatgaagaagctttatttctgaaatattgatttccaatttatgaaatattgattttaatttctgatagtacctttggtgcatttcttaacttctttattccagccttgggatactgtataatcttaccaaatgaacatagataggtctatgtttggtttatgttcattactgtcatttttctgttgtgtgctctgacaaggtggacttaacacaccctaatctactatgacaaacagagcagggcctgctgtagccaatgagttggatacagtggacacaatcacatcaattttgcggttcaattactttgcaaaaggttgtatatgcagcctctcttttgtagtcaactcttttataatggctaaacctagaatttcttttacgcaaactcgacatgatccaaatcagttgctcccagtcaggagctgatttgagtctagcgccaaatcacctcaaacttttatagcccaatttgtctctctgtgttggcatcatgagccatccgtcccattcagcttgatagcaggttatgacacagccaggcagaaacctggaaggattacccaggtctaaattggaccattgcatcagcacacatctcttgctctcgccctattttagatatattgttattttgttctcacacattcgtgctttgctccttgttttgcagttatgcatatatctaataaaagtggaaggataccatatgccacttttttctaatataagataacccttcatatttcatttttctcttaatgtaggacaactagatttatatactctccatagtagctgctcttgacagaaaagaaagcaacagaagtgccattcatacatgtcaaaagattaatttgcagcaataaattataattccacaggtctgaattgtgtgtacatacatacatgtaaaaaaataatttgcaaggacaggtaataattccacatgtccgacttggtgggttacacatcctactatccccttgtttgttttttaaataatctggtcggatgacaattctactatttgcttctatattttctccaaatctccccttctcttgttctgttacagcttgttaatatcacttgctgcagacaaagtacgtcaaaaggcaacgtctaagtaatatgttgatacacaaagcactgatccttagagacttcatccaacgagatagaaggttacatgtgcgttgttactatctcacgccaactcagacctctactggataacgttgcacaccatgcgactagacagacactaaatttgggtacctctacaaagcacttaatttattgtgcctctttcgaaaaaggttcttttctttcgtaattacctaaccactgctatactatactaacattttgaattcacatatacaaactcggcttcattactactgacggaacatccgaagcagaattttttgtgtcatggagatacaaattaaaagttagtttattgtaatttccaaaaaaacagcagagagcacttaacaaggcaagggagtatcaatttaaattatgctaccaaaattgtgttgaaaacttacttttacacaaatccttgaaattaacaaaaaaaattgtcttccttgttcactcactgagaacttgtggtgataacggtcccaggccagttgcgagcaacatatgggttgttctcgtgaaggaagttgaacacctcgtccaacagctgcaacagaaaagctcaaggtcaaatttcaaaaaaaggacgatgaccaatatagaagttatcttaacaatgacagactgtcatcaccacctaaaaagtatgtggcacaaagcacatataggatcaaggctagccaacttcacaaacttcaatcagattttactgaccctgaaaacgataaccattagatcgttgtgaattacatgaagaacgtgggcatgagcgtgcgcaatacactagtgttgggaccatgcttcgtcgccgaaggtcctgcaaaaagaaacagcttcggctgaagctgcttgaacatgatgccgaagacaccgttcacgaagcttcggagctacaacatatccgaagacgaagggtcgaaccgacttaaagatagaatgaccatttagcccataagggtctgagtcattgttgtaaacttttatgaggggcataattgtaattcctcatgagttgtgtcctgtgcctataaatagtgaacagtattcctttactgttcacggattcctgtaattgccaacgcatcactcgggaattattgtttgtcaaggcaaaggtataaatgtacctaaacattgtgttcagatattcaaaattcatttaacaagatatgtgaatgatgtcgtttattttca

SEQ ID NO: 72886 - DNA, 3098 bp, Zea Mays
cccggaggtccccccaatgtcggacggacgacgggttcacccacaccccctgctggcggatcccccccctcgcctgcctgcccgcgcgccaagaactccattcacctccccccacactgccaggagcttcgcccggcccccgggtgccggacggccaccaggttcacccgtgcctgctgccggcggattcccccctcccccggtggctaggagctccatctgtgttgtcgtcgtgtgctgctgggcgtctcccccaatggcgttacagcatgggcattagagaactctatgacggatggggagctactctggcgcgcgtcgttcaccccggcggtacctattctgacgcgtatggaaggttgccttcatgttcctcacgcaagggcaggtgccgctcagggggtgcctcactactacatctacgtccacgcgctatcggccaatttcaccttcgaatcaatcttctcccaacgccaaatacctagtaagattgagtatactgcaatagagacaatgaaggcagatgggtttttgcagactcagactcaagtttgattgattgctatttgctaccaacaaaaaataggtctcgacaagaaagttttattgtacttcagatttgtatatatgatcaacatctctgtgtgcagtatgcttgagaatagctttaaggctgagtaacaaggttcatcatttttaatgcaccaacaccaatgagccccttctcagcacaatgaaattgtttacattatcttcagggccagtctacaaactttcacagcctgaagtttatgaacagttaatacacatcggttctaacttctgtgtttgttcatcatttttaatgcagcaacaccaatgagccccttctcagcacaatgacattgtttacatgtatgcatttttttcttgctattgttatgaagaagctttatttctgaaatattgatttccaatttatgaaatattgattttaatttctgatagtacctttggtgcatttcttaacttctttattccagccttgggatactgtataatcttaccaaatgaacatagataggtctatgtttggtttatgttcattactgtcatttttctgttgtgtgctctgacaaggtggacttaacacaccctaatctactatgacaaacagagcagggcctgctgtagccaatgagttggatacagtggacacaatcacatcaattttgcggttcaattactttgcaaaaggttgtatatgcagcctctcttttgtagtcaactcttttataatggctaaacctagaatttcttttacgcaaactcgacatgatccaaatcagttgctcccagtcaggagctgatttgagtctagcgccaaatcacctcaaacttttatagcccaatttgtctctctgtgttggcatcatgagccatccgtcccattcagcttgatagcaggttatgacacagccaggcagaaacctggaaggattacccaggtctaaattggaccattgcatcagcacacatctcttgctctcgccctattttagatatattgttattttgttctcacacattcgtgctttgctccttgttttgcagttatgcatatatctaataaaagtggaaggataccatatgccacttttttctaatataagataacccttcatatttcatttttctcttaatgtaggacaactagatttatatactctccatagtagctgctcttgacagaaaagaaagcaacagaagtgccattcatacatgtcaaaagattaatttgcagcaataaattataattccacaggtctgaattgtgtgtacatacatacatgtaaaaaaataatttgcaaggacaggtaataattccacatgtccgacttggtgggttacacatcctactatccccttgtttgttttttaaataatctggtcggatgacaattctactatttgcttctatattttctccaaatctccccttctcttgttctgttacagcttgttaatatcacttgctgcagacaaagtacgtcaaaaggcaacgtctaagtaatatgttgatacacaaagcactgatccttagagacttcatccaacgagatagaaggttacatgtgcgttgttactatctcacgccaactcagacctctactggataacgttgcacaccatgcgactagacagacactaaatttgggtacctctacaaagcacttaatttattgtgcctctttcgaaaaaggttcttttctttcgtaattacctaaccactgctatactatactaacattttgaattcacatatacaaactcggcttcattactactgacggaacatccgaagcagaattttttgtgtcatggagatacaaattaaaagttagtttattgtaatttccaaaaaaacagcagagagcacttaacaaggcaagggagtatcaatttaaattatgctaccaaaattgtgttgaaaacttacttttacacaaatccttgaaattaacaaaaaaaattgtcttccttgttcactcactgagaacttgtggtgataacggtcccaggccagttgcgagcaacatatgggttgttctcgtgaaggaagttgaacacctcgtccaacagctgcaacagaaaagctcaaggtcaaatttcaaaaaaagaacgtgggcatgagcgtgcgcaatacactagtgttgggaccatgcttcgtcgccgaaggtcctgcaaaaagaaacagcttcggctgaagctgcttgaacatgatgccgaagacaccgttcacgaagcttcggagctacaacatatccgaagacgaagggtcgaaccgacttaaagatagaatgaccatttagcccataagggtctgagtcattgttgtaaacttttatgaggggcataattgtaattcctcatgagttgtgtcctgtgcctataaatagtgaacagtattcctttactgttcacggattcctgtaattgccaacgcatcactcgggaattattgtttgtcaaggcaaaggtataaatgtacctaaacattgtgttcagatattcaaaattcatttaacaagatatgtgaatgatgtcgtttattttca

SEQ ID NO: 72887 - DNA, 3068 bp, Zea Mays
cccggaggtccccccaatgtcggacggacgacgggttcacccacaccccctgctggcggatcccccccctcgcctgcctgcccgcgcgccaagaactccattcacctccccccacactgccaggagcttcgcccggcccccgggtgccggacggccaccaggttcacccgtgcctgctgccggcggattcccccctcccccggtggctaggagctccatctgtgttgtcgtcgtgtgctgctgggcgtctcccccaatggcgttacagcatgggcattagagaactctatgacggatggggagctactctggcgcgcgtcgttcaccccggcggtacctattctgacgcgtatggaaggttgccttcatgttcctcacgcaagggcaggtgccgctcagggggtgcctcactactacatctacgtccacgcgctatcggccaatttcaccttcgaatcaatcttctcccaacgccaaatacctagtaagattgagtatactgcaatagagacaatgaaggcagatgggtttttgcagactcagactcaagtttgattgattgctatttgctaccaacaaaaaataggtctcgacaagaaagttttattgtacttcagatttgtatatatgatcaacatctctgtgtgcagtatgcttgagaatagctttaaggctgagtaacaaggttcatcatttttaatgcaccaacaccaatgagccccttctcagcacaatgaaattgtttacattatcttcagggccagtctacaaactttcacagcctgaagtttatgaacagttaatacacatcggttctaacttctgtgtttgtaaggatgctaaaagtactcagactctgttaatgtcttcttagataaaatagatttgatttataagtgccagtattttgggagcataatagacactaagcttcaaacgtttggtcaggttcatcatttttaatgcagcaacaccaatgagccccttctcagcacaatgacattgtttacatgtatgcatttttttcttgctattgttatgaagaagctttatttctgaaatattgatttccaatttatgaaatattgattttaatttctgatagtacctttggtgcatttcttaacttctttattccagccttgggatactgtataatcttaccaaatgaacatagataggtctatgtttggtttatgttcattactgtcatttttctgttgtgtgctctgacaaggtggacttaacacaccctaatctactatgacaaacagagcagggcctgctgtagccaatgagttggatacagtggacacaatcacatcaattttgcggttcaattactttgcaaaaggttgtatatgcagcctctcttttgtagtcaactcttttataatggctaaacctagaatttcttttacgcaaactcgacatgatccaaatcagttgctcccagtcaggagctgatttgagtctagcgccaaatcacctcaaacttttatagcccaatttgtctctctgtgttggcatcatgagccatccgtcccattcagcttgatagcaggttatgacacagccaggcagaaacctggaaggattacccaggtctaaattggaccattgcatcagcacacatctcttgctctcgccctattttagatatattgttattttgttctcacacattcgtgctttgctccttgttttgcagttatgcatatatctaataaaagtggaaggataccatatgccacttttttctaatataagataacccttcatatttcatttttctcttaatgtaggacaactagatttatatactctccatagtagctgctcttgacagaaaagaaagcaacagaagtgccattcatacatgtcaaaagattaatttgcagcaataaattataattccacaggtctgaattgtgtgtacatacatacatgtaaaaaaataatttgcaaggacaggtaataattccacatgtccgacttggtgggttacacatcctactatccccttgtttgttttttaaataatctggtcggatgacaattctactatttgcttctatattttctccaaatctccccttctcttgttctgttacagcttgttaatatcacttgctgcagacaaagtacgtcaaaaggcaacgtctaagtaatatgttgatacacaaagcactgatccttagagacttcatccaacgagatagaaggttacatgtgcgttgttactatctcacgccaactcagacctctactggataacgttgcacaccatgcgactagacagacactaaatttgggtacctctacaaagcacttaatttattgtgcctctttcgaaaaaggccagttgcgagcaacatatgggttgttctcgtgaaggaagttgaacacctcgtccaacagctgcaacagaaaagctcaaggtcaaatttcaaaaaaaggacgatgaccaatatagaagttatcttaacaatgacagactgtcatcaccacctaaaaagtatgtggcacaaagcacatataggatcaaggctagccaacttcacaaacttcaatcagattttactgaccctgaaaacgataaccattagatcgttgtgaattacatgaagaacgtgggcatgagcgtgcgcaatacactagtgttgggaccatgcttcgtcgccgaaggtcctgcaaaaagaaacagcttcggctgaagctgcttgaacatgatgccgaagacaccgttcacgaagcttcggagctacaacatatccgaagacgaagggtcgaaccgacttaaagatagaatgaccatttagcccataagggtctgagtcattgttgtaaacttttatgaggggcataattgtaattcctcatgagttgtgtcctgtgcctataaatagtgaacagtattcctttactgttcacggattcctgtaattgccaacgcatcactcgggaattattgtttgtcaaggcaaaggtataaatgtacctaaacattgtgttcagatattcaaaattcatttaacaagatatgtgaatgatgtcgtttattttca

SEQ ID NO: 72888 - DNA, 2760 bp, Zea Mays
cccggaggtccccccaatgtcggacggacgacgggttcacccacaccccctgctggcggatcccccccctcgcctgcctgcccgcgcgccaagaactccattcacctccccccacactgccaggagcttcgcccggcccccgggtgccggacggccaccaggttcacccgtgcctgctgccggcggattcccccctcccccggtggctaggagctccatctgtgttgtcgtcgtgtgctgctgggcgtctcccccaatggcgttacagcatgggcattagagaactctatgacggatggggagctactctggcgcgcgtcgttcaccccggcggtacctattctgacgcgtatggaaggttgccttcatgttcctcacgcaagggcaggtgccgctcagggggtgcctcactactacatctacgtccacgcgctatcggccaatttcaccttcgaatcaatcttctcccaacgccaaatacctagtaagattgagtatactgcaatagagacaatgaaggcagatgggtttttgcagactcagactcaagtttgattgattgctatttgctaccaacaaaaaataggtctcgacaagaaagttttattgtacttcagatttgtatatatgatcaacatctctgtgtgcagtatgcttgagaatagctttaaggctgagtaacaaggttcatcatttttaatgcagcaacaccaatgagccccttctcagcacaatgacattgtttacatgtatgcatttttttcttgctattgttatgaagaagctttatttctgaaatattgatttccaatttatgaaatattgattttaatttctgatagtacctttggtgcatttcttaacttctttattccagccttgggatactgtataatcttaccaaatgaacatagataggtctatgtttggtttatgttcattactgtcatttttctgttgtgtgctctgacaaggtggacttaacacaccctaatctactatgacaaacagagcagggcctgctgtagccaatgagttggatacagtggacacaatcacatcaattttgcggttcaattactttgcaaaaggttgtatatgcagcctctcttttgtagtcaactcttttataatggctaaacctagaatttcttttacgcaaactcgacatgatccaaatcagttgctcccagtcaggagctgatttgagtctagcgccaaatcacctcaaacttttatagcccaatttgtctctctgtgttggcatcatgagccatccgtcccattcagcttgatagcaggttatgacacagccaggcagaaacctggaaggattacccaggtctaaattggaccattgcatcagcacacatctcttgctctcgccctattttagatatattgttattttgttctcacacattcgtgctttgctccttgttttgcagttatgcatatatctaataaaagtggaaggataccatatgccacttttttctaatataagataacccttcatatttcatttttctcttaatgtaggacaactagatttatatactctccatagtagctgctcttgacagaaaagaaagcaacagaagtgccattcatacatgtcaaaagattaatttgcagcaataaattataattccacaggtctgaattgtgtgtacatacatacatgtaaaaaaataatttgcaaggacaggtaataattccacatgtccgacttggtgggttacacatcctactatccccttgtttgttttttaaataatctggtcggatgacaattctactatttgcttctatattttctccaaatctccccttctcttgttctgttacagcttgttaatatcacttgctgcagacaaagtacgtcaaaaggcaacgtctaagtaatatgttgatacacaaagcactgatccttagagacttcatccaacgagatagaaggttacatgtgcgttgttactatctcacgccaactcagacctctactggataacgttgcacaccatgcgactagacagacactaaatttgggccagttgcgagcaacatatgggttgttctcgtgaaggaagttgaacacctcgtccaacagctgcaacagaaaagctcaaggtcaaatttcaaaaaaaggacgatgaccaatatagaagttatcttaacaatgacagactgtcatcaccacctaaaaagtatgtggcacaaagcacatataggatcaaggctagccaacttcacaaacttcaatcagattttactgaccctgaaaacgataaccattagatcgttgtgaattacatgaagaacgtgggcatgagcgtgcgcaatacactagtgttgggaccatgcttcgtcgccgaaggtcctgcaaaaagaaacagcttcggctgaagctgcttgaacatgatgccgaagacaccgttcacgaagcttcggagctacaacatatccgaagacgaagggtcgaaccgacttaaagatagaatgaccatttagcccataagggtctgagtcattgttgtaaacttttatgaggggcataattgtaattcctcatgagttgtgtcctgtgcctataaatagtgaacagtattcctttactgttcacggattcctgtaattgccaacgcatcactcgggaattattgtttgtcaaggcaaaggtataaatgtacctaaacattgtgttcagatattcaaaattcatttaacaagatatgtgaatgatgtcgtttattttca

SEQ ID NO: 72889 - DNA, 3114 bp, Zea Mays
cccggaggtccccccaatgtcggacggacgacgggttcacccacaccccctgctggcggatcccccccctcgcctgcctgcccgcgcgccaagaactccattcacctccccccacactgccaggagcttcgcccggcccccgggtgccggacggccaccaggttcacccgtgcctgctgccggcggattcccccctcccccggtggctaggagctccatctgtgttgtcgtcgtgtgctgctgggcgtctcccccaatggcgttacagcatgggcattagagaactctatgacggatggggagctactctggcgcgcgtcgttcaccccggcggtacctattctgacgcgtatggaaggttgccttcatgttcctcacgcaagggcaggtgccgctcagggggtgcctcactactacatctacgtccacgcgctatcggccaatttcaccttcgaatcaatcttctcccaacgccaaatacctagtaagattgagtatactgcaatagagacaatgaaggcagatgggtttttgcagactcagactcaagtttgattgattgctatttgctaccaacaaaaaataggtctcgacaagaaagttttattgtacttcagatttgtatatatgatcaacatctctgtgtgcagtatgcttgagaatagctttaaggctgagtaacaaggttcatcatttttaatgcaccaacaccaatgagccccttctcagcacaatgaaattgtttacattatcttcagggccagtctacaaactttcacagcctgaagtttatgaacagttaatacacatcggttctaacttctgtgtttgtaaggatgctaaaagtactcagactctgttaatgtcttcttagataaaatagatttgatttataagtgccagtattttgggagcataatagacactaagcttcaaacgtttggtcaggttcatcatttttaatgcagcaacaccaatgagccccttctcagcacaatgacattgtttacatgtatgcatttttttcttgctattgttatgaagaagctttatttctgaaatattgatttccaatttatgaaatattgattttaatttctgatagtacctttggtgcatttcttaacttctttattccagccttgggatactgtataatcttaccaaatgaacatagataggtctatgtttggtttatgttcattactgtcatttttctgttgtgtgctctgacaaggtggacttaacacaccctaatctactatgacaaacagagcagggcctgctgtagccaatgagttggatacagtggacacaatcacatcaattttgcggttcaattactttgcaaaaggttgtatatgcagcctctcttttgtagtcaactcttttataatggctaaacctagaatttcttttacgcaaactcgacatgatccaaatcagttgctcccagtcaggagctgatttgagtctagcgccaaatcacctcaaacttttatagcccaatttgtctctctgtgttggcatcatgagccatccgtcccattcagcttgatagcaggttatgacacagccaggcagaaacctggaaggattacccaggtctaaattggaccattgcatcagcacacatctcttgctctcgccctattttagatatattgttattttgttctcacacattcgtgctttgctccttgttttgcagttatgcatatatctaataaaagtggaaggataccatatgccacttttttctaatataagataacccttcatatttcatttttctcttaatgtaggacaactagatttatatactctccatagtagctgctcttgacagaaaagaaagcaacagaagtgccattcatacatgtcaaaagattaatttgcagcaataaattataattccacaggtctgaattgtgtgtacatacatacatgtaaaaaaataatttgcaaggacaggtaataattccacatgtccgacttggtgggttacacatcctactatccccttgtttgttttttaaataatctggtcggatgacaattctactatttgcttctatattttctccaaatctccccttctcttgttctgttacagcttgttaatatcacttgctgcagacaaagtacgtcaaaaggcaacgtctaagtaatatgttgatacacaaagcactgatccttagagacttcatccaacgagatagaaggttacatgtgcgttgttactatctcacgccaactcagacctctactggataacgttgcacaccatgcgactagacagacactaaatttgggtacctctacaaagcacttaatttattgtgcctctttcgaaaaaggccagttgcgagcaacatatgggttgttctcgtgaaggaagttgaacacctcgtccaacagctgcaacagaaaagctcaaggtcaaatttcaaaaaaaggcacaacacatgtttgcatattcccgtgctctaaaagaatacagaggacgatgaccaatatagaagttatcttaacaatgacagactgtcatcaccacctaaaaagtatgtggcacaaagcacatataggatcaaggctagccaacttcacaaacttcaatcagattttactgaccctgaaaacgataaccattagatcgttgtgaattacatgaagaacgtgggcatgagcgtgcgcaatacactagtgttgggaccatgcttcgtcgccgaaggtcctgcaaaaagaaacagcttcggctgaagctgcttgaacatgatgccgaagacaccgttcacgaagcttcggagctacaacatatccgaagacgaagggtcgaaccgacttaaagatagaatgaccatttagcccataagggtctgagtcattgttgtaaacttttatgaggggcataattgtaattcctcatgagttgtgtcctgtgcctataaatagtgaacagtattcctttactgttcacggattcctgtaattgccaacgcatcactcgggaattattgtttgtcaaggcaaaggtataaatgtacctaaacattgtgttcagatattcaaaattcatttaacaagatatgtgaatgatgtcgtttattttca

SEQ ID NO: 72890 - DNA, 2852 bp, Zea Mays
cccggaggtccccccaatgtcggacggacgacgggttcacccacaccccctgctggcggatcccccccctcgcctgcctgcccgcgcgccaagaactccattcacctccccccacactgccaggagcttcgcccggcccccgggtgccggacggccaccaggttcacccgtgcctgctgccggcggattcccccctcccccggtggctaggagctccatctgtgttgtcgtcgtgtgctgctgggcgtctcccccaatggcgttacagcatgggcattagagaactctatgacggatggggagctactctggcgcgcgtcgttcaccccggcggtacctattctgacgcgtatggaaggttgccttcatgttcctcacgcaagggcaggtgccgctcagggggtgcctcactactacatctacgtccacgcgctatcggccaatttcaccttcgaatcaatcttctcccaacgccaaatacctagtaagattgagtatactgcaatagagacaatgaaggcagatgggtttttgcagactcagactcaagtttgattgattgctatttgctaccaacaaaaaataggtctcgacaagaaagttttattgtacttcagatttgtatatatgatcaacatctctgtgtgcagtatgcttgagaatagctttaaggctgagtaacaaggttcatcatttttaatgcaccaacaccaatgagccccttctcagcacaatgaaattgtttacattatcttcagggccagtctacaaactttcacagcctgaagtttatgaacagttaatacacatcggttctaacttctgtgtttgtaaggatgctaaaagtactcagactctgttaatgtcttcttagataaaatagatttgatttataagtgccagtattttgggagcataatagacactaagcttcaaacgtttggtcaggttcatcatttttaatgcagcaacaccaatgagccccttctcagcacaatgacattgtttacatgtatgcatttttttcttgctattgttatgaagaagctttatttctgaaatattgatttccaatttatgaaatattgattttaatttctgatagtacctttggtgcatttcttaacttctttattccagccttgggatactgtataatcttaccaaatgaacatagataggtctatgtttggtttatgttcattactgtcatttttctgttgtgtgctctgacaaggtggacttaacacaccctaatctactatgacaaacagagcagggcctgctgtagccaatgagttggatacagtggacacaatcacatcaattttgcggttcaattactttgcaaaaggttgtatatgcagcctctcttttgtagtcaactcttttataatggctaaacctagaatttcttttacgcaaactcgacatgatccaaatcagttgctcccagtcaggagctgatttgagtctagcgccaaatcacctcaaacttttatagcccaatttgtctctctgtgttggcatcatgagccatccgtcccattcagcttgatagcaggttatgacacagccaggcagaaacctggaaggattacccaggtctaaattggaccattgcatcagcacacatctcttgctctcgccctattttagatatattgttattttgttctcacacattcgtgctttgctccttgttttgcagttatgcatatatctaataaaagtggaaggataccatatgccacttttttctaatataagataacccttcatatttcatttttctcttaatgtaggacaactagatttatatactctccatagtagctgctcttgacagaaaagaaagcaacagaagtgccattcatacatgtcaaaagattaatttgcagcaataaattataattccacaggtctgaattgtgtgtacatacatacatgtaaaaaaataatttgcaaggacaggtaataattccacatgtccgacttggtgggttacacatcctactatccccttgtttgttttttaaataatctggtcggatgacaattctactatttgcttctatattttctccaaatctccccttctcttgttctgttacagcttgttaatatcacttgctgcagacaaagtacgtcaaaaggcaacgtctaagtaatatgttgatacacaaagcactgatccttagagacttcatccaacgagatagaaggttacatgtgcgttgttactatctcacgccaactcagacctctactggataacgttgcacaccatgcgactagacagacactaaatttgggccagttgcgagcaacatatgggttgttctcgtgaaggaagttgaacacctcgtccaacagctgcaacagaaaagctcaaggtcaaatttcaaaaaaagaacgtgggcatgagcgtgcgcaatacactagtgttgggaccatgcttcgtcgccgaaggtcctgcaaaaagaaacagcttcggctgaagctgcttgaacatgatgccgaagacaccgttcacgaagcttcggagctacaacatatccgaagacgaagggtcgaaccgacttaaagatagaatgaccatttagcccataagggtctgagtcattgttgtaaacttttatgaggggcataattgtaattcctcatgagttgtgtcctgtgcctataaatagtgaacagtattcctttactgttcacggattcctgtaattgccaacgcatcactcgggaattattgtttgtcaaggcaaaggtataaatgtacctaaacattgtgttcagatattcaaaattcatttaacaagatatgtgaatgatgtcgtttattttca

SEQ ID NO: 72891 - DNA, 1488 bp, Zea Mays
cccggaggtccccccaatgtcggacggacgacgggttcacccacaccccctgctggcggatcccccccctcgcctgcctgcccgcgcgccaagaactccattcacctccccccacactgccaggagcttcgcccggcccccgggtgccggacggccaccaggttcacccgtgcctgctgccggcggattcccccctcccccggtggctaggagctccatctgtgttgtcgtcgtgtgctgctgggcgtctcccccaatggcgttacagcatgggcattagagaactctatgacggatggggagctactctggcgcgcgtcgttcaccccggcggtacctattctgacgcgtatggaaggttgccttcatgttcctcacgcaagggcaggtgccgctcagggggtgcctcactactacatctacgtccacgcgctatcggccaatttcaccttcgaatcaatcttctcccaacgccaaatacctagtaagactcagactcaagtttgattgattgctatttgctaccaacaaaaaataggtctcgacaagaaagttttattgtacttcagatttgtatatatgatcaacatctctgtgtgcagtatgcttgagaatagctttaaggctgagtaacaaggttcatcatttttaatgcagcaacaccaatgagccccttctcagcacaatgacattgtttacatacaaagtacgtcaaaaggcaacgtctaagtaatatgttgatacacaaagcactgatccttagagacttcatccaacgaggccagttgcgagcaacatatgggttgttctcgtgaaggaagttgaacacctcgtccaacagctgcaacagaaaagctcaaggtcaaatttcaaaaaaaggacgatgaccaatatagaagttatcttaacaatgacagactgtcatcaccacctaaaaagtatgtggcacaaagcacatataggatcaaggctagccaacttcacaaacttcaatcagattttactgaccctgaaaacgataaccattagatcgttgtgaattacatgaagaacgtgggcatgagcgtgcgcaatacactagtgttgggaccatgcttcgtcgccgaaggtcctgcaaaaagaaacagcttcggctgaagctgcttgaacatgatgccgaagacaccgttcacgaagcttcggagctacaacatatccgaagacgaagggtcgaaccgacttaaagatagaatgaccatttagcccataagggtctgagtcattgttgtaaacttttatgaggggcataattgtaattcctcatgagttgtgtcctgtgcctataaatagtgaacagtattcctttactgttcacggattcctgtaattgccaacgcatcactcgggaattattgtttgtcaaggcaaaggtataaatgtacctaaacattgtgttcagatattcaaaattcatttaacaagatatgtgaatgatgtcgtttattttca

SEQ ID NO: 72892 - DNA, 3124 bp, Zea Mays
cccggaggtccccccaatgtcggacggacgacgggttcacccacaccccctgctggcggatcccccccctcgcctgcctgcccgcgcgccaagaactccattcacctccccccacactgccaggagcttcgcccggcccccgggtgccggacggccaccaggttcacccgtgcctgctgccggcggattcccccctcccccggtggctaggagctccatctgtgttgtcgtcgtgtgctgctgggcgtctcccccaatggcgttacagcatgggcattagagaactctatgacggatggggagctactctggcgcgcgtcgttcaccccggcggtacctattctgacgcgtatggaaggttgccttcatgttcctcacgcaagggcaggtgccgctcagggggtgcctcactactacatctacgtccacgcgctatcggccaatttcaccttcgaatcaatcttctcccaacgccaaatacctagtaagattgagtatactgcaatagagacaatgaaggcagatgggtttttgcagactcagactcaagtttgattgattgctatttgctaccaacaaaaaataggtctcgacaagaaagttttattgtacttcagatttgtatatatgatcaacatctctgtgtgcagtatgcttgagaatagctttaaggctgagtaacaaggttcatcatttttaatgcagcaacaccaatgagccccttctcagcacaatgacattgtttacatgtatgcatttttttcttgctattgttatgaagaagctttatttctgaaatattgatttccaatttatgaaatattgattttaatttctgatagtacctttggtgcatttcttaacttctttattccagccttgggatactgtataatcttaccaaatgaacatagataggtctatgtttggtttatgttcattactgtcatttttctgttgtgtgctctgacaaggtggacttaacacaccctaatctactatgacaaacagagcagggcctgctgtagccaatgagttggatacagtggacacaatcacatcaattttgcggttcaattactttgcaaaaggttgtatatgcagcctctcttttgtagtcaactcttttataatggctaaacctagaatttcttttacgcaaactcgacatgatccaaatcagttgctcccagtcaggagctgatttgagtctagcgccaaatcacctcaaacttttatagcccaatttgtctctctgtgttggcatcatgagccatccgtcccattcagcttgatagcaggttatgacacagccaggcagaaacctggaaggattacccaggtctaaattggaccattgcatcagcacacatctcttgctctcgccctattttagatatattgttattttgttctcacacattcgtgctttgctccttgttttgcagttatgcatatatctaataaaagtggaaggataccatatgccacttttttctaatataagataacccttcatatttcatttttctcttaatgtaggacaactagatttatatactctccatagtagctgctcttgacagaaaagaaagcaacagaagtgccattcatacatgtcaaaagattaatttgcagcaataaattataattccacaggtctgaattgtgtgtacatacatacatgtaaaaaaataatttgcaaggacaggtaataattccacatgtccgacttggtgggttacacatcctactatccccttgtttgttttttaaataatctggtcggatgacaattctactatttgcttctatattttctccaaatctccccttctcttgttctgttacagcttgttaatatcacttgctgcagacaaagtacgtcaaaaggcaacgtctaagtaatatgttgatacacaaagcactgatccttagagacttcatccaacgagatagaaggttacatgtgcgttgttactatctcacgccaactcagacctctactggataacgttgcacaccatgcgactagacagacactaaatttgggtacctctacaaagcacttaatttattgtgcctctttcgaaaaaggttcttttctttcgtaattacctaaccactgctatactatactaacattttgaattcacatatacaaactcggcttcattactactgacggaacatccgaagcagaattttttgtgtcatggagatacaaattaaaagttagtttattgtaatttccaaaaaaacagcagagagcacttaacaaggcaagggagtatcaatttaaattatgctaccaaaattgtgttgaaaacttacttttacacaaatccttgaaattaacaaaaaaaattgtcttccttgttcactcactgagaacttgtggtgataacggtcccaggccagttgcgagcaacatatgggttgttctcgtgaaggaagttgaacacctcgtccaacagctgcaacagaaaagctcaaggtcaaatttcaaaaaaaggacgatgaccaatatagaagttatcttaacaatgacagactgtcatcaccacctaaaaagtatgtggcacaaagcacatataggatcaaggctagccaacttcacaaacttcaatcagattttactgaccctgaaaacgataaccattagatcgttgtgaattacatgaagaacgtgggcatgagcgtgcgcaatacactagtgttgggaccatgcttcgtcgccgaaggtcctgcaaaaagaaacagcttcggctgaagctgcttgaacatgatgccgaagacaccgttcacgaagcttcggagctacaacatatccgaagacgaagggtcgaaccgacttaaagatagaatgaccatttagcccataagggtctgagtcattgttgtaaacttttatgaggggcataattgtaattcctcatgagttgtgtcctgtgcctataaatagtgaacagtattcctttactgttcacggattcctgtaattgccaacgcatcactcgggaattattgtttgtcaaggcaaaggtataaatgtacctaaacattgtgttcagatattcaaaattcatttaacaagatatgtgaatgatgtcgtttattttca

SEQ ID NO: 72893 - DNA, 3481 bp, Zea Mays
cccggaggtccccccaatgtcggacggacgacgggttcacccacaccccctgctggcggatcccccccctcgcctgcctgcccgcgcgccaagaactccattcacctccccccacactgccaggagcttcgcccggcccccgggtgccggacggccaccaggttcacccgtgcctgctgccggcggattcccccctcccccggtggctaggagctccatctgtgttgtcgtcgtgtgctgctgggcgtctcccccaatggcgttacagcatgggcattagagaactctatgacggatggggagctactctggcgcgcgtcgttcaccccggcggtacctattctgacgcgtatggaaggttgccttcatgttcctcacgcaagggcaggtgccgctcagggggtgcctcactactacatctacgtccacgcgctatcggccaatttcaccttcgaatcaatcttctcccaacgccaaatacctaattgagtatactgcaatagagacaatgaaggcagatgggtttttgcagactcagactcaagtttgattgattgctatttgctaccaacaaaaaataggtctcgacaagaaagttttattgtacttcagatttgtatatatgatcaacatctctgtgtgcagtatgcttgagaatagctttaaggctgagtaacaaggtttgaagaaagttatttcattttttttctgaacatatattgtttgattcgtaatttagtttacatggtatgacatcatttatttttggtttaaactttagagtatatatgctaattgtatgctctagatcagtttaaaaaggatgcagatgtctagtcgtaataggccaatctacaaactttcatagcctgaagtttatgaacagtgaatacacatcggttctaacttctgtgtttgtaaagatgctaaaagtattctcgctctattaatgtcttcttaggtaaaatagatttgatttacatgtgccagtattttggaagcataatagacactgagcttcaaacgtttggtcaggttcatcatttttaatgcaccaacaccaatgagccccttctcagcacaatgaaattgtttacatgtatgcatttttttcttgctattgttatgaaaaaagcattatttctgaaatattgacttccaatttatgaaatattgatttccaatttctgatagtatcttcagggccagtctacaaactttcacagcctgaagtttatgaacagttaatacacatcggttctaacttctgtgtttgtaaggatgctaaaagtactcagactctgttaatgtcttcttagataaaatagatttgatttataagtgccagtattttgggagcataatagacactaagcttcaaacgtttggtcaggttcatcatttttaatgcagcaacaccaatgagccccttctcagcacaatgacattgtttacatgtatgcatttttttcttgctattgttatgaagaagctttatttctgaaatattgatttccaatttatgaaatattgattttaatttctgatagtacctttggtgcatttcttaacttctttattccagccttgggatactgtataatcttaccaaatgaacatagataggtctatgtttggtttatgttcattactgtcatttttctgttgtgtgctctgacaaggtggacttaacacaccctaatctactatgacaaacagagcagggcctgctgtagccaatgagttggatacagtggacacaatcacatcaattttgcggttcaattactttgcaaaaggttgtatatgcagcctctcttttgtagtcaactcttttataatggctaaacctagaatttcttttacgcaaactcgacatgatccaaatcagttgctcccagtcaggagctgatttgagtctagcgccaaatcacctcaaacttttatagcccaatttgtctctctgtgttggcatcatgagccatccgtcccattcagcttgatagcaggttatgacacagccaggcagaaacctggaaggattacccaggtctaaattggaccattgcatcagcacacatctcttgctctcgccctattttagatatattgttattttgttctcacacattcgtgctttgctccttgttttgcagttatgcatatatctaataaaagtggaaggataccatatgccacttttttctaatataagataacccttcatatttcatttttctcttaatgtaggacaactagatttatatactctccatagtagctgctcttgacagaaaagaaagcaacagaagtgccattcatacatgtcaaaagattaatttgcagcaataaattataattccacaggtctgaattgtgtgtacatacatacatgtaaaaaaataatttgcaaggacaggtaataattccacatgtccgacttggtgggttacacatcctactatccccttgtttgttttttaaataatctggtcggatgacaattctactatttgcttctatattttctccaaatctccccttctcttgttctgttacagcttgttaatatcacttgctgcagacaaagtacgtcaaaaggcaacgtctaagtaatatgttgatacacaaagatagaaggttacatgtgcgttgttactatctcacgccaactcagacctctactggataacgttgcacaccatgcgactagacagacactaaatttggaattttttgtgtcatggagatacaaattaaaagttagtttattgtaatttccaaaaaaacagcagagagcacttaacaaggcaagggagtatcaatttaaattatgctaccaaaattgtgttgaaaacttacttttacacaaatccttgaaattaacaaaaaaaattgtcttccttgttcactcactgagaacttgtggtgataacggtcccaggccagttgcgagcaacatatgggttgttctcgtgaaggaagttgaacacctcgtccaacagctgcaacagaaaagctcaaggtcaaatttcaaaaaaagaacgtgggcatgagcgtgcgcaatacactagtgttgggaccatgcttcgtcgccgaaggtcctgcaaaaagaaacagcttcggctgaagctgcttgaacatgatgccgaagacaccgttcacgaagcttcggagctacaacatatccgaagacgaagggtcgaaccgacttaaagatagaatgaccatttagcccataagggtctgagtcattgttgtaaacttttatgaggggcataattgtaattcctcatgagttgtgtcctgtgcctataaatagtgaacagtattcctttactgttcacggattcctgtaattgccaacgcatcactcgggaattattgtttgtcaaggcaaaggtataaatgtacctaaacattgtgttcagatattcaaaattcatttaacaagatatgtgaatgatgtcgtttattttca

SEQ ID NO: 72894 - DNA, 2476 bp, Zea Mays
cccggaggtccccccaatgtcggacggacgacgggttcacccacaccccctgctggcggatcccccccctcgcctgcctgcccgcgcgccaagaactccattcacctccccccacactgccaggagcttcgcccggcccccgggtgccggacggccaccaggttcacccgtgcctgctgccggcggattcccccctcccccggtggctaggagctccatctgtgttgtcgtcgtgtgctgctgggcgtctcccccaatggcgttacagcatgggcattagagaactctatgacggatggggagctactctggcgcgcgtcgttcaccccggcggtacctattctgacgcgtatggaaggttgccttcatgttcctcacgcaagggcaggtgccgctcagggggtgcctcactactacatctacgtccacgcgctatcggccaatttcaccttcgaatcaatcttctcccaacgccaaatacctagtaagattgagtatactgcaatagagacaatgaaggcagatgggtttttgcagactcagactcaagtttgattgattgctatttgctaccaacaaaaaataggtctcgacaagaaagttttattgtacttcagatttgtatatatgatcaacatctctgtgtgcagtatgcttgagaatagctttaaggctgagtaacaaggttcatcatttttaatgcaccaacaccaatgagccccttctcagcacaatgaaattgtttacattatcttcagggccagtctacaaactttcacagcctgaagtttatgaacagttaatacacatcggttctaacttctgtgtttgttcatcatttttaatgcagcaacaccaatgagccccttctcagcacaatgacattgtttacatgacaactagatttatatactctccatagtagctgctcttgacagaaaagaaagcaacagaagtgccattcatacatgtcaaaagattaatttgcagcaataaattataattccacaggtctgaattgtgtgtacatacatacatgtaaaaaaataatttgcaaggacaggtaataattccacatgtccgacttggtgggttacacatcctactatccccttgtttgttttttaaataatctggtcggatgacaattctactatttgcttctatattttctccaaatctccccttctcttgttctgttacagcttgttaatatcacttgctgcagacaaagtacgtcaaaaggcaacgtctaagtaatatgttgatacacaaagcactgatccttagagacttcatccaacgagatagaaggttacatgtgcgttgttactatctcacgccaactcagacctctactggataacgttgcacaccatgcgactagacagacactaaatttgggtacctctacaaagcacttaatttattgtgcctctttcgaaaaaggttcttttctttcgtaattacctaaccactgctatactatactaacattttgaattcacatatacaaactcggcttcattactactgacggaacatccgaagcagaattttttgtgtcatggagatacaaattaaaagttagtttattgtaatttccaaaaaaacagcagagagcacttaacaaggcaagggagtatcaatttaaattatgctaccaaaattgtgttgaaaacttacttttacacaaatccttgaaattaacaaaaaaaattgtcttccttgttcactcactgagaacttgtggtgataacggtcccaggccagttgcgagcaacatatgggttgttctcgtgaaggaagttgaacacctcgtccaacagctgcaacagaaaagctcaaggtcaaatttcaaaaaaaggacgatgaccaatatagaagttatcttaacaatgacagactgtcatcaccacctaaaaagtatgtggcacaaagcacatataggatcaaggctagccaacttcacaaacttcaatcagattttactgaccctgaaaacgataaccattagatcgttgtgaattacatgaagaacgtgggcatgagcgtgcgcaatacactagtgttgggaccatgcttcgtcgccgaaggtcctgcaaaaagaaacagcttcggctgaagctgcttgaacatgatgccgaagacaccgttcacgaagcttcggagctacaacatatccgaagacgaagggtcgaaccgacttaaagatagaatgaccatttagcccataagggtctgagtcattgttgtaaacttttatgaggggcataattgtaattcctcatgagttgtgtcctgtgcctataaatagtgaacagtattcctttactgttcacggattcctgtaattgccaacgcatcactcgggaattattgtttgtcaaggcaaaggtataaatgtacctaaacattgtgttcagatattcaaaattcatttaacaagatatgtgaatgatgtcgtttattttca

SEQ ID NO: 72895 - DNA, 2704 bp, Zea Mays
cccggaggtccccccaatgtcggacggacgacgggttcacccacaccccctgctggcggatcccccccctcgcctgcctgcccgcgcgccaagaactccattcacctccccccacactgccaggagcttcgcccggcccccgggtgccggacggccaccaggttcacccgtgcctgctgccggcggattcccccctcccccggtggctaggagctccatctgtgttgtcgtcgtgtgctgctgggcgtctcccccaatggcgttacagcatgggcattagagaactctatgacggatggggagctactctggcgcgcgtcgttcaccccggcggtacctattctgacgcgtatggaaggttgccttcatgttcctcacgcaagggcaggtgccgctcagggggtgcctcactactacatctacgtccacgcgctatcggccaatttcaccttcgaatcaatcttctcccaacgccaaatacctagtaagattgagtatactgcaatagagacaatgaaggcagatgggtttttgcagactcagactcaagtttgattgattgctatttgctaccaacaaaaaataggtctcgacaagaaagttttattgtacttcagatttgtatatatgatcaacatctctgtgtgcagtatgcttgagaatagctttaaggctgagtaacaaggttcatcatttttaatgcaccaacaccaatgagccccttctcagcacaatgaaattgtttacattatcttcagggccagtctacaaactttcacagcctgaagtttatgaacagttaatacacatcggttctaacttctgtgtttgttcatcatttttaatgcagcaacaccaatgagccccttctcagcacaatgacattgtttacatgtatgcatttttttcttgctattgttatgaagaagctttatttctgaaatattgatttccaatttatgaaatattgattttaatttctgatagtacctttggtgcatttcttaacttctttattccagccttgggatactgtataatcttaccaaatgaacatagataggtctatgtttggtttatgttcattactgtcatttttctgttgtgtgctctgacaaggtggacttaacacaccctaatctactatgacaaacagagcagggcctgctgtagccaatgagttggatacagtggacacaatcacatcaattttgcggttcaattactttgcaaaaggttgtatatgcagcctctcttttgtagtcaactcttttataatggctaaacctagaatttcttttacgcaaactcgacatgatccaaatcagttgctcccagtcaggagctgatttgagtctagcgccaaatcacctcaaacttttatagcccaatttgtctctctgtgttggcatcatgagccatccgtcccattcagcttgatagcaggttatgacacagccaggcagaaacctggaaggattacccaggtctaaattggaccattgcatcagcacacatctcttgctctcgccctattttagatatattgttattttgttctcacacattcgtgctttgctccttgttttgcagttatgcatatatctaataaaagtggaaggataccatatgccacttttttctaatataagataacccttcatatttcatttttctcttaatgtaggacaactagatttatatactctccatagtagctgctcttgacagaaaagaaagcaacagaagtgccattcatacatgtcaaaagattaatttgcagcaataaattataattccacaggtctgaattgtgtgtacatacatacatgtaaaaaaataatttgcaaggacaggtaataattccacatgtccgacttggtgggttacacatcctactatccccttgtttgttttttaaataatctggtcggatgacaattctactatttgcttctatattttctccaaatctccccttctcttgttctgttacagcttgttaatatcacttgctgcagacaaagtacgtcaaaaggcaacgtctaagtaatatgttgatacacaaagatagaaggttacatgtgcgttgttactatctcacgccaactcagacctctactggataacgttgcacaccatgcgactagacagacactaaatttgggccagttgcgagcaacatatgggttgttctcgtgaaggaagttgaacacctcgtccaacagctgcaacagaaaagctcaaggtcaaatttcaaaaaaagaacgtgggcatgagcgtgcgcaatacactagtgttgggaccatgcttcgtcgccgaaggtcctgcaaaaagaaacagcttcggctgaagctgcttgaacatgatgccgaagacaccgttcacgaagcttcggagctacaacatatccgaagacgaagggtcgaaccgacttaaagatagaatgaccatttagcccataagggtctgagtcattgttgtaaacttttatgaggggcataattgtaattcctcatgagttgtgtcctgtgcctataaatagtgaacagtattcctttactgttcacggattcctgtaattgccaacgcatcactcgggaattattgtttgtcaaggcaaaggtataaatgtacctaaacattgtgttcagatattcaaaattcatttaacaagatatgtgaatgatgtcgtttattttca

SEQ ID NO: 72896 - DNA, 3046 bp, Zea Mays
cccggaggtccccccaatgtcggacggacgacgggttcacccacaccccctgctggcggatcccccccctcgcctgcctgcccgcgcgccaagaactccattcacctccccccacactgccaggagcttcgcccggcccccgggtgccggacggccaccaggttcacccgtgcctgctgccggcggattcccccctcccccggtggctaggagctccatctgtgttgtcgtcgtgtgctgctgggcgtctcccccaatggcgttacagcatgggcattagagaactctatgacggatggggagctactctggcgcgcgtcgttcaccccggcggtacctattctgacgcgtatggaaggttgccttcatgttcctcacgcaagggcaggtgccgctcagggggtgcctcactactacatctacgtccacgcgctatcggccaatttcaccttcgaatcaatcttctcccaacgccaaatacctagtaagactcagactcaagtttgattgattgctatttgctaccaacaaaaaataggtctcgacaagaaagttttattgtacttcagatttgtatatatgatcaacatctctgtgtgcagtatgcttgagaatagctttaaggctgagtaacaaggttcatcatttttaatgcagcaacaccaatgagccccttctcagcacaatgacattgtttacatgtatgcatttttttcttgctattgttatgaagaagctttatttctgaaatattgatttccaatttatgaaatattgattttaatttctgatagtacctttggtgcatttcttaacttctttattccagccttgggatactgtataatcttaccaaatgaacatagataggtctatgtttggtttatgttcattactgtcatttttctgttgtgtgctctgacaaggtggacttaacacaccctaatctactatgacaaacagagcagggcctgctgtagccaatgagttggatacagtggacacaatcacatcaattttgcggttcaattactttgcaaaaggttgtatatgcagcctctcttttgtagtcaactcttttataatggctaaacctagaatttcttttacgcaaactcgacatgatccaaatcagttgctcccagtcaggagctgatttgagtctagcgccaaatcacctcaaacttttatagcccaatttgtctctctgtgttggcatcatgagccatccgtcccattcagcttgatagcaggttatgacacagccaggcagaaacctggaaggattacccaggtctaaattggaccattgcatcagcacacatctcttgctctcgccctattttagatatattgttattttgttctcacacattcgtgctttgctccttgttttgcagttatgcatatatctaataaaagtggaaggataccatatgccacttttttctaatataagataacccttcatatttcatttttctcttaatgtaggacaactagatttatatactctccatagtagctgctcttgacagaaaagaaagcaacagaagtgccattcatacatgtcaaaagattaatttgcagcaataaattataattccacaggtctgaattgtgtgtacatacatacatgtaaaaaaataatttgcaaggacaggtaataattccacatgtccgacttggtgggttacacatcctactatccccttgtttgttttttaaataatctggtcggatgacaattctactatttgcttctatattttctccaaatctccccttctcttgttctgttacagcttgttaatatcacttgctgcagacaaagtacgtcaaaaggcaacgtctaagtaatatgttgatacacaaagatagaaggttacatgtgcgttgttactatctcacgccaactcagacctctactggataacgttgcacaccatgcgactagacagacactaaatttgggtacctctacaaagcacttaatttattgtgcctctttcgaaaaaggttcttttctttcgtaattacctaaccactgctatactatactaacattttgaattcacatatacaaactcggcttcattactactgacggaacatccgaagcagaattttttgtgtcatggagatacaaattaaaagttagtttattgtaatttccaaaaaaacagcagagagcacttaacaaggcaagggagtatcaatttaaattatgctaccaaaattgtgttgaaaacttacttttacacaaatccttgaaattaacaaaaaaaattgtcttccttgttcactcactgagaacttgtggtgataacggtcccaggccagttgcgagcaacatatgggttgttctcgtgaaggaagttgaacacctcgtccaacagctgcaacagaaaagctcaaggtcaaatttcaaaaaaaggacgatgaccaatatagaagttatcttaacaatgacagactgtcatcaccacctaaaaagtatgtggcacaaagcacatataggatcaaggctagccaacttcacaaacttcaatcagattttactgaccctgaaaacgataaccattagatcgttgtgaattacatgaagaacgtgggcatgagcgtgcgcaatacactagtgttgggaccatgcttcgtcgccgaaggtcctgcaaaaagaaacagcttcggctgaagctgcttgaacatgatgccgaagacaccgttcacgaagcttcggagctacaacatatccgaagacgaagggtcgaaccgacttaaagatagaatgaccatttagcccataagggtctgagtcattgttgtaaacttttatgaggggcataattgtaattcctcatgagttgtgtcctgtgcctataaatagtgaacagtattcctttactgttcacggattcctgtaattgccaacgcatcactcgggaattattgtttgtcaaggcaaaggtataaatgtacctaaacattgtgttcagatattcaaaattcatttaacaagatatgtgaatgatgtcgtttattttca

SEQ ID NO: 72897 - DNA, 3076 bp, Zea Mays
cccggaggtccccccaatgtcggacggacgacgggttcacccacaccccctgctggcggatcccccccctcgcctgcctgcccgcgcgccaagaactccattcacctccccccacactgccaggagcttcgcccggcccccgggtgccggacggccaccaggttcacccgtgcctgctgccggcggattcccccctcccccggtggctaggagctccatctgtgttgtcgtcgtgtgctgctgggcgtctcccccaatggcgttacagcatgggcattagagaactctatgacggatggggagctactctggcgcgcgtcgttcaccccggcggtacctattctgacgcgtatggaaggttgccttcatgttcctcacgcaagggcaggtgccgctcagggggtgcctcactactacatctacgtccacgcgctatcggccaatttcaccttcgaatcaatcttctcccaacgccaaatacctagtaagactcagactcaagtttgattgattgctatttgctaccaacaaaaaataggtctcgacaagaaagttttattgtacttcagatttgtatatatgatcaacatctctgtgtgcagtatgcttgagaatagctttaaggctgagtaacaaggttcatcatttttaatgcagcaacaccaatgagccccttctcagcacaatgacattgtttacatgtatgcatttttttcttgctattgttatgaagaagctttatttctgaaatattgatttccaatttatgaaatattgattttaatttctgatagtacctttggtgcatttcttaacttctttattccagccttgggatactgtataatcttaccaaatgaacatagataggtctatgtttggtttatgttcattactgtcatttttctgttgtgtgctctgacaaggtggacttaacacaccctaatctactatgacaaacagagcagggcctgctgtagccaatgagttggatacagtggacacaatcacatcaattttgcggttcaattactttgcaaaaggttgtatatgcagcctctcttttgtagtcaactcttttataatggctaaacctagaatttcttttacgcaaactcgacatgatccaaatcagttgctcccagtcaggagctgatttgagtctagcgccaaatcacctcaaacttttatagcccaatttgtctctctgtgttggcatcatgagccatccgtcccattcagcttgatagcaggttatgacacagccaggcagaaacctggaaggattacccaggtctaaattggaccattgcatcagcacacatctcttgctctcgccctattttagatatattgttattttgttctcacacattcgtgctttgctccttgttttgcagttatgcatatatctaataaaagtggaaggataccatatgccacttttttctaatataagataacccttcatatttcatttttctcttaatgtaggacaactagatttatatactctccatagtagctgctcttgacagaaaagaaagcaacagaagtgccattcatacatgtcaaaagattaatttgcagcaataaattataattccacaggtctgaattgtgtgtacatacatacatgtaaaaaaataatttgcaaggacaggtaataattccacatgtccgacttggtgggttacacatcctactatccccttgtttgttttttaaataatctggtcggatgacaattctactatttgcttctatattttctccaaatctccccttctcttgttctgttacagcttgttaatatcacttgctgcagacaaagtacgtcaaaaggcaacgtctaagtaatatgttgatacacaaagcactgatccttagagacttcatccaacgagatagaaggttacatgtgcgttgttactatctcacgccaactcagacctctactggataacgttgcacaccatgcgactagacagacactaaatttgggtacctctacaaagcacttaatttattgtgcctctttcgaaaaaggttcttttctttcgtaattacctaaccactgctatactatactaacattttgaattcacatatacaaactcggcttcattactactgacggaacatccgaagcagaattttttgtgtcatggagatacaaattaaaagttagtttattgtaatttccaaaaaaacagcagagagcacttaacaaggcaagggagtatcaatttaaattatgctaccaaaattgtgttgaaaacttacttttacacaaatccttgaaattaacaaaaaaaattgtcttccttgttcactcactgagaacttgtggtgataacggtcccaggccagttgcgagcaacatatgggttgttctcgtgaaggaagttgaacacctcgtccaacagctgcaacagaaaagctcaaggtcaaatttcaaaaaaaggacgatgaccaatatagaagttatcttaacaatgacagactgtcatcaccacctaaaaagtatgtggcacaaagcacatataggatcaaggctagccaacttcacaaacttcaatcagattttactgaccctgaaaacgataaccattagatcgttgtgaattacatgaagaacgtgggcatgagcgtgcgcaatacactagtgttgggaccatgcttcgtcgccgaaggtcctgcaaaaagaaacagcttcggctgaagctgcttgaacatgatgccgaagacaccgttcacgaagcttcggagctacaacatatccgaagacgaagggtcgaaccgacttaaagatagaatgaccatttagcccataagggtctgagtcattgttgtaaacttttatgaggggcataattgtaattcctcatgagttgtgtcctgtgcctataaatagtgaacagtattcctttactgttcacggattcctgtaattgccaacgcatcactcgggaattattgtttgtcaaggcaaaggtataaatgtacctaaacattgtgttcagatattcaaaattcatttaacaagatatgtgaatgatgtcgtttattttca

SEQ ID NO: 72898 - DNA, 3403 bp, Zea Mays
cccggaggtccccccaatgtcggacggacgacgggttcacccacaccccctgctggcggatcccccccctcgcctgcctgcccgcgcgccaagaactccattcacctccccccacactgccaggagcttcgcccggcccccgggtgccggacggccaccaggttcacccgtgcctgctgccggcggattcccccctcccccggtggctaggagctccatctgtgttgtcgtcgtgtgctgctgggcgtctcccccaatggcgttacagcatgggcattagagaactctatgacggatggggagctactctggcgcgcgtcgttcaccccggcggtacctattctgacgcgtatggaaggttgccttcatgttcctcacgcaagggcaggtgccgctcagggggtgcctcactactacatctacgtccacgcgctatcggccaatttcaccttcgaatcaatcttctcccaacgccaaatacctagtaagattgagtatactgcaatagagacaatgaaggcagatgggtttttgcagactcagactcaagtttgattgattgctatttgctaccaacaaaaaataggtctcgacaagaaagttttattgtacttcagatttgtatatatgatcaacatctctgtgtgcagtatgcttgagaatagctttaaggctgagtaacaaggttcatcatttttaatgcaccaacaccaatgagccccttctcagcacaatgaaattgtttacattatcttcagggccagtctacaaactttcacagcctgaagtttatgaacagttaatacacatcggttctaacttctgtgtttgtaaggatgctaaaagtactcagactctgttaatgtcttcttagataaaatagatttgatttataagtgccagtattttgggagcataatagacactaagcttcaaacgtttggtcaggttcatcatttttaatgcagcaacaccaatgagccccttctcagcacaatgacattgtttacatgtatgcatttttttcttgctattgttatgaagaagctttatttctgaaatattgatttccaatttatgaaatattgattttaatttctgatagtacctttggtgcatttcttaacttctttattccagccttgggatactgtataatcttaccaaatgaacatagataggtctatgtttggtttatgttcattactgtcatttttctgttgtgtgctctgacaaggtggacttaacacaccctaatctactatgacaaacagagcagggcctgctgtagccaatgagttggatacagtggacacaatcacatcaattttgcggttcaattactttgcaaaaggttgtatatgcagcctctcttttgtagtcaactcttttataatggctaaacctagaatttcttttacgcaaactcgacatgatccaaatcagttgctcccagtcaggagctgatttgagtctagcgccaaatcacctcaaacttttatagcccaatttgtctctctgtgttggcatcatgagccatccgtcccattcagcttgatagcaggttatgacacagccaggcagaaacctggaaggattacccaggtctaaattggaccattgcatcagcacacatctcttgctctcgccctattttagatatattgttattttgttctcacacattcgtgctttgctccttgttttgcagttatgcatatatctaataaaagtggaaggataccatatgccacttttttctaatataagataacccttcatatttcatttttctcttaatgtaggacaactagatttatatactctccatagtagctgctcttgacagaaaagaaagcaacagaagtgccattcatacatgtcaaaagattaatttgcagcaataaattataattccacaggtctgaattgtgtgtacatacatacatgtaaaaaaataatttgcaaggacaggtaataattccacatgtccgacttggtgggttacacatcctactatccccttgtttgttttttaaataatctggtcggatgacaattctactatttgcttctatattttctccaaatctccccttctcttgttctgttacagcttgttaatatcacttgctgcagacaaagtacgtcaaaaggcaacgtctaagtaatatgttgatacacaaagatagaaggttacatgtgcgttgttactatctcacgccaactcagacctctactggataacgttgcacaccatgcgactagacagacactaaatttgggtacctctacaaagcacttaatttattgtgcctctttcgaaaaaggttcttttctttcgtaattacctaaccactgctatactatactaacattttgaattcacatatacaaactcggcttcattactactgacggaacatccgaagcagaattttttgtgtcatggagatacaaattaaaagttagtttattgtaatttccaaaaaaacagcagagagcacttaacaaggcaagggagtatcaatttaaattatgctaccaaaattgtgttgaaaacttacttttacacaaatccttgaaattaacaaaaaaaattgtcttccttgttcactcactgagaacttgtggtgataacggtcccaggccagttgcgagcaacatatgggttgttctcgtgaaggaagttgaacacctcgtccaacagctgcaacagaaaagctcaaggtcaaatttcaaaaaaaggcacaacacatgtttgcatattcccgtgctctaaaagaatacagaggacgatgaccaatatagaagttatcttaacaatgacagactgtcatcaccacctaaaaagtatgtggcacaaagcacatataggatcaaggctagccaacttcacaaacttcaatcagattttactgaccctgaaaacgataaccattagatcgttgtgaattacatgaagaacgtgggcatgagcgtgcgcaatacactagtgttgggaccatgcttcgtcgccgaaggtcctgcaaaaagaaacagcttcggctgaagctgcttgaacatgatgccgaagacaccgttcacgaagcttcggagctacaacatatccgaagacgaagggtcgaaccgacttaaagatagaatgaccatttagcccataagggtctgagtcattgttgtaaacttttatgaggggcataattgtaattcctcatgagttgtgtcctgtgcctataaatagtgaacagtattcctttactgttcacggattcctgtaattgccaacgcatcactcgggaattattgtttgtcaaggcaaaggtataaatgtacctaaacattgtgttcagatattcaaaattcatttaacaagatatgtgaatgatgtcgtttattttca

SEQ ID NO: 72899 - DNA, 2897 bp, Zea Mays
cccggaggtccccccaatgtcggacggacgacgggttcacccacaccccctgctggcggatcccccccctcgcctgcctgcccgcgcgccaagaactccattcacctccccccacactgccaggagcttcgcccggcccccgggtgccggacggccaccaggttcacccgtgcctgctgccggcggattcccccctcccccggtggctaggagctccatctgtgttgtcgtcgtgtgctgctgggcgtctcccccaatggcgttacagcatgggcattagagaactctatgacggatggggagctactctggcgcgcgtcgttcaccccggcggtacctattctgacgcgtatggaaggttgccttcatgttcctcacgcaagggcaggtgccgctcagggggtgcctcactactacatctacgtccacgcgctatcggccaatttcaccttcgaatcaatcttctcccaacgccaaatacctagtaagattgagtatactgcaatagagacaatgaaggcagatgggtttttgcagactcagactcaagtttgattgattgctatttgctaccaacaaaaaataggtctcgacaagaaagttttattgtacttcagatttgtatatatgatcaacatctctgtgtgcagtatgcttgagaatagctttaaggctgagtaacaaggttcatcatttttaatgcaccaacaccaatgagccccttctcagcacaatgaaattgtttacattatcttcagggccagtctacaaactttcacagcctgaagtttatgaacagttaatacacatcggttctaacttctgtgtttgtaaggatgctaaaagtactcagactctgttaatgtcttcttagataaaatagatttgatttataagtgccagtattttgggagcataatagacactaagcttcaaacgtttggtcaggttcatcatttttaatgcagcaacaccaatgagccccttctcagcacaatgacattgtttacatgtatgcatttttttcttgctattgttatgaagaagctttatttctgaaatattgatttccaatttatgaaatattgattttaatttctgatagtacctttggtgcatttcttaacttctttattccagccttgggatactgtataatcttaccaaatgaacatagataggtctatgtttggtttatgttcattactgtcatttttctgttgtgtgctctgacaaggtggacttaacacaccctaatctactatgacaaacagagcagggcctgctgtagccaatgagttggatacagtggacacaatcacatcaattttgcggttcaattactttgcaaaaggttgtatatgcagcctctcttttgtagtcaactcttttataatggctaaacctagaatttcttttacgcaaactcgacatgatccaaatcagttgctcccagtcaggagctgatttgagtctagcgccaaatcacctcaaacttttatagcccaatttgtctctctgtgttggcatcatgagccatccgtcccattcagcttgatagcaggttatgacacagccaggcagaaacctggaaggattacccaggtctaaattggaccattgcatcagcacacatctcttgctctcgccctattttagatatattgttattttgttctcacacattcgtgctttgctccttgttttgcagttatgcatatatctaataaaagtggaaggataccatatgccacttttttctaatataagataacccttcatatttcatttttctcttaatgtaggacaactagatttatatactctccatagtagctgctcttgacagaaaagaaagcaacagaagtgccattcatacatgtcaaaagattaatttgcagcaataaattataattccacaggtctgaattgtgtgtacatacatacatgtaaaaaaataatttgcaaggacaggtaataattccacatgtccgacttggtgggttacacatcctactatccccttgtttgttttttaaataatctggtcggatgacaattctactatttgcttctatattttctccaaatctccccttctcttgttctgttacagcttgttaatatcacttgctgcagacaaagtacgtcaaaaggcaacgtctaagtaatatgttgatacacaaagcactgatccttagagacttcatccaacgagatagaaggttacatgtgcgttgttactatctcacgccaactcagacctctactggataacgttgcacaccatgcgactagacagacactaaatttgggtacctctacaaagcacttaatttattgtgcctctttcgaaaaaggccagttgcgagcaacatatgggttgttctcgtgaaggaagttgaacacctcgtccaacagctgcaacagaaaagctcaaggtcaaatttcaaaaaaagaacgtgggcatgagcgtgcgcaatacactagtgttgggaccatgcttcgtcgccgaaggtcctgcaaaaagaaacagcttcggctgaagctgcttgaacatgatgccgaagacaccgttcacgaagcttcggagctacaacatatccgaagacgaagggtcgaaccgacttaaagatagaatgaccatttagcccataagggtctgagtcattgttgtaaacttttatgaggggcataattgtaattcctcatgagttgtgtcctgtgcctataaatagtgaacagtattcctttactgttcacggattcctgtaattgccaacgcatcactcgggaattattgtttgtcaaggcaaaggtataaatgtacctaaacattgtgttcagatattcaaaattcatttaacaagatatgtgaatgatgtcgtttattttca

SEQ ID NO: 72900 - DNA, 2059 bp, Zea Mays
cccggaggtccccccaatgtcggacggacgacgggttcacccacaccccctgctggcggatcccccccctcgcctgcctgcccgcgcgccaagaactccattcacctccccccacactgccaggagcttcgcccggcccccgggtgccggacggccaccaggttcacccgtgcctgctgccggcggattcccccctcccccggtggctaggagctccatctgtgttgtcgtcgtgtgctgctgggcgtctcccccaatggcgttacagcatgggcattagagaactctatgacggatggggagctactctggcgcgcgtcgttcaccccggcggtacctattctgacgcgtatggaaggttgccttcatgttcctcacgcaagggcaggtgccgctcagggggtgcctcactactacatctacgtccacgcgctatcggccaatttcaccttcgaatcaatcttctcccaacgccaaatacctagtaagattgagtatactgcaatagagacaatgaaggcagatgggtttttgcagactcagactcaagtttgattgattgctatttgctaccaacaaaaaataggtctcgacaagaaagttttattgtacttcagatttgtatatatgatcaacatctctgtgtgcagtatgcttgagaatagctttaaggctgagtaacaaggttcatcatttttaatgcaccaacaccaatgagccccttctcagcacaatgaaattgtttacattatcttcagggccagtctacaaactttcacagcctgaagtttatgaacagttaatacacatcggttctaacttctgtgtttgtaaggatgctaaaagtactcagactctgttaatgtcttcttagataaaatagatttgatttataagtgccagtattttgggagcataatagacactaagcttcaaacgtttggtcaggttcatcatttttaatgcagcaacaccaatgagccccttctcagcacaatgacattgtttacatacaaagtacgtcaaaaggcaacgtctaagtaatatgttgatacacaaagatagaaggttacatgtgcgttgttactatctcacgccaactcagacctctactggataacgttgcacaccatgcgactagacagacactaaatttgggtacctctacaaagcacttaatttattgtgcctctttcgaaaaaggttcttttctttcgtaattacctaaccactgctatactatactaacattttgaattcacatatacaaactcggcttcattactactgacggaacatccgaagcagaattttttgtgtcatggagatacaaattaaaagttagtttattgtaatttccaaaaaaacagcagagagcacttaacaaggcaagggagtatcaatttaaattatgctaccaaaattgtgttgaaaacttacttttacacaaatccttgaaattaacaaaaaaaattgtcttccttgttcactcactgagaacttgtggtgataacggtcccaggccagttgcgagcaacatatgggttgttctcgtgaaggaagttgaacacctcgtccaacagctgcaacagaaaagctcaaggtcaaatttcaaaaaaagaacgtgggcatgagcgtgcgcaatacactagtgttgggaccatgcttcgtcgccgaaggtcctgcaaaaagaaacagcttcggctgaagctgcttgaacatgatgccgaagacaccgttcacgaagcttcggagctacaacatatccgaagacgaagggtcgaaccgacttaaagatagaatgaccatttagcccataagggtctgagtcattgttgtaaacttttatgaggggcataattgtaattcctcatgagttgtgtcctgtgcctataaatagtgaacagtattcctttactgttcacggattcctgtaattgccaacgcatcactcgggaattattgtttgtcaaggcaaaggtataaatgtacctaaacattgtgttcagatattcaaaattcatttaacaagatatgtgaatgatgtcgtttattttca

SEQ ID NO: 72901 - DNA, 3953 bp, Zea Mays
cccggaggtccccccaatgtcggacggacgacgggttcacccacaccccctgctggcggatcccccccctcgcctgcctgcccgcgcgccaagaactccattcacctccccccacactgccaggagcttcgcccggcccccgggtgccggacggccaccaggttcacccgtgcctgctgccggcggattcccccctcccccggtggctaggagctccatctgtgttgtcgtcgtgtgctgctgggcgtctcccccaatggcgttacagcatgggcattagagaactctatgacggatggggagctactctggcgcgcgtcgttcaccccggcggtacctattctgacgcgtatggaaggttgccttcatgttcctcacgcaagggcaggtgccgctcagggggtgcctcactactacatctacgtccacgcgctatcggccaatttcaccttcgaatcaatcttctcccaacgccaaatacctactttcaaaaaagcccttcacgggcctgataaatcaaggattgattttatgagagaaataggtgccacaaatttctaccagaatttctacatattcatgaatgattttattgttgctaatgaatattgtaatagattgagtatactgcaatagagacaatgaaggcagatgggtttttgcagactcagactcaagtttgattgattgctatttgctaccaacaaaaaataggtctcgacaagaaagttttattgtacttcagatttgtatatatgatcaacatctctgtgtgcagtatgcttgagaatagctttaaggctgagtaacaaggttcatcatttttaatgcaccaacaccaatgagccccttctcagcacaatgaaattgtttacattatcttcagggccagtctacaaactttcacagcctgaagtttatgaacagttaatacacatcggttctaacttctgtgtttgtaaggatgctaaaagtactcagactctgttaatgtcttcttagataaaatagatttgatttataagtgccagtattttgggagcataatagacactaagcttcaaacgtttggtcaggttcatcatttttaatgcagcaacaccaatgagccccttctcagcacaatgacattgtttacatgtatgcatttttttcttgctattgttatgaagaagctttatttctgaaatattgatttccaatttatgaaatattgattttaatttctgatagtacctttggtgcatttcttaacttctttattccagccttgggatactgtataatcttaccaaatgaacatagataggtctatgtttggtttatgttcattactgtcatttttctgttgtgtgctctgacaaggtggacttaacacaccctaatctactatgacaaacagagcagggcctgctgtagccaatgagttggatacagtggacacaatcacatcaattttgcggttcaattactttgcaaaaggttgtatatgcagcctctcttttgtagtcaactcttttataatggctaaacctagaatttcttttacgcaaactcgacatgatccaaatcagttgctcccagtcaggagctgatttgagtctagcgccaaatcacctcaaacttttatagcccaatttgtctctctgtgttggcatcatgagccatccgtcccattcagcttgatagcaggttatgacacagccaggcagaaacctggaaggattacccaggtctaaattggaccattgcatcagcacacatctcttgctctcgccctattttagatatattgttattttgttctcacacattcgtgctttgctccttgttttgcagttatgcatatatctaataaaagtggaaggataccatatgccacttttttctaatataagataacccttcatatttcatttttctcttaatgtaggacaactagatttatatactctccatagtagctgctcttgacagaaaagaaagcaacagaagtgccattcatacatgtcaaaagattaatttgcagcaataaattataattccacaggtctgaattgtgtgtacatacatacatgtaaaaaaataatttgcaaggacaggtaataattccacatgtccgacttggtgggttacacatcctactatccccttgtttgttttttaaataatctggtcggatgacaattctactatttgcttctatattttctccaaatctccccttctcttgttctgttacagcttgttaatatcacttgctgcagacaaagtacgtcaaaaggcaacgtctaagtaatatgttgatacacaaaggtaatccttctcatagcttctgctccaacatgttttgcgaatttattgcattattggtgtataaaaggactgaagttgtgttttgaatactatatgacaacacctttttgggttgaaatgtgtggaataatagcactgatccttagagacttcatccaacgaggtaattggcacttgccaaagcctgttctccatacgtgtaagactatttgtccgctgcatgatttgtgaagactaacattttattgtaccacttagtttatgtcttgcatgtgcattatgttatgtttatttctatataagtagtgttgatatcgccacttggattagcttcgttgagagaacattttataggtagtaggtaacacttacatcaccttcctttgcttacacgttgacagaacactttataggtagcagttgcattagcatgttttccttacatgtaaggcatcaccgatccgctgcatgatatgtggtgataatatgttatttagcctcttgaatacttaaacccattgctttgtgtgttccatgtgctttataatctatttatttaactatttacatatactgagagattactaggtcaacaatagatttattctatttacaataaccttctcttgcataacgcagatagaaggttacatgtgcgttgttactatctcacgccaactcagacctctactggataacgttgcacaccatgcgactagacagacactaaatttgggtacctctacaaagcacttaatttattgtgcctctttcgaaaaaggttcttttctttcgtaattacctaaccactgctatactatactaacattttgaattcacatatacaaactcggcttcattactactgacggaacatccgaagcagaattttttgtgtcatggagatacaaattaaaagttagtttattgtaatttccaaaaaaacagcagagagcacttaacaaggcaagggagtatcaatttaaattatgctaccaaaattgtgttgaaaacttacttttacacaaatccttgaaattaacaaaaaaaattgtcttccttgttcactcactgagaacttgtggtgataacggtcccaggccagttgcgagcaacatatgggttgttctcgtgaaggaagttgaacacctcgtccaacagctgcaacagaaaagctcaaggtcaaatttcaaaaaaagaacgtgggcatgagcgtgcgcaatacactagtgttgggaccatgcttcgtcgccgaaggtcctgcaaaaagaaacagcttcggctgaagctgcttgaacatgatgccgaagacaccgttcacgaagcttcggagctacaacatatccgaagacgaagggtcgaaccgacttaaagatagaatgaccatttagcccataagggtctgagtcattgttgtaaacttttatgaggggcataattgtaattcctcatgagttgtgtcctgtgcctataaatagtgaacagtattcctttactgttcacggattcctgtaattgccaacgcatcactcgggaattattgtttgtcaaggcaaaggtataaatgtacctaaacattgtgttcagatattcaaaattcatttaacaagatatgtgaatgatgtcgtttattttca

SEQ ID NO: 72902 - DNA, 1600 bp, Zea Mays
cccggaggtccccccaatgtcggacggacgacgggttcacccacaccccctgctggcggatcccccccctcgcctgcctgcccgcgcgccaagaactccattcacctccccccacactgccaggagcttcgcccggcccccgggtgccggacggccaccaggttcacccgtgcctgctgccggcggattcccccctcccccggtggctaggagctccatctgtgttgtcgtcgtgtgctgctgggcgtctcccccaatggcgttacagcatgggcattagagaactctatgacggatggggagctactctggcgcgcgtcgttcaccccggcggtacctattctgacgcgtatggaaggttgccttcatgttcctcacgcaagggcaggtgccgctcagggggtgcctcactactacatctacgtccacgcgctatcggccaatttcaccttcgaatcaatcttctcccaacgccaaatacctagtaagactcagactcaagtttgattgattgctatttgctaccaacaaaaaataggtctcgacaagaaagttttattgtacttcagatttgtatatatgatcaacatctctgtgtgcagtatgcttgagaatagctttaaggctgagtaacaaggttcatcatttttaatgcagcaacaccaatgagccccttctcagcacaatgacattgtttacatacaaagtacgtcaaaaggcaacgtctaagtaatatgttgatacacaaagatagaaggttacatgtgcgttgttactatctcacgccaactcagacctctactggataacgttgcacaccatgcgactagacagacactaaatttgggtacctctacaaagcacttaatttattgtgcctctttcgaaaaaggccagttgcgagcaacatatgggttgttctcgtgaaggaagttgaacacctcgtccaacagctgcaacagaaaagctcaaggtcaaatttcaaaaaaaggacgatgaccaatatagaagttatcttaacaatgacagactgtcatcaccacctaaaaagtatgtggcacaaagcacatataggatcaaggctagccaacttcacaaacttcaatcagattttactgaccctgaaaacgataaccattagatcgttgtgaattacatgaagaacgtgggcatgagcgtgcgcaatacactagtgttgggaccatgcttcgtcgccgaaggtcctgcaaaaagaaacagcttcggctgaagctgcttgaacatgatgccgaagacaccgttcacgaagcttcggagctacaacatatccgaagacgaagggtcgaaccgacttaaagatagaatgaccatttagcccataagggtctgagtcattgttgtaaacttttatgaggggcataattgtaattcctcatgagttgtgtcctgtgcctataaatagtgaacagtattcctttactgttcacggattcctgtaattgccaacgcatcactcgggaattattgtttgtcaaggcaaaggtataaatgtacctaaacattgtgttcagatattcaaaattcatttaacaagatatgtgaatgatgtcgtttattttca

SEQ ID NO: 72903 - DNA, 3269 bp, Zea Mays
cccggaggtccccccaatgtcggacggacgacgggttcacccacaccccctgctggcggatcccccccctcgcctgcctgcccgcgcgccaagaactccattcacctccccccacactgccaggagcttcgcccggcccccgggtgccggacggccaccaggttcacccgtgcctgctgccggcggattcccccctcccccggtggctaggagctccatctgtgttgtcgtcgtgtgctgctgggcgtctcccccaatggcgttacagcatgggcattagagaactctatgacggatggggagctactctggcgcgcgtcgttcaccccggcggtacctattctgacgcgtatggaaggttgccttcatgttcctcacgcaagggcaggtgccgctcagggggtgcctcactactacatctacgtccacgcgctatcggccaatttcaccttcgaatcaatcttctcccaacgccaaatacctagtaagattgagtatactgcaatagagacaatgaaggcagatgggtttttgcagactcagactcaagtttgattgattgctatttgctaccaacaaaaaataggtctcgacaagaaagttttattgtacttcagatttgtatatatgatcaacatctctgtgtgcagtatgcttgagaatagctttaaggctgagtaacaaggttcatcatttttaatgcaccaacaccaatgagccccttctcagcacaatgaaattgtttacattatcttcagggccagtctacaaactttcacagcctgaagtttatgaacagttaatacacatcggttctaacttctgtgtttgttcatcatttttaatgcagcaacaccaatgagccccttctcagcacaatgacattgtttacatgtatgcatttttttcttgctattgttatgaagaagctttatttctgaaatattgatttccaatttatgaaatattgattttaatttctgatagtacctttggtgcatttcttaacttctttattccagccttgggatactgtataatcttaccaaatgaacatagataggtctatgtttggtttatgttcattactgtcatttttctgttgtgtgctctgacaaggtggacttaacacaccctaatctactatgacaaacagagcagggcctgctgtagccaatgagttggatacagtggacacaatcacatcaattttgcggttcaattactttgcaaaaggttgtatatgcagcctctcttttgtagtcaactcttttataatggctaaacctagaatttcttttacgcaaactcgacatgatccaaatcagttgctcccagtcaggagctgatttgagtctagcgccaaatcacctcaaacttttatagcccaatttgtctctctgtgttggcatcatgagccatccgtcccattcagcttgatagcaggttatgacacagccaggcagaaacctggaaggattacccaggtctaaattggaccattgcatcagcacacatctcttgctctcgccctattttagatatattgttattttgttctcacacattcgtgctttgctccttgttttgcagttatgcatatatctaataaaagtggaaggataccatatgccacttttttctaatataagataacccttcatatttcatttttctcttaatgtaggacaactagatttatatactctccatagtagctgctcttgacagaaaagaaagcaacagaagtgccattcatacatgtcaaaagattaatttgcagcaataaattataattccacaggtctgaattgtgtgtacatacatacatgtaaaaaaataatttgcaaggacaggtaataattccacatgtccgacttggtgggttacacatcctactatccccttgtttgttttttaaataatctggtcggatgacaattctactatttgcttctatattttctccaaatctccccttctcttgttctgttacagcttgttaatatcacttgctgcagacaaagtacgtcaaaaggcaacgtctaagtaatatgttgatacacaaagcactgatccttagagacttcatccaacgagatagaaggttacatgtgcgttgttactatctcacgccaactcagacctctactggataacgttgcacaccatgcgactagacagacactaaatttgggtacctctacaaagcacttaatttattgtgcctctttcgaaaaaggttcttttctttcgtaattacctaaccactgctatactatactaacattttgaattcacatatacaaactcggcttcattactactgacggaacatccgaagcagaattttttgtgtcatggagatacaaattaaaagttagtttattgtaatttccaaaaaaacagcagagagcacttaacaaggcaagggagtatcaatttaaattatgctaccaaaattgtgttgaaaacttacttttacacaaatccttgaaattaacaaaaaaaattgtcttccttgttcactcactgagaacttgtggtgataacggtcccaggccagttgcgagcaacatatgggttgttctcgtgaaggaagttgaacacctcgtccaacagctgcaacagaaaagctcaaggtcaaatttcaaaaaaaggacgatgaccaatatagaagttatcttaacaatgacagactgtcatcaccacctaaaaagtatgtggcacaaagcacatataggatcaaggctagccaacttcacaaacttcaatcagattttactgaccctgaaaacgataaccattagatcgttgtgaattacatgaagaacgtgggcatgagcgtgcgcaatacactagtgttgggaccatgcttcgtcgccgaaggtcctgcaaaaagaaacagcttcggctgaagctgcttgaacatgatgccgaagacaccgttcacgaagcttcggagctacaacatatccgaagacgaagggtcgaaccgacttaaagatagaatgaccatttagcccataagggtctgagtcattgttgtaaacttttatgaggggcataattgtaattcctcatgagttgtgtcctgtgcctataaatagtgaacagtattcctttactgttcacggattcctgtaattgccaacgcatcactcgggaattattgtttgtcaaggcaaaggtataaatgtacctaaacattgtgttcagatattcaaaattcatttaacaagatatgtgaatgatgtcgtttattttca

SEQ ID NO: 72904 - DNA, 1997 bp, Zea Mays
cccggaggtccccccaatgtcggacggacgacgggttcacccacaccccctgctggcggatcccccccctcgcctgcctgcccgcgcgccaagaactccattcacctccccccacactgccaggagcttcgcccggcccccgggtgccggacggccaccaggttcacccgtgcctgctgccggcggattcccccctcccccggtggctaggagctccatctgtgttgtcgtcgtgtgctgctgggcgtctcccccaatggcgttacagcatgggcattagagaactctatgacggatggggagctactctggcgcgcgtcgttcaccccggcggtacctattctgacgcgtatggaaggttgccttcatgttcctcacgcaagggcaggtgccgctcagggggtgcctcactactacatctacgtccacgcgctatcggccaatttcaccttcgaatcaatcttctcccaacgccaaatacctagtaagattgagtatactgcaatagagacaatgaaggcagatgggtttttgcagactcagactcaagtttgattgattgctatttgctaccaacaaaaaataggtctcgacaagaaagttttattgtacttcagatttgtatatatgatcaacatctctgtgtgcagtatgcttgagaatagctttaaggctgagtaacaaggttcatcatttttaatgcagcaacaccaatgagccccttctcagcacaatgacattgtttacatacaaagtacgtcaaaaggcaacgtctaagtaatatgttgatacacaaagcactgatccttagagacttcatccaacgagatagaaggttacatgtgcgttgttactatctcacgccaactcagacctctactggataacgttgcacaccatgcgactagacagacactaaatttgggtacctctacaaagcacttaatttattgtgcctctttcgaaaaaggttcttttctttcgtaattacctaaccactgctatactatactaacattttgaattcacatatacaaactcggcttcattactactgacggaacatccgaagcagaattttttgtgtcatggagatacaaattaaaagttagtttattgtaatttccaaaaaaacagcagagagcacttaacaaggcaagggagtatcaatttaaattatgctaccaaaattgtgttgaaaacttacttttacacaaatccttgaaattaacaaaaaaaattgtcttccttgttcactcactgagaacttgtggtgataacggtcccaggccagttgcgagcaacatatgggttgttctcgtgaaggaagttgaacacctcgtccaacagctgcaacagaaaagctcaaggtcaaatttcaaaaaaaggacgatgaccaatatagaagttatcttaacaatgacagactgtcatcaccacctaaaaagtatgtggcacaaagcacatataggatcaaggctagccaacttcacaaacttcaatcagattttactgaccctgaaaacgataaccattagatcgttgtgaattacatgaagaacgtgggcatgagcgtgcgcaatacactagtgttgggaccatgcttcgtcgccgaaggtcctgcaaaaagaaacagcttcggctgaagctgcttgaacatgatgccgaagacaccgttcacgaagcttcggagctacaacatatccgaagacgaagggtcgaaccgacttaaagatagaatgaccatttagcccataagggtctgagtcattgttgtaaacttttatgaggggcataattgtaattcctcatgagttgtgtcctgtgcctataaatagtgaacagtattcctttactgttcacggattcctgtaattgccaacgcatcactcgggaattattgtttgtcaaggcaaaggtataaatgtacctaaacattgtgttcagatattcaaaattcatttaacaagatatgtgaatgatgtcgtttattttca

SEQ ID NO: 72905 - DNA, 1796 bp, Zea Mays
cccggaggtccccccaatgtcggacggacgacgggttcacccacaccccctgctggcggatcccccccctcgcctgcctgcccgcgcgccaagaactccattcacctccccccacactgccaggagcttcgcccggcccccgggtgccggacggccaccaggttcacccgtgcctgctgccggcggattcccccctcccccggtggctaggagctccatctgtgttgtcgtcgtgtgctgctgggcgtctcccccaatggcgttacagcatgggcattagagaactctatgacggatggggagctactctggcgcgcgtcgttcaccccggcggtacctattctgacgcgtatggaaggttgccttcatgttcctcacgcaagggcaggtgccgctcagggggtgcctcactactacatctacgtccacgcgctatcggccaatttcaccttcgaatcaatcttctcccaacgccaaatacctagtaagattgagtatactgcaatagagacaatgaaggcagatgggtttttgcagactcagactcaagtttgattgattgctatttgctaccaacaaaaaataggtctcgacaagaaagttttattgtacttcagatttgtatatatgatcaacatctctgtgtgcagtatgcttgagaatagctttaaggctgagtaacaaggttcatcatttttaatgcagcaacaccaatgagccccttctcagcacaatgacattgtttacatacaaagtacgtcaaaaggcaacgtctaagtaatatgttgatacacaaagatagaaggttacatgtgcgttgttactatctcacgccaactcagacctctactggataacgttgcacaccatgcgactagacagacactaaatttgggtacctctacaaagcacttaatttattgtgcctctttcgaaaaaggttcttttctttcgtaattacctaaccactgctatactatactaacattttgaattcacatatacaaactcggcttcattactactgacggaacatccgaagcagaattttttgtgtcatggagatacaaattaaaagttagtttattgtaatttccaaaaaaacagcagagagcacttaacaaggcaagggagtatcaatttaaattatgctaccaaaattgtgttgaaaacttacttttacacaaatccttgaaattaacaaaaaaaattgtcttccttgttcactcactgagaacttgtggtgataacggtcccaggccagttgcgagcaacatatgggttgttctcgtgaaggaagttgaacacctcgtccaacagctgcaacagaaaagctcaaggtcaaatttcaaaaaaagaacgtgggcatgagcgtgcgcaatacactagtgttgggaccatgcttcgtcgccgaaggtcctgcaaaaagaaacagcttcggctgaagctgcttgaacatgatgccgaagacaccgttcacgaagcttcggagctacaacatatccgaagacgaagggtcgaaccgacttaaagatagaatgaccatttagcccataagggtctgagtcattgttgtaaacttttatgaggggcataattgtaattcctcatgagttgtgtcctgtgcctataaatagtgaacagtattcctttactgttcacggattcctgtaattgccaacgcatcactcgggaattattgtttgtcaaggcaaaggtataaatgtacctaaacattgtgttcagatattcaaaattcatttaacaagatatgtgaatgatgtcgtttattttca

SEQ ID NO: 72906 - DNA, 1748 bp, Zea Mays
cccggaggtccccccaatgtcggacggacgacgggttcacccacaccccctgctggcggatcccccccctcgcctgcctgcccgcgcgccaagaactccattcacctccccccacactgccaggagcttcgcccggcccccgggtgccggacggccaccaggttcacccgtgcctgctgccggcggattcccccctcccccggtggctaggagctccatctgtgttgtcgtcgtgtgctgctgggcgtctcccccaatggcgttacagcatgggcattagagaactctatgacggatggggagctactctggcgcgcgtcgttcaccccggcggtacctattctgacgcgtatggaaggttgccttcatgttcctcacgcaagggcaggtgccgctcagggggtgcctcactactacatctacgtccacgcgctatcggccaatttcaccttcgaatcaatcttctcccaacgccaaatacctagtaagactcagactcaagtttgattgattgctatttgctaccaacaaaaaataggtctcgacaagaaagttttattgtacttcagatttgtatatatgatcaacatctctgtgtgcagtatgcttgagaatagctttaaggctgagtaacaaggttcatcatttttaatgcagcaacaccaatgagccccttctcagcacaatgacattgtttacatacaaagtacgtcaaaaggcaacgtctaagtaatatgttgatacacaaagatagaaggttacatgtgcgttgttactatctcacgccaactcagacctctactggataacgttgcacaccatgcgactagacagacactaaatttgggtacctctacaaagcacttaatttattgtgcctctttcgaaaaaggttcttttctttcgtaattacctaaccactgctatactatactaacattttgaattcacatatacaaactcggcttcattactactgacggaacatccgaagcagaattttttgtgtcatggagatacaaattaaaagttagtttattgtaatttccaaaaaaacagcagagagcacttaacaaggcaagggagtatcaatttaaattatgctaccaaaattgtgttgaaaacttacttttacacaaatccttgaaattaacaaaaaaaattgtcttccttgttcactcactgagaacttgtggtgataacggtcccaggccagttgcgagcaacatatgggttgttctcgtgaaggaagttgaacacctcgtccaacagctgcaacagaaaagctcaaggtcaaatttcaaaaaaagaacgtgggcatgagcgtgcgcaatacactagtgttgggaccatgcttcgtcgccgaaggtcctgcaaaaagaaacagcttcggctgaagctgcttgaacatgatgccgaagacaccgttcacgaagcttcggagctacaacatatccgaagacgaagggtcgaaccgacttaaagatagaatgaccatttagcccataagggtctgagtcattgttgtaaacttttatgaggggcataattgtaattcctcatgagttgtgtcctgtgcctataaatagtgaacagtattcctttactgttcacggattcctgtaattgccaacgcatcactcgggaattattgtttgtcaaggcaaaggtataaatgtacctaaacattgtgttcagatattcaaaattcatttaacaagatatgtgaatgatgtcgtttattttca

SEQ ID NO: 72907 - DNA, 1965 bp, Zea Mays
cccggaggtccccccaatgtcggacggacgacgggttcacccacaccccctgctggcggatcccccccctcgcctgcctgcccgcgcgccaagaactccattcacctccccccacactgccaggagcttcgcccggcccccgggtgccggacggccaccaggttcacccgtgcctgctgccggcggattcccccctcccccggtggctaggagctccatctgtgttgtcgtcgtgtgctgctgggcgtctcccccaatggcgttacagcatgggcattagagaactctatgacggatggggagctactctggcgcgcgtcgttcaccccggcggtacctattctgacgcgtatggaaggttgccttcatgttcctcacgcaagggcaggtgccgctcagggggtgcctcactactacatctacgtccacgcgctatcggccaatttcaccttcgaatcaatcttctcccaacgccaaatacctagtaagactcagactcaagtttgattgattgctatttgctaccaacaaaaaataggtctcgacaagaaagttttattgtacttcagatttgtatatatgatcaacatctctgtgtgcagtatgcttgagaatagctttaaggctgagtaacaaggttcatcatttttaatgcagcaacaccaatgagccccttctcagcacaatgacattgtttacatacaaagtacgtcaaaaggcaacgtctaagtaatatgttgatacacaaagatagaaggttacatgtgcgttgttactatctcacgccaactcagacctctactggataacgttgcacaccatgcgactagacagacactaaatttgggtacctctacaaagcacttaatttattgtgcctctttcgaaaaaggttcttttctttcgtaattacctaaccactgctatactatactaacattttgaattcacatatacaaactcggcttcattactactgacggaacatccgaagcagaattttttgtgtcatggagatacaaattaaaagttagtttattgtaatttccaaaaaaacagcagagagcacttaacaaggcaagggagtatcaatttaaattatgctaccaaaattgtgttgaaaacttacttttacacaaatccttgaaattaacaaaaaaaattgtcttccttgttcactcactgagaacttgtggtgataacggtcccaggccagttgcgagcaacatatgggttgttctcgtgaaggaagttgaacacctcgtccaacagctgcaacagaaaagctcaaggtcaaatttcaaaaaaaggcacaacacatgtttgcatattcccgtgctctaaaagaatacagaggacgatgaccaatatagaagttatcttaacaatgacagactgtcatcaccacctaaaaagtatgtggcacaaagcacatataggatcaaggctagccaacttcacaaacttcaatcagattttactgaccctgaaaacgataaccattagatcgttgtgaattacatgaagaacgtgggcatgagcgtgcgcaatacactagtgttgggaccatgcttcgtcgccgaaggtcctgcaaaaagaaacagcttcggctgaagctgcttgaacatgatgccgaagacaccgttcacgaagcttcggagctacaacatatccgaagacgaagggtcgaaccgacttaaagatagaatgaccatttagcccataagggtctgagtcattgttgtaaacttttatgaggggcataattgtaattcctcatgagttgtgtcctgtgcctataaatagtgaacagtattcctttactgttcacggattcctgtaattgccaacgcatcactcgggaattattgtttgtcaaggcaaaggtataaatgtacctaaacattgtgttcagatattcaaaattcatttaacaagatatgtgaatgatgtcgtttattttca

SEQ ID NO: 72908 - DNA, 1900 bp, Zea Mays
gtttgaagaaagttatttcattttttttctgaacatatattgtttgattcgtaatttagtttacatggtatgacatcatttatttttggtttaaactttagagtatatatgctaattgtatgctctagatcagtttaaaaaggatgcagatgtctagtcgtaataggccaatctacaaactttcatagcctgaagtttatgaacagtgaatacacatcggttctaacttctgtgtttgtaaagatgctaaaagtattctcgctctattaatgtcttcttaggtaaaatagatttgatttacatgtgccagtattttggaagcataatagacactgagcttcaaacgtttggtcaggttcatcatttttaatgcaccaacaccaatgagccccttctcagcacaatgaaattgtttacattatcttcagggccagtctacaaactttcacagcctgaagtttatgaacagttaatacacatcggttctaacttctgtgtttgtaaggatgctaaaagtactcagactctgttaatgtcttcttagataaaatagatttgatttataagtgccagtattttgggagcataatagacactaagcttcaaacgtttggtcaggttcatcatttttaatgcagcaacaccaatgagccccttctcagcacaatgacattgtttacatacaaagtacgtcaaaaggcaacgtctaagtaatatgttgatacacaaagatagaaggttacatgtgcgttgttactatctcacgccaactcagacctctactggataacgttgcacaccatgcgactagacagacactaaatttgggtacctctacaaagcacttaatttattgtgcctctttcgaaaaaggttcttttctttcgtaattacctaaccactgctatactatactaacattttgaattcacatatacaaactcggcttcattactactgacggaacatccgaagcagaattttttgtgtcatggagatacaaattaaaagttagtttattgtaatttccaaaaaaacagcagagagcacttaacaaggcaagggagtatcaatttaaattatgctaccaaaattgtgttgaaaacttacttttacacaaatccttgaaattaacaaaaaaaattgtcttccttgttcactcactgagaacttgtggtgataacggtcccaggccagttgcgagcaacatatgggttgttctcgtgaaggaagttgaacacctcgtccaacagctgcaacagaaaagctcaaggtcaaatttcaaaaaaaggacgatgaccaatatagaagttatcttaacaatgacagactgtcatcaccacctaaaaagtatgtggcacaaagcacatataggatcaaggctagccaacttcacaaacttcaatcagattttactgaccctgaaaacgataaccattagatcgttgtgaattacatgaagaacgtgggcatgagcgtgcgcaatacactagtgttgggaccatgcttcgtcgccgaaggtcctgcaaaaagaaacagcttcggctgaagctgcttgaacatgatgccgaagacaccgttcacgaagcttcggagctacaacatatccgaagacgaagggtcgaaccgacttaaagatagaatgaccatttagcccataagggtctgagtcattgttgtaaacttttatgaggggcataattgtaattcctcatgagttgtgtcctgtgcctataaatagtgaacagtattcctttactgttcacggattcctgtaattgccaacgcatcactcgggaattattgtttgtcaaggcaaaggtataaatgtacctaaacattgtgttcagatattcaaaattcatttaacaagatatgtgaatgatgtcgtttattttca

SEQ ID NO: 72909 - DNA, 1670 bp, Zea Mays
ctaaacctagaatttcttttacgcaaactcgacatgatccaaatcagttgctcccagtcaggagctgatttgagtctagcgccaaatcacctcaaacttttatagcccaatttgtctctctgtgttggcatcatgagccatccgtcccattcagcttgatagcaggttatgacacagccaggcagaaacctggaaggattacccaggtctaaattggaccattgcatcagcacacatctcttgctctcgccctattttagatatattgttattttgttctcacacattcgtgctttgctccttgttttgcagttatgcatatatctaataaaagtggaaggataccatatgccacttttttctaatataagataacccttcatatttcatttttctcttaatgtaggacaactagatttatatactctccatagtagctgctcttgacagaaaagaaagcaacagaagtgccattcatacatgtcaaaagattaatttgcagcaataaattataattccacaggtctgaattgtgtgtacatacatacatgtaaaaaaataatttgcaaggacaggtaataattccacatgtccgacttggtgggttacacatcctactatccccttgtttgttttttaaataatctggtcggatgacaattctactatttgcttctatattttctccaaatctccccttctcttgttctgttacagcttgttaatatcacttgctgcagacaaagtacgtcaaaaggcaacgtctaagtaatatgttgatacacaaagcactgatccttagagacttcatccaacgagatagaaggttacatgtgcgttgttactatctcacgccaactcagacctctactggataacgttgcacaccatgcgactagacagacactaaatttgggccagttgcgagcaacatatgggttgttctcgtgaaggaagttgaacacctcgtccaacagctgcaacagaaaagctcaaggtcaaatttcaaaaaaaggcacaacacatgtttgcatattcccgtgctctaaaagaatacagaggacgatgaccaatatagaagttatcttaacaatgacagactgtcatcaccacctaaaaagtatgtggcacaaagcacatataggatcaaggctagccaacttcacaaacttcaatcagattttactgaccctgaaaacgataaccattagatcgttgtgaattacatgaagaacgtgggcatgagcgtgcgcaatacactagtgttgggaccatgcttcgtcgccgaaggtcctgcaaaaagaaacagcttcggctgaagctgcttgaacatgatgccgaagacaccgttcacgaagcttcggagctacaacatatccgaagacgaagggtcgaaccgacttaaagatagaatgaccatttagcccataagggtctgagtcattgttgtaaacttttatgaggggcataattgtaattcctcatgagttgtgtcctgtgcctataaatagtgaacagtattcctttactgttcacggattcctgtaattgccaacgcatcactcgggaattattgtttgtcaaggcaaaggtataaatgtacctaaacattgtgttcagatattcaaaattcatttaacaagatatgtgaatgatgtcgtttattttca

SEQ ID NO: 72910 - DNA, 2799 bp, Zea Mays
cctactgccatatgaacattgcatttatccaactatcagaaggatgattagtgcgctatcatacatattttctttacatttgggaaagacaatgttgagaaatcagacatcacattggacatttgttcaattgttctcaagttaaaactggaccacagggaaaagatgccccatttggtggcagaaacgtggattgtcctgcacttaatgaattgatagatacagatacaaagaacccaaaagcatggatcagatgttggcagctttgcactcaactgaagtaggcgagctgctagttttcaacatcagtcgtcgtgactgggtctggcggatgtctaactgtaggagctcagaatcttgctactttccctgggctctggatcgtcggtgttggtgttggaaatactcacactattacagatagagtagctgattatgatccacatctacccacaaactacaaaaaagaagggacgaactattagaaaatggtgaacagataaaatacacaaaatagaacagataatttgcaattagagataagcaattccatgtgcaagaaaattcattgactaaatttctttggcttgacacttaagaaatctcgtccttccatggtttttgccatctgctagaaacaaagaaaagctaccactcactgaaagtctgaaatcaaattcagatcgcaaaacccgtctcaaggttatgctacctagacatagaacataccatgagactttcttctctgcttctgtgggatataaacataacctatgtcatgaccagaaatcagatgacactaagtttctcaactgtagtcggttgacgatatcacttcatcatcagttccaacactcttgtacccatactataagtactacattcccagcatcatacaaacataatatgagtttaataatatcctttttaatgtatagttcatatatatgttggacctgacatcgtcattcaatactaatacacagagtacatttcattttgttatgtatttgcacttaaaccaccaaagtgtctgaaactgttacaagattgaatattttagaaatcgcaaagattataccatgccatcaacatatatagagcatgtgaatcatgataaccagaaatgttggaagccaagccaagtggtacctcttgcctagagtttgtttcactgaactcttcaaatagtgttgtgaacaaataagctacaaactctctagcaggaaataagctacaagtaatcgctaactgagaggtatgacatgaaatgttcctgattcaacttaaatcatggcgcatttagactccacattagcatgttgttgacatgtatgttacatgtatacaaggttcagaatgtgtttcgttcccaccactatgacgctttattaaaaaaacttaagaaaaggtgggttcaggaatccttcatcaaatcttgaagatgatgtgtgggaacgaagatgcaatataaggtgtcatttagcttgtgcaaggccgcgtggaatgtcagctgaggatttggaccattttttaattgttaactgggtcaggtcaaaacttatgctagacatgaagaaatgttaagcgaacccaaacaagatgatatctcaaatgatcatagaatggaattgctgataatattaagtcaaagtgatcaaaatagaaaacctgaacatttctttcctccactagaatctccttcaccttctcacacaacacccttacttgtaccacataaattgcatgggataaaagcctccaattcagtactacaaatcatcacaatcttgaactgaagaggagggttaacagactcttagaaacatccattcccatccagtaccacataaatctgggaagagaagcagtcactaaatagtcatcgaacaatctagtgatcactttgcgattgtagcctgctaggtgatgcaatggttctgaactctagaggaaagaatcagatccaacaaagtaaaatgaaaaaagaaccagagaaaaacaaaaaagtagaaaaaagagaaaattatgcgtcgaaagcatgtacaaatcctcacagcggaaccaatcaaacgcccaacttcctaatactgccatatgcttttaaaacgtgataaagagccaatctgagataagaaacaatacaagcattcataatagctaaatatttggtttcagaccccacctgaaatcacagaattacagaccaaatcatcaatatctcaaaatataaaacaaaaaaatgcagtgagatattactttcggctctataaatcaagacatgatgttcaatagaatgacggccaagaaaatacagttgatgtcaggcttgaattaaagggaggatcatatcctaatctgcaacaaggattgaccctaaatagcttttgcagattaccataactgaagcagagctgaagcagaactgaagcttcacacatgtgcatttcttcaacaaaatgtggggctcaaattgtaaggcaggttctgccaagatggaacagggcactaacctcttaatgactttaaatttggaaaaggtagaaacttcataggaaggcaaaatttaatttgtcctcagctaccaaagatggcgcctccatcggtagtgtctcctcaatggccatctagcgcgcgggcacgccgatgcagagtctggtggatcctcgtaatccttatcctttgtaaggtgtccaaatctataaaaatatgtgaacacacactgaatatatttctacagaagatacaaacacactataagttggaagatctaagcaaccatattctagaaataatagc

SEQ ID NO: 72911 - DNA, 879 bp, Zea Mays
gaaaattgaacagatgaaaatacatggagcaagttacaactaaggaggtgaaattgtgtttgagaactaccagtggtgacactgacaaaagagaggttggtgacggcaacacagacaacatcaagctcatcatgggaggagacacaacgacaacccctagaagctccaagagtggcaaatctgagcagctaaaataaatgcagccacattgtactaaagaacgggtatattctatcttatatttatagcctctatcctataacagatgacattttttaaccaaacattatttgaaccttctagtgcaaaacgatcctaataaacacttttctcggacaagcagtcagctcctcaaaaggaaaaggaaaaaaagaaccacctcaatggatgaatatgctagtgaactaaacaatcaaaatgcactggtcagctatatagtgtgcagctagaaattgatagcttcactttcctgatagttattacctgacttatatggtccctggcattttgcagctgaattctagtcctactgtttgccatccctaattctaggattgggtcagtttttgttagacaaattattagtaatttacatgctctatagcgtagggaagatcgactctgctagctagattattgcacatacttatattttgtctatgcaggtaagttgtagccacctaattggagcagaaatgaaattatacatggtttgaacctaaaatatcctcgaccttccacaaaggacataaggacaagggactatggaagaacactattagcacttcagaaaaagcccaaccgatgcaagactattaaataccaaccgatgcaagactattgaaattaaagcccaactgatgcaagggactatggaag

SEQ ID NO: 72912 - DNA, 1058 bp, Zea Mays
catcaaaatggaacactataaacattacaggatccaatccatgaccaaatacagaagagattcagggcaattacttgactcaaatacaaaagcattgaagatcttgacacttaaaatcatggggtcattttagaaaaccaggccaatcttgtccaatgaacaaatctagaaccactctgacataatcaagccacattttcaagaaaaagtagaggagcaaaagggcatgaaatttgtgccagtatactcctccaagagaccgagaccaaattagatgtgcttgaaccaatctgaccgatgggcaagcactcaatacagaagagggaaaaaacctgatctcgcagattttaggaaatgcccttgtgcacctagtagttcagtgatgcgacttcgaaatccagccacagcggccctttgacctactacaaaaaaatgaacagcgaactcaccactacctttgcgcacctcctcatgttccaaccaaccagaacaatagcacttccgatgcagacaatagcagtccattgaggtgggtgcatgcgcagttgtgggctgaatttggaatgagggcgaggaagggggcgtagtgcatgccatggccgccaaatatggaaggggtgaaattgtgtcctttgtggaagggggccgcctatctgttgcctcttagtttggaaggagatctgcggcctgtgggcgagatccgcctccccacgggcttggcgcggcgtgagcccggaggcgtgcatcggctgtggcgctagatggagaggacgacattaggaggggagaggagcacggtagacgcggggcacggcgtgagcccggaggcgtgcatcggctgtggcgctagatggagaggacgacattaggaggggcgaggagcacggtagacgcggggggacagagacggagaagaggcgagcatgatgttggtgttgcagagatcaacccacaaccacccttagtacatcggcgtccccggtcacgagagcggcgaattgggccatggccgctgagtacccagcctccatcacagaggcctagaggggatagaggtg

SEQ ID NO: 72913 - DNA, 468 bp, Zea Mays
atggcgggcagaggagtagatggtgcaccttccatgcatggcggaccttccagtaatggggagaagagatccgtagcagatttggacgacgcgggcgcggtacagacgaccttccattgcgcggatccacaacgtggtacaagaattccatggatggcgggcagaggagtagatggcgcaccttccatgaatggcagacctcccagtaatggggagaggagatctgcgacagatttggacggtgcgggcgcggtacagacgaccttccattgtgcggatccgcgacagatttggacaggcggcggcggtggggaggagggtccgcgggcgttgattgacgaggatccacgggcgttgattggtggtggcgcgttgtcgtccgagcaaaatggggcgctgatggcggggcgggtggggaaggacgatcgcaggcagaacgtggtgcactactgtggacgcctacaatag

SEQ ID NO: 72914 - DNA, 913 bp, Zea Mays
cattgccgttctattaattgtactggacacagcttctattttcgctcaggactgctggactgattgacggcaaaacaataaaggctcagatctgggacacagctgggcaggaaaggtaccgtgcgattacaagcgcctactaccgtggcgccgtggccgccctgcttgtgtacgacatcacgaagaggcagagcttcgacaacgttcacaggtggcttcgtgagctccgcgaccacgctgactccagcatcgtgatcatgatggtgggcaacaaatccgacctgatccacttgagagctatctctgaggacgaaggcaaagcgttggctgagaaggaagggctgttcttcctcgagacgtcagctatggaggccatcaacgtggaggaagccttccagactattatcacggaggtgtatggcatcgtcaacaggaaagcgctggccgccaaggaagcagcagccacagctgccccattgccttcacagggcaaaaccatcagcattgacagcaatgcaggaaatacaaagaaggcatgctgctctacatgaataaaaaagatgtaacctttttaaaatatggtagaaaatggagcatatatagtcatcataaaatatggtgtggaggcgatattataactactgctattctattcttttcttttctttaatttttttttgtgtgtggacaaaatcgagtacatgcagtgtttctgaatcaaaagttagatattgtattaggattcataccttttatgttctccaagttgaatggtactactgcagaatcatagtccaatgttactgtagagttcaagtgtgaatttgtgattttatcacgcgttctaattgtaagacaatttgttttgcttttaattaattgccaaggccagcggccagcaatcatgtcgtct

SEQ ID NO: 72915 - DNA, 270 bp, Zea Mays
aaagttttgatacttctggtgaagtatcaaaatatgatttacaaaaatgcttatccctgcttagatcttgtgggtagaggttgtcctttgcgttaatgcctagctcaggggttatcctgaggaaggattgcttctgtctgcaagaatattttcattgggagcaatggtgggatcttactgcaaagttccctgtgatgctcttttcatcctaaggaatacaaaacatcctaagggtggaagtatttaaatcgggacttgggctaggaacag

SEQ ID NO: 72916 - DNA, 909 bp, Zea Mays
ctgacatgtgagccctgtaggagagggccttcactcgtcacatgcgctgacgcgcatccccccggcgtggcgtgcgctttgatctagctcttcttctcgaatccagcccgaggcctttttcttctgcggtttcatccgtacccatcctgcacacgaagcctagaatagccctcccctgctccgccacctcctcggatcccgaccaccccacccccaccccagacaacaggttgatggaggctaagatgggacgcttcttcgagtccgtgagcaatttcttcaccggaggcgaccacatcccctgggctgtgaaggagagcttgtcaatgctgtaaatgaggaacaaaggaatgaaagccttatgaggttgtcatgggcccttgtgcactccaggcagacagacgatgtaaaccgtggaatcagcatgcttcaagcttctttggataattctgccagtcctctgcagactagggaaaagctgtacttgttggctgttggattctacaggattggcgactactcaaaaagcaggcaacttgcagatcgttgtttggagattcaagcggattggcggcaggccatatcgctgaagaaggcaatagaagataaaattgccaaaggtgagacaacatggtctgattggaataggaattgcgacaactgcggtcggacttctggttggtggaattgcagctgctgttgccaggaagaagtgaggccaatatattggatcggcagctcattgaactaggggagctcctgtctctgtaattccaacttttctgttgttaccttggtgatattacagttgaattgccactctttatatgtacgaagtgatcgtatgataatgataacaccattgtgacattatagctttcatcgatctgtcgttttattctcgccaaa

SEQ ID NO: 72917 - DNA, 189 bp, Zea Mays
gttgagcaccgccgcggaagactcttcctgccgtgcgtcgtcgcaagactgcgatccatttccgagcttcgaggaatcgacagtcaagcttcggcgaccaagaggtcgaactcttcgagttctacaaggctgaagaccctgagcatctgtttggtgaaggcaagtgtcctctgacccattatgtcctat

SEQ ID NO: 72918 - DNA, 12653 bp, Zea Mays
gtttgctatacatgctcattgcttccttggacctacaaagaaaaggtattcatgatatacatatatgcaacatgaaggaaacctcagataaccaaacacacaaagttaatattccaaactaggaacaggccatactaacagtgcagatgttactctcaatcaaactgcagtttaaccaaaagaatatactttatggatatcataaactgtgtgctgatccgttacttacaggaatataaaacttcacgaatatatgcagggtaagggcataagacacagaaaattaaggctacctgcaaagtgaatcaagacagatggaccattgcagagcagcccttccatgaaattcagtctgcactcaatgagtaaacaaatatatagtaggaaactgagaagggcacagcaacgaaaaaatggcaaagcaggaacatatgcaaacttgaagtcacatataacatgaggaagaaagaaaagagctaaaactcgtcatattagccgaaacatctaatgggacaaccattatattgcatactgtttatacatcgccaaggtgcactacagatgtgtagtaaatgttgaatttttttggatctttcagaatgttagcatagcgaacaagtcatgttttcagtgtttagctatattgcaaaattaggagctccatatccaaagcaattagttgatttcactactgtaaagctaagttcagttgcaatgataatgttcccgtagacccgtactaccatgaaaagtaactgaaagaagaatcacagaaccagaggtgtctgaacagatcttccaaggagtaggtgggtgatagagaatagggcttcctgagttaggaagttgccgaagacagactttcatatactatcacatgggagtgcagtttttctccctactatgtttattaagaaataaatctaacagcgtgaaagcatgtctaatttaagattcaacagtgaagtactagacttctcatcaagaaaagggttccgttgaaaatttcatttttctagagttccagaggaaactccagtctatcagcactgcattcaggacctttatggtctgttaacgtccaggaaaaaacagcgcagttggctcaaacccatctcatcaccatctaggctcctaataaaatacctcccggtttacataattatagaggcatttatataggaccaaatcccttggtcattatccggctgagcatagcatccttgttgaaaagttcatattatcacaagaaaccaacaattcacttatgattcaaccatagatatactatatatatcaaccaaacagccctgttttcaagtcgtcgactagtcgtccggtcggtcctgggagctcgacttggggaccggctcgacttttctggcaagtcgggcgacttgtcaacaactgaaatttctgagtcgactagtcgtcgacttgttctagctagtcggccgacttgtccccaattcggcccaagcagcacagtacacaacttaaaccctaacctaacccacaactaagtcgcccctcatctgcacatagccgcccgcccctcctctgcacagagccacacggcgccggccgcctctcacgccgccggccgcccctcctctcaagccgccggccggcccctcctctgcagtctacagtctgcacgccgcccttatcaatctgcaggaacctagtgacttggtgagtgctgctccccctctcccgccctcgcagcaagctcgcccggcctctgctcaccctcccctgccctctcatcaatccccacatagcagtccaactcaagctggtgctggtggtgaagaaaatgcaatggatgatcttgatttgggagatatttagagtatctagtatctatctagctgcagcagcagcttagctatttaatggagcttatttcctttcaagtttgtgttaaggcccataaggcccatatattattgactgcctatatatatgctacagtaccctgaggggatgattatctcacctaatccaggttagtcacatggtaacagagcaggttagggttagggtttacatctaaacccaaccctgatccaattttttttcggcgccgtcgcgccgtcgctgtgctgccctcgcagccagcttcttccccttctccggttgctgtcgcggccctccctctcccgctcgtcgtcgcggccgcgggcctccttttcccggccgccgtcgcggcctgctgtccgccgtcgcggcctgctgtccgccgtctgccgtccgccggatccagcctgcgcatccaccgtccgccggatccgccgtctcggtctgcgccccatctgctgcttcatcgtggatcgagctccccctcttcctgtgcccgccaggaccggatcttggtcgccccgcacggatctgtcacgtccgccgccaggggccgtccgccgccctcttcctgtgcccgccaggagtccgttgctgctgtcgctgtgcctgccaggagcccgccatctccttcctggtggtccgccggctcggcggctggccagctgcctgccgagtcgaactgcagtctgcagggcgccttcaccggatctgcgctgtcagcaattctgcgctgtctgtctgatccgtctgatccggatctgcgccctcgccacttctgtgccgagcaggactgcaactctacaccgttgctgctgtcgctgcttctgcgcaggtggctgccagtgatctcgattctctgcagcagggcattaactgctgtccatctcagcttctgctgcccaggatcttcgccaacttgtccaagtcggactgctgtcagctgcggctcttctggtttgtttggtttcacttatctccattgaattcaatatggcgacaaatgttattgtggtcaatatcactctagatggtcaaaactatccggagtgggctttctgtgttgagactgcactccggggacatggattactcttccatttgactgatgcggcacctgttcttgctgatgatcgtcgcaatgctgctgatatcaaaacgtggcaacttaatgatggtaaagtgatggctgctatggtgaacagcgtcaaaccgtctatgattatgagtttgtctaaattcaaaactgctaaatccatctggtctcatttgaaggagcgttttgttcaggatagtggtgctctattacacaccctcatgcagcagacacatgttattgagcaaaatgatatgagcattgatgagtattactcagcctttgatcgcctgatgagtgctttgacatcaatggtgcctgcttgtactgctgatccatgtccggctcataagtttattgagaagttcttcacttacagatttgttatgggtgttcgggccgagtttgattctcttcgtgctcgtttacttcagggctctgacactctcacaatggctaaggcattgtctgatttacttgctgaagagactcgtcttcactcactttcctctactggtggtaatcctcacagtgtgttggctgctgcccagaaacctaagaatgtttttaagccttgtgatcattgtggcaagaccaatcatcgatctgagctttgctttgtcaagtttcctgagaagttgactgattttcgtgcacgacgtgctgctcgtggtcgtggtccaggaccgtctactagaggttcagttgctgttgctgccacttcgtccgcttctacttcagagtcggcttgggtacttgattcaggagcctcctttcatgtcacgtctgatcagtcaaagttggcttctactacacctgtcacagatggtgcttcagtgcagacagctgatggtactgtatgccacattactcataagggttctctttctgatcctcactttacagtacctaatattttctttgtccctgacctatctatggatctcctttcggtaggtcaaattacggatcataattgctttgtcggatttgatgactcatcttgttttgtacaggaccttcgcacaggggaagtgattgggactggccgtcgccgtagagcagctcctcgcctctacatcttggactctttgcggcttccttccttggctacatctccagcgcatgtcctttcagctacccttgcttctgttgcgtcttttgcccagtggcatcatcgtctaggtcatttgtgtggctctagattgtctactctaataaagtcaggttgcttaggtcatacttcggttgagtctaattttcattgtaagggttgtcatcttggaaaacaaatacaacttccatattttactagtaattctcattctgttgaaccgtttgatttggttcactctgatatttggggtcctgcaccttttgtgtcaaaaggtggatataaatactatgtcatttttattgatgatcattctcgctacacttggatttatttcatgaaacgccgttctgagctgatttctatttataaaacctttgctcgcatgattcacactcaattttccactcatattaaaacctttcgttctgattctggtggtgaatatttatctgataattttcgccagtttttgacttcagagggcactcttgctcagctttcttgtcctggtgctcatgcacagaacggtgtggctgaacgcaaacaccgtcacattatagaaactgctcgcactttgttgatatcttcttttgttccttcacatttttggggtgaagcagtttctactgcggtttacctcatcaatagacaaccgtcatccaaactctctggcaaaacacctggtgaagtcctttttggaactcctccacgttatgaccaccttcgagtttttggatgtacgtgttatgtactattatcacctcgtgaacgtactaagttgactgctcaatctgttgagtgtgtttttcttggatacagccctgaacataaaggctatcggtgttatgattcatcttctcgtcgcatgcgtatttctcgagatgtgagctttaatgaaaaccgacccttcttttacaactcttccactcattcttcttttcattccacagagtctaccgccttcatgagccttcctcccatttctgaaacttcatcagcattaccacctactgtttctacacccgatgttcttattcccatcacaccaccttccacttccacatcatctcagtcttactcttccaaaccacctgttactcagacttacattcgtcgtcctcgctctaatcccacggccagtcctgctgatgatcctgttgccgatacttgtactaacaatgatgactctcatgttgtttttaatcaggggtatcatcttcgtgaccgtggcactattgcagctccagaacgttatgggttttcccgtgccggtgcagtcattgctgaaccatcatcttataaagaggcttctgttatacctgagtggcagcgtgctatgactgatgaattaaatgcccttcatcgcacatgtacatgggatgttgttccgttacctgctggtgttgtacctatcacgtgcaaatgggtcttcaaagttaaaaccaaatctgatgggtctattgagcgatataaagctcgtcttgtggccagaggttttcaacagactcagggtattgactatgatgagacttttgcacctgtggcccatctgactactgtccgagccttacttgctgttgcagcctcatcttcttggagtatctctcagatggatgtcaaaaatgcgtttcttcacggtgacctacatgaggaagtctatatgcatccacctcctgggatagaggttccctcaggacatgtctgtcgtcttcgtcgagccttgtatggtctcaaacaagctcctcgtgcttggtttgagagatttgtttctgtcatcaaggcttgtggtttctattctagtgatcatgatcctgcattgttcattcatgtgtcttcacgaggccgcacgttgctattactatatgttgatgacatgttgattacaggcgatgatccagaccatattgctcatgtgaagacgtacctgagtaaggaatttcaaatgtctgacttgggggcactcagttattttttgggcattgaggttttgcagactcaaaatggtatttatctttctcaggccaagtacatacaagaccttcttgatcgttctggtcttagtgacactcgcactgttgccacgcctatggatcttcacttatctctttgtccgactgatgggacacctttggaggatccatctcgatatagacatcttgttggcagcttagtttaccttactgtcaccaggccagatattgctcatgcagttcagatcttgagtcagtttgtctctgctcctacatcagttcattatgggcacctacttcgtgtgcttagatatttacgggggacaaaaacacaatgtttattttatgactcaaattccccacttcagcttcatgcttactctgatgctacatgggccagtgatcctacagatcgtcgctccatcactggttactgtattcttcttggatcatcccctgttgcttggaaatccaagaagcaagctgctgtatctagatctagtactgaagcagaacttcgagccctggctactactactgctgagattatctggattcgttggctcttggctgatctaggtgtttcttgtgactcgcctactcttcttcgctgtgacaacactggagctatacaaatctgtcatgatccagtgaagcgtgaactcacaaaacacattggtgttgatgtctcattcactagatctcattgtcatcagaagaccattgatcttcaatatgtgccctcagaattacagcttgcggatttcttcacaaaagcacaaactagggcacaacatcagtttcatctactcaaactcaatgcttcaaatcctccacttccgccttgagtttgacagggggtgttaaggcccataaggcccatatattattgactgcctatatatatgctacagtaccccgaggggatgattatctcacctaatccaggtttagtcacagtttgaactatattttcttgctatttgttttccaatttgaactatatggctgttatgacttatgagtttatgacttaccacttatgtggctgatttagtttagtttgaggcttcaaatgaggtaagatttgctgtttatttcagtttcgttcaatttcagacttcaaaagagataaaacatcatctttcttcatatataaatgatatattgtttatatgaagccattatataggcaaaacaactactatattggcaagtcgacgactagtcgactgacttatcgactagtcaccaactctgtttacaaatcgtccgactaattgcgattagtcgggctggtcgcctgtaagcggtcgaccagagagacgacgcgatcaggtttcctggtcgtcctgatcgtcgcttaatcgtccaaatcggtcgattagtcgtccgattaactagactctggtcgaccagtgcgcgtgggctaaatgtggctgtgctattgggcttcaccgtttttttggcccagtagccgcatacatctgttggcgccctaaaccctaaatcctccctgtgcctgcgcccctctcaagtttctgtccggcggctgctgctctagcctccagtctccaccgtccactgactccaccatcgccggcggctgccccctctgctcaaggtcgtccctgccccctgctcaaggtcgtccctgccccctgctcatctacaaggaacaagatgagctcgtcatccgaaggtcatccctgctcccctccttcccccttgtctgccccctgcactctgcagttttacattctgcgcagcacggcagtttcacattctgcgcagcactctgcagttctatacctctatgttctactgccttacttcaatagtacttagcttcatctctgccaaccagtttccatcagcccagcagtagcatatctagtgcctagtattgacttgacctctatctgttgacatgttcagagtttcatgctgccggtggacgaagaggtgctaatgttgaggtcttattccccgggtccaatgtggttggcagtggcagtgcaactgcaagtgattctgttcctcccgtgacctcaaatgttgatagcacaggccctgcttcggcattatcagctgctgcagactcaaaaagccttgctgaaaaggctattgcagcactccctcctgagcttagtgcacaagcaactgacccaaaaagaaaggcaaggtcacaggacccaggatggaagtttgggtggtggccagacacaacgaagaaggattttgttcagtgtattttctgttcgaagattgttccttccggaatcaaaaggttcaaacagcatcttgccggtgggtttggtgacaccatgaagtgtgctagagtaccagaactggtttcaaaggaaatgcacatgtatttaaaaaggaacatgagacttgtgattactgctaatactgaagaaggtgaagagggagaagagcgggatgatgaaggtcctgaaccaagttctgggacaaaaaacaagcaaacaaaaaagaaaattgcccaagctgccatgtcctcatttcttgtatctgctcctccaaaaccaaaagaagtagttgcagagaggcataaaaacaaaacttctcagtccacccttgagcactgcacaaagaaagggacacaagcacagcaaattgttgacgaccatgtagctgattttctgtatgagaacaagattccattgaatgtcgtaaactcaagaagttgggagattatgttggagtctattggtcagtacggtcctggatatcatggcccatcgtatcatgaggctagagtaccttggcttgaaagggcagtgaagagaacatcgacattgagagataagcacgaagaggcttggaaggaatatggttgctcaattatgtcagatgggtggaccgacacaagacaacgtcatttgatcaacttccttgccaacagtccagcagggacatacttcctaggttctgttgatgcatcaagtgaggtagcaaatgccaatatgttggcagatccgttggagaagcaaataatgaaggtgggcaaagaacatgttgtccaggtggtaactgacaatggagccaatttcaaagcagcagggcggatcctaatggacagaattccgcatctgttttggactccttgtgcagcacattgtttggatctattgttggaggatattggcaagatcaaggagttcaacacttgcatcaatatggcaaagaaggtttcgaggttcctatacaagcatgggcgacttcacagcctaatgagagaaaagctaggcggggaccttgttaggccgggtgtcactagatttgcaacatcattcttgactttggcaagcatgtacaagcataagaatagattacagggcttgtttgttagtgatgaatggaatggctctaagttttccctacttcaggaaggtgtacaagctgaaaatattgtcctttctgtatcattttggcaaactcttgaaaattgtctacgggcttcacaacctcttctcattgctttaaggattgctgacggtgatgagacgccagcagctccagagataatggcagctatggacaaagcaaaagccaccatacaagagtcactaaaagagaagccaagattacttgttgaagtcatctcatgctttgagaagaggtgggaaactcagatggagcagaaactatatggggcagccctttatttgaatccaggtaaattctttaccttgagggagaaagacagaaggcaagctgcaagacttagagctatgttcaatgatgttttgtggaagatggtcagtgatgaggatgagcaaacaaagattagtaaacaggcagatgactacgaaagatccgaaaggggaatgcttttcaaaggcaggagcaataagagaaagagagaaaaaaaagtcctatcctatggtggggtgcatatggaggactggcatatgaactacaaagcctagcaaaaagggttataagcctctgttgtgcagcttctggttgtgagagaaattggtcagactttgcagcaatggaaaataggtttcgcacactaagagagctgggatccaagggaaaaagaagcaacccactggtgcttgaagagtttatgtgggaaaatgaatgggttgaagaaaataatgaagctgatggtgatagcagcatatggcatgctgtggatgaggcattaggggcaactcatgctctccaaggcagaaatttgccaagattagctgctgcaggtgctgcttcaagttctcggcctcaacgaacctatgttaggacaaggaagcgttcaagaaatgcagcagcacaagatattggagaagatgatagtgatgctcaagaagatggtaatgctacagcagatgcagaagaacaacaagaacaaccactagaagcaactagagatatggaccaagatgaatctgaatctggaggagggaaagctgctgctaatgctttttgcttggatgctgatctgctctaggtagcagactagcaggtactctatattcagtatattgtttcacactttcacttatgttatattgttatgttacattcacttccaattgaaagctgctactgttatatttcagtaattcagttccgaacttccaatttaatttcagttctatatggcttatatgcctagaaatacatatatacatatatatatggcttatatgcctaggaatatacaaaggacgactagggacgaccagaggccgaccagaaccgattagtcggccgattagtcgccctaatcgcgattaggcgcctggtcggtcctgtcggtcgactagctggtcgcccgacttgaaatcagtggtcaccaagtcggtaccttgtcgactcgactcgacttaccgacttgaaaaccttgccaaacagattcaataacttttcttgtacatgcagtatagtaataccttaaagtccacagcgtccatcactttttcataataaggtaatgcttgtttaagccttccagtattcatcatctcatcaccttccctcaaggccttccatatgacaattttacaaatacgtaacaaatacatgtgcattaaagcaaagatgaaaactgcaaaagtccaagatgttagaaggactaggtacagaaaacagaaggagatcctcagtgcaaattaatcagacactggcatttaatacatattttatatactacacaaataactttataatattctggcaaccaaattcaaaactggcaaccagtttgaaaaatgctggaatttcaccaaaacagaccaatttccatggtaatcagaaaccattgatgagttgcaaatggagcctgaatgtggtaaaggaaaaacatgttgggcgttctctaggtcaaagtgggcgataggctcttattctctattctttttttctttttctaaacatcagtcaattttactacttatatgtcaagcatgacctaatatagccctcttattgtgtcccctctctgtttttaggcaagagccccacatacaaaactttccaacgctaacaagcaattgcttctcattgtcccaagttcatgagcgagcagtgcatataagcacatgaatcatctaaaaattcatatatgtgcagatgtaaaatcatactggaattaacatatacagaatcacaaaaacataaacagtttttctagtatgctgatcccattaactccagaatatagcactctcatgtattatgatctgcacttgaagcatttatatttacttttcagtttatgcttacattcactctctgttaattctgatccttcccaacaatgcatagtatgcatttctatgattgatgttgacatgtagtcaaataacaaaacaataaaaggttcaagcaatctaccagtaccctcacagttcaatagccagaataaaagttgagtcttgttgaaaacaatgaaacaagaacaaattgtactgaacaataagccatcatgcaaaataactaacataatataaacatgaaataaaataaaatctgaagattactcccatccattacatagaagtcctttaaaagtgcagtcattaaaggggtaactatataagaaaggtcaagctaaatcactggagtttcaacttaagtggagtaatgtttccatcagtaccttgatgcactctgcttttgtctttgcatcgattaccatgttctgtcgattcctatatgcagctattagctctttggtgcgcttatctttggctgccttttcttctgcactttgagtctctccaccaaggcgtatatttcttccaccgccatactagaaggaaaggttatggcaaaaccagaatcagggaaacacagcaagcccacaaagcatttcacaattaatcaagctccatcaggaattaatggcatatatcatagaacagccacagtttacaaacatgcagtatatcagtatcagctaactgaaaccaaagaaagatacgggggaaagcaatatatcatggaatgatttttaagtttatttcagatgttatctctcagcctatcaacaaaacaagatcaaaagttatatagcaagagagacaaatttaaaagtggttccatgaaatgttgcttagcgatcttttaa

SEQ ID NO: 72919 - DNA, 2374 bp, Zea Mays
atgaggccaaacaactctgttgtacctcacacacattggcaatgtatcccactccttgcccagcacgtcaacacagtgtttctccagaatatactgcagtctgcggcttggtcagttgccgaagccgtgcagtctgcggctcctgcctacagctacaggtgccgtgagcgtcgacgacgccgcctctcgtgctctgtctgtggcgcacatcaaatcctctcgcagaacagccaaaccaaccaccaaaatgtaagaacacacgcccggcgctgtgacgcctacgctactagtcagtactcagtacagtagtcacccccaaagctccgcctacgcacctcttcccactcgcccggccgcggctatggcggccaccacgtccacaacgccggccgtctccttctccctcccctcgcccccgcaccgccaaggggccccgcgccgccgcgcgcctttcctcctccgtgccgcctccaccgcggcgcccccctcccccgacctctccatccagctctcgccccgcgcgtccccgcccgcgtcgacaaacggcgccgccaccgcgcttggacgccccgtggccgcctccttcgcccgtgaccgcgccgaggacctgcaggccgaggcccgcgccatggcccgcgccgccggcgccacagtctacagccccgagctcctcgcctcccgctacggctcccgccccttcaaggtggcgctccgggcagcggaggtgctgtccaagctggcgtcgttcggggtgaaggtcctgctggacgagcggagaggggagtcgtcctcggagaggagacgcgccagagcggtggagttgcgcagcatcctcaccagactgggcccaaccttcgtcaaaattgggcagggtctgtccacacgccccgacctctgcccggtcgagtacctcgaggagctcgccgagctgcaggaaggccaaaatgcaagaaggtttaaaaaactatatgccgataagcaagatgtcttagtgcctgatatattttgggattacacaagtgctaaggttctaacaatggagtggattgagggtgtaaaattaaaccaacaagcagctattgaaagtcaaggattgaaggttctggatttggtcaacattggtatccagtgtagcttgaggcagcttctggagtatggttactttcatgctgaccctcatcctggtaatatattggcaacacctgaggggaagctggcttttcttgattttggcatgatgagtgaaacaccagaggatgcgagggtagccattataggacatgttgtccacttagtcaacagggactatgaagcaatggctcgtgattattatgcactagatttcttggaaccggatgtagatgtttccccgattgtgcctgctctcaagaatttctttgatgatgcactaaatgcaacagtgagtgagctgaacttcaagacaatagttgatggcctaggtgctgttctctatcagtacccgttcaatgtaccagcatactatgcattgatactacgatcgctcactgtactggaaggtttagcactctatgctgaccctgattttaaggtgcttgctgcatcgtatccttactttgcgaaaaggctactcactgatcccaatccatacctcagagacgctttagttgagcttctattcaaggatggaagattcagatggaataggcttgaaaatcttcttgttcaagggcgccaagatagagagtttgcagccaaagatgcattacagcctgttctaaagcttctcctgggtcctgatggggaggaattgcgtgtgttggttgtgaaagaggcagttcgtgtaacagaagccatcactattggaacactgatcgattcatacaatgcagctccagcgtttttgaagccattaatttccagtggcaatccagccggacccttcaagtttagtgaggctgaacaagaacagatgttggagctccgagaccaggttttcagagtatggggtcttttgagatcctcaaataactttgatccgagccttttgcaaccaatcgttcaggtgctacaagaaccagaggcccgcgtcttgggttctcgtgtcgcaggtggtgtaacacagcgccttgcggcacgtctgctgcaacagcttctcaggatcccttctcctggatcttcgtaacagattatatagagatgggctcgtatgaagcatgtaaattgacacgatacttttgacaggaaactgaggtgccatttgattcaagaaatgtaaatatagatatgggctcgtatgaagcatgtaaattgacacgatacttttcacaggaaacaggatgtcatttgattcatgaaatataacgtaaataacaacaataatgattcacgttcg

SEQ ID NO: 72920 - DNA, 2961 bp, Zea Mays
atgaggccaaacaactctgttgtacctcacacacattggcaatgtatcccactccttgcccagcacgtcaacacagtgtttctccagaatatactgcagtctgcggcttggtcagttgccgaagccgtgcagtctgcggctcctgcctacagctacaggtgccgtgagcgtcgacgacgccgcctctcgtgctctgtctgtggcgcacatcaaatcctctcgcagaacagccaaaccaaccaccaaaatgtaagaacacacgcccggcgctgtgacgcctacgctactagtcagtactcagtacagtagtcacccccaaagctccgcctacgcacctcttcccactcgcccggccgcggctatggcggccaccacgtccacaacgccggccgtctccttctccctcccctcgcccccgcaccgccaaggggccccgcgccgccgcgcgcctttcctcctccgtgccgcctccaccgcggcgcccccctcccccgacctctccatccagctctcgccccgcgcgtccccgcccgcgtcgacaaacggcgccgccaccgcgcttggacgccccgtggccgcctccttcgcccgtgaccgcgccgaggacctgcaggccgaggcccgcgccatggcccgcgccgccggcgccacagtctacagccccgagctcctcgcctcccgctacggctcccgccccttcaaggtggcgctccgggcagcggaggtgctgtccaagctggcgtcgttcggggtgaaggtcctgctggacgagcggagaggggagtcgtcctcggagaggagacgcgccagagcggtggagttgcgcagcatcctcaccagactgggcccaaccttcgtcaaaattgggcagggtctgtccacacgccccgacctctgcccggtcgagtacctcgaggagctcgccgagctgcaggattcacttcccacatttccggatgaggatgcatttgcatgtattgagagagagcttggcttcacgcttgattcaatctactcggcaatttcaccttcccccattgcagccgctagtttaggtcaagtttataaagcaaagttgaaatactctgggaagctggtggctgtgaaggtgcagagacccggtatcgaggatgctattgggcttgatttttatctacttagaggactcgggtttcttataaataagtatgttgacattgtaaccagcgatgttgttgcccttatggatgaatttgcacggagagttttccaagagcttaattatgttcaggtacatttttgcttgtccttgtgtgaatttatgtacacacattctgctatgcttctctttctgtctgcatagtacacattgaccactctcctatcctatgtctcatttatgatgaaataagaatacaatggaacaggggaaaaacactgaaattctcagtttcttcaacagtagattattgtagtagttctccttagtttgcctaaaggttgtcatttatcgttgaatgtaaataagaatgcggaatgcaggaaggccaaaatgcaagaaggtttaaaaaactatatgccgataagcaagatgtcttagtgcctgatatattttgggattacacaagtgctaaggttctaacaatggagtggattgagggtgtaaaattaaaccaacaagcagctattgaaagtcaaggattgaaggttctggatttggtcaacattggtatccagtgtagcttgaggcagcttctggagtatggttactttcatgctgaccctcatcctggtaatatattggcaacacctgaggggaagctggcttttcttgattttggcatgatgagtgaaacaccagaggatgcgagggtagccattataggacatgttgtccacttagtcaacagggactatgaagcaatggctcgtgattattatgcactagatttcttggaaccggatgtagatgtttccccgattgtgcctgctctcaagaatttctttgatgatgcactaaatgcaacagtgagtgagctgaacttcaagacaatagttgatggcctaggtgctgttctctatcagtacccgttcaatgtaccagcatactatgcattgatactacgatcgctcactgtactggaaggtttagcactctatgctgaccctgattttaaggtgcttgctgcatcgtatccttactttgcgaaaaggctactcactgatcccaatccatacctcagagacgctttagttgagcttctattcaaggatggaagattcagatggaataggcttgaaaatcttcttgttcaagggcgccaagatagagagtttgcagccaaagatgcattacagcctgttctaaagcttctcctgggtcctgatggggaggaattgcgtgtgttggttgtgaaagaggcagttcgtgtaacagaagccatcactattggaacactgatcgattcatacaatgcagctccagcgtttttgaagccattaatttccagtggcaatccagccggacccttcaagtttagtgaggctgaacaagaacagatgttggagctccgagaccaggttttcagagtatggggtcttttgagatcctcaaataactttgatccgagccttttgcaaccaatcgttcaggtgctacaagaaccagaggcccgcgtcttgggttctcgtgtcgcaggtggtgtaacacagcgccttgcggcacgtctgctgcaacagcttctcaggatcccttctcctggatcttcgtaacagattatatagagatgggctcgtatgaagcatgtaaattgacacgatacttttgacaggaaactgaggtgccatttgattcaagaaatgtaaatatagatatgggctcgtatgaagcatgtaaattgacacgatacttttcacaggaaacaggatgtcatttgattcatgaaatataacgtaaataacaacaataatgattcacgttcg

SEQ ID NO: 72921 - DNA, 2704 bp, Zea Mays
atgaggccaaacaactctgttgtacctcacacacattggcaatgtatcccactccttgcccagcacgtcaacacagtgtttctccagaatatactgcagtctgcggcttggtcagttgccgaagccgtgcagtctgcggctcctgcctacagctacaggtgccgtgagcgtcgacgacgccgcctctcgtgctctgtctgtggcgcacatcaaatcctctcgcagaacagccaaaccaaccaccaaaatgtaagaacacacgcccggcgctgtgacgcctacgctactagtcagtactcagtacagtagtcacccccaaagctccgcctacgcacctcttcccactcgcccggccgcggctatggcggccaccacgtccacaacgccggccgtctccttctccctcccctcgcccccgcaccgccaaggggccccgcgccgccgcgcgcctttcctcctccgtgccgcctccaccgcggcgcccccctcccccgacctctccatccagctctcgccccgcgcgtccccgcccgcgtcgacaaacggcgccgccaccgcgcttggacgccccgtggccgcctccttcgcccgtgaccgcgccgaggacctgcaggccgaggcccgcgccatggcccgcgccgccggcgccacagtctacagccccgagctcctcgcctcccgctacggctcccgccccttcaaggtggcgctccgggcagcggaggtgctgtccaagctggcgtcgttcggggtgaaggtcctgctggacgagcggagaggggagtcgtcctcggagaggagacgcgccagagcggtggagttgcgcagcatcctcaccagactgggcccaaccttcgtcaaaattgggcagggtctgtccacacgccccgacctctgcccggtcgagtacctcgaggagctcgccgagctgcaggattcacttcccacatttccggatgaggatgcatttgcatgtattgagagagagcttggcttcacgcttgattcaatctactcggcaatttcaccttcccccattgcagccgctagtttaggtcaagtttataaagcaaagttgaaatactctgggaagctggtggctgtgaaggtgcagagacccggtatcgaggatgctattgggcttgatttttatctacttagaggactcgggtttcttataaataagtatgttgacattgtaaccagcgatgttgttgcccttatggatgaatttgcacggagagttttccaagagcttaattatgttcaggaaggccaaaatgcaagaaggtttaaaaaactatatgccgataagcaagatgtcttagtgcctgatatattttgggattacacaagtgctaaggttctaacaatggagtggattgagggtgtaaaattaaaccaacaagcagctattgaaagtcaaggattgaaggttctggatttggtcaacattggtatccagtgtagcttgaggcagcttctggagtatggttactttcatgctgaccctcatcctggtaatatattggcaacacctgaggggaagctggcttttcttgattttggcatgatgagtgaaacaccagaggatgcgagggtagccattataggacatgttgtccacttagtcaacagggactatgaagcaatggctcgtgattattatgcactagatttcttggaaccggatgtagatgtttccccgattgtgcctgctctcaagaatttctttgatgatgcactaaatgcaacagtgagtgagctgaacttcaagacaatagttgatggcctaggtgctgttctctatcagtacccgttcaatgcatactatgcattgatactacgatcgctcactgtactggaaggtttagcactctatgctgaccctgattttaaggtgcttgctgcatcgtatccttactttgcgaaaaggctactcactgatcccaatccatacctcagagacgctttagttgagcttctattcaaggatggaagattcagatggaataggcttgaaaatcttcttgttcaagggcgccaagatagagagtttgcagccaaagatgcattacagcctgttctaaagcttctcctgggtcctgatggggaggaattgcgtgtgttggttgtgaaagaggcagttcgtgtaacagaagccatcactattggaacactgatcgattcatacaatgcagctccagcgtttttgaagccattaatttccagtggcaatccagccggacccttcaagtttagtgaggctgaacaagaacagatgttggagctccgagaccaggttttcagagtatggggtcttttgagatcctcaaataactttgatccgagccttttgcaaccaatcgttcaggtgctacaagaaccagaggcccgcgtcttgggttctcgtgtcgcaggtggtgtaacacagcgccttgcggcacgtctgctgcaacagcttctcaggatcccttctcctggatcttcgtaacagattatatagagatgggctcgtatgaagcatgtaaattgacacgatacttttgacaggaaactgaggtgccatttgattcaagaaatgtaaatatagatatgggctcgtatgaagcatgtaaattgacacgatacttttcacaggaaacaggatgtcatttgattcatgaaatataacgtaaataacaacaataatgattcacgttcg

SEQ ID NO: 72922 - DNA, 1400 bp, Zea Mays
atctagtctagtacacgaatcacgaacgcgtccacctgcgcgcatcgccacgcaggttctctccaccaaaccttaacctccccttccagaaaccctccaagaggcagctcaaaggaatagtgagccgccccgccgctcctcagccatcctctccatctcggtgtcacacactccgcatacgcacctacgagagtcgagtgacagcgagcgagcgagcgagcgaagccatggctctccgcaccctggcatcgaagaacgccctatccttcgcgctcggcggcgcggcccggccgtcggcggcgtccgcgaggggggtgacgacggtcgcgctccccgacctctcctacgacttcggcgcgctggagccggccatctcgggggagatcatgcgcctgcaccaccagaagcaccacgccacctacgtcgccaactacaacaaggcgctggagcagctcgacgctgccgtcgccaagggcgacgcctccgctgtcgtccagctccagggcgccatcaagttcaacggcggcggtcatgtgaaccattcaatcttttggaagaacctcaagcctattagcgaaggtggtggggagccgccacatgggaaacttggctgggccatcgatgaggattttggttcatttgaggcacttgtaaagaggatgaatgcagaaggcgctgctttacaaggatctggatgggtgtggttagctttggataaagaggcaaaaaagctttcagttgaaactacagctaatcagggatcaaatgctctgtggggatacagcaagatccagacccggagtggatcctctggtgactaaaggtgcaagcttggttccgctgttggggattgatgtctgggagcatgcgtactacctgcagtacaagaatgttaggccggattacctgaacaacatctggaaggtgatgaactggaaatatgctggagaggtgtacgaaaatgttcttgcttgaattgtcttaatggacaatactcatctgcgcgggtttgttttcggctgtttgaccatgtgaaataaagatggacttgtgtacctgctggaccaagtgtacatttcgctaagatagactaacgcacaatggcctgccgattttgtccatcctgtattcctgcttgcgtgccactccactttctgctgctcgtagtggcaggcacatagtatgtgcttaacgttagactacggcacggccctttcagagttcgagcatggtgatgcccaaaagaaccatttctactcttgtctccattaataaaatctgccgaggtgccgatgtttgcttgaatttgttgccatgcgtttccagtttttggccttcacacttgttgcagcaaaatcttgcaaatcatcttcattaggcatcatgtttgtgttgagctc

SEQ ID NO: 72923 - DNA, 1051 bp, Zea Mays
cgcagctccgtcgagctctatctccatagtcgcgctccctccttcctgtctcccatggtcgagcgcccagcccccagcgccagccccggctcggtccctcccatggtgctcggcttcgcctccaccggaccgtgccccgctccatctcctttccccagctcaggcatccgtcgcaccctgcttcaatttttttccagctatggtgctcgcgtcggcgtcctcgactcctcagtctggcgcgctgctcctttttccttgtccctgtgcgtgagctgttccagcttgccggtcatctactgctccttggcgctccttgctcggcctccgacgactgtcgtccctcgccacgccgtggccgcttcgctggccccctcggttctagccatcgcttgccgcggcatcctcttagttctcggtcatggaatttgcgcgccctcaagcatcagccgcgccgacctccgtgcttgctgttctctagctcgctctggtcgcgggcgccgtcgagtcgtcgaaccccgtcctcccctgctcgactcctaagcaggctccctgatccgcgtcctgctcgccgtcgatttcccacgcctgtggccgcggcactcactcctcggatccttgtcgtcaatcttcagtcctcgccagtcgctaacatggagattgcctcggtctcgtgctcgccgtcgtttggtcgtgagatgttcgtcgctgcgcgctcactatgccatcgcacaccaagtcgattctgcctcatcggtgctcgccaaatattcgatggaacgtctaatctgataatcgttgccgattgtggggattttcgagtttatttgattgcggcacgttaactgatcacgtgatgcggagggccaaagttgagtcgaccccaatatgacgtaacgggtggactactccgcatggtggtgctgatggacgaacctgaagatggacagacggggcaagtatcggaacaaaagctggtcgtcaagtgatcatcgtctaacaaacactaacctagtgtttactccaggcaagccccggtgcaagcaaccccttc

SEQ ID NO: 72924 - DNA, 1249 bp, Zea Mays
cttctcttcactagtcttctctcactatcttctccaatggcaattcattagggcgggatcaacgacaggtaggtcgccggaaggcgagctagctcgtcgtcatcatggacggcggcagcagctggttgccattcctaggccgtggaattggcgacggcgtatcgggcagcaggagcagtggctcggaggtgcagcggaaggaggacgacgacctgccgatcagctcgcaagtggaggaggagctccgacaggcaatgatcatgcacgcacgcacgcttgtaatctgcaattgttttacttttttcttctacttgctgatgggcatggagagaactggacacccagcagagcgagagacgacgacggcgttgcccccctcatcggaatcatccatgttccgctccttccctggaagcccggccgacgaggcctcgtcgctcaggccacggagcagcaacaacaatagtaccacggcgaactcctaccaccaccacccggcagaagtctcctcccagtcccatctgaccgagctctccccggtcacctacggcggcggccaccgccactgtgacgaccatcagtgctacgtcaatctcgacacgatcctaaagctggacgacgagttcaagcgctgccacgacgaacaaccccacaacgaaagagcgcagcacaagaacggcttccgtggcggcgcgttcgtgccctacacccgccacctcggccccaagaagaagcccaagccacctgcaggctccggcgggcagagggcgatcaaggcggccatggcagccttggcacgaatgcacatggtcaggctcgcccagtggcagtgctaccagatggaactggtggtagcgcctgcgccgcccaccggcgggatcaacggcaacaaccagcagcagcacgttttgtcggagcgcaagcgccgcgagaagctcaacgacagcttcaaggccctcaggacagtgctccccccttcttccaagaaagataaggcatccacactgatgagagcaagggactacgtcagcactctccagtctagagtgtctgagttagaggagaagaacaggatgatgctagtacagttgcagcaccgccgcaatgatgtttctcccaacaagattgaggtcgacatcagaagtaatagagaggaaattaggaaacatgacaggaatttcacctgaagatatatagcagttgttatggtttatagtaggaggcctaaacagccctctagtcggcccat

SEQ ID NO: 72925 - DNA, 1189 bp, Zea Mays
cttctcttcactagtcttctctcactatcttctccaatggcaattcattagggcgggatcaacgacaggtaggtcgccggaaggcgagctagctcgtcgtcatcatggacggcggcagcagctggttgccattcctaggccgtggaattggcgacggcgtatcggggagcagtggctcggaggtgcagcggaaggaggacgacgacctgccgatcagctcgcaagtggaggaggagctccgacagttctacttgctgatgggcatggagagaactggacacccagcagagcgagagacgacgacggcgttgcccccctcatcggaatcatccatgttccgctccttccctggaagcccggccgacgaggcctcgtcgctcaggccacggagcagcaacaacaatagtaccacggcgaactcctaccaccaccacccggcagaagtctcctcccagtcccatctgaccgagctctccccggtcacctacggcggcggccaccgccactgtgacgaccatcagtgctacgtcaatctcgacacgatcctaaagctggacgacgagttcaagcgctgccacgacgaacaaccccacaacgaaagagcgcagcacaagaacggcttccgtggcggcgcgttcgtgccctacacccgccacctcggccccaagaagaagcccaagccacctgcaggctccggcgggcagagggcgatcaaggcggccatggcagccttggcacgaatgcacatggtcaggctcgcccagtggcagtgctaccagatggaactggtggtagcgcctgcgccgcccaccggcgggatcaacggcaacaaccagcagcagcacgttttgtcggagcgcaagcgccgcgagaagctcaacgacagcttcaaggccctcaggacagtgctccccccttcttccaagaaagataaggcatccacactgatgagagcaagggactacgtcagcactctccagtctagagtgtctgagttagaggagaagaacaggatgatgctagtacagttgcagcaccgccgcaatgatgtttctcccaacaagattgaggtcgacatcagaagtaatagagaggaaattaggaaacatgacaggaatttcacctgaagatatatagcagttgttatggtttatagtaggaggcctaaacagccctctagtcggcccat

SEQ ID NO: 72926 - DNA, 1134 bp, Zea Mays
acgacaggtaggtcgccggaaggcgagctagctcgtcgtcatcatggacggcggcagcagctggttgccattcctaggccgtggaattggcgacggcgtatcgggcagcaggagcagtggctcggaggtgcagcggaaggaggacgacgacctgccgatcagctcgcaagtggaggaggagctccgacagttctacttgctgatgggcatggagagaactggacacccagcagagcgagagacgacgacggcgttgcccccctcatcggaatcatccatgttccgctccttccctggaagcccggccgacgaggcctcgtcgctcaggccacggagcagcaacaacaatagtaccacggcgaactcctaccaccaccacccggcagaagtctcctcccagtcccatctgaccgagctctccccggtcacctacggcggcggccaccgccactgtgacgaccatcagtgctacgtcaatctcgacacgatcctaaagctggacgacgagttcaagcgctgccacgacgaacaaccccacaacgaaagagcgcagcacaagaacggcttccgtggcggcgcgttcgtgccctacacccgccacctcggccccaagaagaagcccaagccacctgcaggctccggcgggcagagggcgatcaaggcggccatggcagccttggcacgaatgcacatggtcaggctcgcccagtggcagtgctaccagatggaactggtggtagcgcctgcgccgcccaccggcgggatcaacggcaacaaccagcagcagcacgttttgtcggagcgcaagcgccgcgagaagctcaacgacagcttcaaggccctcaggacagtgctccccccttcttccaagaaagataaggcatccacactgatgagagcaagggactacgtcagcactctccagtctagagtgtctgagttagaggagaagaacaggatgatgctagtacagttgcagcaccgccgcaatgatgtttctcccaacaagattgaggtcgacatcagaagtaatagagaggaaattaggaaacatgacaggaatttcacctgaagatatatagcagttgttatggtttatagtaggaggcctaaacagccctctagtcggcccat

SEQ ID NO: 72927 - DNA, 1198 bp, Zea Mays
gtttccaagcaactcctataaacctaatgcacatttcgctaaacttaaagtgtgtaaaaattatttaaaaacacaaggaaaggggttgcatgcaccagggcttgcctggaataaacactaggttagtgtttgttaggtggtgtccacttggcgatcaacctttgttctgatacttgtttcgtctgcccatcttcagttccgttcatcagcaccatcttgtggtcgactcagttctggttcttcgcatcacgtggttaattcacgtacctgaatgaaatgcattatgcacataaatgcatatagacataaatagtacaagactaaatattgctacaccgaagaggatgaaacacttataacaaaacattaagcaatactagctagcgatgtacgactaattataataattacgctatccagtctattcagaggtagtgcatacatcgcaatacaataaaatatacacccgctgtactctccttagctaaagcttaacattttaagactaataaacttagaatcattagtctaagacatctaattttgggaataaggatagaagcacatcaactttctaaaccacttgataggactaacatcacaatattcttagatccaatggataacatattatcaaaagcatggatcctcataaaattgcagtctcgacaattacattattttagtttaaccggacctagcataaagatcaaacaaaaaaaacatcccaacttctatgagcacatactagatcactatgccttcacaacaagtatgatcttcgaattaatgagacctaactcaaatatttattaactagaaccaaacacaagtcgtacaaattgcagtctcgacaattacattattttagtttaaccggacctagcataaagatcaaacaaaaaaacatcccagcttctatgagcacatactagatcactatgccttcacaacaagtatgatcttcgaattaatgagacctaactcaaatatttattaaccagaaccaaacacaagtcgtacagtagagcataacatcaatatatcacaatacttagacttgacacttttaaatactcaagacttgaaataagcataggagtcatttaactaacttcataaattacttctcttggttaactggtacaatatttcgacttactaactttggtcaccccataatcagaacaagagtgac

SEQ ID NO: 72928 - DNA, 498 bp, Zea Mays
atggctgagatgtgcaggaaccgaccagggaaaagcaagggatgcggcggcccaaggaagaagctggagttgcagcggggaatggaagccgctgcgcagggagctcgacgcagaggagcgcgcaggcgaagaagctccaggggcgcgcggcagagaggaacgcagcagccatggagctcacggcggcttgagggagacggccgtgggagggacttcggcgagctggagctggatgcggcctgggcgcgacgaagggagctgcgcgtccagagcgagcagggagagcgccgagcggaacagggacctccgggcaaaggaccagggcgcgaaggccaaggaatccagggcgctgggcgtgcgctcgagcaggcagagggaacactggaagaccgcggcgcgcagcagggaccgctcgactgggcgcactgcgcatggaggaagctcgacagcgcgaggcggagggagaagacgaagggagatggcaacggctggagatga

SEQ ID NO: 72929 - DNA, 658 bp, Zea Mays
cttttcctcttcactctccatcgtcaccaaaaatatgtctccctatccaagcgattcgccgaaggaaccgcccacgatggcgccgatccaccgtgtgcacaagacgggtctgcctcgagcttcgcgctggtaggtcggtcttgtgatggctcctcgccgtcagcgcaggtgcggggtggcgacgactgcgggtcttaggcgacaccgtcacaaccactgcgtccgcaccgtccagaagtgacgcctccaccttcctctacgcgcagacgccaattcgaccaccttcctcgccgacaccctcagcctcaaggagaacgaggtgtgtgtctcgcgttcatgaaatccatcgtgcctggtgggattgcattcaagatgtacttctctgtcaagagaaatggcatgggatatggtttgtatctcgattcttctgtgtgcgtctaagtaggtcgtggtcatctgtacaggctaaagattggtgccttcttccaatctccccctatattagttccccaccctcttcgtcttccatttgtatattggagacctatatctgagatatcaccaggtctatcttttcattgcagacctcattgattttttctgtcatctgccaccgttgtaatggaattgctgctatagatgccgtttgtgacctgac

SEQ ID NO: 72930 - DNA, 1602 bp, Zea Mays
gtgaggtaatcccgcagtgcaggtgagcgaccggcgcctagcgttctgtggccgccgcccttctgccgtccgaccggaccaggtcgccgacgtcgcccctatcccgcacgcgtcatcgcagcgcctccgagtctccgccaagatctgcctcggccacggcgcggcgccgctggagctgcagccgtccagccgactgccttccgccgaccaccgaccaccgaccactggccgagccgccgcagctagctgcgctttgaagcatgggtcgttttgaacaagttactccagaaggccctgaaactaatcagcatgatgagcagcgctccatacgtttacatgcattttctgatctatcacacgtccctgcagccacttttatttatctcttaaaggactgctatggatatggtacgaacaaagcaacctcaaagtttaagatcctcatgcagctggtaaaagtggcattgcataatggtccacagccaggcccgttcacatatgttgtccagtgtatgtatattgtacctctgctggggaaaacttattctgaagggttcagccatatgttgacatcctctttaaagcacttgaaatctgtggaatcagcacagaaagatttcttggaggcaaagcaccttgccgcacaacttgttcttgatatccttgattctattgtaccccatgagaaccgcatattggtcaagcttcttgagacatttgaaattgagttgagagacatggcccgtgctttgtatgattcagagttggacgatggtgatctaatgaaagcacgtgaacatctcagacagcaagttaagcgctgtatggaatcagaatccaatgcacttgctgtgactctaataacacatttttccatccaatgctgtgatgagtccttcatcataaaattgattaaaaacaatcaattagagattgcagagcagtgtgctattttcatgggcaaggaaatgatatcgctagtcgttcaaaagtatctagatatgaaaatgctgaagagtgcaaacaaattggtcaaagaacatgaactcacagaagagtttccagatgttagctatttgtataaagagagttcagtaaagaagttggctgagaaaggatgctgggatattgcagaaactagggccaagaaggacacaaaactcctggaatacctggtatatttagcaatggaagctggttatatggagaaggttgacgagctttgcaagcgatactctattgaagttccggagaaggttttctgtgtatctgactacttagatctgaagaaattggatgtggaagaaattgtctgggttgatgagatcaatgggctgcttaatgcaacaagtgatattgaagcttgtaaaattattggcatggattgtgagtggagacctaatttcgagaaaaatactaaatctagtaaggtaacaccttggtttgtcttggtataagtttcaatgtctttttaattttctggctaaaactgtaatagtggcatggttgcatcggcctatgggcgaataaaaaatgacagttttgtcagaaaacatgtctgtgtaaactaggcaaaatgattgttttaggtttcccatgtgt

SEQ ID NO: 72931 - DNA, 1277 bp, Zea Mays
gtgaggtaatcccgcagtgcaggtgagcgaccggcgcctagcgttctgtggccgccgcccttctgccgtccgaccggaccaggtcgccgacgtcgcccctatcccgcacgcgtcatcgcagcgcctccgagtctccgccaagatctgcctcggccacggcgcggcgccgctggagctgcagccgtccagccgactgccttccgccgaccaccgaccaccgaccactggccgagccgccgcaatctgtgctgttctatacaggctagctgcgctttgaagcatgggtcgttttgaacaagttactccagaaggccctgaaactaatcagcatgatgagcagcgctccatacgtttacatgcattttctgatctatcacacgtccctgcagccacttttatttatctcttaaaggactgctatggatatggtacgaacaaagcaacctcaaagtttaagatcctcatgcagctggtaaaagtggcattgcataatggtccacagccaggcccgttcacatatgttgtccagtgtatgtatattgtacctctgctggggaaaacttattctgaagggttcagccatatgttgacatcctctttaaagcacttgaaatctgtggaatcagcacagaaagatttcttggaggcaaagcaccttgccgcacaacttgttcttgatatccttgattctattgtaccccatgagaaccgcatattggtcaagcttcttgagacatttgaaattgagttgagagacatggcccgtgctttgtatgattcagagttggacgatggtgatctaatgaaagcacgtgaacatctcagacagcaagtatatttagcaatggaagctggttatatggagaaggttgacgagctttgcaagcgatactctattgaaggttatgttgattctttggttccggagaaggttttctgtgtatctgactacttagatctgaagaaattggatgtggaagaaattgtctgggttgatgagatcaatgggctgcttaatgcaacaagtgatattgaagcttgtaaaattattggcatggattgtgagtggagacctaatttcgagaaaaatactaaatctagtaaggtaacaccttggtttgtcttggtataagtttcaatgtctttttaattttctggctaaaactgtaatagtggcatggttgcatcggcctatgggcgaataaaaaatgacagttttgtcagaaaacatgtctgtgtaaactaggcaaaatgattgttttaggtttcccatgtgt

SEQ ID NO: 72932 - DNA, 1608 bp, Zea Mays
gtgaggtaatcccgcagtgcaggtgagcgaccggcgcctagcgttctgtggccgccgcccttctgccgtccgaccggaccaggtcgccgacgtcgcccctatcccgcacgcgtcatcgcagcgcctccgagtctccgccaagatctgcctcggccacggcgcggcgccgctggagctgcagccgtccagccgactgccttccgccgaccaccgaccaccgaccactggccgagccgccgcagctagctgcgctttgaagcatgggtcgttttgaacaagttactccagaaggccctgaaactaatcagcatgatgagcagcgctccatacgtttacatgcattttctgatctatcacacgtccctgcagccacttttatttatctcttaaaggactgctatggatatggtacgaacaaagcaacctcaaagtttaagatcctcatgcagctggtaaaagtggcattgcataatggtccacagccaggcccgttcacatatgttgtccagtgtatgtatattgtacctctgctggggaaaacttattctgaagggttcagccatatgttgacatcctctttaaagcacttgaaatctgtggaatcagcacagaaagatttcttggaggcaaagcaccttgccgcacaacttgttcttgatatccttgattctattgtaccccatgagaaccgcatattggtcaagcttcttgagacatttgaaattgagttgagagacatggcccgtgctttgtatgattcagagttggacgatggtgatctaatgaaagcacgtgaacatctcagacagcaagttaagcgctgtatggaatcagaatccaatgcacttgctgtgactctaataacacatttttccatccaatgctgtgatgagtccttcatcataaaattgattaaaaacaatcaattagagattgcagagcagtgtgctattttcatgggcaaggaaatgatatcgctagtcgttcaaaagtatctagatatgaaaatgctgaagagtgcaaacaaattggtcaaagaacatgaactcacagaagagtttccagatgttagctatttgtataaagagagttcagtaaagaagttggctgagaaaggatgctgggatattgcagaaactagggccaagaaggacacaaaactcctggaatacctggtatatttagcaatggaagctggttatatggagaaggttgacgagctttgcaagcgatactctattgaaggttatgttgattctttggttccggagaaggttttctgtgtatctgactacttagatctgaagaaattggatgtggaagaaattgtctgggttgatgagatcaatgggctgcttaatgcaacaagtgatattgaagcttgtaaaattattggcatggattgtgagtggagacctaatttcgagaaaaatactaaatctagtaaggagacaagtatgtgttgaattgattcgtcagcttgatcatagaggagcagattgttggatttggtaatctgcacttgacaagatggtcaaaagttcaacatcaaattgttaacagctagccatagaataatttctagcacagaggatcacaacatttgcg

SEQ ID NO: 72933 - DNA, 916 bp, Zea Mays
ttcattctctaactgtcattgtgggtagttcattagttaatttatttttttgggaaatgtagaagagctgagttccatgtctctttgagtagaaaagtatgcctttatgaagagaaaaaaaataagagacaattctctgtatgccactgcaattttgcctaataccctatttgccatcgcagatgttctaatcccttttatactacttggatgcaatttcttctaggtattttgcatttttatgaagagatacaaaaaattgcagaggcatccaagtagtataaaattgtagaggcatacaaagattttttctataaataaagtatttctttatgaagagatacaaacaagggcccccaccccaaacatgcacacacagacgcaccgttttagagaaattgactatgcacgacacggagttttacacaaccagattagtgacggtggactaaggccctatttgaatgtactagagctaatagttaactactaaaattagctagagacatccaaatagtctgactaatagttcagctattagctgcttttagctggagacatccaaacacctccagctaatagtctagctaaccattagctgcgccctcaactacccaatagttcattagctggttcaaccgagctaaaatcagctaatagttagctagctaattccattagcaatttttagctagctaactattagctctagtgcattcaaataggccaactgtttgatgatcaccaaaaaatggactagtgccattgaaaacaaaatctgcacgttgcttctaaaaaaactcgacctgcgggggtaagacagcccccgggcattatattaagaagaccttctcacgaaggtcgagaaaactctcgaacccctgccccactcatacacagcggcagcgtagtccat

SEQ ID NO: 72934 - DNA, 1038 bp, Zea Mays
ctttattcttgtttccttgaaagcagtcctgtgatcttaaagagtacgctgctcttgatgccgtggtccttgtgcatatattccatgaacacatgcggaggcaagcacagttcggtgtctctgagggaagcagagtcgagtggaggtctcacgttgtttcccgagtgagttgcacgcgtacgcccttgcgtttctagtggtggggttggacagcttggagtgaaattacttctagcatctgcatgtgccgtcttctaacatctatgatgacagttctctggcatggcatcataggctcacagttcatccccagaagttagtgctgcgacttcgttgctcttgccttgtgtatatacagtatattgttacctccaccggagtttttcctttcctgctgtatcgcattcagtgctgagtgcattattagatttggaacccgttttctgttatgaattagtgataatggaagtcaggaagtgtcgcgttatgaattagtgcagggggcaagaaagccagaggattatttccgtattatgtatgggacgtgaacttagcttaatagatagattggggttggagatgtagatgtagatgaatatcctaacaacttatttgggccaagtcctttctaactcggatttgggtgcttggttttcttttcttttttatttaactgcctacttctgcttaggttaggtcttgcatcttgcgctcatttaaacctgttttcttcttaattaattattaaagttgaagtaaaaaaacggatttggtcttcctaggtcaggttttgttttaaaactactaccgacctatttagtccaatttgatttccagcttatttacggtttcatgttcaagagttgctatttcggataatctgtccatctaggcgcctgagtttctataaaaagctaggtggtcgcagcttataatccaatgatgaattgctaatttgaaaagctaggtgatcgcagcttacaagccaatgccgttaatttgacaggtcataatagttgagttattttttagacgcac

SEQ ID NO: 72935 - DNA, 1952 bp, Zea Mays
aagttttcccgtccacgcacacggcatacggcacacaaagcgagtagagacatctcaatgacactgggtcaccgatccctgatctccggggcctcgtcgtcaaccacagcagccggcagcgcgtgcacgcagcgagggtagcgccacacatgccactgacactgggctcaacaaagtgacggatccgcaacccagtgggacgtcacctccctgcacgggcccactctgttccagcttccgtgtgtacacagtacaccacagcacacgggcctactcaccctcgcctccgaggcttcgagtccgagagagcgcttgagaagaagctcaggcgaggcgaggcaagggatgccgtgattgacgacggaaacgaagccgagagggagaagcgaagctagccttgcatacacccggccccgtcccaatgcccaccgcttccggctcggatcccaaaccctaaccctactcggccgtccgcgggcccgccgccggcgacgcgatcgggtgccgacgctgatgcgctctgtgccgcgtgcgtgattctctcgcgcaagtaagcgttggaaaaggggctccctggctgcagcgacgcgtggccgaggtgcggatcggggaggggaggacggtcggagcgagatgccgggggacgtcgcgacctcgccggcgccggcgccgccgtccgtgtcctcgtcgtcgcagaaccaccaccatcacggccccacgaccgcccgcggcctcctctgccacgctgtcgccggcgcctccgctggcgtggtggcggcgaccttcgtgtgcccgctcgatgtcatcaagaccaggttccaggtacacggatggcccaagcttaccacaggcacaattggagtgtaattattgggagtttacagcagattgctcaacgggaaggttttcggggcatgtaccgtggcctctccccaactgttctagcgctcttgcctaactgggcggtctactttactgtgtatgagcagcttaaaagcttactttcttccaatgatggaagtcatcaactttctttaggggcaaatgttgttgctgcatcatgtgctggtgctgcaacaactactgtaacaaatccactttgggttgttaagacaagatttcagactcaaggaataagagccgggccaatgccatataaaggtacacttgctgccttgcgaagaatagcacatgaagaaggcatccgaggactatacagtggtctggtccctgccttggctggtatcagtcatgttgctattcagtttccctgcatacgagaagataaaagcttatctggctgagcgagataatactactgtagaagcattgagttttggtgatgttgctgttgcgtcgtctctggctaaagtagctgcatcaacattgacatatcctcatgaggttgttcggtcaaggctgcaagaccagcgagcgcactctgatgctagatacaagggtgtagtagactgcatcagaaaggtttatcataaagagggtgtggctggcttctacagtggatgcgccacaaatctattgcggacgacccctgccgcagtgataacattcactagcttcgagatgatccacaggttccttcttgatctattccctgctgaatctgaaccgcacatccaacctctcaagcattgatcatacaacatttgtaccctatccatgctgccattcgagtttaggaccccagcaaccatccagcaatgttgtttactgtgccagatggctgttgtaaaagagagaattgtttttttcccggatatgcaacagtaattcggaagttcaaacaatagtgttggctgagcattagcaacttgtatgtaatagatttgttagcatgcatttgcgggaggtatattgggtatgttttcttgatgatgatgaaaagaaaacaatcttaccacatatgaaagaatgattgctatatttttttccca

SEQ ID NO: 72936 - DNA, 600 bp, Zea Mays
aaaaaacagagtagtaaaaaaaaagcgagtttcatgtctttacttcctctgaccgttgcccaccttccgcagccgccgccactgtcgccgctggcgtctcctcctcctccgccactgaaaccgctatcgcctcccaccacctcctccagcgttcccgagggatggagaacggtggaatcgaggaggccgacgacgcaccgccagtgccctcgccgcccaatgggcggcggtaccggccggtcgggtcgagcgaccgcgctgtgatccagatgacttccatggagccgggatcctcctcttccacaatcgatgccgtcgtgactccccagccgccaaggtgatgcggactctaatcacatttgcaggtttcgcgagcaatttgttatgtcacgtgctagcagatcgcatacgtgctgaattcagaggttactgctgcgtggataactagtatagttgctgcgaaatagtgtgtgcattctcttggacatgaattgtttaggacatggggtgttgaacggagtaagtggagagtagcggtggactgttgagcatactcaatctgggatgttaggaaacactgaaattactattttgggcctt

SEQ ID NO: 72937 - DNA, 3465 bp, Zea Mays
aagacgattgattgaactgttggttctacttcatgacatcatcatctgattgaacctgagcagcatgacaggagagcagattcaggccccttcaagtcccagggatggcgaggatgttgcaattaccattgggcgccccaaggaaagtggacctaagttcggcaccatgatgggtgtctttgttccatgcttgcagaacatcttgggaatcatttattatatccgttttacctggattgtaggtatgtcaggtgtatggcagtcacttgtgttggtttcattttgtggtgcatgcacatttttgacctcgatatcattaagtgccattgcaacgaatggagctatgaagggtggtgggccatattatcttataggccgtgcacttggtcctgaagttggagttagtataggattatgcttcttcctcgggaatgcagtggctggatccatgtatgtgcttggggctgtagaaacctttcttgacgctgttccttctgctggacttttccaaaagagtgtaacagttgtcaacaatacattagtgaatggtacagaaactgctggcacgtcaactatatctacacccagcttgcacgatcttcaagtgtatggtgttattgtgaccatactgctgtgttttattgtgttcggtggtgtcaaaattatcaacaaggttgcacctgctttcttaataccagtcctgttttctttgctgtgcatctatcttggtgtcttcattgcaccaaggcataatgctccaaagggaatcactggattgagtataaccacattgaaagacaattggggtgaaaactatcaacgtacaaataatgctggcgttcctgatccaagtggatcaatatattgggatttcaatgctttggtaggtctgtttttcccagcagtcactggaattatggctggctcaaaccgatctgcttcactgaaagatacacagcgttcgataccaatcggcacattatctgcaactctttcaacaactgctatgtacttgttctctgtgcttctgtttggagccttggccacacgggaagagcttctaactgataggcttcttactgctacggtggcttggcctgctcctgcagtgatttacattggtattattctgtccaccttaggtgcagcactgcagagtttgactggggctccaaggttgcttgcagcaattgcgaatgatgacattcttcctgttcttaattacttcaaagtttctgagggatctgagccacatgcggccactttattcacagctttcatctgtatttgctgtgttgttattggaaacttggatttgattacccccactatcacaatgtttttccttctgtgctatgctggcgtgaacctgtcatgctttctgcttgacctccttgatgctcctagttggcgccctagatggaaatttcaccattggagcctttcacttgttggggcattactctgtgttgtgattatgtttctgatctcctggtctttcactgttgtctcccttgcccttgcaagcctcatctattactatgtgagcataaaagggaaggctggagactggggagatgggttcaagagtgcatactttcaattggccctccgaagtctcagatcacttggagcaaaccaagtccatcctaagaattggtaccccattcctctggtattctgccgtccatggggtaaacttccggaaaatgttccttgtcatccaaaacttgcagacttcgctaattgtatgaagaagaagggtcgtggtatgtccatttttgtctcgataattgatggtgattatcatgaactagctgaggatgcaaagactgcctgccgccaactagatgcttatattgactacaaacgctgtgagggtgttgcagagatcattgtagctcctaatatgtctgatggtttccgtagcattgtgcagacaatgggcctaggaaacttaaaaccaaatattgttgtgatgcggtaccctgagatctggcgacgtgagaatttgacacagataccgtcaacatttgtcagcataataaatgattgcattattgctaacaaggcagtagtcattgtgaagggactcgatgagtggcctaatgagtaccagcgacaatacggtactattgacctctactggattgtaagagatggaggattgatgcttcttctgtctcagctcctgctgacaaaggagagttttgagagctgtaagatccaagtattctgcatatctgaagaggatacagatgcagaggagttgaaggctgatgtcaagaagttcttgtatgatcttaggatgcaagctgaggtcattgttgtcactatgaaatcatgggaatcacacatggagagcagcagtaacggcgctcagcaggataactcccatgaggcttacacaagcgcacagcaaaggatcaggacataccttgatgagatgaaggaaactgctcaaacagaaaggcagttactaatggagaatgggaggcaagttgtgaacgaacagaaggttgataaattcctttacacaatgtttaagttgaactccacgatactcaggtactccagaatggcagctgtagttcttgtgagccttcctccaccgccattataccatccttcatatttctacatggagtacatggatttgcttgtagagaatgtcccacgcatgttaatagttaggggatatacgagagatgttgtcacatttttcacatgattatacatacgaacttctcacctggagactctagtgccgtcaggctgttgtactatctcagcagagactggatacacaagagcgtggaatctaccactgaaatgacaagccctcaccttgaaggcaaccacgatgagatgtcagatgtgcagagctgttgttcgcatattggattcgtgaactattgaactgcagtgtcttcattcttttttctggatttaaaagatccacatagcgagctttgattcttacagattttgtagctatcatatgtaaacacttaccatcttgtaattgtaagcatacttacatgctggcccaaagacaaatgcaatccttaccttctcactgaaacatttatataggtattttttttgcatcacttgtatgcgtctaaaactgatggacttgttgagatgagcagagctgcgaattttgaatggctacccccaaatgaattttggttatgctttgtcgcaaatatttggttttaatggtacaagatttctgagatacattactcaatgaggggtgctctgctactttacccagttactttcttgatatatgttttgttgaatgctgttctacatgtgatcttcagccagtaccttgatgttcaggcaatacatctacctgtcgaatgcaatttgtgccgtgtttcccgagctcgtaccactttcaagctcgggcctattcggaacggtactgtttcccaagcttaaagactcgag

SEQ ID NO: 72938 - DNA, 417 bp, Zea Mays
agcagcatgacaggagagcagattcaggccccttcaagtcccagggatggcgaggatgttgcaattaccattgggcgccccaaggaaagtggacctaagttcggcaccatgatgggtgtctttgttccatgcttgcagaacatcttgggaatcatttattatatccgttttacctggattgtaggtatgtcaggtgtatggcagtcacttgtgttggtttcattttgtggtgcatgcacatttttgacctcgatatcattaagtgccattgcaacgaatggagctatgaagggtggtgggccatattatcttataggccgtgcacttggtcctgaagttggagttagtataggattatgcttcttcctcgggaatgcagtggctggatccatgtatcaccgtgaactcctcttctag

SEQ ID NO: 72939 - DNA, 3251 bp, Zea Mays
agcagcatgacaggagagcagattcaggccccttcaagtcccagggatggcgaggatgttgcaattaccattgggcgccccaaggaaagtggacctaagttcggcaccatgatgggtgtctttgttccatgcttgcagaacatcttgggaatcatttattatatccgttttacctggattgtaggtatgtcaggtgtatggcagtcacttgtgttggtttcattttgtggtgcatgcacatttttgacctcgatatcattaagtgccattgcaacgaatggagctatgaaggtatgtgcttggggctgtagaaacctttcttgacgctgttccttctgctggacttttccaaaagagtgtaacagttgtcaacaatacattagtgaatggtacagaaactgctggcacgtcaactatatctacacccagcttgcacgatcttcaagtgtatggtgttattgtgaccatactgctgtgttttattgtgttcggtggtgtcaaaattatcaacaaggttgcacctgctttcttaataccagtcctgttttctttgctgtgcatctatcttggtgtcttcattgcaccaaggcataatgctccaaagggaatcactggattgagtataaccacattgaaagacaattggggtgaaaactatcaacgtacaaataatgctggcgttcctgatccaagtggatcaatatattgggatttcaatgctttggtaggtctgtttttcccagcagtcactggaattatggctggctcaaaccgatctgcttcactgaaagatacacagcgttcgataccaatcggcacattatctgcaactctttcaacaactgctatgtacttgttctctgtgcttctgtttggagccttggccacacgggaagagcttctaactgataggcttcttactgctacggtggcttggcctgctcctgcagtgatttacattggtattattctgtccaccttaggtgcagcactgcagagtttgactggggctccaaggttgcttgcagcaattgcgaatgatgacattcttcctgttcttaattacttcaaagtttctgagggatctgagccacatgcggccactttattcacagctttcatctgtatttgctgtgttgttattggaaacttggatttgattacccccactatcacaatgtttttccttctgtgctatgctggcgtgaacctgtcatgctttctgcttgacctccttgatgctcctagttggcgccctagatggaaatttcaccattggagcctttcacttgttggggcattactctgtgttgcctcatctattactatgtgagcataaaagggaaggctggagactggggagatgggttcaagagtgcatactttcaattggccctccgaagtctcagatcacttggagcaaaccaagtccatcctaagaattggtaccccattcctctggtattctgccgtccatggggtaaacttccggaaaatgttccttgtcatccaaaacttgcagacttcgctaattgtatgaagaagaagggtcgtggtatgtccatttttgtctcgataattgatggtgattatcatgaactagctgaggatgcaaagactgcctgccgccaactagatgcttatattgactacaaacgctgtgagggtgttgcagagatcattgtagctcctaatatgtctgatggtttccgtagcattgtgcagacaatgggcctaggaaacttaaaaccaaatattgttgtgatgcggtaccctgagatctggcgacgtgagaatttgacacagataccgtcaacatttgtcagcataataaatgattgcattattgctaacaaggcagtagtcattgtgaagggactcgatgagtggcctaatgagtaccagcgacaatacggtactattgacctctactggattgtaagagatggaggattgatgcttcttctgtctcagctcctgctgacaaaggagagttttgagagctgtaagatccaagtattctgcatatctgaagaggatacagatgcagaggagttgaaggctgatgtcaagaagttcttgtatgatcttaggatgcaagctgaggtcattgttgtcactatgaaatcatgggaatcacacatggagagcagcagtaacggcgctcagcaggataactcccatgaggcttacacaagcgcacagcaaaggatcaggacataccttgatgagatgaaggaaactgctcaaacagaaaggcagttactaatggagaatgggaggcaagttgtgaacgaacagaaggttgataaattcctttacacaatgtttaagttgaactccacgatactcaggtactccagaatggcagctgtagttcttgtgagccttcctccaccgccattataccatccttcatatttctacatggagtacatggatttgcttgtagagaatgtcccacgcatgttaatagttaggggatatacgagagatgttgtcacatttttcacatgattatacatacgaacttctcacctggagactctagtgccgtcaggctgttgtactatctcagcagagactggatacacaagagcgtggaatctaccactgaaatgacaagccctcaccttgaaggcaaccacgatgagatgtcagatgtgcagagctgttgttcgcatattggattcgtgaactattgaactgcagtgtcttcattcttttttctggatttaaaagatccacatagcgagctttgattcttacagattttgtagctatcatatgtaaacacttaccatcttgtaattgtaagcatacttacatgctggcccaaagacaaatgcaatccttaccttctcactgaaacatttatataggtattttttttgcatcacttgtatgcgtctaaaactgatggacttgttgagatgagcagagctgcgaattttgaatggctacccccaaatgaattttggttatgctttgtcgcaaatatttggttttaatggtacaagatttctgagatacattactcaatgaggggtgctctgctactttacccagttactttcttgatatatgttttgttgaatgctgttctacatgtgatcttcagccagtaccttgatgttcaggcaatacatctacctgtcgaatgcaatttgtgccgtgtttcccgagctcgtaccactttcaagctcgggcctattcggaacggtactgtttcccaagcttaaagactcgag

SEQ ID NO: 72940 - DNA, 1634 bp, Zea Mays
cagcatgacaggagagcagattcaggccccttcaagtcccagggatggcgaggatgttgcaattaccattgggcgccccaaggaaagtggacctaagttcggcaccatgatgggtgtctttgttccatgcttgcagaacatcttgggaatcatttattatatccgttttacctggattgtaggtatgtcaggtgtatggcagtcacttgtgttggtttcattttgtggtgcatgcacatttttgacctcgatatcattaagtgccattgcaacgaatggagctatgaagggtggtgggccatattatcttataggccgtgcacttggtcctgaagttggagttagtataggattatgcttcttcctcgggaatgcagtggctggatccatgtatgtgcttggggctgtagaaacctttcttgacgctgttccttctgctggacttttccaaaagagtgtaacagttgtcaacaatacattagtgaatggtacagaaactgctggcacgtcaactatatctacacccagcttgcacgatcttcaagtgtatggtgttattgtgaccatactgctgtgttttattgtgttcggtggtgtcaaaattatcaacaaggttgcacctgctttcttaataccagtcctgttttctttgctgtgcatctatcttggtgtcttcattgcaccaaggcataatgctccaaagggaatcactggattgagtataaccacattgaaagacaattggggtgaaaactatcaacgtacaaataatgctggcgttcctgatccaagtggatcaatatattgggatttcaatgctttggtaggtctgtttttcccagcagtcactggaattatggctggctcaaaccgatctgcttcactgaaagatacacagcgttcgataccaatcggcacattatctgcaactctttcaacaactgctatgtacttgttctctgtgcttctgtttggagccttggccacacgggaagagcttctaactgataggcttcttactgctacggtggcttggcctgctcctgcagtgatttacattggtattattctgtccaccttaggtgcagcactgcagagtttgactggggctccaaggttgcttgcagcaattgcgaatgatgacattcttcctgttcttaattacttcaaagtttctgagggatctgagccacatgcggccactttattcacagctttcatctgtatttgctgtgttgttattggaaacttggatttgattacccccactatcacaatgtttttccttctgtgctatgctggcgtgaacctgtcatgctttctgcttgacctccttgatgctcctagttggcgccctagatggaaatttcaccattggagcctttcacttgttggggcattactctgtgttggtatggttcttaatactcttacaattttattttgtctatcatgatcttcagcatgaacagtttaaacttgagttaggtctttggtttgagactttgttcacttctattgtttttaatccaaccaccttatcttcacctatactaaagtcttgtttatcatgttttacaatagcaaatatctaatcgaaacagccataaatgcatttataattataagtgctg

SEQ ID NO: 72941 - DNA, 3603 bp, Zea Mays
cagcatgacaggagagcagattcaggccccttcaagtcccagggatggcgaggatgttgcaattaccattgggcgccccaaggaaagtggacctaagttcggcaccatgatgggtgtctttgttccatgcttgcagaacatcttgggaatcatttattatatccgttttacctggattgtaggtatgtcaggtgtatggcagtcacttgtgttggtttcattttgtggtgcatgcacatttttgacctcgatatcattaagtgccattgcaacgaatggagctatgaagggtggtgggccatattatcttataggccgtgcacttggtcctgaagttggagttagtataggattatgcttcttcctcgggaatgcagtggctggatccatgtatgtgcttggggctgtagaaacctttcttgacgctgttccttctgctggacttttccaaaagagtgtaacagttgtcaacaatacattagtgaatggtacagaaactgctggcacgtcaactatatctacacccagcttgcacgatcttcaagtgtatggtgttattgtgaccatactgctgtgttttattgtgttcggtggtgtcaaaattatcaacaaggttgcacctgctttcttaataccagtcctgttttctttgctgtgcatctatcttggtgtcttcattgcaccaaggcataatgctccaaagggaatcactggattgagtataaccacattgaaagacaattggggtgaaaactatcaacgtacaaataatgctggcgttcctgatccaagtggatcaatatattgggatttcaagtaagttaaacagaatggcaggatggtatgttaccaaaaagagtttcaccctgttcatatgcacttgtttagtgaattccatctgccctatatttaaggtctgttggaactagatgattaactgtgacaaggttcagagatttctaagctattaagagcatgaccctgttcatttttaaatgcacggccgtttgcacatttccttatgtatgtgaaactttattgtgctaaattttttgtatcgatccttcagtgctttggtaggtctgtttttcccagcagtcactggaattatggctggctcaaaccgatctgcttcactgaaagatacacagcgttcgataccaatcggcacattatctgcaactctttcaacaactgctatgtacttgttctctgtgcttctgtttggagccttggccacacgggaagagcttctaactgataggcttcttactgctacggtggcttggcctgctcctgcagtgatttacattggtattattctgtccaccttaggtgcagcactgcagagtttgactggggctccaaggttgcttgcagcaattgcgaatgatgacattcttcctgttcttaattacttcaaagtttctgagggatctgagccacatgcggccactttattcacagctttcatctgtatttgctgtgttgttattggaaacttggatttgattacccccactatcacaatgtttttccttctgtgctatgctggcgtgaacctgtcatgctttctgcttgacctccttgatgctcctagttggcgccctagatggaaatttcaccattggagcctttcacttgttggggcattactctgtgttgcctcatctattactatgtgagcataaaagggaaggctggagactggggagatgggttcaagagtgcatactttcaattggccctccgaagtctcagatcacttggagcaaaccaagtccatcctaagaattggtaccccattcctctggtattctgccgtccatggggtaaacttccggaaaatgttccttgtcatccaaaacttgcagacttcgctaattgtatgaagaagaagggtcgtggtatgtccatttttgtctcgataattgatggtgattatcatgaactagctgaggatgcaaagactgcctgccgccaactagatgcttatattgactacaaacgctgtgagggtgttgcagagatcattgtagctcctaatatgtctgatggtttccgtagcattgtgcagacaatgggcctaggaaacttaaaaccaaatattgttgtgatgcggtaccctgagatctggcgacgtgagaatttgacacagataccgtcaacatttgtcagcataataaatgattgcattattgctaacaaggcagtagtcattgtgaagggactcgatgagtggcctaatgagtaccagcgacaatacggtactattgacctctactggattgtaagagatggaggattgatgcttcttctgtctcagctcctgctgacaaaggagagttttgagagctgtaagatccaagtattctgcatatctgaagaggatacagatgcagaggagttgaaggctgatgtcaagaagttcttgtatgatcttaggatgcaagctgaggtcattgttgtcactatgaaatcatgggaatcacacatggagagcagcagtaacggcgctcagcaggataactcccatgaggcttacacaagcgcacagcaaaggatcaggacataccttgatgagatgaaggaaactgctcaaacagaaaggcagttactaatggagaatgggaggcaagttgtgaacgaacagaaggttgataaattcctttacacaatgtttaagttgaactccacgatactcaggtactccagaatggcagctgtagttcttgtgagccttcctccaccgccattataccatccttcatatttctacatggagtacatggatttgcttgtagagaatgtcccacgcatgttaatagttaggggatatacgagagatgttgtcacatttttcacatgattatacatacgaacttctcacctggagactctagtgccgtcaggctgttgtactatctcagcagagactggatacacaagagcgtggaatctaccactgaaatgacaagccctcaccttgaaggcaaccacgatgagatgtcagatgtgcagagctgttgttcgcatattggattcgtgaactattgaactgcagtgtcttcattcttttttctggatttaaaagatccacatagcgagctttgattcttacagattttgtagctatcatatgtaaacacttaccatcttgtaattgtaagcatacttacatgctggcccaaagacaaatgcaatccttaccttctcactgaaacatttatataggtattttttttgcatcacttgtatgcgtctaaaactgatggacttgttgagatgagcagagctgcgaattttgaatggctacccccaaatgaattttggttatgctttgtcgcaaatatttggttttaatggtacaagatttctgagatacattactcaatgaggggtgctctgctactttacccagttactttcttgatatatgttttgttgaatgctgttctacatgtgatcttcagccagtaccttgatgttcaggcaatacatctacctgtcgaatgcaatttgtgccgtgtttcccgagctcgtaccactttcaagctcgggcctattcggaacggtactgtttcccaagcttaaagactcgag

SEQ ID NO: 72942 - DNA, 3658 bp, Zea Mays
cagcatgacaggagagcagattcaggccccttcaagtcccagggatggcgaggatgttgcaattaccattgggcgccccaaggaaagtggacctaagttcggcaccatgatgggtgtctttgttccatgcttgcagaacatcttgggaatcatttattatatccgttttacctggattgtaggtatgtcaggtgtatggcagtcacttgtgttggtttcattttgtggtgcatgcacatttttgacctcgatatcattaagtgccattgcaacgaatggagctatgaagggtggtgggccatattatcttataggccgtgcacttggtcctgaagttggagttagtataggattatgcttcttcctcgggaatgcagtggctggatccatgtatgtgcttggggctgtagaaacctttcttgacgctgttccttctgctggacttttccaaaagagtgtaacagttgtcaacaatacattagtgaatggtacagaaactgctggcacgtcaactatatctacacccagcttgcacgatcttcaagtgtatggtgttattgtgaccatactgctgtgttttattgtgttcggtggtgtcaaaattatcaacaaggttgcacctgctttcttaataccagtcctgttttctttgctgtgcatctatcttggtgtcttcattgcaccaaggcataatgctccaaagggaatcactggattgagtataaccacattgaaagacaattggggtgaaaactatcaacgtacaaataatgctggcgttcctgatccaagtggatcaatatattgggatttcaagtaagttaaacagaatggcaggatggtatgttaccaaaaagagtttcaccctgttcatatgcacttgtttagtgaattccatctgccctatatttaaggtctgttggaactagatgattaactgtgacaaggttcagagatttctaagctattaagagcatgaccctgttcatttttaaatgcacggccgtttgcacatttccttatgtatgtgaaactttattgtgctaaattttttgtatcgatccttcagtgctttggtaggtctgtttttcccagcagtcactggaattatggctggctcaaaccgatctgcttcactgaaagatacacagcgttcgataccaatcggcacattatctgcaactctttcaacaactgctatgtacttgttctctgtgcttctgtttggagccttggccacacgggaagagcttctaactgataggcttcttactgctacggtggcttggcctgctcctgcagtgatttacattggtattattctgtccaccttaggtgcagcactgcagagtttgactggggctccaaggttgcttgcagcaattgcgaatgatgacattcttcctgttcttaattacttcaaagtttctgagggatctgagccacatgcggccactttattcacagctttcatctgtatttgctgtgttgttattggaaacttggatttgattacccccactatcacaatgtttttccttctgtgctatgctggcgtgaacctgtcatgctttctgcttgacctccttgatgctcctagttggcgccctagatggaaatttcaccattggagcctttcacttgttggggcattactctgtgttgtgattatgtttctgatctcctggtctttcactgttgtctcccttgcccttgcaagcctcatctattactatgtgagcataaaagggaaggctggagactggggagatgggttcaagagtgcatactttcaattggccctccgaagtctcagatcacttggagcaaaccaagtccatcctaagaattggtaccccattcctctggtattctgccgtccatggggtaaacttccggaaaatgttccttgtcatccaaaacttgcagacttcgctaattgtatgaagaagaagggtcgtggtatgtccatttttgtctcgataattgatggtgattatcatgaactagctgaggatgcaaagactgcctgccgccaactagatgcttatattgactacaaacgctgtgagggtgttgcagagatcattgtagctcctaatatgtctgatggtttccgtagcattgtgcagacaatgggcctaggaaacttaaaaccaaatattgttgtgatgcggtaccctgagatctggcgacgtgagaatttgacacagataccgtcaacatttgtcagcataataaatgattgcattattgctaacaaggcagtagtcattgtgaagggactcgatgagtggcctaatgagtaccagcgacaatacggtactattgacctctactggattgtaagagatggaggattgatgcttcttctgtctcagctcctgctgacaaaggagagttttgagagctgtaagatccaagtattctgcatatctgaagaggatacagatgcagaggagttgaaggctgatgtcaagaagttcttgtatgatcttaggatgcaagctgaggtcattgttgtcactatgaaatcatgggaatcacacatggagagcagcagtaacggcgctcagcaggataactcccatgaggcttacacaagcgcacagcaaaggatcaggacataccttgatgagatgaaggaaactgctcaaacagaaaggcagttactaatggagaatgggaggcaagttgtgaacgaacagaaggttgataaattcctttacacaatgtttaagttgaactccacgatactcaggtactccagaatggcagctgtagttcttgtgagccttcctccaccgccattataccatccttcatatttctacatggagtacatggatttgcttgtagagaatgtcccacgcatgttaatagttaggggatatacgagagatgttgtcacatttttcacatgattatacatacgaacttctcacctggagactctagtgccgtcaggctgttgtactatctcagcagagactggatacacaagagcgtggaatctaccactgaaatgacaagccctcaccttgaaggcaaccacgatgagatgtcagatgtgcagagctgttgttcgcatattggattcgtgaactattgaactgcagtgtcttcattcttttttctggatttaaaagatccacatagcgagctttgattcttacagattttgtagctatcatatgtaaacacttaccatcttgtaattgtaagcatacttacatgctggcccaaagacaaatgcaatccttaccttctcactgaaacatttatataggtattttttttgcatcacttgtatgcgtctaaaactgatggacttgttgagatgagcagagctgcgaattttgaatggctacccccaaatgaattttggttatgctttgtcgcaaatatttggttttaatggtacaagatttctgagatacattactcaatgaggggtgctctgctactttacccagttactttcttgatatatgttttgttgaatgctgttctacatgtgatcttcagccagtaccttgatgttcaggcaatacatctacctgtcgaatgcaatttgtgccgtgtttcccgagctcgtaccactttcaagctcgggcctattcggaacggtactgtttcccaagcttaaagactcgag

SEQ ID NO: 72943 - DNA, 3350 bp, Zea Mays
cagcatgacaggagagcagattcaggccccttcaagtcccagggatggcgaggatgttgcaattaccattgggcgccccaaggaaagtggacctaagttcggcaccatgatgggtgtctttgttccatgcttgcagaacatcttgggaatcatttattatatccgttttacctggattgtaggtatgtcaggtgtatggcagtcacttgtgttggtttcattttgtggtgcatgcacatttttgacctcgatatcattaagtgccattgcaacgaatggagctatgaagggtggtgggccatattatcttataggccgtgcacttggtcctgaagttggagttagtataggattatgcttcttcctcgggaatgcagtggctggatccatgtatgtgcttggggctgtagaaacctttcttgacgctgttccttctgctggacttttccaaaagagtgtaacagttgtcaacaatacattagtgaatggtacagaaactgctggcacgtcaactatatctacacccagcttgcacgatcttcaagtgtatggtgttattgtgaccatactgctgtgttttattgtgttcggtggtgtcaaaattatcaacaaggttgcacctgctttcttaataccagtcctgttttctttgctgtgcatctatcttggtgtcttcattgcaccaaggcataatgctccaaagggaatcactggattgagtataaccacattgaaagacaattggggtgaaaactatcaacgtacaaataatgctggcgttcctgatccaagtggatcaatatattgggatttcaatgctttggtaggtctgtttttcccagcagtcactggaattatggctggctcaaaccgatctgcttcactgaaagatacacagcgttcgataccaatcggcacattatctgcaactctttcaacaactgctatgtacttgttctctgtgcttctgtttggagccttggccacacgggaagagcttctaactgataggcttcttactgctacggtggcttggcctgctcctgcagtgatttacattggtattattctgtccaccttaggtgcagcactgcagagtttgactggggctccaaggttgcttgcagcaattgcgaatgatgacattcttcctgttcttaattacttcaaagtttctgagggatctgagccacatgcggccactttattcacagctttcatctgtatttgctgtgttgttattggaaacttggatttgattacccccactatcacaatgtttttccttctgtgctatgctggcgtgaacctgtcatgctttctgcttgacctccttgatgctcctagttggcgccctagatggaaatttcaccattggagcctttcacttgttggggcattactctgtgttgcctcatctattactatgtgagcataaaagggaaggctggagactggggagatgggttcaagagtgcatactttcaattggccctccgaagtctcagatcacttggagcaaaccaagtccatcctaagaattggtaccccattcctctggtattctgccgtccatggggtaaacttccggaaaatgttccttgtcatccaaaacttgcagacttcgctaattgtatgaagaagaagggtcgtggtatgtccatttttgtctcgataattgatggtgattatcatgaactagctgaggatgcaaagactgcctgccgccaactagatgcttatattgactacaaacgctgtgagggtgttgcagagatcattgtagctcctaatatgtctgatggtttccgtagcattgtgcagacaatgggcctaggaaacttaaaaccaaatattgttgtgatgcggtaccctgagatctggcgacgtgagaatttgacacagataccgtcaacatttgtcagcataataaatgattgcattattgctaacaaggcagtagtcattgtgaagggactcgatgagtggcctaatgagtaccagcgacaatacggtactattgacctctactggattgtaagagatggaggattgatgcttcttctgtctcagctcctgctgacaaaggagagttttgagagctgtaagatccaagtattctgcatatctgaagaggatacagatgcagaggagttgaaggctgatgtcaagaagttcttgtatgatcttaggatgcaagctgaggtcattgttgtcactatgaaatcatgggaatcacacatggagagcagcagtaacggcgctcagcaggataactcccatgaggcttacacaagcgcacagcaaaggatcaggacataccttgatgagatgaaggaaactgctcaaacagaaaggcagttactaatggagaatgggaggcaagttgtgaacgaacagaaggttgataaattcctttacacaatgtttaagttgaactccacgatactcaggtactccagaatggcagctgtagttcttgtgagccttcctccaccgccattataccatccttcatatttctacatggagtacatggatttgcttgtagagaatgtcccacgcatgttaatagttaggggatatacgagagatgttgtcacatttttcacatgattatacatacgaacttctcacctggagactctagtgccgtcaggctgttgtactatctcagcagagactggatacacaagagcgtggaatctaccactgaaatgacaagccctcaccttgaaggcaaccacgatgagatgtcagatgtgcagagctgttgttcgcatattggattcgtgaactattgaactgcagtgtcttcattcttttttctggatttaaaagatccacatagcgagctttgattcttacagattttgtagctatcatatgtaaacacttaccatcttgtaattgtaagcatacttacatgctggcccaaagacaaatgcaatccttaccttctcactgaaacatttatataggtattttttttgcatcacttgtatgcgtctaaaactgatggacttgttgagatgagcagagctgcgaattttgaatggctacccccaaatgaattttggttatgctttgtcgcaaatatttggttttaatggtacaagatttctgagatacattactcaatgaggggtgctctgctactttacccagttactttcttgatatatgttttgttgaatgctgttctacatgtgatcttcagccagtaccttgatgttcaggcaatacatctacctgtcgaatgcaatttgtgccgtgtttcccgagctcgtaccactttcaagctcgggcctattcggaacggtactgtttcccaagcttaaagactcgag

SEQ ID NO: 72944 - DNA, 3317 bp, Zea Mays
cagcatgacaggagagcagattcaggccccttcaagtcccagggatggcgaggatgttgcaattaccattgggcgccccaaggaaagtggacctaagttcggcaccatgatgggtgtctttgttccatgcttgcagaacatcttgggaatcatttattatatccgttttacctggattgtaggtatgtcaggtgtatggcagtcacttgtgttggtttcattttgtggtgcatgcacatttttgacctcgatatcattaagtgccattgcaacgaatggagctatgaagggtggtgggccatattatcttataggccgtgcacttggtcctgaagttggagttagtataggattatgcttcttcctcgggaatgcagtggctggatccatgtatgtgcttggggctgtagaaacctttcttgacgctgttccttctgctggacttttccaaaagagtgtaacagttgtcaacaatacattagtgaatggtacagaaactgctggcacgtcaactatatctacacccagcttgcacgatcttcaagtgtatggtgttattgtgaccatactgctgtgttttattgtgttcggtggtgtcaaaattatcaacaagagggaatcactggattgagtataaccacattgaaagacaattggggtgaaaactatcaacgtacaaataatgctggcgttcctgatccaagtggatcaatatattgggatttcaatgctttggtaggtctgtttttcccagcagtcactggaattatggctggctcaaaccgatctgcttcactgaaagatacacagcgttcgataccaatcggcacattatctgcaactctttcaacaactgctatgtacttgttctctgtgcttctgtttggagccttggccacacgggaagagcttctaactgataggcttcttactgctacggtggcttggcctgctcctgcagtgatttacattggtattattctgtccaccttaggtgcagcactgcagagtttgactggggctccaaggttgcttgcagcaattgcgaatgatgacattcttcctgttcttaattacttcaaagtttctgagggatctgagccacatgcggccactttattcacagctttcatctgtatttgctgtgttgttattggaaacttggatttgattacccccactatcacaatgtttttccttctgtgctatgctggcgtgaacctgtcatgctttctgcttgacctccttgatgctcctagttggcgccctagatggaaatttcaccattggagcctttcacttgttggggcattactctgtgttgtgattatgtttctgatctcctggtctttcactgttgtctcccttgcccttgcaagcctcatctattactatgtgagcataaaagggaaggctggagactggggagatgggttcaagagtgcatactttcaattggccctccgaagtctcagatcacttggagcaaaccaagtccatcctaagaattggtaccccattcctctggtattctgccgtccatggggtaaacttccggaaaatgttccttgtcatccaaaacttgcagacttcgctaattgtatgaagaagaagggtcgtggtatgtccatttttgtctcgataattgatggtgattatcatgaactagctgaggatgcaaagactgcctgccgccaactagatgcttatattgactacaaacgctgtgagggtgttgcagagatcattgtagctcctaatatgtctgatggtttccgtagcattgtgcagacaatgggcctaggaaacttaaaaccaaatattgttgtgatgcggtaccctgagatctggcgacgtgagaatttgacacagataccgtcaacatttgtcagcataataaatgattgcattattgctaacaaggcagtagtcattgtgaagggactcgatgagtggcctaatgagtaccagcgacaatacggtactattgacctctactggattgtaagagatggaggattgatgcttcttctgtctcagctcctgctgacaaaggagagttttgagagctgtaagatccaagtattctgcatatctgaagaggatacagatgcagaggagttgaaggctgatgtcaagaagttcttgtatgatcttaggatgcaagctgaggtcattgttgtcactatgaaatcatgggaatcacacatggagagcagcagtaacggcgctcagcaggataactcccatgaggcttacacaagcgcacagcaaaggatcaggacataccttgatgagatgaaggaaactgctcaaacagaaaggcagttactaatggagaatgggaggcaagttgtgaacgaacagaaggttgataaattcctttacacaatgtttaagttgaactccacgatactcaggtactccagaatggcagctgtagttcttgtgagccttcctccaccgccattataccatccttcatatttctacatggagtacatggatttgcttgtagagaatgtcccacgcatgttaatagttaggggatatacgagagatgttgtcacatttttcacatgattatacatacgaacttctcacctggagactctagtgccgtcaggctgttgtactatctcagcagagactggatacacaagagcgtggaatctaccactgaaatgacaagccctcaccttgaaggcaaccacgatgagatgtcagatgtgcagagctgttgttcgcatattggattcgtgaactattgaactgcagtgtcttcattcttttttctggatttaaaagatccacatagcgagctttgattcttacagattttgtagctatcatatgtaaacacttaccatcttgtaattgtaagcatacttacatgctggcccaaagacaaatgcaatccttaccttctcactgaaacatttatataggtattttttttgcatcacttgtatgcgtctaaaactgatggacttgttgagatgagcagagctgcgaattttgaatggctacccccaaatgaattttggttatgctttgtcgcaaatatttggttttaatggtacaagatttctgagatacattactcaatgaggggtgctctgctactttacccagttactttcttgatatatgttttgttgaatgctgttctacatgtgatcttcagccagtaccttgatgttcaggcaatacatctacctgtcgaatgcaatttgtgccgtgtttcccgagctcgtaccactttcaagctcgggcctattcggaacggtactgtttcccaagcttaaagactcgag

SEQ ID NO: 72945 - DNA, 3495 bp, Zea Mays
ggagagcagattcaggccccttcaagtcccagggatggcgaggatgttgcaattaccattgggcgccccaaggttttctttcatttcaacattttctgctgtgtgtttgaaaattcctgttcctttaaaaaaagataaaaaattaagaattatcgataatagcaatcttaaagaaagtggacctaagttcggcaccatgatgggtgtctttgttccatgcttgcagaacatcttgggaatcatttattatatccgttttacctggattgtaggtatgtcaggtgtatggcagtcacttgtgttggtttcattttgtggtgcatgcacatttttgacctcgatatcattaagtgccattgcaacgaatggagctatgaagggtggtgggccatattatcttataggccgtgcacttggtcctgaagttggagttagtataggattatgcttcttcctcgggaatgcagtggctggatccatgtatgtgcttggggctgtagaaacctttcttgacgctgttccttctgctggacttttccaaaagagtgtaacagttgtcaacaatacattagtgaatggtacagaaactgctggcacgtcaactatatctacacccagcttgcacgatcttcaagtgtatggtgttattgtgaccatactgctgtgttttattgtgttcggtggtgtcaaaattatcaacaaggttgcacctgctttcttaataccagtcctgttttctttgctgtgcatctatcttggtgtcttcattgcaccaaggcataatgctccaaagggaatcactggattgagtataaccacattgaaagacaattggggtgaaaactatcaacgtacaaataatgctggcgttcctgatccaagtggatcaatatattgggatttcaatgctttggtaggtctgtttttcccagcagtcactggaattatggctggctcaaaccgatctgcttcactgaaagatacacagcgttcgataccaatcggcacattatctgcaactctttcaacaactgctatgtacttgttctctgtgcttctgtttggagccttggccacacgggaagagcttctaactgataggcttcttactgctacggtggcttggcctgctcctgcagtgatttacattggtattattctgtccaccttaggtgcagcactgcagagtttgactggggctccaaggttgcttgcagcaattgcgaatgatgacattcttcctgttcttaattacttcaaagtttctgagggatctgagccacatgcggccactttattcacagctttcatctgtatttgctgtgttgttattggaaacttggatttgattacccccactatcacaatgtttttccttctgtgctatgctggcgtgaacctgtcatgctttctgcttgacctccttgatgctcctagttggcgccctagatggaaatttcaccattggagcctttcacttgttggggcattactctgtgttgtgattatgtttctgatctcctggtctttcactgttgtctcccttgcccttgcaagcctcatctattactatgtgagcataaaagggaaggctggagactggggagatgggttcaagagtgcatactttcaattggccctccgaagtctcagatcacttggagcaaaccaagtccatcctaagaattggtaccccattcctctggtattctgccgtccatggggtaaacttccggaaaatgttccttgtcatccaaaacttgcagacttcgctaattgtatgaagaagaagggtcgtggtatgtccatttttgtctcgataattgatggtgattatcatgaactagctgaggatgcaaagactgcctgccgccaactagatgcttatattgactacaaacgctgtgagggtgttgcagagatcattgtagctcctaatatgtctgatggtttccgtagcattgtgcagacaatgggcctaggaaacttaaaaccaaatattgttgtgatgcggtaccctgagatctggcgacgtgagaatttgacacagataccgtcaacatttgtcagcataataaatgattgcattattgctaacaaggcagtagtcattgtgaagggactcgatgagtggcctaatgagtaccagcgacaatacggtactattgacctctactggattgtaagagatggaggattgatgcttcttctgtctcagctcctgctgacaaaggagagttttgagagctgtaagatccaagtattctgcatatctgaagaggatacagatgcagaggagttgaaggctgatgtcaagaagttcttgtatgatcttaggatgcaagctgaggtcattgttgtcactatgaaatcatgggaatcacacatggagagcagcagtaacggcgctcagcaggataactcccatgaggcttacacaagcgcacagcaaaggatcaggacataccttgatgagatgaaggaaactgctcaaacagaaaggcagttactaatggagaatgggaggcaagttgtgaacgaacagaaggttgataaattcctttacacaatgtttaagttgaactccacgatactcaggtactccagaatggcagctgtagttcttgtgagccttcctccaccgccattataccatccttcatatttctacatggagtacatggatttgcttgtagagaatgtcccacgcatgttaatagttaggggatatacgagagatgttgtcacatttttcacatgattatacatacgaacttctcacctggagactctagtgccgtcaggctgttgtactatctcagcagagactggatacacaagagcgtggaatctaccactgaaatgacaagccctcaccttgaaggcaaccacgatgagatgtcagatgtgcagagctgttgttcgcatattggattcgtgaactattgaactgcagtgtcttcattcttttttctggatttaaaagatccacatagcgagctttgattcttacagattttgtagctatcatatgtaaacacttaccatcttgtaattgtaagcatacttacatgctggcccaaagacaaatgcaatccttaccttctcactgaaacatttatataggtattttttttgcatcacttgtatgcgtctaaaactgatggacttgttgagatgagcagagctgcgaattttgaatggctacccccaaatgaattttggttatgctttgtcgcaaatatttggttttaatggtacaagatttctgagatacattactcaatgaggggtgctctgctactttacccagttactttcttgatatatgttttgttgaatgctgttctacatgtgatcttcagccagtaccttgatgttcaggcaatacatctacctgtcgaatgcaatttgtgccgtgtttcccgagctcgtaccactttcaagctcgggcctattcggaacggtactgtttcccaagcttaaagactcgag

SEQ ID NO: 72946 - DNA, 3400 bp, Zea Mays
agcagattcaggccccttcaagtcccagggatggcgaggatgttgcaattaccattgggcgccccaaggaaagtggacctaagttcggcaccatgatgggtgtctttgttccatgcttgcagaacatcttgggaatcatttattatatccgttttacctggattgtaggtatgtcaggtgtatggcagtcacttgtgttggtttcattttgtggtgcatgcacatttttgacctcgatatcattaagtgccattgcaacgaatggagctatgaaggtatgtgcttggggctgtagaaacctttcttgacgctgttccttctgctggacttttccaaaagagtgtaacagttgtcaacaatacattagtgaatggtacagaaactgctggcacgtcaactatatctacacccagcttgcacgatcttcaagtgtatggtgttattgtgaccatactgctgtgttttattgtgttcggtggtgtcaaaattatcaacaagagggaatcactggattgagtataaccacattgaaagacaattggggtgaaaactatcaacgtacaaataatgctggcgttcctgatccaagtggatcaatatattgggatttcaagtaagttaaacagaatggcaggatggtatgttaccaaaaagagtttcaccctgttcatatgcacttgtttagtgaattccatctgccctatatttaaggtctgttggaactagatgattaactgtgacaaggttcagagatttctaagctattaagagcatgaccctgttcatttttaaatgcacggccgtttgcacatttccttatgtatgtgaaactttattgtgctaaattttttgtatcgatccttcagtgctttggtaggtctgtttttcccagcagtcactggaattatggctggctcaaaccgatctgcttcactgaaagatacacagcgttcgataccaatcggcacattatctgcaactctttcaacaactgctatgtacttgttctctgtgcttctgtttggagccttggccacacgggaagagcttctaactgataggcttcttactgctacggtggcttggcctgctcctgcagtgatttacattggtattattctgtccaccttaggtgcagcactgcagagtttgactggggctccaaggttgcttgcagcaattgcgaatgatgacattcttcctgttcttaattacttcaaagtttctgagggatctgagccacatgcggccactttattcacagctttcatctgtatttgctgtgttgttattggaaacttggatttgattacccccactatcacaatgtttttccttctgtgctatgctggcgtgaacctgtcatgctttctgcttgacctccttgatgctcctagttggcgccctagatggaaatttcaccattggagcctttcacttgttggggcattactctgtgttgcctcatctattactatgtgagcataaaagggaaggctggagactggggagatgggttcaagagtgcatactttcaattggccctccgaagtctcagatcacttggagcaaaccaagtccatcctaagaattggtaccccattcctctggtattctgccgtccatggggtaaacttccggaaaatgttccttgtcatccaaaacttgcagacttcgctaattgtatgaagaagaagggtcgtggtatgtccatttttgtctcgataattgatggtgattatcatgaactagctgaggatgcaaagactgcctgccgccaactagatgcttatattgactacaaacgctgtgagggtgttgcagagatcattgtagctcctaatatgtctgatggtttccgtagcattgtgcagacaatgggcctaggaaacttaaaaccaaatattgttgtgatgcggtaccctgagatctggcgacgtgagaatttgacacagataccgtcaacatttgtcagcataataaatgattgcattattgctaacaaggcagtagtcattgtgaagggactcgatgagtggcctaatgagtaccagcgacaatacggtactattgacctctactggattgtaagagatggaggattgatgcttcttctgtctcagctcctgctgacaaaggagagttttgagagctgtaagatccaagtattctgcatatctgaagaggatacagatgcagaggagttgaaggctgatgtcaagaagttcttgtatgatcttaggatgcaagctgaggtcattgttgtcactatgaaatcatgggaatcacacatggagagcagcagtaacggcgctcagcaggataactcccatgaggcttacacaagcgcacagcaaaggatcaggacataccttgatgagatgaaggaaactgctcaaacagaaaggcagttactaatggagaatgggaggcaagttgtgaacgaacagaaggttgataaattcctttacacaatgtttaagttgaactccacgatactcaggtactccagaatggcagctgtagttcttgtgagccttcctccaccgccattataccatccttcatatttctacatggagtacatggatttgcttgtagagaatgtcccacgcatgttaatagttaggggatatacgagagatgttgtcacatttttcacatgattatacatacgaacttctcacctggagactctagtgccgtcaggctgttgtactatctcagcagagactggatacacaagagcgtggaatctaccactgaaatgacaagccctcaccttgaaggcaaccacgatgagatgtcagatgtgcagagctgttgttcgcatattggattcgtgaactattgaactgcagtgtcttcattcttttttctggatttaaaagatccacatagcgagctttgattcttacagattttgtagctatcatatgtaaacacttaccatcttgtaattgtaagcatacttacatgctggcccaaagacaaatgcaatccttaccttctcactgaaacatttatataggtattttttttgcatcacttgtatgcgtctaaaactgatggacttgttgagatgagcagagctgcgaattttgaatggctacccccaaatgaattttggttatgctttgtcgcaaatatttggttttaatggtacaagatttctgagatacattactcaatgaggggtgctctgctactttacccagttactttcttgatatatgttttgttgaatgctgttctacatgtgatcttcagccagtaccttgatgttcaggcaatacatctacctgtcgaatgcaatttgtgccgtgtttcccgagctcgtaccactttcaagctcgggcctattcggaacggtactgtttcccaagcttaaagactcgag

SEQ ID NO: 72947 - DNA, 3285 bp, Zea Mays
attcaggccccttcaagtcccagggatggcgaggatgttgcaattaccattgggcgccccaaggaaagtggacctaagttcggcaccatgatgggtgtctttgttccatgcttgcagaacatcttgggaatcatttattatatccgttttacctggattgtaggtatgtcaggtgtatggcagtcacttgtgttggtttcattttgtggtgcatgcacatttttgacctcgatatcattaagtgccattgcaacgaatggagctatgaaggtatgtgcttggggctgtagaaacctttcttgacgctgttccttctgctggacttttccaaaagagtgtaacagttgtcaacaatacattagtgaatggtacagaaactgctggcacgtcaactatatctacacccagcttgcacgatcttcaagtgtatggtgttattgtgaccatactgctgtgttttattgtgttcggtggtgtcaaaattatcaacaaggttgcacctgctttcttaataccagtcctgttttctttgctgtgcatctatcttggtgtcttcattgcaccaaggcataatgctccaaagggaatcactggattgagtataaccacattgaaagacaattggggtgaaaactatcaacgtacaaataatgctggcgttcctgatccaagtggatcaatatattgggatttcaatgctttggtaggtctgtttttcccagcagtcactggaattatggctggctcaaaccgatctgcttcactgaaagatacacagcgttcgataccaatcggcacattatctgcaactctttcaacaactgctatgtacttgttctctgtgcttctgtttggagccttggccacacgggaagagcttctaactgataggcttcttactgctacggtggcttggcctgctcctgcagtgatttacattggtattattctgtccaccttaggtgcagcactgcagagtttgactggggctccaaggttgcttgcagcaattgcgaatgatgacattcttcctgttcttaattacttcaaagtttctgagggatctgagccacatgcggccactttattcacagctttcatctgtatttgctgtgttgttattggaaacttggatttgattacccccactatcacaatgtttttccttctgtgctatgctggcgtgaacctgtcatgctttctgcttgacctccttgatgctcctagttggcgccctagatggaaatttcaccattggagcctttcacttgttggggcattactctgtgttgtgattatgtttctgatctcctggtctttcactgttgtctcccttgcccttgcaagcctcatctattactatgtgagcataaaagggaaggctggagactggggagatgggttcaagagtgcatactttcaattggccctccgaagtctcagatcacttggagcaaaccaagtccatcctaagaattggtaccccattcctctggtattctgccgtccatggggtaaacttccggaaaatgttccttgtcatccaaaacttgcagacttcgctaattgtatgaagaagaagggtcgtggtatgtccatttttgtctcgataattgatggtgattatcatgaactagctgaggatgcaaagactgcctgccgccaactagatgcttatattgactacaaacgctgtgagggtgttgcagagatcattgtagctcctaatatgtctgatggtttccgtagcattgtgcagacaatgggcctaggaaacttaaaaccaaatattgttgtgatgcggtaccctgagatctggcgacgtgagaatttgacacagataccgtcaacatttgtcagcataataaatgattgcattattgctaacaaggcagtagtcattgtgaagggactcgatgagtggcctaatgagtaccagcgacaatacggtactattgacctctactggattgtaagagatggaggattgatgcttcttctgtctcagctcctgctgacaaaggagagttttgagagctgtaagatccaagtattctgcatatctgaagaggatacagatgcagaggagttgaaggctgatgtcaagaagttcttgtatgatcttaggatgcaagctgaggtcattgttgtcactatgaaatcatgggaatcacacatggagagcagcagtaacggcgctcagcaggataactcccatgaggcttacacaagcgcacagcaaaggatcaggacataccttgatgagatgaaggaaactgctcaaacagaaaggcagttactaatggagaatgggaggcaagttgtgaacgaacagaaggttgataaattcctttacacaatgtttaagttgaactccacgatactcaggtactccagaatggcagctgtagttcttgtgagccttcctccaccgccattataccatccttcatatttctacatggagtacatggatttgcttgtagagaatgtcccacgcatgttaatagttaggggatatacgagagatgttgtcacatttttcacatgattatacatacgaacttctcacctggagactctagtgccgtcaggctgttgtactatctcagcagagactggatacacaagagcgtggaatctaccactgaaatgacaagccctcaccttgaaggcaaccacgatgagatgtcagatgtgcagagctgttgttcgcatattggattcgtgaactattgaactgcagtgtcttcattcttttttctggatttaaaagatccacatagcgagctttgattcttacagattttgtagctatcatatgtaaacacttaccatcttgtaattgtaagcatacttacatgctggcccaaagacaaatgcaatccttaccttctcactgaaacatttatataggtattttttttgcatcacttgtatgcgtctaaaactgatggacttgttgagatgagcagagctgcgaattttgaatggctacccccaaatgaattttggttatgctttgtcgcaaatatttggttttaatggtacaagatttctgagatacattactcaatgaggggtgctctgctactttacccagttactttcttgatatatgttttgttgaatgctgttctacatgtgatcttcagccagtaccttgatgttcaggcaatacatctacctgtcgaatgcaatttgtgccgtgtttcccgagctcgtaccactttcaagctcgggcctattcggaacggtactgtttcccaagcttaaagactcgag

SEQ ID NO: 72948 - DNA, 3486 bp, Zea Mays
atggcgaggatgttgcaattaccattgggcgccccaaggttttctttcatttcaacattttctgctgtgtgtttgaaaattcctgttcctttaaaaaaagataaaaaattaagaattatcgataatagcaatcttaaagaaagtggacctaagttcggcaccatgatgggtgtctttgttccatgcttgcagaacatcttgggaatcatttattatatccgttttacctggattgtaggtatgtcaggtgtatggcagtcacttgtgttggtttcattttgtggtgcatgcacatttttgacctcgatatcattaagtgccattgcaacgaatggagctatgaagggtggtgggccatattatcttataggccgtgcacttggtcctgaagttggagttagtataggattatgcttcttcctcgggaatgcagtggctggatccatgtatgtgcttggggctgtagaaacctttcttgacgctgttccttctgctggacttttccaaaagagtgtaacagttgtcaacaatacattagtgaatggtacagaaactgctggcacgtcaactatatctacacccagcttgcacgatcttcaagtgtatggtgttattgtgaccatactgctgtgttttattgtgttcggtggtgtcaaaattatcaacaaggttgcacctgctttcttaataccagtcctgttttctttgctgtgcatctatcttggtgtcttcattgcaccaaggcataatgctccaaagggaatcactggattgagtataaccacattgaaagacaattggggtgaaaactatcaacgtacaaataatgctggcgttcctgatccaagtggatcaatatattgggatttcaagtaagttaaacagaatggcaggatgtgctttggtaggtctgtttttcccagcagtcactggaattatggctggctcaaaccgatctgcttcactgaaagatacacagcgttcgataccaatcggcacattatctgcaactctttcaacaactgctatgtacttgttctctgtgcttctgtttggagccttggccacacgggaagagcttctaactgataggcttcttactgctacggtggcttggcctgctcctgcagtgatttacattggtattattctgtccaccttaggtgcagcactgcagagtttgactggggctccaaggttgcttgcagcaattgcgaatgatgacattcttcctgttcttaattacttcaaagtttctgagggatctgagccacatgcggccactttattcacagctttcatctgtatttgctgtgttgttattggaaacttggatttgattacccccactatcacaatgtttttccttctgtgctatgctggcgtgaacctgtcatgctttctgcttgacctccttgatgctcctagttggcgccctagatggaaatttcaccattggagcctttcacttgttggggcattactctgtgttgtgattatgtttctgatctcctggtctttcactgttgtctcccttgcccttgcaagcctcatctattactatgtgagcataaaagggaaggctggagactggggagatgggttcaagagtgcatactttcaattggccctccgaagtctcagatcacttggagcaaaccaagtccatcctaagaattggtaccccattcctctggtattctgccgtccatggggtaaacttccggaaaatgttccttgtcatccaaaacttgcagacttcgctaattgtatgaagaagaagggtcgtggtatgtccatttttgtctcgataattgatggtgattatcatgaactagctgaggatgcaaagactgcctgccgccaactagatgcttatattgactacaaacgctgtgagggtgttgcagagatcattgtagctcctaatatgtctgatggtttccgtagcattgtgcagacaatgggcctaggaaacttaaaaccaaatattgttgtgatgcggtaccctgagatctggcgacgtgagaatttgacacagataccgtcaacatttgtcagcataataaatgattgcattattgctaacaaggcagtagtcattgtgaagggactcgatgagtggcctaatgagtaccagcgacaatacggtactattgacctctactggattgtaagagatggaggattgatgcttcttctgtctcagctcctgctgacaaaggagagttttgagagctgtaagatccaagtattctgcatatctgaagaggatacagatgcagaggagttgaaggctgatgtcaagaagttcttgtatgatcttaggatgcaagctgaggtcattgttgtcactatgaaatcatgggaatcacacatggagagcagcagtaacggcgctcagcaggataactcccatgaggcttacacaagcgcacagcaaaggatcaggacataccttgatgagatgaaggaaactgctcaaacagaaaggcagttactaatggagaatgggaggcaagttgtgaacgaacagaaggttgataaattcctttacacaatgtttaagttgaactccacgatactcaggtactccagaatggcagctgtagttcttgtgagccttcctccaccgccattataccatccttcatatttctacatggagtacatggatttgcttgtagagaatgtcccacgcatgttaatagttaggggatatacgagagatgttgtcacatttttcacatgattatacatacgaacttctcacctggagactctagtgccgtcaggctgttgtactatctcagcagagactggatacacaagagcgtggaatctaccactgaaatgacaagccctcaccttgaaggcaaccacgatgagatgtcagatgtgcagagctgttgttcgcatattggattcgtgaactattgaactgcagtgtcttcattcttttttctggatttaaaagatccacatagcgagctttgattcttacagattttgtagctatcatatgtaaacacttaccatcttgtaattgtaagcatacttacatgctggcccaaagacaaatgcaatccttaccttctcactgaaacatttatataggtattttttttgcatcacttgtatgcgtctaaaactgatggacttgttgagatgagcagagctgcgaattttgaatggctacccccaaatgaattttggttatgctttgtcgcaaatatttggttttaatggtacaagatttctgagatacattactcaatgaggggtgctctgctactttacccagttactttcttgatatatgttttgttgaatgctgttctacatgtgatcttcagccagtaccttgatgttcaggcaatacatctacctgtcgaatgcaatttgtgccgtgtttcccgagctcgtaccactttcaagctcgggcctattcggaacggtactgtttcccaagcttaaagactcgag

SEQ ID NO: 72949 - DNA, 1504 bp, Zea Mays
atataaacccaacctcgaagattcgtctctcccgaaaccctagctcacttaacgccgccgcggagctgctccgcgcccccgacgccggtgattaggagcaggagcaagaggggttcggaatggccaagtctaagaaccacacggcgcataaccagtcgttcaaggcgcacaagaacggcatcaagaagcccaagcgccaccgccagacctccaccaagggggtacgtgcttccctttcattgcagttgttcgcctctcaacatgctagtagatttgaattcgaaagctaccctttcgctgaaacatgatcatatttattatgtggcctgtggcctgtgcccgagtgcaaatgcagtagttttgtttgtagcatgccttgatgctatcattactagatgctcctatttatactagttttctgttgttccttcgaaattgccttgctgactgccgtgttatttttgacgaaatatgctgcaaatgtatttgttttatgtgtctaagattcattatcatccatttaagcatagacataaaaatcaagagctaaaacgactaatatttttggatgtgagtattttattgtattggcgtcttatttttaaaatattaccatgacatgaatgtctttatatattaatcttgttgcataccttctggtatcatcgaagttttgccagctacttagctattttagttgatatttgactgaattcttatgctacaactgatgtttgcctacagaatgagtgctattgacactttaaatctcaggctatgtactttgtttgaccaaaaaaattgtttgcacaacaaattagtatgtatgatgatctctagtattattggtgtttcatcttctgatttcaattgtgtgtttttttaataattttttacttattctttatctgctgaaacattataattgttttctgaggaaggtttaggtagtttaatattgactatttttacttgcatttttttgacataaatattgtactctgctgaaatttcatttttatttcctgtttgctgtgtctgtttgcttaatatgccgttttggactgggttttatgatctattaatgatctcttttgtgtgcttttagatggaccccaagtttctgaggaacttgaggtactcaaggaagggcaataagaagagttgtgaggctgagtcagaggagtgagatgatgcctgagtttgtggcgacaaatgcatctcttgtatcgttagggtcttagttgtgaacttaattttcacatctgtatgattaaaagagattcatcaattggtactgaagtgttgtttttttgtcttgttgcctatctggagtttatttaactaaaatcatcagttgtgtccttgagaatcgggcacttaatgtatcattttcggttctctgtgacctgtgctgttatctccaatttacctgttgatttcttgccttacactgtcaatttcttgcctcttcatgtcggtagtttgtggctttggtgacaca

SEQ ID NO: 72950 - DNA, 4090 bp, Zea Mays
cctaaccctcccatgaggacatgaagcgactggctccatggctatttaaagcccctcctcctccttcttcttcctcagtgcattgcaagcgtgggaagggaggagatcattggaaggggagaaaagggaatggagcatgatgaagaggaggagctgccttcaccttcttcctccttgggctacctgatgctgtgtaggatctgccacgaggaagaggacggagggcgtgcgaccatggagtccccttgtggatgttccggctctctcaagtacgctcacaggcgatgtgtgcagagatggtgtgatgagaaggggaccgccatctgtgagatttgccttcagaatttcgagccagggtacacaatgcctccaaagaaaactccggtggttgaaacggcggtcacgatcaggtactctacacacgcacacattcttgcctctatctgcacaaatctattgcattgtccaatgaggtcacaggttgatggattgataaaaaaagaacatgtatgtccatgtcctccggcctttcaacgggaatgaaacatacagatcacaaggtagcacattgttttcgaacaacatacattgtcaatgccacaattaaacatttcaaagggtcagacaggtaggcccaagtcctacccagctacctcatgcctcaatgaacacaagagacagctgcactcaacggtatggcctcaaaggggtggtcctgtctgtcaaaagcgtgtccccaaaactaaatcacagccacattgtcaatgcacatccacctagcgcctccagctaatgctccggccacttggtgtccccgatcacaatacatgacattaactcgttgcatttctgtcaaaggtctcctgttaccggaaacctagttgctagtggcaacggggacttggaacttttgtcgagaaaatccagaccaaaatttgaatttgagaatgttagctaaccatccattcttttttaaaaatgaaaccattaacctgcaaaagttccagaaagcttgcaaagatgcaaaattaaaaaggcatccaagtgagcttgtaccctttctaacacggggggccgggcggtcaaatcggcaaccattatctaaattttgtcagctgatcgtgtagtgaacacgaggacatgcaatctttggaatctcgggagggcttgagtgggggtgcaggctacaccaggtgctcctacaccgcagatcaatgcgccacatggtgccggtcgctggcgatcacggtatgatctgtttcaagtcatgcagcaaactgaaacaaccgtccttcaggatccatggctgcccacaggattctgacttctgcaatcctgtgcagttcaccattatgctgctggcatggcatctggttgcagtggtgacggttgaagcagcagctcactgcgcgttcagtctcctggcagtgagttcattgttggcatggccaagcagaaaaaagcagagttttaataggtaacctgattccatcgactaagagcagaggttatgtttctttgcagatgtacttgcttcgcgctgctggtatcctgctgccgctgtgcgttgtcatgcgactgattcgcatcgtccagagtggtcaggagcagcagtatgggctgcagctgctggaggttagtcctggctcctgttcactggtttcttgagggcgccgattatagccggattaaaacgtgctgagctttctcgtcttttttatctctgtttctgcagcaccaaagaagaaatgtatcaactatatgaattatatgcgtgtccaggaggaggaccagcgagtaattaatattcattaagccaatgaatctcaatgcaagcttgcacaaatgtgcattaagtattaccgtggaaactttcaaacagaacatcatctgtaaacatttagtatacatacagttggtgcagggaaaaacagcaccattttattcctgctttttctgaacgttcattatgctattagggaatgttcaaacagatcattattgcatatcccaatgaaaatattggcggccaaccagtcacgtactcttcaatgacacattaccataccatcaaaaaggggaaaaaggtaacagctctccttagtaatcaaatttcaagcaccatgacagcatgctacattcctgctggcagcgtagtaatcttagaacattctattgccaatctgattagatacatttctcttgacctgactcttcattctatctgcccactgataaaacgcattagatacatcgaatttccctgcaaatttcactttctgagccaactcatacaacatatctagtttcccagccttcgataaatctgcagcaaacttattacagtctatctgtggagccttcatccctttattaatcatctcctcaatatacttgtatgcctcctctggcctgccatgacgtatatgtccactaatgaacaccgtgtaagagttaacatcaggacaaatacccctccggtgcatctcctcccacactgcacaacccatggcatagttcctatcaccaaggaaatatgatttcatcatcatgttgtaagtatgaattgtgggatcaagtcctttcttgatcatcttcttgtatatccttgcagcatcatctggcattttcctatttgttagcagcttaatcagtgcattgtaagtccgagcatcaggggggcatcccttctgtgtcatctcctccaacacagcagtcactctgtccattcgctttgcattcccatatccaacaagcaaacatgtataggtagcaacatctggttggcatctggcttcctgcatctcctcaaagcactccattgccatgtccatcttccctcgcttacaatgattgcatatcaacattgtgtaagtccacacatttggtggaggcccctttgccttcatcagctcaaacatcttcacggcctcatgttgcctctgcccacgcagcaacccttcaatcattgtgttgtggacgacaacatctggcttcattcccttctccagcatctcattccaaacccgcccagcctcaaccagattcctcgcattgcaccatgccagcatcagtgcagtataagagcgcaggtctggagagtactggccaagcattttgtcaaacacctgcctggcctccctgcccaatccctcattggccaaagcaacgagcaagcaattgaatgactccaccccatcatcaaaaccgttcttcctcatcaactcgaacacgccgactgcattcttaatctcaccagccgcagcgaaggacttaatggcaaccttgaaggcgtccatggacagggtccccgccttccccatctcttggagcaatgcaaccatcgactcgaactgcctcgtcttgcctaagatgagtaacatcttgcagtaggtaatggtggtgtgggtgaatccgccggacgcggtggcccacctgaagaagcggtacgacggcctgtgtgcgtgcttgaagcggtggagcacagcgagcacgacagcctcacagagcggtggcgagagcgcggatagcgcagcctccaggttcgcgtcggcgccggcggcgatgacgtccgcgatggccgcgcagacgcggcccactccctccgggttgctcgtcgccgcatcctcctgctccaacgaacccccgtcttcatcggaggcagacgaggtggagaggaaccttccggccgcgaagccccagagcacgtcgtaagccccgcatgccggcgtcgcgagttgaggggaacccgtaagggatcggcgtctcggcggcagcagagggagcgcacctctgggaagcaggacgacggcagaggtgcgggcggagccggaggtcagatgcggtggggacagcggtgcggggagatgaggtgtgcaagaggggtgtggcagtagaggcgaaagtggacagtgagtgcgatggagatgacgatgagggcaaggaggaagaacgccaggcacgggcacaacatcaccgtagtcgcagagggctcccgcggcggcgagtagagcggcggcaacttgctggtctccatggagggcggcggcggcggcgggtgtgggcttaacggccatggaggaaggaggat

SEQ ID NO: 72951 - DNA, 911 bp, Zea Mays
ctgccctgaactctagtcacagtccaacatgtgggagcggtagtccttgtgttcctgctggtataaaccctctcaccagtcctcaggtctgcactgtcccaaagcctggcataccatcttgtgtctgtggtgaccacatcccccccaagtgttcacctcgctgtggcgaagtcgttccaggccacgctgtcataggtcagtgccatggatagctccaccgctgatcgatcaacatgcagttttcccaagcgattttgtgtgagcaccgaaaccttgtaccaatttctggttccattactcgcgctcgtcaactcaaccatcaggtgattacactcttgagttcatgtccatcatatttagaccatggagacccgtgcactcttgttttgcttaggaaccaaggagaagaccgaaagggaaaaggatatgaacatgctggattcggactacagaagaacaccaacttgtgacagtcaccacggtcacatgtgggctcagattggaatgttcaagcacaacatggaaatcttatcacgtctactttcatatggatccggaattatagtcatatctgttctaaggccgtcgtaatcattgtttccttaccgagacatttcctgcctttctgcctatggtgctgcgtcaccctattttggcccaatgggtcgtgtatcgagttgggtccattaggtacgcatcctagggttgcagcacaaccccaatacccttgtggtcatcctcccatgtttataaaccccctagccgacaccaagaacagcgggttttgtttagatcaagtttagctctcgctacttgcttgtaagcgtgcgtgctggttcagtcgcccgtcttcttgtcttcggaaccccatcatattagagtttgagtttgaaacctacatttatatctgg

SEQ ID NO: 72952 - DNA, 1336 bp, Zea Mays
gtcattgttgctagcaccctcaagttttcatcaagatttgaggctaagttgcttctggagaagctaaggaacaaaaggctgatgtttgtgggtgattctctgaatcggaaccagtgggagtccatggtgtgcctggtccagtcagaggcaccatgggacaaaaaatctctcgtcaagaatggttctcttaatgtcttccatcttcaggagtacaatgcaacagttgagttctactgggctccgttcctagtggagtcaaactcagacgacccagacattcacagcatcagcgaccgcatgatcaagccgacatcgatcgcgaagcatgcggcaaactgggaaggcgtggactacctgatcttcaacacttacatttggtggatgaacacaccgcagatgaaaaccgtgtgagtaattaattgtcttactcgcgaacaatggaaagggtgagctgctcatgccttacacgagctaccttcttgactacaggcacggtggatctttctcaaggaaacacgtaaagtacgatgaaatagagcgtgtggaggcataccggaaggtcctcaagacgtggtccagatgggtagaggcgcacattgatcccaagagaagcacggtcctattcatgagcgtgtcaccggtacatatgcagagtgaaggctggggcagccccaacgccgtaaaatgcttctccgagacgcagccggcgatcaactacacgaagaaactggaggtgggcacggactgggacctcttcgcggccgcccagcgcgtgacgaggtcgatggagaaggtgccggtgcgcttcgtcgacgtgaccgcgctgtcggagatccgcaaggacgcgcacacctccgtgcacacgctgcggcaggggaagctcctgacgcccgagcagaaggcgaacccgaggaagttcgcggattgcatccactggtgcctccccggcgtgccggacacgtggaaccagttcgtttatggtcacatcgtgtcgagcccgccgccgccgcaggatcaacctcacagataacaacagctagaaatacttctcgtgcatcagtgtgtttgtggtcgacgccataagttatttctttttcccctaatagtaggtttagaagcctatgctgctggactggttcacctgagcatctgttggaaggtcagatcgcactagtgtagccaaaaaaagcagcagtaaatgtggttgtttgagcctgaggggaaatgcgcgcttctgtgcctcgtgtttctacctggcacgtgtacataattttttaccagaatcattcgtgaaattgtttctattcgtgtcgaaatatttctcttaaaaggtgcc

SEQ ID NO: 72953 - DNA, 1957 bp, Zea Mays
tcatcactgctactagtgctacgctagccgctgctcatataaggtactgctactgctagctccaggccgccagaggcgacaggccaatgggtttccgcggtggtttgaggccgcccgtgacgcgcgtctgcttcgtcctcctgtgcctgtgcgcctcgttgtccgaagccaagaggacgccgcagcctgcgcctactacgggcaagaagcagcagccaccggcagcgtcgtcgtcccagcagagcccagcggtctcgtatccggctctccccgtccgggcggtgtgcctcggcggttggctcgtcaccgagggctggattctgccctccctcttcgacggcatccccaacaaagacctcctggatggcacgcagctgcagttcaagtcggcgctgcggaagacgtacctgaccgcggacaacggcggcggcggcgccgtcgtggccaaccgcacgcaggcctccgactgggagacgttcaagctgtggaggctgaacgacacgacgttcaacttccgcacgtccggcaaccagttcgtgggcatcggcgccagcgacggcatcatcgtcgcgacggccaccacgccgggcctgccggagacgttccagatagtgcggtgccccttcgacaagaacagggtccggatcaaggcggcgaacggctacttcgtccaggcgatagcgaccggcgaagtgatagcggactacggcgagcccacgcggtggtccgacttcgacgcgtcagtgttcctgatgaccaccgtcgggcagcagctgcaaggggagtaccagctctgcaacggctacggcgccgacaaggccgcgccgctgctgagggagcattggagcacgtacatagtggaggacgacttcaagttctttgcgtcgagtgggctgaccgcagtgaggatccccgtcggatggtggatcgccagcgaccccagcccgcccgctccgtacgtcggaggctccctccaagccctggacaacgccttcagatgggcagagtaccacgagctgggtgtcatcgtcgacctgcacgcagctcccgggtcgcagaacccctgggagcacagctcgtcccgagacggcacgcaggagtggggaaccacggacgccagcatcgcgcagacggtgcaggtcatagatttcctcgcgtccaggtacgcgacgagcccgaggctgctggcggtggagctgctgaacgagccgctggcgcctggagcgaccctggacagcctcaccaggtactaccgcgacgggtacgccgccgtccggaagcacgcgccggcggcctacgtggtcatgtccaaccgcctgtcgtcggggaactccacggagctcctctggttcgccggccgtgggttcccgggcgccgtcgtcgacgtgcattactacaccgtcttcaacagcttgttcggtaacttcaccgcgcagcagaacatcgacttcgtccggactaacttctccggcgagctcgccgccgtcaccacccgagatggcccgctcaccttcgtcggcgagtgggttgcggagtggaaggtgccgaacgcgaccaaggaggaataccagaagtacgcagcggcgcagatgaacgtgtatggacaggccacgtttgggtgggcctattggacggccaagaatgccaacaaccattgggatctcgagtggatgattagaaatggatacatctcgttgaaaggctaggacccaagccaacaggtttcagtctatataaaactctaatctctattggtagtacgtaggaacccgggcgagccagagatatttgctatatgtcgttgtaattaaattaaggccaagttcaatgaccttggcttcgtcagaacgaacccggccgggcgtactacttgtgccatgaacacttttgttggttgttgtgtgtacccgagcaaaccaatttaacgatgtactaatactattagaccaactccagc

SEQ ID NO: 72954 - DNA, 714 bp, Zea Mays
cgcagtagcaggcggtgccgcccccaatgggggctgactgggcgtgggagatgtgggccgtgaagcacgtcggcccctccgggaagccggtccaggctgcgctgctgctcaactacgccccctccgggccatctcggctccttcccgtcgtagcaagagagaagacaactttcagcttttgatatgcaaccattcctggactttgtcaagaggggcaatctgcagactgaattcttttctgttgggccgacctatgtgtgaacttaattttgtttatatgacatgtcaaattgattgccattgttgtggccagcaatttgtgacagaaaattatgatttgtacatttggtcacgtcaatccatgagaactggttttgtgcctgttgcattaatagcacaaagtcaggaggtgaaggagtaatagctatgcagattggagcttacttgatagtctctatcttcacaagcaatggtggctgctgatcggtttgcaattcagattaaccggacgagtcactaatttctagtatagtttcatgagtaatgttgacccacaatttgttcgtgtttgggatcatagtgctagaacgcagtagatgaccatatgtaacttgtagtgttactattttcatgggtccgtagttgtgctaatgtaatagccaatattgactaatactaatgtttctagtgtgaggctgaagaagctcatgttga

SEQ ID NO: 72955 - DNA, 526 bp, Zea Mays
gcaggcggtgccgcccccaatgggggctgactgggcgtgggagatgtgggccgtgaagcacgtcggcccctccgggaagccggtccaggctgcgctgctgctcaactacgccccctccgggccatctcggctccttcccgtcgtagtagagcaagagagaagacaactttcagcttttgatatgcaaccattcctggactttgtcaagaggggcaatctgcagactgaattcttttctgttgggccgacctatgtgtgaacttaattttgtttatatgacatgtcaaattgattgccattgttgtggccagcaatttgtgacagaaaattatgatttgtacatttggtcacgtcaatccatgagaactggttttgtgcctgttgcattaatagcacaaagtcaggaggtgaaggagtaatagctatgcagattggagcttacttgatagtctctatgtatgtactttttcttcaactttcaattcatggaaattggttgccatattttttaacatattgctattta

SEQ ID NO: 72956 - DNA, 834 bp, Zea Mays
gctctctgcccagagcgatgtatggagacttggcacggactaacttccccggacaggatgcaacaacctctgcccaagctgctctatcatcgacctctgcccaggctgctccaacagctgttgaagctcttcagactggcacgtcatgcgagtcgacaacgacatcaaatcactcggacatcgcatccacctcacacaagcttgaagcctctgacatctcgagctacctaaaggaaaaatgtccagctggatcatgtggtatccaagacggcacacccattgtagctgacaaggaggtctttgggccgttggagcctatcacaaatcttccagatggtggtgatggttttgatatcggtgagatgctgaggatgatggaaagcgatccacataatgcaggtggagccgacgctggcatgggacagccctggtatcttgatgagctggattcgagtgtcttagagagcatgctccagccggagccggagccagagccagagccattcctgatgtctgaagaaccggacatgtttcttgctggcttcgaaagcgctggtttcgtcgagggtctggagcggctaaactgaatttctgatgtttgaccgttgatcctcatcccacttcatgtctgagcttgtgaattcggaggcaaacattggcagaacttataagctctagcaattctaggctttacattcctctgtgatagttctctatgcatgggaactgggtttgcttcacaatttttgtaagaccagaagtgatgtaaatagttcccaccttgtggaaggacaagaaaaaaataaataaaaagagtgcttgctttcgttcctt

SEQ ID NO: 72957 - DNA, 2626 bp, Zea Mays
aaaaaacctagtttgtacagtaatgaacaaacaaactaaactatgtaacattaaaacatgaagagcctgaaaaaccgggtttaagctaacgaacgtgccgggtgggaagtgggaactgcgagcggaagcgcggacgtgtgatccgtcttctgagtcctgactgctgtctggcgtccctaagggtagagagaagttatagcctttcctccccgattcaccccccgcgtgttctcgacgaccgggcgactgccgccaccactctacgccaggtgttcgtcggcgatccgtaccaatcaggactgcaggagtcaggacaacaattatggataccgtgatctacaaacatgatgacatttcccaagaaggaaccctgccatttggagagacaatgaacatgggaggaagcaatgtagaaattctcacaagaatagagctcgatattgcatttgcctccgagaaattattaaatttggagatgctggtgatggaaattgctcgtcaggctactgactttgagccttctacgcttgaagatgagtccatttcttctgagatcgcagagaatgctttggaattggacatcttgtatggtattcttgatgcagaagtcaaggagctacataacttgattagttctctccaagctgatattaaaagtatagagcatgaggtttatgaagaagagtctggaggcaaggtaaaaactagaatggatgcagctaaattgtccttgaagcagatgcaagagctaattgctgatattcagaatgaatctgcaaagtttgagaaagtcgttgagttttcccaggataaggaagggaccattgaagctgttggatgtgataatgaccatctgtcatatcaaactggtgcgcagacagaagatcaacacagaaatgttttacatatgttagaacaatccatagcaagtgagatagatcttgaaaagaaactctctgattccatatctgtcatagaagacctcaggctgaagctccatcatcaggaagaggaaatctatttccttgaggaatcaactgaaacagtttcaggtagaatgtttgaagcagaaaacgcttcggagctactttttggaacttcaaaggaacttataaataggcttaataacatgcagtttcatgtaagtgaacaaaaatgtacagaagatgatctcaagtcaaaactagaacaaagcttaacaaaattatcttttctggaaaatagcccagagaaggtggaaaaaggaagtaacaaagctggagctggatcaccatcattgcaggataaaatacaagagttagaaaaacagttgaatgaatccaatttgcaactgcaattagcactggcttcagcagaaacaaagcaggaggagcaaaatgcattgcaatctgagctgaacacattggaaaacacaattaagaatatcaaagatgatgtctcacgagcagaaagcagagcgcaaaatgcagaaataaggtgtatggagctaactgtagctaatatagagcttaatggggaactaaatgcccttaaaagcgagaagtcagataaggccagtcttttggagaagaagcttacagagtcaaatacccaattagagcatgcaaaggcagcggttgatgccattgttgaacagcaaggtatgctgaaatgtacgatgtctgatatggaacatattattgaagatctgaagggtaaagtttcaaaaactgaaaccagagctgagtgtgctgagtcaaaatgcacactgttaacagacacaaatttagaacttagtgaagagctagcatttctaagaggtcgagtagaaagtctagagaactcgttacgtgaagccaaccatgcgaaggtgtccactgccaaggacattggtgtgaaaactaaaattattactgatttggtcagaaaattggcactggaaagagaacggcttcatctccagattgctacgttgacaaagaagaacaagatgttggttaaaaaacgtgcagagggtattaatggtagcataaaaatgagcaaaaagggtacttccaatcatactgaattccagtcaactcaaaaggctgaggaaatatgtccagattctttgccatcacaaactgtggtggagaaaccatcagatccaattgacaatgatgaatctaagaatcagagtgctgatgtttccacttcagaggatgattccatacgggaggacattcatgagacagtgtgcaccatagagccatcgctgctaaaccggaaatatatttttatggcatttctagtgttgttggctgctgccgttgtattcttgttacatgaagacggcagcccagcatgatagtatgattttgctgatgcagtctacaactctacactgtcacctaaacatctaggtcgtttactcccacttctttgtctgtcagttggggagcaattttgtgtattgtattgtagatttgtgctagactgctcgtgccttcaacttggacccacccggcatttccattgttgctttgcggaggaaataatgttagataacgaaaatgttttgtaactgtgtttacttgtcagagtgaaagaatatgcagcagtctttttttcttgtggaatatttactgttagtactagtggaatttag

SEQ ID NO: 72958 - DNA, 2703 bp, Zea Mays
gaacaaacaaactaaactatgtaacattaaaacatgaagagcctgaaaaaccgggtttaagctaacgaacgtgccgggtgggaagtgggaactgcgagcggaagcgcggacgtgtgatccgtcttctgagtcctgactgctgtctggcgtccctaagggtagagagaagttatagcctttcctccccgattcaccccccgcgtgttctcgacgaccgggcgactgccgccaccactctacgccaggtgttcgtcggcgatccgtaccaatcagatgtgtgcacccatatcctttacttctctacatcaattggcttctgcgggctcaagttcttgagctgtagttagttaagcttgaaattagtggtcttggtggcttttaggagtcaggacaacaattatggataccgtgatctacaaacatgatgacatttcccaagaaggaaccctgccatttggagagacaatgaacatgggaggaagcaatgtagaaattctcacaagaatagagctcgatattgcatttgcctccgagaaattattaaatttggagatgctggtgatggaaattgctcgtcaggctactgactttgagccttctacgcttgaagatgagtccatttcttctgagatcgcagagaatgctttggaattggacatcttgtatggtattcttgatgcagaagtcaaggagctacataacttgattagttctctccaagctgatattaaaagtatagagcatgaggtttatgaagaagagtctggaggcaaggtaaaaactagaatggatgcagctaaattgtccttgaagcagatgcaagagctaattgctgatattcagaatgaatctgcaaagtttgagaaagtcgttgagttttcccaggataaggaagggaccattgaagctgttggatgtgataatgaccatctgtcatatcaaactggtgcgcagacagaagatcaacacagaaatgttttacatatgttagaacaatccatagcaagtgagatagatcttgaaaagaaactctctgattccatatctgtcatagaagacctcaggctgaagctccatcatcaggaagaggaaatctatttccttgaggaatcaactgaaacagtttcaggtagaatgtttgaagcagaaaacgcttcggagctactttttggaacttcaaaggaacttataaataggcttaataacatgcagtttcatgtaagtgaacaaaaatgtacagaagatgatctcaagtcaaaactagaacaaagcttaacaaaattatcttttctggaaaatagcccagagaaggtggaaaaaggaagtaacaaagctggagctggatcaccatcattgcaggataaaatacaagagttagaaaaacagttgaatgaatccaatttgcaactgcaattagcactggcttcagcagaaacaaagcaggaggagcaaaatgcattgcaatctgagctgaacacattggaaaacacaattaagaatatcaaagatgatgtctcacgagcagaaagcagagcgcaaaatgcagaaataaggtgtatggagctaactgtagctaatatagagcttaatggggaactaaatgcccttaaaagcgagaagtcagataaggccagtcttttggagaagaagcttacagagtcaaatacccaattagagcatgcaaaggcagcggttgatgccattgttgaacagcaaggtatgctgaaatgtacgatgtctgatatggaacatattattgaagatctgaagggtaaagtttcaaaaactgaaaccagagctgagtgtgctgagtcaaaatgcacactgttaacagacacaaatttagaacttagtgaagagctagcatttctaagaggtcgagtagaaagtctagagaactcgttacgtgaagccaaccatgcgaaggtgtccactgccaaggacattggtgtgaaaactaaaattattactgatttggtcagaaaattggcactggaaagagaacggcttcatctccagattgctacgttgacaaagaagaacaagatgttggttaaaaaacgtgcagagggtattaatggtagcataaaaatgagcaaaaagggtacttccaatcatactgaattccagtcaactcaaaaggctgaggaaatatgtccagattctttgccatcacaaactgtggtggagaaaccatcagatccaattgacaatgatgaatctaagaatcagagtgctgatgtttccacttcagaggatgattccatacgggaggacattcatgagacagtgtgcaccatagagccatcgctgctaaaccggaaatatatttttatggcatttctagtgttgttggctgctgccgttgtattcttgttacatgaagacggcagcccagcatgatagtatgattttgctgatgcagtctacaactctacactgtcacctaaacatctaggtcgtttactcccacttctttgtctgtcagttggggagcaattttgtgtattgtattgtagatttgtgctagactgctcgtgccttcaacttggacccacccggcatttccattgttgctttgcggaggaaataatgttagataacgaaaatgttttgtaactgtgtttacttgtcagagtgaaagaatatgcagcagtctttttttcttgtggaatatttactgttagtactagtggaatttag

SEQ ID NO: 72959 - DNA, 2558 bp, Zea Mays
aagagcctgaaaaaccgggtttaagctaacgaacgtgccgggtgggaagtgggaactgcgagcggaagcgcggacgtgtgatccgtcttctgagtcctgactgctgtctggcgtccctaagggtagagagaagttatagcctttcctccccgattcaccccccgcgtgttctcgacgaccgggcgactgccgccaccactctacgccaggtgttcgtcggcgatccgtaccaatcaggagtcaggacaacaattatggataccgtgatctacaaacatgatgacatttcccaagaaggaaccctgccatttggagagacaatgaacatgggaggaagcaatgtagaaattctcacaagaatagagctcgatattgcatttgcctccgagaaattattaaatttggagatgctggtgatggaaattgctcgtcaggctactgactttgagccttctacgcttgaagatgagtccatttcttctgagatcgcagagaatgctttggaattggacatcttgtatggtattcttgatgcagaagtcaaggagctacataacttgattagttctctccaagctgatattaaaagtatagagcatgaggtttatgaagaagagtctggaggcaaggtaaaaactagaatggatgcagctaaattgtccttgaagcagatgcaagagctaattgctgatattcagaatgaatctgcaaagtttgagaaagtcgttgagttttcccaggataaggaagggaccattgaagctgttggatgtgataatgaccatctgtcatatcaaactggtgcgcagacagaagatcaacacagaaatgttttacatatgttagaacaatccatagcaagtgagatagatcttgaaaagaaactctctgattccatatctgtcatagaagacctcaggctgaagctccatcatcaggaagaggaaatctatttccttgaggaatcaactgaaacagtttcaggtagaatgtttgaagcagaaaacgcttcggagctactttttggaacttcaaaggaacttataaataggcttaataacatgcagtttcatgtaagtgaacaaaaatgtacagaagatgatctcaagtcaaaactagaacaaagcttaacaaaattatcttttctggaaaatagcccagagaaggtggaaaaaggaagtaacaaagctggagctggatcaccatcattgcaggataaaatacaagagttagaaaaacagttgaatgaatccaatttgcaactgcaattagcactggcttcagcagaaacaaagcaggaggagcaaaatgcattgcaatctgagctgaacacattggaaaacacaattaagaatatcaaagatgatgtctcacgagcagaaagcagagcgcaaaatgcagaaataaggtgtatggagctaactgtagctaatatagagcttaatggggaactaaatgcccttaaaagcgagaagtcagataaggccagtcttttggagaagaagcttacagagtcaaatacccaattagagcatgcaaaggcagcggttgatgccattgttgaacagcaaggtatgctgaaatgtacgatgtctgatatggaacatattattgaagatctgaagggtaaagtttcaaaaactgaaaccagagctgagtgtgctgagtcaaaatgcacactgttaacagacacaaatttagaacttagtgaagagctagcatttctaagaggtcgagtagaaagtctagagaactcgttacgtgaagccaaccatgcgaaggtgtccactgccaaggacattggtgtgaaaactaaaattattactgatttggtcagaaaattggcactggaaagagaacggcttcatctccagattgctacgttgacaaagaagaacaagatgttggttaaaaaacgtgcagagggtattaatggtagcataaaaatgagcaaaaagggtacttccaatcatactgaattccagtcaactcaaaaggctgaggaaatatgtccagattctttgccatcacaaactgtggtggagaaaccatcagatccaattgacaatgatgaatctaagaatcagagtgctgatgtttccacttcagaggatgattccatacgggaggacattcatgagacagtgtgcaccatagagccatcgctgctaaaccggaaatatatttttatggcatttctagtgttgttggctgctgccgttgtattcttgttacatgaagacggcagcccagcatgatagtatgattttgctgatgcagtctacaactctacactgtcacctaaacatctaggtcgtttactcccacttctttgtctgtcagttggggagcaattttgtgtattgtattgtagatttgtgctagactgctcgtgccttcaacttggacccacccggcatttccattgttgctttgcggaggaaataatgttagataacgaaaatgttttgtaactgtgtttacttgtcagagtgaaagaatatgcagcagtctttttttcttgtggaatatttactgttagtactagtggaatttag

SEQ ID NO: 72960 - DNA, 569 bp, Zea Mays
cccttagtacattgtctgggcaaaggcacacagttactgacaaaatgctggtggagaaaccatcagatccaattgacaatgatgaatctaagaatcagagtgctgatgtttccacttcagaggatgattccatacgggaggacattcatgagacagtgtgcaccatagagccatcgctgctaaaccggaaatatatttttatggcatttctagtgttgttggctgctgccgttgtattcttgttacatgaagacggcagcccagcatgatagtatgattttgctgatgcagtctacaactctacactgtcacctaaacatctaggtcgtttactcccacttctttgtctgtcagttggggagcaattttgtgtattgtattgtagatttgtgctagactgctcgtgccttcaacttggacccacccggcatttccattgttgctttgcggaggaaataatgttagataacgaaaatgttttgtaactgtgtttacttgtcagagtgaaagaatatgcagcagtctttttttcttgtggaatatttactgttagtactagtggaatttag

SEQ ID NO: 72961 - DNA, 685 bp, Zea Mays
gcttttggattctggtttctctcgtctttctcctccctctcctgacttttcttctagacatctcgcgggtcttatcgactccaacaagaacacactacacaccagccagcgagatagcgaacgctaggaacccagtggccatctttggagcggccatgacgctggatcagaaccatgccatgccgatgcagcccccggccctgcagcccggaagagcatatggagcagagggcagtgctgtggtgcatggttccatcagaacagtagcaggaggccctactcttgccttgaatgagtgccagattttggtacagcagaaaccccagggagattcacgactgctggcctctaatctgtggtgtgttttaactgttctatatctggttgctctctgctagagcatctgagctatcactagcagtctttgactgatagtgttgtgtgcttgatgagtgagttacccttgtgctgtggtgtgtttttacttgttctatatcgatctggctgctctctgctagagcatctgagctgtcacttgcagtctctgactgatagtgttgtgcgcttgatgagtgagttatccttgcgctgtggtgtgttttaactgttctatatctggctgctctctgctagagcatctcagctatcactagcagtctttgactggtagtgttgtgcgcttgat

SEQ ID NO: 72962 - DNA, 610 bp, Zea Mays
gtccatcaacctgtactgcatatgcgcagtaaaaaggatcgctcttcctgctcttgctgtcaaagttaaatgggtcacacctcacatcttttgtccctgcccaaaaacctgtctctgaccacctaagatcaccatggccgagtccgaggtttcgatattcccatcactggaaccatgagtgaaatgctggtgcataagctagggcgcaaaagtccgtgaaccatgaaggaacttttgtacatcacgatgacccacacatcaggggaggatgcggtgggaacaatcttccaccaccgcaagctaaaggccaacgacattatattaaattcggaaaaacgcgtcttcggcgttccaggaggcatgttgtttggtttccagtctccgagcgaggtattgtggccaacccggagaaggttttgtccatcacgaatatggggctcatacgggatctcaataatgtttagcgattaatgcggtgcttggcttccctcagccattttgtatcatgccttggggagcacgagttactgctctataaactgttgaggaaaaccaaccatttcaagtggacaatagaggcataggggcctctcgatggcctcaagagtct

SEQ ID NO: 72963 - DNA, 321 bp, Zea Mays
aagaaacctctccaactagtaccaccaaatttacagatcttttgtactcagatgaaagaaaaaaaaataatgggtgtacataaacaacatgagcagagaaaaaatgcaatattatttgtttttcccttcttatttctgtaatgataacattagattattctgtgggagcctttaacatatgtcaaaggtaacagaatgaagcgcaccagagtaaatgaatgtcactcattcagagtgaacagggaataaaaagaactttggacattcctcaagttcttgccagcttccatcgtgtgcaaacgcttggataaagaatttcag

SEQ ID NO: 72964 - DNA, 1506 bp, Zea Mays
taccctgcttgtttctagaagacagatccagggacaaccctaaagcagaacttgcattggctcttatctgaaacaaaccgccgaaagaaatgcaaaatcatgaggctggaaagacaaggatccattgagaaacagaacacaaagggactaagggagctcatgcactagtgcagtactactgtcaacacatttctctgtacacattcagtgggttgtgtcaatgttgggaacaataaagaaccaatatagttcatgtgattcagtttagtatttccaaggaattagatgatcagtaaggagacagttaaggtaacacaatgaatgtaattttttttccgaaccgaataaaatagatgaacaggtccatcttccatggcaagtcctccattaaaaagctgttctgagaaaataatgttctgctgaagagatcctttgactgtcaaacaattccctccactgtaaggttcagccttgaaactattatcaagcaaccagcaaaaatatgttataaatggaaaataattgggataattaatttgtaaaataacctaaggacattactaaatgtacaaggaatataaatgttgtgtgcaccaatgaaaatcatcaagcagttcacttgtccggaaaattagaactaaatgtatagtcaacatgtttagcacaaatgcagaatacaaaaccgaaggctcatgattagcacacagaggataaaatagaaattgttcaaacgtcaaagttgatgtaaattaatcgtaaaatagtaattaaaccaagtggaataaataccctatgtggcttggacatgtggcagtaggcacttcaaataatgcattccaacacttttgggggctcatgtctctctcttgttcagcaagctattttagtgacatgctaatttgtatcatcttaaacaaaaatgatgcttcatttacacaatgaaaccttaaactttgaaatatttaaccagctatcagatgtaagagaaagtagatgaaaagttgcatattttagtagtcaaaagaagagaaaaactcgacctacggatggtaagatatgttatgggtattacattaaaaagactttctcacgcaggtcaaacgcaggtcaagagaaccaccgaacccctacctcacccaaacacaacgacaccatagcctaggtgagaacaacatgtgccaggccttagacatttgctttgatgtgggccagacaagagatatctttaacaccatcctaaacccaagacctaaggaatgctactcaagtcaaccaaccaacttagctagaggtcctttcgcacatattttatttcagtagacttgagttacttctatcctgtatttcttgcttaaaaaataatataaaccagacacctcacttttagcattggaaatgaaaactgtatacaagaattcaattaacatgacttaaaatgcagccacagaatttgtgaacttactccgtataggcttgcagatgaacttgatctctggtgtatttaag

SEQ ID NO: 72965 - DNA, 3944 bp, Zea Mays
ccggcggccgcgcgcgctctcctcctccctggcgagctaccgcgctcgcgtcttcgacggctgcgcgtcgtcctcgccggcgagctaccgcgctcgtcctcctccccggcgagctactgcgctcgcgtctccgacggctgcgcgtcgtcctcgccgacggtcgggcgagctcgtcctcctccccggcaatccgacgcgcgtgctgctcctcgtccctggcgcgcgtgcgctcctcctcgtcccaccccacctcttcttctacctccagttgtttgcacggacgactgcaatagcttccgacaccgtgcgggaggtaacggaaggaggctgcgtgcgagagcgaacagtgcatagggagcgatcgctagagcgccacatttggcggacgagaagcgcacgctatgttttagcggaggctttagcgtttcttgctggagccgtagcgaacgttcagatccggtatatttagcgtacagggtcttttaccgtctcttgctggaggcagcctgatgccagaacgacatggtgagtgcgccaaaatcccagaggatgggtccaagagaggccaaccattctgtcccgaggaccacatcatatccggcgagaggcagcgcgaagaaattggtggtgaaggacttgccatcaatggtgaaagggacattccaatagacggtagatgcctggacaggggaccttcttaccatttgccatcgtgaccttcatgttgtcgcgcggattcaattttagcgaggtatggcctgctgcttcctcaaaaacaaaattgtgggtagaccctgaatccagcagggcaaggaggcgattgccgcccaactggatatgcacctgcatcgtttcccgagtctggactccagccatggcgagcagagagatgattggggattggtgcggctcatcatctggagccgcctcttcgtcatcttccaccaagtccaggagaaagatgcgctggcagacacgattgtggccgcgcgcaaatttctcgttgcaattgaaacagagccccagccggcgatgttcttccatctccgattgggacaaacggcgaatcggctggccaccagttgctggtggggttgatcgagttggtggtgcgagtagagccaacgatggggcgggtcccgacagaaggcctcgaccccccaagcgaagggccgccggcgtctgcacagcctgcgtgatgtactgctcgcgcaactccagtttgcgggccatgctcatggcgatgacgagagactggggattatgcatctcaacgtcgaggctgagcagcggctgaagacccgcggtgaacgcctgcaccttttgtgcctccgtgagcgcgctgacacggggcagtaaggcttcgaaacgatcctggtactcagcgacagtcccggtccacttgcaggccatgagctcatcgagagggttggagcggatgggcggcccaaaacgaaggttgaggagttctgaaaaccggcgccatgatgccattccttcctcgttctggacctggatgtaccacatctggccgcctccttctagattgtatgaagccatccagacctgttcctcggcggcaatccattgttgatgaaaataggattcgcaccggttgagaaggccagcggatcagacttgccgtcgaatttcgggaaatccaacttctgaaaacgcggaggttgttcaccctgatgttcagtgaacctcgagccagacggaatggtaccacgctcacggcgcagctcccccacttcagcctagagggtggtcaggctcgtggtcagctgcgcgatgacatcggccaggccggcgttggtggggttagtcatgggtgtcgttgatgatgaacttggagatgaaggagtgctagcaatggagtggtggtcgaaggtggaagaggatcgccggaatcgtgataccaagttgtcaagggcctcggcccctaggctaggaggtccctgactacgtagttcgtagctgggtagaggtggtgccagggctgttacctggacaccgaagcaaggagatgagttgaaggctagaacaggtgagaggtttaggtaatacttctttcttaatttcctcattgcattctgcttacatatatatataggagagagcctgttggctgctagactccaagactcatgtgcagacacataatgatctagactttcaaacttcatgctagactccaagactcatgttcacaccctataatgatctagactttcaaacttcatgctagactccaagactcatgttcacacctcataatgatctaaactttcaaacttcaggcccttcggtcaccccctgaaccttggcgccctggccagctgtgccagcctctttctggcctctttggcgccggctgtactgccgaccccacatgacagaaactatcaactctacttaaaggagataaaactgaatgtactgcaccatccaagtatcgctgatttagaacgagcggagcacttgtgttgaaaattagatattattattactctcttcataaaaaaacaactaagagtttctttgaaccgcatatcgttaacaaggataaaacgttacaggggttggagcccctttagcaggtgcgagaggcgctaaaatccacacagcagactgctgtggaggtttccaaaaaatagccccccagccaggggtggtaacgggccatttaatttagcctagcaaatttaaggatcgaatcaagttagggccggatcataaaacaatacaattttgaactaacaaaattaagggctttattgatttgtgaagcaagtattagggcctgatccattaccacccctacccccagccaaagaccaaaaggaacagacatcattaatctccatgaacactgcctgtgtcgtgcgtcaggagcctctataaaagacaactttgattaccaaaatttatttggtattaatggaacttcagctttttgaacaaatgtacaaatatttgtgttccatgctaatattcacaaataaattcacagttaaatagttcaagagattttacatcgtgaatcctaaaacatttaaacaaaacaaaatcttctagagtagcatagtaattatggtaaaagtccacatttccaaagatgtagaaaacaacttcaatttaactaagatcatgggaagacaatttaattaagcataattgacatccgagcaaaacttgttgcttttgttacaatgaggagacaattcgtcaattgtttttttattgcagtttggtgcttttcattagaagttttttctcaagttggtttaaatctaagaaaatccccaagtgtggcacatatgtttggagcgacaaaagtacaaaacaattgagatcattagtgcttcttgatgcagcagtgacatattggtctatttggttgcacaggaatgattttgtttttgaaaagaaagaatttaattctcgtttgcaagttatctatgcaatatcccacatgctcaatttgtgtggctatccttcagaggttggagttccaagatacgattgtgagtttgtgacggcatcgcgacaatggagcaagtgggaaggatatctttactcgggcatataggtggcggtcgtcttaggattaaatgtcactagttatgctcagccttttagtttcttagatgtgtgcctatcacttaggcagaggctgggagtttcatccaaagccatgtatcaactcaatgtactgttcttgggatgcaataatatctttctctgcaaaaatatcaatcagtttggaacattcatatgggcaacttcagtgcttctacaatgtagtataccaatatactggatgttaatggtttatcgaagtatataggtaaaagtacattaaagaaaatggagcagacagtccaaaatattagatgaccagagttccaaaaatgagtttagtgattacccagtctcca

SEQ ID NO: 72966 - DNA, 1356 bp, Zea Mays
aacgaggatgtactaatgttgtggtaaataatgatggacgatagtcgataacgtgaggtgtggttggtactggtagctagcgtgatgtatggtctgtattcagcctaactaatttgccagcgagtgatgcggtgacgtgctgctgctgttgtagtaggtggtggagcaagcccagtccccaatcccaccctgccacccaaccttgcttcttctccgatagctatttctctgctttctctccaatcttcccgggtttccctgattaaagatggctgaatcctttgttctcagtaccggctcgaggatcccatcggttgggcttggcgtatggcaaatacaacctgacgctgccaacgacgccatctacgctgctgtcaaggctgggtatcggcatattgactgtgcagcagcatacaacaatgaggaggaggtgggcctggctttgaagaaattatttgaagatggtgtggttaagcgtgatgatttgtttatcacctctaagctatgggctgctaatcatgcacctgaagatgtggaagagggaatcgacaccacacttcaagatttgcagcttgactacttggacttgtacctcatccatggtccaatccgcatcaaaaaaggaactagcacgatgacccctgaaaactttctccctacagatatccctgctacatgggcagcgatggagaagttatacgactctggcaaagctcgtgcaatcggcgcattctcgcctttaggctcacctggatctccttggatcaatgggccaagtgtcctcaagaaccccattgtggtctctgttgcagacaagttgcagaaaacgcctgcccaggtcgctctacgctggggaatccaaatgggccatagtgtactcccgaaaagcgccaatgagtccaggattaaggagaacattgacatatttggctggtctattcctgaagatttgatggccaagttctctgaaatcaaacaggtcaggctgctgacagctgagtttgtagttcaccctcaggccggctacaatacattggaggacttttgggatggtgaaatataaaagcatacaaatttgttcagaataaaagagccaggcgaggaaacaaccacaaaaaaggggagatcgaatgcataggccccaatacgatgaatttgggggtttacgtgattgctgaacacaagtattgtgtgactaatctgtgttttgatgtggtaaatgtaattgggttagtcacaataagagataagtgtctttgccacaagacttttggttcattggttgaagcatgatgtaaaccgtaaaggatattcatgaaaactaaggacgctatagagcaaatgtaggttgtgtgc

SEQ ID NO: 72967 - DNA, 1335 bp, Zea Mays
aacgaggatgtactaatgttgtggtaaataatgatggacgatagtcgataacgtgaggtgtggttggtactggtagctagcgtgatgtatggtctgtattcagcctaactaatttgccagcgagtgatgcggtgacgtgctgctgctgttgtagtaggtggtggagcaagcccagtccccaatcccaccctgccacccaaccttgcttcttctccgatagctatttctctgctttctctccaatcttcccgggtttccctgattaaagatggctgaatcctttgttctcagtaccggctcgaggatcccatcggttgggcttggcgtatggcaaatacaacctgacgctgccaacgacgccatctacgctgctgtcaaggctgggtatcggcatattgactgtgcagcagcatacaacaatgaggaggagatccatggtccaatccgcatcaaaaaaggaactagcacgatgacccctgaaaactttctccctacagatatccctgctacatgggcagcgatggagaagttatacgactctggcaaagctcgtgcaatcggcgtgagtaacttctcttgtaagaagctgcatgatttgcttgccgttgcacgagtgcctccagcagtcaaccaggttgagtgtcatccggtttggcagcaagacaagctccggaagctatgccaatccaatggtgttcatctttctgcattctcgcctttaggctcacctggatctccttggatcaatgggccaagtgtcctcaagaaccccattgtggtctctgttgcagacaagttgcagaaaacgcctgcccaggtcgctctacgctggggaatccaaatgggccatagtgtactcccgaaaagcgccaatgagtccaggattaaggagaacattgacatatttggctggtctattcctgaagatttgatggccaagttctctgaaatcaaacaggtcaggctgctgacagctgagtttgtagttcaccctcaggccggctacaatacattggaggacttttgggatggtgaaatataaaagcatacaaatttgttcagaataaaagagccaggcgaggaaacaaccacaaaaaaggggagatcgaatgcataggccccaatacgatgaatttgggggtttacgtgattgctgaacacaagtattgtgtgactaatctgtgttttgatgtggtaaatgtaattgggttagtcacaataagagataagtgtctttgccacaagacttttggttcattggttgaagcatgatgtaaaccgtaaaggatattcatgaaaactaaggacgctatagagcaaatgtaggttgtgtgc

SEQ ID NO: 72968 - DNA, 2749 bp, Zea Mays
ctcaactcgactgccgccgccgcaggcacacgggatcctgactgaggaaaacggacaagagaggcggaggctgatagggagaggagacggaggaccaagagcggcgtcgatctaaaagcgttggcggcggccatggccaccgcggaccggacccggactttcatgaaggacgtcaaacgcgtcatcatcaaggtgggcactgcagtcgtcacgaggggtgatgatgggcgactggctgtgggccggttggggtgtctttgtgagcaggtaaaagagctgaatgtcttaggatacgaggtgatccttgtgacctcaggtgctgttggtgtggggaagcagaggctcaagtacaggaagcttgtcaatagcagctttgctgatctgcaaaagccacagatggagctggatggaaaggcttgcgctgctgttggtcagagtggcctcatggctctttatgatatgctatttacccaacttgatgtgtcctcctcgcaacttcttgtgacagatagtgattttgagaatccaaactttcgggagaggctctgtgaaactgttgagtcactattagaccttaaagttgtaccaatatttaatgaaaatgatgccatcagcactagaaaggctccatatgaggattcatctggtatattctgggataatgacagtttagctggtcttttggctattgaacttaaagcagatctccttgttctactaagtgatgtagatggtctatacagcggtccaccaagcgaaccgggatcaaagatcattcatacctacattaaagataaacattacagtggaataacttttggggataagtcacgtgtaggtagaggaggaatgacagctaaagtgaaggctgcttttgtggcttcgaacagtggcacacctgttgttattacaagtggatttgcatctcagagcattgttagagttctccaaggagagaagattggtactctcttccataaggatgcaagtctgtgggagccatccaaggatgttagtgctcgtgagatggctgttgctgcaagagaatgttcaaggcgtctgcagaatttatcatcggatgaacgcaagaaaatattgttagacattgcagatgctttggaacaaaatgaggatctaattagaactgaaaatgaagctgatgtatctgcagcacaagatgctggatatcagaaatctttggttgatagattgacattgaagccagaaaagatagcaagccttgcgaaatccatacgcactcttgcaaatatggaagacccaatcaaccagatactcaaaagaacagaggttgctgaagacttagtgctcgaaaaaacatcttgccctctgggtgtgctgttgattgtttttgagtccaggcctgatgccttagtccagattgcgtctttagcagttcgaagtggcaatggtcttctcctgaaaggtggaaaagaagccatgagatcgaacacagtattacataaggttataactggcgcaattcctgacaacgtgggtcaaaaacttattggccttgttacaagtagagatgaaatcgctgatttactaaagcttgatgatgtcattgatcttgtcattccaagaggcagcaataagctggtttcgcaaatcaaagcatcaactaagatacctgtcctcggtcatgcggatggtatttgtcatgtatacattgacaaatcagctgacatgaatatggcaaaacgaatagtgatggatgccaaaactgattacccagcagcctgcaatgctatggagacattgcttgttcataaagaccttataaaggctccaggtcttgatgatatactcctatcactcaaaacagaaggagttgctatttatggagggcctgttgcacatgaagtactgtgtattccgaaagcagattcattccatcatgaatatagctctatggcctgcacaattgagttcgttgatgatgtacagtcagcaattaaccatatacatcgttatggaagtgcacatacagattgcattatcaccacagatgataaagtagcagaaacttttctgcgtcaagttgatagtgctgctgtatttcataatgcgagtacacgattctctgatggggctcgttttggattgggtgccgaggttggcataagcacagggcgtatacatgctcgcgggcctgtgggtgttgaaggtctcttaacaacacgctggatcatgcgaggaagtgggcaagtggtgaatggtgacaagaatgttgcatacacccataagaaccttcccttacaatgaggctgtttttgtgcttgatcaggattcgtgtctatccagtgatgtttgatagtttcatcaggcaggagcatagaatggtgaatcttttcgattgaggactgtgaatccatggatgttcagtcattgtttgtgtagacattgtggtgagcttggaggccaccccacctccccaataaagcagtgctgggagtaatagagcactgatgtactgagggtgcctaggttaaacaagaggaaccggttatatttgttttgcggtcgaacacaaacaatttttgttggtgacttgtttcttatgattctacatatttcaaggtttatgtgctgtcctaaccgggttctttgataccgggtattttggatactgtaggcatactgtaacgacagcaaaagctggctgcagtagccacagctgtactgctgcaaatagctgttactaaaatatcgtgcatcacatgtcggc

SEQ ID NO: 72969 - DNA, 2600 bp, Zea Mays
gtgctatcccaccccaccaccatacgtttggcaagttctgagagtgggcactgcagtcgtcacgaggggtgatgatgggcgactggctgtgggccggttggggtgtctttgtgagcaggtaaaagagctgaatgtcttaggatacgaggtgatccttgtgacctcaggtgctgttggtgtggggaagcagaggctcaagtacaggaagcttgtcaatagcagctttgctgatctgcaaaagccacagatggagctggatggaaaggcttgcgctgctgttggtcagagtggcctcatggctctttatgatatgctatttacccaacttgatgtgtcctcctcgcaacttcttgtgacagatagtgattttgagaatccaaactttcgggagaggctctgtgaaactgttgagtcactattagaccttaaagttgtaccaatatttaatgaaaatgatgccatcagcactagaaaggctccatatgaggattcatctggtatattctgggataatgacagtttagctggtcttttggctattgaacttaaagcagatctccttgttctactaagtgatgtagatggtctatacagcggtccaccaagcgaaccgggatcaaagatcattcatacctacattaaagataaacattacagtggaataacttttggggataagtcacgtgtaggtagaggaggaatgacagctaaagtgaaggctgcttttgtggcttcgaacagtggcacacctgttgttattacaagtggatttgcatctcagagcattgttagagttctccaaggagagaagattggtactctcttccataaggatgcaagtctgtgggagccatccaaggatgttagtgctcgtgagatggctgttgctgcaagagaatgttcaaggcgtctgcagaatttatcatcggatgaacgcaagaaaatattgttagacattgcagatgctttggaacaaaatgaggatctaattagaactgaaaatgaagctgatgtatctgcagcacaagatgctggatatcagaaatctttggttgatagattgacattgaagccagaaaagatagcaagccttgcgaaatccatacgcactcttgcaaatatggaagacccaatcaaccagatactcaaaagaacagaggttgctgaagacttagtgctcgaaaaaacatcttgccctctgggtgtgctgttgattgtttttgagtccaggcctgatgccttagtccagattgcgtctttagcagttcgaagtggcaatggtcttctcctgaaaggtggaaaagaagccatgagatcgaacacagtattacataaggttataactggcgcaattcctgacaacgtgggtcaaaaacttattggccttgttacaagtagagatgaaatcgctgatttactaaagcttgatgatgtcattgatcttgtcattccaagaggcagcaataagctggtttcgcaaatcaaagcatcaactaagatacctgtcctcggtcatgcggatggtatttgtcatgtatacattgacaaatcagctgacatgaatatggcaaaacgaatagtgatggatgccaaaactgattacccagcagcctgcaatgctatggagacattgcttgttcataaagaccttataaaggctccaggtcttgatgatatactcctatcactcaaaacagaaggagttgctatttatggagggcctgttgcacatgaagtactgtgtattccgaaagcagattcattccatcatgaatatagctctatggcctgcacaattgagttcgttgatgatgtacagtcagcaattaaccatatacatcgttatggaagtgcacatacagattgcattatcaccacagatgataaagtagcagaaacttttctgcgtcaagttgatagtgctgctgtatttcataatgcgagtacacgattctctgatggggctcgttttggattgggtgccgaggttggcataagcacagggcgtatacatgctcgcgggcctgtgggtgttgaaggtctcttaacaacacgctggatcatgcgaggaagtgggcaagtggtgaatggtgacaagaatgttgcatacacccataagaaccttcccttacaatgaggctgtttttgtgcttgatcaggattcgtgtctatccagtgatgtttgatagtttcatcaggcaggagcatagaatggtgaatcttttcgattgaggactgtgaatccatggatgttcagtcattgtttgtgtagacattgtggtgagcttggaggccaccccacctccccaataaagcagtgctgggagtaatagagcactgatgtactgagggtgcctaggttaaacaagaggaaccggttatatttgttttgcggtcgaacacaaacaatttttgttggtgacttgtttcttatgattctacatatttcaaggtttatgtgctgtcctaaccgggttctttgataccgggtattttggatactgtaggcatactgtaacgacagcaaaagctggctgcagtagccacagctgtactgctgcaaatagctgttactaaaatatcgtgcatcacatgtcggc

SEQ ID NO: 72970 - DNA, 1862 bp, Zea Mays
catcagttgtcaccttgagagaaccaatggatttgcatctcagagcattgttagagttctccaaggagagaagattggtactctcttccataaggatgcaagtctgtgggagccatccaaggatgttagtgctcgtgagatggctgttgctgcaagagaatgttcaaggcgtctgcagaatttatcatcggatgaacgcaagaaaatattgttagacattgcagatgctttggaacaaaatgaggatctaattagaactgaaaatgaagctgatgtatctgcagcacaagatgctggatatcagaaatctttggttgatagattgacattgaagccagaaaagatagcaagccttgcgaaatccatacgcactcttgcaaatatggaagacccaatcaaccagatactcaaaagaacagaggttgctgaagacttagtgctcgaaaaaacatcttgccctctgggtgtgctgttgattgtttttgagtccaggcctgatgccttagtccagattgcgtctttagcagttcgaagtggcaatggtcttctcctgaaaggtggaaaagaagccatgagatcgaacacagtattacataaggttataactggcgcaattcctgacaacgtgggtcaaaaacttattggccttgttacaagtagagatgaaatcgctgatttactaaagcttgatgatgtcattgatcttgtcattccaagaggcagcaataagctggtttcgcaaatcaaagcatcaactaagatacctgtcctcggtcatgcggatggtatttgtcatgtatacattgacaaatcagctgacatgaatatggcaaaacgaatagtgatggatgccaaaactgattacccagcagcctgcaatgctatggagacattgcttgttcataaagaccttataaaggctccaggtcttgatgatatactcctatcactcaaaacagaaggagttgctatttatggagggcctgttgcacatgaagtactgtgtattccgaaagcagattcattccatcatgaatatagctctatggcctgcacaattgagttcgttgatgatgtacagtcagcaattaaccatatacatcgttatggaagtgcacatacagattgcattatcaccacagatgataaagtagcagaaacttttctgcgtcaagttgatagtgctgctgtatttcataatgcgagtacacgattctctgatggggctcgttttggattgggtgccgaggttggcataagcacagggcgtatacatgctcgcgggcctgtgggtgttgaaggtctcttaacaacacgctggatcatgcgaggaagtgggcaagtggtgaatggtgacaagaatgttgcatacacccataagaaccttcccttacaatgaggctgtttttgtgcttgatcaggattcgtgtctatccagtgatgtttgatagtttcatcaggcaggagcatagaatggtgaatcttttcgattgaggactgtgaatccatggatgttcagtcattgtttgtgtagacattgtggtgagcttggaggccaccccacctccccaataaagcagtgctgggagtaatagagcactgatgtactgagggtgcctaggttaaacaagaggaaccggttatatttgttttgcggtcgaacacaaacaatttttgttggtgacttgtttcttatgattctacatatttcaaggtttatgtgctgtcctaaccgggttctttgataccgggtattttggatactgtaggcatactgtaacgacagcaaaagctggctgcagtagccacagctgtactgctgcaaatagctgttactaaaatatcgtgcatcacatgtcggc

SEQ ID NO: 72971 - DNA, 1181 bp, Zea Mays
gcaggacgccacgaggcgaacaaccaactgcttccttccccgccggccgccgccgcctacaactaacacttcacgtgcccccatccttttccgcctcaagtcaagtgttcacggtccatcctctcgagagtctaggcccttctcccgaagccgcagacgcagaaaacggctctgcatatggaggcgaagaagaagccgtcggcccccgccgccgtcggagccgcgccgccgccgccgggtaacgggtacttcagcaccgtcttctccgcgccgactgcgtgagctggtgcgatttgatgaaagagtccgttactatgttgcgatttgtggagggacttcaacggtttcccaatttaattctgatgaggggtgattttgataatagaggacctataggattatgcaaaatctatttggatatgacgttgacattttgactttgttttgcattcaagggaagcgcaagtgacgcaaagcatgcggacttgtacacgatgctgaacaagcagagctccagagggcagaatggcagagatggcaaatcccacagccgccctacttacaaggatggcaaacatgctcatccaaatgagccatcagaatctccttactttggctcatccgtgcattacggtggtcgggagttctacagcagcgttttacggaagcaaccagccaatgaaccccatacggattacaagggggacaacccggatggctctgctaccagaggtgattggtggcaaggttcactttattactgaataatctgctgggacctctcccttttgtgaacaaggaataaaaggggtagagctgagaatggtttgttgtagtgttggaagtgttgacgcgagccgtcaagcatcgatcaatagtaatagttgtaatagttgaaagctgcgtcgtgactacaagcatcctgttggtggaggcagtattttagatccatcatcacgcctggacagatgtgggtgtccttttgtattcctgtttccctggtttaggtgcaggtgctgtactaaaatgatgaaactcgcagttcgataaaagcagttgccaaagagtcgcagctggcaggattacttgtctacaagccagctatatggcatggtttggcagccaccgtatctgaataaaatcatagtacaaaatctctgaatatatatgtcatacgcata

SEQ ID NO: 72972 - DNA, 1911 bp, Zea Mays
gcacacgcacccttcagtcccttccctttcaacgacagtgtacaaaaggcgatcggcatcgacgctgctagctcaatcatctgattatctgaacatattcgtcagcccgaatatgttcggtaagcagcgtgacagagggcggcagcgtttgccgcaagcgcgccacgccgccagctcagcggcgaaccgatccatccctccgcgagggtgactcgccggcgggccggggcctgagcaagcgagcagcagaggacaagcggcgagatgttacggaagaggagaaagaagataagctgcagtttttagaaacacttccgaaaaggtcagacagacttcctagttgctcaagaattggatccttttggtggagaagtttacttagtcttgttcaaaatttcaagggactggcatctccaatcatcggcaatgggagaactatctttttctgggacgatctatggaataagggcattccagctcaacaatatcctgaattattctcctttgcttgcaacagtaaactctctatcaaagaggcaaaacaaaaagaacaccttttcgagatttttcagctacctctgtctgaacaagcttatgagcagtatctggagctaaatgaatcctgtgagcaaatcaatataatcaatgcaaaggacaattgggaatttatttggggttcaaagattttttctaaaaaaagactttcaggcatcttatggggcatatccaggttcatcgcatattcaaatcgctttagaaaaataaatatgaaccaaagcataaatttttctattggttatggctgaaaaacagactgaacataaggaatatgctgaggaggaaaaacatgacacttgagtcatacacgtgcgaaaactgtatatggcaaaaagaggaaacactctaccatctcttcatcagatgcaactttgctaaggcctgctggaattccattggtttgacgccttctagaattgctaatcccgaggaggcttcgtgatatgaccacgccattaagcaacacattacaaccctcaagttatactacatcaactcaagtacaaccaatatcatcaccaacccgagtctttgatggaccaattacacgtagccgagctaagaagctacagcaagaggtgcacgcgctagtctttgatggaccaattacacgtagccgagctaagaagctacagcaagaggtgcacgcactactttatgaatttcaattaaacactaatgcgaactttatgctacctaagtcgtgtatgttgatattacttaggttcaccaagagaaaggacaaaacatatcaaaggcgaatcagcaagaagagctacgtccgagtcagtccagcgctacagaaccgtccagaagaaacagtcataacttttgattcccaaaagctatgaaggcccataagtactttttggaaagctcttgaagtctattttccaatgcttctacagccgacttaaccacatctaccagaaaggcagccgacctactttagtgctgactggtcagaaggtcaacagtctgcttgatgaccaagttttcgtattaaactgcatcattctacgaagtttcattaagcatgctatatatggtgagaaagcttatcaagttagctttccaatgcaaccagtcccacgtcatttgaagattcctagaagaagttattgccaaaatactgaaggctgcgcagaagtcaaacagccacacgaaaatcagctctgcagatcttccgaagagtctccttcacattagctcgtgaaaatacttttattttgtgtttatacctcgctaaggctggttgttactagtataaatacccccctatgtctatgatgtaaggcagctcatgataatctaaaacagaaccccttttgttcagctgtgtgctaaaaatat

SEQ ID NO: 72973 - DNA, 2699 bp, Zea Mays
gcacacgcacccttcagtcccttccctttcaacgacagtgtacaaaaggcgatcggcatcgacgctgctagctcaatcatctgattatctgaacatattcgtcagcccgaatatgttcggtaagcagcgtgacagagggcggcagcgtttgccgcaagcgcgccacgccgccagctcagcggcgaaccgatccatccctccgcgagggtgactcgccggcgggccggggcctgagcaagcgagcagcagaggacaagcggcgagatgttacggaagaggagaaagaagataagctgcagtttttagaaacacttccgaaaaggtttgatgaaatccgtagatccacgtcctttcaaaaaaaaaggtgcaatttgttccccgagaaggtaaatggttattaatttaatcaaacctgtatagaaactcgactaaatgttgaaagagtttaacttatctagaactatgttttttcggaattttatatagccgttccttgctcctcccggcaacccgaccatgcactattttttctcaaagcagttctaaactcttatgtaacttcgatggttttgacgggactcagaataaattaaataaatcaagtatatatccgatcaatgtttgtccgaagaagatgaagattctctcaagaacgttcaactgtcagataggatcaatgtcttttacctatcttgaactttctctgagattatcaaaaccccgaattcatcattttttaccacttatccaaagaattgaaaggagaccgtcatgcacctctactttcctctctcaagctggaagattggagttagttaactcggttttctcagctcttccgactttctttatttgcacgcttaaaatccctgctgccacaatcaagcagatagacgcttacaggaagcactgcctctggagaggaaatgatgtgaactcaaaaaacgccactagctacatggaacatgattactcagccaaaaagcaacagggtctcggggtagtcagattggagacgcacaataagacgttactcttgaaatatttgcacaagttcttcaataattatgacttaccttgggtgaatctcatctgtaacaattattacaggtcagacagacttcctagttgctcaagaattggatccttttggtggagaagtttacttagtcttgttcaaaatttcaagggactggcatctccaatcatcggcaatgggagaactatctttttctgggacgatctatggaataagggcattccagctcaacaatatcctgaattattctcctttgcttgcaacagtaaactctctatcaaagaggcaaaacaaaaagaacaccttttcgagatttttcagctacctctgtctgaacaagcttatgagcagtatctggagctaaatgaatcctgtgagcaaatcaatataatcaatgcaaaggacaattgggaatttatttggggttcaaagattttttctaaaaaaagactttcaggcatcttatggggcatatccaggttcatcgcatattcaaatcgctttagaaaaataaatatgaaccaaagcataaatttttctattggttatggctgaaaaacagactgaacataaggaatatgctgaggaggaaaaacatgacacttgagtcatacacgtgcgaaaactgtatatggcaaaaagaggaaacactctaccatctcttcatcagatgcaactttgctaaggcctgctggaattccattggtttgacgccttctagaattgctaatcccgaggaggcttcgtgatatgaccacgccattaagcaacacattacaaccctcaagttatactacatcaactcaagtacaaccaatatcatcaccaacccgagtctttgatggaccaattacacgtagccgagctaagaagctacagcaagaggtgcacgcgctagtctttgatggaccaattacacgtagccgagctaagaagctacagcaagaggtgcacgcactactttatgaatttcaattaaacactaatgcgaactttatgctacctaagtcgtgtatgttgatattacttaggttcaccaagagaaaggacaaaacatatcaaaggcgaatcagcaagaagagctacgtccgagtcagtccagcgctacagaaccgtccagaagaaacagtcataacttttgattcccaaaagctatgaaggcccataagtactttttggaaagctcttgaagtctattttccaatgcttctacagccgacttaaccacatctaccagaaaggcagccgacctactttagtgctgactggtcagaaggtcaacagtctgcttgatgaccaagttttcgtattaaactgcatcattctacgaagtttcattaagcatgctatatatggtgagaaagcttatcaagttagctttccaatgcaaccagtcccacgtcatttgaagattcctagaagaagttattgccaaaatactgaaggctgcgcagaagtcaaacagccacacgaaaatcagctctgcagatcttccgaagagtctccttcacattagctcgtgaaaatacttttattttgtgtttatacctcgctaaggctggttgttactagtataaatacccccctatgtctatgatgtaaggcagctcatgataatctaaaacagaaccccttttgttcagctgtgtgctaaaaatat

SEQ ID NO: 72974 - DNA, 1829 bp, Zea Mays
gtttgccgcaagcgcgccacgccgccagctcagcggcgaaccgatccatccctccgcgagggtgactcgccggcgggccggggcctgagcaagcgagcagcagaggacaagcggcgagatgttacggaagaggagaaagaagataagctgcagtttttagaaacacttccgaaaaggtttgatgaaatccgtagatccacgtcctttcaaaaaaaaaggtgcaatttgttccccgagaaggtcagacagacttcctagttgctcaagaattggatccttttggtggagaagtttacttagtcttgttcaaaatttcaagggactggcatctccaatcatcggcaatgggagaactatctttttctgggacgatctatggaataagggcattccagctcaacaatatcctgaattattctcctttgcttgcaacagtaaactctctatcaaagaggcaaaacaaaaagaacaccttttcgagatttttcagctacctctgtctgaacaagcttatgagcagtatctggagctaaatgaatcctgtgagcaaatcaatataatcaatgcaaaggacaattgggaatttatttggggttcaaagattttttctaaaaaaagactttcaggcatcttatggggcatatccaggttcatcgcatattcaaatcgctttagaaaaataaatatgaaccaaagcataaatttttctattggttatggctgaaaaacagactgaacataaggaatatgctgaggaggaaaaacatgacacttgagtcatacacgtgcgaaaactgtatatggcaaaaagaggaaacactctaccatctcttcatcagatgcaactttgctaaggcctgctggaattccattggtttgacgccttctagaattgctaatcccgaggaggcttcgtgatatgaccacgccattaagcaacacattacaaccctcaagttatactacatcaactcaagtacaaccaatatcatcaccaacccgagtctttgatggaccaattacacgtagccgagctaagaagctacagcaagaggtgcacgcgctagtctttgatggaccaattacacgtagccgagctaagaagctacagcaagaggtgcacgcactactttatgaatttcaattaaacactaatgcgaactttatgctacctaagtcgtgtatgttgatattacttaggttcaccaagagaaaggacaaaacatatcaaaggcgaatcagcaagaagagctacgtccgagtcagtccagcgctacagaaccgtccagaagaaacagtcataacttttgattcccaaaagctatgaaggcccataagtactttttggaaagctcttgaagtctattttccaatgcttctacagccgacttaaccacatctaccagaaaggcagccgacctactttagtgctgactggtcagaaggtcaacagtctgcttgatgaccaagttttcgtattaaactgcatcattctacgaagtttcattaagcatgctatatatggtgagaaagcttatcaagttagctttccaatgcaaccagtcccacgtcatttgaagattcctagaagaagttattgccaaaatactgaaggctgcgcagaagtcaaacagccacacgaaaatcagctctgcagatcttccgaagagtctccttcacattagctcgtgaaaatacttttattttgtgtttatacctcgctaaggctggttgttactagtataaatacccccctatgtctatgatgtaaggcagctcatgataatctaaaacagaaccccttttgttcagctgtgtgctaaaaatat

SEQ ID NO: 72975 - DNA, 851 bp, Zea Mays
tggtcactcaaactcattaaagttggcaagcacttgatatctgctgaaagggtacaaatccagttactatatgtagctgcgcagcaacaagccacacattcactctgtcaccgcctcacggtgcaggggaggacacgtactgcaagaactccttgtcgaggaggagatgcgccatggtgtctggcgcgaggcacacctccacgtcgatgctaccgtccccagcctgtccggggaacgaagacatcttgccgtcgaatttgttcgcgcggccgctccgcacggcgagcgcgcggccccacccgaagtcgttcccgtcgtacatcgggaaccgaggcgagctccccatcgtgagggccgccccgtcggggttgcctagcgggaagcaacggggcgcggcctcccactccgccgcggcgcgccggatcgcgccgtccttgtgcgacgccacggtggcgttcagccgggcggccgcccagcccaggtcgttggacgccagctcggctacggtggccgtcgtcgccacgctctggatcgcgttgccgaagtagagcggggagatcgccgggcgcagacggtgccggcagttcacggccatgcggaacgtcgtcgtcttgtcggcagccagcagccggcgcgcgcgcgtcaccgccctccagatgtgcgcgcacagcgactgaaacgacgagatttcaccggaacgcccttcaagtctggagtcgtcgtgcgcgagcttgccgttagcctcggcttcctgacctgctcttttcgagcggttggccgtcgccttcagctcgctgattgcggcagcactgaagtggaggatccgctcgcggagcggcgcgagccatgcc

SEQ ID NO: 72976 - DNA, 2289 bp, Zea Mays
cacctggtcctcctctccactctctcttctccctccaataattctctccacccctgcttgctgcagcttcaagcactaccgaatcagggcgagtgggagcagaggagggaatcccatgtctccgcccctcgctggagcagatcgttgtcgagccgacgtggagctgctgcggtagaaagctagcggagcctgcgagctagcctgatccgtccgcagtccgatcgggatcgatgggtggggaggcgccggagccgcggcggctgacccgggcgctgagcatcggcggcggtgacggcggctgggttcccgaggagatgctgcaactcgtgatggggttcgtcgaggaccccgcgcgaccgggaggccgcgtcgctggtgtgtcaccggtggcaccgcgtcgacgcgctctcgcggaagcacgtgacggtgcccttctgctacgccgtttccccggcacgcctgctcgcgcggttcccgcggctcgagtcgctcgcggtgaaggggaagccccgcgcggccatgtacgggctcatacccgacgactggggcgcctacgcccgcccgtggatcaccgagctcgccgcgccgctcgagtgcctcaaggcgctccacctccgacgcatggtcgtcacagacgacgacctcgccgagctcgtccgtgccagggggcacatgctgcaggagctgaagctcgataagtgcaccggcttctccactcatggactccgcctcgttgcccgctcctgcagatcactgaggactttatttttggaagaatgtcaaattgatgataagggcagtgaatggatccacgatctcgcagtctgctgtcctgttctgacaacattgaatttccacatgactgagcttgaagtgatgccagctgacctaaagcttcttgcaaagagctgcaagtcactgatttcattgaagattagtgactgcgatctttcagatttgatagagttcttccaatttgccacagcactggaagaatttgctggagggacattcaatgagcaaggggaactcagcaagtgaggaatgtgattggagatagaggattaggagttgttgcggatacgtgcaagaagctccaaaggctcagaatagagcgaggagatgatgaaggaggtgtgcaagaagagcagggaggggtctctcaagtgggcttgacggctatagccgtaggttgccgtgagctggaatatatagctgcctatgtgtctgatataaccaatggggccttggaatctatcgggacattctgcaaaaaactatacgacttccggcttgttctacttgatagagaagagaggataacagacttgccactggacaatggtgtccgagctttgttgaggggctgcaccaagcttcggaggtttgctctgtacttgagaccaggagggctctcagatgcaggtctcggctacattggacagtgcagcggaaacatccagtacatgcttctcggtaatgttggggaaactgatgatggattgatcagcttcgcattgggttgcgtaaacctgcgaaagcttgaactcaggagttgctgcttcagcgagcgagcactggcccttgcaatactacatatgccttccctgaggtacgtatgggttcagggctacaaagcgtctcaaaccggccgagacctcatgctcatggcaaggcccttctggaacatagagtttacacctcccaatcctaagaacggaggttggctgatggaagatggggagccttgtgtagatagtcacgctcagatacttgcataccactccctcgccggtaagaggctggactgcccacaatccgtggttcctttgtatcctgcgtgagtgtaaatagactaagctggtgtctttccttagcctcctggtcaacaagaatggtgttgataactcgatatatgcggttattgtatggatctagatggctagctgctacgtactgtaataagctactagtagctgagagatgtcctggaataagcccttgctatttttgcctgtactgctttctaatcctagggagatgtatactgctaagcaacgatggaagatgtgagtctgcttgctcgccctgatttgatttgtaccactggaggtataagaatacctgggttttggccgcctgctttgagcattgagttgttctctgccgtatgtggtggttgctcatgagttgacgatgagacaaccaggactgattttgtatgctgtacgaactgagtgtatgaagttactgtgccagggcggccatgaactctctttatgataaaag

SEQ ID NO: 72977 - DNA, 1496 bp, Zea Mays
tgcagagcaccacccctgcactttgatttttttcctcccttgcgtgtcgtctctctctcccttgcgtgtcgtctctctctcggccactagctcgctcgcctctgcagctttcttctccaccgcgccctggctgagctcggcgtcctcctctaccacggctcccagtccttctctgcgcggcgctcctgtgttccaagctcgtcgtggagctttgtctctccagtcgtcgcgctcgggagtccttgttgtgctcgcctcagcgctctggccgagcccctcacgcgtgctcgtctctctcctctgcccggccccaagctcctgcgcgtggctccctgctcgcgtctccggccatctccagctcgctggccgcgacccccccgaggtttttcccatggccggctcactgctcaacccaagccgaggtcgtgtacgaagcagcaagcctcagattcttccgcgccgcgtgcgtcgactcgatttgcaaccctgtgtcatcgatctgtgcagccccgacgtcagccccaacatcgatctgcgcgcgtggatccgacgtcgcgtctcgctctctggtggtcgagctcacccagctcgcctcctgtcttcaactatggatggcagccaccttggattgttcataaactccgccgctcagtgccgcgtctccagcaccagcgtccctgctccttgttcctccatggctgcgtcgcgcgcgttccgttgttcctacgcgtgctgccgcaaagctctctgttctgttcgctttcgtcgcattgtcgtgcgcgcgaaactgcttgcagtcgatatcgagtccgtgacgcgcgcgttggacacggtgaaacgctacgtgtgcttatgtccgagcccgaccgtgacctcgctttgctcctcgcgtcactgctcaccgagtctttcctcagcccgtgatctctccctgcctgtcgttgcgtcgttcgtcgtcctttggtcctagtctgacccatccgtgcgttcgctcctcatccatcgggcttcacgcgtgctcgcgtttgtcgtcgagctgttgaacccgtcctcccttgctcgtaacttcgtcgtcgctagaatcctcactagattcgtgtcctcgccagcccgctccatattcaatctcgtcgtcgttccgcgcgtcagcaaaagatcctaagaatcgggtgaagacgaagctagcagcatggtattcaccaagtgcgtgataggaagctcgagccaggatttatcagcattcgtacgagatttgggtcgtgtttgatgctggtacgttaattaatcgcgtgatgcggaagaagacccaagtcgaccccaagcgcgggttaatccgcaggatgaagctgatgaactaatctgaagatggataaacgacacaagtatcaaaacaaaagataatcgccaagtggatgtcgtctaacaacactaacctagtgttattcaggcaagtcccggtgcagttgccacctcctgtgttttaaaatctttatcac

SEQ ID NO: 72978 - DNA, 1205 bp, Zea Mays
ctgattctttcagccgcggtactcctctgctccagcgcaccatgcccagagcctgcctgttgctcgcgtctccggccatctccagccgtccggccgagctctccctactatttccctggcgcgtcttgctccagcttggtttttcttctcccctgtacgcgctcagcagccggcgtttctccctacgcgtgccgcatccatggcttggtcctagttcggtgcccaagctcccctgcagccgcgcccctacgctcgtcgctgaaactcccatggcgcccggatttatgttcgcccggctctgctccttccccggctacagacgccagttcccatggtggcttcccttgtgtcgcgccttgttccctgcgcacgtgccgtgccgagctcgctccttcccatggtggctgagctctttggctcggtcctgcttgtcccaaagcgacgtgaattttcctgtgcgcgcgtgtctccttacgcacgcgtcgccgtcgaattccctggtgtttgcgcgtcatgaggttcctccagcgcccttgccctctcgcccgtggcgtcagctactcgaccaactctatccctggctgtgctcgtgcctgactcctgcgtcgcgcgcgagttcgacgctcatctccctatttatccatggcgcgcgcctgactctcggttatcggtgccctgtcaggccgtcctggatttcgcgagctccttccagttgccgtcgctcgccgtcgtctcttcgtgctggtcgactagtttgccgtggtcgtgcgtagtcccctgctcgacctcgtcgtcgaacttcgccttgccggtcgtcgttcttcgctcagcaaggtttcgttctaagctgcgccgcccttcaagttcgcgatcttggcggactcgcacctctgtgtcgtgtctgctcgcccatgctcgtcgacctcgacgatctatctttcaactgcgcgctacttgtgtttgagctctgaagccccctatcgagctctttccctggaagtcgccttcgagcacaacccctaccaagtgttcgctgggaggaacgataaataatcgcgtgatgcggaagacaagccaagtcgaccccaagcgcgggctaatccgcaggatgaagctgatggaccaacctgaagatggttaaatcaagcaagtgctcggtcgaagaatactcgtcaagcggacgtcacctaacaacactaacctag

SEQ ID NO: 72979 - DNA, 1258 bp, Zea Mays
ctgattctttcagccgcggtactcctctgctccagcgcaccatgcccagagcctgcctgttgctcgcgtctccggccatctccagccgtccggccgagctctccctactatttccctggcgcgtcttgctccagcttggtttttcttctcccctgtacgcgctcagcagccggcgtttctccctacgcgtgccgcatccatggcttggtcctagttcggtgcccaagctcccctgcagccgcgcccctacgctcgtcgctgaaactcccatggcgcccggatttatgttcgcccggctctgctccttccccggctacagacgccagttcccatggtggcttcccttgtgtcgcgccttgttccctgcgcacgtgccgtgccgagctcgctccttcccatggtggctgagctctttggctcggtcctgcttgtcccaaagcgacgtgaattttcctgtgcgcgcgtgtctccttacgcacgcgtcgccgtcgaattccctggtgtttgcgcgtcatgaggttcctccagcgcccttgccctctcgcccgtggcgtcagctactcgaccaactctatccctggctgtgctcgtgcctgactcctgcgtcgcgcgcgagttcgacgctcatctccctatttatccatggcgcgcgcctgactctcggttatcggtgccctgtcaggccgtcctggatttcgcgagctccttccagttgccgtcgctcgccgtcgtctcttcgtgctggtcgactagtttgccgtggtcgtgcgtagtcccctgctcgacctcgtcgtcgaacttcgccttgccggtcgtcgttcttcgctcagcaaggtttcgttctaagctgcgccgcccttcaagttcgcgatcttggcggactcgcacctctgtgtcgtgtctgctcgcccatgctcgtcgacctcgacgatctatctttcaactgcgcgctacttgtgtttgagctctgaagccccctatcgagctctttccctggaagtcgccttcgagcacaacccctaccaagtgttcgctgggaggtctaaaccaatactcatcatcgatctgcgattatcaaatcattttggtcacagaacgataaataatcgcgtgatgcggaagacaagccaagtcgaccccaagcgcgggctaatccgcaggatgaagctgatggaccaacctgaagatggttaaatcaagcaagtgctcggtcgaagaatactcgtcaagcggacgtcacctaacaacactaacctag

SEQ ID NO: 72980 - DNA, 560 bp, Zea Mays
gtcagggcgtggtagctgtgaagggcggagggagtggttttgaggatgtagagcgagagaggagacagcgaaagttggaaaggaatcacggggtctcaaacctcactccgtgctacctctctctctctcttctctctctctctctctttctctctctgatgtctctctctctgtttcttttgctttggttcctctggccttctcggggttcgggcttgctgacaatgtaggggatcgaagctgaaacgcacacgcgctctcaaacctctccagctttgtgcgtatcgatcggatcaccaccgctgtgatctcgccaagactggcctttcggagttgcttgataagaaggtgatcgcccaaagcatattctgcgtgcgtgcgtgcgtgtatcaatgtgactcacggatcgagcaggaaaacggctgctgaaaacgttcaaaacctcatgtgtttaagctatcttcatcagcttatctatgatatgtttcgtttcatttcctattttaaactttacaatttgaacatcacagtctacgatataaaacaatgtttatctaacc

SEQ ID NO: 72981 - DNA, 701 bp, Zea Mays
cgactagcaaagtggaaaattgatttgtccacatttcaggcggacaccaccgtgtcgcccccgcgtcctaaacttctcacctcgccggggtccggtagccgcgaacgatgctccgccgcgcgctcctctcctccgtctccccactccacggaacggtacgaatcccgagccccagctactctcctatccaagcccttctcgctcaatggagcaggtacgcctccgtggtctcatcctcggccccgccgccgctgccgccgccccctccatctccgcctcgaggtccatcgaggtcgagcggtggaggtcccacttcctcgtcgctgaaccctgcagaggtcgccaagttcgcctccatcgccgagacctggtgggattctagtggcccattcaaacctttgcatgtgatgaatccaacccgactgtcttttatctgctccactctctgtagacatttcaggagggatccaaattcatctaagccacttgaaggtctcaaagttattgatgttggatgtggaggtggcattctgtcagaggtagaaagcttctctgtgtcaatcatttctgagaatcgctattggcacttaacatagtataaaagaccaacaaaggaacaagtgcgtgcatcgtttgacaacagttatagattatagaaacagatactgacatctagtagttggcattttgtttatccaatt

SEQ ID NO: 72982 - DNA, 1462 bp, Zea Mays
cgactagcaaagtggaaaattgatttgtccacatttcaggcggacaccaccgtgtcgcccccgcgtcctaaacttctcacctcgccggggtccggtagccgcgaacgatgctccgccgcgcgctcctctcctccgtctccccactccacggaacggtacgaatcccgagccccagctactctcctatccaagcccttctcgctcaatggagcaggtacgcctccgtggtctcatcctcggccccgccgccgctgccgccgccccctccatctccgcctcgaggtccatcgaggtcgagcggtggaggtcccacttcctcgtcgctgaaccctgcagaggtcgccaagttcgcctccatcgccgagacctggtgggattctagtggcccattcaaacctttgcatgtgatgaatccaacccgactgtcttttatctgctccactctctgtagacatttcaggagggatccaaattcatctaagccacttgaaggtctcaaagttattgatgttggatgtggaggtggcattctgtcagagcctcttgctcgaatgggtgctacggttactgcaattgatgttgttgacaagaatataaagattgcaagtattcatgcggcatctgatccaacaactgcttcgattgagtattgttgtgcaacagctgagggactggtaaaagagaaaaggttgtttgatgctgtaatttctcttgaggtgattgagcatgtcgccaatcctttggagttctgtgaatccctctcggctttgacaattcctaatggtgccactgtgatttccacaatcaaccgatcaatgcgagcatatgccactgcaatagttgctactgagtatatcctcagatggcttcctagaggcacacatgagtggtccaaactggttaccccggaggagcttgtcctaatgctgcaaaaggcttccgtctccgtcgaagagatggcagggttcgtttacaatccgttgagcggagaatggtccctgtcagatgatatcagtgtgaactacattgcttttggcgtcaagaagggcgaggcatcatcgacaaatgacagagaagcaaatttatcatagctgaagaaaaacacgtgaccttgaattgtcgggcatcattttcagaggaccaattcatgtcactgaaatcttactgctaaggatgcaaccaagtagcagaagataattctcttgctctttttagtcttggaaactggagcttgtggagtgatgcttcctggaagcgccattgagaagtcaagttgacaacacgtgactgctaacaagtagagctatctgccttttttgggtaatgtttcaggcagtttttctcaattttgtggcaatcactgatctaaataaaaatactactacactgctgtacgtgaaaactgaacagatttgctgtctggaaatgtaactatttttaacagttaagaggtgtttgaatg

SEQ ID NO: 72983 - DNA, 1383 bp, Zea Mays
cgactagcaaagtggaaaattgatttgtccacatttcaggcggacaccaccgtgtcgcccccgcgtcctaaacttctcacctcgccggggtccggtagccgcgaacgatgctccgccgcgcgctcctctcctccgtctccccactccacggaacggtacgaatcccgagccccagctactctcctatccaagcccttctcgctcaatggagcaggtacgcctccgtggtctcatcctcggccccgccgccgctgccgccgccccctccatctccgcctcgaggtccatcgaggtcgagcggtggaggtcccacttcctcgtcgctgaaccctgcagaggtcgccaagttcgcctccatcgccgagacctggtgggattctagtggcccattcaaacctttgcatgtgatgaatccaacccgactgtcttttatctgctccactctctgtagacatttcagcctcttgctcgaatgggtgctacggttactgcaattgatgttgttgacaagaatataaagattgcaagtattcatgcggcatctgatccaacaactgcttcgattgagtattgttgtgcaacagctgagggactggtaaaagagaaaaggttgtttgatgctgtaatttctcttgaggtgattgagcatgtcgccaatcctttggagttctgtgaatccctctcggctttgacaattcctaatggtgccactgtgatttccacaatcaaccgatcaatgcgagcatatgccactgcaatagttgctactgagtatatcctcagatggcttcctagaggcacacatgagtggtccaaactggttaccccggaggagcttgtcctaatgctgcaaaaggcttccgtctccgtcgaagagatggcagggttcgtttacaatccgttgagcggagaatggtccctgtcagatgatatcagtgtgaactacattgcttttggcgtcaagaagggcgaggcatcatcgacaaatgacagagaagcaaatttatcatagctgaagaaaaacacgtgaccttgaattgtcgggcatcattttcagaggaccaattcatgtcactgaaatcttactgctaaggatgcaaccaagtagcagaagataattctcttgctctttttagtcttggaaactggagcttgtggagtgatgcttcctggaagcgccattgagaagtcaagttgacaacacgtgactgctaacaagtagagctatctgccttttttgggtaatgtttcaggcagtttttctcaattttgtggcaatcactgatctaaataaaaatactactacactgctgtacgtgaaaactgaacagatttgctgtctggaaatgtaactatttttaacagttaagaggtgtttgaatg

SEQ ID NO: 72984 - DNA, 875 bp, Zea Mays
caaaatcttgatcatgtaatatgaatttaggcatctgatccaacaactgcttcgattgagtattgttgtgcaacagctgagggactggtaaaagagaaaaggttgtttgatgctgtaatttctcttgaggtgattgagcatgtcgccaatcctttggagttctgtgaatccctctcggctttgacaattcctaatggtgccactgtgatttccacaatcaaccgatcaatgcgagcatatgccactgcaatagttgctactgagtatatcctcagatggcttcctagaggcacacatgagtggtccaaactggttaccccggaggagcttgtcctaatgctgcaaaaggcttccgtctccgtcgaagagatggcagggttcgtttacaatccgttgagcggagaatggtccctgtcagatgatatcagtgtgaactacattgcttttggcgtcaagaagggcgaggcatcatcgacaaatgacagagaagcaaatttatcatagctgaagaaaaacacgtgaccttgaattgtcgggcatcattttcagaggaccaattcatgtcactgaaatcttactgctaaggatgcaaccaagtagcagaagataattctcttgctctttttagtcttggaaactggagcttgtggagtgatgcttcctggaagcgccattgagaagtcaagttgacaacacgtgactgctaacaagtagagctatctgccttttttgggtaatgtttcaggcagtttttctcaattttgtggcaatcactgatctaaataaaaatactactacactgctgtacgtgaaaactgaacagatttgctgtctggaaatgtaactatttttaacagttaagaggtgtttgaatg

SEQ ID NO: 72985 - DNA, 823 bp, Zea Mays
tcttttccattgacaccatactttgatagggactggtaaaagagaaaaggttgtttgatgctgtaatttctcttgaggtgattgagcatgtcgccaatcctttggagttctgtgaatccctctcggctttgacaattcctaatggtgccactgtgatttccacaatcaaccgatcaatgcgagcatatgccactgcaatagttgctactgagtatatcctcagatggcttcctagaggcacacatgagtggtccaaactggttaccccggaggagcttgtcctaatgctgcaaaaggcttccgtctccgtcgaagagatggcagggttcgtttacaatccgttgagcggagaatggtccctgtcagatgatatcagtgtgaactacattgcttttggcgtcaagaagggcgaggcatcatcgacaaatgacagagaagcaaatttatcatagctgaagaaaaacacgtgaccttgaattgtcgggcatcattttcagaggaccaattcatgtcactgaaatcttactgctaaggatgcaaccaagtagcagaagataattctcttgctctttttagtcttggaaactggagcttgtggagtgatgcttcctggaagcgccattgagaagtcaagttgacaacacgtgactgctaacaagtagagctatctgccttttttgggtaatgtttcaggcagtttttctcaattttgtggcaatcactgatctaaataaaaatactactacactgctgtacgtgaaaactgaacagatttgctgtctggaaatgtaactatttttaacagttaagaggtgtttgaatg

SEQ ID NO: 72986 - DNA, 2556 bp, Zea Mays
gtccaagtatctgaagcccaacgtagacgatgccaaataagcaaaaaatctcagaatctagttgccgagacgaccgtcaccccgcgccgccgccgccactggcgctactcctaccggcgggggcctgaagaatatggcagccgcctccgcctccacgcgacaagcgacggcggaggcgtgcagtagccacgtccaccacgcgcacctcgcggctctcctcaacgcttccgcgcgcttgcctccgctccctctcagccgcctccacctcccgctctcgctccccacggcctcccgcctcgtcgcgtccttccctccactcccgctcctcgtctgcttcctccgcgcgctccgcctcctcccctcctcgccgccgcgcccctttgactcgctcatcaagtcatatgcctcgctccccaaccgcgcctccctcgctgctgcggcgctcgcgttcgccaggtcagccgggtacgtgccctctgtgctcgcctacaacgccgtcctcctcgcgctctctgacgcgtcgctcacctccgctaggcgcttcttcgactccatgcttagcgacggcgtggcgcccaacgtgtacacctacaacatcctcatccgcgcgctgtgcggccgcggacaccggaaagaggcgctcagcatcttgcgtgacatgcgcggcgcaggttgcggccccaatgtcgtgacttacaacacgctcgtcgcggcgttcttcagagccggggaggtggatggcgcggagaggctggtcggcatgatgcttgacggcggcttgaagcccaacctggtgactttcaattcaatggtgaatgggatgtgcaaggctgggaagatggaggacgcacgcaaggtgttcgatgaaatgatgagggagggtttggcgccggatggggtcagttacaacaccttagtgggtgggtattgcaaggcagggtgctcgcatgaggcattgtctgtgtttgcagagatgacacagaaagggatcatgccagacgtcgtgacatttacgtcattgatccatgtaatgtgcaaggctgggaacttggagtgggcagtgacattggtgaggcagatgagggagaggggcctccagatgaatgaggtcacttttacagccttgatagatgggttctgcaagaagggattcttggatgatgcattgcttgcagtaagggggatgaggcaatgcagaataaagccttcagtggtgtgttataatgcacttattaatggttattgtatggtaggaagaatggatgaagcaagagagttactccatgaaatggaagctaaaggactgaagcctgacgttgtgacatacagtacgattatcagtgcgtactgtaagaattgtgatacacattctgcattcgaattgaaccaacagatgcttgagaagggtgttcttccagatgcaatcacctactcatcactcataagggttctttgtgaggagaaacgactcagtgacgctcatgtgctcttcaaaaatatgattaagcttggcctacaacctgatgaatttacatacacatctcttattgatggccactgcaaggagggtaatgtggagagggctctttctctgcacgataaaatggtaaaggcaggagttcttcctgatgttgtgacttacagtgtgcttattaatgggcttagtaaatcagcacgtgctatggaagcacaacagttgctcttcaaattgtaccatgaagagccaattccagcaaatactaaatatgatgccctgatgcattgttgtagaaaagctgagcttaagagtgtgttagctctcttgaagggattttgcatgaaaggtttaatgaatgaagctgataaagtttatcaatcaatgttagacagaaactggaatcttgacgggtctgtctacagtgtgcttattcatgggcattgtagggcaggaaatgttatgaaggctctcagcttccataagcaaatgctgcagcgtggttttgctccaaattcaacaagcacgatttccttgattaggggtctatttgaaaatgggatggttgtagaagcagatcaggtgattcagcagttgttgaactgttgttcccttgctgatgcagaagcatcaaaggctcttattgacctcaacttaaatgaaggtaatgtggacgcagtcttagacgttctgcatggcatggcaaaggatggactgcttccaagtccaagatgagggtgattttcaacattcaagaaccaccctctctgtggaatactggagacctgatggtcatgtttggtacatattgtctcatgagtcataacacgagcatctgaatcagtgttatgtggtaagaacggtctgccctaaatcatgatgtgctccatatggaaaaggctgaaagaagttgcctcatgctgcattattgtgtaaaacagaaaaaggaaaatgaaagcgtgaaatccacggaaaatgaggagcttgaagaaagtggaacatcaatggcaatggatgtatacaggtggtttgcacttacagatttcagctatctagcttgccgcctagtcctccatcttctc

SEQ ID NO: 72987 - DNA, 3403 bp, Zea Mays
cgagacgaccgtcaccccgcgccgccgccgccactggcgctactcctaccggcgggggcctgaagaatatggcagccgcctccgcctccacgcgacaagcgacggcggaggcgtgcagtagccacgtccaccacgcgcacctcgcggctctcctcaacgcttccgcgcgcttgcctccgctccctctcagccgcctccacctcccgctctcgctccccacggcctcccgcctcgtcgcgtccttccctccactcccgctcctcgtctgcttcctccgcgcgctccgcctcctcccctcctcgccgccgcgcccctttgactcgctcatcaagtcatatgcctcgctccccaaccgcgcctccctcgctgctgcggcgctcgcgttcgccaggtcagccgggcgcttcttcgactccatgcttagcgacggcgtggcgcccaacgtgtacacctacaacatcctcatccgcgcgctgtgcggccgcggacaccggaaagaggcgctcagcatcttgcgtgacatgcgcggcgcaggttgcggccccaatgtcgtgacttacaacacgctcgtcgcggcgttcttcagagccggggaggtggatggcgcggagaggctggtcggcatgatgcttgacggcggcttgaagcccaacctggtgactttcaattcaatggtgaatgggatgtgcaaggctgggaagatggaggacgcacgcaaggtgttcgatgaaatgatgagggagggtttggcgccggatggggtcagttacaacaccttagtgggtgggtattgcaaggcagggtgctcgcatgaggcattgtctgtgtttgcagagatgacacagaaagggatcatgccagacgtcgtgacatttacgtcattgatccatgtaatgtgcaaggctgggaacttggagtgggcagtgacattggtgaggcagatgagggagaggggcctccagatgaatgaggtcacttttacagccttgatagatgggttctgcaagaagggattcttggatgatgcattgcttgcagtaagggggatgaggcaatgcagaataaagccttcagtggtgtgttataatgcacttattaatggttattgtatggtaggaagaatggatgaagcaagagagttactccatgaaatggaagctaaaggactgaagcctgacgttgtgacatacagtacgattatcagtgcgtactgtaagaattgtgatacacattctgcattcgaattgaaccaacagatgcttgagaagggtgttcttccagatgcaatcacctactcatcactcataagggttctttgtgaggagaaacgactcagtgacgctcatgtgctcttcaaaaatatgattaagcttggcctacaacctgatgaatttacatacacatctcttattgatggccactgcaaggagggtaatgtggagagggctctttctctgcacgataaaatggtaaaggcaggagttcttcctgatgttgtgacttacagtgtgcttattaatgggcttagtaaatcagcacgtgctatggaagcacaacagttgctcttcaaattgtaccatgaagagccaattccagcaaatactaaatatgatgccctgatgcattgttgtagaaaagctgagcttaagagtgtgttagctctcttgaagggattttgcatgaaaggtttaatgaatgaagctgataaagtttatcaatcaatgttagacagaaactggaatcttgacgggtctgtctacagtgtgcttattcatgggcattgtagggcaggaaatgttatgaaggctctcagcttccataagcaaatgctgcagcgtggttttgctccaaattcaacaagcacgatttccttgattaggggtctatttgaaaatgggatggttgtagaagcagatcaggtgattcagcagttgttgaactgttgttcccttgctgatgcagaagcatcaaaggctcttattgacctcaacttaaatgaaggtaatgtggacgcagtcttagacgttctgcatggcatggcaaaggatggactgcttccaagtccaagatgagggtgattttcaacattcaagaaccaccctctctgtggaatactggagacctgatggtcatgtttggtacatattgtctcatgagtcataacacgagcatctgaatcagtgttatgtggtaagaacggtctgccctaaatcatgatgtgctccatatggaaaaggctgaaagaagttgcctcatgctgcattattgtgtaaagtgagcaaccatttctatctcattaaccgctctgctcttaacaagtgaaatgaattttggttcttgataaatacttgattttgaagggcaggctggtttagtgatgagagttgtttcactaagtcaccggatcttaggtttgaagcaacctctctgcatttgcagaggaaggctggtattgatttatcctttttctaggccccactcacgtgggagtctctggcactaggtctggccccttttataaatacttgattttgtattagcagctttttgtattgttgtttataataattattaggttagagaaggttgtactgatattttatgatgtattacttattgtcttacttttagacactataataaaagatcttgatatatgtagttagtgaactcactaaggaggtctgatctttattcaacacacatttatcccttctggtacctgtctttttttaatacaagttataaaaatcagtgctgtgtttgttatatttctaaaaaggatttacaattgtgcgatgagggtctacctaataatgtgaaactccatttcatagtcaacaataaatataatacatttgaaaagtaaaggctgacgaagcattgtcaaaggaaatgctgtaagtaactaattatttcatgaccagacgctggatatcttttttatgcctattgaattgacaactagtagcattcctgtggactacccgttgatttgtttgagcttttggtcatttttagactattagattttggactttccaaaagccaaaccgctcccataagccaaatgccccaaagctcactgtactgagcttattgtttttggcttccaggagctttttagcgttttgaaaggtctaaaaacggaggtctaaaagcttccgggaagcccaaacaaacatgcctaacaggttcatcttacttcacagcaatacttgatttcatgatagggcagaagacactgcttcgggccttctaactaattatatatattgttttaaccaccttaaatctaatccatttgttttctaacggggcagtctactctctagtcttgtgcttccactatcctttttttttccttagggactaaaacaaaatagcatgtttaacgtattct

SEQ ID NO: 72988 - DNA, 2648 bp, Zea Mays
cgagacgaccgtcaccccgcgccgccgccgccactggcgctactcctaccggcgggggcctgaagaatatggcagccgcctccgcctccacgcgacaagcgacggcggaggcgtgcagtagccacgtccaccacgcgcacctcgcggctctcctcaacgcttccgcgcgcttgcctccgctccctctcagccgcctccacctcccgctctcgctccccacggcctcccgcctcgtcgcgtccttccctccactcccgctcctcgtctgcttcctccgcgcgctccgcctcctcccctcctcgccgccgcgcccctttgactcgctcatcaagtcatatgcctcgctccccaaccgcgcctccctcgctgctgcggcgctcgcgttcgccaggtcagccgggcgcttcttcgactccatgcttagcgacggcgtggcgcccaacgtgtacacctacaacatcctcatccgcgcgctgtgcggccgcggacaccggaaagaggcgctcagcatcttgcgtgacatgcgcggcgcaggttgcggccccaatgtcgtgacttacaacacgctcgtcgcggcgttcttcagagccggggaggtggatggcgcggagaggctggtcggcatgatgcttgacggcggcttgaagcccaacctggtgactttcaattcaatggtgaatgggatgtgcaaggctgggaagatggaggacgcacgcaaggtgttcgatgaaatgatgagggagggtttggcgccggatggggtcagttacaacaccttagtgggtgggtattgcaaggcagggtgctcgcatgaggcattgtctgtgtttgcagagatgacacagaaagggatcatgccagacgtcgtgacatttacgtcattgatccatgtaatgtgcaaggctgggaacttggagtgggcagtgacattggtgaggcagatgagggagaggggcctccagatgaatgaggtcacttttacagccttgatagatgggttctgcaagaagggattcttggatgatgcattgcttgcagtaagggggatgaggcaatgcagaataaagccttcagtggtgtgttataatgcacttattaatggttattgtatggtaggaagaatggatgaagcaagagagttactccatgaaatggaagctaaaggactgaagcctgacgttgtgacatacagtacgattatcagtgcgtactgtaagaattgtgatacacattctgcattcgaattgaaccaacagatgcttgagaagggtgttcttccagatgcaatcacctactcatcactcataagggttctttgtgaggagaaacgactcagtgacgctcatgtgctcttcaaaaatatgattaagcttggcctacaacctgatgaatttacatacacatctcttattgatggccactgcaaggagggtaatgtggagagggctctttctctgcacgataaaatggtaaaggcaggagttcttcctgatgttgtgacttacagtgtgcttattaatgggcttagtaaatcagcacgtgctatggaagcacaacagttgctcttcaaattgtaccatgaagagccaattccagcaaatactaaatatgatgccctgatgcattgttgtagaaaagctgagcttaagagtgtgttagctctcttgaagggattttgcatgaaaggtttaatgaatgaagctgataaagtttatcaatcaatgttagacagaaactggaatcttgacgggtctgtctacagtgtgcttattcatgggcattgtagggcaggaaatgttatgaaggctctcagcttccataagcaaatgctgcagcgtggttttgctccaaattcaacaagcacgatttccttgattaggggtctatttgaaaatgggatggttgtagaagcagatcaggtgattcagcagttgttgaactgttgttcccttgctgatgcagaagcatcaaaggctcttattgacctcaacttaaatgaaggtaatgtggacgcagtcttagacgttctgcatggcatggcaaaggatggactgcttccaagtccaagatgagggtgattttcaacattcaagaaccaccctctctgtggaatactggagacctgatggtcatgtttggtacatattgtctcatgagtcataacacgagcatctgaatcagtgttatgtggtaagaacggtctgccctaaatcatgatgtgctccatatggaaaaggctgaaagaagttgcctcatgctgcattattgtgtaaagtgagcaaccatttctatctcattaaccgctctgctcttaacaagtgaaatgaattttggttcttgataaatacttgattttgaagggcaggctggtttagtgatgagagttgtttcactaagtcaccggatcttaggtttgaagcaacctctctgcatttgcagaggaaggctggtattgatttatcctttttctaggccccactcacgtgggagtctctggcactagacagaaaaaggaaaatgaaagcgtgaaatccacggaaaatgaggagcttgaagaaagtggaacatcaatggcaatggatgtatacaggtggtttgcacttacagatttcagctatctagcttgccgcctagtcctccatcttctc

SEQ ID NO: 72989 - DNA, 1015 bp, Zea Mays
cattgtcttggttgctcttgcgtagtcgataggagaacaaatgaatgactaaggtgagcgtagtaaatgcgtgtacttgtgatgttatttttgtgttgtgtaaggacataaaatatttgtcgtcttttaatggtgttaatgttgaacgccgataacgtgtagataactaatgctagcgtgtggttgttatggtgtcttacaatttaatgtctagttcgctactgtgtatttgtatatcttgtgttactttcattatattcatacatatgcatcttgcatctcatttaggaccgagagatgatgatcgtgcaagtgaagtggtgccaaccacaagaagcagttggtggacgacctgaacaatgatggacttaaccagtggatgctcgccaagcgagtacctccccaagcaaacactatctaagtgttaaactaaaggcaagccccggtttatgcataacctgttattcatgctattttactatacttaatgattgtaggattgaatgtgcacttaagtgtaggagttgtttgaaaccttagttgcatgatctcaggaatccttttgagatggatactagtatgctaggtcgagtagctgctttatttaattaggatctcagtagaagacgagtgatttttctagcgctcacacgagatcaggaattgattgtacccactttcatatcatactgatgttggtctgtggacacggatccatggggaggcgtggtctacgagatgaaattggaataaggattaacgtgcggatacctgtgtcaagcgtttgaatgtactaagaacatggcgagaaatatggtgaatcagtaagcctagtacctgattgaacctaccagcggacatatcccctcacgcgacctgagacgtggtcttccattccggttatggtgggtacaagtgcggtcactgcacgacggcagtcggggtcagtgaggcattgtacgccaaggcggtgagccctgatctgctgccagggaatcgatggggacggttgatg

SEQ ID NO: 72990 - DNA, 2344 bp, Zea Mays
aaaagcaaatgtcgacgaagatgcagagatgcgagtggccgagacctatttcagctagtcctacggaccatccagatccagcacacccaaacccagcagctgattcgcccggccgcatcgcccgagccttctaacagctgactcgtcctcgtcgctccggcgcggcgacaaggcacgcagccaccgcgcgatggccgacggcgccagcagcagcggcggggcgcagaacgggggtgagtcggtggtgattgactacggccggcgccgcactacctgcggctactgccgatcctccgggcccacgagcatctcccacggtatgtgggctaacagtctgaaagctgatgactatcaagctcttcttgatcgtggttggaggagatctggttgttttctttacaaacctgagatggaacggacatgctgcccctcatatacgatacgcttgaaggcaaatgatttcatttgttccaaagagcaagctcgggtacttaaaaagatacaaaggttccttgatggcgagctcgatccacagattggaagccctcagtgtaaggcaagtccaacaaagcgctcactgggtgaacctctgaattcaccaacctcgaaagtatcaaaggtatcagcggaagagtttcaaaaaggcacaagtccaaatatattgaaagaagatgacatcatttgttgcctggcaaacaaaatcaatgaggccacagctacatgcttccgaggtggggtatttggttctgttcaactccccaaagctgttgtgaagaccgttaaacctcaagtcaaaaggaaagttggagaagcagtgcaagaaaagaaagtaggagaagcagtgcaagctttggtttatacgtgtaatataagtttccaaatagtggcagcagttagacgggcattgcctaaagaaaatggtgctactcaaactgaagtaccagcagatctttctccaaattctgttgcagaaaagctatccgtggcaatggaacgtcttggagaactagctggttttgaagtaaaagcttgtaatgggcatctaaatttctatttggcctccaatcaggcaatgcagaaccataccagcgttgttgtacctgtgcaagcttcagacaaatctagtggttcaaagccaagctctgtgaaccaaactaatgcaaaatatcctctgaaaaggaaaaacctggagattaggttgagcacatctcattttgatcctgaggagtttgctctgtaccgaaggtatcagacaaaggtgcataaggagaaggcagttacagaaagctcatacaagagatttctagtagatacaccaatcctgtttgtccccccaaagactggtgataatacagttccaccgtgtgggtttgggtcttttcatcagcagtacaggattgatggaaaacttgtggctgttggtgtagttgatatccttcctaaatgtttgtcaagcaagtacttgttctgggatcctgaccttcctttcttatctcttggaaagtatactgctctgaaggagatagattgggtcaagacgacacaggagcactgtcccagccttcagtactactatctcggttattatatacattcttgcaataagatgagatacaaagctgcatatcgaccatcagaacttctatgtccactccgttatgagtgggttcgctatgatttagccaagcctctactggatgccagtcaatactccgttctatctgattatgctacaatgcaagcgatgaggatgaggacgacgacgatgaagatttcgacaactatgaatcagatatgatggtcgatgaagagacaattcattcagaaaaacccgatacagctgaaggcagttccgagataaatgacataaacaacatcaccctggacctgaaaggctcgagggttaaatttaagggccttcagcaagtttttgggccaatcgagaggcgacacctcaatgcgctagaaaggcaactgagcagatacgtcaaggttgttgggaaggagctgtctgatcgaatggtgtattgtctttcttgatatgcagccggtcccgagatctcaattctactgtgaaaggtgcacatgagagttaaactagtttcattcagaaagaaaggtcatattgctgcgtgtttctgcatggttttcgttgtaaaggtacgagagctgaggctgacatagaacattctccggtcgattttgtatgtgtattttggcactaaagtcttcatggatggcttatactgaagagaagtggcgattcggtacgcctaattgtgcttatagggcaattgaaccggcacagtaataaagttgcagcgaatgggcttctgtcgaaaca

SEQ ID NO: 72991 - DNA, 2335 bp, Zea Mays
aaaagcaaatgtcgacgaagatgcagagatgcgagtggccgagacctatttcagctagtcctacggaccatccagatccagcacacccaaacccagcagctgattcgcccggccgcatcgcccgagccttctaacagctgactcgtcctcgtcgctccggcgcggcgacaaggcacgcagccaccgcgcgatggccgacggcgccagcagcagcggcggggcgcagaacgggggtgagtcggtggtgattgactacggccggcgccgcactacctgcggctactgccgatcctccgggcccacgagcatctcccacggtatgtgggctaacagtctgaaagctgatgactatcaagctcttcttgatcgtggttggaggagatctggttgttttctttacaaacctgagatggaacggacatgctgcccctcatatacgatacgcttgaaggcaaatgatttcatttgttccaaagagcaagctcgggtacttaaaaagatacaaaggttccttgatggcgagctcgatccacagattggaagccctcagtgtaaggcaagtccaacaaagcgctcactgggtgaacctctgaattcaccaacctcgaaagtatcaaaggtatcagcggaagagtttcaaaaaggcacaagtccaaatatattgaaagaagatgacatcatttgttgcctggcaaacaaaatcaatgaggccacagctacatgcttccgaggtggggtatttggttctgttcaactccccaaagctgttgtgaagaccgttaaacctcaagtcaaaaggaaagttggagaagcagtgcaagaaaagaaagtaggagaagcagtgcaagctttggtttatacgtgtaatataagtttccaaatagtggcagcagttagacgggcattgcctaaagaaaatggtgctactcaaactgaagtaccagcagatctttctccaaattctgttgcagaaaagctatccgtggcaatggaacgtcttggagaactagctggttttgaagtaaaagcttgtaatgggcatctaaatttctatttggcctccaatcaggcaatgcagaaccataccagcgttgttgtacctgtgcaagcttcagacaaatctagtggttcaaagccaagctctgtgaaccaaactaatgcaaaatatcctctgaaaaggaaaaacctggagattaggttgagcacatctcattttgatcctgaggagtttgctctgtaccgaaggtatcagacaaaggtgcataaggagaaggcagttacagaaagctcatacaagagatttctagtagatacaccaatcctgtttgtccccccaaagactggtgataatacagttccaccgtgtgggtttgggtcttttcatcagcagtacaggattgatggaaaacttgtggctgttggtgtagttgatatccttcctaaatgtttgtcaagcaagtacttgttctgggatcctgaccttcctttcttatctcttggaaagtatactgctctgaaggagatagattgggtcaagacgacacaggagcactgtcccagccttcagtactactatctcggttattatatacattcttgcaataagatgagatacaaagctgcatatcgaccatcagaacttctatgtccactccgttatgagtgggttcgctatgatttagccaagcctctactggatgccagtcaatactccgttctatctgattatgctacaatgcaagcgatgaggatgaggacgacgacgatgaagatttcgacaactatgaatcagatatgatggtcgatgaagagacaattcattcagaaaaacccgatacagctgaaggcagttccgagataaatgacataaacaacatcaccctggacctgaaaggctcgagggttaaatttaagcaagtttttgggccaatcgagaggcgacacctcaatgcgctagaaaggcaactgagcagatacgtcaaggttgttgggaaggagctgtctgatcgaatggtgtattgtctttcttgatatgcagccggtcccgagatctcaattctactgtgaaaggtgcacatgagagttaaactagtttcattcagaaagaaaggtcatattgctgcgtgtttctgcatggttttcgttgtaaaggtacgagagctgaggctgacatagaacattctccggtcgattttgtatgtgtattttggcactaaagtcttcatggatggcttatactgaagagaagtggcgattcggtacgcctaattgtgcttatagggcaattgaaccggcacagtaataaagttgcagcgaatgggcttctgtcgaaaca

SEQ ID NO: 72992 - DNA, 2268 bp, Zea Mays
gttgggctttggccactcagccagcgctcaccaactcaccgagtgtccgagtcgttggcttggcttggcttggctccgcccgttggcatcgtctactcgccgaaaacctcgccgagtccctgccctccctgggcggtgggcgcggaaacccttcgtctgttcgctaaaccttggcggccggatctcccaccttcagaatccatctggtctcctctataaaagcgctgggaggatctgccgactttgccgtccataggcggcgtctctccggtgtcctgcgtctgcgccgcacacatcccccactcttcttccagtgaaacagttcaggcaaaaactctcctggaattgattgttgaggcatcacagattgcatttgccagtgcaagcaaatttcagagataaggatggcagcacaactacttttctccaatgcttccagttgccactgcccattaggcatttcaaggataaacgttgggaagacacttcttggtgaaagtgcaagttttcagagaaagaagtcgttttctggtggttcctatcgcttttctcgatttgattgctctgcgaactcccgccgagctgggccaaggcgcaccaaggatactttatatgaccttcaccctgagatctccttgctttatggagaagataatggtgcagctaccttatccagcaaagagcagggtattgacactacagctgaaagattggtggacacttctccctcttaccgctataatgagcccaggattaaagtcataggggttggaggtggtggctccaatgctgtgaacaggatgattgaaagctccatgaagggtgtggaattctggattgtgaacactgattttcaggctatgcggatgtcacccattgaaccagaaaataggttacagattggccaagaattgacacgtggtcttggtgctggtgggaacccagaaattggcatgaatgcagccaaggaaagccaggagttggtagaacaggcagttgctggtgccgatatggtttttgtgacggctggaatgggaggtgggacaggcactggtggagcacctattattgcagggattgcaaagtccatgggtatattgactgttggaattgtcacaaccccattttcatttgagggaagaaggcgggctcttcaggcacaagaaggaattgcatcgttgagaagcaatgttgatacactgattgtaattccaaatgacaagttactgactgctgtgtccccaaatactcctgtgacagaagcattcaatttagcagatgatattcttcggcaaggtgttcgtgggatatcagatataatcactgtgccaggtctggtgaatgtggactttgctgatgttcgatcagttatgtcagatgctggctcatcattaatgggcattggaacagcaacaggcaagacacgagcaagagatgccgcactcaatgccatacagtctcctctacttgatattggtattgaaagagcaactggaattgtatggaatatcactggagggaatgatctaaccttgacagaggtgaatgctgcagctgaagtaatctatgatcttgttgaccctggtgcaaatctgatttttggctctgttatagatccgtcatacactggtcaagtgagcataactctaattgcaactggtttcaaacgccaggaggaaagtgagagccggtcttcacaggctggagaagacagcaaccgcggtcgctcgggctggttttctcccacttcccaggaggaaggtcatgcattgcagatcccggagttcctacagaggaaagggcgtccagggtttccacgagtctgaacacactttggttcaatgtttttcttgtcatagtttggtacgatgtaggtttggtttctgggtctcttagttagcaaggtagagcagatgttcctgaaccgcatactaatctgtgtgcaaacttcgtcgcctgagtacattggctgggctgctttgcttctcaggaacctgcagtaggtctcaatttgctagttattatgattaaaagacatcgctgagaccaaattataacgttccgtgtgaagaattactggctcactgccaatttcctttcctttgcggcatacattgtttcattagtcgttattttggtttcgttcaatgttatgacaccaaaataggattataagggttagtttggaaaccattttctcaataaatttctatttttcgagggaaattagttcattttcctttgaaaaataggaactacttgaaaaaa

SEQ ID NO: 72993 - DNA, 1707 bp, Zea Mays
ctcagccagcgctcaccaactcaccgagtgtccgagtcgttggcttggcttggcttggctccgcccgttggcatcgtctactcgccgaaaacctcgccgagtccctgccctccctgggcggtgggcgcggaaacccttcgtctgttcgctaaaccttggcggccggatctcccaccttcagaatccatctggtctcctctataaaagcgctgggaggatctgccgactttgccgtccataggcggcgtctctccggtgtcctgcgtctgcgccgcacacatcccccactcttcttccagtgaaacagttcaggcaaaaactctcctggaattgattgttgaggcatcacagattgcatttgccagtgcaagcaaatttcagagataaggatggcagcacaactacttttctccaatgcttccagttgccactgcccattaggcatttcaaggataaacgttgggaagacacttcttggtgaaagtgcaagttttcagagaaagaagtcgttttctggtggttcctatcgcttttctcgatttgattgctctgcgaactcccgccgagctgggccaaggcgcaccaaggatactttatatgaccttcaccctgagatctccttgctttatggagaagataatggtgcagctaccttatccagcaaagagcagggtattgacactacagctgaaagattggtggacacttctccctcttaccgctataatgagcccaggattaaagtcataggggttggaggtggtggctccaatgctgtgaacaggatgattgaaagctccatgaagggtgtggaattctggattgtgaacactgattttcaggctatgcggatgtcacccattgaaccagaaaataggttacagattggccaagaattgacacgtggtcttggtgctggtgggaacccagaaattggcatgaatgcagccaaggaaagccaggagttggtagaacaggcagttgctggtgccgatatggtttttgtgacggctggaatgggaggtgggacaggcactggtggagcacctattattgcagggattgcaaagtccatgggtatattgactgttggaattgtcacaaccccattttcatttgagggaagaaggcgggctcttcaggcacaagaaggaattgcatcgttgagaagcaatgttgatacactgattgtaattccaaatgacaagttactgactgctgtgtccccaaatactcctgtgacagaagcattcaatttagcagatgatattcttcggcaaggtgttcgtgggatatcagatataatcactgtgccaggtctggtgaatgtggactttgctgatgttcgatcagttatgtcagatgctggctcatcattaatgggcattggaacagcaacaggcaagacacgagcaagagatgccgcactcaatgccatacagtctcctctacttgatattggtattgaaagagcaactggaattgtatggaatatcactggagggaatgatctaaccttgacagaggtgaatgctgcagctgaagtaatctatgatcttgttgaccctggtgcaaatctgatttttggctctgttatagatccgtcatacactggtcaagtgagcataactctaattgcaactggtttcaaacgccaggaggaaagtgagagccggtcttcacagatgtattttcatgagtagtaac

SEQ ID NO: 72994 - DNA, 2256 bp, Zea Mays
ctcagccagcgctcaccaactcaccgagtgtccgagtcgttggcttggcttggcttggctccgcccgttggcatcgtctactcgccgaaaacctcgccgagtccctgccctccctgggcggtgggcgcggaaacccttcgtctgttcgctaaaccttggcggccggatctcccaccttcagaatccatctggtctcctctataaaagcgctgggaggatctgccgactttgccgtccataggcggcgtctctccggtgtcctgcgtctgcgccgcacacatcccccactcttcttccagtgaaacagttcagaaggcaaaaactctcctggaattgattgttgaggcatcacagattgcatttgccagtgcaagcaaatttcagagataaggatggcagcacaactacttttctccaatgcttccagttgccactgcccattaggcatttcaaggataaacgttgggaagacacttcttggtgaaagtgcaagttttcagagaaagaagtcgttttctggtggttcctatcgcttttctcgatttgattgctctgcgaactcccgccgagctgggccaaggcgcaccaaggatactttatatgaccttcaccctgagatctccttgctttatggagaagataatggtgcagctaccttatccagcaaagagcagggtattgacactacagctgaaagattggtggacacttctccctcttaccgctataatgagcccaggattaaagtcataggggttggaggtggtggctccaatgctgtgaacaggatgattgaaagctccatgaagggtgtggaattctggattgtgaacactgattttcaggctatgcggatgtcacccattgaaccagaaaataggttacagattggccaagaattgacacgtggtcttggtgctggtgggaacccagaaattggcatgaatgcagccaaggaaagccaggagttggtagaacaggcagttgctggtgccgatatggtttttgtgacggctggaatgggaggtgggacaggcactggtggagcacctattattgcagggattgcaaagtccatgggtatattgactgttggaattgtcacaaccccattttcatttgagggaagaaggcgggctcttcaggcacaagaaggaattgcatcgttgagaagcaatgttgatacactgattgtaattccaaatgacaagttactgactgctgtgtccccaaatactcctgtgacagaagcattcaatttagcagatgatattcttcggcaaggtgttcgtgggatatcagatataatcactgtgccaggtctggtgaatgtggactttgctgatgttcgatcagttatgtcagatgctggctcatcattaatgggcattggaacagcaacaggcaagacacgagcaagagatgccgcactcaatgccatacagtctcctctacttgatattggtattgaaagagcaactggaattgtatggaatatcactggagggaatgatctaaccttgacagaggtgaatgctgcagctgaagtaatctatgatcttgttgaccctggtgcaaatctgatttttggctctgttatagatccgtcatacactggtcaagtgagcataactctaattgcaactggtttcaaacgccaggaggaaagtgagagccggtcttcacaggctggagaagacagcaaccgcggtcgctcgggctggttttctcccacttcccaggaggaaggtcatgcattgcagatcccggagttcctacagaggaaagggcgtccagggtttccacgagtctgaacacactttggttcaatgtttttcttgtcatagtttggtacgatgtaggtttggtttctgggtctcttagttagcaaggtagagcagatgttcctgaaccgcatactaatctgtgtgcaaacttcgtcgcctgagtacattggctgggctgctttgcttctcaggaacctgcagtaggtctcaatttgctagttattatgattaaaagacatcgctgagaccaaattataacgttccgtgtgaagaattactggctcactgccaatttcctttcctttgcggcatacattgtttcattagtcgttattttggtttcgttcaatgttatgacaccaaaataggattataagggttagtttggaaaccattttctcaataaatttctatttttcgagggaaattagttcattttcctttgaaaaataggaactacttgaaaaaa

SEQ ID NO: 72995 - DNA, 1555 bp, Zea Mays
ctcagccagcgctcaccaactcaccgagtgtccgagtcgttggcttggcttggcttggctccgcccgttggcatcgtctactcgccgaaaacctcgccgagtccctgccctccctgggcggtgggcgcggaaacccttcgtctgttcgctaaaccttggcggccggatctcccaccttcagaatccatctggtctcctctataaaagcgctgggaggatctgccgactttgccgtccataggcggcgtctctccggtgtcctgcgtctgcgccgcacacatcccccactcttcttccagtgaaacagttcaggctggaatgggaggtgggacaggcactggtggagcacctattattgcagggattgcaaagtccatgggtatattgactgttggaattgtcacaaccccattttcatttgagggaagaaggcgggctcttcaggcacaagaaggaattgcatcgttgagaagcaatgttgatacactgattgtaattccaaatgacaagttactgactgctgtgtccccaaatactcctgtgacagaagcattcaatttagcagatgatattcttcggcaaggtgttcgtgggatatcagatataatcactgtgccaggtctggtgaatgtggactttgctgatgttcgatcagttatgtcagatgctggctcatcattaatgggcattggaacagcaacaggcaagacacgagcaagagatgccgcactcaatgccatacagtctcctctacttgatattggtattgaaagagcaactggaattgtatggaatatcactggagggaatgatctaaccttgacagaggtgaatgctgcagctgaagtaatctatgatcttgttgaccctggtgcaaatctgatttttggctctgttatagatccgtcatacactggtcaagtgagcataactctaattgcaactggtttcaaacgccaggaggaaagtgagagccggtcttcacaggctggagaagacagcaaccgcggtcgctcgggctggttttctcccacttcccaggaggaaggtcatgcattgcagatcccggagttcctacagaggaaagggcgtccagggtttccacgagtctgaacacactttggttcaatgtttttcttgtcatagtttggtacgatgtaggtttggtttctgggtctcttagttagcaaggtagagcagatgttcctgaaccgcatactaatctgtgtgcaaacttcgtcgcctgagtacattggctgggctgctttgcttctcaggaacctgcagtaggtctcaatttgctagttattatgattaaaagacatcgctgagaccaaattataacgttccgtgtgaagaattactggctcactgccaatttcctttcctttgcggcatacattgtttcattagtcgttattttggtttcgttcaatgttatgacaccaaaataggattataagggttagtttggaaaccattttctcaataaatttctatttttcgagggaaattagttcattttcctttgaaaaataggaactacttgaaaaaa

SEQ ID NO: 72996 - DNA, 1992 bp, Zea Mays
tcgagtgatcctttctctcctcgtccttggcggcgcatagcagattagcaggcaaaaactctcctggaattgattgttgaggcatcacagattgcatttgccagtgcaagcaaatttcagagataaggatggcagcacaactacttttctccaatgcttccagttgccactgcccattaggcatttcaaggataaacgttgggaagacacttcttggtgaaagtgcaagttttcagagaaagaagtcgttttctggtggttcctatcgcttttctcgatttgattgctctgcgaactcccgccgagctgggccaaggcgcaccaaggatactttatatgaccttcaccctgagatctccttgctttatggagaagataatggtgcagctaccttatccagcaaagagcagggtattgacactacagctgaaagattggtggacacttctccctcttaccgctataatgagcccaggattaaagtcataggggttggaggtggtggctccaatgctgtgaacaggatgattgaaagctccatgaagggtgtggaattctggattgtgaacactgattttcaggctatgcggatgtcacccattgaaccagaaaataggttacagattggccaagaattgacacgtggtcttggtgctggtgggaacccagaaattggcatgaatgcagccaaggaaagccaggagttggtagaacaggcagttgctggtgccgatatggtttttgtgacggctggaatgggaggtgggacaggcactggtggagcacctattattgcagggattgcaaagtccatgggtatattgactgttggaattgtcacaaccccattttcatttgagggaagaaggcgggctcttcaggcacaagaaggaattgcatcgttgagaagcaatgttgatacactgattgtaattccaaatgacaagttactgactgctgtgtccccaaatactcctgtgacagaagcattcaatttagcagatgatattcttcggcaaggtgttcgtgggatatcagatataatcactgtgccaggtctggtgaatgtggactttgctgatgttcgatcagttatgtcagatgctggctcatcattaatgggcattggaacagcaacaggcaagacacgagcaagagatgccgcactcaatgccatacagtctcctctacttgatattggtattgaaagagcaactggaattgtatggaatatcactggagggaatgatctaaccttgacagaggtgaatgctgcagctgaagtaatctatgatcttgttgaccctggtgcaaatctgatttttggctctgttatagatccgtcatacactggtcaagtgagcataactctaattgcaactggtttcaaacgccaggaggaaagtgagagccggtcttcacaggctggagaagacagcaaccgcggtcgctcgggctggttttctcccacttcccaggaggaaggtcatgcattgcagatcccggagttcctacagaggaaagggcgtccagggtttccacgagtctgaacacactttggttcaatgtttttcttgtcatagtttggtacgatgtaggtttggtttctgggtctcttagttagcaaggtagagcagatgttcctgaaccgcatactaatctgtgtgcaaacttcgtcgcctgagtacattggctgggctgctttgcttctcaggaacctgcagtaggtctcaatttgctagttattatgattaaaagacatcgctgagaccaaattataacgttccgtgtgaagaattactggctcactgccaatttcctttcctttgcggcatacattgtttcattagtcgttattttggtttcgttcaatgttatgacaccaaaataggattataagggttagtttggaaaccattttctcaataaatttctatttttcgagggaaattagttcattttcctttgaaaaataggaactacttgaaaaaa

SEQ ID NO: 72997 - DNA, 2823 bp, Zea Mays
cccaaacccagaaactgaagactgttgcagccgcgactcctgaatcccgacagctccagcgcctccgctggtccccactgcttcggccatggcggtgcgagccacggtctcccgcttcccggccacgccggaggcgctggagtcgtgcgccgtccagtggggcgtcgccgtgacgcccttcgccgccgcggacgagcacggccaacccccgaccaccggcgccggcggggaccgcgtcccacgctgcgagcactgctgggcgtacttgagcagccactgcgatctggagcgctggggctggacctgcgcgctctgtggcacgctcaacggattcgacgacgaggccgagcgacggttccagcgtcccgacgtgtgccccgagctcaagtcctctttcgtagacctcgaaatcctagtggatgaggcagagggcggaggagacggtgtgcaggcgctgcctgtctatgtggccgcagtggatctcgcatgttctgaagagttcctggaactcgtcaagagtgcgcttcttgcggccctagaagctcttgttccgggctccctatttgggcttatgacattcagccacaagattgggttgtatgatgtccaaggcccgattccactcgtgaagaatgtttttattcctccggacttagaagaagatggtctgcctgttgcccttgaagatgccatgcccctactttgttttttggctccagttgacacatgcaaggatcaaattgctgctgtcctggagacactgcgacctacatcttcatgggagagaggggttgcttctgggcaggaagaggatactgttttgcttggcagacgtggttttgggacagccatgtctgctttaattgagtacctaagttcagaatatggttctacttttgctttagctcgggtatttgcttttctgtctggtgctcctgattatggagctggtgtgctagataccaggagatatggggagcaatatgctagtaaaggggtagacgctgatcttgcgttgctccctgaacagatacctttctacagagacctagcagctgttgctgttcagtcaggagtatgcatagacatatttgctgtaactgatgaatacactgatttggcttcactgaagtttttaagtatcgaaagtggtggatctttatttctttatgcaagtacagatgattcaacagttccccaagacatataccgattgctaagtcgaccctatgcatttggttgtgttctaaggctgagaacatcttcagattttgagccgggcaattcttatgggcatttcttccctgaccctcaatatgaaaatgtgcaacacatcatctgctgtgattcatttgccacttatgcatatgactttgagtttgcccataacgacggtttctccaggcacacagatcctgctgttgtacagattgcttttcagtacagcgtgattgaacctgtcaaggaaacatcaggcaatggatcacaaccatctgcaagttacaagttctgtctgaagagacggttgagaataagaacattgcagtaccgtccaactaataatatcagcgaaatttatgacagtgtagatccagaggttattttagaatccttggataaaggggttagagaaggcaggcatcaagtgcatgcttggctatccctccttgcagcccggtataatcaggccctgagttctgatgtgcgaccgctgtcaagcatagacattgacttctcacagtgcccacagcttcaaacgatacctcagcttgtttttgcattgttgagaagtcctcttcttcgcttgcatgaggaaggcgtgcacccagattacaggatatatctacaatgccttttcagtgcactggagccatcatctgtagctaaagccatatatccggttttaatctcgtattcctcgcctgacaagcaagcattcccacggcacactctgagccatgctgctctaatcatgagcgagagcccaatatttcttctcgacacatttaccaaccttattgtttactattcctcaactgctgatccttcagttccttttcctccaccccatgactgccttttgagaaaaacaataaatggactgaagcaggacagatgtataacccccaagcttacattcatccatggagggaaagatgattcaacattgtttgagagctatctcattgaagagcaagatgttgatggatcgggcttaacaactggttcaggttttgtagccttccgtgagagcgtgaggaacgttgcaggagagatcatacaggaagaaattggaagttagttccagctcgattacctttttggttctgctgcagagggtatcgactaggatgttttagccttaattaatgccgtagcagttaactgaaacgtagatagccaaaatggagagacaattcaatgaataataaaaggaggccacttgatgtatagttgcttctgtcaacaactgctttaggcttgactaggcagagcagcctttctggtacagcggcactgtctgtctctatgctaaaacagacgagttttactacacaataatacaccgtcggaacctggcagactgaaatttgagagaattcaatcccttaatgctcggtttggatattggagggcaaggaattgaattgagttcaatactaaatcaaccatggtattgaaatgagatgtagtttcaattgtatcgtttgaatgttactgaattagagtttggaatcgtgcgatctaattccacgtaataccgaggggtgatgctctgtattgaaaagttgggattctagttatagttcaattatagggaat

SEQ ID NO: 72998 - DNA, 2861 bp, Zea Mays
cccaaacccagaaactgaagactgttgcagccgcgactcctgaatcccgacagctccagcgcctccgctggtccccactgcttcggccatggcggtgcgagccacggtctcccgcttcccggccacgccggaggcgctggagtcgtgcgccgtccagtggggcgtcgccgtgacgcccttcgccgccgcggacgagcacggccaacccccgaccaccggcgccggcggggaccgcgtcccacgctgcgagcactgctgggcgtacttgagcagccactgcgatctggagcgctggggctggacctgcgcgctctgtggcacgctcaacggattcgacgacgaggccgagcgacggttccagcgtcccgacgtgtgccccgagctcaagtcctctttcgtagacctcgaaatcctagtggatgaggcagagggcggaggagacggtgtgcaggcgctgcctgtctatgtggccgcagtggatctcgcatgttctgaagagttcctggaactcgtcaagagtgcgcttcttgcggccctagaagctcttgttccgggctccctatttgggcttatgacattcagccacaagattgggttgtatgatgtccaaggcccgattccactcgtgaagaatgtttttattcctccggacttagaagaagatggtctgcctgttgcccttgaagatgccatgcccctactttgttttttggctccattaatgggcaggttgacacatgcaaggatcaaattgctgctgtcctggagacactgcgacctacatcttcatgggagagaggggttgcttctgggcaggaagaggatactgttttgcttggcagacgtggttttgggacagccatgtctgctttaattgagtacctaagttcagaatatggttctacttttgctttagctcgggtatttgcttttctgtctggtgctcctgattatggagctggtgtgctagataccaggagatatggggagcaatatgctagtaaaggggtagacgctgatcttgcgttgctccctgaacagatacctttctacagagacctagcagctgttgctgttcagtcaggagtatgcatagacatatttgctgtaactgatgaatacactgatttggcttcactgaagtttttaagtatcgaaagtggtggatctttatttctttatgcaagtacagatgattcaacagttccccaagacatataccgattgctaagtcgaccctatgcatttggttgtgttctaaggctgagaacatcttcagattttgagccgggcaattcttatgggcatttcttccctgaccctcaatatgaaaatgtgcaacacatcatctgctgtgattcatttgccacttatgcatatgactttgagtttgcccataacgacggtttctccaggcacacagatcctgctgttgtacagattgcttttcagtacagcgtgattgaacctgtcaaggaaacatcaggcaatggatcacaaccatctgcaagttacaagttctgtctgaagagacggttgagaataagaacattgcagtaccgtccaactaataatatcagcgaaatttatgacagtgtagatccagaggttgtcctgcatatccttgttcataaggttattttagaatccttggataaaggggttagagaaggcaggcatcaagtgcatgcttggctatccctccttgcagcccggtataatcaggccctgagttctgatgtgcgaccgctgtcaagcatagacattgacttctcacagtgcccacagcttcaaacgatacctcagcttgtttttgcattgttgagaagtcctcttcttcgcttgcatgaggaaggcgtgcacccagattacaggatatatctacaatgccttttcagtgcactggagccatcatctgtagctaaagccatatatccggttttaatctcgtattcctcgcctgacaagcaagcattcccacggcacactctgagccatgctgctctaatcatgagcgagagcccaatatttcttctcgacacatttaccaaccttattgtttactattcctcaactgctgatccttcagttccttttcctccaccccatgactgccttttgagaaaaacaataaatggactgaagcaggacagatgtataacccccaagcttacattcatccatggagggaaagatgattcaacattgtttgagagctatctcattgaagagcaagatgttgatggatcgggcttaacaactggttcaggttttgtagccttccgtgagagcgtgaggaacgttgcaggagagatcatacaggaagaaattggaagttagttccagctcgattacctttttggttctgctgcagagggtatcgactaggatgttttagccttaattaatgccgtagcagttaactgaaacgtagatagccaaaatggagagacaattcaatgaataataaaaggaggccacttgatgtatagttgcttctgtcaacaactgctttaggcttgactaggcagagcagcctttctggtacagcggcactgtctgtctctatgctaaaacagacgagttttactacacaataatacaccgtcggaacctggcagactgaaatttgagagaattcaatcccttaatgctcggtttggatattggagggcaaggaattgaattgagttcaatactaaatcaaccatggtattgaaatgagatgtagtttcaattgtatcgtttgaatgttactgaattagagtttggaatcgtgcgatctaattccacgtaataccgaggggtgatgctctgtattgaaaagttgggattctagttatagttcaattatagggaat

SEQ ID NO: 72999 - DNA, 1581 bp, Zea Mays
cgaagactggatgtagggacgttttgcctgaaccagtaaaaactttgcgcccaccgagcacaccgtccagagcccagaacgcgcacatagaaattcaattgttgaaaatcggaggttcgaaacaccgacaatatggcacacagatcctgctgttgtacagattgcttttcagtacagcgtgattgaacctgtcaaggaaacatcaggcaatggatcacaaccatctgcaagttacaagttctgtctgaagagacggttgagaataagaacattgcagtaccgtccaactaataatatcagcgaaatttatgacagtgtagatccagaggttgtcctgcatatccttgttcataaggttattttagaatccttggataaaggggttagagaaggcaggcatcaagtgcatgcttggctatccctccttgcagcccggtataatcaggccctgagttctgatgtgcgaccgctgtcaagcatagacattgacttctcacagtgcccacagcttcaaacgatacctcagcttgtttttgcattgttgagaagtcctcttcttcgcttgcatgaggaaggcgtgcacccagattacaggatatatctacaatgccttttcagtgcactggagccatcatctgtagctaaagccatatatccggttttaatctcgtattcctcgcctgacaagcaagcattcccacggcacactctgagccatgctgctctaatcatgagcgagagcccaatatttcttctcgacacatttaccaaccttattgtttactattcctcaactgctgatccttcagttccttttcctccaccccatgactgccttttgagaaaaacaataaatggactgaagcaggacagatgtataacccccaagcttacattcatccatggagggaaagatgattcaacattgtttgagagctatctcattgaagagcaagatgttgatggatcgggcttaacaactggttcaggttttgtagccttccgtgagagcgtgaggaacgttgcaggagagatcatacaggaagaaattggaagttagttccagctcgattacctttttggttctgctgcagagggtatcgactaggatgttttagccttaattaatgccgtagcagttaactgaaacgtagatagccaaaatggagagacaattcaatgaataataaaaggaggccacttgatgtatagttgcttctgtcaacaactgctttaggcttgactaggcagagcagcctttctggtacagcggcactgtctgtctctatgctaaaacagacgagttttactacacaataatacaccgtcggaacctggcagactgaaatttgagagaattcaatcccttaatgctcggtttggatattggagggcaaggaattgaattgagttcaatactaaatcaaccatggtattgaaatgagatgtagtttcaattgtatcgtttgaatgttactgaattagagtttggaatcgtgcgatctaattccacgtaataccgaggggtgatgctctgtattgaaaagttgggattctagttatagttcaattatagggaat

SEQ ID NO: 73000 - DNA, 1091 bp, Zea Mays
gtcacttctcccatggccgctccctccctcagccgtggcgggggccgacggcatagcgctcatcaccatcaccaaccttcctgtggtggatgcgccattgcctgatgcgagccgcggggaaatgagggatccttggaggcagagcaacgcggccccgtctccgtctctggccccagcgacgccgccggcccccgccacctcgtcccccgcggcgctgctccgcccgcagcgggaggcgttcgagcatgggctcctgcccatccctaagctcatcttcccggagggcatgctggcgcagaccctcgcccagctcaaggagaagctcgccgcctcagtccctgacgggcgcgtgcgcgctgcggccctggctaaggcgcagcagatcccgcaggagcaggcggcgctcgccctcggcacgctcgcggcgatgctcccggccgaggaccccgtgcttggggacggcgccatggatggtgctgccgccgacatccgcgacgtgctgctcttcctctatatccagtcttacaagcgcctcgtccacctccgcgttcgatggcttgttcgcagcaacagccgccgttttatgccttctcaagctaatgaagaaattcatcagttgtcctttctgcaaaagcatatggcgaatattcttactctcttggcagattctgttgagggtgagggtgacgattcactggtcttcactccaagtataatatgagaacaaccagaaccaaacacagatgctctgtattttcctcagggttattggcaaaactttacgatcggcattgttcctgggtttcatgaattgcagcatcttacgtcttctctggcttcataatcgtgagagatgatgcctgtgtggtggcggtgggtgtactgggcggatccggcggcatggacggttcatggcagagcgccccttgtttgtggagttcctcgaggcatatttataataatattatatatttatattatggtgatattttgtatttgtgaatgatctagctagctatctgtaaatgatctagttgtgaatgatattataattgtgatgcttttgtgaatatataattgtggtgcttttg

SEQ ID NO: 73001 - DNA, 2350 bp, Zea Mays
aacggcctcagatgtctatgcacgtgtactgggtaacttaacaaggctatcacgagttcaacaactcgaactcattatcccaaggatctcccacattcatgcatattacagtaatcacactcgatacaaacacttcggagatagagcggaagactttacaaaacatattttacatttccaaagctcaagttttacaacataagaagaattgtaattattacaagtcctgatagtacccaaagtgcataacttattataataattggaagggtgaagcctttccataagagatacacataaacattctaagcttcaaggcctccacatgaagtaactaaccaaaagataagggaataaaacttctcctgcaaaaacaacaggggataaaaccctgagtacgcaattactcagcaagacttacccgactaaagaaaagactctcaagggtatgctagctgattgggaatcaaggtaaattttatcaatgatcaaagactcttttttgcagaaaagcttggttccagttgatccttaagccaaattttatttcactagttaggttattacttgaatctatatttgtctggtctagttcaagcacttggcctataatagtcgcattttattcattctcatatttcacttactaactacgatgatggtcaccaggatgagtctccataaccgaggagcaacgacgattcgaactgattatacccagctggggatctctaatcacacgacatatgtagcatttaacccttgcatatgtcaaccattcccacggagtcctccactacatgaataggtctgcgccacccgagagcacattaccctaccaggcgtgctactatgccaggagggtacatgctactcccgccatctctccactcccagtgcgcgattgtctcttcacgtatggaatagccaggttcaagcttaccctgtcccataccagtgtatgtggctagttgcaaagtctcaaccacaacaggccagtcaacggtacggtccttaatcaacacaaacgggcgaccatgtcagctcagcgtctggtctcgatttattcaaaccatttccccatttttggtacccggtaggggtactcttttcggatgatgaacccatccggagccctgatggactcatcatcataagtttgctttcacttttgaatcaaaagcccataaccaatgttacacatcattcttttgaaaaacaaatgatttttgagtttctaagcagcactaagcagtaataattctttttataaaacagggatttaggaattttcaaggaatgataatgcatcaattgtttatcacacaactcctatcacctaatgcatcatatcaggtgataaagcatttaaaacgcaaggaaggggcaaatgcaccggggcttgccttattacaggaggagatctgagatcttctattatgataagtagttagatggagttcaccactgaatcaacaacactggaacaagctccctcttcacaattcagttctacatgaaatgatatgaatatgaatgcctgtgtatatgctactagcaaggaaggtattacgaagcattacaaaattacaattacaagctatcaccacaagccataactaccagggagctacttatccttagaactcatctaaccatccaaaacttgctaagaaacttcattttcatttttttactaagtcattatgtgctttaatcacccagggataaatctctttttcctttttgaccaataactagtttgccaagcaaaccttgcccaaacagtttcaaactttacccaagggttcatatgctcaacataagcttacacaatttttctcataatttttagtgctctattttattactaaaatttcagataatcattttaaggcaccttttaaccctctaaaaatatctatttgctgcaaaaactccaaatctatttttacctggcactctactacttcacccacctaacaaaacttgtttcactattttagtacctttccacaatttctggcacaaataaacagacatcagacaaaagaaaatactaaatatataaacagctgtgggcaagaactgactcaactggcccaactctaaacaacaccagcagtcaagcagtgcttacggctttaggctccagcttcgcgctccctctgcgcgctggctgcaacgccaaactccggcaacaacaacacggaacacgacgcagtagagttccaatcagcaactgggtagcatcagtggctcaccacgaagcggaacaacccatgagcgtgctcgcaaccagctccagactaggtccgccatggtgaggtcattccagacggtgttcacc

SEQ ID NO: 73002 - DNA, 2994 bp, Zea Mays
ggcgagtttggtcacggcgacatagagataacaaagattgtccacccactggtcacggtgaagcttatcccagggggaactacatacaagcactaccaacagcttacacgagcatggacacgcgactttattacataagcaccacgcaggatcagtacacgacgaaacaacagacttgggctcgtagtggtcaaaccagagacaacaagcaaggtgggtgccgtcttggataagctcaggtccatcctaggcgtagatatttggaaccttaatacactcgcttacccctggtgccaaaactcacccacatcccaatctaaccggcagcaactggaacatagcagtagtggataagctccgtactggtctcttcttagatcactaaaccaagctccaaacctaatgagtttgaactcacactgaccacctgcacctttccgattcactcccctttatcttactattttcaaaggcaacaggtcaaccaaggctaacaaagtatgctcacaaaacaaaactctaccaactcactatagaaattcagggttaaaagcacacagatcaaaagttgctatgccccaaaatccctccaaactcactgaactttctgtttcagttatctgaaacaagaacctgataaggaacattttgagacaatttacccccaattttgtacagcaccaaggcacacccacttcaagagacttgttcaccttgatatggtatttcatttttatatagaatttttaacccaaatatccttggtttaattaccacaaagctccaaaggtgggtaaaaacacatagattcagacttagatgttttactgtctgaaaatccccaacacctgacaactgatctttaggcaaaaattactctactttttatgcagcaccatgttaatctcaccttatgaaacgtattcaccatactgtggtctccaagtttcctatagaaactacagtctaaaaccactcatattgataacaaaacagctccaaactgagcaacctgctgcaattcaattttcagctaatctgaacaaaaattcagtcagtgcaaactgatagtccatttttggacagctttcactctattttccataaatccccaagccaaaccttctcaaagagatttgttcaccaatatattgtcttcaattattttatagaacctacagtccaaaaccttatggattaggcacaaagaagctccaaaactgcactcacaacactaaaattcagattcaggttattgcactaagtctgaaaaccacaatttctatcagctcgtgcttggaccagtttttctcctagtttcatatggttttagggctatcacatttcataaacattgttatcctatagttactctataggtttgttataacaactgtttccaaaatactcatggattaaaagttacagggattcaaaaacagataaacaaaactgctttgggttgattccaactgacccaaatctgaatttttgcaaattacttcaaattctcccacatcacttggagagctccaaatatgaaaattgttcacttttccaagtgtccacaactttgatatatggacttttagcaaaacttagctaaatcttaaaatccacttttgggctagtttagagttgaaattggacttgatctgcttcaagcatttcatcaatttattgcatcctactaaaaacaaggttaactttaagttcaaacccaactttagtgtatagatctcatgtacaaatttccattggtttaaaatttgttttcttgtactagatttcaaacaaggtctctgaacttctcttgctctcttcgaaacgacacaacctcacccttttgcaaatttgttaccctagtgaatgcattctaggtgtatcaagcaagttaatgcaagtgcatatgatgaaatgtcaaatttttagttctcgtaacaccaggggtgttacagcgtgcccgcgcgtgcccgcgtttctgatcttgcgaaaaggtccttagtgttttaaataacttgaaccgcatccagtgggttattccctgagtcaccgacacctcacaaaaagccccctctaattctgtttctttaccaccccgggtccatggcggaaccgcggcgaacaccagaccagagccgcgattctacggcaaaggtggtccgaacaagcggtaataaatgcataaacgtggtatgctaacctattcggtcaaaagccctcgcttaatttgaaggattcaaccctaattggagcttgttcatggtcacggcggcgagacgaccctggtgatcgtgttccgaacgactaacggcatggctgctaaaattgaagcacgagttagcttcatcggttcaccagaggttatgcacacgcttgaatttggattaagcaagaatagaagagcgggtcgacagagagggtgtcgcggcggcgttctacgggacgattgggtgttccggagtgtgggcttcggtaaagtttaattggtcggctccgagagcaatagaaggccagagtcaagctagaacaggaagtaatttggcatgtactgacccgaggagtgctggccacggaggggttcttcacggcggcggaagaaatcgattcaagggaactccgatgatcactgagggtggtggacagaatagagtgactagtgattcgttggcttcgcaacgaagggacgaagagctgtgctcgattgatttggatgaagggggaagagagcgtggtgaatttataggcccagtgagccaccacgatggccatggtgataaccatcaccggaccttgctggcgaccaatgatgacatcggcgctgcccttttctaagagtttgccacgttccgccgcgacagtaatgatgtcagatcggcgatagcgtggatggacggagaagagcggcgccggtgaccaagggccggaaggatcagtggccgcgtggcggctggaataattatcttccaccgcggcgatcttacccacttcaag

SEQ ID NO: 73003 - DNA, 591 bp, Zea Mays
ctaacctcgaaaacgtatgtgtagctgacgactagtaaaataccgtgagaatcataagtatgccaccggtatagaacgttattgccacattatgttggcaaaatcagtgaggacgtgtaggacgagcatgcatcctgattgttgcatcatgtttgtcacctatacattcaaaatgcttctctcatctttattccagtaaccattgattgtagataatatggtgtaatgctgaattatgaacttcgatgaaatagctgtcctccgttccttaggtattatgtttagatgctatatgtgtgctcttgtgcttaatgtgtcgatagaaggttagagacttgattgcctaaacccaaaaccaggccatattcttatttagtgaaccatgcccaaatttgaattgtccattattactccatgacaaagcccatacaaataaatgcgtagataatttccttattggacataaaatgtacctaagcttaaaacaaggatctcaagtcatgtctccttctagaaccattcctttgttcagttgatgccttggtttcctcatgtcatcgaaggcatatcaacttaatccttgaccttgtg

SEQ ID NO: 73004 - DNA, 947 bp, Zea Mays
gtcatggttaggaacttatggtaccgcggcgaaactgagagcctcctgtgaatgtgcacccaggattttgctgcttggcgcatgtcggtatcgaagtctttagtcatgatccattatggaactacattgatgtgttatctcccgtagacctcttccttgaaacaatttctatgttgtttgtgaagtgatcaagcaacatctatcatctttattggatcaaaaacggcataccactttcgtgtgtggtctcttttctttgatcttgatagtgactactcatacaagttccctttacatcttgtgggtaaaggtgaagccttggagctttttagtgttggagaaacaactgattagctctcaaattggagattgactttccctgctgttgagatgcaggagtttgttcattcgctctcctattttccatgtatttctgaacccagtccgttcatctcgcatgaagaaacggatgaacgacctgaccaaatggacttctacccaaatgcatgacctttgcgagtaaatgtgaactctcaacccttggcttaccgaaggtactgagagaacttgctcaatgtcaaaggtagttcaacaagttggttttactaacttgtaactgcattgtgatcaaaggttgagtttagagatcattttgtcgagttgtctaaactcactttggttcaacccgtcctaagaaagttcttacaaagatcaagttaaaatcgactgatcaccacctaatcatcgctctagtcatgccttgatcgcctcacgcgtgcttttccagcgtgtgtgatcatgtcgagccgtgactagtgctggataaaatggactggttgcaaagtccccatctacatatccctccactggtgattctctcgaatctataccatctttcgtggacttgaattctcgggttagccatatgttaaccgcgacagtattcg

SEQ ID NO: 73005 - DNA, 2902 bp, Zea Mays
tacttaaattataatatttatacaatgaataatctcttaacaaattattacacgaaaatcttgtcacatgtaagtttaactggtctccatagaaaaagaaaatgatgatgaaaaatgctaggataaaaaatctttcccattcccttttaccctcgttttacccgtaggagattttttcatttacatccctatttttttcatttacatccctatggaagaatcttttctgtcccagaatttcccagaaaaaatcccattgtcatctctgctatagacattgtagcgaggaaaaataggggagcagagcaaggtgatgtgctgaagagtttctttatgcgggttgctatgacggatcaaacatcaaatatgaaaaagcaagcattaaataagataatttgctactgaagttcaaaatgactggtagccaaccaaaaacagtacttatttttaaaaaaggaaccagctaaaagcaaactctgaggcaacacgttacaccagtgcggcgcggtgacgaatatacgagtgggatccatttcatacagcagggcgcaccagactcatcttcaggaattggagccagtgctactgttatttctgcttataaccttatcatggcagttcatgtattggttcacaatgagccggtaacgcctgacgtaccatgtcgaacttccccagaaacttctttttttttttggaaaaatttcccaaaaaaacttagaagcacttcatgtggacaatgcccggaccagtttcgtcatactctcccttggagatccacatctgccaacacagttgcccattgtcaaagaaatgaaattaaaataatgagtgcaagtaatggcaatgcaagaaaaatattcggtgctatcacactagtaattccatttccacatcccgcttatatctatcgtgaagaaaaaggccttaaaatcttttcatttcctcaaaaagatgttactatcaaatttaaatctatgtctgtaatgattaaacaacgtaatgattaaacaacaacgcggaggatggagcaacatgtgcagtgcctactaagcccccctttagaacagaagaatatgaaaacacaggaatagagaaaacacatgactataattgcctatgaattgcaatcctacagaaattgagaacgtagcaaaatttctcacctagcctttgggtgctatacatgaatttgaatagagagataagagtcataggaaattttccaagagattggagctcttgttattttcctccaaaacttgtatggaggaaagcaatccatagaaatttcaaaggaattgataggattaaatcctgtgttccaaagggtcacataggaaacttctatgtagggaatgaatccttcaaaaatccttcatatttccttcgttccaaatgggccctaagagaagttgatactagaaaactggagtaactgactaaagcaagaatatatttgtattccaattgcgtttttaggtaaaaaagagtgcatcacaagccagtttaacctaaattgagttggtatataatgggttatttccactttaactacaaaaaaagcacacacacccaacatggtcaaggctgctgtaggttctcatgaagaggagttgaatgataaaagcctactgcttatgaaagaataaagtaagaaagagaagacctgctgaaaagtgctgagagaagccaaaatagagccaccgatccagacactgtacttcctttcaggtggcgcaatcactttaaccttcatgctgctaggagccagggacgtgatctccttgctcatacgatcggcaatcccagggaacatggtagatcccccactgaggacaacgttaccatacaaatccttcctgatatcaacatcacacttcatgatggagttgtacgtggcctcatggacgccaggcgattccatgccaacaagggatggttggaacagcacctcggggcacctaaacctttctgacccaatggtgatgacctgaccatcaggcatctcgtagctcttctcgacagaggagctgctcctggcagtctccagctcctgttcataatcaagggcaacgtaggcaagcttctcctttatgtccctgacaatctcccgctcagcgctcgtagtgagggagtaccctctctctgtgaggatcttcattaggtggtcggtgaggtcacgccccgcaagatccaaacggagaatagcatgaggaagtgtgtatccttcatagattggaaccgtgtggctcacaccatcaccggaatccatcacaatacattgctgggcattcgaaggtttcaaacataatctgcgtcattttctctctgttggccttggggttgagaggggcctcggtcagcagcacagggtgatcttcaggcgaaacacggagctcgttgtagaaggtgtgatgccagattttctccatgtcatcccagttgttgacaatgccatgctcaatcgggtacttcagtgtcaggatgcctctcttggcctgagcctcatcacctacgtaggcatccttttggcccatgccgaccatgacaccggtgtggcgtggtcttcccacaatgctggggaagacagctcttggcgcatcatcaccagcgaaaccggcctgtaaatattgaggagttgagcaacaattaggtcacaggagtagagttgctttgttggaaaagacttctgaacgagataacaaccttgaccattccagtgccattgtcacatacgataggctggatatcctcgtcagccattctcaactattctgtaacagaccaaagttcagcgttcagtacacattcatagaaaaatgcagttatgcagcctggtcggggaatcaaaatacactttctgctcatggtttaagggaaaagctttatgttttgataa

SEQ ID NO: 73006 - DNA, 1795 bp, Zea Mays
cttttctgtcccagaatttcccagaaaaaatcccattgtcatctctgctatagacattgtagcgaggaaaaataggggagcagagcaaggtgatgtgctgaagagtttctttatgcgggttgctatgacggatcaaacatcaaatatgaaaaagcaagcattaaataagataatttgctactgaagttcaaaatgactggtagccaaccaaaaacagtacttatttttaaaaaaggaaccagctaaaagcaaactctgaggcaacacgttacaccagtgcggcgcggtgacgaatatacgagtgggatccatttcatacagcagggcgcaccagactcatcttcaggaattggagccagtgctactgttatttctgcttataaccttatcatggcagttcatgtattggttcacaatgagccggtaacgcctgacgtaccatgtcgaacttccccagaaacttctttttttttttggaaaaatttcccaaaaaaacttagaagcacttcatgtggacaatgcccggaccagtttcgtcatactctcccttggagatccacatctgccaacacatgctgagagaagccaaaatagagccaccgatccagacactgtacttcctttcaggtggcgcaatcactttaaccttcatgctgctaggagccagggacgtgatctccttgctcatacgatcggcaatcccagggaacatggtagatcccccactgaggacaacgttaccatacaaatccttcctgatatcaacatcacacttcatgatggagttgtacgtggcctcatggacgccaggcgattccatgccaacaagggatggttggaacagcacctcggggcacctaaacctttctgacccaatggtgatgacctgaccatcaggcatctcgtagctcttctcgacagaggagctgctcctggcagtctccagctcctgttcataatcaagggcaacgtaggcaagcttctcctttatgtccctgacaatctcccgctcagcgctcgtagtgagggagtaccctctctctgtgaggatcttcattaggtggtcggtgaggtcacgccccgcaagatccaaacggagaatagcatgaggaagtgtgtatccttcatagattggaaccgtgtggctcacaccatcaccggaatccatcacaatacattgctgggcattcgaaggtttcaaacataatctgcgtcattttctctctgttggccttggggttgagaggggcctcggtcagcagcacagggtgatcttcaggcgaaacacggagctcgttgtagaaggtgtgatgccagattttctccatgtcatcccagttgttgacaatgccatgctcaatcgggtacttcagtgtcaggatgcctctcttggcctgagcctcatcacctacgtaggcatccttttggcccatgccgaccatgacaccggtgtggcgtggtcttcccacaatgctggggaagacagctcttggcgcatcatcaccagcgaaaccggcctgtaaatattgaggagttgagcaacaattaggtcacaggagtagagttgctttgttggaaaagacttctgaacgagataacaaccttgaccattccagtgccattgtcacatacgataggctggatatcctcgtcagccattctcaactattctgtaacagaccaaagttcagcgttcagtacacattcatagaaaaatgcagttatgcagcctggtcggggaatcaaaatacactttctgctcatggtttaagggaaaagctttatgttttgataa

SEQ ID NO: 73007 - DNA, 2036 bp, Zea Mays
cgacggcagctccacgcgctggcatagccgtctgttctcagcaaacccacccgtctgttctcgtcgtggcggccgccctgtccccattccccaatccctgtcgccgtgtccctaatccggctccgacaatcccacgcccagcagtccagctccagcaccaccagcgccgccctgccccacgcggccacacccaggacccagcggccagcactactgccaggctggcagcgcgcggaggtccagcgccagccgccagcaccaggcttccaggtctctagtgactcgatctcaagcaaaggcgtttcgggatgtttatcatggatcgatcgatcatggcggatggggagacatcggcggaggaaaagaggaggtggacggggccaccagaggcgcaggagttggaggagacaaagaggaggcggacggggccaccagaggcgcaggagttggaggagcgcctggactctctcagggacaaaattgcggccgcaagtcttgtcgctggcagccgattcggcgaggagcagcgacggtccttgttgcaggagtggttgcgcctcgcatctgccaagttggatctggatctctcaggcataagcgagtttgacctatcagcagaggcgttgccttggttgatgccgccggaggaggcagacaagaggacgacgcacacgcggcaagaggcgcaggagttggaggagcgcatgacctgtctgcggttgctattcgaggacgcagcagatgacagaattctcgccagaagggagcttggagcagcagccgacgagttcctgctccgcttgacgacgcgtcaacaggccttgacgcgcgagtactcgcgcctcgccaacctgaagaggcctctggatctctccggcatgactgaggccgaccgggcggcggaggcagagaggctgagggaggagaagctgcagaaggcgcgtcaactccaggaccagggggacatgagcggcgcccgcgagtgtgaaggtctggcacgcatcatcgacttcgatgtcaagcagggcggcgaatacctcaacagtatctgctgtgtcggcaacatctacaccttcgaccacacagaggagtcgcccgttggtccgatgagatttaccaacagaccctggcaagacaagatgtgtgtgaattgtgcgtcgataaacatcctatctgtcaagattgcatgctcggatatcgacttccccatccaagtctatggcaccgttgttgccagggactgcatcgactacaagtgtgtttacctcttccgccgagataatgaccattgccaactcatcagctctaatgctcagtactgtggatgtgacatatgacgtttgtggaatgtgcggtggaggcaactgttgcagctgaagttacacagggggaattctttggagcaatgactgcccacaccactagaagcaagaggaggattgtgctgtttgatagccaagtaggaggcattgaagttactcctagatggaatggtggacacgaatttgtactcactttaggtgacgctacgatttgtgtgaaggttacttggtcgatggtagatccacggctttaaatgggttcgcctgttcgttgttaagcatcatcggtggaagtgtagtagtgctcttgctctggtttgttgtctgaggctgttggagtctagataagtataacagtgttcacactatcatgcccgtcctgttatttagtgaaccttaatttgtctaatgttgctactcttgttatttattgaaccttagtttattctagttgcattggaagggtttattctactcttgttatttgtctaagtgcatcaattttttgtgtggtggtggtggggttctgttgctgggttctcaggtaatattttaaataaaacctgaaaatccaggcagatctcaccttttggtgcggccatggtggtcttcaccttttgctggattctcatgcttgtttgaggcagatatgatgagtggctacaaacaaactggagcgttcaggtgtgcgagcatccagagctgaacggaatt

SEQ ID NO: 73008 - DNA, 631 bp, Zea Mays
aaaaaaaaaaagaaaaaaaaaggagcgtggcggggggagtgggcggcgtgaggggaggcgggaagcgggcgcttctggatcccgcggaccgcgccgtgatgcagcggcagaagcgcatgatcaagaaccgagagtccgcagcgaggtccagggacaggaaacaggcatacgtcgcggagctggaatcgcaggttatgcagctcgaggaggagcagacagaactgttaagggagcaggaggaccgacgccaaaagagacttaaggagctaaccgaaagggcagttccagtcatcaggaaaaaatcaccacaagatcttagaagaaccaactccatggaatggtagaaatgaccctgagccctgatgttcttctcttagaagttacagggtttgtttttctttgacttctgtttcttctagttttctttgatagctatttaggaatagtggaacgtgcgtgatcaagaagtcacgccatttagaattgatctgttgtcagattgacggttttcttgtgaatgtggccgggtgttgtataaataagaacaataaggttagcttgaagagtggaccaaaatatcctaattacaggcatctattttgacatatcccaatatctgatacaacgtgtt

SEQ ID NO: 73009 - DNA, 1434 bp, Zea Mays
ttttcttttttattaaatggccaaaaaggcattttggcatatgcgatgtggatgacgataacatccggatgaaacccatcaatttgacggaaattctgtaaaactcaatttatatagcggcacaattccaattttctctcagcacagcccgcggccgcggcgaccagaggcttgtgcccctccctctcccgggaggccgggacaagaggcaacgggacacccgcaaggccgcaagaagaaacagcgcagcaacaaatacgctgaagagtggaaagcgagagccgacacgacctcgcccgacctgcgctggtcgactgtgagtttttcccccctgtcgcctcccctgctgggccgtgggccgcggcctcggcgcatggcgtcgtcacgggtgatggcgtcgtcgtctccgccgcagcacgccggggcgggctcgtcctcggacctcgcgcgattcaagagtagcggcgtcggatcgatgaacatggacgacatcatccgtaacatctacggccccgaggccgtcaacgccgccgccgccgaaagcgccggcctcggcccggcggagccctccctggcggccccggaggctgcggcccggcggacgtcggaggaggtgtggaaggagatctccgccgctggagggctccccgcgcccgtcctccatatccctcccgccgccagctccggcgccggggccagaggcggcggcggcgccgcggagatgacgctggaggatttccttgccagggattcctgcggcagggcggcggtgatggaggggaacatggcgctggggttccctgacggtgacggagatgcggcagggagcgtggcggggggagtgggcggcgtgaggggaggcgggaagcgggcgcttctggatcccgcggaccgcgccgtgatgcagcggcagaagcgcatgatcaagaaccgagagtccgcagcgaggtccagggacaggaaacaggcatacgtcgcggagctggaatcgcaggttatgcagctcgaggaggagcagacagaactgttaagggagcaggaggaccgacgccaaaagagacttaaggagctaaccgaaagggcagttccagtcatcaggaaaaaatcaccacaagatcttagaagaaccaactccatggaatggtagaaatgaccctgagccctgatgttcttctcttagaagttacagggtttgtttttctttgacttctgtttcttctagttttctttgatagctatttaggaatagtggaacgtgcgtgatcaagaagtcacgccatttagaattgatctgttgtcagattgacggttttcttgtgaatgtggccgggtgttgtataaataagaacaataaggttagcttgaagagtggaccaaaatatcctaattacaggcatctattttgacatatcccaatatctgatacaacgtgtt

SEQ ID NO: 73010 - DNA, 387 bp, Zea Mays
ttttctcaaatttattaccatgctaaccgaaagggcagttccagtcatcaggaaaaaatcaccacaagatcttagaagaaccaactccatggaatggtagaaatgaccctgagccctgatgttcttctcttagaagttacagggtttgtttttctttgacttctgtttcttctagttttctttgatagctatttaggaatagtggaacgtgcgtgatcaagaagtcacgccatttagaattgatctgttgtcagattgacggttttcttgtgaatgtggccgggtgttgtataaataagaacaataaggttagcttgaagagtggaccaaaatatcctaattacaggcatctattttgacatatcccaatatctgatacaacgtgtt

SEQ ID NO: 73011 - DNA, 1487 bp, Zea Mays
gtttccaacgccagcgcggcaccgcatcggcaccgagacccacgtgcagcctacgcctcagtcacgtcgaccaggcccccacccacacctcccccaccaccaccacaccacgcactggcctccggcgctcgctcgctcgctcccctgtcccctctggcctcctctgctctctctctctatatatatgcgcgcgggccgcggcaatgtttgccccatccgaccagcgtttactcctaactagtttgccgatcgagcccgggcgacgtgagatacgagcggcgtcgaccggcgccggcgagcctccgcagccgcagccgcccgatctgggttttctttcgtagcggtagcggaagatgagccaggaccaggagaacggaggcaccaacgggcagcacgccgccgacgtgatggaggtggagccgaagcgccgggcgccgcggctgaacgagcgcatcctgtcgtcgctgtcgcggaggtccgtcgccgcgcacccctggcacgacctcgagatcggtcgtggagatcaccaaggggagcaaggtgaagtacgagctggacaagaagacggggctcatcaaggtggaccggatcctctactcgtccgtcgtctaccctcacaactacggcttcgtgccccggacgctctgcgaggacaacgaccccatggacgtcctcgtgctcatgcaggaacccgtccttcccggcgccttcctccgcgccagggccatcggcctcatgcctatgatagatcagggagagaaggacgacaagatcatcgccgtctgcgccgacgaccccgagtaccgccactacaacgacatcagcgagctctcccctcaccgcctccaggagatccgccgcttcttcgaagactacaagaagaacgagaacaaggaggtggccgtcaacgacttcctgcccgccgccgctgcccgcgaagccatccagtactccatggacctgtacggccagtacatcatgcagaccctgcggcggtagagcgtgtcctaccagatcccatgcgagctgagctgacgcaagagcacagatcgacagaatccttgtggtctcgtctcatgcatggatagccaggtcacatggcttgtcgacgaccatgcatctcttcttcccagcgattttagcctgtatcttcccttatttatagtcttttgggtttggtggaatctgtccacagtgtggtttgatctatgtactcctcttctacatttctaccagaacgaatcgatgagattaataataatgttactactaccctgttgttttgtcgacctacttgtggcctgcacatctgcatactgctgctgttggtcacggagtttctgctttaaagttgggctgtcgtgcaacttgggatgtgctagctgttagggtactctaccttctcgaatatttatcgtcaggatatttatcatccggtagtttatttttaaactaatcagccacaaataaaaaaaagaacggagaaa

SEQ ID NO: 73012 - DNA, 2096 bp, Zea Mays
atgaataaagacatccttgtagcagccgatgaccacgaaggtggtctctgcctgcccaaatcaagcgctcgcctgactcaggagtcaggagtcgggtacaacaaggcgtcatcactatccttttctgctgaatccagaagacaaatacactactgccgtgcccccctcccttctctctctcttcgccgcagcgtcagccgacggcaaaaccctagatctctctccctcttaaaccctctcaacaagtgcgggaggatgtcagagccgtccaaggtaatccacatccgcaacgtcgggcacgagattgccgagtctgatctccttcagctgctgcagccgttcggcatggtctccaagatcgtcatgttgcgtgccaagaaccaagctcttctgcagatggaagacctccatgcttccgtgagcgcgctgcaatattacacttctgttcaacctagcataaggggaaggaatgtatacatgcagttctcatctcaccaagagcttaccactgaccagagctctcatggaaggaattctgatcaggttttcaagctcttattcagtatcactcgcgccaagaagctgtggaagcatttggttctttgcatggaaggaacatatacgatggttgctgccaactagatattcaatattcaaatctcagtgaactgcaagtccactacaacaacgaccgatctagagatttcacaaatccatcgttgcctacagaacaacgtcctagggcctctcagcaaggttatcttgacccagctaatctctatgccttccaacaagctggagcttcatatgcacagatggggagggttgcaatgattgcggctgcatttggtggaactttacctcatggagtgactggtaccaatgaacggtgcacactcatcgtcagtaatctgaatactgataaaattgatgaggataagcttttcaatctgttttccttgtatggaaacatagtacgaatcaagatactgcgtaacaaaccagatcatgcacttgttgagatggctgatgggttgcaggcagagctagctgtgcattatttgaaggggtctatactatttgggaagaaactggaagttaactactcaaagtatcctaacatcacacctgctcctgacgcccacgactacttaaactcaagcataaaccggttcaacagcaacgtggtcaagaactaccgacattgctgctctccaacgaagatgatccacatttctgccctccctcaagatatctctgaggaagcaatcctgaaccatgtgtctgagcacggcactgttctcaacacgaagctattcgaggtgaatggcaagaggcaggctctcattttgttcaagagcgaagaggaggctaccgaggccctcgtgtcaaagcatgccagcacgctcgagggtaacacgatccggatctctttctcccagatgcagagtatataagccacctcaagggaaagcccctgccgtcctcactcgccccacttcgagctctatttaggaagcatttcagactaagatgtgaatcctgtgcaccattctccaagactgatgctgtctgagctgtacctcccctgaccttgttttttttttcacgcaacactggactttcaccaaaaggtttgtgtttctttccaaatcctgttggttaggatatcatttactccttaatcttcatgtcctgacattctaagttggaaggcctgttaattgcgtgtgaattatattatccttttgcctgtttggcatgtttaatgtaccctctagtgcagctgaaacttacctgcaactgcgattgcgattgacttattatgagcaattgcgatggtaggctaggtgttacaagagcctcctgagcgaatattcaagaattaagcctaggtacctgagaccccttatttgagcgaatattcaagaatttgaacgaatatttatgaattaagcctcagtacctgagctctcttataggaacgaatattcaagaatttaagctttcagtgaagcttcctatgggagtaaatatttaagaattttattggtttgtatatttagcgataggtgatgtttggatctatttatttt

SEQ ID NO: 73013 - DNA, 2620 bp, Zea Mays
atgaataaagacatccttgtagcagccgatgaccacgaaggtggtctctgcctgcccaaatcaagcgctcgcctgactcaggagtcaggagtcgggtacaacaaggcgtcatcactatccttttctgctgaatccagaagacaaatacactactgccgtgcccccctcccttctctctctcttcgccgcagcgtcagccgacggcaaaaccctagatctctctccctcttaaaccctctcaacaagtgcgggaggatgtcagagccgtccaaggtaatccacatccgcaacgtcgggcacgagattgccgagtctgatctccttcagctgctgcagccgttcggcatggtctccaagatcgtcatgttgcgtgccaagaaccaagctcttctgcagatggaagacctccatgcttccgtgagcgcgctgcaatattacacttctgttcaacctagcataaggggaaggaatgtatacatgcagttctcatctcaccaagagcttaccactgaccagagctctcatggaaggaattctgatcaggggtccgaacccaaccgaatacttttagttactatccaccatatgatctatcctataacagtggagattctacatcaagtattcaaagcttatggatttgtggagaagattgtcacatttcaaaagtcagctggttagattttcctgctctctctatctctttcaccacgcacgcgtgcacctggtatacattttctgattcccttacagattgcatgtgaatggtaaggtggatttaccaattgatatgagctttatatgtattaatgtgggggcactgccgtgctgggatgtaccctttttctaaaagtaagccgtaaacaacaactttaaccactaccgacattatgtgctataacatagctattagttatgggttgtagtttgtagatgtgcctgcaaatgactggactggcacagctcgtacatctaaaacttgttacaaatttgaatgatttttgtgctaaccatctgccccagtatgtcatcgttaaggttctttattctttgattaactgatgcaggttttcaagctcttattcagtatcactcgcgccaagaagctgtggaagcatttggttctttgcatggaaggaacatatacgatggttgctgccaactagatattcaatattcaaatctcagtgaactgcaagtccactacaacaacgaccgatctagagatttcacaaatccatcgttgcctacagaacaacgtcctagggcctctcagcaaggttatcttgacccagctaatctctatgccttccaacaagctggagcttcatatgcacagatggggagggttgcaatgattgcggctgcatttggtggaactttacctcatggagtgactggtaccaatgaacggtgcacactcatcgtcagtaatctgaatactgataaaattgatgaggataagcttttcaatctgttttccttgtatggaaacatagtacgaatcaagatactgcgtaacaaaccagatcatgcacttgttgagatggctgatgggttgcaggcagagctagctgtgcattatttgaaggggtctatactatttgggaagaaactggaagttaactactcaaagtatcctaacatcacacctgctcctgacgcccacgactacttaaactcaagcataaaccggttcaacagcaacgtggtcaagaactaccgacattgctgctctccaacgaagatgatccacatttctgccctccctcaagatatctctgaggaagcaatcctgaaccatgtgtctgagcacggcactgttctcaacacgaagctattcgaggtgaatggcaagaggcaggctctcattttgttcaagagcgaagaggaggctaccgaggccctcgtgtcaaagcatgccagcacgctcgagggtaacacgatccggatctctttctcccagatgcagagtatataagccacctcaagggaaagcccctgccgtcctcactcgccccacttcgagctctatttaggaagcatttcagactaagatgtgaatcctgtgcaccattctccaagactgatgctgtctgagctgtacctcccctgaccttgttttttttttcacgcaacactggactttcaccaaaaggtttgtgtttctttccaaatcctgttggttaggatatcatttactccttaatcttcatgtcctgacattctaagttggaaggcctgttaattgcgtgtgaattatattatccttttgcctgtttggcatgtttaatgtaccctctagtgcagctgaaacttacctgcaactgcgattgcgattgacttattatgagcaattgcgatggtaggctaggtgttacaagagcctcctgagcgaatattcaagaattaagcctaggtacctgagaccccttatttgagcgaatattcaagaatttgaacgaatatttatgaattaagcctcagtacctgagctctcttataggaacgaatattcaagaatttaagctttcagtgaagcttcctatgggagtaaatatttaagaattttattggtttgtatatttagcgataggtgatgtttggatctatttatttt

SEQ ID NO: 73014 - DNA, 2168 bp, Zea Mays
atgaataaagacatccttgtagcagccgatgaccacgaaggtggtctctgcctgcccaaatcaagcgctcgcctgactcaggagtcaggagtcgggtacaacaaggcgtcatcactatccttttctgctgaatccagaagacaaatacactactgccgtgcccccctcccttctctctctcttcgccgcagcgtcagccgacggcaaaaccctagatctctctccctcttaaaccctctcaacaagtgcgggaggatgtcagagccgtccaaggtaatccacatccgcaacgtcgggcacgagattgccgagtctgatctccttcagctgctgcagccgttcggcatggtctccaagatcgtcatgttgcgtgccaagaaccaagctcttctgcagatggaagacctccatgcttccgtgagcgcgctgcaatattacacttctgttcaacctagcataaggggaaggaatgtatacatgcagttctcatctcaccaagagcttaccactgaccagagctctcatggaaggaattctgatcagtggagattctacatcaagtattcaaagcttatggatttgtggagaagattgtcacatttcaaaagtcagctggttttcaagctcttattcagtatcactcgcgccaagaagctgtggaagcatttggttctttgcatggaaggaacatatacgatggttgctgccaactagatattcaatattcaaatctcagtgaactgcaagtccactacaacaacgaccgatctagagatttcacaaatccatcgttgcctacagaacaacgtcctagggcctctcagcaaggttatcttgacccagctaatctctatgccttccaacaagctggagcttcatatgcacagatggggagggttgcaatgattgcggctgcatttggtggaactttacctcatggagtgactggtaccaatgaacggtgcacactcatcgtcagtaatctgaatactgataaaattgatgaggataagcttttcaatctgttttccttgtatggaaacatagtacgaatcaagatactgcgtaacaaaccagatcatgcacttgttgagatggctgatgggttgcaggcagagctagctgtgcattatttgaaggggtctatactatttgggaagaaactggaagttaactactcaaagtatcctaacatcacacctgctcctgacgcccacgactacttaaactcaagcataaaccggttcaacagcaacgtggtcaagaactaccgacattgctgctctccaacgaagatgatccacatttctgccctccctcaagatatctctgaggaagcaatcctgaaccatgtgtctgagcacggcactgttctcaacacgaagctattcgaggtgaatggcaagaggcaggctctcattttgttcaagagcgaagaggaggctaccgaggccctcgtgtcaaagcatgccagcacgctcgagggtaacacgatccggatctctttctcccagatgcagagtatataagccacctcaagggaaagcccctgccgtcctcactcgccccacttcgagctctatttaggaagcatttcagactaagatgtgaatcctgtgcaccattctccaagactgatgctgtctgagctgtacctcccctgaccttgttttttttttcacgcaacactggactttcaccaaaaggtttgtgtttctttccaaatcctgttggttaggatatcatttactccttaatcttcatgtcctgacattctaagttggaaggcctgttaattgcgtgtgaattatattatccttttgcctgtttggcatgtttaatgtaccctctagtgcagctgaaacttacctgcaactgcgattgcgattgacttattatgagcaattgcgatggtaggctaggtgttacaagagcctcctgagcgaatattcaagaattaagcctaggtacctgagaccccttatttgagcgaatattcaagaatttgaacgaatatttatgaattaagcctcagtacctgagctctcttataggaacgaatattcaagaatttaagctttcagtgaagcttcctatgggagtaaatatttaagaattttattggtttgtatatttagcgataggtgatgtttggatctatttatttt

SEQ ID NO: 73015 - DNA, 2560 bp, Zea Mays
atgaataaagacatccttgtagcagccgatgaccacgaaggtggtctctgcctgcccaaatcaagcgctcgcctgactcaggagtcaggagtcgggtacaacaaggcgtcatcactatccttttctgctgaatccagaagacaaatacactactgccgtgcccccctcccttctctctctcttcgccgcagcgtcagccgacggcaaaaccctagatctctctccctcttaaaccctctcaacaagtgcgggaggatgtcagagccgtccaaggtaatccacatccgcaacgtcgggcacgagattgccgagtctgatctccttcagctgctgcagccgttcggcatggtctccaagatcgtcatgttgcgtgccaagaaccaagctcttctgcagatggaagacctccatgcttccgtgagcgcgctgcaatattacacttctgttcaacctagcataaggggaaggaatgtatacatgcagttctcatctcaccaagagcttaccactgaccagagctctcatggaaggaattctgatcagtggagattctacatcaagtattcaaagcttatggatttgtggagaagattgtcacatttcaaaagtcagctggttagattttcctgctctctctatctctttcaccacgcacgcgtgcacctggtatacattttctgattcccttacagattgcatgtgaatggtaaggtggatttaccaattgatatgagctttatatgtattaatgtgggggcactgccgtgctgggatgtaccctttttctaaaagtaagccgtaaacaacaactttaaccactaccgacattatgtgctataacatagctattagttatgggttgtagtttgtagatgtgcctgcaaatgactggactggcacagctcgtacatctaaaacttgttacaaatttgaatgatttttgtgctaaccatctgccccagtatgtcatcgttaaggttctttattctttgattaactgatgcaggttttcaagctcttattcagtatcactcgcgccaagaagctgtggaagcatttggttctttgcatggaaggaacatatacgatggttgctgccaactagatattcaatattcaaatctcagtgaactgcaagtccactacaacaacgaccgatctagagatttcacaaatccatcgttgcctacagaacaacgtcctagggcctctcagcaaggttatcttgacccagctaatctctatgccttccaacaagctggagcttttgcaataccagatggggagggttgcaatgattgcggctgcatttggtggaactttacctcatggagtgactggtaccaatgaacggtgcacactcatcgtcagtaatctgaatactgataaaattgatgaggataagcttttcaatctgttttccttgtatggaaacatagtacgaatcaagatactgcgtaacaaaccagatcatgcacttgttgagatggctgatgggttgcaggcagagctagctgtgcattatttgaaggggtctatactatttgggaagaaactggaagttaactactcaaagtatcctaacatcacacctgctcctgacgcccacgactacttaaactcaagcataaaccggttcaacagcaacgtggtcaagaactaccgacattgctgctctccaacgaagatgatccacatttctgccctccctcaagatatctctgaggaagcaatcctgaaccatgtgtctgagcacggcactgttctcaacacgaagctattcgaggtgaatggcaagaggcaggctctcattttgttcaagagcgaagaggaggctaccgaggccctcgtgtcaaagcatgccagcacgctcgagggtaacacgatccggatctctttctcccagatgcagagtatataagccacctcaagggaaagcccctgccgtcctcactcgccccacttcgagctctatttaggaagcatttcagactaagatgtgaatcctgtgcaccattctccaagactgatgctgtctgagctgtacctcccctgaccttgttttttttttcacgcaacactggactttcaccaaaaggtttgtgtttctttccaaatcctgttggttaggatatcatttactccttaatcttcatgtcctgacattctaagttggaaggcctgttaattgcgtgtgaattatattatccttttgcctgtttggcatgtttaatgtaccctctagtgcagctgaaacttacctgcaactgcgattgcgattgacttattatgagcaattgcgatggtaggctaggtgttacaagagcctcctgagcgaatattcaagaattaagcctaggtacctgagaccccttatttgagcgaatattcaagaatttgaacgaatatttatgaattaagcctcagtacctgagctctcttataggaacgaatattcaagaatttaagctttcagtgaagcttcctatgggagtaaatatttaagaattttattggtttgtatatttagcgataggtgatgtttggatctatttatttt

SEQ ID NO: 73016 - DNA, 1631 bp, Zea Mays
ggatttaccaattgatatgagctttatatgtattaatgtgggggcactgccgtgctgggatgtaccctttttctaaaagttttcaagctcttattcagtatcactcgcgccaagaagctgtggaagcatttggttctttgcatggaaggaacatatacgatggttgctgccaactagatattcaatattcaaatctcagtgaactgcaagtccactacaacaacgaccgatctagagatttcacaaatccatcgttgcctacagaacaacgtcctagggcctctcagcaaggttatcttgacccagctaatctctatgccttccaacaagctggagcttcatatgcacagatggggagggttgcaatgattgcggctgcatttggtggaactttacctcatggagtgactggtaccaatgaacggtgcacactcatcgtcagtaatctgaatactgataaaattgatgaggataagcttttcaatctgttttccttgtatggaaacatagtacgaatcaagatactgcgtaacaaaccagatcatgcacttgttgagatggctgatgggttgcaggcagagctagctgtgcattatttgaaggggtctatactatttgggaagaaactggaagttaactactcaaagtatcctaacatcacacctgctcctgacgcccacgactacttaaactcaagcataaaccggttcaacagcaacgtggtcaagaactaccgacattgctgctctccaacgaagatgatccacatttctgccctccctcaagatatctctgaggaagcaatcctgaaccatgtgtctgagcacggcactgttctcaacacgaagctattcgaggtgaatggcaagaggcaggctctcattttgttcaagagcgaagaggaggctaccgaggccctcgtgtcaaagcatgccagcacgctcgagggtaacacgatccggatctctttctcccagatgcagagtatataagccacctcaagggaaagcccctgccgtcctcactcgccccacttcgagctctatttaggaagcatttcagactaagatgtgaatcctgtgcaccattctccaagactgatgctgtctgagctgtacctcccctgaccttgttttttttttcacgcaacactggactttcaccaaaaggtttgtgtttctttccaaatcctgttggttaggatatcatttactccttaatcttcatgtcctgacattctaagttggaaggcctgttaattgcgtgtgaattatattatccttttgcctgtttggcatgtttaatgtaccctctagtgcagctgaaacttacctgcaactgcgattgcgattgacttattatgagcaattgcgatggtaggctaggtgttacaagagcctcctgagcgaatattcaagaattaagcctaggtacctgagaccccttatttgagcgaatattcaagaatttgaacgaatatttatgaattaagcctcagtacctgagctctcttataggaacgaatattcaagaatttaagctttcagtgaagcttcctatgggagtaaatatttaagaattttattggtttgtatatttagcgataggtgatgtttggatctatttatttt

SEQ ID NO: 73017 - DNA, 1589 bp, Zea Mays
gcactgccgtgctgggatgtaccctttttctaaaagttttcaagctcttattcagtatcactcgcgccaagaagctgtggaagcatttggttctttgcatggaaggaacatatacgatggttgctgccaactagatattcaatattcaaatctcagtgaactgcaagtccactacaacaacgaccgatctagagatttcacaaatccatcgttgcctacagaacaacgtcctagggcctctcagcaaggttatcttgacccagctaatctctatgccttccaacaagctggagcttttgcaataccagatggggagggttgcaatgattgcggctgcatttggtggaactttacctcatggagtgactggtaccaatgaacggtgcacactcatcgtcagtaatctgaatactgataaaattgatgaggataagcttttcaatctgttttccttgtatggaaacatagtacgaatcaagatactgcgtaacaaaccagatcatgcacttgttgagatggctgatgggttgcaggcagagctagctgtgcattatttgaaggggtctatactatttgggaagaaactggaagttaactactcaaagtatcctaacatcacacctgctcctgacgcccacgactacttaaactcaagcataaaccggttcaacagcaacgtggtcaagaactaccgacattgctgctctccaacgaagatgatccacatttctgccctccctcaagatatctctgaggaagcaatcctgaaccatgtgtctgagcacggcactgttctcaacacgaagctattcgaggtgaatggcaagaggcaggctctcattttgttcaagagcgaagaggaggctaccgaggccctcgtgtcaaagcatgccagcacgctcgagggtaacacgatccggatctctttctcccagatgcagagtatataagccacctcaagggaaagcccctgccgtcctcactcgccccacttcgagctctatttaggaagcatttcagactaagatgtgaatcctgtgcaccattctccaagactgatgctgtctgagctgtacctcccctgaccttgttttttttttcacgcaacactggactttcaccaaaaggtttgtgtttctttccaaatcctgttggttaggatatcatttactccttaatcttcatgtcctgacattctaagttggaaggcctgttaattgcgtgtgaattatattatccttttgcctgtttggcatgtttaatgtaccctctagtgcagctgaaacttacctgcaactgcgattgcgattgacttattatgagcaattgcgatggtaggctaggtgttacaagagcctcctgagcgaatattcaagaattaagcctaggtacctgagaccccttatttgagcgaatattcaagaatttgaacgaatatttatgaattaagcctcagtacctgagctctcttataggaacgaatattcaagaatttaagctttcagtgaagcttcctatgggagtaaatatttaagaattttattggtttgtatatttagcgataggtgatgtttggatctatttatttt

SEQ ID NO: 73018 - DNA, 2190 bp, Zea Mays
tgcagaggccacttgcgtccgtccgatctgcccagtggacggtccagaccaagttggagaaatcgatgcggacaacatcaccaaccttcttctacccgccctgcagttgccgagagttaattcgagctttaatcacctcaacaagatcctcggttctgacttccgagcattgattaattactccaggctagtttaatccaagatccgcctgtcagaggagacgagcccacaggcacagaaacggacaacccagctcaactttcccgggcccacaggaagccagcccatctgctgctaaacttcctgtcctgtatcatctcgtgctcgtcggtcgtcactagtcctcgctcatagcaggcggcagtgactcatcactactagtgatcagaccagtgagctagcgactgtaccatgcagcagctgtaggagagcctggtggtaggtaggataggagtagcgccagccgccaagtgcgcgtccgggctggctgcttcggcgagcaggagggagccgcaccgccgggctcccgcaatgtcgcctcctccgcccccgccgctgctgcgcaacgagctgtcgcgcaggacggcggtgctgggcctgcgcctgtgggtgctggtgggcatcgccgtcggggccgccttcgtgctgctcctcgtgctcatctccctccacctcgccgcggcgcggcggaggcggcccaggaagggcgtcgcgcacgcgcccgcgcacgcgccggcgggggcgccgccgctgtccccgtccaccatcccgcccgtgtccaaggagatccaggaggtggccgtccacgtcggctcgctccgccactacctcgagacggggcacgcgttcctcaaggacggcggcggcggcgacggtgagtccgtggcgtacgggtcgcagcgcgtccacatcgaggccggcaagggccagcgcatggtcgcggcggcgtccgacgcgctgtcggcggccgtgggccccgaggtgtcgcacctcggctggggccactggtacacgctgcgggagctggaggaggccaccgccgcgttcgcccccgagcacgtcgtcggcgagggcgggtacggcatcgtctaccgcggcgtcctcgccgacggctaccaggtcgccgtcaagaacctcctcaacaacaggggacaagccgagcgggagttcagggtggaggtggaggccatcggccgcgtccggcacaagaatctggtccggctactgggctactgcgccgagggcgcccaacggatacttgtgtacgagtacgtggacaacggcaacctcgagcagtggctgcacggcgacgtcggggcagtgagcccgctcacctgggacgtccggatgaacatcgtgctcggcatggccaaagggatcacgtacctgcacgaggggctggaacccaaggtggtgcacagggacatcaagtcgagcaacatcctgctggacaggaggtggaacccgaaggtctcggacttcggcctcgccaagctcctgggggcggacagcaactacgtcaccaccagagtgatgggaacgtttggctacgtggcgccagagtacgctagcaccggcatgctgaacgagaggagcgacgtgtacagcttcgggatcctgatcatggagatcatctccggccgaagccccgtcgactacgccaggcctgccggagaggtaaaccttgtagagtggctcaagaacaaggtgaccaacagggactacgaggccatcgtggacccgaagctgccggagaagccgtcctccaaggctctcaagaaggcgctcctggtcgcgctgaggtgcgtggatcccgactcgcagaaacggcccaagatggggcacgtaatccacatgctcgaagtcgacgacttcccgtatcgagaggaccgtcgaactcttcggccgggcaacggcagccccctggagaaggcgaggaatccggcggcggggtcatgcgacggcagcagctgctacgggggcgacacgaccaccgcgagcacgccgtccagactagtgcaggacatgtagtagtgatgtgtttgtagccagctgctgctggccttctgagctctgcctgcgggctgcggggcaacatggagatggacatgctgcaactctgctccgtcgttaattaaaggttcccttcctaggtgttgattttggactcaacatattaaaaaaaaatct

SEQ ID NO: 73019 - DNA, 502 bp, Zea Mays
gggaaagtgcccgcctcctccattggatgcaggcataggattgtggaatttattttttgcatctggaatttgagtatgccaaaggagaagatgcttttcaaaacctctgagttagttgctagcttttgattacatatatttccacaaccttttacactgtgattagcagctctttttacctaaatattcactgcacctttttgtccactctcgagtgtttcccctcttaattaattgctacatgttgggtgtatagtgtatacacagccacacaggtttaattgagcatacacaggcctcctaaaatggtcctcttttgggatgttgctggttgcacaaagagttaacaggaaaaggaacagatgtttccaagaagaaatgttgactaagttggcaagaagggagaagacaaccaacatcaagccagatcatgatattgatgtctatatgaagatattagacttggaggtctgtgctgatacgctggtagggaaggagatga

SEQ ID NO: 73020 - DNA, 597 bp, Zea Mays
cttgtacctaacagtcaactacatcgaccgttatctttctggcaacgagatcaaccgccaaaggctgcaattacttggtgttgcttgcatgcttatagcggccgcctacgacaaagtgtttcttgaggtgcttttctgttctgccaccacgctctggacttgcaccgatgtcgcgcacgtgctcctgcagttcagcctcgcctggtacggcaagctcatccggtacgcctgcgccgtcgccgcgcactacgtccgctccgtcaagggcctctgcttcgacctcttcatcattaggggtggaaacagtgctttcaatgcaggctggaggtgcgcgatgtgatcaatataatccatgcttgataaatgatgacaatggtgatggccatgatatatggtcaacattgtattaatcttttttcgagttttaggctatcatgttgtttgctggaatggagatatttcattgttcacttggttcttgtgacagtttattaccttatttcggtgctttcttagtacctttttatgagatttgagttgtaaataacacttctccaatcgtgctgtcattataactcagtgacattattaaaatca

SEQ ID NO: 73021 - DNA, 1672 bp, Zea Mays
cgcacggttcccccacggccccaccttccgtccttcccagcaccgccgcggaccataatccccttcgtcttccccagcacactgcacaccttcactcccgcatcctaagctatggcggcgctgagctggatccggctccggccgccccgtgctgccattctcattttgctgctcctcgccctcaatatctccccctcctttgccgctaacttcgagggcttcgactccgacgaccttcctgtcgcggccggcggcctagatgctgacgatgacgagggcctcgacggcgtctacctcccgccccctccgcccatctccctctccacctccgctccttcacctcccgtcacgacgacaccggcgccgaaccctaacccggctacgcctacgcctcgggatcccaccccggcgctcgacctctgggacgaagacgagttcgagggcatccccgtgcccgaagcgatcccctctgacgactccgccgcgccggccgaggtcgacccatcagatccctccgcggaggcaccggtggaggtggcgccggctgcgaagaggagcccggctgagctcctccgcgcgttctccttcgagatcgcgtgcgccagcttcctggtctgttacgtgctcaactacttcactgggaagcggcaaaacgagaacatcgcgctggcctgggccaccaagttcgccaccagggactctatcttcgacaagaacttcagccttcttggcacaggcgacggcaaggacacgccactcctgctgaaggaggggcaggacgtgttcaagttctatgcaagtgggagacggttctgccaggggttgcttgccaccatggagatgcgagcgcggtacgatctgctgtcaaagttcgtcgagttggtcttccctaggaaggacaccatcacattcgaagtgataatgaacgaagaggccatggaccatgtggttctggctgtagccaggaagaaggcggccaagacaatgcacaaagaagagagggatctgcaaaggtttgccagtgttctcacttctgcacctgcggggaggaagtgggtgtcagatgagcttgctgtggtggctgagtcaaaggaggttgctggggatatgatcactgaagctgtgcttgatcaggttcttggtgagaagacgttcgagaaatttggaaagtggttcatctcgcttcatttttcggaccagttggcaggatcctacaagaaggtccttacattcaagtttgtattgccagatgcaagcaacatgtcagagatgacaagattggtttctcttgtgccatactacattgatttggttgggcgttataagctcagctctcatgctcgctctaaaactgatggagctagaacgaaggctgctcaggaagcttttagggaactacagagtgccaggcaggaggccctgcaaaggaaaaaggctgaaaagaagaaactcatggaggagacagatgccaaactaagcgctgaggcactccggaggaaagatgaaaaggaaagggctaggcaactgaagaaatctgggcccaaagtgaagatgctccgctcttgaatctaccacggcgtgtttggtagactgggtgaatagagaaactgcacctgcgaagttataaagcagtgtttgtttggttagcttctctatgcatcccagctctact

SEQ ID NO: 73022 - DNA, 1926 bp, Zea Mays
gcgaaccaaacaagtttttgacaccaacccagcagcagcaggcgcagccaggagcggaggagccagcacttgctttccagcggcgatccccacctaccacccccaccttcccgcttaccaagcggagcagtataacgcaggggcttggtccagcgacttctcagaaacgcgccaccagccaacgagcaagggccgcagccggagctccaatggcctccttctcctccctctctgcctcctcctccacctccaccccgtccttcaacctccccgcaaaaacctccgctggcacaggctccctgtcattccacagggcgagggagtcgcagaagtccagggccaggatggtgacggtgcgggcggaggcggttgacacgaccatcagcccgcgggtgaatgcgctcaggccgtccaagaccatggccatcaccgaccaggccacggcgctgcgacaggccggcgtgccagtcatcggactcgccgctggggagcccgacttcgacacgccagccgtgatcgccgaggctgggataaatgccatcagagatggggccacaagatacacgcctaatgctggaactctggagctgaggaaggctatctgcaaaaagcttgaggaggagaatggtctatcatactccgccgatcaggtgctagtaagcaatggagccaagcagtgcattacacaagcagtactcgctgtctgctcacctggcgatgaagttttgatacctgcaccatattgggtcagctaccctgagatggctagactggctggtgcaacgccagttattctccctacaagcatatcagacaattacctgctaaggccagagtcacttgcctcagtgatcaatgaaaattcaaggatcttgattctctgctctccatctaatccaacagggtctgtgtatcctaaggagttgcttgaggagattgctgctatagtcagaaagcaccctagactcctagttttatccgatgagatctatgagcatattatctatcaacctgctaaacacacaagctttgcttcattgcctggaatgtgggaaagaacgttaactgtgaatggattttctaaggcttttgctatgactggttggagacttggatacttagctgcccctaaacattttgtcgcggcctgtggaaagatccaaagccagtatacctctggagccagtagtatatcacagaaggcagggcttgcagctttgaacctaggttatgctggtggtgaagcagtatcaaccatggtgaaagcattccaggagcgtcgtgattaccttgtaagaagctttagggagctgccaggtgtcaagatatcggaacctcagggagccttctatttattcatcgacttcagctcgtactatgggtctgaggtggaaggttttggtaccatcaaggactctgagtccctctgtctgttcctgttggagaaggcacagctatgtcgacactgcaaactgcaatgggaaagataaaagaagcgatggctctgctcaggccccctgttgccgtttaacaaaaccaacgtatcgctaatcagttgtggaccaaaggcttctgcaatgcactatcatattaaatacattcagttgacatgatctatcttcttccctttatggaaaaaaatgttgctgctgtcatttggctttggtttgtatctgaagatttatatgtacttgctataatatagatgaactgtgcaacgctttttttacctgcaagaatagaaatggtaaacatgactttattttgacaatttgagtcgtgaatgtttcatattatttgtggagttttttacttgtttgaagcgataaggaatttctcatgtagaagtgcgtccatttatgtagttcatatatcttattatggagaatacaagaaagaaaccatgaacataatctatgaaataaa

SEQ ID NO: 73023 - DNA, 1950 bp, Zea Mays
aattttacaaagcctccgccgccgctaccgaggcggcaatccactcccccccgccgtccaggttggttggtgggtttgaattcgagctcaacgagcgacggcttgcccctgccgtttctctgctcagcgtgccagagctagttcatctccagcatctccggccgttacttgctctgagccaacaacagtatcaaaagccccgacccccccatcctccggcgacgatgccttccggcgacgattccgaccccctgctggcgcccgccgacggcatacgcttcgcggcgctggactaccgcgaccaccccgccgaccgcggcgccaccggcggctggcggtcggcgctcttcatcatagcggtggagatctcggagcggttcacgttctatggcgtgtcgtcgaacctgatcaactacctcacgggcccgctcggagagggcaccgcggcggcggcggcggccatcaacacgtggaacggggtggcgcagctgctgccgctgctgggcggggccctcgcggacaagtggctcggccgctaccgcaccatcgtcgtcgcatcgcttctctatgtcatcggtgcaggcatgctggccttctcgaccttgctctcctccggcagcggccaccaatgcaccaccgccgggggccagacctgtgcgccgtccaccattaaggacaacatcggatggggcctcggtttcggcattccgtgcgccgtcatggcagctgcgctcgccgtattccttctcggtacaaggaggtaccggtactacgtcactgccggggagcggggcctgttcgctcgtgccggcgaggcttttgttgagtggcggagcaggcgaaaggctcttcagcatggtgatcgacctgtagcagagggggcgccgggattcagcgctggtgtcgacgaggaggagcaggctgcagtcagccatgacgcaggcctcgtcaaggagaccaaggacatcctccgtctattcccgatatgggcgacgtgcctgctctacgcggtggcgttctcgcagtcgtcgacgttcttcacgaaacaggcggcgaccctggaccggcgcgtcgggcggcacttgcaggtaccaccggccgcgctgcagagcttcatcagcatcaccatcgtggtcttcatccccctctacgaccgcgtcctcgtgccggtggcgcgccggtactccggcaacccatccggcatcaccatgctgcagcgcatcgggacggggatgttcctctcgctcttgtccatggtgatcgcggcgctcgtcgagaagcaccggctccgcgtggcagtggacgctggcctcgtggacaagccaatggtccccctgccgatgagcctatggtggatggtgccgcagtacgtgctgttcggggccgccgacgtgtacaccatggtcgggctgcaggagttcttctacgatcaggtgcccgacaagctgcgcagcctcgggctggcactctaccttagcatcttcggcgtcggcagcttcatcagcagcacgctcgtgtcgatcatcgacagtgtgacgacggccaggggcgggagctggttctccaacaacctgaaccgtggccacgtggactacttctactggctactcgccgcgctcagcgccctcgagctcctcgcctatgtcttcttcgcggtgacatacaagtacaagaacaaagcaaccgtgcatgcaactgttgttggtcagtcgctttagttcaaaaatgaattagcggcaacaaatattcgagaatggagttagtacatcatcctacgacatagtataggtgatatgacacacaactaaatgtaaatggtaccttttctccgttagggtttgtggtccatacttatctttgattttgattcccatttgtatctgttgggacttgggagggtcaatgctatcattcaattcttaaggcaagggttcatccgtaatcagcaaa

SEQ ID NO: 73024 - DNA, 3081 bp, Zea Mays
ctcgaattcatttaggctttgttcgtttacgtcggattgcactagcaatcgttccagctaatcaaaatttatataaattagaaaagcaatccgactagtaatcgtttcgacccaccaatccgacacaaacaaaccatgattcggaacctcaccggctttcgggacgccgtcactgcctcctccgtcctcccacctcccgccatgagcataaaaataaagaaaaaaaataaaagaaaccccctcttcccctgaccgccgccgtcaccgccgagcacacctctagtcagcttccactggagcacgccaccccgaattttctcccggagtcgttgccctcctctcctacccccgtacactaaagctggttcgcagatccatccggacttgatcggttccttcttttatttcttgcccatagagcccaaacattattggatggactctgtcacttgctgcgacggcggcaaggaattggaataggacgaggtggggatcacgggctgcgacggcggcaagaaattggaaaaggacggcgtggggatcagggtattcgtcttgggaaaggggatggggggtctctgctcgaaggtctcagctgtagacaagtcaccgagcgacaccgcgcttggccggaaccaggtcgccgatcatgagccaggggcgtcgttggagttggagaagccaccggtgtcccgagagtcagctgcgccggcaaagcggctggacgagcagctgcagtctttctcgttccttgagagcgtcgtccctggggttgcttttcatgccggggctaacacgggcggcgaagcggggtccaggacctcgccgcagctgaccaggtcgctgtcccagagggctggtgtgggcaaggcaaaagccggcgctgccaaggtttcagaagtgagctcaattttaggtagagctagcactgctgggcttgaaaaggcagtggaggttctagatacacttggcagtagcatgacaagtttaaattccagcagtggttttgtgtcaagttctgcagcaaagggaaacaaaatatccatgctggcttttgaggtggcaaatactatagttaaaggctctaatctgatgcgttctctatcggaacctagcataaagcatctgaaggaggtggtgcttcattcagaaggtgttgaaaaccttatatccaaagattttgatgaactgctcaagatggcatctgctgacaaaagggaagagttagaagtattcacaagagaggttgttcgctttggaaaccgttgcaaggatcctcaatggcataacttggaccgctactttgaaaaactggcatctgaacgaaccccacaaagttatctgaaagaaaaggcagaatcagtgatgcagaaactggtcacctgcgttcaaaatacagttgaattatatcatgaattgcatgctttggatagatttgagcatgattgtcgtcttaaacagaaagaacaggatggcttgagttcaagaggagacaacctggatatactgaagcaggaattgaaggtccagagtaagcatgttaagagtctgaaaaagaaatcactttggtccaagaatttggaagaggtgatggtaaagcttgtagatattgtccacttcttatatttggagatatataatgccttcggtcgtcctgacagtgaagagccacaagaacctgccaaacaccataatagattgggaccagcaggccttgcattgcattatgctaatatcatcaatcagattgacaatcttgtttctcgatcatgtgcaatgcctccaaatgcaagggatacattatatcatagcttaccacctaccatcaaatctgctttccgttctaagctacaatcttttgaagtcaaggaagagcttacagcttctaggatcaaagcagaaatggaaaagactttgcgttggcttgtcccttttgctagtaacacaaatagggcacaccatggcttcggttgggttggagagtgggcaaatacaggatctgaattaaactgcaagatatcagggcagatggacatgtcccgaatggagaccttgtatcatgctgacaaggagaagaccgaagcacttatcctggagctagtcgtgtggcttcatcatcttatcagcaaatcaggaaacgccagtggaggtgtaaggtctcccatcaaatctccagtcagctcaccaacacaaaagggtgctgcaatcacactgttgtcgggcaaaacaaacaatttgccaccgattctcacccaagaggaccaggatatgctaaggggtgttaagtacaggaaatttgttccaggaataagcaaaagccaagagtttgacacaaagtcaagtcacagcaaacatagtaggttgagcaagagcaacagccactctccggccagtggcagcagaaaagacttgctcccagttaggaggtcttccatgcttccagttattgacttcgagattgacaggaccaaggctttggatctaattgacaggcttgacaacctaaaagtacaatgagcatgaagcttattgtggtcatccgcagttcttgaaaccccagccgcgatataaacagttatcgtgtatcagcagcaagaccgcccgttaggctctgcggttacaagataacaaacagtatgataagttggtgtctcagatcctgtaccgaatagaataggaaaaaatgttgtaaaaattacctgtcgtttctacctgtacaagaaatggaaagtgcagtttttaagaaaaaaaggagggtgaaagggatctaggtgttctatgttttcatggccattagactggaatggtgtgtatgaaccatagtactcccgtcccaaaatattagtcgttttagctcttgatttttatatatctatattcaaatggatgatgaatctagataaatatataaaacaaatacattgattattgtatgaatcaactaaaaagataaataaattttattttgagatgaagggagtatctttttttgcagaaaaaaataaaagcagggaacttagtgtcaatttacccagttccccaatctaattgatcattcataagtataagagcaactaaatt

SEQ ID NO: 73025 - DNA, 3728 bp, Zea Mays
tcgggacgccgtcactgcctcctccgtcctcccacctcccgccatgagcataaaaataaagaaaaaaaataaaagaaaccccctcttcccctgaccgccgccgtcaccgccgagcacacctctagtcagcttccactggagcacgccaccccgaattttctcccggagtcgttgccctcctctcctacccccgtacactaaagctggttcgcagatccatccggacttgatcggttccttcttttatttcttgcccatagagcccaaacattattggatggactctgtcacttgctgcgacggcggcaaggaattggaataggacgaggtggggatcacgggctgcgacggcggcaagaaattggaaaaggacggcgtggggatcagggtattcgtcttgggaaaggggatggggggtctctgctcgaaggtctcagctgtagacaagtcaccgagcgacaccgcgcttggccggaaccaggtcgccgatcatgagccaggggcgtcgttggagttggagaagccaccggtgtcccgagagtcagctgcgccggcaaagcggctggacgagcagctgcagtctttctcgttccttgagagcgtcgtccctggggttgcttttcatgccggggctaacacgggcggcgaagcggggtccaggacctcgccgcagctgaccaggtcgctgtcccagagggctggtgtgggcaaggcaaaagccggcgctgccaaggtttcagaagtgagctcaattttaggtagagctagcactgctgggcttgaaaaggcagtggaggttctagatacacttggcagtagcatgacaagtttaaattccagcagtggttttgtgtcaagttctgcagcaaagggaaacaaaatatccatgctggcttttgaggtggcaaatactatagttaaaggctctaatctgatgcgttctctatcggaacctagcataaagcatctgaaggaggtggtgcttcattcagaaggtgttgaaaaccttatatccaaagattttgatgaactgctcaagatggcatctgctgacaaaagggaagagttagaagtattcacaagagaggttgttcgctttggaaaccgttgcaaggatcctcaatggcataacttggaccgctactttgaaaaactggcatctgaacgaaccccacaaagttatctgaaagaaaaggcagaatcagtgatgcagaaactggtcacctgcgttcaaaatacagttgtaaggataccctgatttgtttagcttcaatggcttatttgctagcctatcttaacttgcttgagagtaaagttcatgttgtttccagtgacttattttcataatacacaatgcctatctgaacttgcatgagagtaaaagaattgtgttcatgttgtttccagtgacttatttacatcatacagaatgccattttggcttattctatactgcatcttgaaccaataaataatttaaagactatcgtggttgacagtcaataaaatatagtgctctctttgggctgctgacctgctgtagttgtcaacgtttcattttggttccatctggccgatttttttggttcctctgaagtttgtagccatcatgacatttactgccaattgcagtatgttcatgccagctatgctttgtacccccaccgtttcaaaatgtttgtcaacttgtaatgtggagtgacacagttaagttttgatcatcagtaggtgaagatgtttctagttttgccagatgaagttttaccattatattcttcttgaagctttcataatgtacaacttttctgttttgaaacaatacattacacaaaaactagtggtcaaaagtcataccaaatgttgtatacctatatttttctgaagtggctaggagcagtataattgtattattttaagtaatgaatccctacatcctagcaccattgatgaatttgtatgtttttgtcatctgccaatttggtcttcttattctggttattagtttcacattacttgtctattttgttttcctacttttttgcactcaggaattatatcatgaattgcatgctttggatagatttgagcatgattgtcgtcttaaacagaaagaacaggatggcttgagttcaagaggagacaacctggatatactgaagcaggaattgaaggtccagagtaagcatgttaagagtctgaaaaagaaatcactttggtccaagaatttggaagaggtgatggtaaagcttgtagatattgtccacttcttatatttggagatatataatgccttcggtcgtcctgacagtgaagagccacaagaacctgccaaacaccataatagattgggaccagcaggccttgcattgcattatgctaatatcatcaatcagattgacaatcttgtttctcgatcatgtgcaatgcctccaaatgcaagggatacattatatcatagcttaccacctaccatcaaatctgctttccgttctaagctacaatcttttgaagtcaaggaagagcttacagcttctaggatcaaagcagaaatggaaaagactttgcgttggcttgtcccttttgctagtaacacaaatagggcacaccatggcttcggttgggttggagagtgggcaaatacaggatctgaattaaactgcaagatatcagggcagatggacatgtcccgaatggagaccttgtatcatgctgacaaggagaagaccgaagcacttatcctggagctagtcgtgtggcttcatcatcttatcagcaaatcaggaaacgccagtggaggtgtaaggtctcccatcaaatctccagtcagctcaccaacacaaaagggtgctgcaatcacactgttgtcgggcaaaacaaacaatttgccaccgattctcacccaagaggaccaggatatgctaaggggtgttaagtacaggaaatttgttccaggaataagcaaaagccaagagtttgacacaaagtcaagtcacagcaaacatagtaggttgagcaagagcaacagccactctccggccagtggcagcagaaaagacttgctcccagttaggaggtcttccatgcttccagttattgacttcgagattgacaggaccaaggctttggatctaattgacaggcttgacaacctaaaagtacaatgagcatgaagcttattgtggtcatccgcagttcttgaaaccccagccgcgatataaacagttatcgtgtatcagcagcaagaccgcccgttaggctctgcggttacaagataacaaacagtatgataagttggtgtctcagatcctgtaccgaatagaataggaaaaaatgttgtaaaaattacctgtcgtttctacctgtacaagaaatggaaagtgcagtttttaagaaaaaaaggagggtgaaagggatctaggtgttctatgttttcatggccattagactggaatggtgtgtatgaaccatagtactcccgtcccaaaatattagtcgttttagctcttgatttttatatatctatattcaaatggatgatgaatctagataaatatataaaacaaatacattgattattgtatgaatcaactaaaaagataaataaattttattttgagatgaagggagtatctttttttgcagaaaaaaataaaagcagggaacttagtgtcaatttacccagttccccaatctaattgatcattcataagtataagagcaactaaatt

SEQ ID NO: 73026 - DNA, 3047 bp, Zea Mays
ctgcctcctccgtcctcccacctcccgccatgagcataaaaataaagaaaaaaaataaaagaaaccccctcttcccctgaccgccgccgtcaccgccgagcacacctctagtcagcttccactggagcacgccaccccgaattttctcccggagtcgttgccctcctctcctacccccgtacactaaagctggttcgcagatccatccggacttgatcggttccttcttttatttcttgcccatagagcccaaacattattggatggactctgtcacttgctgcgacggcggcaaggaattggaataggacgaggtggggatcacgggctgcgacggcggcaagaaattggaaaaggacggcgtggggatcagggtattcgtcttgggaaaggggatggggggtctctgctcgaaggtctcagctgtagacaagtcaccgagcgacaccgcgcttggccggaaccaggtcgccgatcatgagccaggggcgtcgttggagttggagaagccaccggtgtcccgagagtcagctgcgccggcaaagcggctggacgagcagctgcagtctttctcgttccttgagagcgtcgtccctggggttgcttttcatgccggggctaacacgggcggcgaagcggggtccaggacctcgccgcagctgaccaggtcgctgtcccagagggctggtgtgggcaaggcaaaagccggcgctgccaaggtttcagaagtgagctcaattttaggtagagctagcactgctgggcttgaaaaggcagtggaggttctagatacacttggcagtagcatgacaagtttaaattccagcagtggttttgtgtcaagttctgcagcaaagggaaacaaaatatccatgctggcttttgaggtggcaaatactatagttaaaggctctaatctgatgcgttctctatcggaacctagcataaagcatctgaaggaggtggtgcttcattcagaaggtgttgaaaaccttatatccaaagattttgatgaactgctcaagatggcatctgctgacaaaagggaagagttagaagtattcacaagagaggttgttcgctttggaaaccgttgcaaggatcctcaatggcataacttggaccgctactttgaaaaactggcatctgaacgaaccccacaaagttatctgaaagaaaaggcagaatcagtgatgcagaaactggtcacctgcgttcaaaatacagttgaattatatcatgaattgcatgctttggatagatttgagcatgattgtcgtcttaaacagaaagaacaggatggcttgagttcaagaggcatttaagcagtatgatataaaagtgtctgcacttttctgaatgatacattgacatttacttctatatctcatcccactctgtgaatagagttagcttgaacttttgatgaattagagaccagtgattcctttgcaggagacaacctggatatactgaagcaggaattgaaggtccagagtaagcatgttaagagtctgaaaaagaaatcactttggtccaagaatttggaagaggtgatggtaaagcttgtagatattgtccacttcttatatttggagatatataatgccttcggtcgtcctgacagtgaagagccacaagaacctgccaaacaccataatagattgggaccagcaggccttgcattgcattatgctaatatcatcaatcagattgacaatcttgtttctcgatcatgtgcaatgcctccaaatgcaagggatacattatatcatagcttaccacctaccatcaaatctgctttccgttctaagctacaatcttttgaagtcaaggaagagcttacagcttctaggatcaaagcagaaatggaaaagactttgcgttggcttgtcccttttgctagtaacacaaatagggcacaccatggcttcggttgggttggagagtgggcaaatacaggatctgaattaaactgcaagatatcagggcagatggacatgtcccgaatggagaccttgtatcatgctgacaaggagaagaccgaagcacttatcctggagctagtcgtgtggcttcatcatcttatcagcaaatcaggaaacgccagtggaggtgtaaggtctcccatcaaatctccagtcagctcaccaacacaaaagggtgctgcaatcacactgttgtcgggcaaaacaaacaatttgccaccgattctcacccaagaggaccaggatatgctaaggggtgttaagtacaggaaatttgttccaggaataagcaaaagccaagagtttgacacaaagtcaagtcacagcaaacatagtaggttgagcaagagcaacagccactctccggccagtggcagcagaaaagacttgctcccagttaggaggtcttccatgcttccagttattgacttcgagattgacaggaccaaggctttggatctaattgacaggcttgacaacctaaaagtacaatgagcatgaagcttattgtggtcatccgcagttcttgaaaccccagccgcgatataaacagttatcgtgtatcagcagcaagaccgcccgttaggctctgcggttacaagataacaaacagtatgataagttggtgtctcagatcctgtaccgaatagaataggaaaaaatgttgtaaaaattacctgtcgtttctacctgtacaagaaatggaaagtgcagtttttaagaaaaaaaggagggtgaaagggatctaggtgttctatgttttcatggccattagactggaatggtgtgtatgaaccatagtactcccgtcccaaaatattagtcgttttagctcttgatttttatatatctatattcaaatggatgatgaatctagataaatatataaaacaaatacattgattattgtatgaatcaactaaaaagataaataaattttattttgagatgaagggagtatctttttttgcagaaaaaaataaaagcagggaacttagtgtcaatttacccagttccccaatctaattgatcattcataagtataagagcaactaaatt

SEQ ID NO: 73027 - DNA, 3062 bp, Zea Mays
cttcccctgaccgccgccgtcaccgccgagcacacctctagtcagcttccactggagcacgccaccccgaattttctcccggagtcgttgccctcctctcctacccccgtacactaaagctggttcgcagatccatccggacttgatcggttccttcttttatttcttgcccatagagcccaaacattattggatggactctgtcacttgctgcgacggcggcaaggaattggaataggacgaggtggggatcacgggctgcgacggcggcaagaaattggaaaaggacggcgtggggatcagggtattcgtcttgggaaaggggatggggggtctctgctcgaaggtctcagctgtagacaagtcaccgagcgacaccgcgcttggccggaaccaggtcgccgatcatgagccaggggcgtcgttggagttggagaagccaccggtgtcccgagagtcagctgcgccggcaaagcggctggacgagcagctgcagtctttctcgttccttgagagcgtcgtccctggggttgcttttcatgccggggctaacacgggcggcgaagcggggtccaggacctcgccgcagctgaccaggtcgctgtcccagagggctggtgtgggcaaggcaaaagccggcgctgccaaggtttcagaagtgagctcaattttaggtagagctagcactgctgggcttgaaaaggcagtggaggttctagatacacttggcagtagcatgacaagtttaaattccagcagtggttttgtgtcaagttctgcagcaaagggaaacaaaatatccatgctggcttttgaggtggcaaatactatagttaaaggctctaatctgatgcgttctctatcggaacctagcataaagcatctgaaggaggtggtgcttcattcagaaggtgttgaaaaccttatatccaaagattttgatgaactgctcaagatggcatctgctgacaaaagggaagagttagaagtattcacaagagaggttgttcgctttggaaaccgttgcaaggatcctcaatggcataacttggaccgctactttgaaaaactggcatctgaacgaaccccacaaagttatctgaaagaaaaggcagaatcagtgatgcagaaactggtcacctgcgttcaaaatacagttgaattatatcatgaattgcatgctttggatagatttgagcatgattgtcgtcttaaacagaaagaacaggatggcttgagttcaagaggtcagtttcatcaacttcaaatacggaactaaataaatattatggctgtagcataaacaaattgtgtctcagattctgctcaatttccacaggcatttaagcagtatgatataaaagtgtctgcacttttctgaatgatacattgacatttacttctatatctcatcccactctgtgaatagagttagcttgaacttttgatgaattagagaccagtgattcctttgcaggagacaacctggatatactgaagcaggaattgaaggtccagagtaagcatgttaagagtctgaaaaagaaatcactttggtccaagaatttggaagaggtgatggtaaagcttgtagatattgtccacttcttatatttggagatatataatgccttcggtcgtcctgacagtgaagagccacaagaacctgccaaacaccataatagattgggaccagcaggccttgcattgcattatgctaatatcatcaatcagattgacaatcttgtttctcgatcatgtgcaatgcctccaaatgcaagggatacattatatcatagcttaccacctaccatcaaatctgctttccgttctaagctacaatcttttgaagtcaaggaagagcttctaggatcaaagcagaaatggaaaagactttgcgttggcttgtcccttttgctagtaacacaaatagggcacaccatggcttcggttgggttggagagtgggcaaatacaggatctgaattaaactgcaagatatcagggcagatggacatgtcccgaatggagaccttgtatcatgctgacaaggagaagaccgaagcacttatcctggagctagtcgtgtggcttcatcatcttatcagcaaatcaggaaacgccagtggaggtgtaaggtctcccatcaaatctccagtcagctcaccaacacaaaagggtgctgcaatcacactgttgtcgggcaaaacaaacaatttgccaccgattctcacccaagaggaccaggatatgctaaggggtgttaagtacaggaaatttgttccaggaataagcaaaagccaagagtttgacacaaagtcaagtcacagcaaacatagtaggttgagcaagagcaacagccactctccggccagtggcagcagaaaagacttgctcccagttaggaggtcttccatgcttccagttattgacttcgagattgacaggaccaaggctttggatctaattgacaggcttgacaacctaaaagtacaatgagcatgaagcttattgtggtcatccgcagttcttgaaaccccagccgcgatataaacagttatcgtgtatcagcagcaagaccgcccgttaggctctgcggttacaagataacaaacagtatgataagttggtgtctcagatcctgtaccgaatagaataggaaaaaatgttgtaaaaattacctgtcgtttctacctgtacaagaaatggaaagtgcagtttttaagaaaaaaaggagggtgaaagggatctaggtgttctatgttttcatggccattagactggaatggtgtgtatgaaccatagtactcccgtcccaaaatattagtcgttttagctcttgatttttatatatctatattcaaatggatgatgaatctagataaatatataaaacaaatacattgattattgtatgaatcaactaaaaagataaataaattttattttgagatgaagggagtatctttttttgcagaaaaaaataaaagcagggaacttagtgtcaatttacccagttccccaatctaattgatcattcataagtataagagcaactaaatt

SEQ ID NO: 73028 - DNA, 989 bp, Zea Mays
actccttcaatactaaggaaaagaaaacgtgataaagcaacacctgcttcgggtaaatgagttaaagacaggtggagtaagcaatgatagcttttacactcctaatggaacgaatgggaaggatactacttctccaaggtcgtttaaaaactgctgcatcttttttgtcgctgggttctgttaatgggttattgacttctgcaaggagctttgattcttcaccaccctatcagaagaaaaggtcaaaaagaatggccatcatcaaatcagttgagaaacagctagatttttcagcagatggactggatacttctggttctgagattatgaactctccttgccataattcccaaggaattgatctcaatcttatgaagccatacaggacttagaatcccgtcctaactaaccagcctcatgcaaatgtcctggttcatgccaaaatccaaatcaaacaccttcagtggggacaagaccttaccgacagttaccctgtcatctcatgtaatcaggggtgtacaaaatactgtctaaattgaaagcacattccatagaagattacattgtttgctgcattttgtgaacttatagctagaagttcagattatagaaacccacagctgtgtacaaagaagaaaaacatagctttagaaacatatagagcttcccagtggaatgtcaaattgttcttagtttcttttattgcgcgcgtcccacatgttgcgaaacagcaagggtctgctcattttgtaacaataaagcctgatttgtggcctttcttgggatgctataatagtaaggaagaataatgacccacggtgcttgacgcccacttgcgttgtaggcatggaacgggggcacctagcttgttctacaacgctgtatattttgaattggtgcgactttgttgttcttttttcctcccccttatatcttatgaaacaagatcctttttgatctgtgctctgaaataaaataattcaattatg

SEQ ID NO: 73029 - DNA, 3050 bp, Zea Mays
tggattccccgccacaaatccacgcacgcacctgcactgctggtcactgtcgtcccggacgggcgtccccttcccgtgctgctgctttttcttcgtcgtaatccccgtccagcgagctgcagcgcaccacagtccacaaactgctgatcgatcctagctgctaggctggctggagcaggaattgaagcaggcagctagctagctagcattgcgtgatgaagaagaacaactccagcattgagagcacgggcggcggcggcggcacggtgtcgggatccggctccggctccggctccttcaacctccggaacctgtccaaggtcatcctcccgccgctcggcgggccgtccggcggccaaagccagtcgcatggcgggtcggacaagtgggtcgtctcgccgctcgactccagatacaggtggtgggatacgttcatggtggtcctggtggcgtactcggcgtgggtgtacccgttcgaggtggccttcatgaacgcgtcccccaagggcgggctggaggtggcggacatcgtcgtggacctcttcttcgccgtcgacatagtgctcaccttcttcgttgcctacatcgacggcaggacccagctcctcgtccgtgacaggaagaagataacactcaggtacctatcgacgttcttcatcatggacgtggcatcgacgatcccgttccagggccttgcctacctcatcaccggcgaggtcagggaaaacgccgtgtacagtatgctgggcgtcctacgcctttggcgtctgcgaagggtcaagcagttcttcaccaggctcgagaaggacatccgcttcagctacttctggatccgcagcgcgcgtctcgtcgcggtgaccttgttcctggtccactgcgccgggtgcctgtactacctgatcgccgaccggtacccggaccggcagaagacgtggatcggcgcggtgatccccaacttccggcaggccagcctgcggatccgctacatctcttccatctactggtccatcaccaccatgaccaccgtcggctacggcgacctgcacgcccagaacaacgtcgagatgatcttcaacattttctacatgctcttcaacctcgggctcaccgcctacctcatcggcaacatgaccaacctcgtcgtcgagggcacccgccgcaccatggagtttaggaacagcatcagggcggcgtcgagcttcgtgggccggaaccacctgcctccgcggctgaagcagcagatcctggcctacatgtgcctcaagttcagggcggagagcctgaaccagcagcagctcatggaccagctgcccaagtccatctgcaagagcatctgcgagcacctcttcgtgccggtcgtcaaggacgtctacctcttcaggggggtctcaagagaaatgctcctgtccctggtcaccaagatgaaaccggagtacatcccgcccaaggaggacgtgatagtgcagaacgaggccccggacgacgtgtacgtcgtcgtctccggcgaggtggaggtcatactgttcgacggcatctacgagcaggtgcaggccacgctgggggcgcgggacatcttcggcgaggtgagcgcgctgagcgaccgggcgcaggccttcacgttccggacgaggactctcagccagctgctgcggctgaagcaggctacgctcaaggaggccatgcagagcaggcccgaagacagcgtcgtcgtcatcaagaacttcctcaagcatcaggtcgagatgcatggcatgaaggtcgaggacttgctgggagacaacaccggcgagcacgacgacgacgcgaatgtgctgacggtcgccgcgatgggaaacagcggcttactcgaggacctcctcagggcaggcaaggacgccgacgtcggtgacgccaagggcagaacagcattgcacatcgcggcgtccaaggggtacgaggactgcgtgctggtgctactcaagcacgcgtgcaatgtgaacatcagggacgcgcagggcaacacggcgatgtggaacgccatcgcggcggggcaccacaagaccttcaacctcctgtaccaattcgggcgcgcgtcgaacccgcgcgccggcggagacgtgatgtgcctcgcggcgcgccgcggccacctcggcgcgctccaggagctcctcaagctcggcctggacgtggactcggaggaccacgacggcgccaccgcgctgcgcgtcgcgatggccgagggccacgcggatgcggccaggttcctgatattgaacggggccagcgtggacaaggcgagcctcgacgacgacggctcaggttcaggctccggctctggcgccgcgcggctagcaatgtcgcccaccgagctgcgcgagctgctgcagaagcgggagctcggccactcgataacgatccacgactcgccagcggtggtcccgaacggcggctcgtcggggcacagccgtccaggaagattacagagcacaagttcggacagccagcgctggcctcgggtgagcgtatacaagggccaccctttcctcagaaaccgcacctctgaagctggcaagctgatcaacctaccaggcaccatggaagaattcagagccatcgtcggtgagaaactgaaagttgacgcggagaaggcgttgatcgtgagcgacgaaggagcggagatcgactcgatcgacgtgatccgggacaacgacaagctgttcatggtcaccgaagaagatctgaggcggctggcatcaatggactggctgtcgtgcgagtgatttggttcctcccaagataattggaggctaaatatagaatacagtacaagagtattgtgcttctacgatgtctaggattgatagattgatggcaactactgagtggcatgagctctatcgagcgactaatttgcaggcaatgtgtaccatgagttcggaccactgtccgttattaatgcaaggtcattcttcttgtaatttctataaggggtttcattttgaatcctattgggtacacactgacgggttcaaagatgtagttcaacaagcttggacggccacaattaactc

SEQ ID NO: 73030 - DNA, 2575 bp, Zea Mays
ttttcaacaagattcacgaagataatcaaggcaagtgtggtgggaagatccactgttgtagaggtggactctttggctcaaagaagatccaagtcttacagagaagcaacaacatcgaaagagtcggcttcaccagcactagaatctagcctaatcgataaggtacctatcgacgttcttcatcatggacgtggcatcgacgatcccgttccagggccttgcctacctcatcaccggcgaggtcagggaaaacgccgtgtacagtatgctgggcgtcctacgcctttggcgtctgcgaagggtcaagcagttcttcaccaggctcgagaaggacatccgcttcagctacttctggatccgcagcgcgcgtctcgtcgcggtgaccttgttcctggtccactgcgccgggtgcctgtactacctgatcgccgaccggtacccggaccggcagaagacgtggatcggcgcggtgatccccaacttccggcaggccagcctgcggatccgctacatctcttccatctactggtccatcaccaccatgaccaccgtcggctacggcgacctgcacgcccagaacaacgtcgagatgatcttcaacattttctacatgctcttcaacctcgggctcaccgcctacctcatcggcaacatgaccaacctcgtcgtcgagggcacccgccgcaccatggagtttaggaacagcatcagggcggcgtcgagcttcgtgggccggaaccacctgcctccgcggctgaagcagcagatcctggcctacatgtgcctcaagttcagggcggagagcctgaaccagcagcagctcatggaccagctgcccaagtccatctgcaagagcatctgcgagcacctcttcgtgccggtcgtcaaggacgtctacctcttcaggggggtctcaagagaaatgctcctgtccctggtcaccaagatgaaaccggagtacatcccgcccaaggaggacgtgatagtgcagaacgaggccccggacgacgtgtacgtcgtcgtctccggcgaggtggaggtcatactgttcgacggcatctacgagcaggtgcaggccacgctgggggcgcgggacatcttcggcgaggtgagcgcgctgagcgaccgggcgcaggccttcacgttccggacgaggactctcagccagctgctgcggctgaagcaggctacgctcaaggaggccatgcagagcaggcccgaagacagcgtcgtcgtcatcaagaacttcctcaagcatcaggtcgagatgcatggcatgaaggtcgaggacttgctgggagacaacaccggcgagcacgacgacgacgcgaatgtgctgacggtcgccgcgatgggaaacagcggcttactcgaggacctcctcagggcaggcaaggacgccgacgtcggtgacgccaagggcagaacagcattgcacatcgcggcgtccaaggggtacgaggactgcgtgctggtgctactcaagcacgcgtgcaatgtgaacatcagggacgcgcagggcaacacggcgatgtggaacgccatcgcggcggggcaccacaagaccttcaacctcctgtaccaattcgggcgcgcgtcgaacccgcgcgccggcggagacgtgatgtgcctcgcggcgcgccgcggccacctcggcgcgctccaggagctcctcaagctcggcctggacgtggactcggaggaccacgacggcgccaccgcgctgcgcgtcgcgatggccgagggccacgcggatgcggccaggttcctgatattgaacggggccagcgtggacaaggcgagcctcgacgacgacggctcaggttcaggctccggctctggcgccgcgcggctagcaatgtcgcccaccgagctgcgcgagctgctgcagaagcgggagctcggccactcgataacgatccacgactcgccagcggtggtcccgaacggcggctcgtcggggcacagccgtccaggaagattacagagcacaagttcggacagccagcgctggcctcgggtgagcgtatacaagggccaccctttcctcagaaaccgcacctctgaagctggcaagctgatcaacctaccaggcaccatggaagaattcagagccatcgtcggtgagaaactgaaagttgacgcggagaaggcgttgatcgtgagcgacgaaggagcggagatcgactcgatcgacgtgatccgggacaacgacaagctgttcatggtcaccgaagaagatctgaggcggctggcatcaatggactggctgtcgtgcgagtgatttggttcctcccaagataattggaggctaaatatagaatacagtacaagagtattgtgcttctacgatgtctaggattgatagattgatggcaactactgagtggcatgagctctatcgagcgactaatttgcaggcaatgtgtaccatgagttcggaccactgtccgttattaatgcaaggtcattcttcttgtaatttctataaggggtttcattttgaatcctattgggtacacactgacgggttcaaagatgtagttcaacaagcttggacggccacaattaactc

SEQ ID NO: 73031 - DNA, 2437 bp, Zea Mays
caagattcacgaagataatcaagggtacctatcgacgttcttcatcatggacgtggcatcgacgatcccgttccagggccttgcctacctcatcaccggcgaggtcagggaaaacgccgtgtacagtatgctgggcgtcctacgcctttggcgtctgcgaagggtcaagcagttcttcaccaggctcgagaaggacatccgcttcagctacttctggatccgcagcgcgcgtctcgtcgcggtgaccttgttcctggtccactgcgccgggtgcctgtactacctgatcgccgaccggtacccggaccggcagaagacgtggatcggcgcggtgatccccaacttccggcaggccagcctgcggatccgctacatctcttccatctactggtccatcaccaccatgaccaccgtcggctacggcgacctgcacgcccagaacaacgtcgagatgatcttcaacattttctacatgctcttcaacctcgggctcaccgcctacctcatcggcaacatgaccaacctcgtcgtcgagggcacccgccgcaccatggagtttaggaacagcatcagggcggcgtcgagcttcgtgggccggaaccacctgcctccgcggctgaagcagcagatcctggcctacatgtgcctcaagttcagggcggagagcctgaaccagcagcagctcatggaccagctgcccaagtccatctgcaagagcatctgcgagcacctcttcgtgccggtcgtcaaggacgtctacctcttcaggggggtctcaagagaaatgctcctgtccctggtcaccaagatgaaaccggagtacatcccgcccaaggaggacgtgatagtgcagaacgaggccccggacgacgtgtacgtcgtcgtctccggcgaggtggaggtcatactgttcgacggcatctacgagcaggtgcaggccacgctgggggcgcgggacatcttcggcgaggtgagcgcgctgagcgaccgggcgcaggccttcacgttccggacgaggactctcagccagctgctgcggctgaagcaggctacgctcaaggaggccatgcagagcaggcccgaagacagcgtcgtcgtcatcaagaacttcctcaagcatcaggtcgagatgcatggcatgaaggtcgaggacttgctgggagacaacaccggcgagcacgacgacgacgcgaatgtgctgacggtcgccgcgatgggaaacagcggcttactcgaggacctcctcagggcaggcaaggacgccgacgtcggtgacgccaagggcagaacagcattgcacatcgcggcgtccaaggggtacgaggactgcgtgctggtgctactcaagcacgcgtgcaatgtgaacatcagggacgcgcagggcaacacggcgatgtggaacgccatcgcggcggggcaccacaagaccttcaacctcctgtaccaattcgggcgcgcgtcgaacccgcgcgccggcggagacgtgatgtgcctcgcggcgcgccgcggccacctcggcgcgctccaggagctcctcaagctcggcctggacgtggactcggaggaccacgacggcgccaccgcgctgcgcgtcgcgatggccgagggccacgcggatgcggccaggttcctgatattgaacggggccagcgtggacaaggcgagcctcgacgacgacggctcaggttcaggctccggctctggcgccgcgcggctagcaatgtcgcccaccgagctgcgcgagctgctgcagaagcgggagctcggccactcgataacgatccacgactcgccagcggtggtcccgaacggcggctcgtcggggcacagccgtccaggaagattacagagcacaagttcggacagccagcgctggcctcgggtgagcgtatacaagggccaccctttcctcagaaaccgcacctctgaagctggcaagctgatcaacctaccaggcaccatggaagaattcagagccatcgtcggtgagaaactgaaagttgacgcggagaaggcgttgatcgtgagcgacgaaggagcggagatcgactcgatcgacgtgatccgggacaacgacaagctgttcatggtcaccgaagaagatctgaggcggctggcatcaatggactggctgtcgtgcgagtgatttggttcctcccaagataattggaggctaaatatagaatacagtacaagagtattgtgcttctacgatgtctaggattgatagattgatggcaactactgagtggcatgagctctatcgagcgactaatttgcaggcaatgtgtaccatgagttcggaccactgtccgttattaatgcaaggtcattcttcttgtaatttctataaggggtttcattttgaatcctattgggtacacactgacgggttcaaagatgtagttcaacaagcttggacggccacaattaactc

SEQ ID NO: 73032 - DNA, 2454 bp, Zea Mays
cgaaagagtcggcttcaccagcactagaatctagcctaatcgataaggtacctatcgacgttcttcatcatggacgtggcatcgacgatcccgttccagggccttgcctacctcatcaccggcgaggtcagggaaaacgccgtgtacagtatgctgggcgtcctacgcctttggcgtctgcgaagggtcaagcagttcttcaccaggctcgagaaggacatccgcttcagctacttctggatccgcagcgcgcgtctcgtcgcggtgaccttgttcctggtccactgcgccgggtgcctgtactacctgatcgccgaccggtacccggaccggcagaagacgtggatcggcgcggtgatccccaacttccggcaggccagcctgcggatccgctacatctcttccatctactggtccatcaccaccatgaccaccgtcggctacggcgacctgcacgcccagaacaacgtcgagatgatcttcaacattttctacatgctcttcaacctcgggctcaccgcctacctcatcggcaacatgaccaacctcgtcgtcgagggcacccgccgcaccatggagtttaggaacagcatcagggcggcgtcgagcttcgtgggccggaaccacctgcctccgcggctgaagcagcagatcctggcctacatgtgcctcaagttcagggcggagagcctgaaccagcagcagctcatggaccagctgcccaagtccatctgcaagagcatctgcgagcacctcttcgtgccggtcgtcaaggacgtctacctcttcaggggggtctcaagagaaatgctcctgtccctggtcaccaagatgaaaccggagtacatcccgcccaaggaggacgtgatagtgcagaacgaggccccggacgacgtgtacgtcgtcgtctccggcgaggtggaggtcatactgttcgacggcatctacgagcaggtgcaggccacgctgggggcgcgggacatcttcggcgaggtgagcgcgctgagcgaccgggcgcaggccttcacgttccggacgaggactctcagccagctgctgcggctgaagcaggctacgctcaaggaggccatgcagagcaggcccgaagacagcgtcgtcgtcatcaagaacttcctcaaggtcgagatgcatggcatgaaggtcgaggacttgctgggagacaacaccggcgagcacgacgacgacgcgaatgtgctgacggtcgccgcgatgggaaacagcggcttactcgaggacctcctcagggcaggcaaggacgccgacgtcggtgacgccaagggcagaacagcattgcacatcgcggcgtccaaggggtacgaggactgcgtgctggtgctactcaagcacgcgtgcaatgtgaacatcagggacgcgcagggcaacacggcgatgtggaacgccatcgcggcggggcaccacaagaccttcaacctcctgtaccaattcgggcgcgcgtcgaacccgcgcgccggcggagacgtgatgtgcctcgcggcgcgccgcggccacctcggcgcgctccaggagctcctcaagctcggcctggacgtggactcggaggaccacgacggcgccaccgcgctgcgcgtcgcgatggccgagggccacgcggatgcggccaggttcctgatattgaacggggccagcgtggacaaggcgagcctcgacgacgacggctcaggttcaggctccggctctggcgccgcgcggctagcaatgtcgcccaccgagctgcgcgagctgctgcagaagcgggagctcggccactcgataacgatccacgactcgccagcggtggtcccgaacggcggctcgtcggggcacagccgtccaggaagattacagagcacaagttcggacagccagcgctggcctcgggtgagcgtatacaagggccaccctttcctcagaaaccgcacctctgaagctggcaagctgatcaacctaccaggcaccatggaagaattcagagccatcgtcggtgagaaactgaaagttgacgcggagaaggcgttgatcgtgagcgacgaaggagcggagatcgactcgatcgacgtgatccgggacaacgacaagctgttcatggtcaccgaagaagatctgaggcggctggcatcaatggactggctgtcgtgcgagtgatttggttcctcccaagataattggaggctaaatatagaatacagtacaagagtattgtgcttctacgatgtctaggattgatagattgatggcaactactgagtggcatgagctctatcgagcgactaatttgcaggcaatgtgtaccatgagttcggaccactgtccgttattaatgcaaggtcattcttcttgtaatttctataaggggtttcattttgaatcctattgggtacacactgacgggttcaaagatgtagttcaacaagcttggacggccacaattaactc

SEQ ID NO: 73033 - DNA, 2286 bp, Zea Mays
atgcgggaaccctcacctcggccttcttggggtctctcgctggtgctcgaccagcattgggctatgagggttgggattgctgggttggtctttggagaaaccttgcttggttggtaccaggcgggcgacgacggcttttcgacgtcgtttctccctctcgaaggcgcggcccagaagacctcgagtttgtacctatcgacgttcttcatcatggacgtggcatcgacgatcccgttccagggccttgcctacctcatcaccggcgaggtcagggaaaacgccgtgtacagtatgctgggcgtcctacgcctttggcgtctgcgaagggtcaagcagttcttcaccaggctcgagaaggacatccgcttcagctacttctggatccgcagcgcgcgtctcgtcgcggtgaccttgttcctggtccactgcgccgggtgcctgtactacctgatcgccgaccggtacccggaccggcagaagacgtggatcggcgcggtgatccccaacttccggcaggccagcctgcggatccgctacatctcttccatctactggtccatcaccaccatgaccaccgtcggctacggcgacctgcacgcccagaacaacgtcgagatgatcttcaacattttctacatgctcttcaacctcgggctcaccgcctacctcatcggcaacatgaccaacctcgtcgtcgagggcacccgccgcaccatggagtttaggaacagcatcagggcggcgtcgagcttcgtgggccggaaccacctgcctccgcggctgaagcagcagatcctggcctacatgtgcctcaagttcagggcggagagcctgaaccagcagcagctcatggaccagctgcccaagtccatctgcaagagcatctgcgagcacctcttcgtgccggtcgtcaaggacgtctacctcttcaggggggtctcaagagaaatgctcctgtccctggtcaccaagatgaaaccggagtacatcccgcccaaggaggacgtgatagtgcagaacgaggccccggacgacgtgtacgtcgtcgtctccggcgaggtggaggtcatactgttcgacggcatctacgagcaggtgcaggccacgctgggggcgcgggacatcttcggcgaggtgagcgcgctgagcgaccgggcgcaggccttcacgttccggacgaggactctcagccagctgctgcggctgaagcaggctacgctcaaggaggccatgcagagcaggcccgaagacagcgtcgtcgtcatcaagaacttcctcaagcatcaggtcgagatgcatggcatgaaggtcgaggacttgctgggagacaacaccggcgagcacgacgacgacgcgaatgtgctgacggtcgccgcgatgggaaacagcggcttactcgaggacctcctcagggcaggcaaggacgccgacgtcggtgacgccaagggcagaacagcattggtggaggtggaggcgctcgtgatccaggggcccaagctgtcgaccatcctcagccaggtgaagaagctggaggcgtccgtgctggtgctcagccaacgcaaaccctcgcctttctgctgcttcctgcggagcaggagcagcagcgaggaggaggagctggtggaggagtgcataaaccgggcggagtgcctgacgctggcggtgcggcggcggagcaagggcgtgggcggctacctcgtgagcacccggtggcagaagaacttctggctgctcgcctgaccggtccacgaggactccccctcctcatcctcatcctttgacgcaacgcaagagttttacttacttcccgggctaatcgtttttacaaagtccaataataagtaaccaccaccaccaccactactgcatctgtttgttgatctgtaacctccagtgtcctagggtgtgtgccagccagtgtgcgtgtgcctgatcctctctctctccccacgatgtggtgctgtattctatgtatcgtcttggtttagctgtgctgctgtagcctgtagagtgtaagctagctgttgtgtagtgaaggcacgcagaagctgagccgatccgtttgccctgtctgttctgcgggaatctgtctgttttgcagagcggggatgcagaggcgcgggacggggacgtcagtacactgcgttgcgttgcgttgcgttgcataaactacgacttgtgtattgtgcttgtgcgatgtgtttgtttgcttgcttgcttgctacaatggttggtacagagttccataatgaagtgatgatgcgttttgactaactgtctccccct

SEQ ID NO: 73034 - DNA, 786 bp, Zea Mays
aagctgtcaactttaagaagaacaggggctttaccagaggacagtgtaggtgcagcccagccatgcagggggatcaaaagcttcctgcggagcaggagcagcagcgaggaggaggagctggtggaggagtgcataaaccgggcggagtgcctgacgctggcggtgcggcggcggagcaagggcgtgggcggctacctcgtgagcacccggtggcagaagaacttctggctgctcgcctgaccggtccacgaggactccccctcctcatcctcatcctttgacgcaacgcaagagttttacttacttcccgggctaatcgtttttacaaagtccaataataagtaaccaccaccaccaccactactgcatctgtttgttgatctgtaacctccagtgtcctagggtgtgtgccagccagtgtgcgtgtgcctgatcctctctctctccccacgatgtggtgctgtattctatgtatcgtcttggtttagctgtgctgctgtagcctgtagagtgtaagctagctgttgtgtagtgaaggcacgcagaagctgagccgatccgtttgccctgtctgttctgcgggaatctgtctgttttgcagagcggggatgcagaggcgcgggacggggacgtcagtacactgcgttgcgttgcgttgcgttgcataaactacgacttgtgtattgtgcttgtgcgatgtgtttgtttgcttgcttgcttgctacaatggttggtacagagttccataatgaagtgatgatgcgttttgactaactgtctccccct

SEQ ID NO: 73035 - DNA, 734 bp, Zea Mays
gaaaaaaaagtcaccttttcaaccacatcttcctgcggagcaggagcagcagcgaggaggaggagctggtggaggagtgcataaaccgggcggagtgcctgacgctggcggtgcggcggcggagcaagggcgtgggcggctacctcgtgagcacccggtggcagaagaacttctggctgctcgcctgaccggtccacgaggactccccctcctcatcctcatcctttgacgcaacgcaagagttttacttacttcccgggctaatcgtttttacaaagtccaataataagtaaccaccaccaccaccactactgcatctgtttgttgatctgtaacctccagtgtcctagggtgtgtgccagccagtgtgcgtgtgcctgatcctctctctctccccacgatgtggtgctgtattctatgtatcgtcttggtttagctgtgctgctgtagcctgtagagtgtaagctagctgttgtgtagtgaaggcacgcagaagctgagccgatccgtttgccctgtctgttctgcgggaatctgtctgttttgcagagcggggatgcagaggcgcgggacggggacgtcagtacactgcgttgcgttgcgttgcgttgcataaactacgacttgtgtattgtgcttgtgcgatgtgtttgtttgcttgcttgcttgctacaatggttggtacagagttccataatgaagtgatgatgcgttttgactaactgtctccccct

SEQ ID NO: 73036 - DNA, 2937 bp, Zea Mays
gcggcggagatagtcgtcgtcgccgtcgtgaccttgcttctcgggctaacgtcgtgcatggcagagagttcggtatggagggaggaggaccggcgcgtccgaggagaggtgacgtacgagcagagggccctggtgctggacggcgccaggaggatgctgttcgccggggagatgcactacccaaggagcacgccggagatgtggccaaaactcattgctaaagcaaaggagggcgggcttgacgtgatacagacctacgtattctggaacgttcatgagcctatccagggccagtacaacttcgagggaagatatgatcttgtcaggttcatcaaggaaattcaagctcagggtctctacgtaagcctcaggatcggtcccttcatagagtctgaatggaaatatggaggatttccattttggctacatgatgtcccaaacattaccttccgaagtgataacgaaccctttaagcaacacatgcaaagatttgttacagatatagtaaatatgatgaaacatgaaggactttactacccacaaggaggtcccattataacttctcagattgagaacgaataccaaatggttgagcctgcatttggctcaagtgggcaacgttacgtcagttgggcagctgcaatggctgtagaccttcaaacaggtgttccctggacgatgtgcaagcaaaacgatgctccagatccagttgtcggtattcattcctatactattccagttaacttccaaaatgatagcagaaactatcttatatacggcaacgatacaaaattgaggtctccacaagatatcacctttgcagttgcattatttatagcaaggaaaaatggaagctatgtgagctactacatgtatcacggaggaacaaactttgggaggtttgcttcttcatatgtaacaacaagctactacgatggagctcctcttgatgaatatggtttgatatggcaaccaacatggggtcatctcagagaactgcatgctgcagtaaaacagtcatcagaaccactactatttgggacatactccaatctttctataggtcaagaacaagaggcacatatcttcgaaacagaaactcaatgtgtggctttcctagtcaactttgatcagcatcatatatcagaagtagtatttcgtaatatatcactggaactggccccaaaatcaatcagcattctcttagattgtaagcaggtagtttttgaaacagctaaggtaaatgctcagcatggatcaagaacagctgaagaagtgcagtcttttagtgacattagtacttggaaggcattcaaggaaccaattcctcaagatgtgagtaaatctgcatacagtggaaaccgactctttgaacatctatcaactactaaagatgctaccgattatctatggtacattgttggctatgaatatacaccgagtgatgatggccaacttgtgttgattaatgttgagtcacgagcacatatattgcatgcctttgtcaacaatgcatatgtgggtagaatacatggaagccatggtggacctgccaatataattttcagcacaaatatttctctacaggaaggaccaaacaccatatcattgctaagtgctatggttggatcaccggattcgggtgctcatatggaaaggagagtatttggaattaggaaagtgagcatacaacagggacaagagccagaaaatctgctcaacaatgagctatgggggtaccaagttggcttattcggggaaaggaataacatctacacacaagattcaaaaattactgaatggacaactatcgacaatttgacatatagcccacttacttggtacaagactacattttccacaccagtgggaaatgacgcagtgacactgaaccttactggtatgggtaagggtgaagtatgggtcaatggagagagtatcggacgatattgggtctctttcaaggctcctagtggcaatccttcgcaatcactgtatcacataccacgagaatttctaaaccctcaagacaataccctagtcctttttgaggaaatgggaggcaacccacagctaataacagtgaacacaatgtcggtatcaagagtgtgtggcaatgtgaatgagctctcagctccatcacttcaatataaggataaggaaccagcagtagatctctggtgtccagaaggcaaacatatatcagcaattgagtttgcaagctacggaggtcctacgggtgactgcaaaaaatttggtttcggaagatgccatgcaggatcatcagaatctgttgtaaaacaggcttgcttgggtaaaagtggatgctctgttcccgtaacacctatcaaatttggaggcgatccatgtcctggaatccaaaaatctcttctagttgtggcgaactacaggtgacactagacagtcacacaagtatacatcatagaaaagaagttggacgagtataaaaaataaaaagatgagttacaaaatcaacgagcaatagagtggagggaaagtataagtcaaaacatatagtaattgttattaggtaggcaattgatcacttgaggcttagttggtagaccccatgtaccgattgttttgacctggcatagatatgtgttatctgtatatcgatttcacatgaatggcaactcattgttttatggtttatggtgatttagaaatatgtgatatcattcatttgtagtgcctcccatcttcagctcattgtctatgatttagaaatatgatatatcattcatttctagcgcctcccatctaatcgcatccccttgcgcacgacagaattgccatcggaaactaaaaccctttgcgtcaccgcatgggtggaacaaatgtgcatcaacatcaatgattaactaaggggaagaacatttacatactattccatactaaattggtaggtagaat

SEQ ID NO: 73037 - DNA, 2901 bp, Zea Mays
gcggcggagatagtcgtcgtcgccgtcgtgaccttgcttctcgggctaacgtcgtgcatggcagagagttcggtatggagggaggaggaccggcgcgtccgaggagaggtgacgtacgagcagagggccctggtgctggacggcgccaggaggatgctgttcgccggggagatgcactacccaaggagcacgccggagatgtggccaaaactcattgctaaagcaaaggagggcgggcttgacgtgatacagacctacgtattctggaacgttcatgagcctatccagggccagtacaacttcgagggaagatatgatcttgtcaggttcatcaaggaaattcaagctcagggtctctacgtaagcctcaggatcggtcccttcatagagtctgaatggaaatatggaggatttccattttggctacatgatgtcccaaacattaccttccgaagtgataacgaaccctttaagcaacacatgcaaagatttgttacagatatagtaaatatgatgaaacatgaaggactttactacccacaaggaggtcccattataacttctcagattgagaacgaataccaaatggttgagcctgcatttggctcaagtgggcaacgttacgtcagttgggcagctgcaatggctgtagaccttcaaacaggtgttccctggacgatgtgcaagcaaaacgatgctccagatccagttatcaatacgtgcaacgggcttatttgtggagaaacgtttgttggaccaaactcagctaacaagcctgcattatggactgaaaattggacctcgcgctatcttatatacggcaacgatacaaaattgaggtctccacaagatatcacctttgcagttgcattatttatagcaaggaaaaatggaagctatgtgagctactacatgtatcacggaggaacaaactttgggaggtttgcttcttcatatgtaacaacaagctactacgatggagctcctcttgatgaatatggtttgatatggcaaccaacatggggtcatctcagagaactgcatgctgcagtaaaacagtcatcagaaccactactatttgggacatactccaatctttctataggtcaagaacaagaggcacatatcttcgaaacagaaactcaatgtgtggctttcctagtcaactttgatcagcatcatatatcagaagtagtatttcgtaatatatcactggaactggccccaaaatcaatcagcattctcttagattgtaagcaggtagtttttgaaacagctaaggtaaatgctcagcatggatcaagaacagctgaagaagtgcagtcttttagtgacattagtacttggaaggcattcaaggaaccaattcctcaagatgtgagtaaatctgcatacagtggaaaccgactctttgaacatctatcaactactaaagatgctaccgattatctatggtacattgttggtcttttccttaacattttaggtagaatacatggaagccatggtggacctgccaatataattttcagcacaaatatttctctacaggaaggaccaaacaccatatcattgctaagtgctatggttggatcaccggattcgggtgctcatatggaaaggagagtatttggaattaggaaagtgagcatacaacagggacaagagccagaaaatctgctcaacaatgagctatgggggtaccaagttggcttattcggggaaaggaataacatctacacacaagattcaaaaattactgaatggacaactatcgacaatttgacatatagcccacttacttggtacaagactacattttccacaccagtgggaaatgacgcagtgacactgaaccttactggtatgggtaagggtgaagtatgggtcaatggagagagtatcggacgatattgggtctctttcaaggctcctagtggcaatccttcgcaatcactgtatcacataccacgagaatttctaaaccctcaagacaataccctagtcctttttgaggaaatgggaggcaacccacagctaataacagtgaacacaatgtcggtatcaagagtgtgtggcaatgtgaatgagctctcagctccatcacttcaatataaggataaggaaccagcagtagatctctggtgtccagaaggcaaacatatatcagcaattgagtttgcaagctacggaggtcctacgggtgactgcaaaaaatttggtttcggaagatgccatgcaggatcatcagaatctgttgtaaaacaggcttgcttgggtaaaagtggatgctctgttcccgtaacacctatcaaatttggaggcgatccatgtcctggaatccaaaaatctcttctagttgtggcgaactacaggtgacactagacagtcacacaagtatacatcatagaaaagaagttggacgagtataaaaaataaaaagatgagttacaaaatcaacgagcaatagagtggagggaaagtataagtcaaaacatatagtaattgttattaggtaggcaattgatcacttgaggcttagttggtagaccccatgtaccgattgttttgacctggcatagatatgtgttatctgtatatcgatttcacatgaatggcaactcattgttttatggtttatggtgatttagaaatatgtgatatcattcatttgtagtgcctcccatcttcagctcattgtctatgatttagaaatatgatatatcattcatttctagcgcctcccatctaatcgcatccccttgcgcacgacagaattgccatcggaaactaaaaccctttgcgtcaccgcatgggtggaacaaatgtgcatcaacatcaatgattaactaaggggaagaacatttacatactattccatactaaattggtaggtagaat

SEQ ID NO: 73038 - DNA, 2161 bp, Zea Mays
atttccttctaagaatcctttgctattcaatttccttctcaatcttctgtcatcaaactagcctttttttctgtcaccaaacaagccctaaaagctagtacaataatttatttttttttcttaaaagttagtacagtgatttaagaaaaataaatttcagactatgggagagctaaaacaaggccgtgaacacgaccagtagaaaacggacaaacaaattcagcgtggacacaaacgcaacagctaaaataaggccgcgtgcatccatccatccatccgaccgtctatttacacatctcagtctcaaacactcaactcacaagaggcccctccggcgtacgaccggccgggtcagtcccacacaatagcagacttcttcggcgtcaccatgtcgctgtgcggcgccggtcctcccctcgagagcggcctggcagcgggcaccatcggcgccaggtagttgcctacccggacgtacccgcgcgcgtcgtaccgcccaccgtggtgcggcacgggcacaggcacgggcacgggcacgggcgccgtcgggtactggtgctggtagtggtggaaattgttctgcaacagcatgggccccgcgccggcgtgccttggtgagccgctcacgtagcccgatatgctgccgtccacgccgtgctgatgcaagcgccgcgccgccgcgtccagggtgctgaggttcggcgagctccggacgcgctgcatcccgaacccaacgcccaacgcgttggcgcgcggggagttgcccgccgagacggcgccgtgcggctgggcggagaacggcgggctcccgtcgggcgaggctggtacggtggccacgtagcgctccggctggaattggcggtgctgctgatggtggtggtgatgcgggtggaggcgcgacagaccagcgtagcgggtagacgagggcacggtgggtgcggcggccgacgggtggggcgcggtggcctgcggcgtgaagacgtagacgcggaagcgcggggacgtggtcggcgagcgcttcgcctcgaggcggtcgtactcgtccagcatgtggaccaggtcctcgtcgcaggtgacggagacgagcacgtcgagttcctcggcgagggagagcagctggtacttgatggccgcgacctccgtcttgaacatgtcctccaccttcttcttcaactctgcacagggcaacgacagacatctcggcctgctgagagccaaacggcggcaggtcacgcagcgcggcacagcgcatggagaaagcgaacaacacccaccgcggaagcagatggagcgaggcacggcgaggacgcgggtctccccgccgacgtacttgagcacgccgtcgtgcgggcggggcacgatgcggccgccgaagctgcagaggatcttgatgcggcctcccccaccagctccgcccgcgccgccgcagatgcaggtcggcgaaagatgcacgtcctcatctgtggtcgtgccctcggactccgtcgtcgtcaccattggcggcgcacccatcgcgtcttctatctcggccatggggtgccttcacttgaatcccagcagaagcagagcacgcgaaggaatatcccgtaaatatcagaccagagataacggaacgaagcgggagtggagtactaatccaaccaaccggcggcggcggcggtacgggcgacggacgaacagccgccgagcgacccagatcgagccggacaaaggaacaacaacaagggggcggaagcaagcgaagggcgacccccgagaaacttagtagaactaagttattattcgtccgggtccgggacagaggccgatgaatcttccattcgggagtggctgatcaatcttcgcctctcctcaccggcgggcgtggccggatttagggaggacggacggacggacgcgcaggtcgggggctcctagattcgaggaccagccgctagcctattcttggggcggggggggatgggatggggtggggcgattgccgatttcttcctccctccgcgcccgcggaggacttggaactggaactcacacggcggctgcggcctcgcccgcgaggcgagccggttgtgaaatgaaataggtgccccgatgccgggccgtccggacgggtgacgcgaatattcgcgtaacacttgggggggttcgtttgcgtcttgcgtgc

SEQ ID NO: 73039 - DNA, 962 bp, Zea Mays
ccctaataccctaacgcgaccaccaggggtccagtcgtccagggcaccacgcacggaggcaccaggcgtctaggcaccaggccagccgccagcccgccagacggagtgacggaccatccagaattctagattccaggcgtccaaggctccaagccatcctccggtcctcccatccaccaccggtccaccgccactccgccagccgaccactaggtcaccaggccgcaccgctgcagctcgcaatcggcggtcggaggtcggccagtcgccctcgcccaggtctccactctcccgcacccagtgacccaggtctcccgtctcccaggtatgctgtcgctgctgatgtcttcgtcggtatcggctacgtcgagcccacagtccatagagaacggtgaccatgacccaagctctaggccagcagcctcgtcccctcctctgcagattcaggcaggggacttatcatcctctccggagacgaccagctcagacaacgcaagctatccattccaattagcacagttgcctcagagtccgcttttagcacaagtggttgtgttcttagcgagcaccgcagccgacttactccagagatcttggaggcgcttatgtgctcacaagattggatgcgacgcaagtatctagatgcatctaatgctgaccaacctgaaacattttggacttgccttcaagagatgtaggaagggatgcagaagcttttactctgagcaacaagactggaattggaagagaagggtgcccttaagctccaacagcttagaagtcttatatattcaaatattaagtattgtgtattgaacaattagatttgaaggcatgattttgtccacagttttgtagaatcaatgctatgttttgtgtgatttgaaggcatgatattgccatttaatgttgaatattgttgaacatgtgataaaattatgttgggttcgatacatttgtta

SEQ ID NO: 73040 - DNA, 1273 bp, Zea Mays
ccctaataccctaacgcgaccaccaggggtccagtcgtccagggcaccacgcacggaggcaccaggcgtctaggcaccaggccagccgccagcccgccagacggagtgacggaccatccagaattctagattccaggcgtccaaggctccaagccatcctccggtcctcccatccaccaccggtccaccgccactccgccagccgaccactaggtcaccaggccgcaccgctgcagctcgcaatcggcggtcggaggtatgctgtcgctgctgatgtcttcgtcggtatcggctacgtcgagcccacagtccatagagaacggtgaccatgacccaagctctaggccagcagcctcgtcccctcctctgcagattcaggcaggggacttatcatcctctccggagacgaccagctcagacaacgcaagataatctaatgggtaaaacagtggcctcgccattcaagaagagtcgtcgcgtcaccgccaatcgaagtcgcctcgctgttgaaggaccaccagctacgcccgctaaagattcttccaccatctccagcgtagagttgttgaaatcaacggggttcgatgcacgcaaacccctctttttttacttgaatgtgttctttatttatcaggattccatgtaatatttttttatcacatctcaatgtataattgtatgctagaatttaatccgttgctaattttagattcatttgatgttagtttcagattatgtttgttaatatggtagtagtacttccaattatattttgtagctatgcattcactaatttctacatctgtagctatccattccaattagcacagttgcctcagagtccgcttttagcacaagtggttgtgttcttagcgagcaccgcagccgacttactccagagatcttggaggcgcttatgtgctcacaagattggatgcgacgcaagtatctagatgcatctaatgctgaccaacctgaaacattttggacttgccttcaagagatgtaggaagggatgcagaagcttttactctgagcaacaagactggaattggaagagaagggtgcccttaagctccaacagcttagaagtcttatatattcaaatattaagtattgtgtattgaacaattagatttgaaggcatgattttgtccacagttttgtagaatcaatgctatgttttgtgtgatttgaaggcatgatattgccatttaatgttgaatattgttgaacatgtgataaaattatgttgggttcgatacatttgtta

SEQ ID NO: 73041 - DNA, 1236 bp, Zea Mays
cgaccaccaggggtccagtcgtccagggcaccacgcacggaggcaccaggcgtctaggcaccaggccagccgccagcccgccagacggagtgacggaccatccagaattctagattccaggcgtccaaggctccaagccatcctccggtcctcccatccaccaccggtccaccgccactccgccagccgaccactaggtcaccaggccgcaccgctgcagctcgcaatcggcggtcggaggtatgctgtcgctgctgatgtcttcgtcggtatcggctacgtcgagcccacagtccatagagaacggtgaccatgacccaagctctaggccagcagcctcgtcccctcctctgcagattcaggcaggggacttatcatcctctccggagacgaccagctcagacaacgcaagtggcctcgccattcaagaagagtcgtcgcgtcaccgccaatcgaagtcgcctcgctgttgaaggaccaccagctacgcccgctaaagattcttccaccatctccagcgtagagttgttgaaatcaacggggttcgatgcacgcaaacccctctttttttacttgaatgtgttctttatttatcaggattccatgtaatatttttttatcacatctcaatgtataattgtatgctagaatttaatccgttgctaattttagattcatttgatgttagtttcagattatgtttgttaatatggtagtagtacttccaattatattttgtagctatgcattcactaatttctacatctgtagctatccattccaattagcacagttgcctcagagtccgcttttagcacaagtggttgtgttcttagcgagcaccgcagccgacttactccagagatcttggaggcgcttatgtgctcacaagattggatgcgacgcaagtatctagatgcatctaatgctgaccaacctgaaacattttggacttgccttcaagagatgtaggaagggatgcagaagcttttactctgagcaacaagactggaattggaagagaagggtgcccttaagctccaacagcttagaagtcttatatattcaaatattaagtattgtgtattgaacaattagatttgaaggcatgattttgtccacagttttgtagaatcaatgctatgttttgtgtgatttgaaggcatgatattgccatttaatgttgaatattgttgaacatgtgataaaattatgttgggttcgatacatttgtta

SEQ ID NO: 73042 - DNA, 1007 bp, Zea Mays
cgaccaccaggggtccagtcgtccagggcaccacgcacggaggcaccaggcgtctaggcaccaggccagccgccagcccgccagacggagtgacggaccatccagaattctagattccaggcgtccaaggctccaagccatcctccggtcctcccatccaccaccggtccaccgccactccgccagccgaccactaggtcaccaggccgcaccgctgcagctcgcaatcggcggtcggaggtatgctgtcgctgctgatgtcttcgtcggtatcggctacgtcgagcccacagtccatagagaacggtgaccatgacccaagctctaggccagcagcctcgtcccctcctctgcagattcaggcaggggacttatcatcctctccggagacgaccagctcagacaacgcaagtggcctcgccattcaagaagagtcgtcgcgtcaccgccaatcgaagtcgcctcgctgttgaaggaccaccagctacgcccgctaaagattcttccaccatctccagcgtagagttgttgaaatcaacgggctatccattccaattagcacagttgcctcagagtccgcttttagcacaagtggttgtgttcttagcgagcaccgcagccgacttactccagagatcttggaggcgcttatgtgctcacaagattggatgcgacgcaagtatctagatgcatctaatgctgaccaacctgaaacattttggacttgccttcaagagatgtaggaagggatgcagaagcttttactctgagcaacaagactggaattggaagagaagggtgcccttaagctccaacagcttagaagtcttatatattcaaatattaagtattgtgtattgaacaattagatttgaaggcatgattttgtccacagttttgtagaatcaatgctatgttttgtgtgatttgaaggcatgatattgccatttaatgttgaatattgttgaacatgtgataaaattatgttgggttcgatacatttgtta

SEQ ID NO: 73043 - DNA, 1211 bp, Zea Mays
cgaccaccaggggtccagtcgtccagggcaccacgcacggaggcaccaggcgtctaggcaccaggccagccgccagcccgccagacggagtgacggaccatccagaattctagattccaggcgtccaaggctccaagccatcctccggtcctcccatccaccaccggtccaccgccactccgccagccgaccactaggtcaccaggccgcaccgctgcagctcgcaatcggcggtcggagcagcctcgtcccctcctctgcagattcaggcaggggacttatcatcctctccggagacgaccagctcagacaacgcaaggggcgccgctgctgctaccgttgtcacggccggcgccactactaaagataatctaatgggtaaaacagtggcctcgccattcaagaagagtcgtcgcgtcaccgccaatcgaagtcgcctcgctgttgaaggaccaccagctacgcccgctaaagattcttccaccatctccagcgtagagttgttgaaatcaacggggttcgatgcacgcaaacccctctttttttacttgaatgtgttctttatttatcaggattccatgtaatatttttttatcacatctcaatgtataattgtatgctagaatttaatccgttgctaattttagattcatttgatgttagtttcagattatgtttgttaatatggtagtagtacttccaattatattttgtagctatgcattcactaatttctacatctgtagctatccattccaattagcacagttgcctcagagtccgcttttagcacaagtggttgtgttcttagcgagcaccgcagccgacttactccagagatcttggaggcgcttatgtgctcacaagattggatgcgacgcaagtatctagatgcatctaatgctgaccaacctgaaacattttggacttgccttcaagagatgtaggaagggatgcagaagcttttactctgagcaacaagactggaattggaagagaagggtgcccttaagctccaacagcttagaagtcttatatattcaaatattaagtattgtgtattgaacaattagatttgaaggcatgattttgtccacagttttgtagaatcaatgctatgttttgtgtgatttgaaggcatgatattgccatttaatgttgaatattgttgaacatgtgataaaattatgttgggttcgatacatttgtta

SEQ ID NO: 73044 - DNA, 1304 bp, Zea Mays
cgaccaccaggggtccagtcgtccagggcaccacgcacggaggcaccaggcgtctaggcaccaggccagccgccagcccgccagacggagtgacggaccatccagaattctagattccaggcgtccaaggctccaagccatcctccggtcctcccatccaccaccggtccaccgccactccgccagccgaccactaggtcaccaggccgcaccgctgcagctcgcaatcggcggtcggaggtatgctgtcgctgctgatgtcttcgtcggtatcggctacgtcgagcccacagtccatagagaacggtgaccatgacccaagctctaggccagcagcctcgtcccctcctctgcagattcaggcaggggacttatcatcctctccggagacgaccagctcagacaacgcaaggggcgccgctgctgctaccgttgtcacggccggcgccactactaaagataatctaatgggtaaaacagtggcctcgccattcaagaagagtcgtcgcgtcaccgccaatcgaagtcgcctcgctgttgaaggaccaccagctacgcccgctaaagattcttccaccatctccagcgtagagttgttgaaatcaacggggttcgatgcacgcaaacccctctttttttacttgaatgtgttctttatttatcaggattccatgtaatatttttttatcacatctcaatgtataattgtatgctagaatttaatccgttgctaattttagattcatttgatgttagtttcagattatgtttgttaatatggtagtagtacttccaattatattttgtagctatgcattcactaatttctacatctgtagctatccattccaattagcacagttgcctcagagtccgcttttagcacaagtggttgtgttcttagcgagcaccgcagccgacttactccagagatcttggaggcgcttatgtgctcacaagattggatgcgacgcaagtatctagatgcatctaatgctgaccaacctgaaacattttggacttgccttcaagagatgtaggaagggatgcagaagcttttactctgagcaacaagactggaattggaagagaagggtgcccttaagctccaacagcttagaagtcttatatattcaaatattaagtattgtgtattgaacaattagatttgaaggcatgattttgtccacagttttgtagaatcaatgctatgttttgtgtgatttgaaggcatgatattgccatttaatgttgaatattgttgaacatgtgataaaattatgttgggttcgatacatttgtta

SEQ ID NO: 73045 - DNA, 1666 bp, Zea Mays
gccctatcctctccctcgccctaacctcccgtcaatccggctacctgacatcagtctcctctcatgtattaagctttgaaatgagtctccttaattgacgattctggaattcggaggcctggaattcggaggcccaggaatcatgatgcagcaggctcaggcgcacacctcggcacttgcgggagcgccgtcggcgtcggcggtggcaccgacggtggctcacccgcacgatccggtgggcggggatgcgccgccgaagcaggtggctcaggcgatggagcggctgggccgtgctggccggttcatcgcggacatccggctcggcgcggaccgcctcctcgaggctcttttcgtctccggcgacgcgcccccgtacagcgtgcgccagcacgtcgacaggatggagcgtattatcgtcaaggaggatgccgccatgcgcctccactttcaggacctacgcgccctcggcaggcaattagaggagtctggagttcttaacggggcccttaaagctcaaggcaattcatggggcttgcacatgccactcgtttgtccagatggtgctgttgtagcttatgcttggaagcgtcaactagcaggtcaggctggtgcatctgctgtggacaggactaggttagctctcaaggctttcactgaccagaaaagaagattctttcctcatctagaagatgaagttgttagccatctccatgatggtcaacctggtgacaccaaaaagtcaaagttgtttaccagcaatggatatctagaggaaaaatctttgtctgaaatactgaaaaatttagaacatgaagtacctaacataaaaatattcacatactggcatctggattggtcaaaaagagcttcatcattagcatctctgttggatgatgactttgtggatccatctaaagagctgaacctgcaaaatatggacaaatcgagatctgatgctctgacaactaccatagaccaagttgctgttattgaattgctggttccttcaatatttagagctgtagtgtcattgcatcctgctggatctactgatcctgatgcagtggcattcttctctcccactgagggaggaagctatcttcatgcaaggggcacatcggtacatcatgtgtttaagcatgtaaaagaacatgctgacaaggcattgcagtacttcatcaatgcggagccgagtaaagcactacctcttcttttgcgttggattgccagctatcagactctgtttacgaaggtttgcagcaaatgcagacggcttctgatgatggacaagtctttggctttgctgttgcctcctgtccaccgcccctatcaccagacttcaaatgttggaccagatcttcaagaggcctaccacattggatgttcctcctacgatggctagctgatgcttctaagatgttcctgacattgtcattgacatagtacgtgtacaacagtcctgtgtgaaacaatgttcttttttttttggaatgtatccaacccattaggtgacatatgtatagaaacgttactggttgcttaggtacttgaagttctacgctcttgctcaaattaacctacagattaattcagattaacaaaatccagaactggtccaaacaacccagattcttgtacaggccgttatacaatcggtccaccgctg

SEQ ID NO: 73046 - DNA, 1657 bp, Zea Mays
gccctatcctctccctcgccctaacctcccgtcaatccggctacctgacatcagtctcctctcatgtattaagctttgaaatgagtctccttaattgacgattctggaattcggaggcctggaattcggaggcccaggaatcatgatgcagcaggctcaggcgcacacctcggcacttgcgggagcgccgtcggcgtcggcggtggcaccgacggtggctcacccgcacgatccggtgggcggggatgcgccgccgaagcaggtggctcaggcgatggagcggctgggccgtgctggccggttcatcgcggacatccggctcggcgcggaccgcctcctcgaggctcttttcgtctccggcgacgcgcccccgtacagcgtgcgccagcacgtcgacaggatggagcgtattatcgtcaaggaggatgccgccatgcgcctccactttcaggacctacgcgccctcggcaggcaattagaggagtctggagttcttaacggggcccttaaagctcaaggcaattcatggggcttgcacatgccactcgtttgtccagatggtgctgttgtagcttatgcttggaagcgtcaactagcaggtcaggctggtgcatctgctgtggacaggactaggttagctctcaaggctttcactgaccagaaaagaagattctttcctcatctagaagatgaagttgttagccatctccatgatggtcaacctggtgacaccaaaaagtcaaagttgtttaccagcaatggatatctagaggaaaaatctttgtctgaaatactgaaaaatttagaacatgaagtacctaacataaaaatattcacatactggcatctggattggtcaaaaagagcttcatcattagcatctctgttggatgatgactttgtggatccatctaaagagctgaacctgcaaaatatggacaaatcgagatctgatgctctgacaactaccatagaccaagttgctgttattgaattgctggttccttcaatatttagagctgtagtgtcattgcatcctgctggatctactgatcctgatgcagtggcattcttctctcccactgagggaggaagctatcttcatgcaaggggcacatcggtacatcatgtgtttaagcatgtaaaagaacatgctgacaaggcattgcagtacttcatcaatgcggagccgagtaaagcactacctcttcttttgcgttggattgccagctatcagactctgtttacgaaggtttgcagacggcttctgatgatggacaagtctttggctttgctgttgcctcctgtccaccgcccctatcaccagacttcaaatgttggaccagatcttcaagaggcctaccacattggatgttcctcctacgatggctagctgatgcttctaagatgttcctgacattgtcattgacatagtacgtgtacaacagtcctgtgtgaaacaatgttcttttttttttggaatgtatccaacccattaggtgacatatgtatagaaacgttactggttgcttaggtacttgaagttctacgctcttgctcaaattaacctacagattaattcagattaacaaaatccagaactggtccaaacaacccagattcttgtacaggccgttatacaatcggtccaccgctg

SEQ ID NO: 73047 - DNA, 387 bp, Zea Mays
caaggatggacgtaaaagtttcggaagcagttggcagtccattacttcctgattcccataatattcgaaccggtggcaggcccagaccgcactttaaacaaaaaaaaaggttactctctacgtccctattcaacccctcgtagctaaatatcgatcaccagacaaaaaaacaaaataaggcatctactaaattcatagaatttaggtggacactcaaattctccttccggcctttatatttcttgagaaagccatcatgtcacgcggcgcgctcgtcgatgcagccgtcttctctaccggtggtggcacttgatgtcctttcttttggccgagtgcaactctatgacgagcaggtctacttatcaatcctgagtcaatgaattcgag

SEQ ID NO: 73048 - DNA, 1943 bp, Zea Mays
ctcagcccgttattcttcagccgccagcgatccagctctagcgtttcttttttccagccccagaagctcgacgccggcggtgctccacgggagccaccagccccacctccatcggaggcagccaccggccacgggagcagcacgcctcctgcatcaactgctggcagccaccagccacctccatcgttggctacttggctccctcctccttggtagaagatggccccatcctcgtcctccagctccgatggacatggccatgctgctccgcgccctgggactggtagagttcaagtggcgttgcctaacgcagatgctgctgctgaagctgatgcagagagaagttgccaccagagcttgctgcactagctaaagatcctaagaggcatgctaaatctaaggaccctgggtggaagtatgggttctggccatatgaagggaagaaggatatggttcaatgcatattttgcaaaaaggtggttcctgcaggaatcaagagattcaagcaacacatcgcaggtggttatgcagtcgtcgagaggtgtccagctgcacctgcaatgatcaggaaagaaatgtttgattttttggtgaaaaatgcaagaaaagaactgaacttgcagcaaggaagggaatgggattctgaaagtggaggtggagtgcaagaagtacctgttgtgccaagttcagggacaagagttaaggaaaataaaaggaaggttcaagcatccattggttcttatatggatccagtcaagcaagggtcacagaagtacaccaaaaatgttgcttcaatgttgtgcaaatcacctgaagaagtggtcagtgagagacataattcaaagagttatcaaccttcaatggagcagtgtacacagaaatctaaggaatcaaagcaagtagttgatgaccatgttgcggatttcttgtatgagaatggaattccattgaatgttgttaactcaagaagctgggaaataatgttagagtccataggacaatatggtcctgggtatctgtcaccttcgtaccatcagttgaggaattcattacttgagagggcagtagacaagacaaatgaggtgagaaagaagcatgaggaagcatggaaaaagtatggctgcactctcatgtcagatgcatggactgacacacggcaccgtcatctcataaacttttttgtcaagagtccagtgcttgttgaaaatgaagaaaatgaggaagacgttgacatggaagatgaagaagatgatttcaatgaaatgcaggacgacgaagatgacgaagaggatgaggatggtggaggtggagctgcaggggccttccgagtggatgatgctttactttgagcatttactcattccatttcgtttccaggaattcagacaatcatacttgaattggaccctatcccaaaaaaaacatatatcgaaaccctcaatggctggctagtcaaatggcttcctcaggaaaaggacggcattgcacccttcaagagttatgggagctcctgctgtgttcattacagctaatgattggtgtcaagccatgaaaaggataccagaaggcagcgtgtagctacaatggaggctcttgctgtcaatgtacatacgttatgggaggcggcaggacaaaggagcagcagcagcagcagaagctgaaagctgaccacctctctagagaccttgcagagcggctcacatatcatcagaaggaacatggcttgcaagggcattttgaagatgatagggcagtgttgcccattgctgacaacggcagggcagttgataaccgcatagttgcactggatacgttgcacaagagattggatcatgaacaaagatctcggcacgaggaaactgtgagacagacccgataatccacaaagttttattaccagtttggtcttcattctttgtgtttatcatttctcattctccgtg

SEQ ID NO: 73049 - DNA, 1318 bp, Zea Mays
attcttcagccgccagcgatccagctctagcgtttcttttttccagccccagaagctcgacgccggcggtgctccacgggagccaccagccccacctccatcggaggcagccaccggccacgggagcagcacgcctcctgcatcaactgctggcagccaccagccacctccatcgttggctacttggctccctcctccttggtagaagatggccccatcctcgtcctccagctccgatggacatggccatgctgctccgcgccctgggactggtagagttcaagtggcgttgcctaacgcagatgctgctgctgaagctgatgcagaggaatcaagagattcaagcaacacatcgcaggtggttatgcagtcgtcgagaggtgtccagctgcacctgcaatgatcaggaaagaaatgtttgattttttggtgaaaaatgcaagaaaagaactgaacttgcagcaaggaagggaatgggattctgaaagtggaggtggagtgcaagaagtacctgttgtgccaagttcagggacaagagttaaggaaaataaaaggaaggttcaagcatccattggttcttatatggatccagtcaagcaagggtcacagaagtacaccaaaaatgttgcttcaatgttgtgcaaatcacctgaagaagtggtcagtgagagacataattcaaagagttatcaaccttcaatggagcagtgtacacagaaatctaaggaatcaaagcaagtagttgatgaccatgttgcggatttcttgtatgagaatggaattccattgaatgttgttaactcaagaagctgggaaataatgttagagtccataggacaatatggtcctgggtatctgtcaccttcgtaccatcagttgaggaattcattacttgagagggcagtagacaagacaaatgaggtgagaaagaagcatgaggaagcatggaaaaagtatggctgcactctcatgtcagatgcatggactgacacacggcaccgtcatctcataaacttttttgtcaagagtccagtgcttgttgaaaatgaagaaaatgaggaagacgttgacatggaagatgaagaagatgatttcaatgaaatgcaggacgacgaagatgacgaagaggatgaggatggtggaggtggagctgcaggggccttccgagtggatgatgctttactttgagcatttactcattccatttcgtttccaggaattcagacaatcatacttgttagtttagttaatttcagtttcagaattcagactccttttttttatcaatgttccatgctgtgtaatgtactatccaagt

SEQ ID NO: 73050 - DNA, 2090 bp, Zea Mays
ttccacgacttccatccattccaaaggaccaaaacagcggctcggccgttggcaaggtagccaaaccacggtaggcgcctaggcggccacggcgcggcgcacgcgaccacagggcacgagcccaagcgccgtgcggcgtgtccaaagaccaaaggctaggaaacacaaacacccacgccacgcggacccgggcacccgtccggcgggcccctcgctccgccctcatcctggggaccggacgacgccgtcgtcgtcgcccgtcgacccttttcccgcacaacagccgcgccgctctcccgttccacacgaccacatacggtagctagcctagcttcttcgtcacagctcaccacggcgcagcaaccgcagcccacgaaggcgacgaaaagctgccgaaccaccagcagaggagagcgagggaccgcgcaaccgagccactccctagtccctccttctccctctctctctctctcttcgcctccggatctcgcatgcgcggtggccaccgccgcgcccgacggtggagggtgaggagttagcgaggggccctgaccctgagtgctggacggcggcgtgatggggggagcgcagctggtggggagatgggtggagtcgtacacggggatgtcgacggacaacatcaagggcctgctgctcgcgctctcctccagcctcttcatcggtgccagcttcatcgtgaagaagaaggggctcaagaaggccggcgcgtccggcgtccgagcaggcgttggtggctactcatacttgcttgagccactgtggtgggcaggaatgtgattgttggcgaaatcgctaactttgcagcttatgcatttgctcctgctatcttagtcactccacttggtgcacttagcataattatcagtgctgttcttgcccatataatgttgcgggagaaacttcatacatttggtatacttggctgtattctttgtgtggtcggttcgacaacaattgtgcttcatgcccctccagagcgtcaaattgagtctgtggcagaagtgtgggatcttgcgaccgaaccagcattcctgtgctatgcagctgttgtgcttgcagcagcttttgtgctcatattccattttgtccctgagtatggtcagacacatatcatggtatatgttggcatatgttctcttgtgggatctttatcggtcatgagtgtcaaagctcttgggatagccttgaagctgacattttctgggatgaaccagctagtctatccacaaacatgggtgttctcatccgttgtaaccttatgcattgtaacacagatgaactatctgaacaaggccctcgacacattcaacactgcagttgtttcacccatatattacacaatgtttacatccttgaccatcttggctagtgtaataatgttcaaggattgggatcgtcaaaatccaacacaaattgtaacggagatgtgcggcttcgtcacaatcctttctggaacttttcttcttcacaagacaaaggatatggtggatggtctcccaccaaatttaccgattcggcttcctaaacatgcggatgaggacggctacgctgctgaaggaattcctctcagatccgctgctgacggtattccgctcaggtcaccaagggctacagattcatttcgctcgtcatgatgccccgctgagatttgcatgcgcactcaaatcgtgtcacttgaaggctcatacccagcaggcgtcagtcctatatatacatgggaagggaatgataatcctccattcactcggttcgatacacaacgtaggttttagctgtaggattcaaaaggtaacagctcggctgcccccttgtaaattctgaggcattggtacagaattttgaggattatatcagttatactcgtccgggtaagatcaccaggatgaccaagagcccaagtttttgggttgtatacttgtatgtatattgcggtgagccatataggtcactatcttgaattgctgtattttttcaacacaactctcagagtacaggatgttgaacaagcacatcatgccactaaaccatttaccagttttgtctgagcacttataatatgtatctttttc

SEQ ID NO: 73051 - DNA, 1378 bp, Zea Mays
gtctctgtccatagctagtgaattatgcgttggtggctactcatacttgcttgagccactgtggtgggcaggaatggtaacaatgattgttggcgaaatcgctaactttgcagcttatgcatttgctcctgctatcttagtcactccacttggtgcacttagcataattatcagtgctgttcttgcccatataatgttgcgggagaaacttcatacatttggtatacttggctgtattctttgtgtggtcggttcgacaacaattgtgcttcatgcccctccagagcgtcaaattgagtctgtggcagaagtgtgggatcttgcgaccgaaccagcattcctgtgctatgcagctgttgtgcttgcagcagcttttgtgctcatattccattttgtccctgagtatggtcagacacatatcatggtatatgttggcatatgttctcttgtgggatctttatcggtcatgagtgtcaaagctcttgggatagccttgaagctgacattttctgggatgaaccagctagtctatccacaaacatgggtgttctcatccgttgtaaccttatgcattgtaacacagatgaactatctgaacaaggccctcgacacattcaacactgcagttgtttcacccatatattacacaatgtttacatccttgaccatcttggctagtgtaataatgttcaaggattgggatcgtcaaaatccaacacaaattgtaacggagatgtgcggcttcgtcacaatcctttctggaacttttcttcttcacaagacaaaggatatggtggatggtctcccaccaaatttaccgattcggcttcctaaacatgcggatgaggacggctacgctgctgaaggaattcctctcagatccgctgctgacggtattccgctcaggtcaccaagggctacagattcatttcgctcgtcatgatgccccgctgagatttgcatgcgcactcaaatcgtgtcacttgaaggctcatacccagcaggcgtcagtcctatatatacatgggaagggaatgataatcctccattcactcggttcgatacacaacgtaggttttagctgtaggattcaaaaggtaacagctcggctgcccccttgtaaattctgaggcattggtacagaattttgaggattatatcagttatactcgtccgggtaagatcaccaggatgaccaagagcccaagtttttgggttgtatacttgtatgtatattgcggtgagccatataggtcactatcttgaattgctgtattttttcaacacaactctcagagtacaggatgttgaacaagcacatcatgccactaaaccatttaccagttttgtctgagcacttataatatgtatctttttc

SEQ ID NO: 73052 - DNA, 621 bp, Zea Mays
atggcgcggtgcagggcggccggcttgagcgcgcgggctgcacggctgctgctcctggcgaggtcgtggcacaggggctgggcgagcgtggcctggcggctgcaacgcaggaagagaaaggggagagaaagcagagtggggcccgcgcaagagagagaagagggatggagaaggaagaagcctggcgacggcttgctgtccgtaagggagaagaaaggttgggggaggagagaggtgcggtggggcccacatggaagtgagacaaaaagggagggagagaaaacgtgggccgcctagtttggttggccgagcgaccgctttccatttttttatttttttatttttgttaatttcgaaattcattttctttttattttatttttttaataggttattcattaataaatatactttcaatattcataaaagtataataaatctaataataaaattcatagtaaataatcttttggaaaatttctattatttatataaattagacctcacaaaagagaataaattaaaataattttgttgcaatttattaacaaaaaaaccatgctcctaaaaatgaatgcatcaaacatttgtgaccaatatatattcaaaagttaattattt

SEQ ID NO: 73053 - DNA, 1949 bp, Zea Mays
agcggtttccatttccggccctgcaatcctgcaccggcgcgaaagccccctcacggcctcacctccactccggtgatggccgcatctcctttacttctcagtgctcacgccgtccacggtccactagttgcatcggctagctcccgcataaagatccacaccacttgagcagcagctagctcaagggaaggagaaggctggaagtggaaagaagtgggttcttgcttgagctgagctcttgctgcccttggatctgtttgggagtggagaacgcagtatggggcgcggcaagatcaagatcaagaggatcgagaactctaccaaccggcaggtgaccttctccaagcgccgggccggactggtcaagaaggcacgggagatcggcgtgctctgcgacaccgaggtcggcgtcgtcatcttctccagcggcggcaagctctacgactactgctcgcccaggacctcgctgtccaggatcttggagaagtaccagaccaactccgggaagatactgtggggtgagaagcacaagaacctgagtgcagagatcgacagagtcaagaaggagaacgacaacatgcagattcagctcaggcatctgaaaggcgaggacctgaactccctacagcacagggagctgatcgctattgaagagggcctccagaatgggcagaccaacatgcgcgagaagcagatggactactggaggatgcacaagacgaatggaaagatgctggaggacgaacacaagatactgacttttaggatggctgttgatctgagcggccgcatgagggagctggagatcggataccatcaggtccagcacgacagggatttcatttcccagatgccgttcaccttccgggtgcagcccaaccaccccaacctgcaggaagacgagtagctacagcctgctggatagtgatctgcatgccgctctgaactgaagctcctcacctgcagcttctatctcgcgtttcatcattcagcgttagctgggtatctttcttttcatggcaccctggatgaagtctgtcagtacgatgtggtctttgtcttgtgcgtctcttttgactttgctgggctgatttccgtgcatgtagtgatgatgacagcgttaattaagactgaaatgtgcaattaagttgtagcccgtgcttgcttggtctctgttctggttggtgatggttgatgaaaaacagaagcagcaaacaatcgatgtgaatgtcgttcatttgccaattcaacgtatactacaaaagatgaatttcaatcaatcaacaaacagcaacccttaacagaataacagctatctacaacacctgtgattcttatctagtttctgcaatcgaacgaactcggcctgcttcatcaatcacctcagcatgtccccattgtctatgaacggggccaacggaccactgaacgccggtgagatgctgaaggtactaccagcttcgctgaacatggcgttgtgtccgtacggcagcggccggtccggcagctccggcacgtccatgtctccctccagcatcctcactgcgtcgccgatggtcggccggagcgccaccatcacgtgcgcgcacaggattccaaccagtacgaacctttccatgaccccgctccgcgggctctcggcggtggacagcgcctcgtcgagcacctccctcgcctgcccggccttgacgagagtccacgcccagtcagtgatcagcacgggacccgctggcgccgtcatgtccaggactcgccgcccgctcatgatctcgagcagtagcacgccgaagctgtacacgtcgctcttctccgtcagctgcccatacagcgcgtactccggcgccaggtagccgtgcgtcccggcgacgcgcgtcgtgaggtgcgactgcccctcacggctcctccgggcgaggccgaagtccgccacgcgagcgcgcatctcgctgtcg

SEQ ID NO: 73054 - DNA, 700 bp, Zea Mays
caatcctgcaccggcgcgaaagccccctcacggcctcacctccactccggtgatggccgcatctcctttacttctcagtgctcacgccgtccacggtccactagttgcatcggctagctcccgcataaagatccacaccacttgagcagcagctagctcaagggaaggagaaggctggaagtggaaagaagtgggttcttgcttgagctgagctcttgctgcccttggatctgtttgggagtggagaacgcagtatggggcgcggcaagatcaagatcaagaggatcgagaactctaccaaccggcaggtgaccttctccaagcgccgggccggactggtcaagaaggcacgggagatcggcgtgctctgcgacaccgaggtcggcgtcgtcatcttctccagcggcggcaagctctacgactactgctcgcccaggacctcgctgtccaggatcttggagaagtaccagaccaactccgggaagatactgtggggtgagaagcacaagaacctgagtgcagagatcgacagagtcaagaaggagaacgacaacatgcagattcagctcaggcatctgaaaggcgaggacctgaactccctacagcacagggagctgatcgctattgaagagggcctccagaatgggcagaccaacatgcgcgagaagcagatggactactggaggatgcacaagacgaa

SEQ ID NO: 73055 - DNA, 1660 bp, Zea Mays
cagcaaccgacgcggaaaaatgccaagagagcgcaaacgtaacagaacacccgcgacaaccactgagccgagcgggggtggatatggcagcggtcgccgcccaccaccacctccacccctcctccgtcgctgcccgaactccaacacttggccgacgccaccgtttctcgtcgcttcctctcgccgcgcggccgtcctcccaaggccgtttcagcttccgagccgcgacccgcgtcctcacgcgcgccggaagcactggcgccagcagcgccgcctcgcccgccgcgacgacggcgtcgtcgttgtcgctggaggagctgcgcgggggctgcaccacctggacgtggcgagggatgcgcgtgaactacctcgccagaggacaggggccgcccgtactgctcgtccacggcttcggcgcctccgtcgcgcactggcgcaggtgagccggccttgtccgtccgcccccttgatcgatcataatcttctgatgaaaccttacctgggctcaacgcgcgaccgttggtgcacgcacgccatgtgctcgagcttgtgcctctgcatgcgccaaccattgctgggaacattgatcaactcgcttggtaggaacattggggtgttgtctgaatcctataccgtctacgcgatcgatttgctggggtttggcgcgtcggacaagcctcctgggttttcttacacgatggagacatgggccgaggaggcccacggtgcttgtcgggaactcggttggaagcctcgcgtgcgtcattgctgcatcagagtccagcagagaagccgtccgggggcttgtcctgctgaactgcgccggtggcatgaacaacaaggcgatcgtcgatgactggcggatcaagctgctcctgccactgctctggctgatcgacttcctgctgaaacagcggccgatagcatcagcgctctttaaccgcgtgaaaaacagggacaatctgaaggacatcttgctctctgtttatgggaacaaagatgctgtggacgatgaattggttgagatcatacgcggaccggctgacacggagggcgccctggacgcgttcgtgtcgacggtgaccggcccgccggggccaagcccgatagccctgatgccgcggctggccgacctgcccgtgctggtgctgtggggtgaccgggaccccttcaccccgatcgacgggcccgtggggaagttcttctcgaagctgccgtcggagctcccgaacgtgacgctctacatgctggagggcgtggggcactgcccgcacgacgaccggccggacctcgtccacgacaggctgctgccgtggcttgaagcgctcctgccgcccgccgccggcgcggtgactacgacgacgacgacggttgtctaaggctaataataatacgccttattgctgactggatctttgaagtctagttggactcttcatttttaactctctagttatctctttataaaaaataaattctataaatcttatagattttgtttagaaccaactcagtttttaaaaaattggcttttattttttagctagcagtggccaacttcttagtttctaagagcatctctaatctaacatagttcctatttcacaaaaattcattaaacaattggacctggtgtatcaggtcctaaatataggactcc

SEQ ID NO: 73056 - DNA, 1924 bp, Zea Mays
atccgccttcatcgcaactcgcgacgacccagccatacattcatccatcacttgcggactcgcctcgtgcgcttccatttccactccgacccggccggcgacccgccccccggtccccggagcgaccgaggcctcgctcaccgacatgtgggccctcaacaacgccaaggccggcggaccctgcctcacgccgcggcacccagcgccgccctcccttgcgtcgccgtcgacggcatcggctgggcggaggttctggaggcgcagccccgtgtgggcgcccctggtggcggtgcgcgcgtcggggggcacgaggaaggacggctccgtcggtggcgaggccagcggcgaggaagccgatagcaaggcgtcgtctgccggtgaggcccttctcgtgtgtatgtgatgccttcgaatcgctgggcttaggcttggcaaggtgaatgtttgggcgattcgcatcgcatgtgcagtattccaggtcgcatcctttccgttgatccgattcttacctgttgatgggatgcgatttggatttggggcgccgcgcttttcgtgagactggtgactcagatactcagatgtcgatcttgctccgcacctagttgatagcacttctttgattgtgatatattgtgttttttcagttacaaacttgcagttctactactccgcgttttgttaattttggtatagaatctacattaggcttatgtttgtgatcaatccagcatgatggccacattagaagtgctttggtatgcccttccacgctacaagatcatcaactacgaatctaggacctggacctggccttggttcttctcaattgatggtttctgttcatgcagggcatgatgatgcatctaccccaacaggggatacctctgctgggttgaaccaatcgcatgacgaaccaaaaacaagcaagccgattaatgtttctagcagcaactactggcgagatgtcagggcaaaccttgtgcgtcgggaacaggagctattagtggatccaagtactccatcagagtcgaaggcgtcctcaggagatccattacagctccctcaaaagtgggctcatgctattacgatgccagaggcaggatgcgttctggttgctaccgaagcgctagacgacgacagcatcttcgaaagaaccgtcatcttcctcctcaggctcggtacaaggggcacgttcgacggcccgttcggagtcatcatgaaccgtccgctctacacaaagatcaagcacgtgaacccgatgttccgagaccaggcgacgcccttcggcgactcccccctcttcttcggaggccccgtcgacatgagcatgttcctggtgaggaccgaggacagcgcgcgcctcaaggggttcgaggaggtggtgccaggcatctgctacggcttccggacggacctcgagaaggccgccgccctgatgaacagcggcgcgatcaggacccaggacctgaggttctacgtcggccacgccgcctgggaccacgagcagctgctgggcgagatccgggcggggtactgggccgtcgcgtcctgcagcacggagctgatcggcgatgccttgatgggcgacccttctcgcctctggaccgagatacagcagctgatgggaggataaagtgtagtactctctgagctcagccaggaacagaagcagggccggccgtaggtgtttgctcatttgagatgtaataatttgttatgggtaaggttgtggtcgagtctgtacataattggaatagggtgactcgcttgttagttgcccctagcctcgtgtagcaactgctgtgcgtcgaatgtactgaaacaggctctatataatgcctgcctgcctatgtatttcagcaattggcgaacgtgaagatggcgcttctgatgaaatcacatgtcggtcctgtttggcacagct

SEQ ID NO: 73057 - DNA, 1859 bp, Zea Mays
gcagaagcgagtctctctttgcttccggcctcgcgtgccctttcatcccgacgctaggctagctttctgcaggagcaggggggaggccggacgtagtacgggggctgaacgcaatggcggccgagaccgaggagacggcgctggagttcacgccgacgtggatcgtcgcgggggtttgctcgctcatcgtgctcctctcgctcctggccgagcgaggcctccactacctcggcaagacgttcaagaagaagaaccagaagccgctcttcgaggcgctgctcaaggtcaaagaagagctgatgcttctggggttcatctccctgctgctgacggtgttccaggggatgatccagaagacatgcatccccgaagactggacgttcgacatgctgccgtgcaagaagccggacgaggccgccgccatcgccaaggcgagtttcgtcgatgtcgggactacccttggcaggattggtaggcggttgctggccgaagaagttgatggggctgagcactgccattccaagggaaaagttccacttctgtccctggaggccacgcaccagctgcacattttcatattcgtcatggcgatcacgcatgtcattttcagcgtcacaactatgcttctaggaagtgcacagatccgccaatggaaacagtgggaggacgaaatccagaaagatgcttctgaaaatgggcctaagaaagcaacgcgtgacgagtttatggaaaaccgtgttaagggtattggtaaagattctgtaatagtgagttggctgcattctttcggtaaacagttctacagatcagtatccagatcagattacaccacaatgcgtcttggctttatcaagactcactgcccttcaaacccaaaattcgatttccatggatacatggtaagggttttggaggctgattttaggagagtggtaggcatcagctggtacctgtggatcttcgtggtgatattcctgttgctgaatgttaacggctggcacatatacttttggatctccttccttccccttctccttctgttagccgttggcactaagctggagcacgtcatagctcagctaggccacgacgtggctaagaagcacgcggcgatcgacggcgacgtgatcgtgaagccatcggacagccatttctggttcggcaagcctaggatcatcctctacctgatccacttcatcctcttccagaactcgttcgagatcgccttcttcttctggatactgacgacgtacgggttcgacgcgtgcatgatggaacatcttcgttttatcattccaaggcttgtcatgggggttgtcatccagcttctctgcagctacatcaccctgcccctgtacgcaattgtgacccagatggggagctgctacaagaaggagatcttcaacgaccatgtgcagaagggcgtcctggtctgggcgcagaaggtcaagatgaggaaggggttgaagggggctcttagcaagagtgactcggcgaagaacaacaatgccgatccagcaggaccttctgttaagattgagatggccaaggctggggaggatgctaaggtcgtcggaaacacggaatgagagatcaggtgattgcggcggattggacagtgtgcccgacctgtagttgaagaacaatgccatcgtttttactgtcacagcagccgaggagcgttgcagtttattgtcagattttttttccctgtattgttcgagtctattgtgtaatatgcttaataataatttccagaataaagcgcaaaggttcattcatccttccaatttttgtcttgccttgcgcgaaagttcgtaactgaatctaccagtcgtggagatggttaccaagtctgc

SEQ ID NO: 73058 - DNA, 1772 bp, Zea Mays
gcgagtctctctttgcttccggcctcgcgtgccctttcatcccgacgctaggctagctttctgcaggagcaggggggaggccggacgtagtacgggggctgaacgcaatggcggccgagaccgaggagacggcgctggagttcacgccgacgtggatcgtcgcgggggtttgctcgctcatcgtgctcctctcgctcctggccgagcgaggcctccactacctcggcaagacgttcaagaagaagaaccagaagccgctcttcgaggcgctgctcaaggtcaaagaagagctgatgcttctggggttcatctccctgctgctgacggtgttccaggggatgatccagaagacatgcatccccgaagactggacgttcgacatgctgccgtgcaagaagccggacgaggccgccgccatcgccaaggcgagtttcgtcgatgtcgggactacccttggcaggattggtaggcggttgctggccgaagaagttgatggggctgagcactgccattccaagggaaaagttccacttctgtccctggaggccacgcaccagctgcacattttcatattcgtcatggcgatcacgcatgtcattttcagcgtcacaactatgcttctaggaagtgcacagatccgccaatggaaacagtgggaggacgaaatccagaaagatgcttctgaaaatgggcctaagaaagcaacgcgtgacgagtttatggaaaaccgtgttaagggtattggtaaagattctgtaatagtgagttggctgcattctttcggtaaacagttctacagatcagtatccagatcagattacaccacaatgcgtcttggctttatcaagactcactgcccttcaaacccaaaattcgatttccatggatacatggtaagggttttggaggctgattttaggagagtggtaggcatcagctggtacctgtggatcttcgtggtgatattcctgttgctgaatgttaacggctggcacatatacttttggatctccttccttccccttctccttctgttagccgttggcactaagctggagcacgtcatagctcagctaggccacgacgtggctaagaagcacgcggcgatcgacggcgacgtgatcgtgaagccatcggacagccatttctggttcggcaagcctaggatcatcctctacctgatccacttcatcctcttccagaactcgttcgagatcgccttcttcttctggatactgcttctctgcagctacatcaccctgcccctgtacgcaattgtgacccagatggggagctgctacaagaaggagatcttcaacgaccatgtgcagaagggcgtcctggtctgggcgcagaaggtcaagatgaggaaggggttgaagggggctcttagcaagagtgactcggcgaagaacaacaatgccgatccagcaggaccttctgttaagattgagatggccaaggctggggaggatgctaaggtcgtcggaaacacggaatgagagatcaggtgattgcggcggattggacagtgtgcccgacctgtagttgaagaacaatgccatcgtttttactgtcacagcagccgaggagcgttgcagtttattgtcagattttttttccctgtattgttcgagtctattgtgtaatatgcttaataataatttccagaataaagcgcaaaggttcattcatccttccaatttttgtcttgccttgcgcgaaagttcgtaactgaatctaccagtcgtggagatggttaccaagtctgc

SEQ ID NO: 73059 - DNA, 848 bp, Zea Mays
gtgattttttttccgagaaagggccaaaatgcaaaaaattcgggaagcggaacaagggtgctttgggtcccccctcatattaacaactaccgaggcattttagcagcgagcaagaaacggaaatgccgatatgcatatctgaaaagcgatcacaatgcatcactgacaagaacgagcaggttgtagcaaacgtgagcacagttaaaagttaaccatccgatcaataatgcaaggaacaaaggaaccaccaccatcatcctaaacggtcttgtgtttaaacgccatgtaaatgctatagggtgatatgttctgtccgtttaattggctgcagctgcagcatagatctaaacctggcaagccaccaggcagggcctgtgttaacaccgttcttctttagagtatggtatctctaataggaaaatctctagtattcttcagctgcgctggcagcgctcaggtccacactgagatcaacggtctttccagtaattgctgtgtacatactgagaacatctgtcacagttgtctcaaagtgtgtagtagcatcataactctgcaaagaagataacttccataaacatctaagatatctgggacttgtaatcactttgttattacataatcctaaacttaccattgaaacaaagcaattatcaagagatggttcattgacaggtttgtatctgtcatacatatcaaaaaacagttcatctacttgaccaagtagatcaattccaggctttagttcggactgtggattatcggtctcagcttccgcagacacaaatgcaatgaacttcccttttggcgcaacattatgtgtatatgagcaacagaaaacataccta

SEQ ID NO: 73060 - DNA, 3728 bp, Zea Mays
atggagagcgccatcagggaccactcgctctgggccaacgccaccgaccaggagatcgaccacgcgctcgagatgctcaagaatgctggtttcagtcatgtcattgctgaagaccgaactgatcagcatgttcatgaggtgtgttttggctttctgatttttggtgttgggatttgggactgggaatcgcgggggtttggttttgtcaccatggctgctactaaggaggcagatcactgcatcaaatatctggactgttctgtgttgcaaggtcaggtcataattgttgagaagtgcacttgtgttattgtattcaactcatgttatcagtggaattctggtatgattactgcttgtgaaaagagatggcttgactttgtcaagttagctttctatacagacacaagcttggcttgtatcgagctcgtcatcaccgtcatcagaagagatacagttgcggtactctgcatgcaagttatagcttggcaatgtttggaggccttggtttacttgcaccgtctgaggatcattcattgtgacctaaagccagaaaatattcttatcaagagctacagtagatacgaaattaaagtcattgatctgggaagtagttgcttcttgacagacagcttatgcctctatgtccaatcacgctcttatcgagctcctgaggtcattctaggcctaccttatgatcagaggattgatatttggtctcttggttgcatcctttctgaattgtatactggtgaagtattatttcctaacgagcatgtgtccgtaatgcttgctcaaatgatcgggataaccagcccaattgacatggaaatgctagaattgggacaggagacacagaagtatttcactgatgattatgacctttttaccgaaaatgaggagacagatcagctagagtatttgatcccggagaaatcctccttgcgacaacacatacaatgtcctgattcagagtttgtcgattttctgtcttatctgctgcaaattaaccccaggaaaagacctacagctgacgaagcactacatcatccatggctttctttctcgtactaatgagaagccattcggtgctttcttcacatataaagaatagccctccttttctgggtgtaggattcttctttttttgtgtcttcagggtaattcttggcgtttcctttttctggttccaggattcttttttttgtcttcagggtaattcttggtgtgaacccctgccctggagtgattcatgagtgtatgtaaatatcagaaaattttccgcggagtaactgtacagttgtaagcccactcttgtactcctgatcatgaatgataacatgggaatttcaaaatagtgtccaatgtttcatcgttgttggttctattgttgatgtgcccagtatcacttatggtgtgtttggttggatgtacaaggagggatgaaagggagcgaccagtttttatagtgtttggatgagagtcacgtggtggcgagataaacatatagtggtgccgtgattccaaaaaatcgagagaactgtgtcgtcccgtctcatcctactttaatatcaaaccaaacacattaatttgtagtatcagatgttcaagtacacgtggatggttttcgatgtaaaccgctcgcgatgctatttgatctgatcgttggttcttattgaagaaacaagaatgggatcagcggtaatggtaggtcatcgtatcctatttctggtgctataatctctactatttattaaggctgcaagagtagtctacaattccgtgttctgtcaccattctcttctccccgcatgttatggcattccctgttctgcctttctcattctccctccccgcaaaactcattccaattctcattcccacgtacaacccacgtctagatattccgtgttctgccaccattccctcctcctcgcatgttctgtcattctctgttctgcttttctcattcccctccccgcaaagctcattccaattcttattcctacgtacaacccacgtctagctaaaattaaaaaacacaaatgaccctaaggagattcgaacccgcgacctctcagacaaatgcaagcagctacaccacatgtgtgtttatgtctacatctatgacaggaaaaacatctactatatctctccccaagtctaccctactacccttgcacaatgcgtagtagtagataagtatcatcgagattcgtttgaattatatttttagatggaatgagtagtatttaaagaagagccttgcatgcaatttcttttgtttgaataatgttttcaacttaaattctttttttgcatgtgtggcatttattcttcataatattttttttcatggatctcacttgtgagtcattttcataaaccaacaccaaggatgaatccatgtttcttgcttggaaaccccgaacaaacaccattagcaggaggcgctcacgttggcgtcgctcatcgacgacgagaagaagcttgacgactgccagtttgacctctagaagcagtcctacgtggccgcatgagctgctgtgcatgacaagctccgccgcagccaccgcttgaactcggtccagagcgactgcaccgcgttgtctatcgtcaagcagggggacctcatggttgttgccaacgtcggcgactctcaggttgttctgggcaccgcatccaacgacggcgccatcacgccgtccagttcatcgtccatctgaagcgcaacctgccatgtaagtcgctactgaccggcccataaattcttgtgcgctcgaacgatggtcgttgttgacgttgtgtgagtgtcctcgaacatgatgtatgtagaggagtagcgcatccggtggtgcaacgaccagatttactaccttgctaatgagcccgaggtgcactttttctggcagcccagccaagagtcatcggtactcgacatgttgctcgcgttcgacgactactatatcatggactgtggcgtcatctcggcgccggaggtgacacagaggaggaccgacagcaatgatcagttcgtcatcctcaccaccatcggggtagctttttgtgctggtctgcctttaattctcttcgcaaaaacacacaattgttttttgtttgagtaagcgcgtatggtggtacatgcctgatgactgacgatgtacgaggaaacttcttctggcaggcgtggggtgtgctctccaatgatgagaccatggaaatcgtggcatatatcgaagtcggtatgatactgatggttgcaatgtagtggtgaaacaattagattaaaacaacaaaatttatgtatgaccagaatcacaaatgaattatgaaacattttctcataatagtataacacacattttgtatataagttaccgtagtattatatgtccccgttgcaacgcacgggcactcacctagtatacatgaagtatataggagaagtcgttgaatgactgtgctcgagtgagtcgttccaaccctaagatcctatatatctatcgctacatcagctatcgttctatctatatctaacatcatcagcatttatatgctacactctagtgcacagtttttatcatttacaactacctcgatgacacatcaaattcttttacagactcttatctaaaatgaaacaacgttttattaaaataaaaatccatcttagtatataattaagcaaataaaaattatatagttcataaaaattacaaattacgtagttt

SEQ ID NO: 73061 - DNA, 2633 bp, Zea Mays
cacagcacagtgcgaaagccacacgaaagcgacgaccaagggagaatccgtcaattccccaatccccatcctctcaccggcgcaaacccacgggatccgtcgcgatcgcgacgcagcctccaattcgcgccgatgcctgcccccgcgccgtggcccgtgtcgcaggacgtcgcggcgctcgccgatcgcgccagcgccttctcccgtgccgtcgtcgggccccgcaacgacctgggtgctctcgcggcggcgctccttcggatccaacccgtagcccgcgagctcgagcgctggaggtggctcacgcccggcgaccctgaggtgcccgacctgcacgcctggctcttcgagctcagggacgcggtggccgacgccgagagcatcctagatgagctccaccgccggcgccagatcggccctccgctctcggcctgcgtatacgccacgttccgtggccccggacggaagctgaggcggctgacggagaggctcaaccgcgcccgcgacgattcggagcgtctgcgacctggcagcgctgcggccatctacggtgtgcggtcgccgaacagggtaaccggctccgttttcgcggagcggaaggtactcgggcgtggggaggagtgcaactccataatctccaggctcgtcgacgattgcgaggaaacatgccgtccggtatctccggttattgcagtggttggccatggaggcatcggcaaaaccacggtcgctcagtgcgtgtacaacgatgcgagggttgaagcgcggttcgatctgagagcctgggtctgcgtctgggacagatcagatgaggccgagctcaccagggagattttacagtccattggttgtgcagatgataaaccgtgtgatgacggtcttgccagtttagacagtttgcaggagaagtttgagaatctggttgcacgtaagaggttcctcctggtacttgacgatgtttggattgatgagggtaaaaccgagaaggagaataggagcatttggaacagagtgttggtgccacttagatctgccacaactgggagcaaggtcttgttgaccactcggatgaaactagtagctgaggttctgaatgcgggttatttggtttcgcttgatggattaagaagcagtgattgttggttgctgttgaaggaagttgctttgggtggagaaaccatggattttccacctgagttgcaagaggttgcaggaactcttgttgcaatggttaagggctcacctttagctgctaaagctattgggcaaatggcaaggagcaccaggagcacacggaaatggagaaccctggtgaacacagaaattagtaatgatatcattatctcttccatccaactcagttacaaacacttgccgggtcatctccagcgctgctttgcatactgcagcatatttccatcaacttggaggttcagtcgctctcagttggtcaatatgtggatagctctcggtttcattcaatcatcagcagaagggaaagggctggaagaattagggcaaaaatactttgatgatctcctatcacgatccttctttggtactgcaaataaagaccagcaaacatattacttccttgatgacctaatgcacattttggcacagcacttctctgctcatgattgtatgaaaatcaacgagggcatccctgttgtgattccaccaacagttcgtcatctgtctgtttcaaccgattatttaccacagctgaagagcaaatacaggttgggaaggctgcaaacattgttagtcctcagaagctcatcgttatcttcaggtcatttccctagaaaacttctggccaaatttaagaacttgcgggtcctggatctgagtggatctgatattgtagaattgccagaaagcattaatcagttggtacatcttcattacctagctatatgcagtataactaacaaacttcccaagactatatacatgcttaaacatcttgaggtgtgtgatatacctatattcttatttcatgatgatcatcctagaggtgttggtaaatctgttacagttaaacgtctcaaaacatgctgtggcaagcaggcaaggtcagttaagtccttgattgatgtgtaaggactgttataggaaaaggattaacctgcacggcttattagttaatcgatcaaccaatgtctgactttcagaatcaaactttacagtaatcccagcagcaggcatgaagtgcaatttttcttttcaattcgacaccttcaagctctagaatccatttctactcagcctgtttctgtgatttggtgtcagaataactccagtttggtggatcaagaatctggttgttcacatccatcaaaacttcaaactattttgtgttggtttgtttgatagtcccaggtattccattttggttttcactgtcaactggtgcaaacaagactgttgcaacagggaaaaaatagactatgataccataactgaaaaacggtgttgagtgtgatcttgcaacatcctgtatgtagccaactgtcactcttacatgaatcttaataaggacatgcctagcgcagtggtaagaagtctttccacagagccaaaggtcctgaatttggcgtatactctgaaaaaaaaactacaggggtaag

SEQ ID NO: 73062 - DNA, 2255 bp, Zea Mays
cacagcacagtgcgaaagccacacgaaagcgacgaccaagggagaatccgtcaattccccaatccccatcctctcaccggcgcaaacccacgggatccgtcgcgatcgcgacgcagcctccaattcgcgccgatgcctgcccccgcgccgtggcccgtgtcgcaggacgtcgcggcgctcgccgatcgcgccagcgccttctcccgtgccgtcgtcgggccccgcaacgacctgggtgctctcgcggcggcgctccttcggatccaacccgtagcccgcgagctcgagcgctggaggtggctcacgcccggcgaccctgaggtgcccgacctgcacgcctggctcttcgagctcagggacgcggtggccgacgccgagagcatcctagatgagctccaccgccggcgccagatcggccctccgctctcggcctgcgtatacgccacgttccgtggccccggacggaagctgaggcggctgacggagaggctcaaccgcgcccgcgacgattcggagcgtctgcgacctggcagcgctgcggccatctacggtgtgcggtcgccgaacagggtaaccggctccgttttcgcggagcggaaggtactcgggcgtggggaggagtgcaactccataatctccaggctcgtcgacgattgcgaggaaacatgccgtccggtatctccggttattgcagtggttggccatggaggcatcggcaaaaccacggtcgctcagtgcgtgtacaacgatgcgagggttgaagcgcggttcgatctgagagcctgggtctgcgtctgggacagatcagatgaggccgagctcaccagggagattttacagtccattggttgtgcagatgataaaccgtgtgatgacggtcttgccagtttagacagtttgcaggagaagtttgagaatctggttgcacgtaagaggttcctcctggtacttgacgatgtttggattgatgagggtaaaaccgagaaggagaataggagcatttggaacagagtgttggtgccacttagatctgccacaactgggagcaaggtcttgttgaccactcggatgaaactagtagctgaggttctgaatgcgggttatttggtttcgcttgatggattaagaagcagtgattgttggttgctgttgaaggaagttgctttgggtggagaaaccatggattttccacctgagttgcaagaggttgcaggaactcttgttgcaatggttaagggctcacctttagctgctaaagctattgggcaaatggcaaggagcaccaggagcacacggaaatggagaaccctggtgaacacagaaattagtaatgatatcattatctcttccatccaactcagttacaaacacttgccgggtcatctccagcgctgctttgcatactgcagcatatttccatcaacttggaggttcagtcgctctcagttggtcaatatgtggatagctctcggtttcattcaatcatcagcagaagggaaagggctggaagaattagggcaaaaatactttgatgatctcctatcacgatccttctttggtactgcaaataaagaccagcaaacatattacttccttgatgacctaatgcacattttggcacagcacttctctgctcatgattgtatgaaaatcaacgagggcatccctgttgtgattccaccaacagttcgtcatctgtctgtttcaaccgattatttaccacagctgaagagcaaatacaggttgggaaggctgcaaacattgttagtcctcagaagctcatcgttatcttcagaataactccagtttggtggatcaagaatctggttgttcacatccatcaaaacttcaaactattttgtgttggtttgtttgatagtcccaggttggtactttgcaacctttcaagccctctttattgcaggactacttggctgttttgcctatccgcaacttatgtatagttattttatttttacttttattttttttatttccatttgtaaggtattccattttggttttcactgtcaactggtgcaaacaagactgttgcaacagggaaaaaatagactatgataccataactgaaaaacggtgttgagtgtgatcttgcaacatcctgtatgtagccaactgtcactcttacatgaatcttaataaggacatgcctagcgcagtggtaagaagtctttccacagagccaaaggtcctgaatttggcgtatactctgaaaaaaaaactacaggggtaag

SEQ ID NO: 73063 - DNA, 2916 bp, Zea Mays
tttaccaaatagtaaatagttcagattatacgcaactaaacaataatcatgatggaaaaccaccctgtgactttgtgagtgagcatcatcaacctagcagcactgctcctcaacacagagagagagagaaggaaagagaccggaaagggcgccccccgacgcccgagtcgaccgcaacaagaatcagccacgccgcgtctcacccatctcccgtagcatttccgccatctcctgcgggttgagtacggccgagtcctgctgcccttcgctcgcttcttctggtaaattgcagtttgttaccgcaattgcagctgctagtggtggcgaggcatgggccatgggagaaagactagttgttgctggtgtttggtagtagtagccgcgtaggtctcgtgggtgtgcgcaccctgccttccccgtccctatccgcccgtctcatcgtcatccccttcctgtcttcaacttcaccttccctgtgtttcctccccgcttccttccgctctaggggtcagccaggcagtccagataagatttgctctggttaggctacctccgcgccgcgctggaactccctcccggtgaggttgttgaaaccgacaaggaacggggacgtggggcccgaggaaggtcacgctgctagtttttttccttcgcgatcgatcccttccgcctccggattcgccctgctcttgttcctccgctgttttctcgatcggttggctggtgactctgcccctgcccctgcccctgccccggccccgattcgggggaatctgattcgccgttgggcgggcgggagagattgggttcttggttctggtgccggtgcgcgcggcgtaatttggtagcagatagaagcaggaagggggagcatcggcccttggctgcgctgctgagaatcgcggtcgggggaggctgatcttggcgacggtggcccggcggggaccggtggcggccgcggcgatggccgacgggctggatcggtggcgcggcttcttccgtggcgccggcgctggcatctgcgacgtcatcgagaacgccatcctcgtggcggcggccgacgcgccgcgggacttcctgcaccgccgcgaccgcatcgctgagaggctcttcaccgcgctccgccgcgacgcggcgccgccgtccttcggcagcgccgcggcgtccaccaccccggccactcccgttgaggaggacaagggcagcgtgcgccgcgtcgccgagaaggagtgcaaggtcgacagcagcagcaacggtacccacggcggcggcggccatggccatggccacgccgatgaggacgatgattctgactctgacgacgagcgcctccgccgcgccgcagcgagcaactatggccacaactacgatgatgatgacgaagatggcgaccaacaggaggaagatgagcagcagcatgccgcggatgatactgaagaaggggaggaagaccacgacgctgaggagctcgaggcgctcaccaatgagatcgatgaggagtcacagatcgtcggcgaggtcctccgcatcaaggaactcctcctgcacaaggaagaccattcggatgccactttgttcgattcactgaggaggctgcagttgatgcaattgtccgtctctacgctaaaggctactgagattggaagagctgttaatcggctgcggaaacacaactcacgagagattcggcacctcgtgtgcactctcattgaaggttggaaagttttggttgatgaatgggtcagtaccacaaatgctgccctgacagagaactcccctggctcttcaaatccttctgttgtggatgaagaagaggaagggcttccatctccacctttggacgaaggggccttctttgccacccaaaccacttctattcaactctctgagttctttgacgaaatggatgaagatggaaatttgagacatagtaatgacccgagccttggaaacaagaggggtaacaatggtgggagacttgcaagccattcaacggttgcaaggcaagatccacctcgctcttatcctggagtcgtcgaaagagttcaacccaggaggctagaactggcaaggcaagagccaccaatgagtaaaggcagctcaacagagaccatttggtgacatgaaacctaaacaaactcgagagcatgttgctatcgagagaaagcctatggcaagccagacagataaatcaaggcccggcgctcgaccttcggcaggagccaagctagagttggcaaagccaaaggtttacgatgatggtctggataacaacaggaagctggaagcagcgaagcggaggctccaggagcggtaccaggaagcggagaatgcgaaaaggcaacgcacgattcaggtaatggagctgggtgacataccgaagcccaagaatcaaaacagacaaccggtggtgaagtccaggaatagccttaggaattgggcgaacgggcggcgctaactcctctgtgaccttttttttttttgtttacctcacctgatgaattgttgccatgcctggccttgtcggatcatgcgtttattatgctcaacgaggagcagatgaacaatcttttttttctttttgcacagaaccttcaatggagggttcttttgaagtggcaagagttgcacttgatgccatgagtggagacgagagtttagccatgtctggataatggacatgtagctggatttgtatcggctggttctttccttctttctttcttcttgttcttcttcttcaaaggaagctgctgtagataccagatagaataatcagcaatgtttggtacaggtacagccacctctttttctttttcttttctttttttttaccgtcagtcactttgatcgcggaaccattgacaaaaatgcaacaaactttggtaaagtctcttgttctcttgcaactgcggc

SEQ ID NO: 73064 - DNA, 2959 bp, Zea Mays
tttaccaaatagtaaatagttcagattatacgcaactaaacaataatcatgatggaaaaccaccctgtgactttgtgagtgagcatcatcaacctagcagcactgctcctcaacacagagagagagagaaggaaagagaccggaaagggcgccccccgacgcccgagtcgaccgcaacaagaatcagccacgccgcgtctcacccatctcccgtagcatttccgccatctcctgcgggttgagtacggccgagtcctgctgcccttcgctcgcttcttctggtaaattgcagtttgttaccgcaattgcagctgctagtggtggcgaggcatgggccatgggagaaagactagttgttgctggtgtttggtagtagtagccgcgtaggtctcgtgggtgtgcgcaccctgccttccccgtccctatccgcccgtctcatcgtcatccccttcctgtcttcaacttcaccttccctgtgtttcctccccgcttccttccgctctaggggtcagccaggcagtccagataagatttgctctggttaggctacctccgcgccgcgctggaactccctcccggtgaggttgttgaaaccgacaaggaacggggacgtggggcccgaggaaggtcacgctgctagtttttttccttcgcgatcgatcccttccgcctccggattcgccctgctcttgttcctccgctgttttctcgatcggttggctggtgactctgcccctgcccctgcccctgccccggccccgattcgggggaatctgattcgccgttgggcgggcgggagagattgggttcttggttctggtgccggtgcgcgcggcgtaatttggtagcagatagaagcaggaagggggagcatcggcccttggctgcgctgctgagaatcgcggtcgggggaggctgatcttggcgacggtggcccggcggggaccggtggcggccgcggcgatggccgacgggctggatcggtggcgcggcttcttccgtggcgccggcgctggcatctgcgacgtcatcgagaacgccatcctcgtggcggcggccgacgcgccgcgggacttcctgcaccgccgcgaccgcatcgctgagaggctcttcaccgcgctccgccgcgacgcggcgccgccgtccttcggcagcgccgcggcgtccaccaccccggccactcccgttgaggaggacaagggcagcgtgcgccgcgtcgccgagaaggagtgcaaggtcgacagcagcagcaacggtacccacggcggcggcggccatggccatggccacgccgatgaggacgatgattctgactctgacgacgagcgcctccgccgcgccgcagcgagcaactatggccacaactacgatgatgatgacgaagatggcgaccaacaggaggaagatgagcagcagcatgccgcggatgatactgaagaaggggaggaagaccacgacgctgaggagctcgaggcgctcaccaatgagatcgatgaggagtcacagatcgtcggcgaggtcctccgcatcaaggaactcctcctgcacaaggaagaccattcggatgccactttgttcgattcactgaggaggctgcagttgatgcaattgtccgtctctacgctaaaggctactgagattggaagagctgttaatcggctgcggaaacacaactcacgagagattcggcacctcgtgtgcactctcattgaaggttggaaagttttggttgatgaatgggtcagtaccacaaatgctgccctgacagagaactcccctggctcttcaaatccttctgttgtggatgaagaagaggaagggcttccatctccacctttggacgaaggggccttctttgccacccaaaccacttctattcaactctctgagttctttgacgaaatggatgaagatggaaatttgagacatagtaatgacccgagccttggaaacaagaggggtaacaatggtgggagacttgcaagccattcaacggttgcaaggcaagatccacctcgctcttatcctggagtcgtcgaaagagttcaacccaggaggctagaactggcaaggcaagagccaccaatgagtctaataatccctcaagttatgaatctggaccggggagaccagtaaaggcagctcaacagagaccatttggtgacatgaaacctaaacaaactcgagagcatgttgctatcgagagaaagcctatggcaagccagacagataaatcaaggcccggcgctcgaccttcggcaggagccaagctagagttggcaaagccaaaggtttacgatgatggtctggataacaacaggaagctggaagcagcgaagcggaggctccaggagcggtaccaggaagcggagaatgcgaaaaggcaacgcacgattcaggtaatggagctgggtgacataccgaagcccaagaatcaaaacagacaaccggtggtgaagtccaggaatagccttaggaattgggcgaacgggcggcgctaactcctctgtgaccttttttttttttgtttacctcacctgatgaattgttgccatgcctggccttgtcggatcatgcgtttattatgctcaacgaggagcagatgaacaatcttttttttctttttgcacagaaccttcaatggagggttcttttgaagtggcaagagttgcacttgatgccatgagtggagacgagagtttagccatgtctggataatggacatgtagctggatttgtatcggctggttctttccttctttctttcttcttgttcttcttcttcaaaggaagctgctgtagataccagatagaataatcagcaatgtttggtacaggtacagccacctctttttctttttcttttctttttttttaccgtcagtcactttgatcgcggaaccattgacaaaaatgcaacaaactttggtaaagtctcttgttctcttgcaactgcggc

SEQ ID NO: 73065 - DNA, 601 bp, Zea Mays
attttaacactcaccagacgaaaaggcaacgcacgattcaggtaatggagctgggtgacataccgaagcccaagaatcaaaacagacaaccggtggtgaagtccaggaatagccttaggaattgggcgaacgggcggcgctaactcctctgtgaccttttttttttttgtttacctcacctgatgaattgttgccatgcctggccttgtcggatcatgcgtttattatgctcaacgaggagcagatgaacaatcttttttttctttttgcacagaaccttcaatggagggttcttttgaagtggcaagagttgcacttgatgccatgagtggagacgagagtttagccatgtctggataatggacatgtagctggatttgtatcggctggttctttccttctttctttcttcttgttcttcttcttcaaaggaagctgctgtagataccagatagaataatcagcaatgtttggtacaggtacagccacctctttttctttttcttttctttttttttaccgtcagtcactttgatcgcggaaccattgacaaaaatgcaacaaactttggtaaagtctcttgttctcttgcaactgcggc

SEQ ID NO: 73066 - DNA, 1425 bp, Zea Mays
gtggatcgtgccctccggtggcgaaggtgaaccgaaccaaggatggacaaccagttcaactccgaagagtggtcgctccctgtagcctcagccatgatggaacttgagaagtacaaccttactggtgcatttactagatcaatgcataacatgggtgtaccaattcagcctgtgaaccttgctattaatgcatcatctcgtcatcatcccactgaggacccagaggttcaagaagtctacaggagtcaagtctcaaacaacaagggaaagaagaaggttgcccaacgaggaaagtcattcaccaaggaggaagatagagcaatttgctcagcgtttttgcatgttagcacagatcctattgtaggaactaaccaatctgcatctgggtattatacaagaatgcatcgacacttcatggagaacattggagtgggtagtaataggactaaggtttccatagaaaatcggtggaccacaattcagaaggccgtcaataaattttgtggtttctttgctgcaattgaaagaagaaatgaaagcggcaagaatgagcaggacaggattaatgatgacattcggatgtatgagggaaccgagccatggcaattccatcactgttgggtgattcttcgaggagagccgaagtggcatgagaagatggcggagagtaacacgagtcaaaaagttaaccaaaagcattcccttaatgactctgaaatagaaataaattctatgcacaccaatagtgcaatccctgaacgacctgaaggaagggacaacgccaaaaagagatgtcgggtaatggctgatacctcgtcgtcaagtacagctgtggaaatgctacaaaaaatgcatgaaagaggagagaagaatgacgagaaggaagaccagttgaggcaagaaatgttccagatggaaagagagaggctcgagttgcaaaagctgaactgggagaagaaatgggcaataatggagtccaatgccaagttgcgacagaatgagtatgagttaaatcagtggaatgcagatcttttagtcatgtcacaggatcttgacaagttggctccaccattgcgtgcgatgtacgagcaaaaacaaatggagatcatgaagagaagaggcatcaacaccccttcagctagttaatcctaagctattatatgagggttgtacgagacttgtgtatgtgaatttgtttccagtgaagttgtttgattgttaagcttgtttgatcagatacacctattcgtgtctcatgtacccagagttaatttgttaagacttgtgtatgtgactgcttctgttgttcagtgaagttgtttgagtgttaaacttgtttgatcagatacacatattcatggctcatgtattagagttaatttgtctaagttacaatgtatttacaataaaatagttatatattat

SEQ ID NO: 73067 - DNA, 1739 bp, Zea Mays
ctctctttcttaacagcgacatctgttagggagagaagaaggggaaaaaaaaccagagacgcgatgcagagcattaagaccacatacaacggttgtctatagtatgtgaattatccgtttacacatacaatataaataacaactaaaacagtgagttatccgtctacacataccgtctacacatctgttttagactggctccaacaggccagctatttggcaaggcaaagctaatttagctccaatagcccagctatccagcccagccaaattacatgggaggagagagaaccggcaaattagctggcctagacacgccagccattcttcaaccgtcacgctcacctcgcgagggaaccggcgggcagcggctccacgagatctgcgacggcgcggctccatcgacgaccaggatggacaaccagttcaactccgaagagtggtcgctccctgtagcctcagccatgatggaacttgagaagcctgtgaaccttgctattaatgcatcatctcgtcatcatcccactgaggacccagaggttcaagaagtctacaggagtcaagtctcaaacaacaagggaaagaagaaggttgcccaacgaggaaagtcattcaccaaggaggaagatagagcaatttgctcagcgtttttgcatgttagcacagatcctattgtaggaactaaccaatctgcatctgggtattatacaagaatgcatcgacacttcatggagaacattggagtgggtagtaataggactaaggtttccatagaaaatcggtggaccacaattcagaaggccgtcaataaattttgtggtttctttgctgcaattgaaagaagaaatgaaagcggcaagaatgagcaggacaggattaatgatgacattcggatgtatgagggaaccgagccatggcaattccatcactgttgggtgattcttcgaggagagccgaagtggcatgagaagatggcggagagtaacacgagtcaaaaagttaaccaaaagcattcccttaatgactctgaaatagaaataaattctatgcacaccaatagtgcaatccctgaacgacctgaaggaagggacaacgccaaaaagagatgtcgggtaatggctgatacctcgtcgtcaagtacagctgtggaaatgctacaaaaaatgcatgaaagaggagagaagaatgacgagaaggaagaccagttgaggcaagaaatgttccagatggaaagagagaggctcgagttgcaaaagctgaactgggagaagaaatgggcaataatggagtccaatgccaagttgcgacagaatgagtatgagttaaatcagtggaatgcagatcttttagtcatgtcacaggatcttgacaagttggctccaccattgcgtgcgatgtacgagcaaaaacaaatggagatcatgaagagaagaggcatcaacaccccttcagctagttaatcctaagctattatatgagggttgtacgagacttgtgtatgtgaatttgtttccagtgaagttgtttgattgttaagcttgtttgatcagatacacctattcgtgtctcatgtacccagagttaatttgttaagacttgtgtatgtgactgcttctgttgttcagtgaagttgtttgagtgttaaacttgtttgatcagatacacatattcatggctcatgtattagagttaatttgtctaagttacaatgtatttacaataaaatagttatatattat

SEQ ID NO: 73068 - DNA, 1741 bp, Zea Mays
ggagagaagaaggggaaaaaaaaccagagacgcgatgcagagcattaagaccacatacaacggttgtctatagtatgtgaattatccgtttacacatacaatataaataacaactaaaacagtgagttatccgtctacacataccgtctacacatctgttttagactggctccaacaggccagctatttggcaaggcaaagctaatttagctccaatagcccagctatccagcccagccaaattacatgggaggagagagaaccggcaaattagctggcctagacacgccagccattcttcaaccgtcacgctcacctcgcgagggaaccggcgggcagcggctccacgagatctgcgacggcgcggctccatcgacgaccaggatggacaaccagttcaactccgaagagtggtcgctccctgtagcctcagccatgatggaacttgagaagatcaatgcataacatgggtgtaccaattcagcctgtgaaccttgctattaatgcatcatctcgtcatcatcccactgaggacccagaggttcaagaagtctacaggagtcaagtctcaaacaacaagggaaagaagaaggttgcccaacgaggaaagtcattcaccaaggaggaagatagagcaatttgctcagcgtttttgcatgttagcacagatcctattgtaggaactaaccaatctgcatctgggtattatacaagaatgcatcgacacttcatggagaacattggagtgggtagtaataggactaaggtttccatagaaaatcggtggaccacaattcagaaggccgtcaataaattttgtggtttctttgctgcaattgaaagaagaaatgaaagcggcaagaatgagcaggacaggattaatgatgacattcggatgtatgagggaaccgagccatggcaattccatcactgttgggtgattcttcgaggagagccgaagtggcatgagaagatggcggagagtaacacgagtcaaaaagttaaccaaaagcattcccttaatgactctgaaatagaaataaattctatgcacaccaatagtgcaatccctgaacgacctgaaggaagggacaacgccaaaaagagatgtcgggtaatggctgatacctcgtcgtcaagtacagctgtggaaatgctacaaaaaatgcatgaaagaggagagaagaatgacgagaaggaagaccagttgaggcaagaaatgttccagatggaaagagagaggctcgagttgcaaaagctgaactgggagaagaaatgggcaataatggagtccaatgccaagttgcgacagaatgagtatgagttaaatcagtggaatgcagatcttttagtcatgtcacaggatcttgacaagttggctccaccattgcgtgcgatgtacgagcaaaaacaaatggagatcatgaagagaagaggcatcaacaccccttcagctagttaatcctaagctattatatgagggttgtacgagacttgtgtatgtgaatttgtttccagtgaagttgtttgattgttaagcttgtttgatcagatacacctattcgtgtctcatgtacccagagttaatttgttaagacttgtgtatgtgactgcttctgttgttcagtgaagttgtttgagtgttaaacttgtttgatcagatacacatattcatggctcatgtattagagttaatttgtctaagttacaatgtatttacaataaaatagttatatattat

SEQ ID NO: 73069 - DNA, 1383 bp, Zea Mays
tttgctccctcgccgtctcctccacgaatccccatcaatcgcctccatgaagtctggatggacaaccagttcaactccgaagagtggtcgctccctgtagcctcagccatgatggaacttgagaagcctgtgaaccttgctattaatgcatcatctcgtcatcatcccactgaggacccagaggttcaagaagtctacaggagtcaagtctcaaacaacaagggaaagaagaaggttgcccaacgaggaaagtcattcaccaaggaggaagatagagcaatttgctcagcgtttttgcatgttagcacagatcctattgtaggaactaaccaatctgcatctgggtattatacaagaatgcatcgacacttcatggagaacattggagtgggtagtaataggactaaggtttccatagaaaatcggtggaccacaattcagaaggccgtcaataaattttgtggtttctttgctgcaattgaaagaagaaatgaaagcggcaagaatgagcaggacaggattaatgatgacattcggatgtatgagggaaccgagccatggcaattccatcactgttgggtgattcttcgaggagagccgaagtggcatgagaagatggcggagagtaacacgagtcaaaaagttaaccaaaagcattcccttaatgactctgaaatagaaataaattctatgcacaccaatagtgcaatccctgaacgacctgaaggaagggacaacgccaaaaagagatgtcgggtaatggctgatacctcgtcgtcaagtacagctgtggaaatgctacaaaaaatgcatgaaagaggagagaagaatgacgagaaggaagaccagttgaggcaagaaatgttccagatggaaagagagaggctcgagttgcaaaagctgaactgggagaagaaatgggcaataatggagtccaatgccaagttgcgacagaatgagtatgagttaaatcagtggaatgcagatcttttagtcatgtcacaggatcttgacaagttggctccaccattgcgtgcgatgtacgagcaaaaacaaatggagatcatgaagagaagaggcatcaacaccccttcagctagttaatcctaagctattatatgagggttgtacgagacttgtgtatgtgaatttgtttccagtgaagttgtttgattgttaagcttgtttgatcagatacacctattcgtgtctcatgtacccagagttaatttgttaagacttgtgtatgtgactgcttctgttgttcagtgaagttgtttgagtgttaaacttgtttgatcagatacacatattcatggctcatgtattagagttaatttgtctaagttacaatgtatttacaataaaatagttatatattat

SEQ ID NO: 73070 - DNA, 711 bp, Zea Mays
gtcaagtgctgcaaacccttgctgcatacgagtactatatatcaatcatataatgactcttacctccgtcaaaggatgtgctgggaaagaaaatcggcagagcagattaaagctctgaatctccacttcgacgctctcagatccgattatcgtacaagcaggtctaatcctcagaattatccatctccatcgttacctcttgggatcgatcgattattcagcgctgcctatatatatacatatttatccatatggaaacagaaacctcctagtcatgcacaatgggtcaatggttgcttgcgtcacttctctgacgggtcactcgctgctctgaagccaaggtggttgcattgcattgcatcactcaagaacggaacggatgatgagggttgtctctctcgaccctggaatcttggcgcggccgcaaagattggagtcgttctccgatccgatgatggtggagccgaggcgagaaagctgtcgagtcacacaacagttcgttcgttgttcgttcgttgtaccctctaaatacaccatcatctctacggctaactttatgtcatcggcaacaagtcaagaacaacggaagggaggaggggggagaacatgacaaattgcagcagtacacgaacaccaacagaaacaatggtgggcgatgagacgctagtaggatggacggattgctaattcccaataattcttgaactatgt

SEQ ID NO: 73071 - DNA, 1257 bp, Zea Mays
ccgccgccgctgccgccagcgcctcggtccatctcgtcggcgaaggaggagggcgcgatcatccccatccccatcccggcggcggcgctggccatgcggtggtggtgcatcccgggcggcgcgacgcggctcaggaagccgtggtcgaaaccgggcccggcggcggcggcgtagtgggcgagcgggcgcgcggccgggtggtggaagtggccgatctgcggcgctcggtggtggtggtgcgcggcgccggagcccatgggggagaagggcgggtaggtgtcggcggcgggcgcgcggtgggccggcgggaggaaggggacgggccccgtggcgaagaggtgctcggtggcggcgtcggtggcggagccggagccggaggagtggctgccccctcccccgccgccgccgagcccctgcatgcgcttgaggtagaggcggtacttctggaggtgggacgcgacgttctcgcgcgtgaggccgtcgacgctcatgagctgcattatggtcttgggcacggcgttcttgatgccgagctgcgccacggcgtccacgaagcgcttgtgcagctgcggcgtccacacgaggcgcgggcgcttgagcgtccgcgccggctcgtcgccgcccccgcccccgcccccgccgctggatcccgcggccgacgacgcgccgccgccgttgatgtcggggacggggcccgccccgccggcgccgtgcgtcgtgatgtcgaaggccacggcgagatcgggcgtgatgagcgtctgcgtgagcggcatcagctcgtccggccgcgggagctgctgctcctgctcctcgccgcgcgcgaaccagctgggctcctcctcctccctcatggccgcggcttcttcctctgctctctcctgacggacgggcagagcaattcttgcagctcactcgagcgagtcgacgccggcggcagcggcagccagcaggagcaacgagcaagcgaggaggggagtaggggttacttcgaggtggatctctcttcttctagctttcctgcccttctctctcctctcctttctctcccttgtctctcgcgtgtgtgtttagggaggaagggtgttttcgcctgttgctgctgctgctacagctgccgtgccatgatatcctcaagtcttctgttcctcatgctgctgctgctgatgataagcgagagaggagaatcttgggtgctgagctgacctgcttttatttttagtggcctgcccgcccccttcgcccaatcgtaattttgtg

SEQ ID NO: 73072 - DNA, 1083 bp, Zea Mays
attaccagcaacagtagccccatcctcctcgttggtcgtcgtcgccgcctcacagcctcgcccctgaccccgcccggcgccagatgcatacgaccaggaggcagctcgattgcttaccggcaatggtgcagtccatcgtctccatcgacaagatttgtgccatgcttgaggtattaggccatacgagagggtatgttcgattatagttgttttaggttcatggagcatgattaccacattggctagtggcacaacatgcctacgtatctaatatttaatggtgcaattactatgctcgtgttctctcattgctatgtttgtcatcatctgtaggaggttgtcttaggtcactggaatcaacatgggaaacctgttgtgcagaatgttttgtagtatgtttttcataaggttcctcttcatactacatgcttttctttctgatttcaaaaatgcattacacaaataaaattaccatttatatgtctgtatctaatatttaaggcataagaaaaattagcataggcaaagaaatgggtcaaacctcatgttgagactactaagatggtaatacccatttgttcatgtagttcaatttattatgttttatcttgggcttatagttggctaacattattactttctatgattgaagaagtggattcttgttaagcagaaattggttgtcctcaagaaaatgtagaatctcatgtacaaaaggtatcaacaagatgttaataaattgaacctcatattgagactgctaagatgaaatggatttctattaaggagaaattggttgtcctcaaggaaaatgcaggaccttacgtacaaattggttgtcttcaaaatgttggtcttgtagctgcaagcctgcaacaaagagaataaacaattgtggtgatgctacacatgtagaagtagcaatgttggtcttgtaactcccaagatttggttattgatgaatgatatctatgataatatattgctaagtgtatgtgatgatcatttattgttgtttaattataatgagttgtgccttttgtgctacgttggcattggtgatagttaaaaactaaaatggcc

SEQ ID NO: 73073 - DNA, 653 bp, Zea Mays
aacagtagccccatcctcctcgttggtcgtcgtcgccgcctcacagcctcgcccctgaccccgcccggcgccagatgcatacgaccaggagctcgattgcttaccggcaatggtgcagtccatcgtctccatcgacaagatttgtgccatgcttgaggttcatggagcatgattaccacattggctagtggcacaacatgcctacgtatctaatatttaatgaagtggattcttgttaagcagaaattggttgtcctcaagaaaatgtagaatctcatgtacaaaaggtatcaacaagatgttaataaattgaacctcatattgagactgctaagatgaaatggatttctattaaggagaaattggttgtcctcaaggaaaatgcaggaccttacgtacaaattggttgtcttcaaaatgttggtcttgtagctgcaagcctgcaacaaagagaataaacaattgtggtgatgctacacatgtagaagtagcaatgttggtcttgtaactcccaagatttggttattgatgaatgatatctatgataatatattgctaagtgtatgtgatgatcatttattgttgtttaattataatgagttgtgccttttgtgctacgttggcattggtgatagttaaaaactaaaatggcc

SEQ ID NO: 73074 - DNA, 1045 bp, Zea Mays
aacagtagccccatcctcctcgttggtcgtcgtcgccgcctcacagcctcgcccctgaccccgcccggcgccagatgcatacgaccaggagctcgattgcttaccggcaatggtgcagtccatcgtctccatcgacaagatttgtgccatgcttgaggtattaggccatacgagagggttcatggagcatgattaccacattggctagtggcacaacatgcctacgtatctaatatttaatggtgcaattactatgctcgtgttctctcattgctatgtttgtcatcatctgtaggaggttgtcttaggtcactggaatcaacatgggaaacctgttgtgcagaatgttttgtagtatgtttttcataaggttcctcttcatactacatgcttttctttctgatttcaaaaatgcattacacaaataaaattaccatttatatgtctgtatctaatatttaaggcataagaaaaattagcataggcaaagaaatgggtcaaacctcatgttgagactactaagatggtaatacccatttgttcatgtagttcaatttattatgttttatcttgggcttatagttggctaacattattactttctatgattgaagaagtggattcttgttaagcagaaattggttgtcctcaagaaaatgtagaatctcatgtacaaaaggtatcaacaagatgttaataaattgaacctcatattgagactgctaagatgaaatggatttctattaaggagaaattggttgtcctcaaggaaaatgcaggaccttacgtacaaattggttgtcttcaaaatgttggtcttgtagctgcaagcctgcaacaaagagaataaacaattgtggtgatgctacacatgtagaagtagcaatgttggtcttgtaactcccaagatttggttattgatgaatgatatctatgataatatattgctaagtgtatgtgatgatcatttattgttgtttaattataatgagttgtgccttttgtgctacgttggcattggtgatagttaaaaactaaaatggcc

SEQ ID NO: 73075 - DNA, 1295 bp, Zea Mays
gtcgtcgccgcctcacagcctcgcccctgaccccgcccggcgccagatgcatacgaccaggaggtcagcgcccccgcctagcactagccgcatccagcctggtggttagcacctcacctcactctagcctccagcctgcacctacaagggccccacaggcagcgcccctgcctggtagccagccacagtcggctaggcggtcaacgcccttgcccgccgcccatgccacacaccggcatccggccagccactgcttcactgtgctccagtagatggtgtgacgcccccatccctcgctctcgctcttcctggctctgatctgatccaccttctgcgttaggctcgattgcttaccggcaatggtgcagtccatcgtctccatcgacaagatttgtgccatgcttgaggtattaggccatacgagagggttcatggagcatgattaccacattggctagtggcacaacatgcctacgtatctaatatttaatggtgcaattactatgctcgtgttctctcattgctatgtttgtcatcatctgtaggaggttgtcttaggtcactggaatcaacatgggaaacctgttgtgcagaatgttttgtagtatgtttttcataaggttcctcttcatactacatgcttttctttctgatttcaaaaatgcattacacaaataaaattaccatttatatgtctgtatctaatatttaaggcataagaaaaattagcataggcaaagaaatgggtcaaacctcatgttgagactactaagatggtaatacccatttgttcatgtagttcaatttattatgttttatcttgggcttatagttggctaacattattactttctatgattgaagaagtggattcttgttaagcagaaattggttgtcctcaagaaaatgtagaatctcatgtacaaaaggtatcaacaagatgttaataaattgaacctcatattgagactgctaagatgaaatggatttctattaaggagaaattggttgtcctcaaggaaaatgcaggaccttacgtacaaattggttgtcttcaaaatgttggtcttgtagctgcaagcctgcaacaaagagaataaacaattgtggtgatgctacacatgtagaagtagcaatgttggtcttgtaactcccaagatttggttattgatgaatgatatctatgataatatattgctaagtgtatgtgatgatcatttattgttgtttaattataatgagttgtgccttttgtgctacgttggcattggtgatagttaaaaactaaaatggcc

SEQ ID NO: 73076 - DNA, 1241 bp, Zea Mays
cacagcctcgcccctgaccccgcccggcgccagatgcatacgaccaggaggtcagcgcccccgcctagcactagccgcatccagcctggtggttagcacctcacctcactctagcctccagcctgcacctacaagggccccacaggcagcgcccctgcctggtagccagccacagtcggctaggcggtcaacgcccttgcccgccgcccatgccacacaccggcatccggccagccactgcttcactgtgctccagtagatgctcgattgcttaccggcaatggtgcagtccatcgtctccatcgacaagatttgtgccatgcttgaggtattaggccatacgagagggtatgttcgattatagttgttttaggttcatggagcatgattaccacattggctagtggcacaacatgcctacgtatctaatatttaatggtgcaattactatgctcgtgttctctcattgctatgtttgtcatcatctgtaggaggttgtcttaggtcactggaatcaacatgggaaacctgttgtgcagaatgttttgtagtatgtttttcataaggttcctcttcatactacatgcttttctttctgatttcaaaaatgcattacacaaataaaattaccatttatatgtctgtatctaatatttaaggcataagaaaaattagcataggcaaagaaatgggtcaaacctcatgttgagactactaagatggtaatacccatttgttcatgtagttcaatttattatgttttatcttgggcttatagttggctaacattattactttctatgattgaagaagtggattcttgttaagcagaaattggttgtcctcaagaaaatgtagaatctcatgtacaaaaggtatcaacaagatgttaataaattgaacctcatattgagactgctaagatgaaatggatttctattaaggagaaattggttgtcctcaaggaaaatgcaggaccttacgtacaaattggttgtcttcaaaatgttggtcttgtagctgcaagcctgcaacaaagagaataaacaattgtggtgatgctacacatgtagaagtagcaatgttggtcttgtaactcccaagatttggttattgatgaatgatatctatgataatatattgctaagtgtatgtgatgatcatttattgttgtttaattataatgagttgtgccttttgtgctacgttggcattggtgatagttaaaaactaaaatggcc

SEQ ID NO: 73077 - DNA, 1201 bp, Zea Mays
acgaccaggaggtcagcgcccccgcctagcactagccgcatccagcctggtggttagcacctcacctcactctagcctccagcctgcacctacaagggccccacaggcagcgcccctgcctggtagccagccacagtcggctaggcggtcaacgcccttgcccgccgcccatgccacacaccggcatccggccagccactgcttcactgtgctccagtagatggtgtgacgcccccatccctcgctctcgctcttcctggctctgatctgatccaccttctgcgttaggctcgattgcttaccggcaatggtgcagtccatcgtctccatcgacaagatttgtgccatgcttgaggttcatggagcatgattaccacattggctagtggcacaacatgcctacgtatctaatatttaatggtgcaattactatgctcgtgttctctcattgctatgtttgtcatcatctgtaggaggttgtcttaggtcactggaatcaacatgggaaacctgttgtgcagaatgttttgtagtatgtttttcataaggttcctcttcatactacatgcttttctttctgatttcaaaaatgcattacacaaataaaattaccatttatatgtctgtatctaatatttaaggcataagaaaaattagcataggcaaagaaatgggtcaaacctcatgttgagactactaagatggtaatacccatttgttcatgtagttcaatttattatgttttatcttgggcttatagttggctaacattattactttctatgattgaagaagtggattcttgttaagcagaaattggttgtcctcaagaaaatgtagaatctcatgtacaaaagttggttgacactgttacttatgattgaagaaatggatttctattaaggagaaattggttgtcctcaaggaaaatgcaggaccttacgtacaaattggttgtcttcaaaatgttggtcttgtagctgcaagcctgcaacaaagagaataaacaattgtggtgatgctacacatgtagaagtagcaatgttggtcttgtaactcccaagatttggttattgatgaatgatatctatgataatatattgctaagtgtatgtgatgatcatttattgttgtttaattataatgagttgtgccttttgtgctacgttggcattggtgatagttaaaaactaaaatggcc

SEQ ID NO: 73078 - DNA, 1005 bp, Zea Mays
tagcactagccgcatccagcctggtgctcgattgcttaccggcaatggtgcagtccatcgtctccatcgacaagatttgtgccatgcttgaggtattaggccatacgagagggtatgttcgattatagttgttttaggttcatggagcatgattaccacattggctagtggcacaacatgcctacgtatctaatatttaatggtgcaattactatgctcgtgttctctcattgctatgtttgtcatcatctgtaggaggttgtcttaggtcactggaatcaacatgggaaacctgttgtgcagaatgttttgtagtatgtttttcataaggttcctcttcatactacatgcttttctttctgatttcaaaaatgcattacacaaataaaattaccatttatatgtctgtatctaatatttaaggcataagaaaaattagcataggcaaagaaatgggtcaaacctcatgttgagactactaagatggtaatacccatttgttcatgtagttcaatttattatgttttatcttgggcttatagttggctaacattattactttctatgattgaagaagtggattcttgttaagcagaaattggttgtcctcaagaaaatgtagaatctcatgtacaaaaggtatcaacaagatgttaataaattgaacctcatattgagactgctaagatgaaatggatttctattaaggagaaattggttgtcctcaaggaaaatgcaggaccttacgtacaaattggttgtcttcaaaatgttggtcttgtagctgcaagcctgcaacaaagagaataaacaattgtggtgatgctacacatgtagaagtagcaatgttggtcttgtaactcccaagatttggttattgatgaatgatatctatgataatatattgctaagtgtatgtgatgatcatttattgttgtttaattataatgagttgtgccttttgtgctacgttggcattggtgatagttaaaaactaaaatggcc

SEQ ID NO: 73079 - DNA, 770 bp, Zea Mays
ctggtggttagcacctcacctcactctagcctccagcctgcacctacaagggccccacaggcagcgcccctgcctggtagccagccacagtcggctaggcggtcaacgcccttgcccgccgcccatgccacacaccggcatccggccagccactgcttcactgtgctccagtagatgctcgattgcttaccggcaatggtgcagtccatcgtctccatcgacaagatttgtgccatgcttgagtgttatccttataccggtactccacatgaaggttcatggagcatgattaccacattggctagtggcacaacatgcctacgtatctaatatttaatgaagtggattcttgttaagcagaaattggttgtcctcaagaaaatgtagaatctcatgtacaaaaggtatcaacaagatgttaataaattgaacctcatattgagactgctaagatgaaatggatttctattaaggagaaattggttgtcctcaaggaaaatgcaggaccttacgtacaaattggttgtcttcaaaatgttggtcttgtagctgcaagcctgcaacaaagagaataaacaattgtggtgatgctacacatgtagaagtagcaatgttggtcttgtaactcccaagatttggttattgatgaatgatatctatgataatatattgctaagtgtatgtgatgatcatttattgttgtttaattataatgagttgtgccttttgtgctacgttggcattggtgatagttaaaaactaaaatggcc

SEQ ID NO: 73080 - DNA, 1193 bp, Zea Mays
ttagcacctcacctcactctagcctccagcctgcacctacaagggccccacaggcagcgcccctgcctggtagccagccacagtcggctaggcggtcaacgcccttgcccgccgcccatgccacacaccggcatccggccagccactgcttcactgtgctccagtagatggtgtgacgcccccatccctcgctctcgctcttcctggctctgatctgatccaccttctgcgttaggctcgattgcttaccggcaatggtgcagtccatcgtctccatcgacaagatttgtgccatgcttgaggtattaggccatacgagagggtatgttcgattatagttgttttaggttcatggagcatgattaccacattggctagtggcacaacatgcctacgtatctaatatttaatggtgcaattactatgctcgtgttctctcattgctatgtttgtcatcatctgtaggaggttgtcttaggtcactggaatcaacatgggaaacctgttgtgcagaatgttttgtagtatgtttttcataaggttcctcttcatactacatgcttttctttctgatttcaaaaatgcattacacaaataaaattaccatttatatgtctgtatctaatatttaaggcataagaaaaattagcataggcaaagaaatgggtcaaacctcatgttgagactactaagatggtaatacccatttgttcatgtagttcaatttattatgttttatcttgggcttatagttggctaacattattactttctatgattgaagaagtggattcttgttaagcagaaattggttgtcctcaagaaaatgtagaatctcatgtacaaaagttggttgacactgttacttatgattgaagaaatggatttctattaaggagaaattggttgtcctcaaggaaaatgcaggaccttacgtacaaattggttgtcttcaaaatgttggtcttgtagctgcaagcctgcaacaaagagaataaacaattgtggtgatgctacacatgtagaagtagcaatgttggtcttgtaactcccaagatttggttattgatgaatgatatctatgataatatattgctaagtgtatgtgatgatcatttattgttgtttaattataatgagttgtgccttttgtgctacgttggcattggtgatagttaaaaactaaaatggcc

SEQ ID NO: 73081 - DNA, 2999 bp, Zea Mays
cgaaagtgttggcgaatatgccgcgcaggggcatgctgccgtcgagatggttgtaggacaagtccagctcgaccagggagctcaggtcatcccgttcctccgggacggctcatcatttctggacaggtacagctcctgcaggccagacatgtggccgagctccagtgggatgctcccggacaaccagttgctcgccaggctgagtctcctgagacccttgagcttgctcagcgacggagggatgcttccatggaaggaattgaaatccagatcaagaaactctaggctctagcaatgctccagctcttctggtagctgaccggagaatctgttcccggatagcgctagctgagcaaggttggtgaggatggagacgtcaggttggctagagtgtcggggatgaacccactcagcgcgttactgctcagatcaagctccagtagctgggtgaggtcgctgatggaggatgggattggcctcgtcaaccggttcccctgcaacgccaacttcgtgaggttcttcatgtccccaatccctgctgggatggtgccgttgaggaggttggattcgaggcccaacgttgtgagcccgatgaggtcgccgatggccggtggaatagacccggagatgcgggttttccctatgtccagtgcttgaatctccctcaggagttgggcaatggagcctggcaactggccaccgagcttgttgtcgtcaagggcgaggacctgtaggctgccgcagttggtaagatggtccaggaactcccagccttgctcgtcgctcgcgtcagctggttgcctgacatgtacagcgactgtgggcagagcatgccgatgactcactgctcctttgtatatttatgctattgttttcatccgacaccgtaaattgcagcctgcttaccaacttcagacgctctcgtcgccgatttgctgcattgcatccaagtgatagtgtcgtagtggtatgacagcctctttttaccttgtactacatttacatcctcttttttttactagcctggctcaagttatttcgttattgttacatgctactactgctcttgttcctgccttttgcgctggatgtcctctagctttggccacaccacaccacccttttatgttccgttggaggggtttggttttctatctgtacacaatcactgtaatgttttgtggagttttccaggatatattatgtgcaggtatccacagagtctcgaaactgaaatcgatcgtgcggtatatgttccacaatcccgacgacgtaaaatggttcaaggcaagtatttctgcgcgccattgacatatccaatttatccattttcgacgcaacgacaatgttatttttgcagcctattgagtggtggacaaaacatggtcgttgtggacgcataaaggagaccgttggtactcatggtgcgtcggttcaccaatcaaatgctttttgacagcttagatccagtttatcattatatatccctatttctggacctcttgctaatgttttctttccgccatgaaatgcttattcaacagcagcatgatgttgtgtgcatgagcttgtacaaacacgcgtacctgaaatggcctgaacagctctaccactgacgtttggctggatctgtaccagcaggctatccaaacaacgggaatgaaacagccgctagcgaggcatgtagcctatctaaatatttttaggattagaaaattgctttgtattggtccatcttatacttttctttaacattacaccctcattcttcttggtcttagacgactcttttcagtatcaattcaaaattcatgtttaactaggtgagtgcccgtgcgttgcaacggggacatataatattatagtgacttatatataaaatgtgtgtattatatgtctccgttgcaacgcacgggcactcacctagtttctattatcagctttccctctcaaagcccaatgcccaaacaacgtacagcctcgtggcagtagacacgaatatgagcgaccgacgactcaatggtgtggctgccccgacatatcacatcgctatcaagtgtgacgtgacaagacgtctaggccccaacgtttgtggatcgagtgcaagcggttgtcgagtgacttctttatttgtccagactggagcctgtcttgttcagtcaccgcacgcacgtccataacgaggtctgtgcctcgtcagtgccagcggagccctcgtaggccaacgcagcagcaggcacctcggcgccatggcccatgacaccgagcaaagggtccaaaaacgatattaagttgtcaaaaagtctaaacgtggtatttttcgaaaaaaagattaaaatataaaaaattcggtcgtcaatccaatgggtggtgatatcgtgctttttttcatcctagacaacaactggattggccagtcagccagtacacctaatgaattaaccacaatccaatatgattatctcaacatactttgattgctgcacacatatacatctatctattaacctagtgcagaagaacacagtagactatcctcttctatgtaaaattggccgtgcttagtgtgtgttttgtgtacttgtgacaaaccaaataaacccaactagtaaaatatggtgtttgtacaggtcttttatgcttgtagaaaaattgagcatatgacatgtttagtaaaaactgagcatgtggtgttttttagaaaaattgagcatattgcatctcaaatacttgccacaaaaacaacatgatgaaatgaaatagcttaggcatgtattcatgcacttattagtccaagatactcgcattatttctcaggggaggccaaacaagcaagataaaaagagagaagccaccatcaatccaaatgaatgttctaatatccagtgctagtgggcacgcacacatgacagtgacatggtagagaatgtacaattgaaaattaatagcgacatatgcatgtaaaataaaaataccagtgcacaacaagcataatgcat

SEQ ID NO: 73082 - DNA, 2809 bp, Zea Mays
gtcatcccgttcctccgggacggctcatcatttctggacaggtacagctcctgcaggccagacatgtggccgagctccagtgggatgctcccggacaaccagttgctcgccaggctgagtctcctgagacccttgagcttgctcagcgacggagggatgcttccatggaaggaattgaaatccagatcaagaaactctaggctctagcaatgctccagctcttctggtagctgaccggagaatctgttcccggatagcgctagctgagcaaggttggtgaggatggagacgtcaggttggctagagtgtcggggatgaacccactcagcgcgttactgctcagatcaagctccagtagctgggtgaggtcgctgatggaggatgggattggcctcgtcaaccggttcccctgcaacgccaacttcgtgaggttcttcatgtccccaatccctgctgggatggtgccgttgaggaggttggattcgaggcccaacgttgtgagcccgatgaggtcgccgatggccggtggaatagacccggagatgcgggttttccctatgtccagtgcttgaatctccctcaggagttgggcaatggagcctggcaactggccaccgagcttgttgtcgtcaagggcgaggacctgtaggctgccgcagttggtaagatggtccaggaactcccagccttgctcgtcgctcgcgtcagctggttgcctgacatgtacagcgactgtgggcagagcatgccgatgactcactgctcctttttttgaagaacagagatggcgagcaacctgccattgtagctgtaggttcgctaaaaagtatggatccagatcggatcattctgaagaaaattgttctgaccatgtaagcttgggtgcatccatcttcacaaggcaattttacttatgcagaatcctgcacccttttatgttccgttggaggggtttggttttctatctgtacacaatcactgtaatgttttgtggagttttccaggatatattatgtgcaggtatccacagagtctcgaaactgaaatcgatcgtgcggtatatgttccacaatcccgacgacgtaaaatggttcaaggcaagtatttctgcgcgccattgacatatccaatttatccattttcgacgcaacgacaatgttatttttgcagcctattgagtggtggacaaaacatggtcgttgtggacgcataaaggagaccgttggtactcatggtgcgtcggttcaccaatcaaatgctttttgacagcttagatccagtttatcattatatatccctatttctggacctcttgctaatgttttctttccgccatgaaatgcttattcaacagcagcatgatgttgtgtgcatgagcttgtacaaacacgcgtacctgaaatggcctgaacagctctaccactgacgtttggctggatctgtaccagcaggctatccaaacaacgggaatgaaacagccgctagcgaggcatgtagcctatctaaatatttttaggattagaaaattgctttgtattggtccatcttatacttttctttaacattacaccctcattcttcttggtcttagacgactcttttcagtatcaattcaaaattcatgtttaactaggtgagtgcccgtgcgttgcaacggggacatataatattatagtgacttatatataaaatgtgtgtattatatgtctccgttgcaacgcacgggcactcacctagtttctattatcagctttccctctcaaagcccaatgcccaaacaacgtacagcctcgtggcagtagacacgaatatgagcgaccgacgactcaatggtgtggctgccccgacatatcacatcgctatcaagtgtgacgtgacaagacgtctaggccccaacgtttgtggatcgagtgcaagcggttgtcgagtgacttctttatttgtccagactggagcctgtcttgttcagtcaccgcacgcacgtccataacgaggtctgtgcctcgtcagtgccagcggagccctcgtaggccaacgcagcagcaggcacctcggcgccatggcccatgacaccgagcaaagggtccaaaaacgatattaagttgtcaaaaagtctaaacgtggtatttttcgaaaaaaagattaaaatataaaaaattcggtcgtcaatccaatgggtggtgatatcgtgctttttttcatcctagacaacaactggattggccagtcagccagtacacctaatgaattaaccacaatccaatatgattatctcaacatactttgattgctgcacacatatacatctatctattaacctagtgcagaagaacacagtagactatcctcttctatgtaaaattggccgtgcttagtgtgtgttttgtgtacttgtgacaaaccaaataaacccaactagtaaaatatggtgtttgtacaggtcttttatgcttgtagaaaaattgagcatatgacatgtttagtaaaaactgagcatgtggtgttttttagaaaaattgagcatattgcatctcaaatacttgccacaaaaacaacatgatgaaatgaaatagcttaggcatgtattcatgcacttattagtccaagatactcgcattatttctcaggggaggccaaacaagcaagataaaaagagagaagccaccatcaatccaaatgaatgttctaatatccagtgctagtgggcacgcacacatgacagtgacatggtagagaatgtacaattgaaaattaatagcgacatatgcatgtaaaataaaaataccagtgcacaacaagcataatgcat

SEQ ID NO: 73083 - DNA, 3422 bp, Zea Mays
cccgatcgcaagtctgttgtgcttgtgcctgcgctgcgcggccttgctgtcccgtctctcgcccgcccgaccgctgtctcgctcgcctcccgtctcgcttcgtctccattttctccccaccccaccacacccgcgtcaaccaaccaaaccctagaaggctctcgccctcgtccccaatccctcgccgccccgcgatccccgccgcccgcaggccaaaaccctacgcgtattgctcgacgccggttcggtggccccatggtttgatccgccgacgcgcgggaatgccaacgctcgctggagagtgtgtgggagactgggagccgcgcgcccgtggaattcagacggggaacggccgctggggctccacgggatcgcgtgattgcggtgcgggtgaccgtggcgggcgtaccatgcgcgcctgggcatggaaggacgccacacgtcgataattttcggggattgggcacaggtgatggctcgcggggatttgcagggagtcctctcggtgtcaggatgctggtgaagctatgggtgattatgctgtagagtttcgtgaaaagagaatttttggtttcttatctactggctcatgaattgatgattaggttttggaattcaagggatgagaaatgtaagcgcagtttttctggaggctaatagatgcaaaatgctcattcagccaaaattctggttatagtagctgtatagacagtgtaatcactttgtcagaaatgccttctgcatccaagtccaaggcaaaagaaagatcagctgcaaaagttgcaaaagagcaacccaaggttgctgcaaagccaatgggaaatgctacacttgcaagttcttataacaacctgtctggaaagttccatgttctggaaccatcaagctctttgttgggtagccaaggcatcgataaattcaggaatacagatgaaatagatgagcattctcgcagctcccatggtacaggggatttcgattgtgcctccaacaatggtagctgttctggtgactcagaggatacaaaggaaaaatcaaccagcactgcgtcccgagtagactctgttcctggatgtgatattgataaacgtgagaagattagacagaaaaatgagaagaagcatcaaagacagaaggagaggcgtgcccaagagttacacgagcgttgtaagggatacattatgtccagaaagttggaagcacttgcgcagaagcttgttgcgatgggtttctcagcagatcaagcaacgatggctcttatacaaaatgagggttgcgttgaggagtctgttacctggctctgcaactttgatgccagtgaggaagctaaacaacaacttgtagctgatcaacagtctggagttaacttgaagattgatatagctgatgagctttcaaagattgtgagcttggaggcaaaatataagtgtacaaagcaagaagttgaaagggcagttgtttcctgtgaaggtgatctagaaagggccgaggaggccttgaagacacacaagcaagaatcaactgcaatcccaccaaagcctgaggggtctggctattcaagtggcttgcctaataagccgcaagttgtacttgcacagaaccctgcaaggcctcaaacaaatggattatcatcagtaggatctcatcagatgagaagagaggagaaggacataaactataagcttttgatgaatggtagtggtccaaaggaacctgcaattaaaggttttcagccactggcaacaccgattaagccagatttggtccgtcagcaatttgttcaacctgagaagagacgtctcaatcccaactcgaatccatcagttccttctgtggcatcgtctcctttgcctgttgcagtgccacaagtgaagccagacatgcggcatgtggcagggaccaatgaggtgaaaagtttgatgcccaatggaagcttgcgagagtctgtgattgtaatgcagcgtcctcaatctgcaggtaccaaacagagcctaccatccactagccatagtatgtttgtgtcagaaccatctgcaagggattggtacttaaatggcgtgtcaggtgtggatatgatgttgaatgggggcttaggtcatggactaaggaatatgagtttggacagtgctagttctgccaggtcgtttgggcatgcaaaccatcaacaaaatttggtttctaatcctatagagctggctgccaatggttggggtggcacctggagttctggaggtacatcatcttcccgttctgtggtgtcatcactcggggcatttagagggtggaatgcatccgagtcctctgcattgcctcattctgattggagaaccaacggggcagcaccttatgactacacctcagtagactggagcgtcgacacaacactattgaacccagcagcaaagagcgagctgctgtcggacacatggtcaaccatgttcatgggtggcagatcaacaaggacacctgggaacctcagtggtgcaggcatcgctgggttgtatgacagtaaccgtccaatggatcctgctccttcggctcgtccatatgagtggcctactttctgcaggggaggatcttcctagtttccccaaccctgtaggcaagaggccattgaataaaaaaagtaaaagctgtcatttgtttcttttcttgttttggtctcagttgcagttggttgaaaaagttttactttgtctatcgaaccgagcttgtgtacccttgactgttggccgagataagtcatctttctgtgaaatcgttgtgcatgaaaaatgaaggaagagaactgaatctatcttggctgaaatgcaggtaattgtttttattttacttgctataatagtaacttactaattctttctcacagttcggcttagctgccatgtgcattcttgcttcacggactgtttttactgcggtccttctgaaaaaaggcacacacgtttttctcttcttttatttacttggttgcttattaccaccgaaacttgtatatgtgtttcatcaaccttcaagagaagaggttaaaagaatattatcatgttttacattggcgtcgtgtaacctgtgttttatccagaaaatgcaggagttttcctatatgttggcaatgtgtattttcttcacagtgatttatgcacatgagaccaattgtgactccaaaccatttgaagcctcttttcttcttcctggtttattcaacgagaacatcgaatttagctttctcggtctgttgggctggccaatttcctcgtgatgactgatgggatcagtgtttgaaactaggtagcataaaatggcatgttcattcagattatatgatcctattatgaccctcaggggttctcggtacaatatgcataccagagtatatggtgtttgtaccgcaacttaaatatttgtctcacaattgaagtggt

SEQ ID NO: 73084 - DNA, 2632 bp, Zea Mays
cgcccgaccgctgtctcgctcgcctcccgtctcgcttcgtctccattttctccccaccccaccacacccgcgtcaaccaaccaaaccctagaaggctctcgccctcgtccccaatccctcgccgccccgcgatccccgccgcccgcaggccaaaaccctacgcgtattgctcgacgccgggtatagacagtgtaatcactttgtcagaaatgccttctgcatccaagtccaaggcaaaagaaagatcagctgcaaaagttgcaaaagagcaacccaaggttgctgcaaagccaatgggaaatgctacacttgcaagttcttataacaacctgtctggaaagttccatgttctggaaccatcaagctctttgttgggtagccaaggcatcgataaattcaggaatacagatgaaatagatgagcattctcgcagctcccatggtacaggggatttcgattgtgcctccaacaatggtagctgttctggtgactcagaggatacaaaggaaaaatcaaccagcactgcgtcccgagtagactctgttcctggatgtgatattgataaacgtgagaagattagacagaaaaatgagaagaagcatcaaagacagaaggagaggcgtgcccaagagttacacgagcgttgtaagggatacattatgtccagaaagttggaagcacttgcgcagaagcttgttgcgatgggtttctcagcagatcaagcaacgatggctcttatacaaaatgagggttgcgttgaggagtctgttacctggctctgcaactttgatgccagtgaggaagctaaacaacaacttgtagctgatcaacagtctggagttaacttgaagattgatatagctgatgagctttcaaagattgtgagcttggaggcaaaatataagtgtacaaagcaagaagttgaaagggcagttgtttcctgtgaaggtgatctagaaagggccgaggaggccttgaagacacacaagcaagaatcaactgcaatcccaccaaagcctgaggggtctggctattcaagtggcttgcctaataagccgcaagttgtacttgcacagaaccctgcaaggcctcaaacaaatggattatcatcagtaggatctcatcagatgagaagagaggagaaggacataaactataagcttttgatgaatggtagtggtccaaaggaacctgcaattaaaggttttcagccactggcaacaccgattaagccagatttggtccgtcagcaatttgttcaacctgagaagagacgtctcaatcccaactcgaatccatcagttccttctgtggcatcgtctcctttgcctgttgcagtgccacaagtgaagccagacatgcggcatgtggcagggaccaatgaggtgaaaagtttgatgcccaatggaagcttgcgagagtctgtgattgtaatgcagcgtcctcaatctgcaggtaccaaacagagcctaccatccactagccatagtatgtttgtgtcagaaccatctgcaagggattggtacttaaatggcgtgtcaggtgtggatatgatgttgaatgggggcttaggtcatggactaaggaatatgagtttggacagtgctagttctgccaggtcgtttgggcatgcaaaccatcaacaaaatttggtttctaatcctatagagctggctgccaatggttggggtggcacctggagttctggaggtacatcatcttcccgttctgtggtgtcatcactcggggcatttagagggtggaatgcatccgagtcctctgcattgcctcattctgattggagaaccaacggggcagcaccttatgactacacctcagtagactggagcgtcgacacaacactattgaacccagcagcaaagagcgagctgctgtcggacacatggtcaaccatgttcatgggtggcagatcaacaaggacacctgggaacctcagtggtgcaggcatcgctgggttgtatgacagtaaccgtccaatggatcctgctccttcggctcgtccatatgagtggcctactttctgcaggggaggatcttcctagtttccccaaccctgtaggcaagaggccattgaataaaaaaagtaaaagctgtcatttgtttcttttcttgttttggtctcagttgcagttggttgaaaaagttttactttgtctatcgaaccgagcttgtgtacccttgactgttggccgagataagtcatctttctgtgaaatcgttgtgcatgaaaaatgaaggaagagaactgaatctatcttggctgaaatgcagaaaatgcaggagttttcctatatgttggcaatgtgtattttcttcacagtgatttatgcacatgagaccaattgtgactccaaaccatttgaagcctcttttcttcttcctggtttattcaacgagaacatcgaatttagctttctcggtctgttgggctggccaatttcctcgtgatgactgatgggatcagtgtttgaaactaggtagcataaaatggcatgttcattcagattatatgatcctattatgaccctcaggggttctcggtacaatatgcataccagagtatatggtgtttgtaccgcaacttaaatatttgtctcacaattgaagtggt

SEQ ID NO: 73085 - DNA, 2904 bp, Zea Mays
caacgctcgctggagagtgtgtgggagactgggagccgcgcgcccgtggaattcagacggggaacggccgctggggctccacgggatcgcgtgattgcggtgcgggtgaccgtggcgggcgtaccatgcgcgcctgggcatggaaggacgccacacgtcgataattttcggggattgggcacaggtatagacagtgtaatcactttgtcagaaatgccttctgcatccaagtccaaggcaaaagaaagatcagctgcaaaagttgcaaaagagcaacccaaggttgctgcaaagccaatgggaaatgctacacttgcaagttcttataacaacctgtctggaaagttccatgttctggaaccatcaagctctttgttgggtagccaaggcatcgataaattcaggaatacagatgaaatagatgagcattctcgcagctcccatggtacaggggatttcgattgtgcctccaacaatggtagctgttctggtgactcagaggatacaaaggaaaaatcaaccagcactgcgtcccgagtagactctgttcctggatgtgatattgataaacgtgagaagattagacagaaaaatgagaagaagcatcaaagacagaaggagaggcgtgcccaagagttacacgagcgttgtaagggatacattatgtccagaaagttggaagcacttgcgcagaagcttgttgcgatgggtttctcagcagatcaagcaacgatggctcttatacaaaatgagggttgcgttgaggagtctgttacctggctctgcaactttgatgccagtgaggaagctaaacaacaacttgtagctgatcaacagtctggagttaacttgaagattgatatagctgatgagctttcaaagattgtgagcttggaggcaaaatataagtgtacaaagcaagaagttgaaagggcagttgtttcctgtgaaggtgatctagaaagggccgaggaggccttgaagacacacaagcaagaatcaactgcaatcccaccaaagcctgaggggtctggctattcaagtggcttgcctaataagccgcaagttgtacttgcacagaaccctgcaaggcctcaaacaaatggattatcatcagtaggatctcatcagatgagaagagaggagaaggacataaactataagcttttgatgaatggtagtggtccaaaggaacctgcaattaaaggttttcagccactggcaacaccgattaagccagatttggtccgtcagcaatttgttcaacctgagaagagacgtctcaatcccaactcgaatccatcagttccttctgtggcatcgtctcctttgcctgttgcagtgccacaagtgaagccagacatgcggcatgtggcagggaccaatgaggtgaaaagtttgatgcccaatggaagcttgcgagagtctgtgattgtaatgcagcgtcctcaatctgcaggtaccaaacagagcctaccatccactagccatagtatgtttgtgtcagaaccatctgcaagggattggtacttaaatggcgtgtcaggtgtggatatgatgttgaatgggggcttaggtcatggactaaggaatatgagtttggacagtgctagttctgccaggtcgtttgggcatgcaaaccatcaacaaaatttggtttctaatcctatagagctggctgccaatggttggggtggcacctggagttctggaggtacatcatcttcccgttctgtggtgtcatcactcggggcatttagagggtggaatgcatccgagtcctctgcattgcctcattctgattggagaaccaacggggcagcaccttatgactacacctcagtagactggagcgtcgacacaacactattgaacccagcagcaaagagcgagctgctgtcggacacatggtcaaccatgttcatgggtggcagatcaacaaggacacctgggaacctcagtggtgcaggcatcgctgggttgtatgacagtaaccgtccaatggatcctgctccttcggctcgtccatatgagtggcctactttctgcaggggaggatcttcctagtttccccaaccctgtaggcaagaggccattgaataaaaaaagtaaaagctgtcatttgtttcttttcttgttttggtctcagttgcagttggttgaaaaagttttactttgtctatcgaaccgagcttgtgtacccttgactgttggccgagataagtcatctttctgtgaaatcgttgtgcatgaaaaatgaaggaagagaactgaatctatcttggctgaaatgcaggtaattgtttttattttacttgctataatagtaacttactaattctttctcacagttcggcttagctgccatgtgcattcttgcttcacggactgtttttactgcggtccttctgaaaaaaggcacacacgtttttctcttcttttatttacttggttgcttattaccaccgaaacttgtatatgtgtttcatcaaccttcaagagaagaggttaaaagaatattatcatgttttacattggcgtcgtgtaacctgtgttttatccagaaaatgcaggagttttcctatatgttggcaatgtgtattttcttcacagtgatttatgcacatgagaccaattgtgactccaaaccatttgaagcctcttttcttcttcctggtttattcaacgagaacatcgaatttagctttctcggtctgttgggctggccaatttcctcgtgatgactgatgggatcagtgtttgaaactaggtagcataaaatggcatgttcattcagattatatgatcctattatgaccctcaggggttctcggtacaatatgcataccagagtatatggtgtttgtaccgcaacttaaatatttgtctcacaattgaagtggt

SEQ ID NO: 73086 - DNA, 2832 bp, Zea Mays
gtgaagctatgggtgattatgctgtagagtttcgtgaaaagagaatttttggtttcttatctactggctcatgaattgatgattaggttttggaattcaagggatgagaaatgtatagacagtgtaatcactttgtcagaaatgccttctgcatccaagtccaaggcaaaagaaagatcagctgcaaaagttgcaaaagagcaacccaaggttgctgcaaagccaatgggaaatgctacacttgcaagttcttataacaacctgtctggaaagttccatgttctggaaccatcaagctctttgttgggtagccaaggcatcgataaattcaggaatacagatgaaatagatgagcattctcgcagctcccatggtacaggggatttcgattgtgcctccaacaatggtagctgttctggtgactcagaggatacaaaggaaaaatcaaccagcactgcgtcccgagtagactctgttcctggatgtgatattgataaacgtgagaagattagacagaaaaatgagaagaagcatcaaagacagaaggagaggcgtgcccaagagttacacgagcgttgtaagggatacattatgtccagaaagttggaagcacttgcgcagaagcttgttgcgatgggtttctcagcagatcaagcaacgatggctcttatacaaaatgagggttgcgttgaggagtctgttacctggctctgcaactttgatgccagtgaggaagctaaacaacaacttgtagctgatcaacagtctggagttaacttgaagattgatatagctgatgagctttcaaagattgtgagcttggaggcaaaatataagtgtacaaagcaagaagttgaaagggcagttgtttcctgtgaaggtgatctagaaagggccgaggaggccttgaagacacacaagcaagaatcaactgcaatcccaccaaagcctgaggggtctggctattcaagtggcttgcctaataagccgcaagttgtacttgcacagaaccctgcaaggcctcaaacaaatggattatcatcagtaggatctcatcagatgagaagagaggagaaggacataaactataagcttttgatgaatggtagtggtccaaaggaacctgcaattaaaggttttcagccactggcaacaccgattaagccagatttggtccgtcagcaatttgttcaacctgagaagagacgtctcaatcccaactcgaatccatcagttccttctgtggcatcgtctcctttgcctgttgcagtgccacaagtgaagccagacatgcggcatgtggcagggaccaatgaggtgaaaagtttgatgcccaatggaagcttgcgagagtctgtgattgtaatgcagcgtcctcaatctgcaggtaccaaacagagcctaccatccactagccatagtatgtttgtgtcagaaccatctgcaagggattggtacttaaatggcgtgtcaggtgtggatatgatgttgaatgggggcttaggtcatggactaaggaatatgagtttggacagtgctagttctgccaggtcgtttgggcatgcaaaccatcaacaaaatttggtttctaatcctatagagctggctgccaatggttggggtggcacctggagttctggaggtacatcatcttcccgttctgtggtgtcatcactcggggcatttagagggtggaatgcatccgagtcctctgcattgcctcattctgattggagaaccaacggggcagcaccttatgactacacctcagtagactggagcgtcgacacaacactattgaacccagcagcaaagagcgagctgctgtcggacacatggtcaaccatgttcatgggtggcagatcaacaaggacacctgggaacctcagtggtgcaggcatcgctgggttgtatgacagtaaccgtccaatggatcctgctccttcggctcgtccatatgagtggcctactttctgcaggggaggatcttcctagtttccccaaccctgtaggcaagaggccattgaataaaaaaagtaaaagctgtcatttgtttcttttcttgttttggtctcagttgcagttggttgaaaaagttttactttgtctatcgaaccgagcttgtgtacccttgactgttggccgagataagtcatctttctgtgaaatcgttgtgcatgaaaaatgaaggaagagaactgaatctatcttggctgaaatgcaggtaattgtttttattttacttgctataatagtaacttactaattctttctcacagttcggcttagctgccatgtgcattcttgcttcacggactgtttttactgcggtccttctgaaaaaaggcacacacgtttttctcttcttttatttacttggttgcttattaccaccgaaacttgtatatgtgtttcatcaaccttcaagagaagaggttaaaagaatattatcatgttttacattggcgtcgtgtaacctgtgttttatccagaaaatgcaggagttttcctatatgttggcaatgtgtattttcttcacagtgatttatgcacatgagaccaattgtgactccaaaccatttgaagcctcttttcttcttcctggtttattcaacgagaacatcgaatttagctttctcggtctgttgggctggccaatttcctcgtgatgactgatgggatcagtgtttgaaactaggtagcataaaatggcatgttcattcagattatatgatcctattatgaccctcaggggttctcggtacaatatgcataccagagtatatggtgtttgtaccgcaacttaaatatttgtctcacaattgaagtggt

SEQ ID NO: 73087 - DNA, 245 bp, Zea Mays
ttcatgaacgagtctgcaatatacattatgaaaccagacaagtacgtacaattacatatatcatcaacaatctaaatatttaaatatagatacagtgatgataataattgtaaatatattcagccaaaaaatagtccttgtcgaaatgggccaaaacagccagcccatttgcggcctataggaggtgggcaagcagttagggtttcctaactcttcttgtcgcggccctctctctcttccaccag

SEQ ID NO: 73088 - DNA, 306 bp, Zea Mays
atgggccagacccggccatggcgcggtctcttgcggctggcgcagcccccagccccggctcgccagcgggtggcccggccaggagcggcgggtgtggcctccttccccggcctcggccaggcgcgtgcgggccccagccccgactcgccggtgggcggcccgaccaggagcggtggccatggcggccttgggcacaggcgcggcggcccctggccctgtcggcgcgggagtggctcaccagcgcgcacgggcgcggctccagcggctcggcgcaggccggcggacaagggcgggctcagcccataa

SEQ ID NO: 73089 - DNA, 1755 bp, Zea Mays
cgcagcgatgccaagccctcgacgacgccactgctcgccacgaccccgctgcagcgctgctccagcctctcctgtcgtcccaacacaggcgaccacagtgacgagcccactgcccctggacctgcccgcggcaacactaagtcctcggcgcagccgctgctccatcatctcctgccgccccggcacatgcgaccccccccccccccccctgtgaccgggccgagccgctgtttcagtcgtcccgatgcggtgccctgtacatctgtacgtgagcgccttgccgatctggtaattccactgccacgccctcactctatttctgtctccttaattgtttatactacatatttactacttttccacctttcagctaattcgtgttcgtatttctggatctgtggttaatgatctttctaattcaatatctatgtgcacaaactcaggcagtcaggctacatgtataccaccccctgtacccacccgttctccaatttcatatagaacaagttgttgcttgatattagcgtcccacttgaatgagtctctgtcaactctgtttgtctcttggtttctccgttataatgcttatatgctcccaagtcagttcatgtcaaccaatcaaagaaaataaaaaaatttggcgacggcggagcaggatggcaacgtcccccacagaacttcgcagggctccccaatattcagatattgtaagtgtaacttgctaaattcttcgaatagccttttgcattgaacatggatatggtatcttttacatatggttctgtttattttcactgcaaatatgtgaactttgtgtgtgcattatccagtgaatagattgcaaaagcttctgtttgtaatcttctcgtggctggattcaaatttgtaatcattttatatcatttgaaaataagaatatatatgtaaaacctttcaaactgtcatacattttttattatttatggcatcaggatatatatgttccctcaacaatctggaatggcatcaggattattggaaatagaagctttgttctgtctgacctttttctgcagtagtagttcttttcaagtctaactatacatatgtaataatattttacaataacacagaggcttccaaaacgattctttcaaaacaattctggatacgtttgatcctcccccaaatatcactgtaatgtatgttatcatacatttatgctatgtatttcagttttcacctccacatgaatatcaatagtccctgtacatattggattgcgattatgcacttttatttactgtatataatattaatagacattctatattctgttactgagctgtatttttagataatggaaacatttccagccttcccttcaatagaagttaggtccgggtacaaaagcatgacactaccatccacaaacagacacacgcaataggaaagccattagatcgcctattacatgataatgattgcaaaccaccaaccaacgactggaatgactaaatccttacatgtgtttcagttttatgctgggctacatgtaggaatgatctaatctttgacaaaaaaaaaccctctctcacttatttgcgagttcttttttgagttacctattggctaaggttttggagtaatctgcaaaggaagggtgaagataaggatttaataaaagcaagttgcaggtccttggagacagttgctatgcagtttttttgcacactttggctacatttttcttttgcgtatgattttgtttatttt

SEQ ID NO: 73090 - DNA, 1564 bp, Zea Mays
gcgatgccaagccctcgacgacgccactgctcgccacgaccccgctgcagcgctgctccagcctctcctgtcgtcccaacacaggcgaccacagtgacgagcccactgcccctggacctgcccgcggcaacactaagtcctcggcgcagccgctgctccatcatctcctgccgccccggcacatgcgaccccccccccccccccctgtgaccgggccgagccgctgtttcagtcgtcccgatgcggtgccctgtacatctgtacgtgagcgccttgccgatctggcagtcaggctacatgtataccaccccctgtacccacccgttctccaatttcatatagaacaagttgttgcttgatattagcgtcccacttgaatgagtctctgtcaactctgtttgtctcttggtttctccgttataatgcttatatgctcccaagtcagttcatgtcaaccagtaagtgttcaataacattttgtttcaattgtgcataccatttgatatgtttttggtcatctcagcacaaaattttagtttgttttggctatctgttttatgaagaattaaaccttggataattatgttacttcggtgtgattgggcagaatccactaacaacatatttgttcctgtcaaactgtgtatgaatgatttagtttacattagaagtgtcatccataatttctagatcaaagaaaataaaaaaatttggcgacggcggagcaggatggcaacgtcccccacagaacttcgcagggctccccaatattcagatattgatatatatgttccctcaacaatctggaatggcatcaggattattggaaatagaagctttgttctgtctgacctttttctgcagtagtagttcttttcaagtctaactatacatatgtaataatattttacaataacacagaggcttccaaaacgattctttcaaaacaattctggatacgtttgatcctcccccaaatatcactgtaatgtatgttatcatacatttatgctatgtatttcagttttcacctccacatgaatatcaatagtccctgtacatattggattgcgattatgcacttttatttactgtatataatattaatagacattctatattctgttactgagctgtatttttagataatggaaacatttccagccttcccttcaatagaagttaggtccgggtacaaaagcatgacactaccatccacaaacagacacacgcaataggaaagccattagatcgcctattacatgataatgattgcaaaccaccaaccaacgactggaatgactaaatccttacatgtgtttcagttttatgctgggctacatgtaggaatgatctaatctttgacaaaaaaaaaccctctctcacttatttgcgagttcttttttgagttacctattggctaaggttttggagtaatctgcaaaggaagggtgaagataaggatttaataaaagcaagttgcaggtccttggagacagttgctatgcagtttttttgcacactttggctacatttttcttttgcgtatgattttgtttatttt

SEQ ID NO: 73091 - DNA, 4123 bp, Zea Mays
gtactatcaaggtggtaaacaattcactgtcacagagcgaataggtgagatttctgtagctgtggcaaagactcatattacacccctctgtggggtgcatcataaaacatccatatagaagtttacaatcctttgcatttgtcatccaacaatgtccaacaaatagcacaaaggatatcatgattggaaattttttgtttgtatggcctaacttattttggctactatataaaagcaaaagtcagcttcactccagtggactttaacaacagttcacttcacatccaaaacttccaatgctctaccatttacatggccatcgacatgcagagaaagtggacaacaacaagaggaactcatcaccaccaaagttttgagttcctggcttctagctatttgttctcattgtgcttgttgtttttcaactctccttaccttctttatgcccctttcattcaggtcagtctggactggaacactcatctttgtgatgaaaaacacgctcagggctcagcacattctccaaaaaagtcatacgttgtaggtacacagcacaaggtgaagagggtggcactggagttggggccaatgggaacctaaaatcaagatatactttgctgacagaaccgttgagctgcaatattatctttttttttattttttaccaagcctcagtgccagattccactctaggtcttgtttggttgcatggggattgaggggggactaaatctctttctatttaattttgactagcaaggaattatcctaaccgaacaagcccccaaggggttgacatattgtagtgctggttgggtttgcggtaattctgctgtaaggtgtaagctgcccaagagggatattgagtggggcaaatggaagggaccagagaggatctaggtttgaggacacattgtcaccaagaagcaaggtagcatgaacagcataaactgtcaaattgtgatgaaattgaaatacaacaccatgatatgagtcctgggaatagatacggaagttcggcactagaaatctgccttttctttcttatagatagaagccagctagagaacacctttataaaccccttcaatttgacttaaatgcatgccacagccactcgtccacgtcttacactccagctcataattcagtgaccctacttgatagctaataagcatttctccgtcatgttttatttctatccttggttagagactctcatatttcttttttaacgcaatggcaggatctttgcctttcaattaaaggagagatagaattaacccagattatgaaggaaaccaagcctaaaaacctcacaatggcacagtttattaaagggaaacccaccaaaaatacctaaacataacagcccagatagctaaccctaagcaacccacaaatacacaaaagtgtcacacaaccaatgtagcctaccgtgcgccatcgttgccgagcttaatcccaagatagtgataagcaactccgacttcccacaaaaaacctcagtcaaagcccatactaagctgccactcactcgcaacaagccacgacctcttgagaaaaagaacaatttgccatcgttgtggagctttgttgcaccctcaaaaccaaagcagctccgacttcaccactgcagatccactccaaaagaacctgagatgtgccacaagaaaatcgtgagctagagagagctcagcctcgtcgaaaacccagggcttgcagatcagccacgcgaattggcagatcgacatccatcaaagcggtgcaagatcttctaggtgtcgccttcaagaaagacacgatgttgagtgccgccgtcacaagcctaggtgaagtttcctcataaaaaccccacagaatgagtggaggcgcctcaacgatgcttccaagaaaaaacacttgaagagacctgcccctgcgagggggctagttgtcgactgggccgccgttgtagccgccaccattgccacccttgcctttgttcgagcgtcgaccactattgccctttggcttgccatcaggggcaggggacaggggcgctagactttgtagtggcgatggagctaagacacccatccaaagtggtgcagccagtggcaacaattgaggtaccggaggagaccttgtctttgttggcaaggcacaattccttgagggtgaacatgttgcatgtcgtggtgaagttgggtagcaccgtggagttggcaatgatgtccacaatgttggagaaaagcgacggttgaggccacggagaaggttgaggacgagatcagagtcctggactggatgactgacatcacggagggtgtcggcaatggttttcatatgctagcaataggagttgatggaagtgtcaccctgctgcatggagtgaaactcatggatgaggaagatggcctgaggctccttgttggcgcggaaaaggttcttgatggtaacccagagattgcacgcagtctggtcgtcatcgtccatggtgaagccgaggacgaagccatcgatggagccaaatatccaactgcgaacacatcagtctacttgatcccattgagggtcagtgggattggcaaagcctgtgccatcgatgtgcggcttgaggcaaaatttgcaacataaggacttgaagtgggatgcccacttagtgtagttggagttttgcatctccaatgtcatggggatgtgggacttgacacagacggtggcacaaaggtggacaatcaccaccagctgctcctggttactggaggggatgtcctctgtcgtggacgtggtgctggagtcactagagttcggtggcgccatcagaagaagtgcgacaacgaccaggaagaggagcggcgataggtacccaaaagaagagatcggtggcttcgaccaaagatgtacagggaggggggagggagggggcagcggcgccctagggtttgggatggcaaacagagaggggaagggagccagtggcgccataagaggagtatggcttggtgtacaagtgaggaagctgccgtatgcggacagccagggccatcagagcctgcgcatccagacacaggatccaatcaggcgcttagtctcccattctctgtatgcagattgtccccaaagggaccccgtcagaacatcctccaagggccttcctcccaagggcctccaggaatcaagcgatggcccacttccccaacactaccttcggatccatgaatagcacttctttcttctgaaactcaagtctacagtttggatatcaacactgcagctagcagaaaagggggagggacataacaattgcatttgtacaagcaccaactgatttttcttggagcaatcagataacacagcataaccaaattaagaaaatagagttatagatcaaccccaatctaccaagagtcagatgtgaactagaaaaaggactccattaagcaaatgtaatttgctacctccagcccaaaaaggatagaattgtgtttggagtgaatcaaagttccttaagtttgactaagtttatagaaaatgcctactgatgtgaagaacttagtgagccaattggctttcctccttatagttccccccagttgttttttcccttgattgtttggatggtagctagcttttttctattctcttttgtttgtctatcttttctttctttgtctaggtaagtcaggtttgtgctcccccttcctctcctctcttttctcttccttgtctgtacagccctcctataccatttcttttcctatatttatatttataaaattgccgccgctgtaggggcttcccctacagttttcccggtcaaaaaaaaagtttatagagaatgttattaatatttatgactcttaataggtatgatacttcattgtgaatctaattattattattagatatcataaatagttttttgtatgtatttagtcaaagctgagatagattgccttggtagaaagctcgattgcatcctttttgggagggagtagatcaaatgaaaaaacaaaggaaatataagcaagaaagtaagcaattttcatactgtatgagcagataaacgtaatgtcaatttgtttgcatgaagatcatagacatatattgagtcatcattgctgccagcaacaagttc

SEQ ID NO: 73092 - DNA, 4593 bp, Zea Mays
aaacaattcactgtcacagagcgaataggtgagatttctgtagctgtggcaaagactcatattacacccctctgtggggtgcatcataaaacatccatatagaagtttacaatcctttgcatttgtcatccaacaatgtccaacaaatagcacaaaggatatcatgattggaaattttttgtttgtatggcctaacttattttggctactatataaaagcaaaagtcagcttcactccagtggactttaacaacagttcacttcacatccaaaacttccaatgctctaccatttacatggccatcgacatgcagagaaagtggacaacaacaagaggaactcatcaccaccaaagttttgagttcctggcttctagctatttgttctcattgtgcttgttgtttttcaactctccttaccttctttatgcccctttcattcaggtcagtctggactggaacactcatctttgtgatgaaaaacacgctcagggctcagcacattctccaaaaaagtcatacgttgtaggtacacagcacaaggtgaagagggtggcactggagttggggccaatgggaacctaaaatcaagatatactttgctgacagaaccgttgagctgcaatattatctttttttttattttttaccaagcctcagtgccagattccactctaggtcttgtttggttgcatggggattgaggggggactaaatctctttctatttaattttgactagcaaggaattatcctaaccgaacaagcccccaaggggttgacatattgtagtgctggttgggtttgcggtaattctgctgtaaggtgtaagctgcccaagagggatattgagtggggcaaatggaagggaccagagaggatctaggtttgaggacacattgtcaccaagaagcaaggtagcatgaacagcataaactgtcaaattgtgatgaaattgaaatacaacaccatgatatgagtcctgggaatagatacggaagttcggcactagaaatctgccttttctttcttatagatagaagccagctagagaacacctttataaaccccttcaatttgacttaaatgcatgccacagccactcgtccacgtcttacactccagctcataattcagtgaccctacttgatagctaataagcatttctccgtcatgttttatttctatccttggttagagactctcatatttcttttttaacgcaatggcaggatctttgcctttcaattaaaggagagatagaattaacccagattatgaaggaaaccaagcctaaaaacctcacaatggcacagtttattaaagggaaacccaccaaaaatacctaaacataacagcccagatagctaaccctaagcaacccacaaatacacaaaagtgtcacacaaccaatgtagcctaccgtgcgccatcgttgccgagcttaatcccaagatagtgataagcaactccgacttcccacaaaaaacctcagtcaaagcccatactaagctgccactcactcgcaacaagccacgacctcttgagaaaaagaacaatttgccatcgttgtggagctttgttgcaccctcaaaaccaaagcagctccgacttcaccactgcagatccactccaaaagaacctgagatgtgccacaagaaaatcgtgagctagagagagctcagcctcgtcgaaaacccagggcttgcagatcagccacgcgaattggcagatcgacatccatcaaagcggtgcaagatcttctaggtgtcgccttcaagaaagacacgatgttgagtgccgccgtcacaagcctaggtgaagtttcctcataaaaaccccacagaatgagtggaggcgcctcaacgatgcttccaagaaaaaacacttgaagagacctgcccctgcgagggggctagttgtcgactgggccgccgttgtagccgccaccattgccacccttgcctttgttcgagcgtcgaccactattgccctttggcttgccatcaggggcaggggacaggggcgctagactttgtagtggcgatggagctaagacacccatccaaagtggtgcagccagtggcaacaattgaggtaccggaggagaccttgtctttgttggcaaggcacaattccttgagggtgaacatgttgcatgtcgtggtgaagttgggtagcaccgtggagttggcaatgatgtccacaatgttggagaaaagcgacggttgaggccacggagaaggttgaggacgagatcagagtcctggactggatgactgacatcacggagggtgtcggcaatggttttcatatgctagcaataggagttgatggaagtgtcaccctgctgcatggagtgaaactcatggatgaggaagatggcctgaggctccttgttggcgcggaaaaggttcttgatggtaacccagagattgcacgcagtctggtcgtcatcgtccatggtgaagccgaggacgaagccatcgatggagccaaatatccaactgcgaacacatcagtctacttgatcccattgagggtcagtgggattggcaaagcctgtgccatcgatgtgcggcttgaggcaaaatttgcaacataaggacttgaagtgggatgcccacttagtgtagttggagttttgcatctccaatgtcatggggatgtgggacttgacacagacggtggcacaaaggtggacaatcaccaccagctgctcctggttactggaggggatgtcctctgtcgtggacgtggtgctggagtcactagagttcggtggcgccatcagaagaagtgcgacaacgaccaggaagaggagcggcgataggtacccaaaagaagagatcggtggcttcgaccaaagatgtacagggaggggggagggagggggcagcggcgccctagggtttgggatggcaaacagagaggggaagggagccagtggcgccataagtaagggtcgatagctaaggggtggggtgaggcacgcaagcagcagagtggagccagggttaggctcggactcatgataccatgtgaagaattagggagacaccacacacccatagcagatggtgaccttttagtatataggttgtgtggcttggtgtacaagtaggatgtatgcttgatgtacaagtaaggtgagtacaaagatatacacgcctatacatatctctaacaggaatgtgtcggtgtgttcaggaggagtatggcttggtgtacaagtgaggtgagtacaaagatatacacacctatacttctctaacagtatgtgtcggtttgttcgggaggggcttattttaccgtttgtttggttaacctcaccgtctcgtcttggaccaccatatatgttgactctgtctgagcttctgtttggttgcctgcacataggagacgtaagttgcatgagtgaatgcaaaacaaaccattttgtaaccatttggttgcatccgttggtatgcaggaagctgccgtatgcggacagccagggccatcagagcctgcgcatccagacacaggatccaatcaggcgcttagtctcccattctctgtatgcagattgtccccaaagggaccccgtcagaacatcctccaagggccttcctcccaagggcctccaggaatcaagcgatggcccacttccccaacactaccttcggatccatgaatagcacttctttcttctgaaactcaagtctacagtttggatatcaacactgcagctagcagaaaagggggagggacataacaattgcatttgtacaagcaccaactgatttttcttggagcaatcagataacacagcataaccaaattaagaaaatagagttatagatcaaccccaatctaccaagagtcagatgtgaactagaaaaaggactccattaagcaaatgtaatttgctacctccagcccaaaaaggatagaattgtgtttggagtgaatcaaagttccttaagtttgactaagtttatagaaaatgcctactgatgtgaagaacttagtgagccaattggctttcctccttatagttccccccagttgttttttcccttgattgtttggatggtagctagcttttttctattctcttttgtttgtctatcttttctttctttgtctaggtaagtcaggtttgtgctcccccttcctctcctctcttttctcttccttgtctgtacagccctcctataccatttcttttcctatatttatatttataaaattgccgccgctgtaggggcttcccctacagttttcccggtcaaaaaaaaagtttatagagaatgttattaatatttatgactcttaataggtatgatacttcattgtgaatctaattattattattagatatcataaatagttttttgtatgtatttagtcaaagctgagatagattgccttggtagaaagctcgattgcatcctttttgggagggagtagatcaaatgaaaaaacaaaggaaatataagcaagaaagtaagcaattttcatactgtatgagcagataaacgtaatgtcaatttgtttgcatgaagatcatagacatatattgagtcatcattgctgccagcaacaagttc

SEQ ID NO: 73093 - DNA, 4359 bp, Zea Mays
aaacaattcactgtcacagagcgaataggtgagatttctgtagctgtggcaaagactcatattacacccctctgtggggtgcatcataaaacatccatatagaagtttacaatcctttgcatttgtcatccaacaatgtccaacaaatagcacaaaggatatcatgattggaaattttttgtttgtatggcctaacttattttggctactatataaaagcaaaagtcagcttcactccagtggactttaacaacagttcacttcacatccaaaacttccaatgctctaccatttacatggccatcgacatgcagagaaagtggacaacaacaagaggaactcatcaccaccaaagttttgagttcctggcttctagctatttgttctcattgtgcttgttgtttttcaactctccttaccttctttatgcccctttcattcaggtcagtctggactggaacactcatctttgtgatgaaaaacacgctcagggctcagcacattctccaaaaaagtcatacgttgtaggtacacagcacaaggtgaagagggtggcactggagttggggccaatgggaacctaaaatcaagatatactttgctgacagaaccgttgagctgcaatattatctttttttttattttttaccaagcctcagtgccagattccactctaggtcttgtttggttgcatggggattgaggggggactaaatctctttctatttaattttgactagcaaggaattatcctaaccgaacaagcccccaaggggttgacatattgtagtgctggttgggtttgcggtaattctgctgtaaggtgtaagctgcccaagagggatattgagtggggcaaatggaagggaccagagaggatctaggtttgaggacacattgtcaccaagaagcaaggtagcatgaacagcataaactgtcaaattgtgatgaaattgaaatacaacaccatgatatgagtcctgggaatagatacggaagttcggcactagaaatctgccttttctttcttatagatagaagccagctagagaacacctttataaaccccttcaatttgacttaaatgcatgccacagccactcgtccacgtcttacactccagctcataattcagtgaccctacttgatagctaataagcatttctccgtcatgttttatttctatccttggttagagactctcatatttcttttttaacgcaatggcaggatctttgcctttcaattaaaggagagatagaattaacccagattatgaaggaaaccaagcctaaaaacctcacaatggcacagtttattaaagggaaacccaccaaaaatacctaaacataacagcccagatagctaaccctaagcaacccacaaatacacaaaagtgtcacacaaccaatgtagcctaccgtgcgccatcgttgccgagcttaatcccaagatagtgataagcaactccgacttcccacaaaaaacctcagtcaaagcccatactaagctgccactcactcgcaacaagccacgacctcttgagaaaaagaacaatttgccatcgttgtggagctttgttgcaccctcaaaaccaaagcagctccgacttcaccactgcagatccactccaaaagaacctgagatgtgccacaagaaaatcgtgagctagagagagctcagcctcgtcgaaaacccagggcttgcagatcagccacgcgaattggcagatcgacatccatcaaagcggtgcaagatcttctaggtgtcgccttcaagaaagacacgatgttgagtgccgccgtcacaagcctaggtgaagtttcctcataaaaaccccacagaatgagtggaggcgcctcaacgatgcttccaagaaaaaacacttgaagagacctgcccctgcgagggggctagttgtcgactgggccgccgttgtagccgccaccattgccacccttgcctttgttcgagcgtcgaccactattgccctttggcttgccatcaggggcaggggacaggggcgctagactttgtagtggcgatggagctaagacacccatccaaagtggtgcagccagtggcaacaattgaggtaccggaggagaccttgtctttgttggcaaggcacaattccttgagggtgaacatgttgcatgtcgtggtgaagttgggtagcaccgtggagttggcaatgatgtccacaatgttggagaaaagcgacggttgaggccacggagaaggttgaggacgagatcagagtcctggactggatgactgacatcacggagggtgtcggcaatggttttcatatgctagcaataggagttgatggaagtgtcaccctgctgcatggagtgaaactcatggatgaggaagatggcctgaggctccttgttggcgcggaaaaggttcttgatggtaacccagagattgcacgcagtctggtcgtcatcgtccatggtgaagccgaggacgaagccatcgatggagccaaatatccaactgcgaacacatcagtctacttgatcccattgagggtcagtgggattggcaaagcctgtgccatcgatgtgcggcttgaggcaaaatttgcaacataaggacttgaagtgggatgcccacttagtgtagttggagttttgcatctccaatgtcatggggatgtgggacttgacacagacggtggcacaaaggtggacaatcaccaccagctgctcctggttactggaggggatgtcctctgtcgtggacgtggtgctggagtcactagagttcggtggcgccatcagaagaagtgcgacaacgaccaggaagaggagcggcgataggtacccaaaagaagagatcggtggcttcgaccaaagatgtacagggaggggggagggagggggcagcggcgccctagggtttgggatggcaaacagagaggggaagggagccagtggcgccataagtaagggtcgatagctaaggggtggggtgaggcacgcaagcagcagagtggagccagggttaggctcggactcatgataccatgtgaagaattagggagacaccacacacccatagcagatggtgaccttttagtatataggttgtgtggcttggtgtacaagtaggatgtatgcttgatgtacaagtaaggtgagtacaaagatatacacgcctatacatatctctaacaggaatgtgtcggtgtgttcaggaggagtatggcttggtgtacaagtgaggaagctgccgtatgcggacagccagggccatcagagcctgcgcatccagacacaggatccaatcaggcgcttagtctcccattctctgtatgcagattgtccccaaagggaccccgtcagaacatcctccaagggccttcctcccaagggcctccaggaatcaagcgatggcccacttccccaacactaccttcggatccatgaatagcacttctttcttctgaaactcaagtctacagtttggatatcaacactgcagctagcagaaaagggggagggacataacaattgcatttgtacaagcaccaactgatttttcttggagcaatcagataacacagcataaccaaattaagaaaatagagttatagatcaaccccaatctaccaagagtcagatgtgaactagaaaaaggactccattaagcaaatgtaatttgctacctccagcccaaaaaggatagaattgtgtttggagtgaatcaaagttccttaagtttgactaagtttatagaaaatgcctactgatgtgaagaacttagtgagccaattggctttcctccttatagttccccccagttgttttttcccttgattgtttggatggtagctagcttttttctattctcttttgtttgtctatcttttctttctttgtctaggtaagtcaggtttgtgctcccccttcctctcctctcttttctcttccttgtctgtacagccctcctataccatttcttttcctatatttatatttataaaattgccgccgctgtaggggcttcccctacagttttcccggtcaaaaaaaaagtttatagagaatgttattaatatttatgactcttaataggtatgatacttcattgtgaatctaattattattattagatatcataaatagttttttgtatgtatttagtcaaagctgagatagattgccttggtagaaagctcgattgcatcctttttgggagggagtagatcaaatgaaaaaacaaaggaaatataagcaagaaagtaagcaattttcatactgtatgagcagataaacgtaatgtcaatttgtttgcatgaagatcatagacatatattgagtcatcattgctgccagcaacaagttc

SEQ ID NO: 73094 - DNA, 2934 bp, Zea Mays
ctgagatgtgccacaagaaaatcgtgagctagagagagctcagcctcgtcgaaaacccagggcttgcagatcagccacgcgaattggcagatcgacatccatcaaagcggtgcaagatcttctaggtgtcgccttcaagaaagacacgatgttgagtgccgccgtcacaagcctaggtgaagtttcctcataaaaaccccacagaatgagtggaggcgcctcaacgatgcttccaagaaaaaacacttgaagagacctgcccctgcgagggggctagttgtcgactgggccgccgttgtagccgccaccattgccacccttgcctttgttcgagcgtcgaccactattgccctttggcttgccatcaggggcaggggacaggggcgctagactttgtagtggcgatggagctaagacacccatccaaagtggtgcagccagtggcaacaattgaggtaccggaggagaccttgtctttgttggcaaggcacaattccttgagggtgaacatgttgcatgtcgtggtgaagttgggtagcaccgtggagttggcaatgatgtccacaatgttggagaaaagcgacggttgaggccacggagaaggttgaggacgagatcagagtcctggactggatgactgacatcacggagggtgtcggcaatggttttcatatgctagcaataggagttgatggaagtgtcaccctgctgcatggagtgaaactcatggatgaggaagatggcctgaggctccttgttggcgcggaaaaggttcttgatggtaacccagagattgcacgcagtctggtcgtcatcgtccatggtgaagccgaggacgaagccatcgatggagccaaatatccaactgcgaacacatcagtctacttgatcccattgagggtcagtgggattggcaaagcctgtgccatcgatgtgcggcttgaggcaaaatttgcaacataaggacttgaagtgggatgcccacttagtgtagttggagttttgcatctccaatgtcatggggatgtgggacttgacacagacggtggcacaaaggtggacaatcaccaccagctgctcctggttactggaggggatgtcctctgtcgtggacgtggtgctggagtcactagagttcggtggcgccatcagaagaagtgcgacaacgaccaggaagaggagcggcgataggtacccaaaagaagagatcggtggcttcgaccaaagatgtacagggaggggggagggagggggcagcggcgccctagggtttgggatggcaaacagagaggggaagggagccagtggcgccataagaggagtatggcttggtgtacaagtgaggaagctgccgtatgcggacagccagggccatcagagcctgcgcatccagacacaggatccaatcaggcgcttagtctcccattctctgtatgcagattgtacctttttccttcttgataaaatgacacgcagctctcctgtgctgttcgagaaattaaaatagggaacacgaccccttcttgtccactgaaagtctccccacacccacactccatccttcttccataaatatggaacggattgtcccaagatatccagctctggtgttcatccctccatcctaggacagacctttctctaacagagagtactgtgttctgacatgggagggagctaaggtcagacccctcctgtcctttggcacaccctaataacatccatccgccgatggattctagggacaactatcctcattggccattactgattccagatccatcctgggggattccaacagaggatccctttggtgaacattgagggggctccctctgatggctgcttctgtctagctagcaaccttcagaggggcccttcagggctgctcctgatagttcttctgtaggtccccaaagggaccccgtcagaacatcctccaagggccttcctcccaagggcctccaggaatcaagcgatggcccacttccccaacactaccttcggatccatgaatagcacttctttcttctgaaactcaagtctacagtttggatatcaacactgcagctagcagaaaagggggagggacataacaattgcatttgtacaagcaccaactgatttttcttggagcaatcagataacacagcataaccaaattaagaaaatagagttatagatcaaccccaatctaccaagagtcagatgtgaactagaaaaaggactccattaagcaaatgtaatttgctacctccagcccaaaaaggatagaattgtgtttggagtgaatcaaagttccttaagtttgactaagtttatagaaaatgcctactgatgtgaagaacttagtgagccaattggctttcctccttatagttccccccagttgttttttcccttgattgtttggatggtagctagcttttttctattctcttttgtttgtctatcttttctttctttgtctaggtaagtcaggtttgtgctcccccttcctctcctctcttttctcttccttgtctgtacagccctcctataccatttcttttcctatatttatatttataaaattgccgccgctgtaggggcttcccctacagttttcccggtcaaaaaaaaagtttatagagaatgttattaatatttatgactcttaataggtatgatacttcattgtgaatctaattattattattagatatcataaatagttttttgtatgtatttagtcaaagctgagatagattgccttggtagaaagctcgattgcatcctttttgggagggagtagatcaaatgaaaaaacaaaggaaatataagcaagaaagtaagcaattttcatactgtatgagcagataaacgtaatgtcaatttgtttgcatgaagatcatagacatatattgagtcatcattgctgccagcaacaagttc

SEQ ID NO: 73095 - DNA, 2850 bp, Zea Mays
cttgcctttgttcgagcgtcgaccactattgccctttggcttgccatcaggggcaggggacaggggcgctagactttgtagtggcgatggagctaagacacccatccaaagtggtgcagccagtggcaacaattgaggtaccggaggagaccttgtctttgttggcaaggcacaattccttgagggtgaacatgttgcatgtcgtggtgaagttgggtagcaccgtggagttggcaatgatgtccacaatgttggagaaaagcgacggttgaggccacggagaaggttgaggacgagatcagagtcctggactggatgactgacatcacggagggtgtcggcaatggttttcatatgctagcaataggagttgatggaagtgtcaccctgctgcatggagtgaaactcatggatgaggaagatggcctgaggctccttgttggcgcggaaaaggttcttgatggtaacccagagattgcacgcagtctggtcgtcatcgtccatggtgaagccgaggacgaagccatcgatggagccaaatatccaactgcgaacacatcagtctacttgatcccattgagggtcagtgggattggcaaagcctgtgccatcgatgtgcggcttgaggcaaaatttgcaacataaggacttgaagtgggatgcccacttagtgtagttggagttttgcatctccaatgtcatggggatgtgggacttgacacagacggtggcacaaaggtggacaatcaccaccagctgctcctggttactggaggggatgtcctctgtcgtggacgtggtgctggagtcactagagttcggtggcgccatcagaagaagtgcgacaacgaccaggaagaggagcggcgataggtacccaaaagaagagatcggtggcttcgaccaaagatgtacagggaggggggagggagggggcagcggcgccctagggtttgggatggcaaacagagaggggaagggagccagtggcgccataagaggagtatggcttggtgtacaagtgaggtgagtacaaagatatacacacctatacttctctaacagtatgtgtcggtttgttcgggaggggcttattttaccgtttgtttggttaacctcaccgtctcgtcttggaccaccatatatgttgactctgtctgagcttctgtttggttgcctgcacataggagacgtaagttgcatgagtgaatgcaaaacaaaccattttgtaaccatttggttgcatccgttggtatgcaggaagctgccgtatgcggacagccagggccatcagagcctgcgcatccagacacaggatccaatcaggcgcttagtctcccattctctgtatgcagattgtacctttttccttcttgataaaatgacacgcagctctcctgtgctgttcgagaaattaaaatagggaacacgaccccttcttgtccactgaaagtctccccacacccacactccatccttcttccataaatatggaacggattgtcccaagatatccagctctggtgttcatccctccatcctaggacagacctttctctaacagagagtactgtgttctgacatgggagggagctaaggtcagacccctcctgtcctttggcacaccctaataacatccatccgccgatggattctagggacaactatcctcattggccattactgattccagatccatcctgggggattccaacagaggatccctttggtgaacattgagggggctccctctgatggctgcttctgtctagctagcaaccttcagaggggcccttcagggctgctcctgatagttcttctgtaggtccccaaagggaccccgtcagaacatcctccaagggccttcctcccaagggcctccaggaatcaagcgatggcccacttccccaacactaccttcggatccatgaatagcacttctttcttctgaaactcaagtctacagtttggatatcaacactgcagctagcagaaaagggggagggacataacaattgcatttgtacaagcaccaactgatttttcttggagcaatcagataacacagcataaccaaattaagaaaatagagttatagatcaaccccaatctaccaagagtcagatgtgaactagaaaaaggactccattaagcaaatgtaatttgctacctccagcccaaaaaggatagaattgtgtttggagtgaatcaaagttccttaagtttgactaagtttatagaaaatgcctactgatgtgaagaacttagtgagccaattggctttcctccttatagttccccccagttgttttttcccttgattgtttggatggtagctagcttttttctattctcttttgtttgtctatcttttctttctttgtctaggtaagtcaggtttgtgctcccccttcctctcctctcttttctcttccttgtctgtacagccctcctataccatttcttttcctatatttatatttataaaattgccgccgctgtaggggcttcccctacagttttcccggtcaaaaaaaaagtttatagagaatgttattaatatttatgactcttaataggtatgatacttcattgtgaatctaattattattattagatatcataaatagttttttgtatgtatttagtcaaagctgagatagattgccttggtagaaagctcgattgcatcctttttgggagggagtagatcaaatgaaaaaacaaaggaaatataagcaagaaagtaagcaattttcatactgtatgagcagataaacgtaatgtcaatttgtttgcatgaagatcatagacatatattgagtcatcattgctgccagcaacaagttc

SEQ ID NO: 73096 - DNA, 2313 bp, Zea Mays
agactttgtagtggcgatggagctaagacacccatccaaagtggtgcagccagtggcaacaattgaggtaccggaggagaccttgtctttgttggcaaggcacaattccttgagggtgaacatgttgcatgtcgtggtgaagttgggtagcaccgtggagttggcaatgatgtccacaatgttggagaaaagcgacggttgaggccacggagaaggttgaggacgagatcagagtcctggactggatgactgacatcacggagggtgtcggcaatggttttcatatgctagcaataggagttgatggaagtgtcaccctgctgcatggagtgaaactcatggatgaggaagatggcctgaggctccttgttggcgcggaaaaggttcttgatggtaacccagagattgcacgcagtctggtcgtcatcgtccatggtgaagccgaggacgaagccatcgatggagccaaatatccaactgcgaacacatcagtctacttgatcccattgagggtcagtgggattggcaaagcctgtgccatcgatgtgcggcttgaggcaaaatttgcaacataaggacttgaagtgggatgcccacttagtgtagttggagttttgcatctccaatgtcatggggatgtgggacttgacacagacggtggcacaaaggtggacaatcaccaccagctgctcctggttactggaggggatgtcctctgtcgtggacgtggtgctggagtcactagagttcggtggcgccatcagaagaagtgcgacaacgaccaggaagaggagcggcgataggtacccaaaagaagagatcggtggcttcgaccaaagatgtacagggaggggggagggagggggcagcggcgccctagggtttgggatggcaaacagagaggggaagggagccagtggcgccataagaggagtatggcttggtgtacaagtgaggtgagtacaaagatatacacacctatacttctctaacagtatgtgtcggtttgttcgggaggggcttattttaccgtttgtttggttaacctcaccgtctcgtcttggaccaccatatatgttgactctgtctgagcttctgtttggttgcctgcacataggagacgtaagttgcatgagtgaatgcaaaacaaaccattttgtaaccatttggttgcatccgttggtatgcaggaagctgccgtatgcggacagccagggccatcagagcctgcgcatccagacacaggatccaatcaggcgcttagtctcccattctctgtatgcagattgtccccaaagggaccccgtcagaacatcctccaagggccttcctcccaagggcctccaggaatcaagcgatggcccacttccccaacactaccttcggatccatgaatagcacttctttcttctgaaactcaagtctacagtttggatatcaacactgcagctagcagaaaagggggagggacataacaattgcatttgtacaagcaccaactgatttttcttggagcaatcagataacacagcataaccaaattaagaaaatagagttatagatcaaccccaatctaccaagagtcagatgtgaactagaaaaaggactccattaagcaaatgtaatttgctacctccagcccaaaaaggatagaattgtgtttggagtgaatcaaagttccttaagtttgactaagtttatagaaaatgcctactgatgtgaagaacttagtgagccaattggctttcctccttatagttccccccagttgttttttcccttgattgtttggatggtagctagcttttttctattctcttttgtttgtctatcttttctttctttgtctaggtaagtcaggtttgtgctcccccttcctctcctctcttttctcttccttgtctgtacagccctcctataccatttcttttcctatatttatatttataaaattgccgccgctgtaggggcttcccctacagttttcccggtcaaaaaaaaagtttatagagaatgttattaatatttatgactcttaataggtatgatacttcattgtgaatctaattattattattagatatcataaatagttttttgtatgtatttagtcaaagctgagatagattgccttggtagaaagctcgattgcatcctttttgggagggagtagatcaaatgaaaaaacaaaggaaatataagcaagaaagtaagcaattttcatactgtatgagcagataaacgtaatgtcaatttgtttgcatgaagatcatagacatatattgagtcatcattgctgccagcaacaagttc

SEQ ID NO: 73097 - DNA, 3241 bp, Zea Mays
caaccccacactggtctggggtggccctctcgtcagcgagcacgcgcggggcagccccggttgtccagcgccgcccacctacctgcccggccggatcctctgtcgggtcactgacgtgcgaggccggcctgagcctggccccgcacgtcagtgacctaagaggaatggcttcgcctacctgctgtgactggggacgccaggaccaattccattcgctccaccccgcgaccgcgagtccctcccttcctgcctccccccgcggaatcgtgagggttcccaaatcgccggagttgatcctgccgtgcgggcgcgcggtggttagggctagtctgtctccggaaatggacgcccccgattccggcggtggcggctcggcggatgccggcgagcctatctgggactggggcaatctcctcgacttcgtcgtccaggatgacgactccctcatcctcccctgggatgacgccgccggcatagcagcatccgaccccaccgaggccgccacggcactgctccccgcctcgcccccgcttccgcagtcggtggaggaggagccggagccggagccggaaccggggccagtgcttccgccgccccctcttcgggttcaggggatcgggcgccgcgtcaggaagcgggacccgcggctggtgtgcccgaactatctcgcggggatagtcccatgcgcgtgccccgaggtggacgagatggtcgccgctgccgaggtggaggacgtggcgacggagttccttgctggcgcgcggaagaagactaagactgctggtcgccgtggcaaagcggaagctgcaggtactgccggaggaactgtccgcgcggcggtggcggagatgaagtgccaagtgcctggctgtgaggcggacatacgggagctgaaagggtaccatcgccggcaccgtgtgtgtctgcgctgcgcgcacgctgctactgtcatgctcgatggtgtccagaagcgctactgccagcagtgcggcaagttccatgtattactagatttcgatgaagataaaaggagttgtagaagaaagttggagcgtcacaacaaaagaagacgaagaaaacctgattccaaaggaacattagataaagaaattgatgaaccattggatatgccagcagatgttagtggcagcgatgaacttagagaagagaacatggaaggcataaccagtgagattcttgagactgttcttagcaacaaggtgatggacagagaaacacctgtgggatctgaagatgtgcttagttcaccaacctgtacacaaccttgtttgcaaaatgaccaaagtaaaagtgtagttacctttgcagcttctgttgaagcctgcattggtgcaaagcaggaaagcataaaacttgccaattccccaatgcatgacaccaagagtgcatattcatcctcgggcgcatctcattcaagttgtatgattggaatcctgcagaatttcctcgacgactacgacaccagatcttcgaatggttgggtagcatgcctgttgaattggagggctacattcgtccgggttgtattattttaactgtatttattgcaatgccacagcatatgtgggacaagttatcagatgatgcagcagatcttctcagaaacttggtaaattccccaaacagtcttttgttgggtaaaggggccttcttcattcatgtcaataacatgttatttcaagtactaaaagatgaaacaacattgatgagtaccagattagatatacaagctccaaggattgattatgttcatccaacatggtttgaagcagggaaacctgtcaatcttatcctttatggaagttctcttgaccaaccgaacttcaggtcacttctgtcttttggtggagactatttgaagcatgattgctaccgtttaccatctcatgatacctttgatggttttgagagtggtgattttattcctgattctcaacatgaaattttccgaattcacatcactcaatcaagaccagatatttatggacctgcatttgtggaagttgaaaacatgtttgggttatcaaattttgttcctatcctttttggaagcaaacagttgtgttctgaactagagaggatacatgatgctctttgtggttcttacagtgaaaataatgtacttggtgagttactcagtgcttcttctgatcctcatgagcaccggaaactttgtagttctgtgatgtctggattcctgatcgacattggatggcttatcagaaagcctactcctgacgaatttaaaagtgtgctgagttcaacaaatatacagagatggatatgcatgttgaagtttttgatacagaatgatttcatcaatgttctggagataatcgtgaagtcaatggacagcatcatgggttcagaggttctttcaaacttggaaagggggaggttggaagatcatgtaacagcatttcttggatatgtaagccatgctcggaatattgctgatcgtagagctaaccatgacgagaaaacacagattgaaacaagaggcattattgttacttctccaaatcagccaaacttaggcgcctcagtgccatttgctagtgaaaacactgactttggaggggataacaaattgaactcaactgatgaggaagaaattatgccacttgtgactagagatgtctcacaccggcactgctgccagcctgatacgactgttaggtggcttaagccctcactgattgttacttatcctggtggtgccacgagaatgcgacttgttacgactgtggcggttgcggctgttttgtgtttcacagcttgtcttgttcttttccatccgcatggggtaggggtgcttgcagctccagtgaagaggtacttgtcgagtgactccgcatcgtagttgatgttatagatcagatattctattttgccgtgccgctctgctctgtctgtatcatttgcgctttgttaaggcatagcttgtgtatctgatttttttgtaagggaaccaacacgcaggtgcttttcatctgtgcaaaactggcatcttttgtttttttcagactgtaagtataggcgccggaagctctgacctgctaatgtttgggcatgtaaacttctaatgtagtgcatcagttaatggaaaatagctgcattgctgcaaagggtggtgtgcgtctgaactgttggcatacaatacaattgtgctgttctcgctgctgcgggttttactggcatacgcatacgccgtggagaa

SEQ ID NO: 73098 - DNA, 2950 bp, Zea Mays
cgccaggaccaattccattcgctccaccccgcgaccgcgagtccctcccttcctgcctccccccgcggaatcgtgagggttcccaaatcgccggagttgatcctgccgtgcgggcgcgcggtggttagggctagtctgtctccggaaatggacgcccccgattccggcggtggcggctcggcggatgccggcgagcctatctgggactggggcaatctcctcgacttcgtcgtccaggatgacgactccctcatcctcccctgggatgacgccgccggcatagcagcatccgaccccaccgaggccgccacggcactgctccccgcctcgcccccgcttccgcagtcggtggaggaggagccggagccggagccggaaccggggccagtgcttccgccgccccctcttcgggttcaggggatcgggcgccgcgtcaggaagcgggacccgcggctggtgtgcccgaactatctcgcggggatagtcccatgcgcgtgccccgaggtggacgagatggtcgccgctgccgaggtggaggacgtggcgacggagttccttgctggcgcgcggaagaagactaagactgctggtcgccgtggcaaagcggaagctgcaggtactgccggaggaactgtccgcgcggcggtggcggagatgaagtgccaagtgcctggctgtgaggcggacatacgggagctgaaagggtaccatcgccggcaccgtgtgtgtctgcgctgcgcgcacgctgctactgtcatgctcgatggtgtccagaagcgctactgccagcagtgcggcaagttccatgtattactagatttcgatgaagataaaaggagttgtagaagaaagttggagcgtcacaacaaaagaagacgaagaaaacctgattccaaaggaacattagataaagaaattgatgaaccattggatatgccagcagatgttagtggcagcgatgaacttagagaagagaacatggaaggcataaccagtgagattcttgagactgttcttagcaacaaggtgatggacagagaaacacctgtgggatctgaagatgtgcttagttcaccaacctgtacacaaccttgtttgcaaaatgaccaaagtaaaagtgtagttacctttgcagcttctgttgaagcctgcattggtgcaaagcaggaaagcataaaacttgccaattccccaatgcatgacaccaagagtgcatattcatcctcgtgtccaacagggcgcatctcattcaagttgtatgattggaatcctgcagaatttcctcgacgactacgacaccagatcttcgaatggttgggtagcatgcctgttgaattggagggctacattcgtccgggttgtattattttaactgtatttattgcaatgccacagcatatgtgggacaagttatcagatgatgcagcagatcttctcagaaacttggtaaattccccaaacagtcttttgttgggtaaaggggccttcttcattcatgtcaataacatgttatttcaagtactaaaagatgaaacaacattgatgagtaccagattagatatacaagctccaaggattgattatgttcatccaacatggtttgaagcagggaaacctgtcaatcttatcctttatggaagttctcttgaccaaccgaacttcaggtcacttctgtcttttggtggagactatttgaagcatgattgctaccgtttaccatctcatgatacctttgatggttttgagagtggtgattttattcctgattctcaacatgaaattttccgaattcacatcactcaatcaagaccagatatttatggacctgcatttgtggaatgaaaataatgtacttggtgagttactcagtgcttcttctgatcctcatgagcaccggaaactttgtagttctgtgatgtctggattcctgatcgacattggatggcttatcagaaagcctactcctgacgaatttaaaagtgtgctgagttcaacaaatatacagagatggatatgcatgttgaagtttttgatacagaatgatttcatcaatgttctggagataatcgtgaagtcaatggacagcatcatgggttcagaggttctttcaaacttggaaagggggaggttggaagatcatgtaacagcatttcttggatatgtaagccatgctcggaatattgctgatcgtagagctaaccatgacgagaaaacacagattgaaacaagaggcattattgttacttctccaaatcagccaaacttaggcgcctcagtgccatttgctagtgaaaacactgactttggaggggataacaaattgaactcaactgatgaggaagaaattatgccacttgtgactagagatgtctcacaccggcactgctgccagcctgatacgactgttaggtggcttaagccctcactgattgttacttatcctggtggtgccacgagaatgcgacttgttacgactgtggcggttgcggctgttttgtgtttcacagcttgtcttgttcttttccatccgcatggggtaggggtgcttgcagctccagtgaagaggtacttgtcgagtgactccgcatcgtagttgatgttatagatcagatattctattttgccgtgccgctctgctctgtctgtatcatttgcgctttgttaaggcatagcttgtgtatctgatttttttgtaagggaaccaacacgcaggtgcttttcatctgtgcaaaactggcatcttttgtttttttcagactgtaagtataggcgccggaagctctgacctgctaatgtttgggcatgtaaacttctaatgtagtgcatcagttaatggaaaatagctgcattgctgcaaagggtggtgtgcgtctgaactgttggcatacaatacaattgtgctgttctcgctgctgcgggttttactggcatacgcatacgccgtggagaa

SEQ ID NO: 73099 - DNA, 2975 bp, Zea Mays
cgccaggaccaattccattcgctccaccccgcgaccgcgagtccctcccttcctgcctccccccgcggaatcgtgagggttcccaaatcgccggagttgatcctgccgtgcgggcgcgcggtggttagggctagtctgtctccggaaatggacgcccccgattccggcggtggcggctcggcggatgccggcgagcctatctgggactggggcaatctcctcgacttcgtcgtccaggatgacgactccctcatcctcccctgggatgacgccgccggcatagcagcatccgaccccaccgaggccgccacggcactgctccccgcctcgcccccgcttccgcagtcggtggaggaggagccggagccggagccggaaccggggccagtgcttccgccgccccctcttcgggttcaggggatcgggcgccgcgtcaggaagcgggacccgcggctggtgtgcccgaactatctcgcggggatagtcccatgcgcgtgccccgaggtggacgagatggtcgccgctgccgaggtggaggacgtggcgacggagttccttgctggcgcgcggaagaagactaagactgctggtcgccgtggcaaagcggaagctgcaggtactgccggaggaactgtccgcgcggcggtggcggagatgaagtgccaagtgcctggctgtgaggcggacatacgggagctgaaagggtaccatcgccggcaccgtgtgtgtctgcgctgcgcgcacgctgctactgtcatgctcgatggtgtccagaagcgctactgccagcagtgcggcaagttccatgtattactagatttcgatgaagataaaaggagttgtagaagaaagttggagcgtcacaacaaaagaagacgaagaaaacctgattccaaaggaacattagataaagaaattgatgaaccattggatatgccagcagatgttagtggcagcgatgaacttagagaagagaacatggaaggcataaccagtgagattcttgagactgttcttagcaacaaggtgatggacagagaaacacctgtgggatctgaagatgtgcttagttcaccaacctgtacacaaccttgtttgcaaaatgaccaaagtaaaagtgtagttacctttgcagcttctgttgaagcctgcattggtgcaaagcaggaaagcataaaacttgccaattccccaatgcatgacaccaagagtgcatattcatcctcgtgtccaacagggcgcatctcattcaagttgtatgattggaatcctgcagaatttcctcgacgactacgacaccagatcttcgaatggttgggtagcatgcctgttgaattggagggctacattcgtccgggttgtattattttaactgtatttattgcaatgccacagcatatgtgggacaagttatcagatgatgcagcagatcttctcagaaacttgatgaaacaacattgatgagtaccagattagatatacaagctccaaggattgattatgttcatccaacatggtttgaagcagggaaacctgtcaatcttatcctttatggaagttctcttgaccaaccgaacttcaggtcacttctgtcttttggtggagactatttgaagcatgattgctaccgtttaccatctcatgatacctttgatggttttgagagtggtgattttattcctgattctcaacatgaaattttccgaattcacatcactcaatcaagaccagatatttatggacctgcatttgtggaagttgaaaacatgtttgggttatcaaattttgttcctatcctttttggaagcaaacagttgtgttctgaactagagaggatacatgatgctctttgtggttcttacagtgaaaataatgtacttggtgagttactcagtgcttcttctgatcctcatgagcaccggaaactttgtagttctgtgatgtctggattcctgatcgacattggatggcttatcagaaagcctactcctgacgaatttaaaagtgtgctgagttcaacaaatatacagagatggatatgcatgttgaagtttttgatacagaatgatttcatcaatgttctggagataatcgtgaagtcaatggacagcatcatgggttcagaggttctttcaaacttggaaagggggaggttggaagatcatgtaacagcatttcttggatatgtaagccatgctcggaatattgctgatcgtagagctaaccatgacgagaaaacacagattgaaacaagaggcattattgttacttctccaaatcagccaaacttaggcgcctcagtgccatttgctagtgaaaacactgactttggaggggataacaaattgaactcaactgatgaggaagaaattatgccacttgtgactagagatgtctcacaccggcactgctgccagcctgatacgactgttaggtggcttaagccctcactgattgttacttatcctggtggtgccacgagaatgcgacttgttacgactgtggcggttgcggctgttttgtgtttcacagcttgtcttgttcttttccatccgcatggggtaggggtgcttgcagctccagtgaagaggtacttgtcgagtgactccgcatcgtagttgatgttatagatcagatattctattttgccgtgccgctctgctctgtctgtatcatttgcgctttgttaaggcatagcttgtgtatctgatttttttgtaagggaaccaacacgcaggtgcttttcatctgtgcaaaactggcatcttttgtttttttcagactgtaagtataggcgccggaagctctgacctgctaatgtttgggcatgtaaacttctaatgtagtgcatcagttaatggaaaatagctgcattgctgcaaagggtggtgtgcgtctgaactgttggcatacaatacaattgtgctgttctcgctgctgcgggttttactggcatacgcatacgccgtggagaa

SEQ ID NO: 73100 - DNA, 3218 bp, Zea Mays
cgccaggaccaattccattcgctccaccccgcgaccgcgagtccctcccttcctgcctccccccgcggaatcgtgagggttcccaaatcgccggagttgatcctgccgtgcgggcgcgcggtggttagggctagtctgtctccggaaatggacgcccccgattccggcggtggcggctcggcggatgccggcgagcctatctgggactggggcaatctcctcgacttcgtcgtccaggatgacgactccctcatcctcccctgggatgacgccgccggcatagcagcatccgaccccaccgaggccgccacggcactgctccccgcctcgcccccgcttccgcagtcggtggaggaggagccggagccggagccggaaccggggccagtgcttccgccgccccctcttcgggttcaggggatcgggcgccgcgtcaggaagcgggacccgcggctggtgtgcccgaactatctcgcggggatagtcccatgcgcgtgccccgaggtggacgagatggtcgccgctgccgaggtggaggacgtggcgacggagttccttgctggcgcgcggaagaagactaagactgctggtcgccgtggcaaagcggaagctgcaggtactgccggaggaactgtccgcgcggcggtggcggagatgaagtgccaagtgcctggctgtgaggcggacatacgggagctgaaagggtaccatcgccggcaccgtgtgtgtctgcgctgcgcgcacgctgctactgtcatgctcgatggtgtccagaagcgctactgccagcagtgcggcaagttccatgtattactagatttcgatgaagataaaaggagttgtagaagaaagttggagcgtcacaacaaaagaagacgaagaaaacctgattccaaaggaacattagataaagaaattgatgaaccattggatatgccagcagatgttagtggcagcgatgaacttagagaagagaacatggaaggcataaccagtgagattcttgagactgttcttagcaacaaggtgatggacagagaaacacctgtgggatctgaagatgtgcttagttcaccaacctgtacacaaccttgtttgcaaaatgaccaaagtaaaagtgtagttacctttgcagcttctgttgaagcctgcattggtgcaaagcaggaaagcataaaacttgccaattccccaatgcatgacaccaagagtgcatattcatcctcgtgtccaacagggcgcatctcattcaagttgtatgattggaatcctgcagaatttcctcgacgactacgacaccagatcttcgaatggttgggtagcatgcctgttgaattggagggctacattcgtccgggttgtattattttaactgtatttattgcaatgccacagcatatgtgggacaagttatcagatgatgcagcagatcttctcagaaacttggtaaattccccaaacagtcttttgttgggtaaaggggccttcttcattcatgtcaataacatgttatttcaagtactaaaagatgaaacaacattgatgagtaccagattagatatacaagctccaaggattgattatgttcatccaacatggtttgaagcagggaaacctgtcaatcttatcctttatggaagttctcttgaccaaccgaacttcaggtcacttctgtcttttggtggagactatttgaagcatgattgctaccgtttaccatctcatgatacctttgatggttttgagagtggtgattttattcctgattctcaacatgaaattttccgaattcacatcactcaatcaagaccagatatttatggacctgcatttgtggaaagttttggtctacatgttcctagacctaaaagaaactacaatgttaagagatggattgatgtgtttggcatttcgtgtggagtcagattttctccacttgtacttttggttaccacggtaccaccttcacaaagtgtgccttagactgatgcaaagaaaaggttgaaaacatgtttgggttatcaaattttgttcctatcctttttggaagcaaacagttgtgttctgaactagagaggatacatgatgctctttgtggttcttacagtgaaaataatgtacttggtgagttactcagtgcttcttctgatcctcatgagcaccggaaactttgtagttctgtgatgtctggattcctgatcgacattggatggcttatcagaaagcctactcctgacgaatttaaaagtgtgctgagttcaacaaatatacagagatggatatgcatgttgaagtttttgatacagaatgatttcatcaatgttctggagataatcgtgaagtcaatggacagcatcatgggttcagaggttctttcaaacttggaaagggggaggttggaagatcatgtaacagcatttcttggatatgtaagccatgctcggaatattgctgatcgtagagctaaccatgacgagaaaacacagattgaaacaagaggcattattgttacttctccaaatcagccaaacttaggcgcctcagtgccatttgctagtgaaaacactgactttggaggggataacaaattgaactcaactgatgaggaagaaattatgccacttgtgactagagatgtctcacaccggcactgctgccagcctgatacgactgttaggtggcttaagccctcactgattgttacttatcctggtggtgccacgagaatgcgacttgttacgactgtggcggttgcggctgttttgtgtttcacagcttgtcttgttcttttccatccgcatggggtaggggtgcttgcagctccagtgaagaggtacttgtcgagtgactccgcatcgtagttgatgttatagatcagatattctattttgccgtgccgctctgctctgtctgtatcatttgcgctttgttaaggcatagcttgtgtatctgatttttttgtaagggaaccaacacgcaggtgcttttcatctgtgcaaaactggcatcttttgtttttttcagactgtaagtataggcgccggaagctctgacctgctaatgtttgggcatgtaaacttctaatgtagtgcatcagttaatggaaaatagctgcattgctgcaaagggtggtgtgcgtctgaactgttggcatacaatacaattgtgctgttctcgctgctgcgggttttactggcatacgcatacgccgtggagaa

SEQ ID NO: 73101 - DNA, 2961 bp, Zea Mays
cagaaaggcaccgagaagaagagtccccggtcgctgctatagctacaagcctacgacacacgagagtgtcctccatggcgacggcggcgaggaaagggagcagcagcaggagtgccgcggcggcggccgcgactgtggccgtgttgttcctcacagtagtatcggccgccggcggtgctgcggctactccgcggcggctcctggtggacacggacatggacaccgacgacttgctcgggcttctctacctcctcaagcagaaccggtccgagatcgacgtcaaggccattaccatcagcgccaacgcgtggagcgacgccgggcacgccgtcaaccatctctacgacatgctctacatgatgggccgcgacgacatccccgtcggcgtgggcggcgacggcgggatatcctacgccggcgacgtgcaacgcgacgtcggtggctacctaccactgatcgaccagggcatgtcgacggacggcggctgccggtaccggcaggccatcccgctctcgggccggctggacgtcgacacgaactccggggtccggaagggcttcctcccgcggggctcccgggcgtaccggccgctccggcagcccacggcgcagcgggtgatggcggacgcgctgtccgccggcccgacctcggtgctcctcctgggcacgcacaccaacctcgcgctcctcctgatgtcgcgcccgcgcctgaggcggaacgtggagcgcgtctacgtctccggcggcgccgtgagggcggcgggcaacctgttcacggccgccgccgccaacccggtcgccgagttcaacgtcttcggcgaccccttcgccgcctacctggtgctccactccggcgtcccgatcactatgatccctctcgacgccaccaacaccatccccgtgacggaggcgttctactccgagttccagcggcgccagaggacgtacgaggcacagtactgtctcctgtcgctggacggggctctggcgcggcagaggaggcggtccgacagccatgacaacacgggcttctacttgtgggatcccttcgccgtcggggtggccatctccagcatgcgccatggcgatggcgaaaccagcaacgagtttgccgagcttgagtacatgaacgtcaccgtggtaacgtccaacaaaccttacggtgcgcgtgacgacggctctaacccctttttcgatggacgaactactcccaagtttgggctgcgagagggtggagttcacagcggccatgttgagaccgggataagagaccccttctgcctggtgcccggaagcaaccgaggcagatgccaagatgggtacactaaagaagtggccggtccagaagcagtgcagatgcttgtggcaacgagggcgaggccgaacaccaacaaaagtagcccactggacaagaaatttatggagaccttcctagaggttctaaatctcccccaaaacactggacgtttcaacataagcacacagtttccgtactatagagaggttctctacaagccggattccatcatgaacgtgacccgcaggggcgggaagccaaagccagtcgtttttgacatggacatgagccctggggacttcgtgtcgctcatatgcctcctgaaagaacccagacacgagatcgatctgaaggctgttttggtcaacgggaacggctgggctaacagcgctagcattgacatcgtgtacgacgtcctgcatatgatgggccgtgacgacatcccagtcggccttggcaatgccactgcgctgggcagcccgacgcttgggtgcaacaattcctacgcgatcccgcaagggagtggtgggtttgtagattcagacacgctgtatggactggctcggtcgttgccgaggagtcctcgaaggttcatctctgatgatctagaccatcccgagcgccggcacccgagcgctttcgatgtttggcggtcagttaggaagcagctcggtccaggccagaagatcacggctcttaccagcggacctctcaccaatctagccagcattatttcactgtctgacatggacgccggctctgtcatagagagagtttatgttgtcggtggagtggttagagatggaggtgatgacaggggaaacgtgttcaccgttccctccaacagatacgcggagttcaacatgttcctggatccgctggccgcaaagacggtgctagaatctggtctaaatatcacgctcattcctctcaacgtgcagcggaaggtttcttcatttgagggcgtcctcggagctctgaagcaacacacccagcatactcccgagtcaaagcttgtgcgccgtttgctgttgctgctccagcagctccagagggaacaacggaaattctatcaccacatggacatatttcttggagaagttcttggcgcagtttacatggtccaaggatctaacttggagccctctgtggaagtgaagtcaatatgcattgttgccaacacaaccgaaagcataaatgggcttattttggtcaagaagagcgcaaagccagtggatgtattgtatagtttgaatactggagcatattacgaccacctggcaaattctttggttaaccataagcaatctgctcctattggcagctttggagagcaaaaggcaatttggagcaggccacaaaaacatttagggacggacatagcaaaggatagaaaataagcaatctatttgtacaatattgctggaaaaggattagagattagattccaaaagaaaaacagtttacatcatacttcactatcttatagcgtagtacaaaattaaaggagatactcaacacagttacagttgtatgaaagggcttcagtaagcaataaaatttatcttgaatggatttcacatactctgctggacgtgaaacttttgttctacacttgtttcacatttctagtctattatttatgttcaagaaatatcagacaac

SEQ ID NO: 73102 - DNA, 2916 bp, Zea Mays
cagaaaggcaccgagaagaagagtccccggtcgctgctatagctacaagcctacgacacacgagagtgtcctccatggcgacggcggcgaggaaagggagcagcagcaggagtgccgcggcggcggccgcgactgtggccgtgttgttcctcacagtagtatcggccgccggcggtgctgcggctactccgcggcggctcctggtggacacggacatggacaccgacgacttgctcgggcttctctacctcctcaagcagaaccggtccgagatcgacgtcaaggccattaccatcagcgccaacgcgtggagcgacgccgggcacgccgtcaaccatctctacgacatgctctacatgatgggccgcgacgacatccccgtcggcgtgggcggcgacggcgggatatcctacgccggcgacgtgcaacgcgacgtcggtggctacctaccactgatcgaccagggcatgtcgacggacggcggctgccggtaccggcaggccatcccgctctcgggccggctggacgtcgacacgaactccggggtccggaagggcttcctcccgcggggctcccgggcgtaccggccgctccggcagcccacggcgcagcgggtgatggcggacgcgctgtccgccggcccgacctcggtgctcctcctgggcacgcacaccaacctcgcgctcctcctgatgtcgcgcccgcgcctgaggcggaacgtggagcgcgtctacgtctccggcggcgccgtgagggcggcgggcaacctgttcacggccgccgccgccaacccggtcgccgagttcaacgtcttcggcgaccccttcgccgcctacctggtgctccactccggcgtcccgatcactatgatccctctcgacgccaccaacaccatccccgtgacggaggcgttctactccgagttccagcggcgccagaggacgtacgaggcacagtactgtctcctgtcgctggacgggggcttctacttgtgggatcccttcgccgtcggggtggccatctccagcatgcgccatggcgatggcgaaaccagcaacgagtttgccgagcttgagtacatgaacgtcaccgtggtaacgtccaacaaaccttacggtgcgcgtgacgacggctctaacccctttttcgatggacgaactactcccaagtttgggctgcgagagggtggagttcacagcggccatgttgagaccgggataagagaccccttctgcctggtgcccggaagcaaccgaggcagatgccaagatgggtacactaaagaagtggccggtccagaagcagtgcagatgcttgtggcaacgagggcgaggccgaacaccaacaaaagtagcccactggacaagaaatttatggagaccttcctagaggttctaaatctcccccaaaacactggacgtttcaacataagcacacagtttccgtactatagagaggttctctacaagccggattccatcatgaacgtgacccgcaggggcgggaagccaaagccagtcgtttttgacatggacatgagccctggggacttcgtgtcgctcatatgcctcctgaaagaacccagacacgagatcgatctgaaggctgttttggtcaacgggaacggctgggctaacagcgctagcattgacatcgtgtacgacgtcctgcatatgatgggccgtgacgacatcccagtcggccttggcaatgccactgcgctgggcagcccgacgcttgggtgcaacaattcctacgcgatcccgcaagggagtggtgggtttgtagattcagacacgctgtatggactggctcggtcgttgccgaggagtcctcgaaggttcatctctgatgatctagaccatcccgagcgccggcacccgagcgctttcgatgtttggcggtcagttaggaagcagctcggtccaggccagaagatcacggctcttaccagcggacctctcaccaatctagccagcattatttcactgtctgacatggacgccggctctgtcatagagagagtttatgttgtcggtggagtggttagagatggaggtgatgacaggggaaacgtgttcaccgttccctccaacagatacgcggagttcaacatgttcctggatccgctggccgcaaagacggtgctagaatctggtctaaatatcacgctcattcctctcaacgtgcagcggaaggtttcttcatttgagggcgtcctcggagctctgaagcaacacacccagcatactcccgagtcaaagcttgtgcgccgtttgctgttgctgctccagcagctccagagggaacaacggaaattctatcaccacatggacatatttcttggagaagttcttggcgcagtttacatggtccaaggatctaacttggagccctctgtggaagtgaagtcaatatgcattgttgccaacacaaccgaaagcataaatgggcttattttggtcaagaagagcgcaaagccagtggatgtattgtatagtttgaatactggagcatattacgaccacctggcaaattctttggttaaccataagcaatctgctcctattggcagctttggagagcaaaaggcaatttggagcaggccacaaaaacatttagggacggacatagcaaaggatagaaaataagcaatctatttgtacaatattgctggaaaaggattagagattagattccaaaagaaaaacagtttacatcatacttcactatcttatagcgtagtacaaaattaaaggagatactcaacacagttacagttgtatgaaagggcttcagtaagcaataaaatttatcttgaatggatttcacatactctgctggacgtgaaacttttgttctacacttgtttcacatttctagtctattatttatgttcaagaaatatcagacaac

SEQ ID NO: 73103 - DNA, 2824 bp, Zea Mays
cacacgagagtgtcctccatggcgacggcggcgaggaaagggagcagcagcaggagtgccgcggcggcggccgcgactgtggccgtgttgttcctcacagtagtatcggccgccggcggtgctgcggctactccgcggcggctcctggtggacacggacatggacaccgacgacttgctcgggcttctctacctcctcaagcagaaccggtccgagatcgacgtcaaggccattaccatcagcgccaacgcgtggagcgacgccgggcacgccgtcaaccatctctacgacatgctctacatgatgggccgcgacgacatccccgtcggcgtgggcggcgacggcgggatatcctacgccggcgacgtgcaacgcgacgtcggtggctacctaccactgatcgaccagggcatgtcgacggacggcggctgccggtaccggcaggccatcccgctctcgggccggctggacgtcgacacgaactccggggtccggaagggcttcctcccgcggggctcccgggcgtaccggccgctccggcagcccacggcgcagcgggtgatggcggacgcgctgtccgccggcccgacctcggtgctcctcctgggcacgcacaccaacctcgcgctcctcctgatgtcgcgcccgcgcctgaggcggaacgtggagcgcgtctacgtctccggcggcgccgtgagggcggcgggcaacctgttcacggccgccgccgccaacccggtcgccgagttcaacgtcttcggcgaccccttcgccgcctacctggtgctccactccggcgtcccgatcactatgatccctctcgacgccaccaacaccatccccgtgacggaggcgttctactccgagttccagcggcgccagaggacgtacgaggcacagtactgtctcctgtcgctggacggggctctggcgcggcagaggaggcggtccgacagccatgacaacacgggcttctacttgtgggatcccttcgccgtcggggtggccatctccagcatgcgccatggcgatggcgaaaccagcaacgagtttgccgagcttgagtacatgaacgtcaccgtggtaacgtccaacaaaccttacggtgcgcgtgacgacggctctaacccctttttcgatggacgaactactcccaagtttgggctgcgagagggtggagttcacagcggccatgttgagaccgggataagagaccccttctgcctggtgcccggaagcaaccgaggcagatgccaagatgggtacactaaagaagtggccggtccagaagcagtgcaggttctaaatctcccccaaaacactggacgtttcaacataagcacacagtttccgtactatagagaggttctctacaagccggattccatcatgaacgtgacccgcaggggcgggaagccaaagccagtcgtttttgacatggacatgagccctggggacttcgtgtcgctcatatgcctcctgaaagaacccagacacgagatcgatctgaaggctgttttggtcaacgggaacggctgggctaacagcgctagcattgacatcgtgtacgacgtcctgcatatgatgggccgtgacgacatcccagtcggccttggcaatgccactgcgctgggcagcccgacgcttgggtgcaacaattcctacgcgatcccgcaagggagtggtgggtttgtagattcagacacgctgtatggactggctcggtcgttgccgaggagtcctcgaaggttcatctctgatgatctagaccatcccgagcgccggcacccgagcgctttcgatgtttggcggtcagttaggaagcagctcggtccaggccagaagatcacggctcttaccagcggacctctcaccaatctagccagcattatttcactgtctgacatggacgccggctctgtcatagagagagtttatgttgtcggtggagtggttagagatggaggtgatgacaggggaaacgtgttcaccgttccctccaacagatacgcggagttcaacatgttcctggatccgctggccgcaaagacggtgctagaatctggtctaaatatcacgctcattcctctcaacgtgcagcggaaggtttcttcatttgagggcgtcctcggagctctgaagcaacacacccagcatactcccgagtcaaagcttgtgcgccgtttgctgttgctgctccagcagctccagagggaacaacggaaattctatcaccacatggacatatttcttggagaagttcttggcgcagtttacatggtccaaggatctaacttggagccctctgtggaagtgaagtcaatatgcattgttgccaacacaaccgaaagcataaatgggcttattttggtcaagaagagcgcaaagccagtggatgtattgtatagtttgaatactggagcatattacgaccacctggcaaattctttggttaaccataagcaatctgctcctattggcagctttggagagcaaaaggcaatttggagcaggccacaaaaacatttagggacggacatagcaaaggatagaaaataagcaatctatttgtacaatattgctggaaaaggattagagattagattccaaaagaaaaacagtttacatcatacttcactatcttatagcgtagtacaaaattaaaggagatactcaacacagttacagttgtatgaaagggcttcagtaagcaataaaatttatcttgaatggatttcacatactctgctggacgtgaaacttttgttctacacttgtttcacatttctagtctattatttatgttcaagaaatatcagacaac

SEQ ID NO: 73104 - DNA, 784 bp, Zea Mays
agcggatcaagggatctgggaggggagcggaggggcaggagggcgtgtgcggcagcggaccacggcggcgacgaaagcgcgaccaaacagacagacggttgcagatagaaaagacaacactgacgatcaaatggaaccatcaattttggcacttgatcgcaacaacacatgtgtaagccctactttattatggactctcaattcagtctgaaggcatgtacatatcttagaagataaacgaaggaatggtacaagtgccgcacagaacaactatgaccagccagctgccaccctgatgccgccacaccatggcatgccggatctcagcatgcccttggagacatgttgtgtcaacaagggaagagaatcgaggatctgtcgcggcacaaccggttctattatgttacaggaagtaattgttataccccatgggttgcactttccatctgcccttggcctggtgtgtgggaatatgtgagggtcaatgtcatcaagctcgctgttgaggagatgagggtccctgagtacctgcagttcaaggaacaacttatggaagaagggttgaggctgagagaacttaccatcagagagttcttgagatacttgaccaattggaagaattgcttctcgcaatgggcttcacctacaaccaggtcatggaagcctacaacatattcgacgaggatgtggattgtcctgtgtgggctctcttcctttgaaaaccaacttggcgattgggaattagcatgaaacaaatctttacacaattattacttgcatggac

SEQ ID NO: 73105 - DNA, 3265 bp, Zea Mays
gcggggcccgaccgggataaggtgaggagccgctgcgatggcggcccgtgtgacccccgtcgcaacgcacggacgctacgcgcctggacagactcggcgcaggaggggatcgggaggatggcggcgtcggtttccacttccagggtcatctgcctccagaagccgggccccgaaggcagcagcaggggggccagggaagtggcccccttcacccgccagtcggtcgcggcgccgaggcgcccgcacggcgccaacgcgagcgtgatcatcggctccgactccggcgccggacggggccagcattcgccgccgctcagggccgtcgtcgatgccggcccggtacagacgacgaaaaagagggtgttccacttcggcaagggcaagagcgagggcaacaagaacatgaaggagctgctgggcggcaagggcgcgaacctggcggagatggcgagcatcgggctgtcggtgccgccggggttcacggtgtcgacggaggcgtgccagcagtaccaggaggccgggcgcgccctcccgccggggctctgggcggaggtcctcgacggcctgcggtgggtggaggagtacatgggcgccgccctcggcgacccgcggcgcccgctcctgctctccgtccgctccggcgccgcggtgtccatgcccgggatgatggacacggtgctcaacctggggctcaacgaccaagtggcagccgggctggcggccaagagcggggaccgcttcgcctacgactccttccgccgcttcctcgacatgttcggcaacgtcgtgatggacatcccccacgcgctgttcgaagagaagcttgaagccatgaagaaagccaaggggctgaagaacgacaccgacctcaccgccaccgacctcaaagagctggtgagccagtacaagaacgtctacgtggaggctaagggagagccattcccctcagaccccaagaggcagctggagttggcagtgctggccgtgttcgactcgtgggagagcccgagggcaaagaagtacaggagcatcaaccagatcaccggcctcagaggcaccgccgtgaacgtgcagtgcatggtgttcggcaacatggggaacacctctggcaccggcgtgctcttcactaggaaccccaacaccggagagaagaagctgtacggcgagttcctggtgaatgctcagggcgaggatgtggttgctggaatcagaaccccggaggatcttgatgccatgaaggacgttatgccacaggcctacaaagagctagtcgagaactgcaggatactggagagccactataaagaaatgcaggacatcgaatttactgttcaggagagcaggctgtggatgttgcagtgcaggacagggaaacgtacgggcaaaagcgccgtaaagatcgccgtggacatggttaacgagggccttgttgagcgccgtgcggcgatcaagatggtagagccaggccacctggaccagcttctccatcctcagtttgagaacccatcggcgtacaaggaccaagtcattgccacgggcctaccggcgtcacctggggccgctgtgggccaggttgtattcactgctgaggacgctgaaacatggcattcccaagggaaatcagttattctggtgagggcggagaccagccctgaggacgtcggcggcatgcacgcggctgcaggaatcctcacagaaagaggtggcatgacctcccatgccgccgtggtcgcacgcgggtggggaaaatgctgtgtctcgggatgctctgggattcgtgtaaatgacgcagagaaggttgtgaagattggaggcaatgtgctgcgcgaaggtgagtggctatcgctgaatggatcgaccggcgaagtgatcctcggaaagcagccgctctccccaccagccctcagtggcgatctgggaacattcatgtcctgggtggatgacgttagaaagctcaaggtcctggcaaacgcggatacccctgaggatgcattggctgcacggaacaacggggcagaaggaatcgggttatgccggacagagcacatgttcttcgcttcggatgagaggattaaggctgtgaggcagatgattatggctcccacagttgagctgaggcagcaggcgctggatcgccttctgccttaccagaggtctgacttcgaaggcattttccgtgctatggatggactttcagtgactattcgacttctggaccctcccctccacgagttccttccagaagggaacgtcgaggaaatcgtgcgtgaactgtgttctgagacgggagccaaccaggaggatgccctcgcacggatcgaaaagctttcggaagtaaacccgatgcttggcttccgtggctgcaggcttggtatatcgtaccctgagctaacagaaatgcaagcccgtgccatctttgaagctgctatagcgatgaccaaccagggcgttcaagtctttccagagataatggttcctcttgttggaacaccgcaggaattgggacatcaggtggcccttatccgtcaagtcgctaacaaagttttcaccagtatggggaaaactattgggtacaagatcggaacgatgattgagattcccagggcagctctagtggctgacgagatcgcggagcaggctgaattcttctcctttggaacgaacgacctcacgcagatgacctttggctacagcagggatgatgtggggaagttcatccccatttatctggctcagggcatcctccagcatgaccccttcgaggttctcgaccagagaggagtgggcgagctggttaagcttgctacagagaggggccgcaaagctaggcctaacttgaaggtgggcatttgtggagaacatggtggagagccttcatcggttgctttcttcgccaagactgggctggattacgtttcttgctcccctttcagggtcccgatcgctaggctagctgcagctcaggtgcttgtctgaggggctgcctcctcgttggcagcctgctgttggtgcatctggtgattaataatactactatgacagagccatatgctctgtgaagagtattagtagcagcgctcataaaagctacagttccatctattttctcagctatgtaaaacttccaaactgttcatgcttaaaactgagggttttcgtggtgtgagatgtgcatgtcgttgttgaggccattgctgcacattccacctattgaggccctcctcaaattaagcctcgaaaaagctgatatcttttcgtaaaagaa

SEQ ID NO: 73106 - DNA, 1284 bp, Zea Mays
cttttgatttatttgttctgggcgagggaaatagtttcaagtttcttttcttttcttttcctcacctgtacttggggcagttcttcgcttcggatgagaggattaaggctgtgaggcagatgattatggctcccacagttgagctgaggcagcaggcgctggatcgccttctgccttaccagaggtctgacttcgaaggcattttccgtgctatggatggactttcagtgactattcgacttctggaccctcccctccacgagttccttccagaagggaacgtcgaggaaatcgtgcgtgaactgtgttctgagacgggagccaaccaggaggatgccctcgcacggatcgaaaagctttcggaagtaaacccgatgcttggcttccgtggctgcaggcttggtatatcgtaccctgagctaacagaaatgcaagcccgtgccatctttgaagctgctatagcgatgaccaaccagggcgttcaagtctttccagagataatggttcctcttgttggaacaccgcaggaattgggacatcaggtggcccttatccgtcaagtcgctaacaaagttttcaccagtatggggaaaactattgggtacaagatcggaacgatgattgagattcccagggcagctctagtggctgacgagatcgcggagcaggctgaattcttctcctttggaacgaacgacctcacgcagatgacctttggctacagcagggatgatgtggggaagttcatccccatttatctggctcagggcatcctccagcatgaccccttcgaggtgggcatttgtggagaacatggtggagagccttcatcggttgctttcttcgccaagactgggctggattacgtttcttgctcccctttcagggtcccgatcgctaggctagctgcagctcaggtgcttgtctgaggggctgcctcctcgttggcagcctgctgttggtgcatctggtgattaataatactactatgacagagccatatgctctgtgaagagtattagtagcagcgctcataaaagctacagttccatctattttctcagctatgtaaaacttccaaactgttcatgcttaaaactgagggttttcgtggtgtgagatgtgcatgtcgttgttgaggccattgctgcacattccacctattgaggccctcctcaaattaagcctcgaaaaagctgatatcttttcgtagaactctagactccggtgaatgcaactggctggtttgcttccgaggcaattcgttttattcctgcaaaagaa

SEQ ID NO: 73107 - DNA, 297 bp, Zea Mays
atgatgtcaagagtaggggcaacagaggcatgctttgctgtgaaaggtgaagccatagaagcatcaccaagcttaacaattggtgctgagcggccatcactttcatcattcatttcatccaacaatttctgcaacttttcttgctgtctctcagcagcagtcaaggggcggctgctcgatgctttagcagaactattggttgccggagtcactcgtgatgatgcttcattaccaggcttctgttttttcaatttcccagatttattttcagctttggattttgagttgactttctga

SEQ ID NO: 73108 - DNA, 683 bp, Zea Mays
caactatgtgcgtccagcgtctgctgaggccatcctcacgccggagcagttcaacatcctacgcctcaagggcaccgagtaccctggaacgggtgagtacgacaagttctttgaggagggcatttataaatgtgctggatgtggaactcccttatacaaatcatcgacaaagttcaactcagggtgtggctggccggcattctatgaaggacttcctggggccataaggcagacgccggaccctgatgggaggcggacagagatcacatgtactgcttgtggaggacacttggggcacatattcaaaggggaggggtttaagacgcctaccaacgagcgacactgtgttaacagcatctcgcttaagttcaatccgtcccccgaggaagcctgacggcagatgaactcccaatctgtaactcaacaacagaataaatttggactttgtttgttgctttcacattgtgtagagagctatgagatcgagtttgtcattcctcggatcatttcgaatatgatgtaaaaaatccaatcacaagtgctggtctttgttgataaatcaatgtacctcagttttagatgaataggccatgtatatgctcatgctcatacaacaaatcaactatcttcatgaagtcatcgtatccgcaggtacaggttatcaaacatgctaattttatggt

SEQ ID NO: 73109 - DNA, 646 bp, Zea Mays
cttgacagtaagcaaatttgctcagctactcaacaaaagaggtaccctggaacgggtgagtacgacaagttctttgaggagggcatttataaatgtgctggatgtggaactcccttatacaaatcatcgacaaagttcaactcagggtgtggctggccggcattctatgaaggacttcctggggccataaggcagacgccggaccctgatgggaggcggacagagatcacatgtactgcttgtggaggacacttggggcacatattcaaaggggaggggtttaagacgcctaccaacgagcgacactgtgttaacagcatctcgcttaagttcaatccgtcccccgaggaagcctgacggcagatgaactcccaatctgtaactcaacaacagaataaatttggactttgtttgttgctttcacattgtgtagagagctatgagatcgagtttgtcattcctcggatcatttcgaatatgatgtaaaaaatccaatcacaagtgctggtctttgttgataaatcaatgtacctcagttttagatgaataggccatgtatatgctcatgctcatacaacaaatcaactatcttcatgaagtcatcgtatccgcaggtacaggttatcaaacatgctaattttatggt

SEQ ID NO: 73110 - DNA, 1233 bp, Zea Mays
gccctactgacgttgcttcgcttcgcgactccgtgataagcgctcgcgccgcctctctggctctcttccgacgccctcaccgttgtcgttcccgtttggccgcacgcgtccgccacaccccagctcgcctccccggctcacgtctgcctctgtttgccgcccttcccgccgccgttcccatctggccgcacgcgccggccacaccccagctcgcctccccgcccccggctcactgcggctcccgtctgcttccgtctgcagtcctccccgccgcagttcccatctggctgcacgcgcctgccgcaccccggcccacctccccggctcgtgaacgcctccttccgccgccctcaaatccgcgtcgtctttggcgtgacaatcctgtggttcctccagttgaacggtgacgagtacagcggattttggccttccgattcgattaaaaattctgtcgtgcagttcctattaaggtccaacccatttgaaggcaattgaaaggccaaaacagattgattaaggtgccaccacctaacaaaaccaagcttgcaatggaatcctcctcaagcaatggtagcaatgtgccactgcctgcatctcaacaccctctacatgtgacagatgcagatgaggaggacaagagtgtaaagcagcttaacgagtgtgccacaatatatctatctctccaggactgcctcattgagtcaaaccgcaactggaaggtctgccaagcatacgtccaagcactgaaagcctgccaggctaaaagaaacaaaagtgatcaaacctaaagctttacatatgtgagtagctgatatcctaaaatggtcagcacggatgccaggggacaggaagcaatgctccagatgttagttgcagatggagatgggctcttctcaaacagctcagaatctctgatgaccatgatgtttctttgttacgtttttctgcataagttcactgaacaacagtagaatttcaattctgtttctgtatttcccaatcccccaataagattaatggtttcagatttattaataggacaactgaacaagacattcttgcatacggttacaactgagttcgtgtgagatcgctttggattaaagccggttgtttgaactgctgcagttgcaatccatagagacaaaaacactgtagaaacagtagaaatcggtacagattaaagccaagcgaacaagctttatcataatgtcagtctcaattcgattttct

SEQ ID NO: 73111 - DNA, 1481 bp, Zea Mays
ctgcggcctacagctgtaggcctgtagcctttgccttcctctctgctgtggctctgcatctcatcgctgcggctttcatcctcgccaccggacctctgtcgctcacctgttgcccccaagtccaaatgatgaagtccctcctcttctccgcccaccccacgtcgctgctcctccccgctccccgccttcgcaggctcctccgcctccgcgccgcctcctctgcctccgcttccgcgccgccccgagccgaccgccgctcccccgggacgccttcgcgccgaccatcctcctccctctacgcgcgccccagcctcctcgacatggagcgggatcgcgccacccgccgcgccgatgtcgacgccttcctcacctccctcggcgtcgacccgggcgaactcgcgggcctcgagctcccagtcaccgtcgacgtcatgcgggagcgcgcggagtttttgggttccctcgggctcacccaggaggacctcgctgcctaccctctcgctctcggctgcagcgtgcgcaagaacatggtccccgtcctcgactacctcggcaagctaggcgtacgccgcgatgcgctcccggacctgctgagacggtacccgcaggtactacacgccagcgtcgtcgtcgaccttgcccccgtcgtcaagtacctccagggtatggacgtgaggcccactgacgtgccgcgcgtgctcgagcgctacccggagctcctcggattcaagctcgagggcaccatgagcacttccgtcgcctacctcgtcggcattggagtggggaggcgtcaggtaccctggaacgggtgagttctacaagttctttgaggagagcatttataagggcttgttcagtttcatcagaatccatatccatatggattggaggggattgagaataaccgaacaaaaatgtgccggatgtggaactcccttatacaaatcatcgacaaagttcaactcaggtgtggctggccagcattctatgagggacttcctggggccataaaggcagacgccagacgaccctgatgggagccggacagagatcacatgtactgcccgtggaggacacttggggctcatattcaaaggggaggggtttaaaacgcctgccaacgagcgacactgtgttaatagcatttcgctcaagtttattccgtcccccaaggaagcctgactgcagatgagctctaatctggaactcaacaacagaataaatttggacttttgtttgttgcttccatgtgagagttatgagatgggatttgtcattcctctgaccattttgaatatgctgtaacaaattttcaatcgcaagtgctggtctttgttgataaaattattgtaccgcagtcttagaagaataggccatgtatctgctcatacaacaaatcaaataccatcataaagtcatcgcatctgcaaatacatgttatcaaactagtcagttgtctgtgtattgccatgatatatgag

SEQ ID NO: 73112 - DNA, 3143 bp, Zea Mays
catcgctgcggctttcatcctcgccaccggacctctgtcgctcacctgttgcccccaagtccaaatgatgaagtccctcctcttctccgcccaccccacgtcgctgctcctccccgctccccgccttcgcaggctcctccgcctccgcgccgcctcctctgcctccgcttccgcgccgccccgagccgaccgccgctcccccgggacgccttcgcgccgaccatcctcctccctctacgcgcgccccagcctcctcgacatggagcgggatcgcgccacccgccgcgccgatgtcgacgccttcctcacctccctcggcgtcgacccgggcgaactcgcgggcctcgagctcccagtcaccgtcgacgtcatgcgggagcgcgcggagtttttgggttccctcgggctcacccaggaggacctcgctgcctaccctctcgctctcggctgcagcgtgcgcaagaacatggtccccgtcctcgactacctcggcaagctaggcgtacgccgcgatgcgctcccggacctgctgagacggtacccgcaggtactacacgccagcgtcgtcgtcgaccttgcccccgtcgtcaagtacctccagggtatggacgtgaggcccactgacgtgccgcgcgtgctcgagcgctacccggagctcctcggattcaagctcgagggcaccatgagcacttccgtcgcctacctcgtcggcattggagtggggaggcgtcagaagccatatgtgcttggatttgggctacaggagaaggtgaagcctaacattgaggctcttgtggacattggagtgaggaaggaggccctagcatccattgtgatgcagtaccccgacgttcttggacttgaactgagggacaagcttgttgcacaacagagcttatttgagtcgagcatattggttagtcgtgaagattttgggagagtgctggagaggatgccgcaagccattagtcttggacgagctgcggttctgaagcatgttaatttcctcacagcttgtggatttatgctatctcaagtgagcaaaatggttgtggcatgcccccaactgcttgcactaaatatagatataatgaggatgaattttgaatacttcaagaatgagatggagagggatttggaggagctggttgagtttcctgcattcttcacatatggcatcgagtcgactgtgaggcctcggcatgagatggtgtcccggaagggcctcacatgctcccttgcatggcttcttaactgttctgatgccaaatttgatgagcgcatgaagtatgatacaattggggttgaggaaatggagcgtgaggattcttctgacatgaatgcatctgtggatgaggtagagagtgaggagtatgaagacagtgattatggtgactctgatgatgagtttgttcgataatttatttcactagtcattagatttttaactttggagtatgtgcttggtacgcgaaatgtcaaattatagcttaatgatgcatttctcatcttccttactgatgtatcccctcagttccaaattataagaggttttggcttttccagatatatagtcttaatcatttaaatatacattatgtctaaatgtatagtaaaaataatgtaagtagaaaagtcaaaatgtcttataatttgaaatagaggaagtacttgtcaattctatgccaaaacactacgggcaactaacactagtgtgtgtatcccttcatgacagacaactagcactagatatatagttataacttttaagcacttagatatacactatctagatatatagtaaaaacgatctaagtaaaaaagtcaaaatgtcttacaatttgaaacagtgtcaattctatgcaaaacacatgtgaaaccatctttttcatgcatgcccagaggttgataacacgagaccagtggactgaagattagaggtgctgactggtttccatattgtattgaaaacacaagctaatgaatcttcttacgtgaatgcatttgtggaggactggagggtgtagagagtgcagaggatgaaggcgtttatgatgattctgatcatggttttgttcaatggtttgtttaatcgtatcaagttcttttgttgaattagagtgtagagcataagaaaagtgttttttgttagtgttgctgtagttctggctgtgtctgatgcatcacagagttctatagcaatgcaagaacattttaaccgatcctatgtatctgtatatgacctattgccattaccatgattttctgctattatgaaatatgaattgctaaaatgtatgagagtccatttaatttagttttttttttcacatgggaagcatgtatttaattctgtgagttactataactagtgtgcaccgtttccacattgttgcatgggagtcattattacatgccaaatatcatggtagaactagtagtttctgactgatgtgatgtttggcatgtggtgcggtgaagctgattctctgttgaactaggcgtcatagtttttgctgagttcatttggttgtctgatttcgcaggtaccctggaacgggaataaccgaacaaaaatgtgccggatgtggaactcccttatacaaatcatcgacaaagttcaactcaggtgtggctggccagcattctatgagggacttcctggggccataaaggcagacgccagacgaccctgatgggagccggacagagatcacatgtactgcccgtggaggacacttggggctcatattcaaaggggaggggtttaaaacgcctgccaacgagcgacactgtgttaatagcatttcgctcaagtttattccgtcccccaaggaagcctgactgcagatgagctctaatctggaactcaacaacagaataaatttggacttttgtttgttgcttccatgtgagagttatgagatgggatttgtcattcctctgaccattttgaatatgctgtaacaaattttcaatcgcaagtgctggtctttgttgataaaattattgtaccgcagtcttagaagaataggccatgtatctgctcatacaacaaatcaaataccatcataaagtcatcgcatctgcaaatacatgttatcaaactagtcagttgtctgtgtattgccatgatatatgag

SEQ ID NO: 73113 - DNA, 794 bp, Zea Mays
gtttatgatgattctgatcatggttttgttcaatggtaccctggaacgggtgagttctacaagttctttgaggagagcatttataagggcttgttcagtttcatcagaatccatatccatatggattggaggggattgagtgagttttaatccatagcaagtcaaaattcttcataattttttccaatcccttccaatccatgagatataggaataaccgaacaaaaatgtgccggatgtggaactcccttatacaaatcatcgacaaagttcaactcaggtgtggctggccagcattctatgagggacttcctggggccataaaggcagacgccagacgaccctgatgggagccggacagagatcacatgtactgcccgtggaggacacttggggctcatattcaaaggggaggggtttaaaacgcctgccaacgagcgacactgtgttaatagcatttcgctcaagtttattccgtcccccaaggaagcctgactgcagatgagctctaatctggaactcaacaacagaataaatttggacttttgtttgttgcttccatgtgagagttatgagatgggatttgtcattcctctgaccattttgaatatgctgtaacaaattttcaatcgcaagtgctggtctttgttgataaaattattgtaccgcagtcttagaagaataggccatgtatctgctcatacaacaaatcaaataccatcataaagtcatcgcatctgcaaatacatgttatcaaactagtcagttgtctgtgtattgccatgatatatgag

SEQ ID NO: 73114 - DNA, 3454 bp, Zea Mays
gctggccacaccggccacctgtatgttggcccgccgcgacccaaatctgtcatgtgccggcccgccgtgcccctctgttcgccgtcgaccggccggccactcgctatcactctacctcgctagaaagttccaaacgactacggcatcctctgactcccccgctctcggtccgcatttccattgtgctttctccgttgcatgcagcctcgcatctattctagcctccgccctcagctcaccaccacgacccgagggaaagggagaggggacgaatggcgagctctcagtgctgcgataacccgccagccctgaacccggcctgcgggaagggcaaggtcgtcgacagcttcggcgggctcaaggcctacgtcgccggccccgaggactccaaggccgccgtcgtcctcgttgccgacgtcttcggattcgaagcgccgattctgaggaacatagccgacaaagttgcttcgtcagggtactttgttgtggtaccagatttctttcatggggatccttatgtacctgagaatgctgagaagctcatacctgtgtggctgaagtcacatactccggttcgctgtcccctgctccttccctgaactattcctgtaaatatttgtctgtaccttgtttctatttatcttcattcagattatacgaggaataaaaattaaggagataatgaataagttattaggttgttaaagaatgtttcaaagtcctgacagtcaatatccaggtgacgctaaacatgatgttctaacagcatgcattatgttagcagtcaaatttctgtctgtaatgttactgcctaccaatatatctgatatgtatgatccttctcatttaaattggactaaaaataaaatttgctacctgcataaatactgttcactgagacactgacagtatgttgtttatggtgccatgcaatgttttcaaatgatctaatcgaccctagttgccatggcactgataaggcgaccagttgcgattagtcgtcgataagcctgattagttgagcctagtcgactgtagtcatacatgtagtcatcctctatgtaccaaaaccgttgtactatatagtatgcagtatatatgctatataaagcaagatttaaggcagaatagcaaagaacagagcactgaagactgggggaagcctgccaaagatggaggagaaggtacaccaaccgtcggaggggaagtttatcgaaatcctgggagccggagttgtgggcggtgtttgaaagctgggaacagtctgctgaatacgcctggctgagtcgggtaggcgccttccctcgcgcggctgctcaagcttgtgggctatgacctccaaatgcagagaagggaggagccactgcggtgagagagggtgcaccgcagagacctgtcagctgccgtcattcgagatagagagggaaagcaggcagcagctgaagtgcgggaatgcacaggagagaggaggggtgaaaaagctaagaaacgatccctattgggccaaaaacaacaatgagtctaatgggtcaacaggccagatgcctgctctacgaagaaattgacattcacctgctagtcgtccatgtccaaatcgttcgattattcgacgattaatcgaacgacctggtttctagttgctttagtcgagtcggtggacataatctgtgctagggaactgataaggccgactcatcgcgcctaatcggggaacgcaattggtatatatatatatatagagtcgaaatctgttttgataagttcaggcctatccatatcctccgtatcctgagtctggatattcaacatctgataccatatccgtatgcgaagacccaactcacatgttcatgatgtgggatatccatttatgtcctatccgatacagttgacactacccgtattcgaatccgaatccgatctgtttacacccctactaattgcgattagttggacgacttaataacaatgttgccatgaggtttacatctctagttccagatctgagtttcttatatttagtctgtgtgtaaatgatgatacgacacaagttatattgcaattagttaagaagcccattctaagaacctctgtgcttcggtctttggtatccttattttctcttaacccgttttcttgtaaaagcatggattgggttggaattgtgaccatggttctaacaacctcttgcaaatgcaggaaaaagctctgtgctatagacccaaatgggtccgatccttccctggaccctgaccaagcgggagcacatgcacttggctgcccttttttttgttatatttcttctgagatcaaagttgggcatcttaatctgaaccatatgtgttgccataaaaaaactaaaaacaaataaaaacgcaaatgcttaatcttgtttgaactacatttaatccatctaggtgctaggaagtggcctagcgcctagcatcttttggacccttgattgtcacacgttgtttactttctttcgctgaacaaatttcatcaacagaaagaggtatttatttgctaggaaaaagggtttgaagaggcaaaaccagttatcgcggctctaaaggagaagggagtgtctgccgttggagctgcagggtattgctggggtgcaaaggtcgttgtggagttggcaaaagcaaatgagctcctccaggctgctgtactattttttttttccaatataacaccagaggtcaaatgctcaatctctatacttggagctgagatggatgtgaggtccccaccagagttagtcaagcaattcgagcaagccctttctgtgaactcaggggttggtcacttcgtcaaggtcttccctggcgtggcgcatgggtggagcgtgagatacagcctcgatgatgcagctgccgtgaagagcgctgaggaagcctttgcggacatgctcgactggttcaacaagaacctaaaatgaactctgcagttgccatcatgccttgtaataataatgcgtattccattgtcctggaatcgggtctgctgtggtagggctgccattcagagttgaacaaatcatttagaaatcattatgttgctcggcaacagattaagaccctatattgtacaactcaacttcactagtaaggccccgtttcaatctcatgagctaaactttagcttcctgctaaactttagctatatgaattgaagtgctaaagtttagtttcaattatcaccattagctctcatgtttagattataaatggctaaaagtagctaaaaaatagctgctaaagtttatctcgcgacattggaacaaggcctaaatctttttttttagattctagctttatgagaatctttcttagtgaagctgagtcatttcatgtccccatttggcaaaataacatcacataatgaagcgaaagaattaaataactagaatgcccttcttttttctctctctctttttgtttacgtttac

SEQ ID NO: 73115 - DNA, 1135 bp, Zea Mays
atgcgcacgctacccccacccacctcccattccgctgccaggatcatgcagctctgcgccgccacgcccaagcggacctcgtggcacatgcccacaccgtactggggcgctggtgccgccgcgttcccgcagacgcccgagcggagcccgaggttcacgggcgacgcccgactggggcactgcgttcatgatgtcgccgagcgctacggctgcgccgaggacgccggagaggtggcccgcgctgtccgcactctggagtacgcgcctgcgccgaggcgagagcaggcgaggtggggcggcgaatctgaggcagaagcgcctgcgctttatgaatccggagccgaatcgctccgtccagcttgcctcctcaccgttgcttttgcgctctgcttttcacttgccttgcgtggatctgctcaacgcgcgaaccaccgcctcgccgagaaggagatcgtcatcgtcctctcctctgcctccgtggtccccgtcgagagcagtgttgctgtcttcgactagctcaccaccctcttctctcgcctccaatacctcaagcacaagatggaggagggaggacggacagaggaattgccggtgcaatggagagcacattttgaacatttcttcatccatttacaagcttacctaccttatggtattccacggctgatgcaaaaggttgtatacaccgttgggggccacttattcagcgctgtatttattgaatacgtaattctgaagatgaaatcaccaagtcataggccacaaatggtataccacttacttaaaaccttgctagacatttagctgacagtgctgcttatttcagtttccttcggttaatcgaggcaaactattccaaggtatttctgtctttggttcaaggctctgcttctcaccctccagaagatcaaggtacctgcggagcagaaaaatcttgcattacgacacctaagccacttttgatgtttgccctcagttgtggaatgtattcttctcccgggataagttgtcaaagcattccactggcttatatttaagtttggtcttgctaaccttagtatgctgcgtattatcatttttttacaatgaaggagtatttctgaattttttaatatgtttgctgtgatggtgaaat

SEQ ID NO: 73116 - DNA, 4894 bp, Zea Mays
ttataggtggaagtgatttgtagtacctgaaaaagccaactaaatgagcatacattctaaacagcttcaaacctaaaggactcagttctccataaactaatgatgatttacaagtgatgtacaagcagaaagagtaaatgaatgaacgatgcattagttcaagtaatatgatcaagattcgaaggatttacaaatataagcaaaacaagggtaaagttttgctatattatgccaagttagtgacgtatgacggtgcactgtgcctcattaagtcgctacacatagattatatattacacaccaataaatatttatcacatggaaatacaggatgcaagtttgaagagaactggacaaatgagaatccagtagctatacatcgagattgcacaaacaacaaaaacaatttcgagggtggtatgcctttatgggtgtgtggaggggtggaggtgggtaaaaggttgacatagggatgaaaccagattggatacaaatattacagatacagaataccagtagtcatttctttctaggatttggagtccaatatggatagtgttggatattggtatgtatggcatatatgtatcaaaatccaactttgagtattcggactcggatatggcatggatattaaatgtctgtattcaactattcatatacagattgttcaagtagggtttaaaccctttcgggacagatgaatatcaggaaatatcattgccattttcatccctaggttaacagtttgcatggttgtccatttctttctaattgttatccatgaaaaaaaatacatctcccaattgtactataaattcatggacatttttgcacataactcatgttcactgttcttaaggcggtaaggtgaggcggggcgttggaccaccaccttgatgcctaggcgagcaaggcggctaggattctttgagcgcctagacgcctaggcgacgccttaaaaacactgctgatgttttctctattctcttatacatgttgcatttgaacatagtttttaagaggataaagcgagttaaggcgaccgacccccgttttaccttttaagcatgaaggcataaggcgaggcgacaccttagtaatatataaaaataggataatataggataataggaatagtctcatatatagatagggataatagtaccaaatattagtacaagttcaacataatagagtccaacagaactagtatgtagtagtgtgtaacactcgtctcttagtagccatcatcaaactcgtcgggaactgcatgacattttcttctccgccatctttcaacttattcacctcatcactatcactcatgttcaagtcatcatatggattcacctcttcattgcattcatttccatctttctaaccttgctcaccttcttctaccctcattgtaccccaactttgatacatgttcgaacacatacgagtttgtcttgtcgcgggtgctgctgcggagagaggggagagggccattggggagcttgcgaggactatagaaagaaggccaaggcatggaggggtcgttgctgccaagagggacgccactgccaatagacgaagacatccaccccgaggcgaagacatccacaagtcgatgccttgcaggcgctttgcagagataaggtgacactcagactaaggcggacgccttacgccgaaattcaaggcgactgtgacaccttggttggcaaaaacaccttaccgcttaagtgatgccttaaaaaccatgcatttgaatgccaatgaactccacctatgctgcctcaacatagcaggtcacaagccctagtaaaggagggttttgatatgcttggcgagccaacggtaaacctagccattctaatgaagataaaccccgaaaaaatctgttggagtgtaacctcttagcgacgcgccatatcagaacccaggtatggtgttaaattggtctatgtgaatataactgtgggttaaaccgatgaacatgtgtgtgaattgtgaattgatgagtgatgagttgtgttaatttggtgttacatcaatgtggtctgtgaaactatgagtgtaattactactttctattgttaaattagtttaaaattaactagaaatttattattatatacatattgttttttctactcttgcttgcgagctaaacgaaccagctcgagctcgtaaacgagttgaatcgagctgactttgtggctcgctagcttaacgagctagctcgaactcggacgagctgagctgtctcgatattcagccctagtgatgaataaggtcacatggaacatacaaagggattcccttggtgtatgctttttgcaaacgatgtagtactagttgatggaagtcgagcaggagtaaataggaaactagagttgtggcaggagactctagaacctaaagggcttagactcagtagaaataaaacagaatatatgagatgtgatttcagcactactatacatgaggaaggagatgttagttccgaaggtcaagtgacacatttagatatttaggatcaatgctacaaagagatagggatattgaagaagatgttagccatagaatcaaagcagggtagatgaagtggtgtcaagcatctgacgttctatatgacaagaggataccacagaagctaaaagggatgttttataggacgacgattagacttgctatattgtatggtgcagaatgttagtctaaaaaatgacatgttcaacatataagtgttacagaaacgcgtatattgtgttggatctgtggtcatacaagaaggaattgattccggaatgatgatatatgtgataggctaaggatagcgccaattgaagaaaaacttgtccaacattggttgagatgatttgaacatttccaacagagacctccagaggcgccaatacgcagtgagatcctaagatgcgatagcattaggaagagaggaagaagaaaaccaaagttaatattggaagagacagtaaaaggagacttgaaaggatggaatatatccaaatatttaaccttgaataggagtgcatggaaaacaactatccatgtatccgaaccttgacttgggttctattggatttttaactctaacctacctcaacttggttggcactaaaagacttcgttgtagttgtttgaatgcctatgccaactgccaacattttataactctggccactaactttgaatagatttattgattgatattattcacatacaaatgacataagtagctgtttcacaatatagttttcatgattttggacaatgtataattagaacaggcaaagatcaaaagggtgcacaacgtagactgctaatagtcaaatcggcaatcaaagcagacaggaggtagttgcctcttcgactgggtttggtgaatggcacgctgtaaaaagactgagtggactactaaaatcacaacgcataaattggctccaaacgtgtaaagaactaaagacaaaagcccatatcagaatatcatgcctcaattaacaaattcaaatagaaataatttagcagagctaagagtcacagggtcaaggaaacaggccaaactggtttgatcattttagccagtacaaaaatgatgacagcttcagatgcccagatctacagattctaactcccaacaccagcgtttttagtcaagtccttttgttgattggcaaatgcatcgccagtattatcaagggccctatcatcaaagaatatcaaagtggatgtcttcttgacatattatattttcagcccactatgcaaaagcaaaaggagaaagaaaaaccaggctcctttgtagatttcgacaacaacgaagtggcaaaatgttattactttataaactgtctctatgcatcaggtgatgcacactccagttcttcgtttcaaattaaactaattaataaagtggcttgaaacacccttattcataaaccagtaattattttttttgctgacgactctaaatatacagcaaaacaatcatggaactaattgataacgaaaacaatctgtaaacattacatatcgatattgtcaacaccaacacatccatccaaccttccagccgaagattacaaagtttgagggctcctttggaacgcaggaatttcacaggaatgatatagaaattttacggctcctttggaacaaggaaaattttctgaatcctgtgtttttcatgtgtttttgaactaattcctgttaaattactataccatttctataaaattcttgtgtttcatagaagcccttacaggaattagttaaaaaacacaggaaaaacgcagattcaggaaaaaaaactttattccaaatgagacctgagggggctgttactccaactgaacaaaccaattcaggtactataaattttttgggataaaggccatagttcactcaactctacttccaggttgaaagactatttatcaacagcgaaaactaacccttcatctcgtgttcgtgacagtacaaaggtgcagtacaaactacaaagccgatgtatatgtatgtatgtaacgctgtaccagtccagcaacatacagcaccgacgaacatggacatatcagctcaaatgccagaccaatttcgaagcggaagcctaagggatcaaagtggcaccacgaatccgccgccacagacctcgactctggcaacccaaggataagcccactctattctgataaaaatgatgggatccatcgattactcggaacagttcagctcgaattcctctagcgatcccgaacccgaatcacgggggctaccatacaacatctacgtctcggaatctgagatcgcgaagcttggaatcagatgaaaccgctgtaagagtcgaagggactcactcggcgggcgaagacatcttcacgcgtcg

SEQ ID NO: 73117 - DNA, 127 bp, Zea Mays
atcctgaatggaagatcattttacttagcaagttgcggttggtaggaggccaactctgacagttttaggaaatgactatgcaacaagagatgggactggggtacttctgttgcatatgatgtgctta

SEQ ID NO: 73118 - DNA, 3412 bp, Zea Mays
attcaaaccaaatatttagacttttttttattctatatatttataaactgatgatgatatatatttattgtgttacactttgtctaagctaacgtgtctatgcagtcgtctcatcctaaccatgcaccatgcgtttaaatccaacgatgactcgctcatgggccgggacaggtggcccatctaattcccatcggtccttcgcttctacgggatgagatcctctgccggccgccgcttccatcgccatggcaagcaggcgactcgctccttcgccttaaccgtcgtcttccgcccaagactgcctccatggagtgctcgagcgacggtccgttgtgagatctcgacttcctcacgaatacggtggatgcccctgacgcccaaactagctgcagagccgtcagaccttactcaagagagcacagccacgaagctctctacctgcttcataggagggcgacagagacatgtattctgattagataggaaacaattctagattgagattgtggatcaatatcgagtatgatgattgtggatcaattctagactgatattctggtgctattgtgatgtttgtaccagtttgtgaaatatgaatgaaattagcgaacaagtttcagatagtattgattccagaatgaccatgctccaatttatacaactgatattgatgatctcatctcagtgatggcagttgagaaaaccaaacactcaagtggctttacacttcagccacaaaaaaccaaaagctatccataatttagaggctacccaaaagctcatactattccccatctgcgagtggaaaggcaacacaaaagcttatattgttctccatctgcaaagacaaacatccgaggttgtacaaaaaaacaaactgtgctgattttaaactaaaattcagcagtaagatcataggtgattggtccctacaagaggaaagaacaacaattgaattctttttattatgaaatatcatctgaataattatgtcatcgttgttaaatattaccatcaacaaccgagaaaatttatggatggccatacatgttcaggcaccccttccttctagcaaaaagtactagggactgctacagcaccatcttcgaattgcacagttgttgtactaggggacatattttggactgctggaacactctcaccgaatggcaccgttgtagctttttgttccttcttataaaagagaatgaaataagtaatacaattagacactaatacaattaaaatcaatcaaattattctagtctgcgacgtaccactgaacattttccccttttcttatgtccctttttagcccttatgcatcttttcaacctaacttttttccgctttgagctttttgtctccacctccttcttctttagttgtgttgtactaaccaaattacatgggagagtgacattcgagggagaagtgattggatccactgtactactacaattattgatttcttcctcaacttgcttgctaaggatgtcaacttactacacgggcggccgaaaccctagcgccgccgccccctccctccactccatcccacctcgccgtcaccagagggcgccgccggatgtccgcgcggccccaaggaaggtggcggcgaggcgatttttctctggtttggtcgcgtctgcccggatctagtcgggttccaggaggtggcagcggcgtgtgtggggcggcgacccttcgccggcgcggctcagcctcggcggcatcctggcggcagtgagcgcgacgttcgtatggcacatccgggcgttgcgggtcctggatgggtgttcgcgcagcaggggggcatgcggccggccgtgggtcgcaggcgcggagaaggtgctgtctggcgcccccagggcagggagcggcgccgcgcgtggaggtctggaatctagtgcgcgtggggttcgcggcctccgcgtgccagccttcggaggcgtcgacaggctggtcccgggcatgtgccggggtggtgttcggcgtggtgcgtcggtgggcctgcgcagtcgaccggattggcggtggcgggacctccactcgtctgcgtctacgatgaggtggtcggcgtcttgatctgcgttgggttggttggatctgcgggctgtctgcccggatctggggggctggtcgccttccgccgctcctccctgttgctggcttgggcgggtggccttgcggctgctgcggcggtgcctgcgcgctcgcgtggtcgtagctggtctgcggcgtcggcacccacgcgtgcggctggcgcgctgtggtggcggcgtggcttgcctgtacttgccttggtcggggcgttggccgtcgccggatctgcagctgtctgcggcgccttctgcaggggcggctagctccgtgcgttggggcgtgtggtgggagggcctctggcgaaagccatgcccgcttgcgggcggacagcggtgacgcccgcgggcgccacccctgccctattgagggtgctgtccttggacctctcaccacaatgcgggaaccctcgcctcggccttcttggggactttcgctggtgctcgtccgacgttggggctctgaaggttggggttgctgggttggtgggtcggcggacgacaggaggtcttcggaggaaactttgcttggttggtaccaggcgggcggcgacgacttttcgacttcgtttctccttcttgaaggcacagcccagaagacctctagtttgtgtgttcgtcggcgttgtggaggctctttgtcactccgcttggctcggtggtgtcggggccattgtcgctttaggcgtctgttttctcccggagttcggcgttgtggatctttgctcgtggcgaagaatcggagctgcctcgtgtggggtgtgcgaggcttggcaacgatggcgcgccgtgatcttattccttgcgtcggtgtctggatttaggcgtcgtcgagttgctttggcagtgtgcggctcgtcttggggagtcggagctgctcgtcccttgtgtttgagcttggcaacaatgactctagatgtgtttgtgtgtgtgaggctgctgttgtctaggtggtttgttagggccttcaccggtttttctaccgtgcgccctgtgtaggttttgggtccggttttccttaaaactggatcaattctattcttcttaattgagaggcagagctcctgccattatgttcaaaaaaataaggtgtagcttgcatagctagcaactctatgctaaattgagaaacttgcgagtcatatatttgcaacgaatcatacaatctaatcttggattctctattatgtgttttgaccttgattgttttgtacagtttcactatgagcttctcgggtccatcgcttgaaaatatattgtgtgagtaatgacttgatattcattatatcaaggacttttatagcatggac

SEQ ID NO: 73119 - DNA, 3142 bp, Zea Mays
gtccaagagcgacagccatgtctcgcaactgcctccatggagtgctcgagcgacggtccgttgtgagatctcgacttcctcacgaatacggtggatgcccctgacgcccaaactagctgcagagccgtcagaccttactcaagagagcacagccacgaagctctctacctgcttcataggagggcgacagagacatgtattctgattagataggaaacaattctagattgagattgtggatcaatatcgagtatgatgattgtggatcaattctagactgatattctggtgctattgtgatgtttgtaccagtttgtgaaatatgaatgaaattagcgaacaagtttcagatagtattgattccagaatgaccatgctccaatttatacaactgatattgatgatctcatctcagtgatggcagttgagaaaaccaaacactcaagtggctttacacttcagccacaaaaaaccaaaagctatccataatttagaggctacccaaaagctcatactattccccatctgcgagtggaaaggcaacacaaaagcttatattgttctccatctgcaaagacaaacatccgaggttgtacaaaaaaacaaactgtgctgattttaaactaaaattcagcagtaagatcataggtgattggtccctacaagaggaaagaacaacaattgaattctttttattatgaaatatcatctgaataattatgtcatcgttgttaaatattaccatcaacaaccgagaaaatttatggatggccatacatgttcaggcaccccttccttctagcaaaaagtactagggactgctacagcaccatcttcgaattgcacagttgttgtactaggggacatattttggactgctggaacactctcaccgaatggcaccgttgtagctttttgttccttcttataaaagagaatgaaataagtaatacaattagacactaatacaattaaaatcaatcaaattattctagtctgcgacgtaccactgaacattttccccttttcttatgtccctttttagcccttatgcatcttttcaacctaacttttttccgctttgagctttttgtctccacctccttcttctttagttgtgttgtactaaccaaattacatgggagagtgacattcgagggagaagtgattggatccactgtactactacaattattgatttcttcctcaacttgcttgctaaggatgtcaacttactacacgggcggccgaaaccctagcgccgccgccccctccctccactccatcccacctcgccgtcaccagagggcgccgccggatgtccgcgcggccccaaggaaggtggcggcgaggcgatttttctctggtttggtcgcgtctgcccggatctagtcgggttccaggaggtggcagcggcgtgtgtggggcggcgacccttcgccggcgcggctcagcctcggcggcatcctggcggcagtgagcgcgacgttcgtatggcacatccgggcgttgcgggtcctggatgggtgttcgcgcagcaggggggcatgcggccggccgtgggtcgcaggcgcggagaaggtgctgtctggcgcccccagggcagggagcggcgccgcgcgtggaggtctggaatctagtgcgcgtggggttcgcggcctccgcgtgccagccttcggaggcgtcgacaggctggtcccgggcatgtgccggggtggtgttcggcgtggtgcgtcggtgggcctgcgcagtcgaccggattggcggtggcgggacctccactcgtctgcgtctacgatgaggtggtcggcgtcttgatctgcgttgggttggttggatctgcgggctgtctgcccggatctggggggctggtcgccttccgccgctcctccctgttgctggcttgggcgggtggccttgcggctgctgcggcggtgcctgcgcgctcgcgtggtcgtagctggtctgcggcgtcggcacccacgcgtgcggctggcgcgctgtggtggcggcgtggcttgcctgtacttgccttggtcggggcgttggccgtcgccggatctgcagctgtctgcggcgccttctgcaggggcggctagctccgtgcgttggggcgtgtggtgggagggcctctggcgaaagccatgcccgcttgcgggcggacagcggtgacgcccgcgggcgccacccctgccctattgagggtgctgtccttggacctctcaccacaatgcgggaaccctcgcctcggccttcttggggactttcgctggtgctcgtccgacgttggggctctgaaggttggggttgctgggttggtgggtcggcggacgacaggaggtcttcggaggaaactttgcttggttggtaccaggcgggcggcgacgacttttcgacttcgtttctccttcttgaaggcacagcccagaagacctctagtttgtgtgttcgtcggcgttgtggaggctctttgtcactccgcttggctcggtggtgtcggggccattgtcgctttaggcgtctgttttctcccggagttcggcgttgtggatctttgctcgtggcgaagaatcggagctgcctcgtgtggggtgtgcgaggcttggcaacgatggcgcgccgtgatcttattccttgcgtcggtgtctggatttaggcgtcgtcgagttgctttggcagtgtgcggctcgtcttggggagtcggagctgctcgtcccttgtgtttgagcttggcaacaatgactctagatgtgtttgtgtgtgtgaggctgctgttgtctaggtggtttgttagggccttcaccggtttttctaccgtgcgccctgtgtaggttttgggtccggttttccttaaaactggatcaattctattcttcttaattgagaggcagagctcctgccattatgttcaaaaaaataaggtgtagcttgcatagctagcaactctatgctaaattgagaaacttgcgagtcatatatttgcaacgaatcatacaatctaatcttggattctctattatgtgttttgaccttgattgttttgtacagtttcactatgagcttctcgggtccatcgcttgaaaatatattgtgtgagtaatgacttgatattcattatatcaaggacttttatagcatggac

SEQ ID NO: 73120 - DNA, 358 bp, Zea Mays
tttgagtccgtgaaactgtatgccagtgttatctccccaactcttaaattgttcttgtcagcaggttgcataaaaggcccagaaaagcagcagttgacgagactggaactacaaaagcttgttgaatcccattggatgtatcttaaccgcaaacaaagtgacttaagactggatctgaaacactaaggatagattatggtaaaatactaatattaatgttgcatctgccaaaaattcgacaacggagtcccaaattttcagtaaggaagagaaacaaagctccccatactatgtgtctctgttgtggattaatcaggaaacaggggatcccttgatattttctttaggaacgactaac

SEQ ID NO: 73121 - DNA, 1118 bp, Zea Mays
ctttgttgttgttgttcttctgtgctctgttctgatattgtgttgttaatatatgttctgatattgtgctgttaatatgtgttctgatattgtgttgttattatgttcaaattttagaaagtatgaagaaatatgcccacctctggtagaagaactctgttatattactgactattcatacaccaaggaagaggttttgcaaatggaagcttctgttctgaataacttgaaatttgagatgacagtacctacagcaaaatgtttcttaaggagatttgtacgtgttgctcaagttcctgacaagggctcatctctgcatcttgagttcttagtcaactacatttgtgagctgtcacttctggagtacagcttactttgctatttaccttcaatggtagctgcctcttctgttttcttggcgaagtttatccttatgccaataaaaaacccatggaattcctcactttcttactacacgcggtatacaccatctgagttgcgtggttgtgtaagggtactgcaccggctcttccgtttgggccctggaagcaatcttcctgcaattagagaaaaatacagtcagcataagtacaaatttgtagcaaagaagtactgcccacagtcaatccctactaagttcttccaggatctgacaagttagaagccaagattacttctagttactcaatgaaaccttcctgaggtacttagtgtgatactatgatattgatttgacagatagttttgaatgcaaggcatgcgcgcggccttgcgtttagcagataaacaggttcaagtaaactgtatgtcacttgtggcaatgttgtttcagtgttgtgctttgattgcttccagcatcgtcttatacgttgctgttgtggtcttctcacgctgtctagaacttttattgtatagttctggaccttgctcataacaagggtagatagtttggctaaagataaagtgtactcattctctcattgttatctacgtgttgcttctgtattctgaagattctgctctgaaacccagcaaatgtattatcaggcatcagaatagtagagtctgagtcaatttttgctattgggaataagtgggagggtaactttggaaagcaa

SEQ ID NO: 73122 - DNA, 555 bp, Zea Mays
aatatgcccacctctggtagaagaactctgttatattactgactattcatacaccaaggaagaggttttgcaaatggaagcttctgttctgaataacttgaaatttgagatgacagtacctacagcaaaatgtttcttaaggagatttgtacgtgttgctcaagttcctgacaaggtacatgtttcactgttttgcagttcctaccaattccatgtgctggttgatttttttttctttctgcagggctcatctctgcatcttgagttcttagtcaactacatttgtgagctgtcacttctggagtacagcttactttgctatttaccttcaatggtagctgcctcttctgttttcttggcgaagtttatccttatgccaataaaaaacccatggaattcctcactttcttactacacgcggtatacaccatctgagttgcgtggttgtgtaagggtactgcaccggctcttccgtttgggccctggaagcaatcttcctgcaattagagaaaaatacagtcagcataagggttagctaaggggaggaggaagatt

SEQ ID NO: 73123 - DNA, 498 bp, Zea Mays
tttgctatttaccttcaatggtagctgcctcttctgttttcttggcgaagtttatccttatgccaataaaaaacccatgggtatatgtccccaaccttatattttatgaatcttcattgttaaactcgatgtttgcattcttcacccccaaaacataaataaattttgatgcttgcattagctaacatttgcatttattcttgatcgaaagcagaattcctcactttcttactacacgcggtatacaccatctgagttgcgtggttgtgtaagggtactgcaccggctcttccgtttgggccctggaagcaatcttccttgaacgcgatcagcctgcctcccacacgccctcaagtcaccagatttttttttttgccgcttgtgtgatgatccgacgagatcgccgaaacccacatgccgaggataggatgacccgtggaccgcgcgatgcgccaccaccgcgacatgagtaaaccacaggacgccaacgataggtag

SEQ ID NO: 73124 - DNA, 926 bp, Zea Mays
aaacggcgtagcatccggatttcaaaaggtggataacaaagaacactgcaaatctttaagcggtacttgacctgactactgctgtcattaatacatgaacgatcggatcagaaaatagcaatagaactgagtgttgcgcaaaccacagcaaagagcatcttgtagcccagcctatcacaggctgacaacagaatggtaatggcaggagaggaaggcaaaatacagttcctgccattaaagttataagagaagcagaaacgctatatcaacagcaattgctataatctgctaaagagttcggttgcagtcggggtacacagcttacacattataagcaaaccattctctcgccatctgcgctctgctaatatcctttgatgccatctccagaaattttcagctgcacaggtggctgcttcggcagtgtgtcggttcacagcagataggctttcttcttgtcgaatggttacataaataaaatgcctatagtcaaaggtgaagtgaactctagcactaaaatgaaaaaagggggggaccaaaacaaaggagctagctgactggggcccgaaattttcttccgcgtaacaactttgagacctcgctcacctccacttgtcccccaactccttcttctcggaccaaatccatgtgacgatgatggcagcaaccaggactgcgatcgtgattagaagcagcgcgtagctgaattcgtcggtgagggaatcgtaggtccttgacggggcaagctgggtgtagaacagatcgacgccgtatgtgaaaacaagagtcgtggactccagcttcgcaggaatagaaacgatccctcgcagggcctccacttggtgagagtgcgtcacaaaggactgaaataagaaacaacgagaaacgtgtgaatcgcccattagcagaaactagattaaacaaac

SEQ ID NO: 73125 - DNA, 2571 bp, Zea Mays
ggaaagcaagggaaagttcgttcagagagataaaggagtgaagcgaaaggaagcgcgaaaacaaaaacaaggcccagattcctcctctccggccggatcctctcacctctctctttctctctccttctgttgctgggtgttgttgttgttgctgttcccttctccctctctctccctccccatctccctctccatctccatctctgtagctatagggaggagatgtattccgacttccgagccccccatctccaaggaaattgcgacgagcccatcgttccatatctccctttaagattgacctgagactgcttcgtccacaccacgagtgcaagagaggtgggagacagacacacagagagagagagagagagagagagactggcgaggaagagataacgaaccagcatttgctgcgtcaccagctctctacctagcaagctagctagcggccggtgcgcgcggcggcgatgaacagaggacaattccgggcctcgcctttgcagcagcaggtgatctggagcgccgataccgccacggccagcagcagcagcgtcgtcatgagcgccttcaacttcaattcgtgccatgaggatcaagaggccttctcccccaacaacctgccgtccttgtcttccccgtcgctgctcttctcccacgaccagcagcagtcgtttccgcacaccggtaccactaccacctctccgggccaccaacttcttgccaaccgcggcgcagcagcgggcggctgccttccaagtctgcacgacggcggccaggagaaccaccacatgccggagtcgtggagccagatgcttctagcggggctagtcggaggagatcaggagcgctgcaccgcagctctcctgtcaaagggcatggacgattggggggatcacgctgcgactgcaagcgcggcgtgcatggtgggtggcggcggtacgaagaaggatgagggctccgccgtgcctcaacaacctccgtatagcttctacgggagccacggccacctcgctgctggcggtgatgagcatgagatgccggcgccagccagcaaggctcagctcagccagatgctcctggcctcgtctcctcgctcgtgcgtcaccacgagcctcggcagcaacatgcttgacttctccaacagcgcgccgccgatggagctgaagcgccaccatcatcactctgataactcatccgagtgcaacagcactgcgactgctgcaggttcggccgtcaagaagcctagggttcaggcggcctcctcttcagcacaatctactctaaagtatgagacctgtttttgtacgttgcaggtgaggaaggagagactgggcgatagaataactgctcttcatcagatcgtttccccgtttggaaagactgacacggcgtctgtgctgcaagagaccattgggtatatcagattcctcctgggtcaaattgaggctctcagctacccctacatgggccacggcaatttgacctcctcctccactcaaaatgggccagctggatcagaaaggaaccctgcagggctgttcccagaataccccggccagttgctaaaccataatcataacactggagcacagcagcagcagcctgcagcagtccagcagccgcctgatgagaagcagggagtcgatgacgaggtgaaaagggacttgaggagccgggggctgtgcctcgtcccggtgtcctgcacgtcgcacttcggaggggacaacgccgctgactactgggccccggcggcgctcggcgggatgttccgctagatagagcatacagcgccgccgtgccattgaagcatggtggtctagacgtacgtacgtacgggctgggcgagcagctgtttggtgcgagtatatgtgttcatgacgcttgctgcaggtagagagatcatcgagctgtctaagaatcatcgcgagctagctagctagggtggtgcagctgggaaacatagcatcatgagcagtcattctggtaagggagaagcgagaacctgtaaggctgattgctcttgatgctatgcgagtagtatatgacctttcggggccgtaaagcttcgtcgtctgtatcttcagttggagggcttagcttctgcaggaagatctagctagatcttctctggtccttcgcgcagatttgttttgttgatcgtgtatatgtaattaaaatctagcaagttgtcagtgaacatctttactcatatatatagatcctgccatgctcgtacaagttggccgggacagggagatcgagctagtcccggcggggcgccgtcttcttcatttatgcgccgccgcgccgggtgtacttatctgggaaaatgaaaataatcctttgaaaaaatggtgttgccaaactagcctttatctgggttaaatcagcaattgatattgattgttgtattcctatgagctcgcggccgtacaaaacctacagctagctcacatatgtttttttttgaacgaacggcacgagattgtgcacgtttctattaataaagaagagagtgaagcagtgcccaagagacaccgcaggaagggtacatataggttacgtaat

SEQ ID NO: 73126 - DNA, 1613 bp, Zea Mays
ctcctctccggccggatcctctcacctctctctttctctctccttctgttgctgggtgttgttgttgttgctgttcccttctccctctctctccctccccatctccctctccatctccatctctgtagctatagggaggagatgtattccgacttccgagccccccatctccaaggaaattgcgacgagcccatcgttccatatctccctttaagattgacctgagactgcttcgtccacaccacgagtgcaagagaggtgggagacagacacacagagagagagagagagagagagagactggcgaggaagagataacgaaccagcatttgctgcgtcaccagctctctacctagcaagctagctagcggccggtgcgcgcggcggcgatgaacagaggacaattccgggcctcgcctttgcagcagcaggtgatctggagcgccgataccgccacggccagcagcagcagcgtcgtcatgagcgccttcaacttcaattcgtgccatgaggatcaagaggccttctcccccaacaacctgccgtccttgtcttccccgtcgctgctcttctcccacgaccagcagcagtcgtttccgcacaccggtaccactaccacctctccgggccaccaacttcttgccaaccgcggcgcagcagcgggcggctgccttccaagtctgcacgacggcggccaggagaaccaccacatgccggagtcgtggagccagatgcttctagcggggctagtcggaggagatcaggagcgctgcaccgcagctctcctgtcaaagggcatggacgattggggggatcacgctgcgactgcaagcgcggcgtgcatggtgggtggcggcggtacgaagaaggatgagggctccgccgtgcctcaacaacctccgtatagcttctacgggagccacggccacctcgctgctggcggtgatgagcatgagatgccggcgccagccagcaaggctcagctcagccagatgctcctggcctcgtctcctcgctcgtgcgtcaccacgagcctcggcagcaacatgcttgacttctccaacagcgcgccgccgatggagctgaagcgccaccatcatcactctgataactcatccgagtgcaacagcactgcgactgctgcaggttcggccgtcaagaagcctagggttcaggcggcctcctcttcagcacaatctactctaaaggtgaggaaggagagactgggcgatagaataactgctcttcatcagatcgtttccccgtttggaaagactgacacggcgtctgtgctgcaagagaccattgggtatatcagattcctcctgggtcaaattgaggctctcagctacccctacatgggccacggcaatttgacctcctcctccactcaaaatgggccagctggatcagaaaggaaccctgcagggctgttcccagaataccccggccagttgctaaaccataatcataacactggagcacagcagcagcagcctgcagcagtccagcagccgcctgatgagaagcaggtgcggttgttcctttccagccaaatgtgccagaccaccagtaggagcagggagcgcgttccctttttgggcacagcgact

SEQ ID NO: 73127 - DNA, 347 bp, Zea Mays
ccctcttctccttcatgtccggccgccggtctggccgaggaccctggtcgtggggtcgcgtcctcctccctcgtcgcggacctgccgtgtcctgggcgccattccagcactgccaggttccgcgccatcgtgcctctgggtcctcgccgcggttcaggccgtcgatgcctgttgccccgacgctccctcacgctcctttatcagcctcgcctagacctccgcctcctcgtcggactgcacacacgccgccgccatttcttgcagtttcgtcgcgccatcccctctgatttccttgttctcgtcggcttaaactccgttgacgtaccctgcaagcaggtacgataatt

SEQ ID NO: 73128 - DNA, 2888 bp, Zea Mays
tcggtctcactttgcatttaaccctggaccgccctgcctagtaggctgtggactcctactcctactcctactcctctctccccttcctcccgttgattgattgaggggattgctactaggcgggcgctagcactgcgaagcatctcgcctcatcgtctcctccgtgctccacttgcccattcttacgcgctaagcaacaggccagccggccgtagctccaaagcgggagccggagccggagccggagccgggagctaaggggggccgtgatgtcgtcgtcgccgacggccgcgccggcgccgaccacgccatcggctccgccggccaacgcgacaaatccgccgcccgcgaccccgtccgcgccgccaccggcggcgcccacgcctcccacgcccaccccgcccacgccgtccccgccgtccccagccgcgccgccgccgtcacccccctccgtcccggcccccgcgccggcctccaccccggtgactccctctgcgccctcgccctcctccccttcctccccgggcacgcccgccaccccgtcgcctccatcggacaccccgtcgccgccatcgtccggtggagggggcaggtccccgccgtcgtctgggggtgggcgatccacgccgtcctcccactcgcctcccaagtcgcactcgccggggggcggtggcggcagctccgggccgtctacgtcgctcgtcgtgggcgtggccgtcggcggcctcgtgctgctgctgctcgccagcttcatctgcctctgctgcctccgcaagaagcgccgccgcgcgccgccgccgccgccgcctcagcactacggatacccgccgcccccgccgccgtacaaggaggatccatacggtggaacgtaccagagttggcagcaaaatgcgcctcctgctccaccccctgagcatgtggtcaagatgcacccttcgcctccgccagcatatgccaatcgtcctccacagccgccagtgccaccaccaccagcgatgctaaatagtagtggtggatctggttctaattactctggtggcgagatcctacctccaccatcccctggtgctgttcttggcttctcgaagagcacattcacctacgaagagctgttgagggctactgatggattctcggatgctaatctccttggacaaggtggttttggctatgttcacagaggattgctgcctaatggcaaagagattgctgtaaaacaattgaaactgggaagtggccagggagagcgtgagttccaggctgaggttgagattatcagccgagtacatcacaaacaccttgtgtctttggttggctattgcatttctggaggcaagaggctgcttgtctatgagtttgtccccaataacacattggaattccacttacatgcgaaaggtcgaccaacaatggagtggcctgctagattaaagatcagtttgggtgctgccaagggtttagcttatcttcatgaagactgccatccaaagatcatccatcgtgacataaaggcatctaacattcttcttgacttccaatttgaagctaaggttgctgattttggacttgcaaagttcactactgataacaacacccatgtttcgacaagagtaatgggcacctttgggtatttggcacctgagtatgcatcttctggcaagctaacagaaaaatccgatgtattttccttcggagtcatgcttcttgagcttattactgggcggcgaccagttgacacaacccaaacatatatggatgacagcttggttgactgggcaaggccattactgatgcgagcacttgaggatggtgaatatgattctttagtggatcctcggctgggaaaggacttcaatcctaatgagatggcaagaatgatagcctgtgcagctgcatgtgtacgccattctgcacgtcgtcggccacgtatgagtcaggtaatttatagacagcttttgcactgtcctagcgaacattcctaaactgcacttacgtcccttggcactattaagtgcagaatctgttgtaatgttgtatacatcacttgatttctataccacaagaagtattgagctgacgaaatggtgacctgagttctgagttggaactttggtcactttagtttcaatgctgaaaacatgccacattgggataacataatactgcattgcaccaacatgctcagattttcatgtatttacttggtggattaatagcttctcaccttattgttaaggtcgttcgggctttggagggcaatgtgtctttggaggaccttaatgaaggtgttcggcctggccatagccgcttctttgggtcatacagcagctccgattacgattctggccagtacaacgaggacatgaagaagttcaagaagatggcattcaacaacaactataccagcagccaatacagcgcgccaaccagtgaatatggacagataccgtctgcatcaagcagcgagggccaccagacgcaagagatggagtcgggtgcaatgaagaaaggtggctacagtggtggctacagctcaggatacagcggagcctcgtaagggaattccctctttttttttgtttttcttttgatgttttcattgctgcatttgtaaagtctggccgaattatatgaccaaagctgctgacttgcgcgtgatgtatctgagtttgaccgagtatagttctatgtagctgcaattgtttattctttcatgaaagttgttcttgaccaatgtttgctgtgcagttcgaagagagctaattgaatgttgatatactgtccatgggtcgcttgattcatctttcccctcgatgtgtcatctaaataaccttgctagtattttccggctacttcattacaatacatgtatcatgtatgctgtcacg

SEQ ID NO: 73129 - DNA, 2309 bp, Zea Mays
cttcctcccgttgattgattgaggggattgctactaggcgggcgctagcactgcgaagcatctcgcctcatcgtctcctccgtgctccacttgcccattcttacgcgctaagcaacaggccagccggccgtagctccaaagcgggagccggagccggagccggagccgggagctaaggggggccgtgatgtcgtcgtcgccgacggccgcgccggcgccgaccacgccatcggctccgccggccaacgcgacaaatccgccgcccgcgaccccgtccgcgccgccaccggcggcgcccacgcctcccacgcccaccccgcccacgccgtccccgccgtccccagccgcgccgccgccgtcacccccctccgtcccggcccccgcgccggcctccaccccggtgactccctctgcgccctcgccctcctccccttcctccccgggcacgcccgccaccccgtcgcctccatcggacaccccgtcgccgccatcgtccggtggagggggcaggtccccgccgtcgtctgggggtgggcgatccacgccgtcctcccactcgcctcccaagtcgcactcgccggggggcggtggcggcagctccgggccgtctacgtcgctcgtcgtgggcgtggccgtcggcggcctcgtgctgctgctgctcgccagcttcatctgcctctgctgcctccgcaagaagcgccgccgcgcgccgccgccgccgccgcctcagcactacggatacccgccgcccccgccgccgtacaaggaggatccatacggtggaacgtaccagagttggcagcaaaatgcgcctcctgctccaccccctgagcatgtggtcaagatgcacccttcgcctccgccagcatatgccaatcgtcctccacagccgccagtgccaccaccaccagcgatgctaaatagtagtggtggatctggttctaattactctggtggcgagatcctacctccaccatcccctggtgctgttcttggcttctcgaagagcacattcacctacgaagagctgttgagggctactgatggattctcggatgctaatctccttggacaaggtggttttggctatgttcacagaggattgctgcctaatggcaaagagattgctgtaaaacaattgaaactgggaagtggccagggagagcgtgagttccaggctgaggttgagattatcagccgagtacatcacaaacaccttgtgtctttggttggctattgcatttctggaggcaagaggctgcttgtctatgagtttgtccccaataacacattggaattccacttacatgcgaaaggtcgaccaacaatggagtggcctgctagattaaagatcagtttgggtgctgccaagggtttagcttatcttcatgaagactgccatccaaagatcatccatcgtgacataaaggcatctaacattcttcttgacttccaatttgaagctaaggttgctgattttggacttgcaaagttcactactgataacaacacccatgtttcgacaagagtaatgggcacctttgggtatttggcacctgagtatgcatcttctggcaagctaacagaaaaatccgatgtattttccttcggagtcatgcttcttgagcttattactgggcggcgaccagttgacacaacccaaacatatatggatgacagcttggttgactgggcaaggccattactgatgcgagcacttgaggatggtgaatatgattctttagtggatcctcggctgggaaaggacttcaatcctaatgagatggcaagaatgatagcctgtgcagctgcatgtgtacgccattctgcacgtcgtcggccacgtatgagtcaggtcgttcgggctttggagggcaatgtgtctttggaggaccttaatgaaggtgttcggcctggccatagccgcttctttgggtcatacagcagctccgattacgattctggccagtacaacgaggacatgaagaagttcaagaagatggcattcaacaacaactataccagcagccaatacagcgcgccaaccagtgaatatggacagataccgtctgcatcaagcagcgagggccaccagacgcaagagatggagtcggctgcaattgtttattctttcatgaaagttgttcttgaccaatgtttgctgtgcagttcgaagagagctaattgaatgttgatatactgtccatgggtcgcttgattcatctttcccctcgatgtgtcatctaaataaccttgctagtattttccggctacttcattacaatacatgtatcatgtatgctgtcacg

SEQ ID NO: 73130 - DNA, 982 bp, Zea Mays
agtttgtgtcatcatttatcatccgcactcagatctagccttggccgggagacaccacgacagaggctggacgtgctcttcccgtcctcacgcccccacgccgctgcgcgctcttcccttcacctctcactacacgacggctgcggggcaggggtgaaagaggtgaggcttctccagcttctcgaggccggagaccgtttgctcaagggtgtcgttcttgacggcctcctccgacagcgtggacgcgtggttctcagccatggccttggtcgcggcaggaagcatagcctggtgaggtcccatttcatgtgcttgtcaataggtgtatattataattccggtaataatttaggtgccagagaagctcccagtgccccatgtgttggtagcatatcagcatgaaagatcctatgagccaagagctactagaggctgttgaacaagagaggaacatccgatctaatccttcacgtaatactgctgttttccaccatccaatgctgggtgattttgagatccctataggtgcagatgatgcagaacttgaagaacgcattattcagcacttggctgccacagctgtagtgcgtaggtcacaccgtcatcataatagaagagatgggcaccagagcagatcaggagcaagtagccacccacattttctggtgctctcagcagacgtgcacactatttcaggtcaagaagaggactatgaacaagcacctgctgtagcttctggccgccctttacgtacacttgttgaacaagaacacactcgagggttagcggatgcttccagtctcctgtgtgtaactactggacataaattgttctctatttttaggaaacgtgcaatacacaacaagaacagattcaaacatttcagaagcagcttgcagttgcgactgagaagttgaagctcaaggtcattggtgatggtggtgatccaaatggccactatgacaaggatgatcatcaatga

SEQ ID NO: 73131 - DNA, 1792 bp, Zea Mays
ggcaccctcgtcactgactccacaaacaaaattgcagagtcggagaccaacgccacgccgacatcgacagcactgatccgacaagtcgccgtttctgccctaagcacggacgctgttggtcacactcgcggagccccatccttccctcccggtctctccttgcgagctagtaccctacttgctgcacagtgccacaccgctcgcgctggagtatgggttcgagcccgatgtggtggtcaggaccaccaccgtcgccgtggagccgcggtttagggaaatggtgggcgctggtagggccattcgtggtgaaggccgtcgggttcctgctgctcgcgggcctcttgttccgggtgctctggtcctttccgtcctctccggcgccggcgttgcagatcacaaaagtcttttcaatggggaatggataccaaacccctctggtccagcctatacaaatgcaagctgtcgatttatcgacgatcaccagaactgcatgatgaatggtagacctgataaggaatatctacattggaagtggaaaccttatggatgtgatcttccaccatttgatgcagtaagatttctagattctgtgagaaacaaaggttggggactaattggtgactccatccttcgtaaccaagttcagtcattgctttgccttctgtctaaggctgaagaacctgttgaggtttaccatgataacgaattcaaaaacaggagatggcacttccaatcctacaacttcacagtgtccatcgtctgggctcctttcctcatcaaatctggtatttttgagaatgaggatggcgtgtctacctctgaaatacagctccaccttgatatactcgatgctaactggacaagtcagtatgagagctttgactatattattatttctggcggacaatggtttctgaggacagcggtctactgggagaacggtgcagtggttggtggtcataattctcagaacaagaacgtcgctgaacttggttttgagcacctgtatcagaaaactctacaaaacgttttcaacttcatcgtctcagcgaaacacaagccagtaattttcttcaggacctggtcacctgatcacttcgaggatggagagtggttcagcggtgggtcttgtcgcaggaaattgccctacaacaagggagagtacagagagggtaacatcgagcgtgtcatgagacagatcgagcttgagtccttcaacaaggctgtagccgcgcttaggggttcagcggacatggatagactgagactgatggatacctacagcctctcgtccttgagaccggacggccacgttgggccttacagaacaccctatccctttgcaaggggcagcagtaaatccacgcccgttcaaaatgattgcttgcactggtgtgtaccaggccccattgatgcatggaatgatcttgttatgaagatggccctggatccatgaaaaccttatggatttgtatggtgtgctcttatggagtaagtagcagctaagtgggcacaaaaaagtgtgtccgttttggtttagctgtaaaataggagtgctagcaaatagagaaacctcagggttggctttgttgcaaagatatgtgtatgttgttttaaagctttataagtttcaactgggcagatactgccagttgttcctggtttaacaggttggccctcgatgctgactgttcaagcgtaccatgaattttgagatggtagcaagaagtaaccttcaatccaccgttcagccaggcatgactgctccagctgacgaactcttctaatttag

SEQ ID NO: 73132 - DNA, 1692 bp, Zea Mays
gtcggagaccaacgccacgccgacatcgacagcactgatccgacaagtcgccgtttctgccctaagcacggacgctgttggtcacactcgcggagccccatccttccctcccggtctctccttgcgagctagtaccctacttgctgcacagtgccacaccgctcgcgctggagtatgggttcgagcccgatgtggtggtcaggaccaccaccgtcgccgtggagccgcggtttagggaaatggtgggcgctggtagggccattcgtggtgaaggccgtcgggttcctgctgctcgcgggcctcttgttccgggtgctctggtcctttccgtcctctccggcgccggcgttgcagatcacaaaaggaaaatgcagtcttttcaatggggaatggataccaaacccctctggtccagcctatacaaatgcaagctgtcgatttatcgacgatcaccagaactgcatgatgaatgtaagatttctagattctgtgagaaacaaaggttggggactaattggtgactccatccttcgtaaccaagttcagtcattgctttgccttctgtctaaggctgaagaacctgttgaggtttaccatgataacgaattcaaaaacaggagatggcacttccaatcctacaacttcacagtgtccatcgtctgggctcctttcctcatcaaatctggtatttttgagaatgaggatggcgtgtctacctctgaaatacagctccaccttgatatactcgatgctaactggacaagtcagtatgagagctttgactatattattatttctggcggacaatggtttctgaggacagcggtctactgggagaacggtgcagtggttggtggtcataattctcagaacaagaacgtcgctgaacttggttttgagcacctgtatcagaaaactctacaaaacgttttcaacttcatcgtctcagcgaaacacaagccagtaattttcttcaggacctggtcacctgatcacttcgaggatggagagtggttcagcggtgggtcttgtcgcaggaaattgccctacaacaagggagagtacagagagggtaacatcgagcgtgtcatgagacagatcgagcttgagtccttcaacaaggctgtagccgcgcttaggggttcagcggacatggatagactgagactgatggatacctacagcctctcgtccttgagaccggacggccacgttgggccttacagaacaccctatccctttgcaaggggcagcagtaaatccacgcccgttcaaaatgattgcttgcactggtgtgtaccaggccccattgatgcatggaatgatcttgttatgaagatggccctggatccatgaaaaccttatggatttgtatggtgtgctcttatggagtaagtagcagctaagtgggcacaaaaaagtgtgtccgttttggtttagctgtaaaataggagtgctagcaaatagagaaacctcagggttggctttgttgcaaagatatgtgtatgttgttttaaagctttataagtttcaactgggcagatactgccagttgttcctggtttaacaggttggccctcgatgctgactgttcaagcgtaccatgaattttgagatggtagcaagaagtaaccttcaatccaccgttcagccaggcatgactgctccagctgacgaactcttctaatttag

SEQ ID NO: 73133 - DNA, 1892 bp, Zea Mays
gtcggagaccaacgccacgccgacatcgacagcactgatccgacaagtcgccgtttctgccctaagcacggacgctgttggtcacactcgcggagccccatccttccctcccggtctctccttgcgagctagtaccctacttgctgcacagtgccacaccgctcgcgctggagtatgggttcgagcccgatgtggtggtcaggaccaccaccgtcgccgtggagccgcggtttagggaaatggtgggcgctggtagggccattcgtggtgaaggccgtcgggttcctgctgctcgcgggcctcttgttccgggtgctctggtcctttccgtcctctccggcgccggcgttgcagatcacaaaagctgttcaacctactgtgctgtgactcagcattcagcaatatttaaggctatgcatgtccttggatgtagacaccggaatgatctcacttcattattatccataaaaaaatatgggaccaacgagttaggaaaatgcagtcttttcaatggggaatggataccaaacccctctggtccagcctatacaaatgcaagctgtcgatttatcgacgatcaccagaactgcatgatgaatggtagacctgataaggaatatctacattggaagtggaaaccttatggatgtgatcttccaccatttgatgcagtaagatttctagattctgtgagaaacaaaggttggggactaattggtgactccatccttcgtaaccaagttcagtcattgctttgccttctgtctaaggctgaagaacctgttgaggtttaccatgataacgaattcaaaaacaggagatggcacttccaatcctacaacttcacagtgtccatcgtctgggctcctttcctcatcaaatctggtatttttgagaatgaggatggcgtgtctacctctgaaatacagctccaccttgatatactcgatgctaactggacaagtcagtatgagagctttgactatattattatttctggcggacaatggtttctgaggacagcggtctactgggagaacggtgcagtggttggtggtcataattctcagaacaagaacgtcgctgaacttggttttgagcacctgtatcagaaaactctacaaaacgttttcaacttcatcgtctcagcgaaacacaagccagtaattttcttcaggacctggtcacctgatcacttcgaggatggagagtggttcagcggtgggtcttgtcgcaggaaattgccctacaacaagggagagtacagagagggtaacatcgagcgtgtcatgagacagatcgagcttgagtccttcaacaaggctgtagccgcgcttaggggttcagcggacatggatagactgagactgatggatacctacagcctctcgtccttgagaccggacggccacgttgggccttacagaacaccctatccctttgcaaggggcagcagtaaatccacgcccgttcaaaatgattgcttgcactggtgtgtaccaggccccattgatgcatggaatgatcttgttatgaagatggccctggatccatgaaaaccttatggatttgtatggtgtgctcttatggagtaagtagcagctaagtgggcacaaaaaagtgtgtccgttttggtttagctgtaaaataggagtgctagcaaatagagaaacctcagggttggctttgttgcaaagatatgtgtatgttgttttaaagctttataagtttcaactgggcagatactgccagttgttcctggtttaacaggttggccctcgatgctgactgttcaagcgtaccatgaattttgagatggtagcaagaagtaaccttcaatccaccgttcagccaggcatgactgctccagctgacgaactcttctaatttag

SEQ ID NO: 73134 - DNA, 1476 bp, Zea Mays
tacaaggctacaagctttagttggccacttgtactgttctctaccaatatattatttggcaaatactgttcttcaggaaaatgcagtcttttcaatggggaatggataccaaacccctctggtccagcctatacaaatgcaagctgtcgatttatcgacgatcaccagaactgcatgatgaatggtagacctgataaggaatatctacattggaagtggaaaccttatggatgtgatcttccaccatttgatgcagtaagatttctagattctgtgagaaacaaaggttggggactaattggtgactccatccttcgtaaccaagttcagtcattgctttgccttctgtctaaggctgaagaacctgttgaggtttaccatgataacgaattcaaaaacaggagatggcacttccaatcctacaacttcacagtgtccatcgtctgggctcctttcctcatcaaatctggtatttttgagaatgaggatggcgtgtctacctctgaaatacagctccaccttgatatactcgatgctaactggacaagtcagtatgagagctttgactatattattatttctggcggacaatggtttctgaggacagcggtctactgggagaacggtgcagtggttggtggtcataattctcagaacaagaacgtcgctgaacttggttttgagcacctgtatcagaaaactctacaaaacgttttcaacttcatcgtctcagcgaaacacaagccagtaattttcttcaggacctggtcacctgatcacttcgaggatggagagtggttcagcggtgggtcttgtcgcaggaaattgccctacaacaagggagagtacagagagggtaacatcgagcgtgtcatgagacagatcgagcttgagtccttcaacaaggctgtagccgcgcttaggggttcagcggacatggatagactgagactgatggatacctacagcctctcgtccttgagaccggacggccacgttgggccttacagaacaccctatccctttgcaaggggcagcagtaaatccacgcccgttcaaaatgattgcttgcactggtgtgtaccaggccccattgatgcatggaatgatcttgttatgaagatggccctggatccatgaaaaccttatggatttgtatggtgtgctcttatggagtaagtagcagctaagtgggcacaaaaaagtgtgtccgttttggtttagctgtaaaataggagtgctagcaaatagagaaacctcagggttggctttgttgcaaagatatgtgtatgttgttttaaagctttataagtttcaactgggcagatactgccagttgttcctggtttaacaggttggccctcgatgctgactgttcaagcgtaccatgaattttgagatggtagcaagaagtaaccttcaatccaccgttcagccaggcatgactgctccagctgacgaactcttctaatttag

SEQ ID NO: 73135 - DNA, 1470 bp, Zea Mays
tggtctgctactctgaaattaataaaacttaataacacgacactattttgtattttcaatactttgccaggaaaatgcagtcttttcaatggggaatggataccaaacccctctggtccagcctatacaaatgcaagctgtcgatttatcgacgatcaccagaactgcatgatgaatggtagacctgataaggaatatctacattggaagtggaaaccttatggatgtgatcttccaccatttgatgcagtaagatttctagattctgtgagaaacaaaggttggggactaattggtgactccatccttcgtaaccaagttcagtcattgctttgccttctgtctaaggctgaagaacctgttgaggtttaccatgataacgaattcaaaaacaggagatggcacttccaatcctacaacttcacagtgtccatcgtctgggctcctttcctcatcaaatctggtatttttgagaatgaggatggcgtgtctacctctgaaatacagctccaccttgatatactcgatgctaactggacaagtcagtatgagagctttgactatattattatttctggcggacaatggtttctgaggacagcggtctactgggagaacggtgcagtggttggtggtcataattctcagaacaagaacgtcgctgaacttggttttgagcacctgtatcagaaaactctacaaaacgttttcaacttcatcgtctcagcgaaacacaagccagtaattttcttcaggacctggtcacctgatcacttcgaggatggagagtggttcagcggtgggtcttgtcgcaggaaattgccctacaacaagggagagtacagagagggtaacatcgagcgtgtcatgagacagatcgagcttgagtccttcaacaaggctgtagccgcgcttaggggttcagcggacatggatagactgagactgatggatacctacagcctctcgtccttgagaccggacggccacgttgggccttacagaacaccctatccctttgcaaggggcagcagtaaatccacgcccgttcaaaatgattgcttgcactggtgtgtaccaggccccattgatgcatggaatgatcttgttatgaagatggccctggatccatgaaaaccttatggatttgtatggtgtgctcttatggagtaagtagcagctaagtgggcacaaaaaagtgtgtccgttttggtttagctgtaaaataggagtgctagcaaatagagaaacctcagggttggctttgttgcaaagatatgtgtatgttgttttaaagctttataagtttcaactgggcagatactgccagttgttcctggtttaacaggttggccctcgatgctgactgttcaagcgtaccatgaattttgagatggtagcaagaagtaaccttcaatccaccgttcagccaggcatgactgctccagctgacgaactcttctaatttag

SEQ ID NO: 73136 - DNA, 2793 bp, Zea Mays
tgagttgctgacggtcgcttgacgagtttgcgattttggatcccatcccatcgtttcctcctcctccctctggcctccggtcacggctcgatctcccgttccaatcacgcccatggcagccgccgccttcggctccgccactggtggcgggtcgcggcttgtggaccgctgcatcgacgcggcagcgcgcggtcccgccactgtggaggcctggcgccggcagcgccgctccctggagcgcctcccggccccgctcgccgacgcgctcttacgccgcctagctgcgcgtcgccttctcttcccctccctcctcgaggtgtttggccggtcagtagaggaggttgatctgagtggatttctttctgtgaattccgagtggttggcataccttggctccttcaggtaccttagggttctgaagttggcggactgcaagaacatcaacaatgacgctgtctggtcgctctctggtgagatgctgaagcttctttgatcatatgattacactgtgggcatgggtggatccagaatagagaaccatcaatgtcatgtcaatggtgttcaaaagaacaattggtggtcgtgtttctattagatcacactttagccttggattttaaatttcatttatgtcaagtgacaacatcaaaaattcaaaatagccttgctttgccccctgcttttgagttttgtgatttgcaacataatttgcttgttactttaggaatgaacacattaaaggagctggacttgtcaaggtgcaaaaagatttctgatgctggcatcaaacatatagtgaccattgaaagcttagagaagctacacttatctgagactgaattgactgacaatggagtgatgctcatttcttcactgacaaatctaagtttccttgatctaggtggaattctcatgacagacaaaaccctacagtctttacaggtattgacaaaacttgagcatcttgatatatggggtagtgaaactacaaatgagggagcttctgctctgaaatcctttgcaaggctgctatccttgaatcttgcgttgacacgtgtcaaccatttatcaattcctccaaccacaagctatctaaatatgagcaactgcgaaattcattctatttgtgatgtggattctgaagttcctgttccactagaaaactttattgtctctgcagctacatttggcaatattgataaagtattttctagcatccaagcaagctcactgatacatttggacttgtctagctgcaagttaagcaacttgtctttcttggaaaagatgaagaatctagagcatctggaccttagctacaacataataactgatggtgcaattgaacatattgcgaagattggaacaaacttgcaatatttgagcctcaagaatactggaataacttcccaggcactatgtattctggcagggacagttccaaacctcacctcactgtctttagctaatacaaaaattgatgactctgctctagcatatattggcatgatacctttgctgagaacgatagatttaagccagacaagtatcaaaggttgtgctcttgcttactaaaattttttgtttccttgattacattaatttacttttggccacaaaaaaataaattttaccttatggcaggttttattcacactgaagtaaattccgagaagttgttgtctatgtctgcatttgagcatctcaaatatctggaaagtctaaatctggaggatacaccgctatcagctgaagttatacctcccttggcatcctttgcaacactgaaatatttgtacctgaaaagtgatttcttgtctgatcctgccttgcacgcactctctgctgcctccaatttgatacaccttgggttccgcgggaatatattgtcaagctttgggcttttacagtttgtaccccctgtcacactctgtgtgttggatttaagcggctgttggatcttaacaggcgatgctatttcaacattccgtaagcgtcatcctacgattgaattgagacatgagctcctgcacgaagttgaggaaaattttgttggtggttcccaatttcgtaaacctagacgcagacgatctcctcatgtgaaagcagaagttggaaacagttttgctggctcaagtaggctacacgatatccgttttgtagatgaaaggataaaatacagcaaggaggaatttgtggagctgcaaggccttgctaaaccaaattcgttaatgcttggcgtgtggcttccaccagaactgcgaaggcccaaatgatagttttggatcttgattccttacgcatttactgccagcatatcataatcttccttgagttattcttgatatgacagacttttgagaattaagcatcaagcatgtcactcagttccaaattatagttcactttggttttgtcctaggtcaaacttttctagctttgacctatgcattcgaataaatgctataccaaaatgtatttcgtgaagaatctaaagaaactgatttgatgttctagatggtggtacactttcctttaaacttggtcaaacataaagaagtttgacttatgaaaccaaagttaactataatttggaacaaagggagtacactggagttatctaaaacaaattttcgataaattagttttaacatttgcattgggctctcatcagttgatcctgaatccagttctccgatctgtgatataaaatatcattttctggagtttccttttggtcacgtgaaacttttacacactttggcctttgggcgctttctaactaaggtcccg

SEQ ID NO: 73137 - DNA, 2091 bp, Zea Mays
tgagttgctgacggtcgcttgacgagtttgcgattttggatcccatcccatcgtttcctcctcctccctctggcctccggtcacggctcgatctcccgttccaatcacgcccatggcagccgccgccttcggctccgccactggtggcgggtcgcggcttgtggaccgctgcatcgacgcggcagcgcgcggtcccgccactgtggaggcctggcgccggcagcgccgctccctggagcgcctcccggccccgctcgccgacgcgctcttacgccgcctagctgcgcgtcgccttctcttcccctccctcctcgaggtgtttggccggtcagtagaggaggttgatctgagtggatttctttctgtgaattccgagtggttggcataccttggctccttcaggtaccttagggttctgaagttggcggactgcaagaacatcaacaatgacgctgtctggtcgctctctggtgagatgctgaagcttctttgatcatatgattacactgtgggcatgggtggatccagaatagagaaccatcaatgtcatgtcaatggtgttcaaaagaacaattggtggtcgtgtttctattagatcacactttagccttggattttaaatttcatttatgtcaagtgacaacatcaaaaattcaaaatagccttgctttgccccctgcttttgagttttgtgatttgcaacataatttgcttgttactttaggaatgaacacattaaaggagctggacttgtcaaggtgcaaaaagatttctgatgctggcatcaaacatatagtgaccattgaaagcttagagaagctacacttatctgagactgaattgactgacaatggagtgatgctcatttcttcactgacaaatctaagtttccttgatctaggtggaattctcatgacagacaaaaccctacagtctttacaggttttattcacactgaagtaaattccgagaagttgttgtctatgtctgcatttgagcatctcaaatatctggaaagtctaaatctggaggatacaccgctatcagctgaagttatacctcccttggcatcctttgcaacactgaaatatttgtacctgaaaagtgatttcttgtctgatcctgccttgcacgcactctctgctgcctccaatttgatacaccttgggttccgcgggaatatattgtcaagctttgggcttttacagtttgtaccccctgtcacactctgtgtgttggatttaagcggctgttggatcttaacaggcgatgctatttcaacattccgtaagcgtcatcctacgattgaattgagacatgagctcctgcacgaagttgaggaaaattttgttggtggttcccaatttcgtaaacctagacgcagacgatctcctcatgtgaaagcagaagttggaaacagttttgctggctcaagtaggctacacgatatccgttttgtagatgaaaggataaaatacagcaaggaggaatttgtggagctgcaaggccttgctaaaccaaattcgttaatgcttggcgtgtggcttccaccagaactgcgaaggcccaaatgatagttttggatcttgattccttacgcatttactgccagcatatcataatcttccttgagttattcttgatatgacagacttttgagaattaagcatcaagcatgtcactcagttccaaattatagttcactttggttttgtcctaggtcaaacttttctagctttgacctatgcattcgaataaatgctataccaaaatgtatttcgtgaagaatctaaagaaactgatttgatgttctagatggtggtacactttcctttaaacttggtcaaacataaagaagtttgacttatgaaaccaaagttaactataatttggaacaaagggagtacactggagttatctaaaacaaattttcgataaattagttttaacatttgcattgggctctcatcagttgatcctgaatccagttctccgatctgtgatataaaatatcattttctggagtttccttttggtcacgtgaaacttttacacactttggcctttgggcgctttctaactaaggtcccg

SEQ ID NO: 73138 - DNA, 1978 bp, Zea Mays
tgagttgctgacggtcgcttgacgagtttgcgattttggatcccatcccatcgtttcctcctcctccctctggcctccggtcacggctcgatctcccgttccaatcacgcccatggcagccgccgccttcggctccgccactggtggcgggtcgcggcttgtggaccgctgcatcgacgcggcagcgcgcggtcccgccactgtggaggcctggcgccggcagcgccgctccctggagcgcctcccggccccgctcgccgacgcgctcttacgccgcctagctgcgcgtcgccttctcttcccctccctcctcgaggtgtttggccggtcagtagaggaggttgatctgagtggatttctttctgtgaattccgagtggttggcataccttggctccttcaggtaccttagggttctgaagttggcggactgcaagaacatcaacaatgacgctgtctggtcgctctctggaatgaacacattaaaggagctggacttgtcaaggtggaattctcatgacagacaaaaccctacagtctttacagctgcaagttaagcaacttgtctttcttggaaaagatgaagaatctagagcatctggaccttagctacaacataataactgatggtgcaattgaacatattgcgaagattggaacaaacttgcaatatttgagcctcaagaatactggaataacttcccaggcactatgtattctggcagggacagttccaaacctcacctcactgtctttagctaatacaaaaattgatgactctgctctagcatatattggcatgatacctttgctgagaacgatagatttaagccagacaagtatcaaagtaaattccgagaagttgttgtctatgtctgcatttgagcatctcaaatatctggaaagtctaaatctggaggatacaccgctatcagctgaagttatacctcccttggcatcctttgcaacactgaaatatttgtacctgaaaagtgatttcttgtctgatcctgccttgcacgcactctctgctgcctccaatttgatacaccttgggttccgcgggaatatattgtcaagctttgggcttttacagtttgtaccccctgtcacactctgtgtgttggatttaagcggctgttggatcttaacaggcgatgctatttcaacattccgtaagcgtcatcctacgattgaattgagacatgagctcctgcacgaagttgaggaaaattttgttggtggttcccaatttcgtaaacctagacgcagacgatctcctcatgtgaaagcagaagttggaaacagttttgctggctcaagtaggctacacgatatccgttttgtagatgaaaggataaaatacagcaaggaggaatttgtggagctgcaaggccttgctaaaccaaattcgttaatgcttggcgtgtggcttccaccagaactgcgaaggcccaaatgatagttttggatcttgattccttacgcatttactgccagcatatcataatcttccttgagttattcttgatatgacagacttttgagaattaagcatcaagcatgtcactcagttccaaattatagttcactttggttttgtcctaggtcaaacttttctagctttgacctatgcattcgaataaatgctataccaaaatgtatttcgtgaagaatctaaagaaactgatttgatgttctagatggtggtacactttcctttaaacttggtcaaacataaagaagtttgacttatgaaaccaaagttaactataatttggaacaaagggagtacactggagttatctaaaacaaattttcgataaattagttttaacatttgcattgggctctcatcagttgatcctgaatccagttctccgatctgtgatataaaatatcattttctggagtttccttttggtcacgtgaaacttttacacactttggcctttgggcgctttctaactaaggtcccg

SEQ ID NO: 73139 - DNA, 2210 bp, Zea Mays
aaaatctttggttggagcctttggtcaacttaaaattgctaactttggctggtccggcatcttcaacaggactatggtgtttggccggtcagtagaggaggttgatctgagtggatttctttctgtgaattccgagtggttggcataccttggctccttcaggtaccttagggttctgaagttggcggactgcaagaacatcaacaatgacgctgtctggtcgctctctggaatgaacacattaaaggagctggacttgtcaaggtgcaaaaagatttctgatgctggcatcaaacatatagtgaccattgaaagcttagagaagctacacttatctgagactgaattgactgacaatggagtgatgctcatttcttcactgacaaatctaagtttccttgatctaggtggaattctcatgacagacaaaaccctacagtctttacaggtattgacaaaacttgagcatcttgatatatggggtagtgaaactacaaatgagggagcttctgctctgaaatcctttgcaaggctgctatccttgaatcttgcgttgacacgtgtcaaccatttatcaattcctccaaccacaagctatctaaatatgagcaactgcgaaattcattctatttgtgatgtggattctgaagttcctgttccactagaaaactttattgtctctgcagctacatttggcaatattgataaagtattttctagcatccaagcaagctcactgatacatttggacttgtctagctgcaagttaagcaacttgtctttcttggaaaagatgaagaatctagagcatctggaccttagctacaacataataactgatggtgcaattgaacatattgcgaagattggaacaaacttgcaatatttgagcctcaagaatactggaataacttcccaggcactatgtattctggcagggacagttccaaacctcacctcactgtctttagctaatacaaaaattgatgactctgctctagcatatattggcatgatacctttgctgagaacgatagatttaagccagacaagtatcaaaggttttattcacactgaagtaaattccgagaagttgttgtctatgtctgcatttgagcatctcaaatatctggaaagtctaaatctggaggatacaccgctatcagctgaagttatacctcccttggcatcctttgcaacactgaaatatttgtacctgaaaagtgatttcttgtctgatcctgccttgcacgcactctctgctgcctccaatttgatacaccttgggttccgcgggaatatattgtcaagctttgggcttttacagtttgtaccccctgtcacactctgtgtgttggatttaagcggctgttggatcttaacaggcgatgctatttcaacattccgtaagcgtcatcctacgattgaattgagacatgagctcctgcacgaagttgaggaaaattttgttggtggttcccaatttcgtaaacctagacgcagacgatctcctcatgtgaaagcagaagttggaaacagttttgctggctcaagtaggctacacgatatccgttttgtagatgaaaggataaaatacagcaaggaggaatttgtggagctgcaaggccttgctaaaccaaattcgttaatgcttggcgtgtggcttccaccagaactgcgaaggcccaaatgatagttttggatcttgattccttacgcatttactgccagcatatcataatcttccttgagttattcttgatatgacagacttttgagaattaagcatcaagcatgtcactcagttccaaattatagttcactttggttttgtcctaggtcaaacttttctagctttgacctatgcattcgaataaatgctataccaaaatgtatttcgtgaagaatctaaagaaactgatttgatgttctagatggtggtacactttcctttaaacttggtcaaacataaagaagtttgacttatgaaaccaaagttaactataatttggaacaaagggagtacactggagttatctaaaacaaattttcgataaattagttttaacatttgcattgggctctcatcagttgatcctgaatccagttctccgatctgtgatataaaatatcattttctggagtttccttttggtcacgtgaaacttttacacactttggcctttgggcgctttctaactaaggtcccg

SEQ ID NO: 73140 - DNA, 2267 bp, Zea Mays
cttaaaattgctaactttggctggtccggcatcttcaacaggactatggtgtttggccggtcagtagaggaggttgatctgagtggatttctttctgtgaattccgagtggttggcataccttggctccttcaggtaccttagggttctgaagttggcggactgcaagaacatcaacaatgacgctgtctggtcgctctctggaatgaacacattaaaggagctggacttgtcaaggtgcaaaaagatttctgatgctggcatcaaacatatagtgaccattgaaagcttagagaagctacacttatctgagactgaattgactgacaatggagtgatgctcatttcttcactgacaaatctaagtttccttgatctaggtggaattctcatgacagacaaaaccctacagtctttacaggtattgacaaaacttgagcatcttgatatatggggtagtgaaactacaaatgagggagcttctgctctgaaatcctttgcaaggctgctatccttgaatcttgcgttgacacgtgtcaaccatttatcaattcctccaaccacaagctatctaaatatgagcaactgcgaaattcattctatttgtgatgtggattctgaagttcctgttccactagaaaactttattgtctctgcagctacatttggcaatattgataaagtattttctagcatccaagcaagctcactgatacatttggacttgtctagctgcaagttaagcaacttgtctttcttggaaaagatgaagaatctagagcatctggaccttagctacaacataataactgatggtgcaattgaacatattgcgaagattggaacaaacttgcaatatttgagcctcaagaatactggaataacttcccaggcactatgtattctggcagggacagttccaaacctcacctcactgtctttagctaatacaaaaattgatgactctgctctagcatatattggcatgatacctttgctgagaacgatagatttaagccagacaagtatcaaaggttgtgctcttgcttactaaaattttttgtttccttgattacattaatttacttttggccacaaaaaaataaattttaccttatggcaggttttattcacactgaagtaaattccgagaagttgttgtctatgtctgcatttgagcatctcaaatatctggaaagtctaaatctggaggatacaccgctatcagctgaagttatacctcccttggcatcctttgcaacactgaaatatttgtacctgaaaagtgatttcttgtctgatcctgccttgcacgcactctctgctgcctccaatttgatacaccttgggttccgcgggaatatattgtcaagctttgggcttttacagtttgtaccccctgtcacactctgtgtgttggatttaagcggctgttggatcttaacaggcgatgctatttcaacattccgtaagcgtcatcctacgattgaattgagacatgagctcctgcacgaagttgaggaaaattttgttggtggttcccaatttcgtaaacctagacgcagacgatctcctcatgtgaaagcagaagttggaaacagttttgctggctcaagtaggctacacgatatccgttttatgaaaggataaaatacagcaaggaggaatttgtggagctgcaaggccttgctaaaccaaattcgttaatgcttggcgtgtggcttccaccagaactgcgaaggcccaaatgatagttttggatcttgattccttacgcatttactgccagcatatcataatcttccttgagttattcttgatatgacagacttttgagaattaagcatcaagcatgtcactcagttccaaattatagttcactttggttttgtcctaggtcaaacttttctagctttgacctatgcattcgaataaatgctataccaaaatgtatttcgtgaagaatctaaagaaactgatttgatgttctagatggtggtacactttcctttaaacttggtcaaacataaagaagtttgacttatgaaaccaaagttaactataatttggaacaaagggagtacactggagttatctaaaacaaattttcgataaattagttttaacatttgcattgggctctcatcagttgatcctgaatccagttctccgatctgtgatataaaatatcattttctggagtttccttttggtcacgtgaaacttttacacactttggcctttgggcgctttctaactaaggtcccg

SEQ ID NO: 73141 - DNA, 3422 bp, Zea Mays
tataaatgtcagccacttggaccgagtattatacaagcgaaaagagttcaggaaggaagctaagctactcctgtcctgtttcaggcacgaccgcggaccgcttctagttctgcatcggcggccttcgcttctcagccttttcctccccccatcccggagacttcttccctggttgctgcacagccttctttttttgcgaggtggagaggtttggggaggagaacacgaacgcatccaaagaccggagcggagcagggtaagggctctctcctgcaggctgcagccgtggaccgtggagggagaagatgcgcaaggggcagctcttgttgctgctgcttttgttcgctgccggatcaacaaccgcctccgccaagaccgacccgcaagatgaggctgctctcagatccttgatgaagagatggaaaaatgtgcctgctagctggggaaagtccagtccttgcgacatgccgtgggatggtattttgtgtgatgaaaatggaagggtcacatcactgaatctgtttgggatgggcatgggaggcactctgagtgatgatataggaagtctgactgagctaacgatcttagatctgtcctcaaacagagatcttggtgggccattgccagctgccattgggaagttgtttaagcttgaatcttttttcagtggtcctgttccgagcgaactaggaaacttgtcacaactcacattctttgctctgaactcaaacaaactaacgggtagcatcccgccctcattaggcaagctctccaatgtcacctggctggaccttgccgataaccagctgaccggacctctcccaacctccagagataatagaactggattggaccagcttcttaacgcacaacacttccattttaatcgaaacatgctggaaggttcaataccagactctctcttcagctccagcatgcacctcaaacatatcctttttgacctaaacagatttactggacagattccagcttctattggtgcaattccatcactcacagtacttcgtctaaataacaatggtttcatgggaccagttcctgctctcaacaacctgactaatctccaagttttaatgctttcaaataacaagctaagtggaccaattcctaatttgaccgggatgggctcgctagaaaatgtggatatcagtaataacagctttgatccttctaacgtcccaagctggttctcagatttaaagagcataatgacccttacaatgcagtcagttgggctttcggggcaactgccacagaagcttttcagttttcctcaactgcagcatctagtactaagtgataatgaactgaatggcacgcttgacatgggaaacaatatgagcaagcatcttgatcttgtcgatattcaaaacaacaaaatcacctcagttacagtgtacaacagcttcaaaaacctcaagcttgaaggaaacccactctgcaatgattctcttctgtcagacacaagtccatgcatgggcctgcaaactgaagccccacctcagccttatcaatttgatgttcaatgtgcatatccttttatagaaaccatcgtattcagagctccttcctttgccaacgtattcgagtaccttcccgagctacagaagaacctgtctaaacaattgaacagctgtaccccgaactggctaggcttggtaccttacttcgacgaagatgcatacctaaatgtgaatattaaggcatgcccagtaaagcagaaaaggttcaactactctcaagtgttaaactgcttcaacctgacccgtcagacttacaagccacccgagatgtatgggccttactatgtgaatgcacatccttacgcattccacgataaaacatctcgcgctgtgttgattggcattgtgactggatctgttctcctggtcgtggggctcactctggttgtattttacgctgtaaatcaaaagaaacgggctcagaggcttgtgtccatcaacaatccttttgcgtcttggggatcattgggagaagatattggtgcagcaccacaactgaagagtgctaaattcttctcattggaagaactcaagttatgcaccaatgatttccgagaaattaatgcgattggagctggaggctatggaacggtttaccgaggaaaacttccagatgggcagttagtggcaatcaagagatccaaggaagggtccatgcagggtggccttgagttcaagacagaaatagaactcctttccagggttcatcacaataacttggttggactggttggtttctgctttgagaagggcgaaaagatgttagtttacgagttcatacctaatggaacactaagcgaggctttatatggtatgaaaggaatacaattagactggagcaggaggctcaagatagctttggattcagctaaagggctagcatacctccatgaccatgccaatcctcctatcattcacagagatgtgaagtccactaacattctccttaatgagaagatgaccgcaaaggtttcagactttggcctgtcgttgctggtaacagacagtgaggaagggcaactatgcacaaacgtcaaggggacactgggctacctggacccagagtactacatgacccaacaactcacagcaaagagcgatgtctacagcttcggcgtagtgctcctagaactcatagtgggtaagccaccaatacacaacaacaagtacattgtccgtgaggtgaaaatggcactagacgaagacgatggcacgcactatgggctcaaggatgtgatggaccctgttcttcagaaaattgggggcctctttggcttcccacggtttctaaaactagcactgcaatgcgttgaagaggtggcaaccgcccggccctcgatgaacagcattgtgagggagattgaggcgatcatgctggacaatgggctcacaccgggctcaatgtctacgagctcttcattcagcattgaatcaagaacgatgaaggttggacctaagcacccatactccagttcatccatgtcaacctcgacgtttgatatggatagcagggcctttgagtacagtggggtgttcccttcttctcatggtagcttgaagccctgaagatcagaacttttggactccaacaatctgtacgagctgttatatatgtttcagtaggactgtacagaattgatgaactttgattcgttttgcctagagagacaaaagtatcttttggtttttttctttttaaagaagagatgtatataatattggccaaaacttttctccagtgatattgaagcttaggtgaggatgaaccaattataatgaactctcgagaacatgataagtactccctgtgtaattataatttgtttcttcttgtattagccatatatatatatatatatatatatatatatatagcac

SEQ ID NO: 73142 - DNA, 3382 bp, Zea Mays
gccacttggaccgagtattatacaagcgaaaagagttcaggaaggaagctaagctactcctgtcctgtttcaggcacgaccgcggaccgcttctagttctgcatcggcggccttcgcttctcagccttttcctccccccatcccggagacttcttccctggttgctgcacagccttctttttttgcgaggtggagaggtttggggaggagaacacgaacgcatccaaagaccggagcggagcagggtaagggctctctcctgcaggctgcagccgtggaccgtggagggagaagatgcgcaaggggcagctcttgttgctgctgcttttgttcgctgccggatcaacaaccgcctccgccaagaccgacccgcaagatgaggctgctctcagatccttgatgaagagatggaaaaatgtgcctgctagctggggaaagtccagtccttgcgacatgccgtgggatggtattttgtgtgatgaaaatggaagggtcacatcactgaatctgtttgggatgggcatgggaggcactctgagtgatgatataggaagtctgactgagctaacgatcttagatctgtcctcaaacagagatcttggtgggccattgccagctgccattgggaagttgtttaagcttgaatctttagcattgattggttgcagtttcagtggtcctgttccgagcgaactaggaaacttgtcacaactcacattcttgcaagctctccaatgtcacctggctggaccttgccgataaccagctgaccggacctctcccaacctccagagataatagaactggattggaccagcttcttaacgcacaacacttccattttaatcgaaacatgctggaaggttcaataccagactctctcttcagctccagcatgcacctcaaacatatcctttttgacctaaacagatttactggacagattccagcttctattggtgcaattccatcactcacagtacttcgtctaaataacaatggtttcatgggaccagttcctgctctcaacaacctgactaatctccaagttttaatgctttcaaataacaagctaagtggaccaattcctaatttgaccgggatgggctcgctagaaaatgtggatatcagtaataacagctttgatccttctaacgtcccaagctggttctcagatttaaagagcataatgacccttacaatgcagtcagttgggctttcggggcaactgccacagaagcttttcagttttcctcaactgcagcatctagtactaagtgataatgaactgaatggcacgcttgacatgggaaacaatatgagcaagcatcttgatcttgtcgatattcaaaacaacaaaatcacctcagttacagtgtacaacagcttcaaaaacctcaagcttgaaggaaacccactctgcaatgattctcttctgtcagacacaagtccatgcatgggcctgcaaactgaagccccacctcagccttatcaatttgatgttcaatgtgcatatccttttatagaaaccatcgtattcagagctccttcctttgccaacgtattcgagtaccttcccgagctacagaagaacctgtctaaacaattgaacagctgtaccccgaactggctaggcttggtaccttacttcgacgaagatgcatacctaaatgtgaatattaaggcatgcccagtaaagcagaaaaggttcaactactctcaagtgttaaactgcttcaacctgacccgtcagacttacaagccacccgagatgtatgggccttactatgtgaatgcacatccttacgcattccacgataaaacatctcgcgctgtgttgattggcattgtgactggatctgttctcctggtcgtggggctcactctggttgtattttacgctgtaaatcaaaagaaacgggctcagaggcttgtgtccatcaacaatccttttgcgtcttggggatcattgggagaagatattggtgcagcaccacaactgaagagtgctaaattcttctcattggaagaactcaagttatgcaccaatgatttccgagaaattaatgcgattggagctggaggctatggaacggtttaccgaggaaaacttccagatgggcagttagtggcaatcaagagatccaaggaagggtccatgcagggtggccttgagttcaagacagaaatagaactcctttccagggttcatcacaataacttggttggactggttggtttctgctttgagaagggcgaaaagatgttagtttacgagttcatacctaatggaacactaagcgaggctttatatggtatgaaaggaatacaattagactggagcaggaggctcaagatagctttggattcagctaaagggctagcatacctccatgaccatgccaatcctcctatcattcacagagatgtgaagtccactaacattctccttaatgagaagatgaccgcaaaggtttcagactttggcctgtcgttgctggtaacagacagtgaggaagggcaactatgcacaaacgtcaaggggacactgggctacctggacccagagtactacatgacccaacaactcacagcaaagagcgatgtctacagcttcggcgtagtgctcctagaactcatagtgggtaagccaccaatacacaacaacaagtacattgtccgtgaggtgaaaatggcactagacgaagacgatggcacgcactatgggctcaaggatgtgatggaccctgttcttcagaaaattgggggcctctttggcttcccacggtttctaaaactagcactgcaatgcgttgaagaggtggcaaccgcccggccctcgatgaacagcattgtgagggagattgaggcgatcatgctggacaatgggctcacaccgggctcaatgtctacgagctcttcattcagcattgaatcaagaacgatgaaggttggacctaagcacccatactccagttcatccatgtcaacctcgacgtttgatatggatagcagggcctttgagtacagtggggtgttcccttcttctcatggtagcttgaagccctgaagatcagaacttttggactccaacaatctgtacgagctgttatatatgtttcagtaggactgtacagaattgatgaactttgattcgttttgcctagagagacaaaagtatcttttggtttttttctttttaaagaagagatgtatataatattggccaaaacttttctccagtgatattgaagcttaggtgaggatgaaccaattataatgaactctcgagaacatgataagtactccctgtgtaattataatttgtttcttcttgtattagccatatatatatatatatatatatatatatatatagcac

SEQ ID NO: 73143 - DNA, 3342 bp, Zea Mays
caggaaggaagctaagctactcctgtcctgtttcaggcacgaccgcggaccgcttctagttctgcatcggcggccttcgcttctcagccttttcctccccccatcccggagacttcttccctggttgctgcacagccttctttttttgcgaggtggagaggtttggggaggagaacacgaacgcatccaaagaccggagcggagcagggtaagggctctctcctgcaggctgcagccgtggaccgtggagggagaagatgcgcaaggggcagctcttgttgctgctgcttttgttcgctgccggatcaacaaccgcctccgccaagaccgacccgcaagatgaggctgctctcagatccttgatgaagagatggaaaaatgtgcctgctagctggggaaagtccagtccttgcgacatgccgtgggatggtattttgtgtgatgaaaatggaagggtcacatcactgaatctgtttgggatgggcatgggaggcactctgagtgatgatataggaagtctgactgagctaacgatcttagatctgtcctcaaacagagatcttggtgggccattgccagctgccattgggaagttgtttaagcttgaatctttagcattgattggttgcagtttcagtggtcctgttccgagcgaactaggaaacttgtcacaactcacattctttgctctgaactcaaacaaactaacgggtagcatcccgccctcattaggcaagctctccaatgtcacctggctggaccttgccgataaccagctgaccggacctctcccaacctccagagataatagaactggattggaccagcttcttaacgcacaacacttccattttaatcgaaacatgctggaaggttcaataccagactctctcttcagctccagcatgcacctcaaacatatcctttttgacctaaacagatttactggacagattccagcttctattggtgcaattccatcactcacagtacttcgtctaaataacaatggtttcatgggaccagttcctgctctcaacaacctgactaatctccaagttttaatgctttcaaataacaagctaagtggaccaattcctaatttgaccgggatgggctcgctagaaaatgtggatatcagtaataacagctttgatccttctaacgtcccaagctggttctcagatttaaagagcataatgacccttacaatgcagtcagttgggctttcggggcaactgccacagaagcttttcagttttcctcaactgcagcatctagtactaagtgataatgaactgaatggcacgcttgacatgggaaacaatatgagcaagcatcttgatcttgtcgatattcaaaacaacaaaatcacctcagttacagtgtacaacagcttcaaaaacctcaagcttgaaggaaacccactctgcaatgattctcttctgtcagacacaagtccatgcatgggcctgcaaactgaagccccacctcagccttatcaatttgatgttcaatgtgcatatccttttatagaaaccatcgtattcagagctccttcctttgccaacgtattcgagtaccttcccgagctacagaagaacctgtctaaacaattgaacagctgtaccccgaactggctaggcttggtaccttacttcgacgaagatgcatacctaaatgtgaatattaaggcatgcccagtaaagcagaaaaggttcaactactctcaagtgttaaactgcttcaacctgacccgtcagacttacaagccacccgagatcatctcgcgctgtgttgattggcattgtgactggatctgttctcctggtcgtggggctcactctggttgtattttacgctgtaaatcaaaagaaacgggctcagaggcttgtgtccatcaacaatccttttgcgtcttggggatcattgggagaagatattggtgcagcaccacaactgaagagtgctaaattcttctcattggaagaactcaagttatgcaccaatgatttccgagaaattaatgcgattggagctggaggctatggaacggtttaccgaggaaaacttccagatgggcagttagtggcaatcaagagatccaaggaagggtccatgcagggtggccttgagttcaagacagaaatagaactcctttccagggttcatcacaataacttggttggactggttggtttctgctttgagaagggcgaaaagatgttagtttacgagttcatacctaatggaacactaagcgaggctttatatggtatgaaaggaatacaattagactggagcaggaggctcaagatagctttggattcagctaaagggctagcatacctccatgaccatgccaatcctcctatcattcacagagatgtgaagtccactaacattctccttaatgagaagatgaccgcaaaggtttcagactttggcctgtcgttgctggtaacagacagtgaggaagggcaactatgcacaaacgtcaaggggacactgggctacctggacccagagtactacatgacccaacaactcacagcaaagagcgatgtctacagcttcggcgtagtgctcctagaactcatagtgggtaagccaccaatacacaacaacaagtacattgtccgtgaggtgaaaatggcactagacgaagacgatggcacgcactatgggctcaaggatgtgatggaccctgttcttcagaaaattgggggcctctttggcttcccacggtttctaaaactagcactgcaatgcgttgaagaggtggcaaccgcccggccctcgatgaacagcattgtgagggagattgaggcgatcatgctggacaatgggctcacaccgggctcaatgtctacgagctcttcattcagcattgaatcaagaacgatgaaggttggacctaagcacccatactccagttcatccatgtcaacctcgacgtttgatatggatagcagggcctttgagtacagtggggtgttcccttcttctcatggtagcttgaagccctgaagatcagaacttttggactccaacaatctgtacgagctgttatatatgtttcagtaggactgtacagaattgatgaactttgattcgttttgcctagagagacaaaagtatcttttggtttttttctttttaaagaagagatgtatataatattggccaaaacttttctccagtgatattgaagcttaggtgaggatgaaccaattataatgaactctcgagaacatgataagtactccctgtgtaattataatttgtttcttcttgtattagccatatatatatatatatatatatatatatatatagcac

SEQ ID NO: 73144 - DNA, 3084 bp, Zea Mays
attggaggggagggccacgtgtcgcggcaaggtcggggcagtacggcgcagctaagatggccttgcggcgacgggaaagaaaggctgctctcagatccttgatgaagagatggaaaaatgtgcctgctagctggggaaagtccagtccttgcgacatgccgtgggatggtattttgtgtgatgaaaatggaagggtcacatcactgaatctgtttgggatgggcatgggaggcactctgagtgatgatataggaagtctgactgagctaacgatcttagatctgtcctcaaacagagatcttggtgggccattgccagctgccattgggaagttgtttaagcttgaatctttagcattgattggttgcagtttcagtggtcctgttccgagcgaactaggaaacttgtcacaactcacattcttgcaagctctccaatgtcacctggctggaccttgccgataaccagctgaccggacctctcccaacctccagagataatagaactggattggaccagcttcttaacgcacaacacttccattttaatcgaaacatgctggaaggttcaataccagactctctcttcagctccagcatgcacctcaaacatatcctttttgacctaaacagatttactggacagattccagcttctattggtgcaattccatcactcacagtacttcgtctaaataacaatggtttcatgggaccagttcctgctctcaacaacctgactaatctccaagttttaatgctttcaaataacaagctaagtggaccaattcctaatttgaccgggatgggctcgctagaaaatgtggatatcagtaataacagctttgatccttctaacgtcccaagctggttctcagatttaaagagcataatgacccttacaatgcagtcagttgggctttcggggcaactgccacagaagcttttcagttttcctcaactgcagcatctagtactaagtgataatgaactgaatggcacgcttgacatgggaaacaatatgagcaagcatcttgatcttgtcgatattcaaaacaacaaaatcacctcagttacagtgtacaacagcttcaaaaacctcaagcttgaaggaaacccactctgcaatgattctcttctgtcagacacaagtccatgcatgggcctgcaaactgaagccccacctcagccttatcaatttgatgttcaatgtgcatatccttttatagaaaccatcgtattcagagctccttcctttgccaacgtattcgagtaccttcccgagctacagaagaacctgtctaaacaattgaacagctgtaccccgaactggctaggcttggtaccttacttcgacgaagatgcatacctaaatgtgaatattaaggcatgcccagtaaagcagaaaaggttcaactactctcaagtgttaaactgcttcaacctgacccgtcagacttacaagccacccgagatgtatgggccttactatgtgaatgcacatccttacgcattccacgataaaacatctcgcgctgtgttgattggcattgtgactggatctgttctcctggtcgtggggctcactctggttgtattttacgctgtaaatcaaaagaaacgggctcagaggcttgtgtccatcaacaatccttttgcgtcttggggatcattgggagaagatattggtgcagcaccacaactgaagagtgctaaattcttctcattggaagaactcaagttatgcaccaatgatttccgagaaattaatgcgattggagctggaggctatggaacggtttaccgaggaaaacttccagatgggcagttagtggcaatcaagagatccaaggaagggtccatgcagggtggccttgagttcaagacagaaatagaactcctttccagggttcatcacaataacttggttggactggttggtttctgctttgagaagggcgaaaagatgttagtttacgagttcatacctaatggaacactaagcgaggctttatatggtatgaaaggaatacaattagactggagcaggaggctcaagatagctttggattcagctaaagggctagcatacctccatgaccatgccaatcctcctatcattcacagagatgtgaagtccactaacattctccttaatgagaagatgaccgcaaaggtttcagactttggcctgtcgttgctggtaacagacagtgaggaagggcaactatgcacaaacgtcaaggggacactgggctacctggacccagagtactacatgacccaacaactcacagcaaagagcgatgtctacagcttcggcgtagtgctcctagaactcatagtgggtaagccaccaatacacaacaacaagtacattgtccgtgaggtgaaaatggcactagacgaagacgatggcacgcactatgggctcaaggatgtgatggaccctgttcttcagaaaattgggggcctctttggcttcccacggtttctaaaactagcactgcaatgcgttgaagaggtggcaaccgcccggccctcgatgaacagcattgtgagggagattgaggcgatcatgctggacaatgggctcacaccgggctcaatgtctacgagctcttcattcagcattgaatcaagaacgatgaaggttggacctaagcacccatactccagttcatccatgtcaacctcgacgtttgatatggatagcagggcctttgagtacagtggggtgttcccttcttctcatggtagcttgaagccctgaagatcagaacttttggactccaacaatctgtacgagctgttatatatgtttcagtaggactgtacagaattgatgaactttgattcgttttgcctagagagacaaaagtatcttttggtttttttctttttaaagaagagatgtatataatattggccaaaacttttctccagtgatattgaagcttaggtgaggatgaaccaattataatgaactctcgagaacatgataagtactccctgtgtaattataatttgtttcttcttgtattagccatatatatatatatatatatatatatatatatagcac

SEQ ID NO: 73145 - DNA, 3099 bp, Zea Mays
ccacgtgtcgcggcaaggtcggggcagtacggcgcagctaagatggccttgcggcgacgggaaagaaaggctgctctcagatccttgatgaagagatggaaaaatgtgcctgctagctggggaaagtccagtccttgcgacatgccgtgggatggtattttgtgtgatgaaaatggaagggtcacatcactgaatctgtttgggatgggcatgggaggcactctgagtgatgatataggaagtctgactgagctaacgatcttagatctgtcctcaaacagagatcttggtgggccattgccagctgccattgggaagttgtttaagcttgaatcttttttcagtggtcctgttccgagcgaactaggaaacttgtcacaactcacattctttgctctgaactcaaacaaactaacgggtagcatcccgccctcattaggcaagctctccaatgtcacctggctggaccttgccgataaccagctgaccggacctctcccaacctccagagataatagaactggattggaccagcttcttaacgcacaacacttccattttaatcgaaacatgctggaaggttcaataccagactctctcttcagctccagcatgcacctcaaacatatcctttttgacctaaacagatttactggacagattccagcttctattggtgcaattccatcactcacagtacttcgtctaaataacaatggtttcatgggaccagttcctgctctcaacaacctgactaatctccaagttttaatgctttcaaataacaagctaagtggaccaattcctaatttgaccgggatgggctcgctagaaaatgtggatatcagtaataacagctttgatccttctaacgtcccaagctggttctcagatttaaagagcataatgacccttacaatgcagtcagttgggctttcggggcaactgccacagaagcttttcagttttcctcaactgcagcatctagtactaagtgataatgaactgaatggcacgcttgacatgggaaacaatatgagcaagcatcttgatcttgtcgatattcaaaacaacaaaatcacctcagttacagtgtacaacagcttcaaaaacctcaagcttgaaggaaacccactctgcaatgattctcttctgtcagacacaagtccatgcatgggcctgcaaactgaagccccacctcagccttatcaatttgatgttcaatgtgcatatccttttatagaaaccatcgtattcagagctccttcctttgccaacgtattcgagtaccttcccgagctacagaagaacctgtctaaacaattgaacagctgtaccccgaactggctaggcttggtaccttacttcgacgaagatgcatacctaaatgtgaatattaaggcatgcccagtaaagcagaaaaggttcaactactctcaagtgttaaactgcttcaacctgacccgtcagacttacaagccacccgagatgtatgggccttactatgtgaatgcacatccttacgcattccacgataaaacatctcgcgctgtgttgattggcattgtgactggatctgttctcctggtcgtggggctcactctggttgtattttacgctgtaaatcaaaagaaacgggctcagaggcttgtgtccatcaacaatccttttgcgtcttggggatcattgggagaagatattggtgcagcaccacaactgaagagtgctaaattcttctcattggaagaactcaagttatgcaccaatgatttccgagaaattaatgcgattggagctggaggctatggaacggtttaccgaggaaaacttccagatgggcagttagtggcaatcaagagatccaaggaagggtccatgcagggtggccttgagttcaagacagaaatagaactcctttccagggttcatcacaataacttggttggactggttggtttctgctttgagaagggcgaaaagatgttagtttacgagttcatacctaatggaacactaagcgaggctttatatggtatgaaaggaatacaattagactggagcaggaggctcaagatagctttggattcagctaaagggctagcatacctccatgaccatgccaatcctcctatcattcacagagatgtgaagtccactaacattctccttaatgagaagatgaccgcaaaggtttcagactttggcctgtcgttgctggtaacagacagtgaggaagggcaactatgcacaaacgtcaaggggacactgggctacctggacccagagtactacatgacccaacaactcacagcaaagagcgatgtctacagcttcggcgtagtgctcctagaactcatagtgggtaagccaccaatacacaacaacaagtacattgtccgtgaggtgaaaatggcactagacgaagacgatggcacgcactatgggctcaaggatgtgatggaccctgttcttcagaaaattgggggcctctttggcttcccacggtttctaaaactagcactgcaatgcgttgaagaggtggcaaccgcccggccctcgatgaacagcattgtgagggagattgaggcgatcatgctggacaatgggctcacaccgggctcaatgtctacgagctcttcattcagcattgaatcaagaacgatgaaggttggacctaagcacccatactccagttcatccatgtcaacctcgacgtttgatatggatagcagggcctttgagtacagtggggtgttcccttcttctcatggtagcttgaagccctgaagatcagaacttttggactccaacaatctgtacgagctgttatatatgtttcagtaggactgtacagaattgatgaactttgattcgttttgcctagagagacaaaagtatcttttggtttttttctttttaaagaagagatgtatataatattggccaaaacttttctccagtgatattgaagcttaggtgaggatgaaccaattataatgaactctcgagaacatgataagtactccctgtgtaattataatttgtttcttcttgtattagccatatatatatatatatatatatatatatatatagcac

SEQ ID NO: 73146 - DNA, 3111 bp, Zea Mays
gtcgcggcaaggtcggggcagtacggcgcagctaagatggccttgcggcgacgggaaagaaaggctgctctcagatccttgatgaagagatggaaaaatgtgcctgctagctggggaaagtccagtccttgcgacatgccgtgggatggtattttgtgtgatgaaaatggaagggtcacatcactgaatctgtttgggatgggcatgggaggcactctgagtgatgatataggaagtctgactgagctaacgatcttagatctgtcctcaaacagagatcttggtgggccattgccagctgccattgggaagttgtttaagcttgaatctttagcattgattggttgcagtttcagtggtcctgttccgagcgaactaggaaacttgtcacaactcacattctttgctctgaactcaaacaaactaacgggtagcatcccgccctcattaggcaagctctccaatgtcacctggctggaccttgccgataaccagctgaccggacctctcccaacctccagagataatagaactggattggaccagcttcttaacgcacaacacttccattttaatcgaaacatgctggaaggttcaataccagactctctcttcagctccagcatgcacctcaaacatatcctttttgacctaaacagatttactggacagattccagcttctattggtgcaattccatcactcacagtacttcgtctaaataacaatggtttcatgggaccagttcctgctctcaacaacctgactaatctccaagttttaatgctttcaaataacaagctaagtggaccaattcctaatttgaccgggatgggctcgctagaaaatgtggatatcagtaataacagctttgatccttctaacgtcccaagctggttctcagatttaaagagcataatgacccttacaatgcagtcagttgggctttcggggcaactgccacagaagcttttcagttttcctcaactgcagcatctagtactaagtgataatgaactgaatggcacgcttgacatgggaaacaatatgagcaagcatcttgatcttgtcgatattcaaaacaacaaaatcacctcagttacagtgtacaacagcttcaaaaacctcaagcttgaaggaaacccactctgcaatgattctcttctgtcagacacaagtccatgcatgggcctgcaaactgaagccccacctcagccttatcaatttgatgttcaatgtgcatatccttttatagaaaccatcgtattcagagctccttcctttgccaacgtattcgagtaccttcccgagctacagaagaacctgtctaaacaattgaacagctgtaccccgaactggctaggcttggtaccttacttcgacgaagatgcatacctaaatgtgaatattaaggcatgcccagtaaagcagaaaaggttcaactactctcaagtgttaaactgcttcaacctgacccgtcagacttacaagccacccgagatgtatgggccttactatgtgaatgcacatccttacgcattccacgataaaacatctcgcgctgtgttgattggcattgtgactggatctgttctcctggtcgtggggctcactctggttgtattttacgctgtaaatcaaaagaaacgggctcagaggcttgtgtccatcaacaatccttttgcgtcttggggatcattgggagaagatattggtgcagcaccacaactgaagagtgctaaattcttctcattggaagaactcaagttatgcaccaatgatttccgagaaattaatgcgattggagctggaggctatggaacggtttaccgaggaaaacttccagatgggcagttagtggcaatcaagagatccaaggaagggtccatgcagggtggccttgagttcaagacagaaatagaactcctttccagggttcatcacaataacttggttggactggttggtttctgctttgagaagggcgaaaagatgttagtttacgagttcatacctaatggaacactaagcgaggctttatatggtatgaaaggaatacaattagactggagcaggaggctcaagatagctttggattcagctaaagggctagcatacctccatgaccatgccaatcctcctatcattcacagagatgtgaagtccactaacattctccttaatgagaagatgaccgcaaaggtttcagactttggcctgtcgttgctggtaacagacagtgaggaagggcaactatgcacaaacgtcaaggggacactgggctacctggacccagagtactacatgacccaacaactcacagcaaagagcgatgtctacagcttcggcgtagtgctcctagaactcatagtgggtaagccaccaatacacaacaacaagtacattgtccgtgaggtgaaaatggcactagacgaagacgatggcacgcactatgggctcaaggatgtgatggaccctgttcttcagaaaattgggggcctctttggcttcccacggtttctaaaactagcactgcaatgcgttgaagaggtggcaaccgcccggccctcgatgaacagcattgtgagggagattgaggcgatcatgctggacaatgggctcacaccgggctcaatgtctacgagctcttcattcagcattgaatcaagaacgatgaaggttggacctaagcacccatactccagttcatccatgtcaacctcgacgtttgatatggatagcagggcctttgagtacagtggggtgttcccttcttctcatggtagcttgaagccctgaagatcagaacttttggactccaacaatctgtacgagctgttatatatgtttcagtaggactgtacagaattgatgaactttgattcgttttgcctagagagacaaaagtatcttttggtttttttctttttaaagaagagatgtatataatattggccaaaacttttctccagtgatattgaagcttaggtgaggatgaaccaattataatgaactctcgagaacatgataagtactccctgtgtaattataatttgtttcttcttgtattagccatatatatatatatatatatatatatatatatagcac

SEQ ID NO: 73147 - DNA, 2381 bp, Zea Mays
gcaaagagaaacggggaggcggacatccaaccggattggcgagaccgcaacggcgcaacgggcttctcccgttctccgtcggtcgcggtcttttcccgtccgccccgcctccagctcccgtctcccaccccaacccggatctcgcgcgcgacgccgcgcaggcgaaccccacctcctctcagaagcctctagaagttcctcaccccgctcccgcgcggatgagtggcagctcgggccccctcccctactcgatgcgcgatgtgggtgctggcggcgcctacaacaacgccaagttccgccaccggtctcgcctcaagatggttctacagtccttggctactaacagaagcaaataccattgtggaaagttcactgttggtaaattcttgagcctgttgatggtttctggcttattgtacttatttatgcacaaaggctcagagggtattgtatccagtgagcttcatggcaaagaagtacagaataaaaatgttaggagatctcccagtatacgcacattctggagaaaaccaccaaggctgcccccacgcctccctccaaatgaaatctacaaaaataattctctgcttcagcagtctccatctgagtggacatcgaggcagaagaaagttaaagaagcatttgaacatgcatggtctggttatcaaaagtatgcaatgggttacgatgagcttatgcctctgagccacagaggcacagatgggttaggtggtctaggagctactattgtggattctttggatactgcgataataatgggtgctgatgatgttgtttctgaagcatcaaaatggattgaagacaacctaatgaaaagaattagtgagaaagggcaggtgactccggagtacctgtaacatataaaaaggctaatccagagcgacttttggaagtttcaaaggatttagccgacaggttattattggcttttacatcaagcccaacagctatacctttaagtgatgttattcttcgtgaccatactgcacatgcagcgcctgatggcttaagcagcacttcagaggcttcaacgttgcaattagagttcagttacctcagtaaagtattaggggatcctaagtacgacagggcggcaatgaaggtgttagagcatatacatacactcccaaaggtggagggtctggtgcctatttacatcaacccctcctctggtcaatttagtggtgagaatattcgattaggatctcgaggggacagttattatgagtatctgctaaaagtgtgggttcagcaggaggaatatcgtgacagtagtttaaagtatctatttgaaatgtatactgaggcaatgagaggggtcaagcatcttcttgttcggaaaactgttccaaatgggttggtatttgttggggagcttccatttggacgaaatggcgggtttagtcctaaaatggatcacctggtgtgttttcttcctggtacccttgctcttggtgcaactaaaggtatcaccaagagaaaagctcttgagactaatttgttaactgatgaagatatagaaaatctgcagcttgctgaagatcttgccaaaacatgtgttgagatgtacttcgtgacctctaccggccttgctcctgaaatagcttatttccacattgagggtgatacagaaggggggcctgatggtgggaataaaagctccaaatatatcaatgatatcgtaataaaaccacttgaccgtcacaatcttctacgcccagagactgtggaatcactatttgttttgtatagaatcacagaggattccaagtatagggagtggggttggcagatctttcaggcttttgagaagtacacaaaagttgattctggtggttacacatcattggatgatgtcacaagcctacctccttccacgagagataaaatggaaactttctttcttggagaaacattgaagtatttgtatttactgtttgatgaaaacaatacccttcccctagataagtatgtgttcaatacagaggcccatcctcttccagttatgcggtctgcagaacaggcttcacattctgtgtagtttcccaagtttatagctgttgtaccatggtgagaagtacagatctgtgacaaatatacttgacaacatagttggaggaacgagaaattgagaatcccttgcatgactgttcttggaggcaagctcatggttctggaatctccatgcctgatttgaggatttgggggttttacttgtatttactggaaggccatacaacctttgtactctgtactgtctgtagtctgtaatacctaacttcaaattttgaaatcggctagcagttataccaagatttttatcttcaacaattgtatgatcatgcatcagccgttctttc

SEQ ID NO: 73148 - DNA, 2456 bp, Zea Mays
gcaaagagaaacggggaggcggacatccaaccggattggcgagaccgcaacggcgcaacgggcttctcccgttctccgtcggtcgcggtcttttcccgtccgccccgcctccagctcccgtctcccaccccaacccggatctcgcgcgcgacgccgcgcaggcgaaccccacctcctctcagaagcctctagaagttcctcaccccgctcccgcgcggatgagtggcagctcgggccccctcccctactcgatgcgcgatgtgggtgctggcggcgcctacaacaacgccaagttccgccaccggtctcgcctcaagatggttctacagtccttggctactaacagaagcaaataccattgtggaaagttcactgttggtaaattcttgagcctgttgatggtttctggcttattgtacttatttatgcacaaaggctcagagggtattgtatccagtgagcttcatggcaaagaagtacagaataaaaatgttaggagatctcccagtatacgcacattctggagaaaaccaccaaggctgcccccacgcctccctccaaatgaaatctacaaaaataattctctgcttcagcagtctccatctgagtggacatcgaggcagaagaaagttaaagaagcatttgaacatgcatggtctggttatcaaaagtatgcaatgggttacgatgagcttatgcctctgagccacagaggcacagatgggttaggtggtctaggagctactattgtggattctttggatactgcgataataatgggtgctgatgatgttgtttctgaagcatcaaaatggattgaagacaacctaatgaaaagaattagtgagaaagggcaggttaacttatttgagactaccatccgtgtcttgggagggcttcttagtgcataccatttgagtggtggtgatcatccaggggcaggtgactccggagtacctgtaacatataaaaaggctaatccagagcgacttttggaagtttcaaaggatttagccgacaggttattattggcttttacatcaagcccaacagctatacctttaagtgatgttattcttcgtgaccatactgcacatgcagcgcctgatggcttaagcagcacttcagaggcttcaacgttgcaattagagttcagttacctcagtaaagtattaggggatcctaagtacgacagggcggcaatgaaggtgttagagcatatacatacactcccaaaggtggagggtctggtgcctatttacatcaacccctcctctggtcaatttagtggtgagaatattcgattaggatctcgaggggacagttattatgagtatctgctaaaagtgtgggttcagcaggaggaatatcgtgacagtagtttaaagtatctatttgaaatgtatactgaggcaatgagaggggtcaagcatcttcttgttcggaaaactgttccaaatgggttggtatttgttggggagcttccatttggacgaaatggcgggtttagtcctaaaatggatcacctggtgtgttttcttcctggtacccttgctcttggtgcaactaaaggtatcaccaagagaaaagctcttgagactaatttgttaactgatgaagatatagaaaatctgcagcttgctgaagatcttgccaaaacatgtgttgagatgtacttcgtgacctctaccggccttgctcctgaaatagcttatttccacattgagaaggggggcctgatggtgggaataaaagctccaaatatatcaatgatatcgtaataaaaccacttgaccgtcacaatcttctacgcccagagactgtggaatcactatttgttttgtatagaatcacagaggattccaagtatagggagtggggttggcagatctttcaggcttttgagaagtacacaaaagttgattctggtggttacacatcattggatgatgtcacaagcctacctccttccacgagagataaaatggaaactttctttcttggagaaacattgaagtatttgtatttactgtttgatgaaaacaatacccttcccctagataagtatgtgttcaatacagaggcccatcctcttccagttatgcggtctgcagaacaggcttcacattctgtgtagtttcccaagtttatagctgttgtaccatggtgagaagtacagatctgtgacaaatatacttgacaacatagttggaggaacgagaaattgagaatcccttgcatgactgttcttggaggcaagctcatggttctggaatctccatgcctgatttgaggatttgggggttttacttgtatttactggaaggccatacaacctttgtactctgtactgtctgtagtctgtaatacctaacttcaaattttgaaatcggctagcagttataccaagatttttatcttcaacaattgtatgatcatgcatcagccgttctttc

SEQ ID NO: 73149 - DNA, 1157 bp, Zea Mays
gcaaagagaaacggggaggcggacatccaaccggattggcgagaccgcaacggcgcaacgggcttctcccgttctccgtcggtcgcggtcttttcccgtccgccccgcctccagctcccgtctcccaccccaacccggatctcgcgcgcgacgccgcgcaggcgaaccccacctcctctcagaagcctctagaagttcctcaccccgctcccgcgcggatgagtggcagctcgggccccctcccctactcgatgcgcgatgtgggtgctggcggcgcctacaacaacgccaagttccgccaccggtctcgcctcaagaaaatctgcagcttgctgaagatcttgccaaaacatgtgttgagatgtacttcgtgacctctaccggccttgctcctgaaatagcttatttccacattgagggtgatacagaaggggggcctgatggtgggaataaaagctccaaatatatcaatgatatcgtaataaaaccacttgaccgtcacaatcttctacgcccagagactgtggaatcactatttgttttgtatagaatcacagaggattccaagtatagggagtggggttggcagatctttcaggcttttgagaagtacacaaaagttgattctggtggttacacatcattggatgatgtcacaagcctacctccttccacgagagataaaatggaaactttctttcttggagaaacattgaagtatttgtatttactgtttgatgaaaacaatacccttcccctagataagtatgtgttcaatacagaggcccatcctcttccagttatgcggtctgcagaacaggcttcacattctgtgtagtttcccaagtttatagctgttgtaccatggtgagaagtacagatctgtgacaaatatacttgacaacatagttggaggaacgagaaattgagaatcccttgcatgactgttcttggaggcaagctcatggttctggaatctccatgcctgatttgaggatttgggggttttacttgtatttactggaaggccatacaacctttgtactctgtactgtctgtagtctgtaatacctaacttcaaattttgaaatcggctagcagttataccaagatttttatcttcaacaattgtatgatcatgcatcagccgttctttc

SEQ ID NO: 73150 - DNA, 1146 bp, Zea Mays
gcaaagagaaacggggaggcggacatccaaccggattggcgagaccgcaacggcgcaacgggcttctcccgttctccgtcggtcgcggtcttttcccgtccgccccgcctccagctcccgtctcccaccccaacccggatctcgcgcgcgacgccgcgcaggcgaaccccacctcctctcagaagcctctagaagttcctcaccccgctcccgcgcggatgagtggcagctcgggccccctcccctactcgatgcgcgatgtgggtgctggcggcgcctacaacaacgccaagttccgccaccggtctcgcctcaagcttgctgaagatcttgccaaaacatgtgttgagatgtacttcgtgacctctaccggccttgctcctgaaatagcttatttccacattgagggtgatacagaaggggggcctgatggtgggaataaaagctccaaatatatcaatgatatcgtaataaaaccacttgaccgtcacaatcttctacgcccagagactgtggaatcactatttgttttgtatagaatcacagaggattccaagtatagggagtggggttggcagatctttcaggcttttgagaagtacacaaaagttgattctggtggttacacatcattggatgatgtcacaagcctacctccttccacgagagataaaatggaaactttctttcttggagaaacattgaagtatttgtatttactgtttgatgaaaacaatacccttcccctagataagtatgtgttcaatacagaggcccatcctcttccagttatgcggtctgcagaacaggcttcacattctgtgtagtttcccaagtttatagctgttgtaccatggtgagaagtacagatctgtgacaaatatacttgacaacatagttggaggaacgagaaattgagaatcccttgcatgactgttcttggaggcaagctcatggttctggaatctccatgcctgatttgaggatttgggggttttacttgtatttactggaaggccatacaacctttgtactctgtactgtctgtagtctgtaatacctaacttcaaattttgaaatcggctagcagttataccaagatttttatcttcaacaattgtatgatcatgcatcagccgttctttc

SEQ ID NO: 73151 - DNA, 2279 bp, Zea Mays
gcaaagagaaacggggaggcggacatccaaccggattggcgagaccgcaacggcgcaacgggcttctcccgttctccgtcggtcgcggtcttttcccgtccgccccgcctccagctcccgtctcccaccccaacccggatctcgcgcgcgacgccgcgcaggcgaaccccacctcctctcagaagcctctagaagttcctcaccccgctcccgcgcggatgagtggcagctcgggccccctcccctactcgatgcgcgatgtgggtgctggcggcgcctacaacaacgccaagttccgccaccggtctcgcctcaagatggttctacagtccttggctactaacagaagcaaataccattgtggaaagttcactgttgtgagcttcatggcaaagaagtacagaataaaaatgttaggagatctcccagtatacgcacattctggagaaaaccaccaaggctgcccccacgcctccctccaaatgaaatctacaaaaataattctctgcttcagcagtctccatctgagtggacatcgaggcagaagaaagttaaagaagcatttgaacatgcatggtctggttatcaaaagtatgcaatgggttacgatgagcttatgcctctgagccacagaggcacagatgggttaggtggtctaggagctactattgtggattctttggatactgcgataataatgggtgctgatgatgttgtttctgaagcatcaaaatggattgaagacaacctaatgaaaagaattagtgagaaagggcaggttaacttatttgagactaccatccgtgtcttgggagggcttcttagtgcataccatttgagtggtggtgatcatccaggggcaggtgactccggagtacctgtaacatataaaaaggctaatccagagcgacttttggaagtttcaaaggatttagccgacaggttattattggcttttacatcaagcccaacagctatacctttaagtgatgttattcttcgtgaccatactgcacatgcagcgcctgatggcttaagcagcacttcagaggcttcaacgttgcaattagagttcagttacctcagtaaagtattaggggatcctaagtacgacagggcggcaatgaaggtgttagagcatatacatacactcccaaaggtggagggtctggtgcctatttacatcaacccctcctctggtcaatttagtggtgagaatattcgattaggatctcgaggggacagttattatgagtatctgctaaaagtgtgggttcagcaggaggaatatcgtgacagtagtttaaagtatctatttgaaatgtatactgaggcaatgagaggggtcaagcatcttcttgttcggaaaactgttccaaatgggttggtatttgttggggagcttccatttggacgaaatggcgggtttagtcctaaaatggatcacctgcttgctgaagatcttgccaaaacatgtgttgagatgtacttcgtgacctctaccggccttgctcctgaaatagcttatttccacattgagggtgatacagaaggggggcctgatggtgggaataaaagctccaaatatatcaatgatatcgtaataaaaccacttgaccgtcacaatcttctacgcccagagactgtggaatcactatttgttttgtatagaatcacagaggattccaagtatagggagtggggttggcagatctttcaggcttttgagaagtacacaaaagttgattctggtggttacacatcattggatgatgtcacaagcctacctccttccacgagagataaaatggaaactttctttcttggagaaacattgaagtatttgtatttactgtttgatgaaaacaatacccttcccctagataagtatgtgttcaatacagaggcccatcctcttccagttatgcggtctgcagaacaggcttcacattctgtgtagtttcccaagtttatagctgttgtaccatggtgagaagtacagatctgtgacaaatatacttgacaacatagttggaggaacgagaaattgagaatcccttgcatgactgttcttggaggcaagctcatggttctggaatctccatgcctgatttgaggatttgggggttttacttgtatttactggaaggccatacaacctttgtactctgtactgtctgtagtctgtaatacctaacttcaaattttgaaatcggctagcagttataccaagatttttatcttcaacaattgtatgatcatgcatcagccgttctttc

SEQ ID NO: 73152 - DNA, 1732 bp, Zea Mays
caggcagctatcgcagtcgcaggaggcttgcctggctggtcaacgtatgtacatatgttacgtactgcacgcgcgtgcagtaaacagctgcgagtcagccgatcctgatccctagccggaggtgggaggtcaccgtcaccgcgcctcgccgccggggcgtcacaatggcctaccgccggaagcctcagccccatccccagccccagcccacgccctcgttggagcaccactacccgtcgtccgtgggccccgcctcacccgactccctcgccgcgcaggccatgcgcgcctccgccgcacaccgcgatgcctcctccctcacctccgcctactccgcctcagcctcgctggcggcctctcgccggagccaccacgagccctccgtgtccacaccgtccctggatagttcaggctatgaatacacgtccatgaagaacctcaacgaggccaagtatggattctggggcacacttgcgcggaaggcaaagtcatttcttgacgaggactgctccccggagcagtacaaatcgccaagagatgatgtgcatgttggtgtccagcttccacattcaaaacaattgccaggagagacgtggaaacctgagacacctccatctcagaagagatctgagtctataacttcctcccttacctatattggaggcacaataaaaaatgcacttgaagaaggtcggaccattgtagagaataaaacggctgacattattcaggagacgcgtaaactgaacataagaagaaaaggagctggtctaaatacacaaggagaagctggccacaaaattgctcaaagacaccttcctcaaaatccacttgaccatgaaactcagttgaaggcatctcgcgacgtaaggttgcaaatgccatggctgcaaaagcaaagttgctattgcgggagctgaaaactgtgaaggcagatttagcttttgcaaaggaacgatgtgctcagcttgaagaagagaataaaatgttgcgtgagagttatgacaagggtgataatccagaagatgatgatctgatccgcctccagttggaaacactactagctgagaaagcacggcttgcgcatgagaactcagtatatgcacgagaaaacagattcctgcgggaaatagttgagtatcaccagctcactatgcaggatgtcatatatgtagacgaaggcatcgaagaggtcaccgaggtgtaccctacacaagtactacctcgcactgggtcgagcgtcagtcgtgcagccactgcagctacaccgaaatctgctccgacgtcaacataatcttgccctgtcgtacaagcttctacaaatacactttttcgcggtcatctctgagcaatagatcaaagcgcccacctccaaccttcacggaagagtaaggtggttgtttggttgtgacgggaccacatagtttatgctgctactgttcaatgtaaacaaggattcactgttgttatgcctgtttgttgtcgtgactgagctgtggcgaaatatgaatgaacagtagcttctgactttctatatatattgtctcttaaccgcatttatggtcagggactcatggttatattatatagtctcttaattgtctcttatacttggaaaaataatgtacatgctctaagaagtggtattggacgacaaatagtcatgggaatgcattgttgtcagctactaatgtgttaaaaagaatggaagtaaaatgatttcatgtttgac

SEQ ID NO: 73153 - DNA, 1716 bp, Zea Mays
gctatcgcagtcgcaggaggcttgcctggctggtcaacgtatgtacatatgttacgtactgcacgcgcgtgcagtaaacagctgcgagtcagccgatcctgatccctagccggaggtgggaggtcaccgtcaccgcgcctcgccgccggggcgtcacaatggcctaccgccggaagcctcagccccatccccagccccagcccacgccctcgttggagcaccactacccgtcgtccgtgggccccgcctcacccgactccctcgccgcgcaggccatgcgcgcctccgccgcacaccgcgatgcctcctccctcacctccgcctactccgcctcagcctcgctggcggcctctcgccggagccaccacgagccctccgtgtccacaccgtccctgttcaggctatgaatacacgtccatgaagaacctcaacgaggccaagtatggattctggggcacacttgcgcggaaggcaaagtcatttcttgacgaggactgctccccggagcagtacaaatcgccaagagatgatgtgcatgttggtgtccagcttccacattcaaaacaattgccaggagagacgtggaaacctgagacacctccatctcagaagagatctgagtctataacttcctcccttacctatattggaggcacaataaaaaatgcacttgaagaaggtcggaccattgtagagaataaaacggctgacattattcaggagacgcgtaaactgaacataagaagaaaaggagctggtctaaatacacaaggagaagctggccacaaaattgctcaaagacaccttcctcaaaatccacttgaccatgaaactcagttgaaggcatctcgcgacgttgcaaatgccatggctgcaaaagcaaagttgctattgcgggagctgaaaactgtgaaggcagatttagcttttgcaaaggaacgatgtgctcagcttgaagaagagaataaaatgttgcgtgagagttatgacaagggtgataatccagaagatgatgatctgatccgcctccagttggaaacactactagctgagaaagcacggcttgcgcatgagaactcagtatatgcacgagaaaacagattcctgcgggaaatagttgagtatcaccagctcactatgcaggatgtcatatatgtagacgaaggcatcgaagaggtcaccgaggtgtaccctacacaagtactacctcgcactgggtcgagcgtcagtcgtgcagccactgcagctacaccgaaatctgctccgacgtcaacataatcttgccctgtcgtacaagcttctacaaatacactttttcgcggtcatctctgagcaatagatcaaagcgcccacctccaaccttcacggaagagtaaggtggttgtttggttgtgacgggaccacatagtttatgctgctactgttcaatgtaaacaaggattcactgttgttatgcctgtttgttgtcgtgactgagctgtggcgaaatatgaatgaacagtagcttctgactttctatatatattgtctcttaaccgcatttatggtcagggactcatggttatattatatagtctcttaattgtctcttatacttggaaaaataatgtacatgctctaagaagtggtattggacgacaaatagtcatgggaatgcattgttgtcagctactaatgtgttaaaaagaatggaagtaaaatgatttcatgtttgac

SEQ ID NO: 73154 - DNA, 918 bp, Zea Mays
aacatgtgtcactagatatgttgcttcagtgctccattttgaatgtttgaatccatagttgcaaatgccatggctgcaaaagcaaagttgctattgcgggagctgaaaactgtgaaggcagatttagcttttgcaaaggaacgatgtgctcagcttgaagaagagaataaaatgttgcgtgagagttatgacaagggtgataatccagaagatgatgatctgatccgcctccagttggaaacactactagctgagaaagcacggcttgcgcatgagaactcagtatatgcacgagaaaacagattcctgcgggaaatagttgagtatcaccagctcactatgcaggatgtcatatatgtagacgaaggcatcgaagaggtcaccgaggtgtaccctacacaagtactacctcgcactgggtcgagcgtcagtcgtgcagccactgcagctacaccgaaatctgctccgacgtcaacataatcttgccctgtcgtacaagcttctacaaatacactttttcgcggtcatctctgagcaatagatcaaagcgcccacctccaaccttcacggaagagtaaggtggttgtttggttgtgacgggaccacatagtttatgctgctactgttcaatgtaaacaaggattcactgttgttatgcctgtttgttgtcgtgactgagctgtggcgaaatatgaatgaacagtagcttctgactttctatatatattgtctcttaaccgcatttatggtcagggactcatggttatattatatagtctcttaattgtctcttatacttggaaaaataatgtacatgctctaagaagtggtattggacgacaaatagtcatgggaatgcattgttgtcagctactaatgtgttaaaaagaatggaagtaaaatgatttcatgtttgac

SEQ ID NO: 73155 - DNA, 1213 bp, Zea Mays
atgcagcttcggcaattatgcaagatatcgggggtaaaggtctgctttgatactgaaaatgctcgtgattctttctacagagcagcagtgaactttgttttagatgattgcagcagcaaaagacatcggtgcagcaaaacttaatggtgaggatccaagggattttctcgccggccttgctagcaatattggattagacaagtttcgtgctgccactcttgtatgtgcatcagttgctactcgtacacggacatgcttcttgcaatgctgggctctagagattcaaggaaaacggccagaagcactggatgaactcgtgaagatttgtagaattcattacatatttcctccagaggacaattctgcagagatggaaatggtggctgctggactagaaaagaatttgcatgttgccgagagggttcaccttctatatctatacaggagcgtttgtactgctggtaacttaaaaacagctgcacaggctcttggtctgagtttgccaaatgagaatacagaaggatttgcaatgcccattcgtcaaccatagatgaaggctttgaagcccctgacgcagttttggtattcctactttcttaacatgcattatgcagtatgctaccaagacaagaatcaagcatactgcagattcccttctcaacagaatcttagggacagatctgcacgggccccccagacaaatgctgaatcaattgttccgttcatgtgcatttgatagaggggtgctctttaatatgtgcaatgtcatcaaaacctcgtatattcagatgatcgattctgctcaccaaacgcgcccaccgccatgcctaatatcgtggccgtattgggagtatcatggccgtattgggagttctcttctgcagctgtagttggttaggacatctacaacctgagtctttgaattgttattttaagagctacaaaaactgtgcgatgagaattggttttttaagagctaaaaaactgtatgatataatgagatgtcttcaatattaatcacataataaatatagttaatagacaatgtgtagtgtagagagactctttgcaaagagatctctcttatattttttatttaacccttatttctgaaaaggctgtattaaatgatattgtatatgtcattatttcgtggtcgtattgggagtctgctgttgctggttaccattgattacagaagcaaagagaaatt

SEQ ID NO: 73156 - DNA, 1218 bp, Zea Mays
atgcagcttcggcaattatgcaagatatcgggggtaaaggtctgctttgatactgaaaatgctcgtgattctttctacagagcagcagtgaactttgttttagatgattgcagcagagcagcaaaagacatcggtgcagcaaaacttaatggtgaggatccaagggattttctcgccggccttgctagcaatattggattagacaagtttcgtgctgccactcttgtatgtgcatcagttgctactcgtacacggacatgcttcttgcaatgctgggctctagagattcaaggaaaacggccagaagcactggatgaactcgtgaagatttgtagaattcattacatatttcctccagaggacaattctgcagagatggaaatggtggctgctggactagaaaagaatttgcatgttgccgagagggttcaccttctatatctatacaggagcgtttgtactgctggtaacttaaaaacagctgcacaggctcttggtctgagtttgccaaatgagaatacagaaggatttgcaatgcccattcgtcaaccatagatgaaggctttgaagcccctgacgcagttttggtattcctactttcttaacatgcattatgcagtatgctaccaagacaagaatcaagcatactgcagattcccttctcaacagaatcttagggacagatctgcacgggccccccagacaaatgctgaatcaattgttccgttcatgtgcatttgatagaggggtgctctttaatatgtgcaatgtcatcaaaacctcgtatattcagatgatcgattctgctcaccaaacgcgcccaccgccatgcctaatatcgtggccgtattgggagtatcatggccgtattgggagttctcttctgcagctgtagttggttaggacatctacaacctgagtctttgaattgttattttaagagctacaaaaactgtgcgatgagaattggttttttaagagctaaaaaactgtatgatataatgagatgtcttcaatattaatcacataataaatatagttaatagacaatgtgtagtgtagagagactctttgcaaagagatctctcttatattttttatttaacccttatttctgaaaaggctgtattaaatgatattgtatatgtcattatttcgtggtcgtattgggagtctgctgttgctggttaccattgattacagaagcaaagagaaatt

SEQ ID NO: 73157 - DNA, 1361 bp, Zea Mays
atgcagcttcggcaattatgcaagatatcgggggtaaaggtctgctttgatactgaaaatgctcgtgattctttctacagagcagcagtgaactttgttttagatgattgcagcagagcagcaaaagacatcggtgcagcaaaacttaatggtgaggatccaagggattttctcgccggccttgctagcaatattggattagacaagtttcgtgctgccactcttgtatgtgcatcagttgctactcgtacacggacatgcttcttgcaatgctgggctctagagattcaaggaaaacggccagaagcactggatgaactcgtgaagatttgtagaattcattacatatttcctccagaggacaattctgcagagatggaaatggtggctgctggactagaaaagaatttgcatgttgccgagagggttcaccttctatatctatacaggagcgtttgtactgctggtaacttaaaaacagctgcacaggctcttggtctgagtttgccaaatgagaatacagaaggatttgcaatgcccattcgtcaaccatagatgaaggctttgaagcccctgacgcagttttggtgtttctcccaatctcccctgctttcctcatcctgctgccgcttttgcttttaatcgctgtgacagcatagcacccgcctcgtctcgctgccggctgccgctggtgatcctgctccctgtggcattggccctagccagcaggcaggcagtcggccagggacggatggacggagacgacggatggaagccgcagccactagccagccacaccgcagaccgcgcacgcaagagaaagaagcggtgtttgcatggactgggattgccgacttgactgcggattgacggggacaggtgggagccagaaccgcccgaggaccctcttctcctcggccaagagacccacaccgcaactggaaccctcttctcctcatccgacgacagtggtggccactgctccggccaggcatagcataggcagcctggttacacaaaccaaaaaagaatggtagtgtgaagtggaatcaaaatgggaactgggtgcagactgcctcaaaggatcagattattaagatccatgaaagagcagcaatccttctgaggggacgtcgctggttagatagttattacagtatcaagatttttatatgttcctttacatattttaaggttcacaaattgatactggttttatatgtagcagttcattgttcactgtaaccatacatgtaaaccataagcaaatgtgatgtaggagattgttatataaagagacttttgcagccactttgatgttttgttttatgcttctttttgtgaaaaattattatggtgct

SEQ ID NO: 73158 - DNA, 546 bp, Zea Mays
gcagcttcggcaattatgcaagatatcgggggtaaaggtctgctttgatactgaaaatgctcgtgattctttctacagagcagcagtgaactttgttttagatgattgcagcagcaaaagacatcggtgcagcaaaacttaatggtgaggatccaagggattttctcgccggccttgctagcaatattggattagacaagtttcgtgctgccactcttgtatgtgcatcagttgctactcgtacacggacatgcttcttgcaatgctgggctctagagattcaaggaaaacggccagaagcactggatgaactcgtgaagatttgtagaattcattacatatttcctccagaggacaattctgcagagatggaaatggtggctgctggactagaaaagaatttgcatgttgccgagagggttcaccttctatatctatacaggagcgtttgtactgctggtaacttaaaaacagctgcacaggctcttggtctgaggcaattatgcgagggcattggtgtctggctggtagccttggaagttaagg

SEQ ID NO: 73159 - DNA, 1160 bp, Zea Mays
gcagcttcggcaattatgcaagatatcgggggtaaaggtctgctttgatactgaaaatgctcgtgattctttctacagagcagcagtgaactttgttttagatgattgcagcagcaaaagacatcggtgcagcaaaacttaatggtgaggatccaagggattttctcgccggccttgctagcaatattggattagacaagtttcgtgctgccactcttgctctagagattcaaggaaaacggccagaagcactggatgaactcgtgaagatttgtagaattcattacatatttcctccagaggacaattctgcagagatggaaatggtggctgctggactagaaaagaatttgcatgttgccgagagggttcaccttctatatctatacaggagcgtttgtactgctggtaacttaaaaacagctgcacaggctcttggtctgagtttgccaaatgagaatacagaaggatttgcaatgcccattcgtcaaccatagatgaaggctttgaagcccctgacgcagttttggtattcctactttcttaacatgcattatgcagtatgctaccaagacaagaatcaagcatactgcagattcccttctcaacagaatcttagggacagatctgcacgggccccccagacaaatgctgaatcaattgttccgttcatgtgcatttgatagaggggtgctctttaatatgtgcaatgtcatcaaaacctcgtatattcagatgatcgattctgctcaccaaacgcgcccaccgccatgcctaatatcgtggccgtattgggagtatcatggccgtattgggagttctcttctgcagctgtagttggttaggacatctacaacctgagtctttgaattgttattttaagagctacaaaaactgtgcgatgagaattggttttttaagagctaaaaaactgtatgatataatgagatgtcttcaatattaatcacataataaatatagttaatagacaatgtgtagtgtagagagactctttgcaaagagatctctcttatattttttatttaacccttatttctgaaaaggctgtattaaatgatattgtatatgtcattatttcgtggtcgtattgggagtctgctgttgctggttaccattgattacagaagcaaagagaaatt

SEQ ID NO: 73160 - DNA, 1206 bp, Zea Mays
tcggcaattatgcaagatatcgggggtaaaggtctgctttgatactgaaaatgctcgtgattctttctacagagcagcagtgaactttgttttagatgattgcagcagagcagcaaaagacatcggtgcagcaaaacttaatggtgaggatccaagggattttctcgccggccttgctagcaatattggattagacaagtttcgtgctgccactcttgtatgtgcatcagttgctactcgtacacggacatgcttcttgcaatgctgggctctagagattcaaggaaaacggccagaagcactggatgaactcgtgaagatttgtagaattcattacatatttcctccagaggacaattctagatggaaatggtggctgctggactagaaaagaatttgcatgttgccgagagggttcaccttctatatctatacaggagcgtttgtactgctggtaacttaaaaacagctgcacaggctcttggtctgagtttgccaaatgagaatacagaaggatttgcaatgcccattcgtcaaccatagatgaaggctttgaagcccctgacgcagttttggtattcctactttcttaacatgcattatgcagtatgctaccaagacaagaatcaagcatactgcagattcccttctcaacagaatcttagggacagatctgcacgggccccccagacaaatgctgaatcaattgttccgttcatgtgcatttgatagaggggtgctctttaatatgtgcaatgtcatcaaaacctcgtatattcagatgatcgattctgctcaccaaacgcgcccaccgccatgcctaatatcgtggccgtattgggagtatcatggccgtattgggagttctcttctgcagctgtagttggttaggacatctacaacctgagtctttgaattgttattttaagagctacaaaaactgtgcgatgagaattggttttttaagagctaaaaaactgtatgatataatgagatgtcttcaatattaatcacataataaatatagttaatagacaatgtgtagtgtagagagactctttgcaaagagatctctcttatattttttatttaacccttatttctgaaaaggctgtattaaatgatattgtatatgtcattatttcgtggtcgtattgggagtctgctgttgctggttaccattgattacagaagcaaagagaaatt

SEQ ID NO: 73161 - DNA, 543 bp, Zea Mays
ggcaattatgcaagatatcgggggtaaaggtctgctttgatactgaaaatgctcgtgattctttctacagagcagcagtgaactttgttttagatgattgcagcagagcagcaaaagacatcggtgcagcaaaacttaatggtgaggatccaagggattttctcgccggccttgctagcaatattggattagacaagtttcgtgctgccactcttgtatgtgcatcagttgctactcgtacacggacatgcttcttgcaatgctgggctctagagattcaaggaaaacggccagaagcactggatgaactcgtgaagatttgtagaattcattacatatttcctccagaggacaattctgcagagatggaaatggtggctgctggactagaaaagaatttgcatgttgccgagagggttcaccttctatatctatacaggagcgtttgtactgctggtaacttaaaaacagctgcacaggctcttggtctgaggcaattatgcgagggcattggtgtctggctggtagccttggaagttaagg

SEQ ID NO: 73162 - DNA, 1722 bp, Zea Mays
ggcaattatgcaagatatcgggggtaaaggtctgctttgatactgaaaatgctcgtgattctttctacagagcagcagtgaactttgttttagatgattgcagcagagcagcaaaagacatcggtgcagcaaaacttaatggtgaggatccaagggattttctcgccggccttgctagcaatattggattagacaagtttcgtgctgccactcttgtatgtgcatcagttgctactcgtacacggacatgcttcttgcaatgctgggctctagagattcaaggaaaacggccagaagcactggatgaactcgtgaagatttgtagaattcattacatatttcctccagaggacaattctgcagagatggaaatggtggctgctggactagaaaagaatttgcatgttgccgagagggttcaccttctatatctatacaggagcgtttgtactgctggtaacttaaaaacagctgcacaggctcttggtctgagtttgccaaatgagaatacagaaggatttgcaatgcccattcgtcaaccatagatgaaggctttgaagcccctgacgcagttttggtgaaggcggccgagcacgcggccgagatggaggcgacggtggtcgtcgcggctgccgtggaggccgaggaggaggaggctgctgctgctgcggcttcgacgccgcagcggtctgggaggaaacggccccgcgcgattgggagtgggcggtaccgctcggtgtccaggtgtttctcccaatctcccctgctttcctcatcctgctgccgcttttgcttttaatcgctgtgacagcatagcacccgcctcgtctcgctgccggctgccgctggtgatcctgctccctgtggcattggccctagccagcaggcaggcagtcggccagggacggatggacggagacgacggatggaagccgcagccactagccagccacaccgcagaccgcgcacgcaagagaaagaagcggtgtttgcatggactgggattgccgacttgactgcggattgacggggacaggtgggagccagaaccgcccgaggaccctcttctcctcggccaagagacccacaccgcaactggaaccctcttctcctcatccgacgacagtggtggccactgctccggccaggcatagcataggcagcctggttacacaaaccaaaaaagaatggtagtgtgaagtggaatcaaaatgggaactgggtgcagactgcctcaaaggatcagattattaaggtccgtggcttgtgctttttatttttctatcttcttcaaagaattttcggattacagtgtgcactctataaccagaattctatactatctatggagatggcctaatccatcctataaccaggatcgataagtttgttttttgatgccagtaaattattgattttggtccatttgctaattcattttgcaactgtatgacattagatccatgaaagagcagcaatccttctgaggggacgtcgctggttagatagttattacagtatcaagatttttatatgttcctttacatattttaaggttcacaaattgatactggttttatatgtagcagttcattgttcactgtaaccatacatgtaaaccataagcaaatgtgatgtaggagattgttatataaagagacttttgcagccactttgatgttttgttttatgcttctttttgtgaaaaattattatggtgct

SEQ ID NO: 73163 - DNA, 960 bp, Zea Mays
ccggacccgattttttcttcaatcaagctctgagcgtctcctctcttgcccgctgtccacttccctctcatcctctcgacctcgcttcctccctcccaccgtgccctgccttttcctcacgacctcgccgctgattgcggtcccccatggaaccgtgaaggcggccgagcacgcggccgagatggaggcgacggtggtcgtcgcggctgccgtggaggccgaggaggaggaggctgctgctgctgcggcttcgacgccgcagcggtctgggaggaaacggccccgcgcgattgggagtgggcggtaccgctcggtgtccagccagcaggcaggcagtcggccagggacggatggacggagacgacggatggaagccgcagccactagccagccacaccgcagaccgcgcacgcaagagaaagaagcggtgtttgcatggactgggattgccgacttgactgcggattgacggggacaggtgggagccagaaccgcccgaggaccctcttctcctcggccaagagacccacaccgcaactggaaccctcttctcctcatccgacgacagtggtggccactgctccggccaggcatagcataggcagcctggttacacaaaccaaaaaagaatggtagtgtgaagtggaatcaaaatgggaactgggtgcagactgcctcaaaggatcagattattaagatccatgaaagagcagcaatccttctgaggggacgtcgctggttagatagttattacagtatcaagatttttatatgttcctttacatattttaaggttcacaaattgatactggttttatatgtagcagttcattgttcactgtaaccatacatgtaaaccataagcaaatgtgatgtaggagattgttatataaagagacttttgcagccactttgatgttttgttttatgcttctttttgtgaaaaattattatggtgct

SEQ ID NO: 73164 - DNA, 947 bp, Zea Mays
attttttcttcaatcaagctctgagcgtctcctctcttgcccgctgtccacttccctctcatcctctcgacctcgcttcctccctcccaccgtgccctgccttttcctcacgacctcgccgctgattgcggtcccccatggaaccgtgaaggcggccgagcacgcggccgagatggaggcgacggtggtcgtcgcggctgccgtggaggccgaggaggaggaggctgctgctgctgcggcttcgacgccgcagcggtctgggaggaaacggccccgcgcgattgggagtgggcggtaccgctcggtgtccagcaggcaggcagtcggccagggacggatggacggagacgacggatggaagccgcagccactagccagccacaccgcagaccgcgcacgcaagagaaagaagcggtgtttgcatggactgggattgccgacttgactgcggattgacggggacaggtgggagccagaaccgcccgaggaccctcttctcctcggccaagagacccacaccgcaactggaaccctcttctcctcatccgacgacagtggtggccactgctccggccaggcatagcataggcagcctggttacacaaaccaaaaaagaatggtagtgtgaagtggaatcaaaatgggaactgggtgcagactgcctcaaaggatcagattattaagatccatgaaagagcagcaatccttctgaggggacgtcgctggttagatagttattacagtatcaagatttttatatgttcctttacatattttaaggttcacaaattgatactggttttatatgtagcagttcattgttcactgtaaccatacatgtaaaccataagcaaatgtgatgtaggagattgttatataaagagacttttgcagccactttgatgttttgttttatgcttctttttgtgaaaaattattatggtgct

SEQ ID NO: 73165 - DNA, 1369 bp, Zea Mays
attttttcttcaatcaagctctgagcgtctcctctcttgcccgctgtccacttccctctcatcctctcgacctcgcttcctccctcccaccgtgccctgccttttcctcacgacctcgccgctgattgcggtcccccatggaaccgtcgtcctctcaatccgtccgccgctccatcgtcttcctgtatttgtgctgctgatatgtgtaacttgtgtttctccaggtgaaggcggccgagcacgcggccgagatggaggcgacggtggtcgtcgcggctgccgtggaggccgaggaggaggaggctgctgctgctgcggcttcgacgccgcagcggtctgggaggaaacggccccgcgcgattgggagtgggcggtaccgctcggtgtccaggtgtttctcccaatctcccctgctttcctcatcctgctgccgcttttgcttttaatcgctgtgacagcatagcacccgcctcgtctcgctgccggctgccgctggtgatcctgctccctgtggcattggccctagccagcaggcaggcagtcggccagggacggatggacggagacgacggatggaagccgcagccactagccagccacaccgcagaccgcgcacgcaagagaaagaagcggtgtttgcatggactgggattgccgacttgactgcggattgacggggacaggtgggagccagaaccgcccgaggaccctcttctcctcggccaagagacccacaccgcaactggaaccctcttctcctcatccgacgacagtggtggccactgctccggccaggcatagcataggcagcctggttacacaaaccaaaaaagaatggtagtgtgaagtggaatcaaaatgggaactgggtgcagactgcctcaaaggatcagattattaaggtccgtggcttgtgctttttatttttctatcttcttcaaagaattttcggattacagtgtgcactctataaccagaattctatactatctatggagatggcctaatccatcctataaccaggatcgataagtttgttttttgatgccagtaaattattgattttggtccatttgctaattcattttgcaactgtatgacattagatccatgaaagagcagcaatccttctgaggggacgtcgctggttagatagttattacagtatcaagatttttatatgttcctttacatattttaaggttcacaaattgatactggttttatatgtagcagttcattgttcactgtaaccatacatgtaaaccataagcaaatgtgatgtaggagattgttatataaagagacttttgcagccactttgatgttttgttttatgcttctttttgtgaaaaattattatggtgct

SEQ ID NO: 73166 - DNA, 1072 bp, Zea Mays
cttccctctcatcctctcgacctcgcttcctccctcccaccgtgccctgccttttcctcacgacctcgccgctgattgcggtcccccatggaaccgtcgtcctctcaatccgtccgccgctccatcgtcttcctgtatttgtgctgctgatatgtgtaacttgtgtttctccaggtgaaggcggccgagcacgcggccgagatggaggcgacggtggtcgtcgcggctgccgtggaggccgaggaggaggaggctgctgctgctgcggcttcgacgccgcagcggtctgggaggaaacggccccgcgcgattgggagtgggcggtaccgctcggtgtccaggtgtttctcccaatctcccctgctttcctcatcctgctgccgcttttgcttttaatcgctgtgacagcatagcacccgcctcgtctcgctgccggctgccgctggtgatcctgctccctgtggcattggccctagccagcaggcaggcagtcggccagggacggatggacggagacgacggatggaagccgcagccactagccagccacaccgcagaccgcgcacgcaagagaaagaagcggtgtttgcatggactgggattgccgacttgactgcggattgacggggacaggtgggagccagaaccgcccgaggaccctcttctcctcggccaagagacccacaccgcaactggaaccctcttctcctcatccgacgacagtggtggccactgctccggccaggcatagcataggcagcctggttacacaaaccaaaaaagaatggtagtgtgaagtggaatcaaaatgggaactgggtgcagactgcctcaaaggatcagattattaagagtatattagaggggagatgacttattttagcatggaagcatctacaactggctcttaaatacaaagtgatgtatatgatccactgaaagatccaaaaagaagcccaaatctgatgatccaggctggatgtatgcctattatgtagagcctagcaagcgagagttgatccaatgcactgtttgtctgaggcggatttatagaggaatcttgagggtggag

SEQ ID NO: 73167 - DNA, 731 bp, Zea Mays
ataagttttcaagacaaattgttagtcttcatgtttcatcatctgattgtgagcggatttggatcaagtttgaatttatgcataccaagaaaaggaacgtgctatagcacaaaagattgaatgatttggtgtatgtttcatacaatagaaagatggccactaggttccaaaaaatgtgtgaagaagggaaggacttcgatactttggttcttgaagattttgattgggacaatgagtgggttgatccatttgctaattcgtctgttattggggataaccctcttttcacaagggagcatgtttatcatgccgagagctcatggtactcaaagtgccaattctttgaggatgatgaagacgggcttgatgtgggtgaagagaatgaagacgatgaaaattttgtgcttgatgactttgacatggatgatgaagaagcaacaaacaacaatggtggatgtggtgatgagcaagaaaaggatggtgttggtttagatgatttggatgatggctattgagtgcttgagtaacacttgtgtgcttgtggttgtggacattgcattccactttagttgcttttgtgctatgtttgtgattgtggactactagacgtcccattccactttgtttgcagttgtcgacatgctattagttgaacttgtgttattgtggtaatgtggttgtggacatgtcattttgcacaatattattatgttaacctatgttggttgttt

SEQ ID NO: 73168 - DNA, 359 bp, Zea Mays
ctccatctgattgcttatgatgatcggtgatttaaaatcttggagataaggctagatgaggttttttagttcaatttcgcctaatgatgtttttagttcaattttaaatttactaacagaatgataaaaatgttgtactaaccaattgtttggcatgattttgttttgacgggataaagcagtttaaagtatgtttagcatacatcatctttggaagtttggttttggatacttgttaattctcctttacataagttcttagaccaagtcattctctcttttgttaagttcagtaatatacattgcaggctatgatgcagcccctaaatcagttcctccatttcagatgaaagaaatac

SEQ ID NO: 73169 - DNA, 817 bp, Zea Mays
cttcatgtcactaatcgacaagggcgtctcgaatggaaggagcccatccaacccaacgaagaagcaaaatccccaatctctgcgccgccgccgttctgtgtcgttcttcgcccgccgtcgttccgtgtcgttcttagcccgccgccgtttgtagtcgcggcttcatcgtcgcgtaccgatccccaccgcccccactgccaccagaggtgtcgacatgtctcagaacaacccctcccagcttctcccctcagagctgatcgaccggtgcatcgggtccaagatctgggtgatcatgaagggggacaaggagctcgttggcaccctctgcggctttgatgtctacgtcaatatggtgctggaggacgtcaccgagtatgaatacactgctgaagggcgccgtattacaaaacttgaccagatcctcctgaacggcaacaacatagccattttggttcctggtggttcaccacctgatgtgtaatgaacttttgcttcccagagtatcattcgtggtgaaggcaatggattatgaagaaacctgataaatggaagcgcatcggttgtatttggcgtttgattgacagcgttacttttatttaaaaattccatttttttctattttacctgccgtccaaaaccagtctagagcaatctagtgatctgagaagtatttgttggttaatattcaatgtttggcctaatcatgaaattaggctttagtctgttttcgtcgtcatctaacaaagtgaactttctatgtcctgtacgtctcctagtcgtcctttgtagactttctatgtccgaaggtgatttcatc

SEQ ID NO: 73170 - DNA, 833 bp, Zea Mays
cgacagaagagtctcactttacgtcgagctgtgctcgtgattcgagctgatcgaccggtgcatcgggtccaagatctgggtgatcatgaagggggacaaggagctcgttggcaccctctgcggctttgatgtctacgtcaatatggtgctggaggacgtcaccgagtatgaatacactgctgaagggcgccgtattacaaaacttgaccagatcctcctgaacggcaacaacatagccattttggttcctggtggttcaccacctgatgtgtaatgaacttttgcttcccagagtatcattcgtggtgaaggcagccccgtgaactttgcaccttatattttttaatcattggatgtttcctcatctcggatgtgtttctcctgttcatgattataccgaagtttattgttaactctgtcagcatggaatctctcctctgtattgaacttactgacctgaagtagtgtgcctgcatagctgtggttatatgattcgctttgctcatcatcattgtactgtaatgtgaattgcaggcaatggattatgaagaaacctgataaatggaagcgcatcggttgtatttggcgtttgattgacagcgttacttttatttaaaaattccatttttttctattttacctgccgtccaaaaccagtctagagcaatctagtgatctgagaagtatttgttggttaatattcaatgtttggcctaatcatgaaattaggctttagtctgttttcgtcgtcatctaacaaagtgaactttctatgtcctgtacgtctcctagtcgtcctttgtagactttctatgtccgaaggtgatttcatc

SEQ ID NO: 73171 - DNA, 2022 bp, Zea Mays
atcaaacaacactccaatcaacgcaaggacgcatcgtatcgggtagttttaccgaaccatctctctcttcgcctagcgtgtatgtagccaagctacgctagcgtctgaagcggtggaaggaaagacgaacgaagctacagctgccgaggtccccgttcccgcccaccgaggcgtcgcgcatgcggccacccgcacccaggcactggcccgggggagcgaggcgtggaggcggagcaatggcgggcggtctggaccgatccgtgcaactgtaggcgcggcgcggggggtgttggctggtgcgtgatgggatctgggagcagcaaggcaaccacctcctccacgtcgcccacggcggcggaggcgggcggcgagggtaagaggccaaatggtagcgagaaggcgaggagggggaggagcctgctgccgctgccgagttcctcctgcttccgtggctccacgacgccttgcgattgcgacgtttccgcagtggcggtggacgtcgagtgtaacaagggaggggagactgcaagcctaccttcactcactcacactacaaaatctgatgaagatgttcttgcaacgcctaagtctcatcccggtgaagagataacactaccttcatcagatagggaaagagatcaagatgatggcgtgctacagaatgctgctgccactaacactttaacagcagccagtcaattgacagatccttctgggaggtcaaggccacgttttggtgtcaactttgggttgagtagagctgtcagcttgggatcatcagtagcctgctctattctgtcatctggcctcccgacttctgctaacccaggtgaaggtcggggtgatgtggatgactcttctgatacagtcatctcccagcagggtagtgcaccaactgctgggattgattcgactctagacatgcttagagatagtgtcacggcacaagctagagcagctcgtcaggctagaagaaatctgcaagaatctgaagatgctatcttgaggaactcctacagaaggatgggatctcaggaaccttttgaaggcagtgttcggtttagccgaacattaagtgttgggcggcttcgggacagagtcctcaaacggcctccattctcagatgggttattcacccctgcccttctttacgatagggcggtatggttgtctggaaatgctagtgctaggcaagattcagcagtaatgcaaaggactaattcagacaggagttcagaatcgcgctctgatccttcaaccaatggtctgtacaacttgagctctgagaggcaggccagtaatagtgacctactggagcgtagatcagtttttcttgagaggaggcggaggatacggtctcaggtcagagctctgcaaaggttgggcagcaggtttgaaaatttatctggtcatgagaggtcctgcatactatctggtcagcatagaacaggaacttgcaactgcagaacaggtagtcgacaaggcaatcctgatgaagaaactagcacaagggctagcatatcaagaattgttatgttagcagaagcactatttgaggttctggatgaaattcaccaccaatctgctgcgttatcgtcatcaagaccagcgttttcttcaattggatctgttcctgctccaagggagattgttgagcgtcttcctgcaaaagtgtataggagaccattgaaataccacagtgaggaagctgcacaatgctatatttgccttgttgaatatgaagagggagattgtcttcgtatacttccatgccatcatgaatttcatctaacatgtgtagataaatggttaaaggagattcacagggtttgtccactttgtcgtggcgatgtctgcagatctgatgcactgattggaaaggatgctcctgtattgtatggaaaattcgcattgaaactggtcacacgctattgtgaatttaagactcttgtatggtggggcgagtttgttgatattggattgttgccttccgtttccttataccgatgtgacgtttgatca

SEQ ID NO: 73172 - DNA, 1938 bp, Zea Mays
cgtgtatgtagccaagctacgctagcgtctgaagcggtggaaggaaagacgaacgaagctacagctgccgaggtccccgttcccgcccaccgaggcgtcgcgcatgcggccacccgcacccaggcactggcccgggggagcgaggcgtggaggcggagcaatggcgggcggtctggaccgatccgtgcaactgtaggcgcggcgcggggggtgttggctggtgcgtgatgggatctgggagcagcaaggcaaccacctcctccacgtcgcccacggcggcggaggcgggcggcgagggtaagaggccaaatggtagcgagaaggcgaggagggggaggagcctgctgccgctgccgagttcctcctgcttccgtggctccacgacgccttgcgattgcgacgtttccgcagtggcggtggacgtcgagggaggggagactgcaagcctaccttcactcactcacactacaaaatctgatgaagatgttcttgcaacgcctaagtctcatcccggtgaagagataacactaccttcatcagatagggaaagagatcaagatgatggcgtgctacagaatgctgctgccactaacactttaacagcagccagtcaattgacagatccttctgggaggtcaaggccacgttttggtgtcaactttgggttgagtagagctgtcagcttgggatcatcagtagcctgctctattctgtcatctggcctcccgacttctgctaacccaggtgaaggtcggggtgatgtggatgactcttctgatacagtcatctcccagcagggtagtgcaccaactgctgggattgattcgactctagacatgcttagagatagtgtcacggcacaagctagagcagctcgtcaggctagaagaaatctgcaagaatctgaagatgctatcttgaggaactcctacagaaggatgggatctcaggaaccttttgaaggcagtgttcggtttagccgaacattaagtgttgggcggcttcgggacagagtcctcaaacggcctccattctcagatgggttattcacccctgcccttctttacgatagggcggtatggttgtctggaaatgctagtgctaggcaagattcagcagtaatgcaaaggactaattcagacaggagttcagaatcgcgctctgatccttcaaccaatggtctgtacaacttgagctctgagaggcaggccagtaatagtgacctactggagcgtagatcagtttttcttgagaggaggcggaggatacggtctcaggtcagagctctgcaaaggttgggcagcaggtttgaaaatttatctggtcatgagaggtcctgcatactatctggtcagcatagaacaggaacttgcaactgcagaacaggtagtcgacaaggcaatcctgatgaagaaactagcacaagggctagcatatcaagaattgttatgttagcagaagcactatttgaggttctggatgaaattcaccaccaatctgctgcgttatcgtcatcaagaccagcgttttcttcaattggatctgttcctgctccaagggagattgttgagcgtcttcctgcaaaagtgtataggagaccattgaaataccacagtgaggaagctgcacaatgctatatttgccttgttgaatatgaagagggagattgtcttcgtatacttccatgccatcatgaatttcatctaacatgtgtagataaatggttaaaggagattcacagggtttgtccactttgtcgtggcgatgtctgcagatctgatgcactgattggaaagggatgctcctgtattgtatggaaaattcgcattgaaactggtcacacgctattgtgaatttaagactcttgtatggtggggcgagtttgttgatattggattgttgccttccgtttccttataccgatgtgacgtttgatca

SEQ ID NO: 73173 - DNA, 1989 bp, Zea Mays
ggaaagacgaacgaagctacagctgccgaggtccccgttcccgcccaccgaggcgtcgcgcatgcggccacccgcacccaggcactggcccgggggagcgaggcgtggaggcggagcaatggcgggcggtctggaccgatccgtgcaactgtaggcgcggcgcggggggtgttggctggtgcgtgatgggatctgggagcagcaaggcaaccacctcctccacgtcgcccacggcggcggaggcgggcggcgagggtaagaggccaaatggtagcgagaaggcgaggagggggaggagcctgctgccgctgccgagttcctcctgcttccgtggctccacgacgccttgcgattgcgacgtttccgcagtggcggtggacgtcgagtgtaacaagggaggggagactgcaagcctaccttcactcactcacactacaaaatctgatgaagatgttcttgcaacgcctaagtctcatcccggtgaagagataacactaccttcatcagatagggaaagagatcaagatgatggcgtgctacagaatgctgctgccactaacactttaacagcagccagtcaattgacagatccttctgggaggtcaaggccacgttttggtgtcaactttgggttgagtagagctgtcagcttgggatcatcagtagcctgctctattctgtcatctggcctcccgacttctgctaacccaggtgaaggtcggggtgatgtggatgactcttctgatacagtcatctcccagcagggtagtgcaccaactgctgggattgattcgactctagacatgcttagagatagtgtcacggcacaagctagagcagctcgtcaggctagaagaaatctgcaagaatctgaagatgctatcttgaggaactcctacagaaggatgggatctcaggaaccttttgaaggcagtgttcggtttagccgaacattaagtgttgggcggcttcgggacagagtcctcaaacggcctccattctcagatgggttattcacccctgcccttctttacgatagggcggtatggttgtctggaaatgctagtgctaggcaagattcagcagtaatgcaaaggactaattcagacaggagttcagaatcgcgctctgatccttcaaccaatggtctgtacaacttgagctctgagaggcaggccagtaatagtgacctactggagcgtagatcagtttttcttgagaggaggcggaggatacggtctcaggtcagagctctgcaaaggttgggcagcaggtttgaaaatttatctggtcatgagaggtcctgcatactatctggtcagcatagaacaggaacttgcaactgcagaacaggtagtcgacaaggcaatcctgatgaagaaactagcacaagggctagcatatcaagaattgttatgttagcagaagcactatttgaggttctggatgaaattcaccaccaatctgctgcgttatcgtcatcaagaccagcgttttcttcaattggatctgttcctgctccaagggagattgttgagcgtcttcctgcaaaagtgtataggagaccattgaaataccacaatgctatatttgccttgttgaatatgaagagggagattgtcttcgtatacttccatgccatcatgaatttcatctaacatgtgtagataaatggttaaaggagattcacagggtttgtccactttgtcgtggcgatgtctgcagatctgatgcactgattggaaaggtcagctgattctgtctcttgagaatgcagcttcctacagagaaaagtggagctctttccatggttctaattccgatacaacctacaaaactattgcacaggatgctcctgtattgtatggaaaattcgcattgaaactggtcacacgctattgtgaatttaagactcttgtatggtggggcgagtttgttgatattggattgttgccttccgtttccttataccgatgtgacgtttgatca

SEQ ID NO: 73174 - DNA, 1307 bp, Zea Mays
ctaagtcagttgttgattgataatgcactaactacatgtgtccactagatttgtacgtcaactgtaatttttgcagcaggaccactggaccagactactttttgatatggaaaactgtctattcctagttagggttctagtgacattgatcaacttgggaagattttcgcagcacttgggaccccaaaatcttctcaatggcctgacatggtttatcttcctgattatgttgaataccaatatgttgctgcacctccactacgtacgttgtttccaatggccagcgatgatgctttggatcttctgtcaaaaatgcttacctatgatccaaaagcaagaatcagtgctcagcaggctctagaacacaggtacttttcatcgttacctgcaccaacaagaccatcgcagcttccaaggccacgtcggaaaggagatcaagggaataacaagattcctgatctcaacctgcaggatggccctatggtgctctccccgccaagaaagttacgtagggtgacagcgcatgaagggatggaaggtatgcacaggacagataaagtggacgaacatccttctgggatgaggcacaccgatgacatgcccagtcagagttctagaattccaatgtcagttgatgttggggctgtgtttggcacacgacctgcacctaggccaacattgaacagtgcggacaagtctcgtttaaaacggaaacttgatatggatccagagtttggatacgcggagtagaaggaacacatgtttacatgcaccattcttttcttattggggatgttgatttttaaaataagattctgacacaatcaactgagatgttaccgtcatcgcctcacgaagaggaaaactgaagagagattattctaatttatcccgagtcacatagggtattacagctaaccaattccgtaaggcaggctcttgaaaacagtagactcaatgggatattcatgagtggagagtgttatggggaattggaggatggaaaagcttgctccatgcgtgtttgtacgtgttttgccaagattgtgctgaagcatctgatctatctactgattctctattttccgtactgtcaattcccgttcttgtatggacagagctttgagcatgttttcagtcagacaccttaggcagtgattcttattgtacaacttatatcatctgacatttcttttgagatgattaaacaatgcatggcgaaaaaggggggaaaagtggtcttgatttcgtctccgttcacaatgtgcccttccttttccttctgagggcccgttgctttggaaccg

SEQ ID NO: 73175 - DNA, 866 bp, Zea Mays
atcaggctcaaccacatcaccatccacgccaacccgctcgtcctctgaactcgctcatgtcccgcctgcctacctggctcggctcatccactaggatctgagtgcaaaatcaaccttgtgaattcggatgaggtgcaccggtgttcagcactttgcgctactcttgattgtcctctcctacagttctggttctagataccacttgcataggttgtatcctaaagactatagttctgcattgatataaaaagcttgattacttgcttcggatgattcacacgatcacaaccaagacgacaccttacctagagattgtgatcaaagtgcagcataaacagagcactgctgtcctgtcgacatatacatagcactgctagtagctaagggttctcgtgatcagggtttctgatgatttggtgatacatatagtctgatggaaacgaaacaatgggcatgaaaatgaggacatgatgttgtaagcctcgaaccgactagcatggatatctggtttcaagtacaaactatcactgaccacttatgagcgacgagaactttccgatgaactccagttttttaatagaaagtatatgtcgtggtttcggaaaccggggagacaatagatttgagtttggtggggaatacaggcacggactcacaccgaatggtgaatcacgagcatccaggctaaggagctgagacatagggagttatactggttcacgctagggccctagtccaatatagtgttgatcgatgtattgcttaggagcgtgttacaacaagtgtgcttgtgtggagaaagaatgttgtccagcacttttatagctaaagggtggactttacagttgggacatatattctactcg

SEQ ID NO: 73176 - DNA, 2663 bp, Zea Mays
cagaaaacacccgagttccttccattcccacccaaaaatctagccaaaaaagcccaaccaaaatgctgcctgcccgccccctcctcgtggccgccgccgtcttcctcctcctcctccccgttcacgtcgccatcgtcgccgcacaggggtttcgcggcttctcttacctcctaaactgtggcgcggcgtcccccaccaccgacagccgcggcctccgctgggatcccgatggcgactatgtctctgccggtacccccggcgtggtctcgctctcgggcctcatcaaccccacgcttgccacccttcgcaccttcccgctccgctacggggccaagttctgctacgagctccccgtggatcggaaccgccgctacctcatccgccccacattcttctacggcgcgctcttcgcctcctcctctgcaccgccgccgcccgtcttcgacctgatcgtggacggtaccttctggaccgccgtcaacaccaccgatgacgcgctggccggcgccgcgtcgtcctacgagggcgtgttccctgcgagtggcaggaacatgagcttctgtctcggggtgaacccggactataccgacgccaggccattcatttccgcgctgcaggtgatccagctcgacgattccgtgtacaacgcaactgatttcccgaccagcgcgatgggcctcattgctcgcaccaagtttggctccactggcggcatcgagaggtaccctaatgacagttttgatcgctattggcagccatttccagacgacaagcatgctgtcagtagcacccaaaatgttacatcagccgacttctggaatcttccccctcctgatgtgtttaacacagctttcatagcagaacaagatgcaccgcttgtgttacaatggcctccagtgcctctccaaaatgatagctattatgtcgccctctactttgctgatacattgcctgataattcaaggacctttgacgtgtatataaatgattacctctttttcaaagatctaaatgtcacatcagctggtctttctgtctttgcaacacaatggattctctcaggcttgaccacaattatattgaaatctgcttctccttctgctcttcctccacttattaatgctggcgaggtttttgggctttttcctgttggaagattgacatatgcacgggatgtacttgccctggagagtataaagaaaagccttcaaaatatacctgaagattggaatggagatccatgcatgccttcaggatattcttggaccggagttacatgtgatgaaggatcaaaaatacgtgtcatctcattgaacttttcaagtatgagtctctctggatttctttcaccagatattgccaaactgactgctttgactgatatatctttggcacacaacatgctcagtgggcctattccgaatcttagcaacctaagaaatctccaacgactgcacttgcaagaaaatcagctatctggatcggtacctgagacattgggtacaatcaatacattgcgtgaaatgtgagttaatttcatcactttgtgcttatagcttgttattctccttttcaatttgacatgatttttttcatgttgaaacaaattatcagaaccagcatagagtgttcatgatcttcaatttagtcgtgttttcatgctttgaattgctgcacatctattctgacaagtacatatgtcaatatgtgccgcatgcttgaagaacacaagaagttgacagtagatgtaaacttgtgacattagttaatgttatatgatgtattttggtccttactttgtatcagtatgcatttcaagtttattattatgcatatagcggaatgatataacatatctctgcaagtccaatagcatatatgatcttactaatgtgctccctaattcacaatatctgtccaatttattaggatttacttcttacagtatctctctgttgggagtatgccaatggtttgagcaagccattgaaaaggagactagcatgttataacattttttctgttagttacttcaattctcttatcaccactacaattttgaatgtgatctatgtgctagcattatagcacacaaaattcttggtgcagaccgaatgtctgtccagtacagctgcagaacatctgcaatgaaatacactatcctgttaaaagtgtaagacataaacttgtcggatactaccttaaccccgcttgaaagtagccaaatttgttcgtaactctatccatgagtaatgcaatatgagttcccaacacaaaaaatgaaagtgtcccaagtaccaagtcaatcatggagtttgtgaaaaaggctgcctggcccaggaagcgatctcaggcatccaaatttggttgccttcggtcagatcttgttgcctctcagggctgtaaagaaacaggattgctgccatgttcaatttttacaatacaataatttaactggaacagttccggagaacttactgaacaatacaggattgacatacacatttctgccagggaatagcttctctccaaaaccaccgcattgagaaccaggcagtttgtacgacaaactactctgtgtaacatgattcagatttcagagttcacaggatgcgaagtggattagactaaggctccgaggatgtaacagctcaaaagaagat

SEQ ID NO: 73177 - DNA, 2637 bp, Zea Mays
cccaaaaatctagccaaaaaagcccaaccaaaatgctgcctgcccgccccctcctcgtggccgccgccgtcttcctcctcctcctccccgttcacgtcgccatcgtcgccgcacaggggtttcgcggcttctcttacctcctaaactgtggcgcggcgtcccccaccaccgacagccgcggcctccgctgggatcccgatggcgactatgtctctgccggtacccccggcgtggtctcgctctcgggcctcatcaaccccacgcttgccacccttcgcaccttcccgctccgctacggggccaagttctgctacgagctccccgtggatcggaaccgccgctacctcatccgccccacattcttctacggcgcgctcttcgcctcctcctctgcaccgccgccgcccgtcttcgacctgatcgtggacggtaccttctggaccgccgtcaacaccaccgatgacgcgctggccggcgccgcgtcgtcctacgagggcgtgttccctgcgagtggcaggaacatgagcttctgtctcggggtgaacccggactataccgacgccaggccattcatttccgcgctgcaggtgatccagctcgacgattccgtgtacaacgcaactgatttcccgaccagcgcgatgggcctcattgctcgcaccaagtttggctccactggcggcatcgagaggtaccctaatgacagttttgatcgctattggcagccatttccagacgacaagcatgctgtcagtagcacccaaaatgttacatcagccgacttctggaatcttccccctcctgatgtgtttaacacagctttcatagcagaacaagatgcaccgcttgtgttacaatggcctccagtgcctctccaaaatgatagctattatgtcgccctctactttgctgatacattgcctgataattcaaggacctttgacgtgtatataaatgattacctctttttcaaagatctaaatgtcacatcagctggtctttctgtctttgcaacacaatggattctctcaggcttgaccacaattatattgaaatctgcttctccttctgctcttcctccacttattaatgctggcgaggtttttgggctttttcctgttggaagattgacatatgcacgggatgtacttgccctggagagtataaagaaaagccttcaaaatatacctgaagattggaatggagatccatgcatgccttcaggatattcttggaccggagttacatgtgatgaaggatcaaaaatacgtgtcatctcattgcacttgcaagaaaatcagctatctggatcggtacctgagacattgggtacaatcaatacattgcgtgaaatgtgagttaatttcatcactttgtgcttatagcttgttattctccttttcaatttgacatgatttttttcatgttgaaacaaattatcagaaccagcatagagtgttcatgatcttcaatttagtcgtgttttcatgctttgaattgctgcacatctattctgacaagtacatatgtcaatatgtgccgcatgcttgaagaacacaagaagttgacagtagatgtaaacttgtgacattagttaatgttatatgatgtattttggtccttactttgtatcagtatgcatttcaagtttattattatgcatatagcggaatgatataacatatctctgcaagtccaatagcatatatgatcttactaatgtgctccctaattcacaatatctgtccaatttattaggatttacttcttacagtatctctctgttgggagtatgccaatggtttgagcaagccattgaaaaggagactagcatgttataacattttttctgttagttacttcaattctcttatcaccactacaattttgaatgtgatctatgtgctagcattatagcacacaaaattcttggtgcagaccgaatgtctgtccagtacagctgcagaacatctgcaatgaaatacactatcctgttaaaagtgtaagacataaacttgtcggatactaccttaaccccgcttgaaagtagccaaatttgttcgtaactctatccatgagtaatgcaatatgagttcccaacacaaaaaatgaaagtgtcccaagtaccaagtcaatcatggagtttgtgaaaaaggctgcctggcccaggaagcgatctcaggcatccaaatttggttgccttcggtcagatcttgttgcctctcagggctgtaaagaaacaggattgctgccatgttcaatttttacaatacaataatttaactggaacagttccggagaacttactgaacaatacaggattgacatacacatttctgccagggaatagcttctctccaaaaccaccgcattgagaaccaggcagtttgtacgacaaactactctgtgtaacatgattcagatttcagaggtagcaggaatgttgttgattcttctagggtagctgtacatttttttaaccattctgtgcataaaggggagatagcagtacagttattcaaaccaatcaaggaggttggcaacatggtggcaagatacatatattggttttggttagcaatgtttggttccagagactaaagttcagtcagttcaaatcgaatgtttgaatatcca

SEQ ID NO: 73178 - DNA, 1168 bp, Zea Mays
ccagtctccacctcacccctctccactcgacggctcgatccttgctgcccgacctttttttttgatctgctatgctgtagactaatcgcgattaaggaaataaggggggaaaaggaggaaggtccaagcggcggcagcagcaaaaacccgctccgaaaggcagaaaaccacaataaacaaggcacgcaacgaatccgatcccgatttaattcgcccaaatccgtcgattaatccccacgccggccgcgtcatgctccggccattcctctcccctcccctcaccgctctgccgccgccccctgcctccaccgcagcagccgcgggcgccgcggcgatgcgacccgcatcctcctcctcctcccgctcctcggccggcggaggcggggcccaccaccaccaacacaaccacggcggccacagcatctccgtctctccgccgacgtgcaggcacgccccatcgtcggccacgctcgatctcctcatcctgcttctcgtgctcttctcgcttgccttcctgctcgcctcctcgctctcgcacgtcgcgcgctcgctctccccgctgctcgccacgccgcccgccgccgcggcgctcgcctacgccaccgccgcactgccttacctggccgcggcggccgtgctcgtcgccaccgcgttcctctcctgtcgccggctcccgcggcgccggtgccgcaacccgcgctgccgcggcctgcgaaaggcgctggagttcgacgtccagctgcagaccgagggggcccttcgcgccggcgccggaagcaccgccggcggcgccgaagcatccatgtggcgcgagatcgaggcgctgccgtggaagggcggccagggcggaaacaacccagactacgagtgccttcgcgccgaactccgccggatggcgccgcctaacggccgagccgtgctgctcttccgcaaccggtgtggctgccctgttgctaaactcgaaggatggggcgcccccaagagcaaacggcgcaacaagaagggcacgcaaggttcgttccatgaccgagggctgaggtgaacgcaagtccggtgtcgccagttgcaaacttgcaacactgttgctttagactgccatgttgaataatacttctagcaaaagatacgccaatcacagtttacatgtgggttgcgccatgattgtatt

SEQ ID NO: 73179 - DNA, 3661 bp, Zea Mays
cctcggtccaacaagcatctaggcgtctttggtagtggtctgtcaacaacttacaagttacagatgatgcaatatgtaaagataggcttcagcatatgagacaacatagagattagaatttctacatgtgtaaagtcagcaaggactttgtaattgatgcagcttttacagaacacgcttctcgcttttttaaccacagttgtcaacctaactgtcggctggagaaatggaatcagagggtctgctttgggccctcaatttgttgctaaaccacttgcacctgataaccctccactgaaggtaagatttattgacaacatcgatcctggtgggattgatcatcaaattgctcaactaggatctcaactggcaactagctactcttgtaattgtcatttctaaggtacataaagatcccaaactttcttattttgttgatattctcccagctgcagcatgagcttataagtagctgcgattcttggttttgcattgctttaccagggacaaaattatgtagccctttgttactggttgagttagtgtctctctgtatgtagcctaagaaaaagaccaaaactgttgttgagaagtattgggattgggagctttcaaatgagacacaacctatttggctaagatccatctttgttctttttattgatataatcatggttgtctaagcatgtatttttggaaatgtcaatgcctgaggcttatgtggtaatcatgcctttttttggtgttgtatcaaacctggaaatgtacccttgtgaattggaaactctaggtaatagagttctgttctatttttttatgggcagtacaacactgcaatctctacagctttgatgcaccttcttgctaagagctagcactgacgaatgcttctgttagtacaccagtcagatctttttggatcttgtatgcttgattgtgcaaatttattgactgtatagcttgtcagtcgttgtaacattgccttcaaatatgccccagtgattttgaaattttaggcaacaaagaatatagttacattgaaatgcgacaaacttgtttgcatcatggctagaaattggagggaaagcattatcggacaatcatttaatttggcttagttacaggtgctttttaagtggtaacgcaagttgcagttcacacaaataacacctttgaatgtaatgtattatcacacaaggctccagtgagttgtgttctatttgtttcttttctatttggcagtataatacttaatctttatgtttttgatgcacctgctaagcgctaccagtaccaaaaaggggttacattaaaatgtgatgtatcatgtatatattgttgggtctgcatgttgtgatcttcaagggcacaacaacttagatgaacccaagtcgaatatgattatgtatcctcttttactgttctatattagattacttcacaattgttgaatgatatttcgatggtcatatttgaatgttgtttgttatggaagaaagatgatattttggcactatatggtaccaagtttttattatcttgcaaaaaaatatctaaatgttactgacagatttcccatcagtctgttttggatcacttttccctttctttgattgtgtgccaaaagaggtgccatctttcaccatgaggccttacattttctgatggtgacaaactgacaatccattccaagtctatatgctcatattatttttagtatctttgtattttacttccgaaggggcgtgtttatatgatagaaaaagtattacaacactaagtctttgccaccagagtttagcagcaaattattttttgccatcatacatgcttagattttggaggcccaagtgagcaggccttcctgttatctagaacacaaaggccatttactccattgcagtggatggagttggagcaccaggctctcatgtacaatctcaatgcaatggccccggtaccgtaccttccagcctgctcatttcaatcagcaagaacttcatatcatccaatagagatatgcatattctgaatcataaggctaaggttctctacttcaaaactactagcatttgcaataaaacaaaaatagaagataaaaatattatttgcacaaatgaatgcctttgtaatgttacatggtaaataataatgttggcagctttgtagtatcagaaactacatgagccatttgctcattgtattggatgtttctatatctggagttgtgctgttagagtattaaagttctacactttacgatgtaatagtttgtagattcctctattcatattttttgagtttaggtaattaactttatggatcatcttaagtcctcatggttggggagtatgtactaacaactaaagtcaagactaggcaaaatgaatcaaacaagtaaagcgtgtggctgcctgtagcttactgacaaataaaaacgaatcaagttggcaccatagtaacacaagagaagctgtcattctccttttattccatatgattatgtgttatttcacagtttatgatggtaacagaacacttgagggagggggaactgctgaagcgtgtttcatcaagatccaagcagcacatgagctattgattcatgatgaaaggagaagggcatatgatagagaggatcatgtgaacccaatgaagattaccaccgtatcatgattcatcaactctaacatgcgtgagccaacactatgcttctccacttcaggacatggatatgactcttctatgtttaagccactacaacttggtgtatttatgccaaagattttttgagcactaacacaccaaaccagcgcctatgaagtgcttttgtatgatcaccttcttcttgcaccatccatggataatctacgtagctgcaaacagtcttagttacatattactgtactgaacatcctttcatagactacttgtacactgcctttttagaaccgttgtaaaacctcatgcgatacgtctgcgcctttgaaacagagatcaactgaacaacctgttcaatgtttccttctattgcatatgtattctgttgtcatactatgtccaacaatgcatttatattgctacaatatgtttatacttgatgcatgtgatacaaatccgttatttatacatacaaagacaagctcttctgacaccatagggcgccgcggagcgcaccccttttttctagtaagtttaacgttgcagttgctgaaggtgattgaatagaactcctgatttttttgtgttctatctaggaacttcagacatgatgtaaagatgaaccggagcatcaagcagcagctgggtgcctcttcactgatagtagatctctaatatagtgatgtatgttctatactttgaggttagcttttcccctctggtcccctttgttggagaaactgttgtacttcagttaagagataagttttcagagtaatttctcctaatcagtttagtagaggtttcaggttcactaacctgagcagtgatcaggcttttagcttatttatttatgttgtgcaacgctggaatggtttcgaatgcaaaattgtcgctgctgttgccgcattgccgtcttaactcgcaggggctgcatgctgatatcggtgtttgaacggaaagaggactcacaacaagaaatgaatgaacgatgttccat

SEQ ID NO: 73180 - DNA, 1572 bp, Zea Mays
cctcggtccaacaagcatctaggcgtctttggtagtggtctgtcaacaacttacaagttacagatgatgcaatatgtaaagataggcttcagcatatgagacaacatagagattagaatttctacatgtgtaaagtcagcaaggactttgtaattgatgcagcttttacagaacacgcttctcgcttttttaaccacagttgtcaacctaactgtcggctggagaaatggaatcagagggtctgctttgggccctcaatttgttgctaaaccacttgcacctgataaccctccactgaaggtaagatttattgacaacatcgatcctggtgggattgatcatcaaattgctcaactaggatctcaactggcaactagctactcttgtaattgtcatttctaagtttatgatggtaacagaacacttgagggagggggaactgctgaagcgtgtttcatcaagatccaagcagcacatgagctattgattcatgatgaaaggagaagggcatatgatagagaggatcatgtgaacccaatgaaggtcttataattttcttagccactcagattaccaccgtatcatgattcatcaactctaacatgcgtgagccaacactatgcttctccacttcaggacatggatatgactcttctatgtttaagccactacaacttggtgtatttatgccaaagattttttgagcactaacacaccaaaccagcgcctatgaagtgcttttgtatgatcaccttcttcttgcaccatccatggataatctacgtagctgcaaacagtcttagttacatattactgtactgaacatcctttcatagactacttgtacactgcctttttagaaccgttgtaaaacctcatgcgatacgtctgcgcctttgaaacagagatcaactgaacaacctgttcaatgtttccttctattgcatatgtattctgttgtcatactatgtccaacaatgcatttatattgctacaatatgtttatacttgatgcatgtgatacaaatccgttatttatacatacaaagacaagctcttctgacaccatagggcgccgcggagcgcaccccttttttctagtaagtttaacgttgcagttgctgaaggtgattgaatagaactcctgatttttttgtgttctatctaggaacttcagacatgatgtaaagatgaaccggagcatcaagcagcagctgggtgcctcttcactgatagtagatctctaatatagtgatgtatgttctatactttgaggttagcttttcccctctggtcccctttgttggagaaactgttgtacttcagttaagagataagttttcagagtaatttctcctaatcagtttagtagaggtttcaggttcactaacctgagcagtgatcaggcttttagcttatttatttatgttgtgcaacgctggaatggtttcgaatgcaaaattgtcgctgctgttgccgcattgccgtcttaactcgcaggggctgcatgctgatatcggtgtttgaacggaaagaggactcacaacaagaaatgaatgaacgatgttccat

SEQ ID NO: 73181 - DNA, 2504 bp, Zea Mays
acaagcatctaggcgtctttggtagtggtctgtcaacaacttacaagttacagatgatgcaatatgtaaagataggcttcagcatatgagacaacatagagattagaatttctacatgtgtaaagtcagcaaggactttgtaattgatgcagcttttacagaacacgcttctcgcttttttaaccacagttgtcaacctaactgtcggctggagaaatggaatcagagggtctgctttgggccctcaatttgttgctaaaccacttgcacctgataaccctccactgaaggtaagatttattgacaacatcgatcctggtgggattgatcatcaaattgctcaactaggatctcaactggcaactagctactcttgtaattgtcatttctaaggtgctttttaagtggtaacgcaagttgcagttcacacaaataacacctttgaatgtaatgtattatcacacaaggctccagtgagttgtgttctatttgtttcttttctatttggcagtataatacttaatctttatgtttttgatgcacctgctaagcgctaccagtaccaaaaaggggttacattaaaatgtgatgtatcatgtatatattgttgggtctgcatgttgtgatcttcaagggcacaacaacttagatgaacccaagtcgaatatgattatgtatcctcttttactgttctatattagattacttcacaattgttgaatgatatttcgatggtcatatttgaatgttgtttgttatggaagaaagatgatattttggcactatatggtaccaagtttttattatcttgcaaaaaaatatctaaatgttactgacagatttcccatcagtctgttttggatcacttttccctttctttgattgtgtgccaaaagaggtgccatctttcaccatgaggccttacattttctgatggtgacaaactgacaatccattccaagtctatatgctcatattatttttagtatctttgtattttacttccgaaggggcgtgtttatatgatagaaaaagtattacaacactaagtctttgccaccagagtttagcagcaaattattttttgccatcatacatgcttagattttggaggcccaagtgagcaggccttcctgttatctagaacacaaaggccatttactccattgcagtggatggagttggagcaccaggctctcatgtacaatctcaatgcaatggccccggtaccgtaccttccagcctgctcatttcaatcagcaagaacttcatatcatccaatagagatatgcatattctgaatcataaggctaaggttctctacttcaaaactactagcatttgcaataaaacaaaaatagaagataaaaatattatttgcacaaatgaatgcctttgtaatgttacatggtaaataataatgttggcagctttgtagtatcagaaactacatgagccatttgctcattgtattggatgtttctatatctggagttgtgctgttagagtattaaagttctacactttacgatgtaatagtttgtagattcctctattcatattttttgagtttaggtaattaactttatggatcatcttaagtcctcatggttggggagtatgtactaacaactaaagtcaagactaggcaaaatgaatcaaacaagtaaagcgtgtggctgcctgtagcttactgacaaataaaaacgaatcaagttggcaccatagtaacacaagagaagctgtcattctccttttattccatatgattatgtgttatttcacagtttatgatggtaacagaacacttgagggagggggaactgctgaagcgtgtttcatcaagatccaagcagcacatgagctattgattcatgatgaaaggagaagggcatatgatagagaggatcatgtgaacccaatgaagattaccaccgtatcatgattcatcaactctaacatgcgtgagccaacactatgcttctccacttcaggacatggatatgactcttctatgtttaagccactacaacttggtgtatttatgccaaagattttttgagcactaacacaccaaaccagcgcctatgaagtgcttttgaacttcagacatgatgtaaagatgaaccggagcatcaagcagcagctgggtgcctcttcactgatagtagatctctaatatagtgatgtatgttctatactttgaggttagcttttcccctctggtcccctttgttggagaaactgttgtacttcagttaagagataagttttcagagtaatttctcctaatcagtttagtagaggtttcaggttcactaacctgagcagtgatcaggcttttagcttatttatttatgttgtgcaacgctggaatggtttcgaatgcaaaattgtcgctgctgttgccgcattgccgtcttaactcgcaggggctgcatgctgatatcggtgtttgaacggaaagaggactcacaacaagaaatgaatgaacgatgttccat

SEQ ID NO: 73182 - DNA, 1234 bp, Zea Mays
ctaggcgtctttggtagtggtctgtcaacaacttacaagttacagatgatgcaatatgtaaagataggcttcagcatatgagacaacatagagattagaatttctacatgtgtaaagtcagcaaggactttgtaattgatgcagcttttacagaacacgcttctcgcttttttaaccacagttgtcaacctaactgtcggctggagaaatggaatcagagggtctgctttgggccctcaatttgttgctaaaccacttgcacctgataaccctccactgaaggtaagatttattgacaacatcgatcctggtgggattgatcatcaaattgctcaactaggatctcaactggcaactagctactcttgtaattgtcatttctaagattttggaggcccaagtgagcaggccttcctgttatctagaacacaaaggccatttactccattgcagtggatggagttggagcaccaggctctcatgtacaatctcaatgcaatggccccgaacacttgagggagggggaactgctgaagcgtgtttcatcaagatccaagcagcacatgagctattgattcatgatgaaaggagaagggcatatgatagagaggatcatgtgaacccaatgaaggtcttataattttcttagccactcagattaccaccgtatcatgattcatcaactctaacatgcgtgagccaacactatgcttctccacttcaggacatggatatgactcttctatgtttaagccactacaacttggtgtatttatgccaaagattttttgagcactaacacaccaaaccagcgcctatgaagtgcttttgaacttcagacatgatgtaaagatgaaccggagcatcaagcagcagctgggtgcctcttcactgatagtagatctctaatatagtgatgtatgttctatactttgaggttagcttttcccctctggtcccctttgttggagaaactgttgtacttcagttaagagataagttttcagagtaatttctcctaatcagtttagtagaggtttcaggttcactaacctgagcagtgatcaggcttttagcttatttatttatgttgtgcaacgctggaatggtttcgaatgcaaaattgtcgctgctgttgccgcattgccgtcttaactcgcaggggctgcatgctgatatcggtgtttgaacggaaagaggactcacaacaagaaatgaatgaacgatgttccat

SEQ ID NO: 73183 - DNA, 2658 bp, Zea Mays
ctttggtagtggtctgtcaacaacttacaagttacagatgatgcaatatgtaaagataggcttcagcatatgagacaacatagagattagaatttctacatgtgtaaagtcagcaaggactttgtaattgatgcagcttttacagaacacgcttctcgcttttttaaccacagttgtcaacctaactgtcggctggagaaatggaatcagagggtctgctttgggccctcaatttgttgctaaaccacttgcacctgataaccctccactgaaggtaagatttattgacaacatcgatcctggtgggattgatcatcaaattgctcaactaggatctcaactggcaactagctactcttgtaattgtcatttctaaggtacataaagatcccaaactttcttattttgttgatattctcccagctgcagcatgagcttataagtagctgcgattcttggttttgcattgctttaccagggacaaaattatgtagccctttgttactggttgagttagtgtctctctgtatgtagcctaagaaaaagaccaaaactgttgttgagaagtattgggattgggagctttcaaatgagacacaacctatttggctaagatccatctttgttctttttattgatataatcatggttgtctaagcatgtatttttggaaatgtcaatgcctgaggcttatgtggtaatcatgcctttttttggtgttgtatcaaacctggaaatgtacccttgtgaattggaaactctaggtaatagagttctgttctatttttttatgggcagtacaacactgcaatctctacagctttgatgcaccttcttgctaagagctagcactgacgaatgcttctgttagtacaccagtcagatctttttggatcttgtatgcttgattgtgcaaatttattgactgtatagcttgtcagtcgttgtaacattgccttcaaatatgccccagtgattttgaaattttaggcaacaaagaatatagttacattgaaatgcgacaaacttgtttgcatcatggctagaaattggagggaaagcattatcggacaatcatttaatttggcttagttacaggtgctttttaagtggtaacgcaagttgcagttcacacaaataacacctttgaatgtaatgtattatcacacaaggctccagtgagttgtgttctatttgtttcttttctatttggcagtataatacttaatctttatgtttttgatgcacctgctaagcgctaccagtaccaaaaaggggttacattaaaatgtgatgtatcatgtatatattgttgggtctgcatgttgtgatcttcaagggcacaacaacttagatgaacccaagtcgaatatgattatgtatcctcttttactgttctatattagattacttcacaattgttgaatgatatttcgatggtcatatttgaatgttgtttgttatggaagaaagatgatattttggcactatatggtaccaagtttttattatcttgcaaaaaaatatctaaatgttactgacagatttcccatcagtctgttttggatcacttttccctttctttgattgtgtgccaaaagaggtgccatctttcaccatgaggccttacattttctgatggtgacaaactgacaatccattccaagtctatatgctcatattatttttagtatctttgtattttacttccgaaggggcgtgtttatatgatagaaaaagtattacaacactaagtctttgccaccagagtttagcagcaaattattttttgccatcatacatgcttagattttggaggcccaagtgagcaggccttcctgttatctagaacacaaaggccatttactccattgcagtggatggagttggagcaccaggctctcatgtacaatctcaatgcaatggccccgaacacttgagggagggggaactgctgaagcgtgtttcatcaagatccaagcagcacatgagctattgattcatgatgaaaggagaagggcatatgatagagaggatcatgtgaacccaatgaaggtcttataattttcttagccactcagattaccaccgtatcatgattcatcaactctaacatgcgtgagccaacactatgcttctccacttcaggacatggatatgactcttctatgtttaagccactacaacttggtgtatttatgccaaagattttttgagcactaacacaccaaaccagcgcctatgaagtgcttttgaacttcagacatgatgtaaagatgaaccggagcatcaagcagcagctgggtgcctcttcactgatagtagatctctaatatagtgatgtatgttctatactttgaggttagcttttcccctctggtcccctttgttggagaaactgttgtacttcagttaagagataagttttcagagtaatttctcctaatcagtttagtagaggtttcaggttcactaacctgagcagtgatcaggcttttagcttatttatttatgttgtgcaacgctggaatggtttcgaatgcaaaattgtcgctgctgttgccgcattgccgtcttaactcgcaggggctgcatgctgatatcggtgtttgaacggaaagaggactcacaacaagaaatgaatgaacgatgttccat

SEQ ID NO: 73184 - DNA, 3648 bp, Zea Mays
ctgtcaacaacttacaagttacagatgatgcaatatgtaaagataggcttcagcatatgagacaacatagagattagaatttctacatgtgtaaagtcagcaaggactttgtaattgatgcagcttttacagaacacgcttctcgcttttttaaccacagttgtcaacctaactgtcggctggagaaatggaatcagagggtctgctttgggccctcaatttgttgctaaaccacttgcacctgataaccctccactgaaggtaagatttattgacaacatcgatcctggtgggattgatcatcaaattgctcaactaggatctcaactggcaactagctactcttgtaattgtcatttctaaggtacataaagatcccaaactttcttattttgttgatattctcccagctgcagcatgagcttataagtagctgcgattcttggttttgcattgctttaccagggacaaaattatgtagccctttgttactggttgagttagtgtctctctgtatgtagcctaagaaaaagaccaaaactgttgttgagaagtattgggattgggagctttcaaatgagacacaacctatttggctaagatccatctttgttctttttattgatataatcatggttgtctaagcatgtatttttggaaatgtcaatgcctgaggcttatgtggtaatcatgcctttttttggtgttgtatcaaacctggaaatgtacccttgtgaattggaaactctaggtaatagagttctgttctatttttttatgggcagtacaacactgcaatctctacagctttgatgcaccttcttgctaagagctagcactgacgaatgcttctgttagtacaccagtcagatctttttggatcttgtatgcttgattgtgcaaatttattgactgtatagcttgtcagtcgttgtaacattgccttcaaatatgccccagtgattttgaaattttaggcaacaaagaatatagttacattgaaatgcgacaaacttgtttgcatcatggctagaaattggagggaaagcattatcggacaatcatttaatttggcttagttacaggtgctttttaagtggtaacgcaagttgcagttcacacaaataacacctttgaatgtaatgtattatcacacaaggctccagtgagttgtgttctatttgtttcttttctatttggcagtataatacttaatctttatgtttttgatgcacctgctaagcgctaccagtaccaaaaaggggttacattaaaatgtgatgtatcatgtatatattgttgggtctgcatgttgtgatcttcaagggcacaacaacttagatgaacccaagtcgaatatgattatgtatcctcttttactgttctatattagattacttcacaattgttgaatgatatttcgatggtcatatttgaatgttgtttgttatggaagaaagatgatattttggcactatatggtaccaagtttttattatcttgcaaaaaaatatctaaatgttactgacagatttcccatcagtctgttttggatcacttttccctttctttgattgtgtgccaaaagaggtgccatctttcaccatgaggccttacattttctgatggtgacaaactgacaatccattccaagtctatatgctcatattatttttagtatctttgtattttacttccgaaggggcgtgtttatatgatagaaaaagtattacaacactaagtctttgccaccagagtttagcagcaaattattttttgccatcatacatgcttagattttggaggcccaagtgagcaggccttcctgttatctagaacacaaaggccatttactccattgcagtggatggagttggagcaccaggctctcatgtacaatctcaatgcaatggccccggtaccgtaccttccagcctgctcatttcaatcagcaagaacttcatatcatccaatagagatatgcatattctgaatcataaggctaaggttctctacttcaaaactactagcatttgcaataaaacaaaaatagaagataaaaatattatttgcacaaatgaatgcctttgtaatgttacatggtaaataataatgttggcagctttgtagtatcagaaactacatgagccatttgctcattgtattggatgtttctatatctggagttgtgctgttagagtattaaagttctacactttacgatgtaatagtttgtagattcctctattcatattttttgagtttaggtaattaactttatggatcatcttaagtcctcatggttggggagtatgtactaacaactaaagtcaagactaggcaaaatgaatcaaacaagtaaagcgtgtggctgcctgtagcttactgacaaataaaaacgaatcaagttggcaccatagtaacacaagagaagctgtcattctccttttattccatatgattatgtgttatttcacagtttatgatggtaacagaacacttgagggagggggaactgctgaagcgtgtttcatcaagatccaagcagcacatgagctattgattcatgatgaaaggagaagggcatatgatagagaggatcatgtgaacccaatgaaggtcttataattttcttagccactcagattaccaccgtatcatgattcatcaactctaacatgcgtgagccaacactatgcttctccacttcaggacatggatatgactcttctatgtttaagccactacaacttggtgtatttatgccaaagattttttgagcactaacacaccaaaccagcgcctatgaagtgcttttgtatgatcaccttcttcttgcaccatccatggataatctacgtagctgcaaacagtcttagttacatattactgtactgaacatcctttcatagactacttgtacactgcctttttagaaccgttgtaaaacctcatgcgatacgtctgcgcctttgaaacagagatcaactgaacaacctgttcaatgtttccttctattgcatatgtattctgttgtcatactatgtccaacaatgcatttatattgctacaatatgtttatacttgatgcatgtgatacaaatccgttatttatacatacaaagacaagctcttctgacaccatagggcgccgcggagcgcaccccttttttctagtaagtttaacgttgcagttgctgaaggtgattgaatagaactcctgatttttttgtgttctatctaggaacttcagacatgatgtaaagatgaaccggagcatcaagcagcagctgggtgcctcttcactgatagtagatctctaatatagtgatgtatgttctatactttgaggttagcttttcccctctggtcccctttgttggagaaactgttgtacttcagttaagagataagttttcagagtaatttctcctaatcagtttagtagaggtttcaggttcactaacctgagcagtgatcaggcttttagcttatttatttatgttgtgcaacgctggaatggtttcgaatgcaaaattgtcgctgctgttgccgcattgccgtcttaactcgcaggggctgcatgctgatatcggtgtttgaacggaaagaggactcacaacaagaaatgaatgaacgatgttccat

SEQ ID NO: 73185 - DNA, 1567 bp, Zea Mays
caacaacttacaagttacagatgatgcaatatgtaaagataggcttcagcatatgagacaacatagagattagaatttctacatgtgtaaagtcagcaaggactttgtaattgatgcagcttttacagaacacgcttctcgcttttttaaccacagttgtcaacctaactgtcggctggagaaatggaatcagagggtctgctttgggccctcaatttgttgctaaaccacttgcacctgataaccctccactgaaggtaagatttattgacaacatcgatcctggtgggattgatcatcaaattgctcaactaggatctcaactggcaactagctactcttgtaattgtcatttctaagtggatggagttggagcaccaggctctcatgtacaatctcaatgcaatggccccgaacacttgagggagggggaactgctgaagcgtgtttcatcaagatccaagcagcacatgagctattgattcatgatgaaaggagaagggcatatgatagagaggatcatgtgaacccaatgaaggtcttataattttcttagccactcagattaccaccgtatcatgattcatcaactctaacatgcgtgagccaacactatgcttctccacttcaggacatggatatgactcttctatgtttaagccactacaacttggtgtatttatgccaaagattttttgagcactaacacaccaaaccagcgcctatgaagtgcttttgtatgatcaccttcttcttgcaccatccatggataatctacgtagctgcaaacagtcttagttacatattactgtactgaacatcctttcatagactacttgtacactgcctttttagaaccgttgtaaaacctcatgcgatacgtctgcgcctttgaaacagagatcaactgaacaacctgttcaatgtttccttctattgcatatgtattctgttgtcatactatgtccaacaatgcatttatattgctacaatatgtttatacttgatgcatgtgatacaaatccgttatttatacatacaaagacaagctcttctgacaccatagggcgccgcggagcgcaccccttttttctagtaagtttaacgttgcagttgctgaaggtgattgaatagaactcctgatttttttgtgttctatctaggaacttcagacatgatgtaaagatgaaccggagcatcaagcagcagctgggtgcctcttcactgatagtagatctctaatatagtgatgtatgttctatactttgaggttagcttttcccctctggtcccctttgttggagaaactgttgtacttcagttaagagataagttttcagagtaatttctcctaatcagtttagtagaggtttcaggttcactaacctgagcagtgatcaggcttttagcttatttatttatgttgtgcaacgctggaatggtttcgaatgcaaaattgtcgctgctgttgccgcattgccgtcttaactcgcaggggctgcatgctgatatcggtgtttgaacggaaagaggactcacaacaagaaatgaatgaacgatgttccat

SEQ ID NO: 73186 - DNA, 2896 bp, Zea Mays
aacaacttacaagttacagatgatgcaatatgtaaagataggcttcagcatatgagacaacatagagattagaatttctacatgtgtaaagtcagcaaggactttgtaattgatgcagcttttacagaacacgcttctcgcttttttaaccacagttgtcaacctaactgtcggctggagaaatggaatcagagggtctgctttgggccctcaatttgttgctaaaccacttgcacctgataaccctccactgaaggtaagatttattgacaacatcgatcctggtgggattgatcatcaaattgctcaactaggatctcaactggcaactagctactcttgtaattgtcatttctaaggtgctttttaagtggtaacgcaagttgcagttcacacaaataacacctttgaatgtaatgtattatcacacaaggctccagtgagttgtgttctatttgtttcttttctatttggcagtataatacttaatctttatgtttttgatgcacctgctaagcgctaccagtaccaaaaaggggttacattaaaatgtgatgtatcatgtatatattgttgggtctgcatgttgtgatcttcaagggcacaacaacttagatgaacccaagtcgaatatgattatgtatcctcttttactgttctatattagattacttcacaattgttgaatgatatttcgatggtcatatttgaatgttgtttgttatggaagaaagatgatattttggcactatatggtaccaagtttttattatcttgcaaaaaaatatctaaatgttactgacagatttcccatcagtctgttttggatcacttttccctttctttgattgtgtgccaaaagaggtgccatctttcaccatgaggccttacattttctgatggtgacaaactgacaatccattccaagtctatatgctcatattatttttagtatctttgtattttacttccgaaggggcgtgtttatatgatagaaaaagtattacaacactaagtctttgccaccagagtttagcagcaaattattttttgccatcatacatgcttagattttggaggcccaagtgagcaggccttcctgttatctagaacacaaaggccatttactccattgcagtggatggagttggagcaccaggctctcatgtacaatctcaatgcaatggccccggtaccgtaccttccagcctgctcatttcaatcagcaagaacttcatatcatccaatagagatatgcatattctgaatcataaggctaaggttctctacttcaaaactactagcatttgcaataaaacaaaaatagaagataaaaatattatttgcacaaatgaatgcctttgtaatgttacatggtaaataataatgttggcagctttgtagtatcagaaactacatgagccatttgctcattgtattggatgtttctatatctggagttgtgctgttagagtattaaagttctacactttacgatgtaatagtttgtagattcctctattcatattttttgagtttaggtaattaactttatggatcatcttaagtcctcatggttggggagtatgtactaacaactaaagtcaagactaggcaaaatgaatcaaacaagtaaagcgtgtggctgcctgtagcttactgacaaataaaaacgaatcaagttggcaccatagtaacacaagagaagctgtcattctccttttattccatatgattatgtgttatttcacagtttatgatggtaacagaacacttgagggagggggaactgctgaagcgtgtttcatcaagatccaagcagcacatgagctattgattcatgatgaaaggagaagggcatatgatagagaggatcatgtgaacccaatgaagattaccaccgtatcatgattcatcaactctaacatgcgtgagccaacactatgcttctccacttcaggacatggatatgactcttctatgtttaagccactacaacttggtgtatttatgccaaagattttttgagcactaacacaccaaaccagcgcctatgaagtgcttttgtatgatcaccttcttcttgcaccatccatggataatctacgtagctgcaaacagtcttagttacatattactgtactgaacatcctttcatagactacttgtacactgcctttttagaaccgttgtaaaacctcatgcgatacgtctgcgcctttgaaacagagatcaactgaacaacctgttcaatgtttccttctattgcatatgtattctgttgtcatactatgtccaacaatgcatttatattgctacaatatgtttatacttgatgcatgtgatacaaatccgttatttatacatacaaagacaagctcttctgacaccatagggcgccgcggagcgcaccccttttttctagtaagtttaacgttgcagttgctgaaggtgattgaatagaactcctgatttttttgtgttctatctaggaacttcagacatgatgtaaagatgaaccggagcatcaagcagcagctgggtgcctcttcactgatagtagatctctaatatagtgatgtatgttctatactttgaggttagcttttcccctctggtcccctttgttggagaaactgttgtacttcagttaagagataagttttcagagtaatttctcctaatcagtttagtagaggtttcaggttcactaacctgagcagtgatcaggcttttagcttatttatttatgttgtgcaacgctggaatggtttcgaatgcaaaattgtcgctgctgttgccgcattgccgtcttaactcgcaggggctgcatgctgatatcggtgtttgaacggaaagaggactcacaacaagaaatgaatgaacgatgttccat

SEQ ID NO: 73187 - DNA, 3203 bp, Zea Mays
acaacttacaagatgatgcaatatgtaaagataggcttcagcatatgagacaacatagagattagaatttctacatgtgtaaagtcagcaaggactttgtaattgatgcagcttttacagaacacgcttctcgcttttttaaccacagttgtcaacctaactgtcggctggagaaatgagggtctgctttgggccctcaatttgttgctaaaccacttgcacctgataaccctccactgaaggtaagatttattgacaacatcgatcctggtgggattgatcatcaaattgctcaactaggatctcaactggcaactagctactcttgtaattgtcatttctaaggtacataaagatcccaaactttcttattttgttgatattctcccagctgcagcatgagcttataagtagctgcgattcttggttttgcattgctttaccagggacaaaattatgtagccctttgttactggttgagttagtgtctctctgtatgtagcctaagaaaaagaccaaaactgttgttgagaagtattgggattgggagctttcaaatgagacacaacctatttggctaagatccatctttgttctttttattgatataatcatggttgtctaagcatgtatttttggaaatgtcaatgcctgaggcttatgtggtaatcatgcctttttttggtgttgtatcaaacctggaaatgtacccttgtgaattggaaactctaggtaatagagttctgttctatttttttatgggcagtacaacactgcaatctctacagctttgatgcaccttcttgctaagagctagcactgacgaatgcttctgttagtacaccagtcagatctttttggatcttgtatgcttgattgtgcaaatttattgactgtatagcttgtcagtcgttgtaacattgccttcaaatatgccccagtgattttgaaattttaggcaacaaagaatatagttacattgaaatgcgacaaacttgtttgcatcatggctagaaattggagggaaagcattatcggacaatcatttaatttggcttagttacaggtgctttttaagtggtaacgcaagttgcagttcacacaaataacacctttgaatgtaatgtattatcacacaaggctccagtgagttgtgttctatttgtttcttttctatttggcagtataatacttaatctttatgtttttgatgcacctgctaagcgctaccagtaccaaaaaggggttacattaaaatgtgatgtatcatgtatatattgttgggtctgcatgttgtgatcttcaagggcacaacaacttagatgaacccaagtcgaatatgattatgtatcctcttttactgttctatattagattacttcacaattgttgaatgatatttcgatggtcatatttgaatgttgtttgttatggaagaaagatgatattttggcactatatggtaccaagtttttattatcttgcaaaaaaatatctaaatgttactgacagatttcccatcagtctgttttggatcacttttccctttctttgattgtgtgccaaaagaggtgccatctttcaccatgaggccttacattttctgatggtgacaaactgacaatccattccaagtctatatgctcatattatttttagtatctttgtattttacttccgaaggggcgtgtttatatgatagaaaaagtattacaacactaagtctttgccaccagagtttagcagcaaattattttttgccatcatacatgcttagattttggaggcccaagtgagcaggccttcctgttatctagaacacaaaggccatttactccattgcagtggatggagttggagcaccaggctctcatgtacaatctcaatgcaatggccccggtaccgtaccttccagcctgctcatttcaatcagcaagaacttcatatcatccaatagagatatgcatattctgaatcataaggctaaggttctctacttcaaaactactagcatttgcaataaaacaaaaatagaagataaaaatattatttgcacaaatgaatgcctttgtaatgttacatggtaaataataatgttggcagctttgtagtatcagaaactacatgagccatttgctcattgtattggatgtttctatatctggagttgtgctgttagagtattaaagttctacactttacgatgtaatagtttgtagattcctctattcatattttttgagtttaggtaattaactttatggatcatcttaagtcctcatggttggggagtatgtactaacaactaaagtcaagactaggcaaaatgaatcaaacaagtaaagcgtgtggctgcctgtagcttactgacaaataaaaacgaatcaagttggcaccatagtaacacaagagaagctgtcattctccttttattccatatgattatgtgttatttcacagtttatgatggtaacagaacacttgagggagggggaactgctgaagcgtgtttcatcaagatccaagcagcacatgagctattgattcatgatgaaaggagaagggcatatgatagagaggatcatgtgaacccaatgaaggtcttataattttcttagccactcagattaccaccgtatcatgattcatcaactctaacatgcgtgagccaacactatgcttctccacttcaggacatggatatgactcttctatgtttaagccactacaacttggtgtatttatgccaaagattttttgagcactaacacaccaaaccagcgcctatgaagtgcttttgaacttcagacatgatgtaaagatgaaccggagcatcaagcagcagctgggtgcctcttcactgatagtagatctctaatatagtgatgtatgttctatactttgaggttagcttttcccctctggtcccctttgttggagaaactgttgtacttcagttaagagataagttttcagagtaatttctcctaatcagtttagtagaggtttcaggttcactaacctgagcagtgatcaggcttttagcttatttatttatgttgtgcaacgctggaatggtttcgaatgcaaaattgtcgctgctgttgccgcattgccgtcttaactcgcaggggctgcatgctgatatcggtgtttgaacggaaagaggactcacaacaagaaatgaatgaacgatgttccat

SEQ ID NO: 73188 - DNA, 3610 bp, Zea Mays
acaacttacaagatgatgcaatatgtaaagataggcttcagcatatgagacaacatagagattagaatttctacatgtgtaaagtcagcaaggactttgtaattgatgcagcttttacagaacacgcttctcgcttttttaaccacagttgtcaacctaactgtcggctggagaaatggaatcagagggtctgctttgggccctcaatttgttgctaaaccacttgcacctgataaccctccactgaaggtaagatttattgacaacatcgatcctggtgggattgatcatcaaattgctcaactaggatctcaactggcaactagctactcttgtaattgtcatttctaaggtacataaagatcccaaactttcttattttgttgatattctcccagctgcagcatgagcttataagtagctgcgattcttggttttgcattgctttaccagggacaaaattatgtagccctttgttactggttgagttagtgtctctctgtatgtagcctaagaaaaagaccaaaactgttgttgagaagtattgggattgggagctttcaaatgagacacaacctatttggctaagatccatctttgttctttttattgatataatcatggttgtctaagcatgtatttttggaaatgtcaatgcctgaggcttatgtggtaatcatgcctttttttggtgttgtatcaaacctggaaatgtacccttgtgaattggaaactctaggtaatagagttctgttctatttttttatgggcagtacaacactgcaatctctacagctttgatgcaccttcttgctaagagctagcactgacgaatgcttctgttagtacaccagtcagatctttttggatcttgtatgcttgattgtgcaaatttattgactgtatagcttgtcagtcgttgtaacattgccttcaaatatgccccagtgattttgaaattttaggcaacaaagaatatagttacattgaaatgcgacaaacttgtttgcatcatggctagaaattggagggaaagcattatcggacaatcatttaatttggcttagttacaggtgctttttaagtggtaacgcaagttgcagttcacacaaataacacctttgaatgtaatgtattatcacacaaggctccagtgagttgtgttctatttgtttcttttctatttggcagtataatacttaatctttatgtttttgatgcacctgctaagcgctaccagtaccaaaaaggggttacattaaaatgtgatgtatcatgtatatattgttgggtctgcatgttgtgatcttcaagggcacaacaacttagatgaacccaagtcgaatatgattatgtatcctcttttactgttctatattagattacttcacaattgttgaatgatatttcgatggtcatatttgaatgttgtttgttatggaagaaagatgatattttggcactatatggtaccaagtttttattatcttgcaaaaaaatatctaaatgttactgacagatttcccatcagtctgttttggatcacttttccctttctttgattgtgtgccaaaagaggtgccatctttcaccatgaggccttacattttctgatggtgacaaactgacaatccattccaagtctatatgctcatattatttttagtatctttgtattttacttccgaaggggcgtgtttatatgatagaaaaagtattacaacactaagtctttgccaccagagtttagcagcaaattattttttgccatcatacatgcttagattttggaggcccaagtgagcaggccttcctgttatctagaacacaaaggccatttactccattgcagtggatggagttggagcaccaggctctcatgtacaatctcaatgcaatggccccggtaccgtaccttccagcctgctcatttcaatcagcaagaacttcatatcatccaatagagatatgcatattctgaatcataaggctaaggttctctacttcaaaactactagcatttgcaataaaacaaaaatagaagataaaaatattatttgcacaaatgaatgcctttgtaatgttacatggtaaataataatgttggcagctttgtagtatcagaaactacatgagccatttgctcattgtattggatgtttctatatctggagttgtgctgttagagtattaaagttctacactttacgatgtaatagtttgtagattcctctattcatattttttgagtttaggtaattaactttatggatcatcttaagtcctcatggttggggagtatgtactaacaactaaagtcaagactaggcaaaatgaatcaaacaagtaaagcgtgtggctgcctgtagcttactgacaaataaaaacgaatcaagttggcaccatagtaacacaagagaagctgtcattctccttttattccatatgattatgtgttatttcacagtttatgatggtaacagaacacttgagggagggggaactgctgaagcgtgtttcatcaagatccaagcagcacatgagctattgattcatgatgaaaggagaagggcatatgatagagaggatcatgtgaacccaatgaagattaccaccgtatcatgattcatcaactctaacatgcgtgagccaacactatgcttctccacttcaggacatggatatgactcttctatgtttaagccactacaacttggtgtatttatgccaaagattttttgagcactaacacaccaaaccagcgcctatgaagtgcttttgtatgatcaccttcttcttgcaccatccatggataatctacgtagctgcaaacagtcttagttacatattactgtactgaacatcctttcatagactacttgtacactgcctttttagaaccgttgtaaaacctcatgcgatacgtctgcgcctttgaaacagagatcaactgaacaacctgttcaatgtttccttctattgcatatgtattctgttgtcatactatgtccaacaatgcatttatattgctacaatatgtttatacttgatgcatgtgatacaaatccgttatttatacatacaaagacaagctcttctgacaccatagggcgccgcggagcgcaccccttttttctagtaagtttaacgttgcagttgctgaaggtgattgaatagaactcctgatttttttgtgttctatctaggaacttcagacatgatgtaaagatgaaccggagcatcaagcagcagctgggtgcctcttcactgatagtagatctctaatatagtgatgtatgttctatactttgaggttagcttttcccctctggtcccctttgttggagaaactgttgtacttcagttaagagataagttttcagagtaatttctcctaatcagtttagtagaggtttcaggttcactaacctgagcagtgatcaggcttttagcttatttatttatgttgtgcaacgctggaatggtttcgaatgcaaaattgtcgctgctgttgccgcattgccgtcttaactcgcaggggctgcatgctgatatcggtgtttgaacggaaagaggactcacaacaagaaatgaatgaacgatgttccat

SEQ ID NO: 73189 - DNA, 2400 bp, Zea Mays
ttcacatgaaacacacaagtttggatatataggaagtgtaggtggttgttcagacttaataatgttttcttcttaagtggtgttgttccttaatcatcttattttttgtatacattgtaaggtacataaaaaaacttggattcatcatttaagttaaccaccaaccatgttgaagttcagcttttgccttaagcagtggttacagaagataatatatgtaatatccaatgaattctttctctaatgtgttttttgcatattatgactatcttatgtctttcaaacttatgaatgactttttaggatatattgtattgaggttccttttatagtaccaaaactgtcttacatactaagttttcctttatgtggctcttgcaatctgtttgctatcgagtttctcctaactcctgggattttctgatggtacaggttgattactgaaatattttctttaatattctactccataccttccaaattataaattgttttagatacacagatcttgttatgcacctagatatatataatatatttacaatttcgaatggaggtagtaaaacattgaatatttcctcatttcctaaacaagaccggagagctgtcatatgttagaagtaaaagttatgtcttatccacgtgtgcacaattgaaatggtatgctttacgtagttggtttacatgaaaaaattgtattaatgacaaggctagatttgtgatcaagttatatttcctttttaatgtcattgtttattataatccacatcatatttcgtattttaccgttaacatctctcttcagttacagatgatgcaatatgtaaagataggcttcagcatatgagacaacatagagattagaatttctacatgtgtaaagtcagcaaggactttgtaattgatgcagcttttacagaacacgcttctcgcttttttaaccacagttgtcaacctaactgtcggctggagaaatggaatcagagggtctgctttgggccctcaatttgttgctaaaccacttgcacctgataaccctccactgaaggtaagatttattgacaacatcgatcctggtgggattgatcatcaaattgctcaactaggatctcaactggcaactagctactcttgtaattgtcatttctaagattttggaggcccaagtgagcaggccttcctgttatctagaacacaaaggccatttactccattgcagtggatggagttggagcaccaggctctcatgtacaatctcaatgcaatggccccgaacacttgagggagggggaactgctgaagcgtgtttcatcaagatccaagcagcacatgagctattgattcatgatgaaaggagaagggcatatgatagagaggatcatgtgaacccaatgaagattaccaccgtatcatgattcatcaactctaacatgcgtgagccaacactatgcttctccacttcaggacatggatatgactcttctatgtttaagccactacaacttggtgtatttatgccaaagattttttgagcactaacacaccaaaccagcgcctatgaagtgcttttgtatgatcaccttcttcttgcaccatccatggataatctacgtagctgcaaacagtcttagttacatattactgtactgaacatcctttcatagactacttgtacactgcctttttagaaccgttgtaaaacctcatgcgatacgtctgcgcctttgaaacagagatcaactgaacaacctgttcaatgtttccttctattgcatatgtattctgttgtcatactatgtccaacaatgcatttatattgctacaatatgtttatacttgatgcatgtgatacaaatccgttatttatacatacaaagacaagctcttctgacaccatagggcgccgcggagcgcaccccttttttctagtaagtttaacgttgcagttgctgaaggtgattgaatagaactcctgatttttttgtgttctatctaggaacttcagacatgatgtaaagatgaaccggagcatcaagcagcagctgggtgcctcttcactgatagtagatctctaatatagtgatgtatgttctatactttgaggttagcttttcccctctggtcccctttgttggagaaactgttgtacttcagttaagagataagttttcagagtaatttctcctaatcagtttagtagaggtttcaggttcactaacctgagcagtgatcaggcttttagcttatttatttatgttgtgcaacgctggaatggtttcgaatgcaaaattgtcgctgctgttgccgcattgccgtcttaactcgcaggggctgcatgctgatatcggtgtttgaacggaaagaggactcacaacaagaaatgaatgaacgatgttccat

SEQ ID NO: 73190 - DNA, 2304 bp, Zea Mays
ttcacatgaaacacacaagtttggatatataggaagtgtaggtggttgttcagacttaataatgttttcttcttaagtggtgttgttccttaatcatcttattttttgtatacattgtaaggtacataaaaaaacttggattcatcatttaagttaaccaccaaccatgttgaagttcagcttttgccttaagcagtggttacagaagataatatatgtaatatccaatgaattctttctctaatgtgttttttgcatattatgactatcttatgtctttcaaacttatgaatgactttttaggatatattgtattgaggttccttttatagtaccaaaactgtcttacatactaagttttcctttatgtggctcttgcaatctgtttgctatcgagtttctcctaactcctgggattttctgatggtacaggttgattactgaaatattttctttaatattctactccataccttccaaattataaattgttttagatacacagatcttgttatgcacctagatatatataatatatttacaatttcgaatggaggtagtaaaacattgaatatttcctcatttcctaaacaagaccggagagctgtcatatgttagaagtaaaagttatgtcttatccacgtgtgcacaattgaaatggtatgctttacgtagttggtttacatgaaaaaattgtattaatgacaaggctagatttgtgatcaagttatatttcctttttaatgtcattgtttattataatccacatcatatttcgtattttaccgttaacatctctcttcagttacagatgatgcaatatgtaaagataggcttcagcatatgagacaacatagagattagaatttctacatgtgtaaagtcagcaaggactttgtaattgatgcagcttttacagaacacgcttctcgcttttttaaccacagttgtcaacctaactgtcggctggagaaatggaatcagagggtctgctttgggccctcaatttgttgctaaaccacttgcacctgataaccctccactgaaggtaagatttattgacaacatcgatcctggtgggattgatcatcaaattgctcaactaggatctcaactggcaactagctactcttgtaattgtcatttctaagaacacttgagggagggggaactgctgaagcgtgtttcatcaagatccaagcagcacatgagctattgattcatgatgaaaggagaagggcatatgatagagaggatcatgtgaacccaatgaaggtcttataattttcttagccactcagattaccaccgtatcatgattcatcaactctaacatgcgtgagccaacactatgcttctccacttcaggacatggatatgactcttctatgtttaagccactacaacttggtgtatttatgccaaagattttttgagcactaacacaccaaaccagcgcctatgaagtgcttttgtatgatcaccttcttcttgcaccatccatggataatctacgtagctgcaaacagtcttagttacatattactgtactgaacatcctttcatagactacttgtacactgcctttttagaaccgttgtaaaacctcatgcgatacgtctgcgcctttgaaacagagatcaactgaacaacctgttcaatgtttccttctattgcatatgtattctgttgtcatactatgtccaacaatgcatttatattgctacaatatgtttatacttgatgcatgtgatacaaatccgttatttatacatacaaagacaagctcttctgacaccatagggcgccgcggagcgcaccccttttttctagtaagtttaacgttgcagttgctgaaggtgattgaatagaactcctgatttttttgtgttctatctaggaacttcagacatgatgtaaagatgaaccggagcatcaagcagcagctgggtgcctcttcactgatagtagatctctaatatagtgatgtatgttctatactttgaggttagcttttcccctctggtcccctttgttggagaaactgttgtacttcagttaagagataagttttcagagtaatttctcctaatcagtttagtagaggtttcaggttcactaacctgagcagtgatcaggcttttagcttatttatttatgttgtgcaacgctggaatggtttcgaatgcaaaattgtcgctgctgttgccgcattgccgtcttaactcgcaggggctgcatgctgatatcggtgtttgaacggaaagaggactcacaacaagaaatgaatgaacgatgttccat

SEQ ID NO: 73191 - DNA, 4435 bp, Zea Mays
ttcacatgaaacacacaagtttggatatataggaagtgtaggtggttgttcagacttaataatgttttcttcttaagtggtgttgttccttaatcatcttattttttgtatacattgtaaggtacataaaaaaacttggattcatcatttaagttaaccaccaaccatgttgaagttcagcttttgccttaagcagtggttacagaagataatatatgtaatatccaatgaattctttctctaatgtgttttttgcatattatgactatcttatgtctttcaaacttatgaatgactttttaggatatattgtattgaggttccttttatagtaccaaaactgtcttacatactaagttttcctttatgtggctcttgcaatctgtttgctatcgagtttctcctaactcctgggattttctgatggtacaggttgattactgaaatattttctttaatattctactccataccttccaaattataaattgttttagatacacagatcttgttatgcacctagatatatataatatatttacaatttcgaatggaggtagtaaaacattgaatatttcctcatttcctaaacaagaccggagagctgtcatatgttagaagtaaaagttatgtcttatccacgtgtgcacaattgaaatggtatgctttacgtagttggtttacatgaaaaaattgtattaatgacaaggctagatttgtgatcaagttatatttcctttttaatgtcattgtttattataatccacatcatatttcgtattttaccgttaacatctctcttcagttacagatgatgcaatatgtaaagataggcttcagcatatgagacaacatagagattagaatttctacatgtgtaaagtcagcaaggactttgtaattgatgcagcttttacagaacacgcttctcgcttttttaaccacagttgtcaacctaactgtcggctggagaaatggaatcagagggtctgctttgggccctcaatttgttgctaaaccacttgcacctgataaccctccactgaaggtaagatttattgacaacatcgatcctggtgggattgatcatcaaattgctcaactaggatctcaactggcaactagctactcttgtaattgtcatttctaaggtacataaagatcccaaactttcttattttgttgatattctcccagctgcagcatgagcttataagtagctgcgattcttggttttgcattgctttaccagggacaaaattatgtagccctttgttactggttgagttagtgtctctctgtatgtagcctaagaaaaagaccaaaactgttgttgagaagtattgggattgggagctttcaaatgagacacaacctatttggctaagatccatctttgttctttttattgatataatcatggttgtctaagcatgtatttttggaaatgtcaatgcctgaggcttatgtggtaatcatgcctttttttggtgttgtatcaaacctggaaatgtacccttgtgaattggaaactctaggtaatagagttctgttctatttttttatgggcagtacaacactgcaatctctacagctttgatgcaccttcttgctaagagctagcactgacgaatgcttctgttagtacaccagtcagatctttttggatcttgtatgcttgattgtgcaaatttattgactgtatagcttgtcagtcgttgtaacattgccttcaaatatgccccagtgattttgaaattttaggcaacaaagaatatagttacattgaaatgcgacaaacttgtttgcatcatggctagaaattggagggaaagcattatcggacaatcatttaatttggcttagttacaggtgctttttaagtggtaacgcaagttgcagttcacacaaataacacctttgaatgtaatgtattatcacacaaggctccagtgagttgtgttctatttgtttcttttctatttggcagtataatacttaatctttatgtttttgatgcacctgctaagcgctaccagtaccaaaaaggggttacattaaaatgtgatgtatcatgtatatattgttgggtctgcatgttgtgatcttcaagggcacaacaacttagatgaacccaagtcgaatatgattatgtatcctcttttactgttctatattagattacttcacaattgttgaatgatatttcgatggtcatatttgaatgttgtttgttatggaagaaagatgatattttggcactatatggtaccaagtttttattatcttgcaaaaaaatatctaaatgttactgacagatttcccatcagtctgttttggatcacttttccctttctttgattgtgtgccaaaagaggtgccatctttcaccatgaggccttacattttctgatggtgacaaactgacaatccattccaagtctatatgctcatattatttttagtatctttgtattttacttccgaaggggcgtgtttatatgatagaaaaagtattacaacactaagtctttgccaccagagtttagcagcaaattattttttgccatcatacatgcttagattttggaggcccaagtgagcaggccttcctgttatctagaacacaaaggccatttactccattgcagtggatggagttggagcaccaggctctcatgtacaatctcaatgcaatggccccggtaccgtaccttccagcctgctcatttcaatcagcaagaacttcatatcatccaatagagatatgcatattctgaatcataaggctaaggttctctacttcaaaactactagcatttgcaataaaacaaaaatagaagataaaaatattatttgcacaaatgaatgcctttgtaatgttacatggtaaataataatgttggcagctttgtagtatcagaaactacatgagccatttgctcattgtattggatgtttctatatctggagttgtgctgttagagtattaaagttctacactttacgatgtaatagtttgtagattcctctattcatattttttgagtttaggtaattaactttatggatcatcttaagtcctcatggttggggagtatgtactaacaactaaagtcaagactaggcaaaatgaatcaaacaagtaaagcgtgtggctgcctgtagcttactgacaaataaaaacgaatcaagttggcaccatagtaacacaagagaagctgtcattctccttttattccatatgattatgtgttatttcacagtttatgatggtaacagaacacttgagggagggggaactgctgaagcgtgtttcatcaagatccaagcagcacatgagctattgattcatgatgaaaggagaagggcatatgatagagaggatcatgtgaacccaatgaaggtcttataattttcttagccactcagattaccaccgtatcatgattcatcaactctaacatgcgtgagccaacactatgcttctccacttcaggacatggatatgactcttctatgtttaagccactacaacttggtgtatttatgccaaagattttttgagcactaacacaccaaaccagcgcctatgaagtgcttttgtatgatcaccttcttcttgcaccatccatggataatctacgtagctgcaaacagtcttagttacatattactgtactgaacatcctttcatagactacttgtacactgcctttttagaaccgttgtaaaacctcatgcgatacgtctgcgcctttgaaacagagatcaactgaacaacctgttcaatgtttccttctattgcatatgtattctgttgtcatactatgtccaacaatgcatttatattgctacaatatgtttatacttgatgcatgtgatacaaatccgttatttatacatacaaagacaagctcttctgacaccatagggcgccgcggagcgcaccccttttttctagtaagtttaacgttgcagttgctgaaggtgattgaatagaactcctgatttttttgtgttctatctaggaacttcagacatgatgtaaagatgaaccggagcatcaagcagcagctgggtgcctcttcactgatagtagatctctaatatagtgatgtatgttctatactttgaggttagcttttcccctctggtcccctttgttggagaaactgttgtacttcagttaagagataagttttcagagtaatttctcctaatcagtttagtagaggtttcaggttcactaacctgagcagtgatcaggcttttagcttatttatttatgttgtgcaacgctggaatggtttcgaatgcaaaattgtcgctgctgttgccgcattgccgtcttaactcgcaggggctgcatgctgatatcggtgtttgaacggaaagaggactcacaacaagaaatgaatgaacgatgttccat

SEQ ID NO: 73192 - DNA, 2308 bp, Zea Mays
cttggattcatcatttaagttaaccaccaaccatgttgaagttcagcttttgccttaagcagtggttacagaagataatatatgtaatatccaatgaattctttctctaatgtgttttttgcatattatgactatcttatgtctttcaaacttatgaatgactttttaggatatattgtattgaggttccttttatagtaccaaaactgtcttacatactaagttttcctttatgtggctcttgcaatctgtttgctatcgagtttctcctaactcctgggattttctgatggtacaggttgattactgaaatattttctttaatattctactccataccttccaaattataaattgttttagatacacagatcttgttatgcacctagatatatataatatatttacaatttcgaatggaggtagtaaaacattgaatatttcctcatttcctaaacaagaccggagagctgtcatatgttagaagtaaaagttatgtcttatccacgtgtgcacaattgaaatggtatgctttacgtagttggtttacatgaaaaaattgtattaatgacaaggctagatttgtgatcaagttatatttcctttttaatgtcattgtttattataatccacatcatatttcgtattttaccgttaacatctctcttcagttacagatgatgcaatatgtaaagataggcttcagcatatgagacaacatagagattagaatttctacatgtgtaaagtcagcaaggactttgtaattgatgcagcttttacagaacacgcttctcgcttttttaaccacagttgtcaacctaactgtcggctggagaaatggaatcagagggtctgctttgggccctcaatttgttgctaaaccacttgcacctgataaccctccactgaaggtaagatttattgacaacatcgatcctggtgggattgatcatcaaattgctcaactaggatctcaactggcaactagctactcttgtaattgtcatttctaagattttggaggcccaagtgagcaggccttcctgttatctagaacacaaaggccatttactccattgcagtggatggagttggagcaccaggctctcatgtacaatctcaatgcaatggccccgtttatgatggtaacagaacacttgagggagggggaactgctgaagcgtgtttcatcaagatccaagcagcacatgagctattgattcatgatgaaaggagaagggcatatgatagagaggatcatgtgaacccaatgaaggtcttataattttcttagccactcagattaccaccgtatcatgattcatcaactctaacatgcgtgagccaacactatgcttctccacttcaggacatggatatgactcttctatgtttaagccactacaacttggtgtatttatgccaaagattttttgagcactaacacaccaaaccagcgcctatgaagtgcttttgtatgatcaccttcttcttgcaccatccatggataatctacgtagctgcaaacagtcttagttacatattactgtactgaacatcctttcatagactacttgtacactgcctttttagaaccgttgtaaaacctcatgcgatacgtctgcgcctttgaaacagagatcaactgaacaacctgttcaatgtttccttctattgcatatgtattctgttgtcatactatgtccaacaatgcatttatattgctacaatatgtttatacttgatgcatgtgatacaaatccgttatttatacatacaaagacaagctcttctgacaccatagggcgccgcggagcgcaccccttttttctagtaagtttaacgttgcagttgctgaaggtgattgaatagaactcctgatttttttgtgttctatctaggaacttcagacatgatgtaaagatgaaccggagcatcaagcagcagctgggtgcctcttcactgatagtagatctctaatatagtgatgtatgttctatactttgaggttagcttttcccctctggtcccctttgttggagaaactgttgtacttcagttaagagataagttttcagagtaatttctcctaatcagtttagtagaggtttcaggttcactaacctgagcagtgatcaggcttttagcttatttatttatgttgtgcaacgctggaatggtttcgaatgcaaaattgtcgctgctgttgccgcattgccgtcttaactcgcaggggctgcatgctgatatcggtgtttgaacggaaagaggactcacaacaagaaatgaatgaacgatgttccat

SEQ ID NO: 73193 - DNA, 3822 bp, Zea Mays
cttaagcagtggttacagaagataatatatgtaatatccaatgaattctttctctaatgtgttttttgcatattatgactatcttatgtctttcaaacttatgaatgactttttaggatatattgtattgaggttccttttatagtaccaaaactgtcttacatactaagttttcctttatgtggctcttgcaatctgtttgctatcgagtttctcctaactcctgggattttctgatggtacaggttgattactgaaatattttctttaatattctactccataccttccaaattataaattgttttagatacacagatcttgttatgcacctagatatatataatatatttacaatttcgaatggaggtagtaaaacattgaatatttcctcatttcctaaacaagaccggagagctgtcatatgttagaagtaaaagttatgtcttatccacgtgtgcacaattgaaatggtatgctttacgtagttggtttacatgaaaaaattgtattaatgacaaggctagatttgtgatcaagttatatttcctttttaatgtcattgtttattataatccacatcatatttcgtattttaccgttaacatctctcttcagttacagatgatgcaatatgtaaagataggcttcagcatatgagacaacatagagattagaatttctacatgtgtaaagtcagcaaggactttgtaattgatgcagcttttacagaacacgcttctcgcttttttaaccacagttgtcaacctaactgtcggctggagaaatggaatcagagggtctgctttgggccctcaatttgttgctaaaccacttgcacctgataaccctccactgaaggtaagatttattgacaacatcgatcctggtgggattgatcatcaaattgctcaactaggatctcaactggcaactagctactcttgtaattgtcatttctaaggtacataaagatcccaaactttcttattttgttgatattctcccagctgcagcatgagcttataagtagctgcgattcttggttttgcattgctttaccagggacaaaattatgtagccctttgttactggttgagttagtgtctctctgtatgtagcctaagaaaaagaccaaaactgttgttgagaagtattgggattgggagctttcaaatgagacacaacctatttggctaagatccatctttgttctttttattgatataatcatggttgtctaagcatgtatttttggaaatgtcaatgcctgaggcttatgtggtaatcatgcctttttttggtgttgtatcaaacctggaaatgtacccttgtgaattggaaactctaggtaatagagttctgttctatttttttatgggcagtacaacactgcaatctctacagctttgatgcaccttcttgctaagagctagcactgacgaatgcttctgttagtacaccagtcagatctttttggatcttgtatgcttgattgtgcaaatttattgactgtatagcttgtcagtcgttgtaacattgccttcaaatatgccccagtgattttgaaattttaggcaacaaagaatatagttacattgaaatgcgacaaacttgtttgcatcatggctagaaattggagggaaagcattatcggacaatcatttaatttggcttagttacaggtgctttttaagtggtaacgcaagttgcagttcacacaaataacacctttgaatgtaatgtattatcacacaaggctccagtgagttgtgttctatttgtttcttttctatttggcagtataatacttaatctttatgtttttgatgcacctgctaagcgctaccagtaccaaaaaggggttacattaaaatgtgatgtatcatgtatatattgttgggtctgcatgttgtgatcttcaagggcacaacaacttagatgaacccaagtcgaatatgattatgtatcctcttttactgttctatattagattacttcacaattgttgaatgatatttcgatggtcatatttgaatgttgtttgttatggaagaaagatgatattttggcactatatggtaccaagtttttattatcttgcaaaaaaatatctaaatgttactgacagatttcccatcagtctgttttggatcacttttccctttctttgattgtgtgccaaaagaggtgccatctttcaccatgaggccttacattttctgatggtgacaaactgacaatccattccaagtctatatgctcatattatttttagtatctttgtattttacttccgaaggggcgtgtttatatgatagaaaaagtattacaacactaagtctttgccaccagagtttagcagcaaattattttttgccatcatacatgcttagattttggaggcccaagtgagcaggccttcctgttatctagaacacaaaggccatttactccattgcagtggatggagttggagcaccaggctctcatgtacaatctcaatgcaatggccccggtaccgtaccttccagcctgctcatttcaatcagcaagaacttcatatcatccaatagagatatgcatattctgaatcataaggctaaggttctctacttcaaaactactagcatttgcaataaaacaaaaatagaagataaaaatattatttgcacaaatgaatgcctttgtaatgttacatggtaaataataatgttggcagctttgtagtatcagaaactacatgagccatttgctcattgtattggatgtttctatatctggagttgtgctgttagagtattaaagttctacactttacgatgtaatagtttgtagattcctctattcatattttttgagtttaggtaattaactttatggatcatcttaagtcctcatggttggggagtatgtactaacaactaaagtcaagactaggcaaaatgaatcaaacaagtaaagcgtgtggctgcctgtagcttactgacaaataaaaacgaatcaagttggcaccatagtaacacaagagaagctgtcattctccttttattccatatgattatgtgttatttcacagtttatgatggtaacagaacacttgagggagggggaactgctgaagcgtgtttcatcaagatccaagcagcacatgagctattgattcatgatgaaaggagaagggcatatgatagagaggatcatgtgaacccaatgaaggtcttataattttcttagccactcagattaccaccgtatcatgattcatcaactctaacatgcgtgagccaacactatgcttctccacttcaggacatggatatgactcttctatgtttaagccactacaacttggtgtatttatgccaaagattttttgagcactaacacaccaaaccagcgcctatgaagtgcttttgaacttcagacatgatgtaaagatgaaccggagcatcaagcagcagctgggtgcctcttcactgatagtagatctctaatatagtgatgtatgttctatactttgaggttagcttttcccctctggtcccctttgttggagaaactgttgtacttcagttaagagataagttttcagagtaatttctcctaatcagtttagtagaggtttcaggttcactaacctgagcagtgatcaggcttttagcttatttatttatgttgtgcaacgctggaatggtttcgaatgcaaaattgtcgctgctgttgccgcattgccgtcttaactcgcaggggctgcatgctgatatcggtgtttgaacggaaagaggactcacaacaagaaatgaatgaacgatgttccat

SEQ ID NO: 73194 - DNA, 2816 bp, Zea Mays
cttaagcagtggttacagaagataatatatgtaatatccaatgaattctttctctaatgtgttttttgcatattatgactatcttatgtctttcaaacttatgaatgactttttaggatatattgtattgaggttccttttatagtaccaaaactgtcttacatactaagttttcctttatgtggctcttgcaatctgtttgctatcgagtttctcctaactcctgggattttctgatggtacaggttgattactgaaatattttctttaatattctactccataccttccaaattataaattgttttagatacacagatcttgttatgcacctagatatatataatatatttacaatttcgaatggaggtagtaaaacattgaatatttcctcatttcctaaacaagaccggagagctgtcatatgttagaagtaaaagttatgtcttatccacgtgtgcacaattgaaatggtatgctttacgtagttggtttacatgaaaaaattgtattaatgacaaggctagatttgtgatcaagttatatttcctttttaatgtcattgtttattataatccacatcatatttcgtattttaccgttaacatctctcttcagttacagatgatgcaatatgtaaagataggcttcagcatatgagacaacatagagattagaatttctacatgtgtaaagtcagcaaggactttgtaattgatgcagcttttacagaacacgcttctcgcttttttaaccacagttgtcaacctaactgtcggctggagaaatggaatcagagggtctgctttgggccctcaatttgttgctaaaccacttgcacctgataaccctccactgaaggtaagatttattgacaacatcgatcctggtgggattgatcatcaaattgctcaactaggatctcaactggcaactagctactcttgtaattgtcatttctaagattttggaggcccaagtgagcaggccttcctgttatctagaacacaaaggccatttactccattgcagtggatggagttggagcaccaggctctcatgtacaatctcaatgcaatggccccggtaccgtaccttccagcctgctcatttcaatcagcaagaacttcatatcatccaatagagatatgcatattctgaatcataaggctaaggttctctacttcaaaactactagcatttgcaataaaacaaaaatagaagataaaaatattatttgcacaaatgaatgcctttgtaatgttacatggtaaataataatgttggcagctttgtagtatcagaaactacatgagccatttgctcattgtattggatgtttctatatctggagttgtgctgttagagtattaaagttctacactttacgatgtaatagtttgtagattcctctattcatattttttgagtttaggtaattaactttatggatcatcttaagtcctcatggttggggagtatgtactaacaactaaagtcaagactaggcaaaatgaatcaaacaagtaaagcgtgtggctgcctgtagcttactgacaaataaaaacgaatcaagttggcaccatagtaacacaagagaagctgtcattctccttttattccatatgattatgtgttatttcacagtttatgatggtaacagaacacttgagggagggggaactgctgaagcgtgtttcatcaagatccaagcagcacatgagctattgattcatgatgaaaggagaagggcatatgatagagaggatcatgtgaacccaatgaaggtcttataattttcttagccactcagattaccaccgtatcatgattcatcaactctaacatgcgtgagccaacactatgcttctccacttcaggacatggatatgactcttctatgtttaagccactacaacttggtgtatttatgccaaagattttttgagcactaacacaccaaaccagcgcctatgaagtgcttttgtatgatcaccttcttcttgcaccatccatggataatctacgtagctgcaaacagtcttagttacatattactgtactgaacatcctttcatagactacttgtacactgcctttttagaaccgttgtaaaacctcatgcgatacgtctgcgcctttgaaacagagatcaactgaacaacctgttcaatgtttccttctattgcatatgtattctgttgtcatactatgtccaacaatgcatttatattgctacaatatgtttatacttgatgcatgtgatacaaatccgttatttatacatacaaagacaagctcttctgacaccatagggcgccgcggagcgcaccccttttttctagtaagtttaacgttgcagttgctgaaggtgattgaatagaactcctgatttttttgtgttctatctaggaacttcagacatgatgtaaagatgaaccggagcatcaagcagcagctgggtgcctcttcactgatagtagatctctaatatagtgatgtatgttctatactttgaggttagcttttcccctctggtcccctttgttggagaaactgttgtacttcagttaagagataagttttcagagtaatttctcctaatcagtttagtagaggtttcaggttcactaacctgagcagtgatcaggcttttagcttatttatttatgttgtgcaacgctggaatggtttcgaatgcaaaattgtcgctgctgttgccgcattgccgtcttaactcgcaggggctgcatgctgatatcggtgtttgaacggaaagaggactcacaacaagaaatgaatgaacgatgttccat

SEQ ID NO: 73195 - DNA, 2790 bp, Zea Mays
cttaagcagtggttacagaagataatatatgtaatatccaatgaattctttctctaatgtgttttttgcatattatgactatcttatgtctttcaaacttatgaatgactttttaggatatattgtattgaggttccttttatagtaccaaaactgtcttacatactaagttttcctttatgtggctcttgcaatctgtttgctatcgagtttctcctaactcctgggattttctgatggtacaggttgattactgaaatattttctttaatattctactccataccttccaaattataaattgttttagatacacagatcttgttatgcacctagatatatataatatatttacaatttcgaatggaggtagtaaaacattgaatatttcctcatttcctaaacaagaccggagagctgtcatatgttagaagtaaaagttatgtcttatccacgtgtgcacaattgaaatggtatgctttacgtagttggtttacatgaaaaaattgtattaatgacaaggctagatttgtgatcaagttatatttcctttttaatgtcattgtttattataatccacatcatatttcgtattttaccgttaacatctctcttcagttacagatgatgcaatatgtaaagataggcttcagcatatgagacaacatagagattagaatttctacatgtgtaaagtcagcaaggactttgtaattgatgcagcttttacagaacacgcttctcgcttttttaaccacagttgtcaacctaactgtcggctggagaaatggaatcagagggtctgctttgggccctcaatttgttgctaaaccacttgcacctgataaccctccactgaaggtaagatttattgacaacatcgatcctggtgggattgatcatcaaattgctcaactaggatctcaactggcaactagctactcttgtaattgtcatttctaagattttggaggcccaagtgagcaggccttcctgttatctagaacacaaaggccatttactccattgcagtggatggagttggagcaccaggctctcatgtacaatctcaatgcaatggccccggtaccgtaccttccagcctgctcatttcaatcagcaagaacttcatatcatccaatagagatatgcatattctgaatcataaggctaaggttctctacttcaaaactactagcatttgcaataaaacaaaaatagaagataaaaatattatttgcacaaatgaatgcctttgtaatgttacatggtaaataataatgttggcagctttgtagtatcagaaactacatgagccatttgctcattgtattggatgtttctatatctggagttgtgctgttagagtattaaagttctacactttacgatgtaatagtttgtagattcctctattcatattttttgagtttaggtaattaactttatggatcatcttaagtcctcatggttggggagtatgtactaacaactaaagtcaagactaggcaaaatgaatcaaacaagtaaagcgtgtggctgcctgtagcttactgacaaataaaaacgaatcaagttggcaccatagtaacacaagagaagctgtcattctccttttattccatatgattatgtgttatttcacagtttatgatggtaacagaacacttgagggagggggaactgctgaagcgtgtttcatcaagatccaagcagcacatgagctattgattcatgatgaaaggagaagggcatatgatagagaggatcatgtgaacccaatgaagattaccaccgtatcatgattcatcaactctaacatgcgtgagccaacactatgcttctccacttcaggacatggatatgactcttctatgtttaagccactacaacttggtgtatttatgccaaagattttttgagcactaacacaccaaaccagcgcctatgaagtgcttttgtatgatcaccttcttcttgcaccatccatggataatctacgtagctgcaaacagtcttagttacatattactgtactgaacatcctttcatagactacttgtacactgcctttttagaaccgttgtaaaacctcatgcgatacgtctgcgcctttgaaacagagatcaactgaacaacctgttcaatgtttccttctattgcatatgtattctgttgtcatactatgtccaacaatgcatttatattgctacaatatgtttatacttgatgcatgtgatacaaatccgttatttatacatacaaagacaagctcttctgacaccatagggcgccgcggagcgcaccccttttttctagtaagtttaacgttgcagttgctgaaggtgattgaatagaactcctgatttttttgtgttctatctaggaacttcagacatgatgtaaagatgaaccggagcatcaagcagcagctgggtgcctcttcactgatagtagatctctaatatagtgatgtatgttctatactttgaggttagcttttcccctctggtcccctttgttggagaaactgttgtacttcagttaagagataagttttcagagtaatttctcctaatcagtttagtagaggtttcaggttcactaacctgagcagtgatcaggcttttagcttatttatttatgttgtgcaacgctggaatggtttcgaatgcaaaattgtcgctgctgttgccgcattgccgtcttaactcgcaggggctgcatgctgatatcggtgtttgaacggaaagaggactcacaacaagaaatgaatgaacgatgttccat

SEQ ID NO: 73196 - DNA, 2239 bp, Zea Mays
cttaagcagtggttacagaagataatatatgtaatatccaatgaattctttctctaatgtgttttttgcatattatgactatcttatgtctttcaaacttatgaatgactttttaggatatattgtattgaggttccttttatagtaccaaaactgtcttacatactaagttttcctttatgtggctcttgcaatctgtttgctatcgagtttctcctaactcctgggattttctgatggtacaggttgattactgaaatattttctttaatattctactccataccttccaaattataaattgttttagatacacagatcttgttatgcacctagatatatataatatatttacaatttcgaatggaggtagtaaaacattgaatatttcctcatttcctaaacaagaccggagagctgtcatatgttagaagtaaaagttatgtcttatccacgtgtgcacaattgaaatggtatgctttacgtagttggtttacatgaaaaaattgtattaatgacaaggctagatttgtgatcaagttatatttcctttttaatgtcattgtttattataatccacatcatatttcgtattttaccgttaacatctctcttcagttacagatgatgcaatatgtaaagataggcttcagcatatgagacaacatagagattagaatttctacatgtgtaaagtcagcaaggactttgtaattgatgcagcttttacagaacacgcttctcgcttttttaaccacagttgtcaacctaactgtcggctggagaaatggaatcagagggtctgctttgggccctcaatttgttgctaaaccacttgcacctgataaccctccactgaaggtaagatttattgacaacatcgatcctggtgggattgatcatcaaattgctcaactaggatctcaactggcaactagctactcttgtaattgtcatttctaagattttggaggcccaagtgagcaggccttcctgttatctagaacacaaaggccatttactccattgcagtggatggagttggagcaccaggctctcatgtacaatctcaatgcaatggccccgaacacttgagggagggggaactgctgaagcgtgtttcatcaagatccaagcagcacatgagctattgattcatgatgaaaggagaagggcatatgatagagaggatcatgtgaacccaatgaaggtcttataattttcttagccactcagattaccaccgtatcatgattcatcaactctaacatgcgtgagccaacactatgcttctccacttcaggacatggatatgactcttctatgtttaagccactacaacttggtgtatttatgccaaagattttttgagcactaacacaccaaaccagcgcctatgaagtgcttttgtatgatcaccttcttcttgcaccatccatggataatctacgtagctgcaaacagtcttagttacatattactgtactgaacatcctttcatagactacttgtacactgcctttttagaaccgttgtaaaacctcatgcgatacgtctgcgcctttgaaacagagatcaactgaacaacctgttcaatgtttccttctattgcatatgtattctgttgtcatactatgtccaacaatgcatttatattgctacaatatgtttatacttgatgcatgtgatacaaatccgttatttatacatacaaagacaagctcttctgacaccatagggcgccgcggagcgcaccccttttttctagtaagtttaacgttgcagttgctgaaggtgattgaatagaactcctgatttttttgtgttctatctaggaacttcagacatgatgtaaagatgaaccggagcatcaagcagcagctgggtgcctcttcactgatagtagatctctaatatagtgatgtatgttctatactttgaggttagcttttcccctctggtcccctttgttggagaaactgttgtacttcagttaagagataagttttcagagtaatttctcctaatcagtttagtagaggtttcaggttcactaacctgagcagtgatcaggcttttagcttatttatttatgttgtgcaacgctggaatggtttcgaatgcaaaattgtcgctgctgttgccgcattgccgtcttaactcgcaggggctgcatgctgatatcggtgtttgaacggaaagaggactcacaacaagaaatgaatgaacgatgttccat

SEQ ID NO: 73197 - DNA, 3796 bp, Zea Mays
cttaagcagtggttacagaagataatatatgtaatatccaatgaattctttctctaatgtgttttttgcatattatgactatcttatgtctttcaaacttatgaatgactttttaggatatattgtattgaggttccttttatagtaccaaaactgtcttacatactaagttttcctttatgtggctcttgcaatctgtttgctatcgagtttctcctaactcctgggattttctgatggtacaggttgattactgaaatattttctttaatattctactccataccttccaaattataaattgttttagatacacagatcttgttatgcacctagatatatataatatatttacaatttcgaatggaggtagtaaaacattgaatatttcctcatttcctaaacaagaccggagagctgtcatatgttagaagtaaaagttatgtcttatccacgtgtgcacaattgaaatggtatgctttacgtagttggtttacatgaaaaaattgtattaatgacaaggctagatttgtgatcaagttatatttcctttttaatgtcattgtttattataatccacatcatatttcgtattttaccgttaacatctctcttcagttacagatgatgcaatatgtaaagataggcttcagcatatgagacaacatagagattagaatttctacatgtgtaaagtcagcaaggactttgtaattgatgcagcttttacagaacacgcttctcgcttttttaaccacagttgtcaacctaactgtcggctggagaaatggaatcagagggtctgctttgggccctcaatttgttgctaaaccacttgcacctgataaccctccactgaaggtaagatttattgacaacatcgatcctggtgggattgatcatcaaattgctcaactaggatctcaactggcaactagctactcttgtaattgtcatttctaaggtacataaagatcccaaactttcttattttgttgatattctcccagctgcagcatgagcttataagtagctgcgattcttggttttgcattgctttaccagggacaaaattatgtagccctttgttactggttgagttagtgtctctctgtatgtagcctaagaaaaagaccaaaactgttgttgagaagtattgggattgggagctttcaaatgagacacaacctatttggctaagatccatctttgttctttttattgatataatcatggttgtctaagcatgtatttttggaaatgtcaatgcctgaggcttatgtggtaatcatgcctttttttggtgttgtatcaaacctggaaatgtacccttgtgaattggaaactctaggtaatagagttctgttctatttttttatgggcagtacaacactgcaatctctacagctttgatgcaccttcttgctaagagctagcactgacgaatgcttctgttagtacaccagtcagatctttttggatcttgtatgcttgattgtgcaaatttattgactgtatagcttgtcagtcgttgtaacattgccttcaaatatgccccagtgattttgaaattttaggcaacaaagaatatagttacattgaaatgcgacaaacttgtttgcatcatggctagaaattggagggaaagcattatcggacaatcatttaatttggcttagttacaggtgctttttaagtggtaacgcaagttgcagttcacacaaataacacctttgaatgtaatgtattatcacacaaggctccagtgagttgtgttctatttgtttcttttctatttggcagtataatacttaatctttatgtttttgatgcacctgctaagcgctaccagtaccaaaaaggggttacattaaaatgtgatgtatcatgtatatattgttgggtctgcatgttgtgatcttcaagggcacaacaacttagatgaacccaagtcgaatatgattatgtatcctcttttactgttctatattagattacttcacaattgttgaatgatatttcgatggtcatatttgaatgttgtttgttatggaagaaagatgatattttggcactatatggtaccaagtttttattatcttgcaaaaaaatatctaaatgttactgacagatttcccatcagtctgttttggatcacttttccctttctttgattgtgtgccaaaagaggtgccatctttcaccatgaggccttacattttctgatggtgacaaactgacaatccattccaagtctatatgctcatattatttttagtatctttgtattttacttccgaaggggcgtgtttatatgatagaaaaagtattacaacactaagtctttgccaccagagtttagcagcaaattattttttgccatcatacatgcttagattttggaggcccaagtgagcaggccttcctgttatctagaacacaaaggccatttactccattgcagtggatggagttggagcaccaggctctcatgtacaatctcaatgcaatggccccggtaccgtaccttccagcctgctcatttcaatcagcaagaacttcatatcatccaatagagatatgcatattctgaatcataaggctaaggttctctacttcaaaactactagcatttgcaataaaacaaaaatagaagataaaaatattatttgcacaaatgaatgcctttgtaatgttacatggtaaataataatgttggcagctttgtagtatcagaaactacatgagccatttgctcattgtattggatgtttctatatctggagttgtgctgttagagtattaaagttctacactttacgatgtaatagtttgtagattcctctattcatattttttgagtttaggtaattaactttatggatcatcttaagtcctcatggttggggagtatgtactaacaactaaagtcaagactaggcaaaatgaatcaaacaagtaaagcgtgtggctgcctgtagcttactgacaaataaaaacgaatcaagttggcaccatagtaacacaagagaagctgtcattctccttttattccatatgattatgtgttatttcacagtttatgatggtaacagaacacttgagggagggggaactgctgaagcgtgtttcatcaagatccaagcagcacatgagctattgattcatgatgaaaggagaagggcatatgatagagaggatcatgtgaacccaatgaagattaccaccgtatcatgattcatcaactctaacatgcgtgagccaacactatgcttctccacttcaggacatggatatgactcttctatgtttaagccactacaacttggtgtatttatgccaaagattttttgagcactaacacaccaaaccagcgcctatgaagtgcttttgaacttcagacatgatgtaaagatgaaccggagcatcaagcagcagctgggtgcctcttcactgatagtagatctctaatatagtgatgtatgttctatactttgaggttagcttttcccctctggtcccctttgttggagaaactgttgtacttcagttaagagataagttttcagagtaatttctcctaatcagtttagtagaggtttcaggttcactaacctgagcagtgatcaggcttttagcttatttatttatgttgtgcaacgctggaatggtttcgaatgcaaaattgtcgctgctgttgccgcattgccgtcttaactcgcaggggctgcatgctgatatcggtgtttgaacggaaagaggactcacaacaagaaatgaatgaacgatgttccat

SEQ ID NO: 73198 - DNA, 2877 bp, Zea Mays
atgagggtctgctttgggccctcaatttgttgctaaaccacttgcacctgataaccctccactgaaggtaagatttattgacaacatcgatcctggtgggattgatcatcaaattgctcaactaggatctcaactggcaactagctactcttgtaattgtcatttctaaggtacataaagatcccaaactttcttattttgttgatattctcccagctgcagcatgagcttataagtagctgcgattcttggttttgcattgctttaccagggacaaaattatgtagccctttgttactggttgagttagtgtctctctgtatgtagcctaagaaaaagaccaaaactgttgttgagaagtattgggattgggagctttcaaatgagacacaacctatttggctaagatccatctttgttctttttattgatataatcatggttgtctaagcatgtatttttggaaatgtcaatgcctgaggcttatgtggtaatcatgcctttttttggtgttgtatcaaacctggaaatgtacccttgtgaattggaaactctaggtaatagagttctgttctatttttttatgggcagtacaacactgcaatctctacagctttgatgcaccttcttgctaagagctagcactgacgaatgcttctgttagtacaccagtcagatctttttggatcttgtatgcttgattgtgcaaatttattgactgtatagcttgtcagtcgttgtaacattgccttcaaatatgccccagtgattttgaaattttaggcaacaaagaatatagttacattgaaatgcgacaaacttgtttgcatcatggctagaaattggagggaaagcattatcggacaatcatttaatttggcttagttacaggtgctttttaagtggtaacgcaagttgcagttcacacaaataacacctttgaatgtaatgtattatcacacaaggctccagtgagttgtgttctatttgtttcttttctatttggcagtataatacttaatctttatgtttttgatgcacctgctaagcgctaccagtaccaaaaaggggttacattaaaatgtgatgtatcatgtatatattgttgggtctgcatgttgtgatcttcaagggcacaacaacttagatgaacccaagtcgaatatgattatgtatcctcttttactgttctatattagattacttcacaattgttgaatgatatttcgatggtcatatttgaatgttgtttgttatggaagaaagatgatattttggcactatatggtaccaagtttttattatcttgcaaaaaaatatctaaatgttactgacagatttcccatcagtctgttttggatcacttttccctttctttgattgtgtgccaaaagaggtgccatctttcaccatgaggccttacattttctgatggtgacaaactgacaatccattccaagtctatatgctcatattatttttagtatctttgtattttacttccgaaggggcgtgtttatatgatagaaaaagtattacaacactaagtctttgccaccagagtttagcagcaaattattttttgccatcatacatgcttagattttggaggcccaagtgagcaggccttcctgttatctagaacacaaaggccatttactccattgcagtggatggagttggagcaccaggctctcatgtacaatctcaatgcaatggccccgaacacttgagggagggggaactgctgaagcgtgtttcatcaagatccaagcagcacatgagctattgattcatgatgaaaggagaagggcatatgatagagaggatcatgtgaacccaatgaaggtcttataattttcttagccactcagattaccaccgtatcatgattcatcaactctaacatgcgtgagccaacactatgcttctccacttcaggacatggatatgactcttctatgtttaagccactacaacttggtgtatttatgccaaagattttttgagcactaacacaccaaaccagcgcctatgaagtgcttttgtatgatcaccttcttcttgcaccatccatggataatctacgtagctgcaaacagtcttagttacatattactgtactgaacatcctttcatagactacttgtacactgcctttttagaaccgttgtaaaacctcatgcgatacgtctgcgcctttgaaacagagatcaactgaacaacctgttcaatgtttccttctattgcatatgtattctgttgtcatactatgtccaacaatgcatttatattgctacaatatgtttatacttgatgcatgtgatacaaatccgttatttatacatacaaagacaagctcttctgacaccatagggcgccgcggagcgcaccccttttttctagtaagtttaacgttgcagttgctgaaggtgattgaatagaactcctgatttttttgtgttctatctaggaacttcagacatgatgtaaagatgaaccggagcatcaagcagcagctgggtgcctcttcactgatagtagatctctaatatagtgatgtatgttctatactttgaggttagcttttcccctctggtcccctttgttggagaaactgttgtacttcagttaagagataagttttcagagtaatttctcctaatcagtttagtagaggtttcaggttcactaacctgagcagtgatcaggcttttagcttatttatttatgttgtgcaacgctggaatggtttcgaatgcaaaattgtcgctgctgttgccgcattgccgtcttaactcgcaggggctgcatgctgatatcggtgtttgaacggaaagaggactcacaacaagaaatgaatgaacgatgttccat

SEQ ID NO: 73199 - DNA, 2014 bp, Zea Mays
caaacttgtttgcatcatggctagaaattggagggaaagcattatcggacaatcatttaatttggcttagttacaggtgctttttaagtggtaacgcaagttgcagttcacacaaataacacctttgaatgtaatgtattatcacacaaggctccagtgagttgtgttctatttgtttcttttctatttggcagtataatacttaatctttatgtttttgatgcacctgctaagcgctaccagtaccaaaaaggggttacattaaaatgtgatgtatcatgtatatattgttgggtctgcatgttgtgatcttcaagggcacaacaacttagatgaacccaagtcgaatatgattatgtatcctcttttactgttctatattagattacttcacaattgttgaatgatatttcgatggtcatatttgaatgttgtttgttatggaagaaagatgatattttggcactatatggtaccaagtttttattatcttgcaaaaaaatatctaaatgttactgacagatttcccatcagtctgttttggatcacttttccctttctttgattgtgtgccaaaagaggtgccatctttcaccatgaggccttacattttctgatggtgacaaactgacaatccattccaagtctatatgctcatattatttttagtatctttgtattttacttccgaaggggcgtgtttatatgatagaaaaagtattacaacactaagtctttgccaccagagtttagcagcaaattattttttgccatcatacatgcttagattttggaggcccaagtgagcaggccttcctgttatctagaacacaaaggccatttactccattgcagtggatggagttggagcaccaggctctcatgtacaatctcaatgcaatggccccggtaccgtaccttccagcctgctcatttcaatcagcaagaacttcatatcatccaatagagatatgcatattctgaatcataaggctaaggttctctacttcaaaactactagcatttgcaataaaacaaaaatagaagataaaaatattatttgcacaaatgaatgcctttgtaatgttacatggtaaataataatgttggcagctttgtagtatcagaaactacatgagccatttgctcattgtattggatgtttctatatctggagttgtgctgttagagtattaaagttctacactttacgatgtaatagtttgtagattcctctattcatattttttgagtttaggtaattaactttatggatcatcttaagtcctcatggttggggagtatgtactaacaactaaagtcaagactaggcaaaatgaatcaaacaagtaaagcgtgtggctgcctgtagcttactgacaaataaaaacgaatcaagttggcaccatagtaacacaagagaagctgtcattctccttttattccatatgattatgtgttatttcacagtttatgatggtaacagaacacttgagggagggggaactgctgaagcgtgtttcatcaagatccaagcagcacatgagctattgattcatgatgaaaggagaagggcatatgatagagaggatcatgtgaacccaatgaaggaacttcagacatgatgtaaagatgaaccggagcatcaagcagcagctgggtgcctcttcactgatagtagatctctaatatagtgatgtatgttctatactttgaggttagcttttcccctctggtcccctttgttggagaaactgttgtacttcagttaagagataagttttcagagtaatttctcctaatcagtttagtagaggtttcaggttcactaacctgagcagtgatcaggcttttagcttatttatttatgttgtgcaacgctggaatggtttcgaatgcaaaattgtcgctgctgttgccgcattgccgtcttaactcgcaggggctgcatgctgatatcggtgtttgaacggaaagaggactcacaacaagaaatgaatgaacgatgttccat

SEQ ID NO: 73200 - DNA, 1931 bp, Zea Mays
gttcacacaaataacacctttgaatgtaatgtattatcacacaaggctccagtgagttgtgttctatttgtttcttttctatttggcagtataatacttaatctttatgtttttgatgcacctgctaagcgctaccagtaccaaaaaggggttacattaaaatgtgatgtatcatgtatatattgttgggtctgcatgttgtgatcttcaagggcacaacaacttagatgaacccaagtcgaatatgattatgtatcctcttttactgttctatattagattacttcacaattgttgaatgatatttcgatggtcatatttgaatgttgtttgttatggaagaaagatgatattttggcactatatggtaccaagtttttattatcttgcaaaaaaatatctaaatgttactgacagatttcccatcagtctgttttggatcacttttccctttctttgattgtgtgccaaaagaggtgccatctttcaccatgaggccttacattttctgatggtgacaaactgacaatccattccaagtctatatgctcatattatttttagtatctttgtattttacttccgaaggggcgtgtttatatgatagaaaaagtattacaacactaagtctttgccaccagagtttagcagcaaattattttttgccatcatacatgcttagattttggaggcccaagtgagcaggccttcctgttatctagaacacaaaggccatttactccattgcagtggatggagttggagcaccaggctctcatgtacaatctcaatgcaatggccccgaacacttgagggagggggaactgctgaagcgtgtttcatcaagatccaagcagcacatgagctattgattcatgatgaaaggagaagggcatatgatagagaggatcatgtgaacccaatgaagattaccaccgtatcatgattcatcaactctaacatgcgtgagccaacactatgcttctccacttcaggacatggatatgactcttctatgtttaagccactacaacttggtgtatttatgccaaagattttttgagcactaacacaccaaaccagcgcctatgaagtgcttttgtatgatcaccttcttcttgcaccatccatggataatctacgtagctgcaaacagtcttagttacatattactgtactgaacatcctttcatagactacttgtacactgcctttttagaaccgttgtaaaacctcatgcgatacgtctgcgcctttgaaacagagatcaactgaacaacctgttcaatgtttccttctattgcatatgtattctgttgtcatactatgtccaacaatgcatttatattgctacaatatgtttatacttgatgcatgtgatacaaatccgttatttatacatacaaagacaagctcttctgacaccatagggcgccgcggagcgcaccccttttttctagtaagtttaacgttgcagttgctgaaggtgattgaatagaactcctgatttttttgtgttctatctaggaacttcagacatgatgtaaagatgaaccggagcatcaagcagcagctgggtgcctcttcactgatagtagatctctaatatagtgatgtatgttctatactttgaggttagcttttcccctctggtcccctttgttggagaaactgttgtacttcagttaagagataagttttcagagtaatttctcctaatcagtttagtagaggtttcaggttcactaacctgagcagtgatcaggcttttagcttatttatttatgttgtgcaacgctggaatggtttcgaatgcaaaattgtcgctgctgttgccgcattgccgtcttaactcgcaggggctgcatgctgatatcggtgtttgaacggaaagaggactcacaacaagaaatgaatgaacgatgttccat

SEQ ID NO: 73201 - DNA, 2109 bp, Zea Mays
gtgagttgtgttctatttgtttcttttctatttggcagtataatacttaatctttatgtttttgatgcacctgctaagcgctaccagtaccaaaaaggggttacattaaaatgtgatgtatcatgtatatattgttgggtctgcatgttgtgatcttcaagggcacaacaacttagatgaacccaagtcgaatatgattatgtatcctcttttactgttctatattagattacttcacaattgttgaatgatatttcgatggtcatatttgaatgttgtttgttatggaagaaagatgatattttggcactatatggtaccaagtttttattatcttgcaaaaaaatatctaaatgttactgacagatttcccatcagtctgttttggatcacttttccctttctttgattgtgtgccaaaagaggtgccatctttcaccatgaggccttacattttctgatggtgacaaactgacaatccattccaagtctatatgctcatattatttttagtatctttgtattttacttccgaaggggcgtgtttatatgatagaaaaagtattacaacactaagtctttgccaccagagtttagcagcaaattattttttgccatcatacatgcttagattttggaggcccaagtgagcaggccttcctgttatctagaacacaaaggccatttactccattgcagtggatggagttggagcaccaggctctcatgtacaatctcaatgcaatggccccgtttatgatggtaacagaacacttgagggagggggaactgctgaagcgtgtttcatcaagatccaagcagcacatgagctattgattcatgatgaaaggagaagggcatatgatagagaggatcatgtgaacccaatgaaggtcttataattttcttagccactcaggttatcatttcattttgtgcaagatgcagttccactccagttttattcttatttgtagttaacttttgttggtttctaagtttaggatttaatccatgtggaataaacgaataaacatagctgcttggattgcttaggttattttgctacataattgctctgatagtgtccctctattgtgtttcagattaccaccgtatcatgattcatcaactctaacatgcgtgagccaacactatgcttctccacttcaggacatggatatgactcttctatgtttaagccactacaacttggtgtatttatgccaaagattttttgagcactaacacaccaaaccagcgcctatgaagtgcttttgtatgatcaccttcttcttgcaccatccatggataatctacgtagctgcaaacagtcttagttacatattactgtactgaacatcctttcatagactacttgtacactgcctttttagaaccgttgtaaaacctcatgcgatacgtctgcgcctttgaaacagagatcaactgaacaacctgttcaatgtttccttctattgcatatgtattctgttgtcatactatgtccaacaatgcatttatattgctacaatatgtttatacttgatgcatgtgatacaaatccgttatttatacatacaaagacaagctcttctgacaccatagggcgccgcggagcgcaccccttttttctagtaagtttaacgttgcagttgctgaaggtgattgaatagaactcctgatttttttgtgttctatctaggaacttcagacatgatgtaaagatgaaccggagcatcaagcagcagctgggtgcctcttcactgatagtagatctctaatatagtgatgtatgttctatactttgaggttagcttttcccctctggtcccctttgttggagaaactgttgtacttcagttaagagataagttttcagagtaatttctcctaatcagtttagtagaggtttcaggttcactaacctgagcagtgatcaggcttttagcttatttatttatgttgtgcaacgctggaatggtttcgaatgcaaaattgtcgctgctgttgccgcattgccgtcttaactcgcaggggctgcatgctgatatcggtgtttgaacggaaagaggactcacaacaagaaatgaatgaacgatgttccat

SEQ ID NO: 73202 - DNA, 1462 bp, Zea Mays
gcagtataatacttaatctttatgtttttgatgcacctgctaagcgctaccagtaccaaaaaggggttacattaaaatgtgatgtatcatgtatatattgttgggtctgcatgttgtgatcttcaagggcacaacaacttagatgaacccaagtcgaatatgattatgtatcctcttttactgttctatattagattacttcacaattgttgaatgatatttcgatggtcatatttgaatgttgtttgttatggaagaaagatgatattttggcactatatggtaccaagtttttattatcttgcaaaaaaatatctaaatgttactgacagatttcccatcagtctgttttggatcacttttccctttctttgattgtgtgccaaaagaggtgccatctttcaccatgaggccttacattttctgatggtgacaaactgacaatccattccaagtctatatgctcatattatttttagtatctttgtattttacttccgaaggggcgtgtttatatgatagaaaaagtattacaacactaagtctttgccaccagagtttagcagcaaattattttttgccatcatacatgcttagattttggaggcccaagtgagcaggccttcctgttatctagaacacaaaggccatttactccattgcagtggatggagttggagcaccaggctctcatgtacaatctcaatgcaatggccccgtttatgatggtaacagaacacttgagggagggggaactgctgaagcgtgtttcatcaagatccaagcagcacatgagctattgattcatgatgaaaggagaagggcatatgatagagaggatcatgtgaacccaatgaaggtcttataattttcttagccactcagattaccaccgtatcatgattcatcaactctaacatgcgtgagccaacactatgcttctccacttcaggacatggatatgactcttctatgtttaagccactacaacttggtgtatttatgccaaagattttttgagcactaacacaccaaaccagcgcctatgaagtgcttttgaacttcagacatgatgtaaagatgaaccggagcatcaagcagcagctgggtgcctcttcactgatagtagatctctaatatagtgatgtatgttctatactttgaggttagcttttcccctctggtcccctttgttggagaaactgttgtacttcagttaagagataagttttcagagtaatttctcctaatcagtttagtagaggtttcaggttcactaacctgagcagtgatcaggcttttagcttatttatttatgttgtgcaacgctggaatggtttcgaatgcaaaattgtcgctgctgttgccgcattgccgtcttaactcgcaggggctgcatgctgatatcggtgtttgaacggaaagaggactcacaacaagaaatgaatgaacgatgttccat

SEQ ID NO: 73203 - DNA, 1734 bp, Zea Mays
ccaccactgaccgaggtccaccaggcccatcccgcgccgcgtgacgcgacccacgcagtagctgacgcttcggacccgctgctggtggggtccaagtgtcagtgagtgcgaaagacagcgaaaaagggcagtgagggtgagggtgagggtgagaccgagcccctcgtcagtcgtcacgccgaccgagcgctggccgccaccactcctcgaggcgagcaccagcaggaggggcagggcaacgactcctgggcatattgatcattctgcaagggtcatgaaaataattacatggaatagatcctttaaaggaatgcaaaatggcgatgatgggaaagatgacttcgaaaatgatgaattggagaccttggcaactgtagttgataaaatcttagcatgggagaaaaagctctatgatgaagtgaaggctggtgagattatgaagcttgagtatcagaggaaggttgctttgttaaatagacaaaagaaacacaatgctgccattgaggttcttgagaaaacgaaagctgcggtaacccacttacatactagatacatagttgatatgcaatcaatggattcaactgtgtcagaaattcagtatctccgtgataaccaactgtacccaagactattggatcttactgaccggatggcaaaaatgtgggaggacatgaagatacatcacgcaaatcagctgaaaattgtcctaaatctgaagtctgttgatattcctgattccaatattgaaacaagtgattatcaccacagccacacacggcagctgcgtgatattgtagataagtggatcacaaattttactgacttcatgaactgtcaaaaggaatacataaatgctctctatggctggttgaagttgaaccttatacccatagagagcagcctgaaggagaaagtagcatcgccacctaggatgcagcaacctcctatcaaagcctttctttatgcctggcatgagcacctagccaagctgcctgatgatcttgccaagacagccattgtcacttttcgagcagtcttggataccatattgggtgttcaagatgaggagttgaaacagaaggagatctgtgagcagactcgtagggaatacatacgtaaggcccgggcttttgaggattggtgccacaagcatccacagcccagagcgatcgacgtcgatccagatagcggtgaggggacaggacataaggatgtagtcaccgagaagagattcgcagtggagagcttgaagagcaagcttgacgatgaaattgaatcccataataagctatcaaagcaggtcagggagaagtccctctcgatcctgaaggcacatctcccagagctgttccgtgctctgaccgacttctccgacgcctccttcgaaatgtactcgaagctgaggctgatgtcgttgatgcaggatcagggaaacaactagatggacagtatgttcagaagttaggatcagtaatatccctcccccaagtgttgtaatgcatgtgttctacccctttctgtggtatgtgtaaaaggctagtagctcattggatgaggattcttgtttaatttattggcttgatgaaaccatcgggtactttgtagtgtggacatatgctggatagttagcatgtgatgaactgattacaatctgtgggggtaaaagccgtcgtctatgtaaatgataaattttgttgagatatccagccgtccagttttttgaggcactcgtga

SEQ ID NO: 73204 - DNA, 5473 bp, Zea Mays
ctggggcggcgcggggagatggggtacgaggaaggggagctcgagctggaggagggcgaggcggcctccggcggcggccgtgagctggttattcccgacgcgctcacctgcatcgatgaaagaatccaaaatgtgttgggtcatttacgcaagaaatttgaaggtgaaataactcatatgaatttgggttcgatgtatggatgccatggttcgttcttgccaacatacccacgttcccctttgggctttcctcaatataggaacactgcagatccaaaaaaccatggcagtgcctcgagatccctgcatgtattaacagagaatgcgcaaaagaaccattttgttaagacggaattagacagcagcaggaaaaatgaatactgtcgaatatccaatgagagtgatggcaatcaacagatgttaaacagagcagtcattgggtctgagcagaaagcacgaaaaatacgtatcaagttgaacagcaataaaagtttgccaagaaatactgctgctatatatagtggcctgggcctagatatttccccttcatcatctgcagaagacaacctagatgagactgctggggctctggtgcctgaagttttgcctgatgaatctccacgtgccatacttgagataatgaccagccattatattcctggaggacacttgctctcacccctcaaggaaaatgttctagaattgaaacaaaagcctaaagtgatggtaaaacaagaagcacctgaatttcaagtcaaagtagaattgcatggagactggggctgtacaacctctgctactctggataacaaagataagtgtaccaaggaaatcaagtctgatgaaaagaaagacaagatccccattttcaggagttcaaaaatcagagttaacaaaccatctgctgtgaataagggaactaagcctttacaggatgttttagatgataccggttcaaacttgttgcctacaattgtaaatacagaacatacagttgaggagccagcgaaatttacaggtgcaatttcagataaaatgaagggatcgaaggatggtgcatcaaaaggacacattagtggcaagaacaaaaacattaaggaggaaccttcgcttgatcatggattttctcgtaaaaacagatgtgattctgatgagtacaatggtaaacctcatgccagttcatgtcagttgcaaaacattcccaacaaaacttcgccactggagagggacaaagggaaagtattgcatatggaagatgaaccatctcagtacaaaagcaaggaaaatggagacctgtttagtgcagattccatggctgtcatggtaggaaatgttgatagaaattctttagggatgatgaaagggaagaagaaagtttcttctttgcaagccaccctgtctgggaagttcaagttcaaggcaaaaaaacaattgaatgacaacattgatagaaaaaaatatggtgaagacgagcattatgctttagaccatagaattggtttggataattcatatcaaatagataagagtgtgaggcttgagaaaaagaccatctcatctggggagattgataacaagtcagatgttggaaatgatggtggtgtcaatatctctgccatgtttgatgagaaatcagatgttttgccattagcatctgcatccctgcctgctccagaacccattttaataaatgaacaatgggtgtgctgcgacaagtgtgagaattggcgccttttaccctatgggatgaatccagatatacttcccaaaaaatggcggtgtagcatgcagagttggctgcctggaatgaatagctgcaaaataactgaagacgagaccacaaaagcccttcgggcactttatatggttcctgcacctgaaaataacattaaggatggtggtcatgataatgctatgtcaggcaaaggtacagctattgctccaacttttcagggaaatacacagtccatcagttcactggggaagctaaaaggttcccttgatggagccaatgtggcaaatactttggagtcagctggtatgtcaaagccctcaaagaatctgcatgctccttcaagtagaaacttctctaaactgaaggaaaaaaggaagctggtggaatcatcagataaaggagaaattgttggaaaagaccaatcacgtcgaatgagaagcagtgtaggggttgatcatgataacctgcgagcatcaaagaaaatgaagaaagaatccaatggccctgtgatgaagcatcaaccctctgagtttgaaataagcaaaagtagtcctgccagtgagactctgaaaaacattcagaagcgcagttgcatttctcctggcatgggaaagtatggtttatcttcatcaggtaaacattctcatggtgaggataaagatttctcagctgtggtcattaaaacatcagatacagagaactctggccctcgagactcatccattaagaagagaaaactgaaacaaaggcagtcaagccagcattttcgggatccacactgtagcaacaatgacacaaatggtattacaaaacaaaatattactgaaattaatgctgtgaagaaaaaatccaggtcagaattgaatttgttaaagacagataggatagctactgattctagaggcacagttggtggagttgatgataggatatctactgataaggagtgtttaagtgagcaacttcaagaaaatacccatttccagcatccgtcactcgtagaaggcaccacaaagagggaaatccgtcatgcacaaacacctatagctgcgacttcgagttcatccaagatgtctaactccaacaagtatatagctcattttcaggaaacgagggcctctcctgtagagtcagtttcttcctcacccttgagatcttctgataagaatcctttgggtcgacatagaagctcttcatggacaattacagaaaatgtgcattctcaagagtcagggaagataaattcttcatgctcgaacagaaactatgatcttgggtctgattgtgataaagctaaggctcgtatttctggttgctttaacggagatgtgagtcatcatgttcagaaggatagggactttctgaaagataaacaagatgtgatgaacgcatgtcttataaacaaaggttctggatttggtgctagaaatttccagctgagtcctgaacataaagtcaatccagatgtcctttcatcacatgacaacgatggtcacaagcaaccaacagttcgtcagaatgggaaaacacagccccatttcggttcaaaccaaggtgaccatgcaaatttgacttatgggcatattaagcctggtaaagggaatataccaaataaggaccagaaaacaaatccatctgcagtcaaagcaagcaagcagcagccatccttaaacaatgcatcaaatggtgatgcctcttacaaggcaaggcaaatagaaaaggctgttattgaaaatttggacacgaggaagcacatcactctcaatggtgatgcttcaaatctaacaagtgcatctgttctactgaaggaagctcgagatttgaagcacttgtctaaacgtcttaaggaaaaaggggatgactttgagagtacaagcatgtgctttgaggcgggtctgaaatttctccatgttgcttctctgtgggagaccccaaacattgatagctccaatcaaggggtttctatacaagctatgaaactgtattccgaaacaggaatcctctttggattctgcgctcacgaatttgagcgactcaagaaaatggcgaatgctgctctggcatataaatgtgtggaagtggcatatatgaaggctgctttctttagaagtcctggtgtaattaaagatagacatgcattgcatgcagcatctttgatggttgctccagacatcgataatttaaataaccagagcacagttgctaaggctgtttctgcaagaggtgtatactctcctcagattgctagcaattccatatctcggaacaatcatcatttgatgggattgctttcttatgcagaggacacaaataattcatttgagggaaccagaaaatcacaaacttcattttcagcttatctttctggcattgggaagaatcaggtggatgaagttgctcttgtaaggaaagtacttgatttcagttttcataatgtcaagggattgctgcaactgattcgtcattcgttggagtctatcaaccatgaaagtggtaaatgatctaccaagtataggtatcttggaaaagagattaatgatgggaaggttgctttggcaactgtgctatacattggtacctcctccaatctggatgtagaagtaaacaagtttagagagtaatcagttgtgaatggaaagggttcacattgccttctcttggttgcatggaagtattatatgtgggtgatacaaatttcaccagcggcaaactgctaaaacgggtttctttaccaagtcatattgctacttttgttgcccggaatatttcttgtagatgatgactttgactagtgccgaactggcaaagggggttcttaccaagaattagcctgcaaatgttaattgctaagtccaacattcttggtttcagtgtctagtgaatgatcaaatccaagtcctcaatgggaatctaatatacatctaccatagtgttcgagggcagagtctcagttttctttccagggcgccagtgtaagcttaggtcagcacttttgtcctaaagtctccccaccttctattggccttgcggagaaggttctgacaggcaagactccaccaattgcttcagtctaatattttacaaatttgcggaggttcagtgaggattgtctgactccaatgataggtgtgtatataggccaactttttagttaattcctgccctttttctcgatacatgtgtgtatattatacgagaaaaggaagaaaacaattttgtcataattttagctaatggttgtaattattgttcagatgttgcaaaattcattctttggtggcctggaaaaaactagtctagccctaaaacttcatcattgtttaggcaccttataactataaatattcttagcgtttgattcattttttccttttggggctgacctaacaacaaatgttagatgatgacactatctgctgcctatctgagtgttgtttgggttcctgactgagcattaccattgtaacgagaaagcgatgtaaaagcccttgctgctgtgctgacgaaagaggattcctttccaatgttacacgatgagtccggttgatttgtgtaacatgttctcgtctccgtccagactgaaaaggcagtggctcgttgagctgtacggcatgaagccttctttccgattttaatactagttctgggtgtactgctccaaagagtagcatctctttgcagtaaaaatggtttgttctgttcaagtatgtgagagaacaagaatgcattgagtgtttt

SEQ ID NO: 73205 - DNA, 5155 bp, Zea Mays
ctggggcggcgcggggagatggggtacgaggaaggggagctcgagctggaggagggcgaggcggcctccggcggcggccgtgagctggttattcccgacgcgctcacctgcatcgatgaaagaatccaaaatgtgttgggtcatttacgcaagaaatttgaaggtgaaataactcatatgaatttgggttcgatgtatggatgccatggttcgttcttgccaacatacccacgttcccctttgggctttcctcaatataggaacactgcagatccaaaaaaccatggcagtgcctcgagatccctgcatgtattaacagagaatgcgcaaaagaaccattttgttaagacggaattagacagcagcaggaaaaatgaatactgtcgaatatccaatgagagtgatggcaatcaacagatgttaaacagagcagtcattgggtctgagcagaaagcacgaaaaatacgtatcaagttgaacagcaataaaagtttgccaagaaatactgctgctatatatagtggcctgggcctagatatttccccttcatcatctgcagaagacaacctagatgagactgctggggctctggtgcctgaagttttgcctgatgaatctccacgtgccatacttgagataatgaccagccattatattcctggaggacacttgctctcacccctcaaggaaaatgttctagaattgaaacaaaagcctaaagtgatggtaaaacaagaagcacctgaatttcaagtcaaagtagaattgcatggagactggggctgtacaacctctgctactctggataacaaagataagtgtaccaaggaaatcaagtctgatgaaaagaaagacaagatccccattttcaggagttcaaaaatcagagttaacaaaccatctgctgtgaataagggaactaagcctttacaggatgttttagatgataccggttcaaacttgttgcctacaattgtaaatacagaacatacagttgaggagccagcgaaatttacaggtgcaatttcagataaaatgaagggatcgaaggatggtgcatcaaaaggacacattagtggcaagaacaaaaacattaaggaggaaccttcgcttgatcatggattttctcgtaaaaacagatgtgattctgatgagtacaatggtaaacctcatgccagttcatgtcagttgcaaaacattcccaacaaaacttcgccactggagagggacaaagggaaagtattgcatatggaagatgaaccatctcagtacaaaagcaaggaaaatggagacctgtttagtgcagattccatggctgtcatggtaggaaatgttgatagaaattctttagggatgatgaaagggaagaagaaagtttcttctttgcaagccaccctgtctgggaagttcaagttcaaggcaaaaaaacaattgaatgacaacattgatagaaaaaaatatggtgaagacgagcattatgctttagaccatagaattggtttggataattcatatcaaatagataagagtgtgaggcttgagaaaaagaccatctcatctggggagattgataacaagtcagatgttggaaatgatggtggtgtcaatatctctgccatgtttgatgagaaatcagatgttttgccattagcatctgcatccctgcctgctccagaacccattttaataaatgaacaatgggtgtgctgcgacaagtgtgagaattggcgccttttaccctatgggatgaatccagatatacttcccaaaaaatggcggtgtagcatgcagagttggctgcctggaatgaatagctgcaaaataactgaagacgagaccacaaaagcccttcgggcactttatatggttcctgcacctgaaaataacattaaggatggtggtcatgataatgctatgtcaggcaaaggtacagctattgctccaacttttcagggaaatacacagtccatcagttcactggggaagctaaaaggttcccttgatggagccaatgtggcaaatactttggagtcagctggtatgtcaaagccctcaaagaatctgcatgctccttcaagtagaaacttctctaaactgaaggaaaaaaggaagctggtggaatcatcagataaaggagaaattgttggaaaagaccaatcacgtcgaatgagaagcagtgtaggggttgatcatgataacctgcgagcatcaaagaaaatgaagaaagaatccaatggccctgtgatgaagcatcaaccctctgagtttgaaataagcaaaagtagtcctgccagtgagactctgaaaaacattcagaagcgcagttgcatttctcctggcatgggaaagtatggtttatcttcatcaggtaaacattctcatggtgaggataaagatttctcagctgtggtcattaaaacatcagatacagagaactctggccctcgagactcatccattaagaagagaaaactgaaacaaaggcagtcaagccagcattttcgggatccacactgtagcaacaatgacacaaatggtattacaaaacaaaatattactgaaattaatgctgtgaagaaaaaatccaggtcagaattgaatttgttaaagacagataggatagctactgattctagaggcacagttggtggagttgatgataggatatctactgataaggagtgtttaagtgagcaacttcaagaaaatacccatttccagcatccgtcactcgtagaaggcaccacaaagagggaaatccgtcatgcacaaacacctatagctgcgacttcgagttcatccaagatgtctaactccaacaagtatatagctcattttcaggaaacgagggcctctcctgtagagtcagtttcttcctcacccttgagatcttctgataagaatcctttgggtcgacatagaagctcttcatggacaattacagaaaatgtgcattctcaagagtcagggaagataaattcttcatgctcgaacagaaactatgatcttgggtctgattgtgataaagctaaggctcgtatttctggttgctttaacggagatgtgagtcatcatgttcagaaggatagggactttctgaaagataaacaagatgtgatgaacgcatgtcttataaacaaaggttctggatttggtgctagaaatttccagctgagtcctgaacataaagtcaatccagatgtcctttcatcacatgacaacgatggtcacaagcaaccaacagttcgtcagaatgggaaaacacagccccatttcggttcaaaccaaggtgaccatgcaaatttgacttatgggcatattaagcctggtaaagggaatataccaaataaggaccagaaaacaaatccatctgcagtcaaagcaagcaagcagcagccatccttaaacaatgcatcaaatggtgatgcctcttacaaggcaaggcaaatagaaaaggctgttattgaaaatttggacacgaggaagcacatcactctcaatggtgatgcttcaaatctaacaagtgcatctgttctactgaaggaagctcgagatttgaagcacttgtctaaacgtcttaaggaaaaaggggatgactttgagagtacaagcatgtgctttgaggcgggtctgaaatttctccatgttgcttctctgtgggagaccccaaacattgatagctccaatcaaggggtttctatacaagctatgaaactgtattccgaaacaggaatcctctttggattctgcgctcacgaatttgagcgactcaagaaaatggcgaatgctgctctggcatataaatgtgtggaagtggcatatatgaaggctgctttctttagaagtcctggtgtaattaaagatagacatgcattgcatgcagcatctttgatggttgctccagctgagtctccatcatcttccgcttcagacatcgataatttaaataaccagagcacagttgctaaggctgtttctgcaagaggtgtatactctcctcagattgctagcaattccatatctcggaacaatcatcatttgatgggattgctttcttatgcagaggacacaaataattcatttgagggaaccagaaaatcacaaacttcattttcagcttatctttctggcattgggaagaatcaggtggatgaagttgctcttgtaaggaaagtacttgatttcagttttcataatgtcaagggattgctgcaactgattcgtcattcgttggagtctatcaaccatgaaagtggtaaatgatctaccaagtataggtatcttggaaaagagattaatgatgggaaggttgctttggcaactgtgctatacattggtacctcctccaatctggatgtagaagtaaacaagtttagagagtaatcagttgtgaatggaaagggttcacattgccttctcttggttgcatggaagtattatatgtgggtgatacaaatttcaccagcggcaaactgctaaaacgggtttctttaccaagtcatattgctacttttgttgcccggaatatttcttgtagatgatgactttgactagtgccgaactggcaaagggggttcttaccaagaattagcctgcaaatgttaattgctaagtccaacattcttggtttcagtgtctagtgaatgatcaaatccaagtcctcaatgggaatctaatatacatctaccatagtgttcgagggcagagtctcagttttctttccagggcgccagtgtaagcttaggtcagcacttttgtcctaaagtctccccaccttctattggccttgcggagaaggttctgacagttttggaggtgcttcaggatttagcagtctaatattttacaaatttgcggaggttcagtgaggattgtctgactccaatgatagcgatgtaaaagcccttgctgctgtgctgacgaaagaggattcctttccaatgttacacgatgagtccggttgatttgtgtaacatgttctcgtctccgtccagactgaaaaggcagtggctcgttgagctgtacggcatgaagccttctttccgattttaatactagttctgggtgtactgctccaaagagtagcatctctttgcagtaaaaatggtttgttctgttcaagtatgtgagagaacaagaatgcattgagtgtttt

SEQ ID NO: 73206 - DNA, 5229 bp, Zea Mays
ctggggcggcgcggggagatggggtacgaggaaggggagctcgagctggaggagggcgaggcggcctccggcggcggccgtgagctggttattcccgacgcgctcacctgcatcgatgaaagaatccaaaatgtgttgggtcatttacgcaagaaatttgaaggtgaaataactcatatgaatttgggttcgatgtatggatgccatggttcgttcttgccaacatacccacgttcccctttgggctttcctcaatataggaacactgcagatccaaaaaaccatggcagtgcctcgagatccctgcatgtattaacagagaatgcgcaaaagaaccattttgttaagacggaattagacagcagcaggaaaaatgaatactgtcgaatatccaatgagagtgatggcaatcaacagatgttaaacagagcagtcattgggtctgagcagaaagcacgaaaaatacgtatcaagttgaacagcaataaaagtttgccaagaaatactgctgctatatatagtggcctgggcctagatatttccccttcatcatctgcagaagacaacctagatgagactgctggggctctggtgcctgaagttttgcctgatgaatctccacgtgccatacttgagataatgaccagccattatattcctggaggacacttgctctcacccctcaaggaaaatgttctagaattgaaacaaaagcctaaagtgatggtaaaacaagaagcacctgaatttcaagtcaaagtagaattgcatggagactggggctgtacaacctctgctactctggataacaaagataagtgtaccaaggaaatcaagtctgatgaaaagaaagacaagatccccattttcaggagttcaaaaatcagagttaacaaaccatctgctgtgaataagggaactaagcctttacaggatgttttagatgataccggttcaaacttgttgcctacaattgtaaatacagaacatacagttgaggagccagcgaaatttacaggtgcaatttcagataaaatgaagggatcgaaggatggtgcatcaaaaggacacattagtggcaagaacaaaaacattaaggaggaaccttcgcttgatcatggattttctcgtaaaaacagatgtgattctgatgagtacaatggtaaacctcatgccagttcatgtcagttgcaaaacattcccaacaaaacttcgccactggagagggacaaagggaaagtattgcatatggaagatgaaccatctcagtacaaaagcaaggaaaatggagacctgtttagtgcagattccatggctgtcatggtaggaaatgttgatagaaattctttagggatgatgaaagggaagaagaaagtttcttctttgcaagccaccctgtctgggaagttcaagttcaaggcaaaaaaacaattgaatgacaacattgatagaaaaaaatatggtgaagacgagcattatgctttagaccatagaattggtttggataattcatatcaaatagataagagtgtgaggcttgagaaaaagaccatctcatctggggagattgataacaagtcagatgttggaaatgatggtggtgtcaatatctctgccatgtttgatgagaaatcagatgttttgccattagcatctgcatccctgcctgctccagaacccattttaataaatgaacaatgggtgtgctgcgacaagtgtgagaattggcgccttttaccctatgggatgaatccagatatacttcccaaaaaatggcggtgtagcatgcagagttggctgcctggaatgaatagctgcaaaataactgaagacgagaccacaaaagcccttcgggcactttatatggttcctgcacctgaaaataacattaaggatggtggtcatgataatgctatgtcaggcaaaggtacagctattgctccaacttttcagggaaatacacagtccatcagttcactggggaagctaaaaggttcccttgatggagccaatgtggcaaatactttggagtcagctggtatgtcaaagccctcaaagaatctgcatgctccttcaagtagaaacttctctaaactgaaggaaaaaaggaagctggtggaatcatcagataaaggagaaattgttggaaaagaccaatcacgtcgaatgagaagcagtgtaggggttgatcatgataacctgcgagcatcaaagaaaatgaagaaagaatccaatggccctgtgatgaagcatcaaccctctgagtttgaaataagcaaaagtagtcctgccagtgagactctgaaaaacattcagaagcgcagttgcatttctcctggcatgggaaagtatggtttatcttcatcaggtaaacattctcatggtgaggataaagatttctcagctgtggtcattaaaacatcagatacagagaactctggccctcgagactcatccattaagaagagaaaactgaaacaaaggcagtcaagccagcattttcgggatccacactgtagcaacaatgacacaaatggtattacaaaacaaaatattactgaaattaatgctgtgaagaaaaaatccaggtcagaattgaatttgttaaagacagataggatagctactgattctagaggcacagttggtggagttgatgataggatatctactgataaggagtgtttaagtgagcaacttcaagaaaatacccatttccagcatccgtcactcgtagaaggcaccacaaagagggaaatccgtcatgcacaaacacctatagctgcgacttcgagttcatccaagatgtctaactccaacaagtatatagctcattttcaggaaacgagggcctctcctgtagagtcagtttcttcctcacccttgagatcttctgataagaatcctttgggtcgacatagaagctcttcatggacaattacagaaaatgtgcattctcaagagtcagggaagataaattcttcatgctcgaacagaaactatgatcttgggtctgattgtgataaagctaaggctcgtatttctggttgctttaacggagatgtgagtcatcatgttcagaaggatagggactttctgaaagataaacaagatgtgatgaacgcatgtcttataaacaaaggttctggatttggtgctagaaatttccagctgagtcctgaacataaagtcaatccagatgtcctttcatcacatgacaacgatggtcacaagcaaccaacagttcgtcagaatgggaaaacacagccccatttcggttcaaaccaaggtgaccatgcaaatttgacttatgggcatattaagcctggtaaagggaatataccaaataaggaccagaaaacaaatccatctgcagtcaaagcaagcaagcagcagccatccttaaacaatgcatcaaatggtgatgcctcttacaaggcaaggcaaatagaaaaggctgttattgaaaatttggacacgaggaagcacatcactctcaatggtgatgcttcaaatctaacaagtgcatctgttctactgaaggaagctcgagatttgaagcacttgtctaaacgtcttaaggaaaaaggggatgactttgagagtacaagcatgtgctttgaggcgggtctgaaatttctccatgttgcttctctgtgggagaccccaaacattgatagctccaatcaaggggtttctatacaagctatgaaactgtattccgaaacaggaatcctctttggattctgcgctcacgaatttgagcgactcaagaaaatggcgaatgctgctctggcatataaatgtgtggaagtggcatatatgaaggctgctttctttagaagtcctggtgtaattaaagatagacatgcattgcatgcagcatctttgatggttgctccagctgagtctccatcatcttccgcttcagacatcgataatttaaataaccagagcacagttgctaaggctgtttctgcaagaggtgtatactctcctcagattgctagcaattccatatctcggaacaatcatcatttgatgggattgctttcttatgcagaggacacaaataattcatttgagggaaccagaaaatcacaaacttcattttcagcttatctttctggcattgggaagaatcaggtggatgaagttgctcttgtaaggaaagtacttgatttcagttttcataatgtcaagggattgctgcaactgattcgtcattcgttggagtctatcaaccatgaaagtggtaaatgatctaccaagtataggtatcttggaaaagagattaatgatgggaaggttgctttggcaactgtgctatacattggtacctcctccaatctggatgtagaagtaaacaagtttagagagtaatcagttgtgaatggaaagggttcacattgccttctcttggttgcatggaagtattatatgtgggtgatacaaatttcaccagcggcaaactgctaaaacgggtttctttaccaagtcatattgctacttttgttgcccggaatatttcttgtagatgatgactttgactagtgccgaactggcaaagggggttcttaccaagaattagcctgcaaatgttaattgctaagtccaacattcttggtttcagtgtctagtgaatgatcaaatccaagtcctcaatgggaatctaatatacatctaccatagtgttcgagggcagagtctcagttttctttccagggcgccagtgtaagcttaggtcagcacttttgtcctaaagtctccccaccttctattggccttgcggagaaggttctgacagttttggaggtgcttcaggatttagcagtctaatattttacaaatttgcggaggttcagtgaggattgtctgactccaatgatagatgatgacactatctgctgcctatctgagtgttgtttgggttcctgactgagcattaccattgtaacgagaaagcgatgtaaaagcccttgctgctgtgctgacgaaagaggattcctttccaatgttacacgatgagtccggttgatttgtgtaacatgttctcgtctccgtccagactgaaaaggcagtggctcgttgagctgtacggcatgaagccttctttccgattttaatactagttctgggtgtactgctccaaagagtagcatctctttgcagtaaaaatggtttgttctgttcaagtatgtgagagaacaagaatgcattgagtgtttt

SEQ ID NO: 73207 - DNA, 5375 bp, Zea Mays
ctggggcggcgcggggagatggggtacgaggaaggggagctcgagctggaggagggcgaggcggcctccggcggcggccgtgagctggttattcccgacgcgctcacctgcatcgatgaaagaatccaaaatgtgttgggtcatttacgcaagaaatttgaaggtgaaataactcatatgaatttgggttcgatgtatggatgccatggttcgttcttgccaacatacccacgttcccctttgggctttcctcaatataggaacactgcagatccaaaaaaccatggcagtgcctcgagatccctgcatgtattaacagagaatgcgcaaaagaaccattttgttaagacggaattagacagcagcaggaaaaatgaatactgtcgaatatccaatgagagtgatggcaatcaacagatgttaaacagagcagtcattgggtctgagcagaaagcacgaaaaatacgtatcaagttgaacagcaataaaagtttgccaagaaatactgctgctatatatagtggcctgggcctagatatttccccttcatcatctgcagaagacaacctagatgagactgctggggctctggtgcctgaagttttgcctgatgaatctccacgtgccatacttgagataatgaccagccattatattcctggaggacacttgctctcacccctcaaggaaaatgttctagaattgaaacaaaagcctaaagtgatggtaaaacaagaagcacctgaatttcaagtcaaagtagaattgcatggagactggggctgtacaacctctgctactctggataacaaagataagtgtaccaaggaaatcaagtctgatgaaaagaaagacaagatccccattttcaggagttcaaaaatcagagttaacaaaccatctgctgtgaataagggaactaagcctttacaggatgttttagatgataccggttcaaacttgttgcctacaattgtaaatacagaacatacagttgaggagccagcgaaatttacaggtgcaatttcagataaaatgaagggatcgaaggatggtgcatcaaaaggacacattagtggcaagaacaaaaacattaaggaggaaccttcgcttgatcatggattttctcgtaaaaacagatgtgattctgatgagtacaatggtaaacctcatgccagttcatgtcagttgcaaaacattcccaacaaaacttcgccactggagagggacaaagggaaagtattgcatatggaagatgaaccatctcagtacaaaagcaaggaaaatggagacctgtttagtgcagattccatggctgtcatggtaggaaatgttgatagaaattctttagggatgatgaaagggaagaagaaagtttcttctttgcaagccaccctgtctgggaagttcaagttcaaggcaaaaaaacaattgaatgacaacattgatagaaaaaaatatggtgaagacgagcattatgctttagaccatagaattggtttggataattcatatcaaatagataagagtgtgaggcttgagaaaaagaccatctcatctggggagattgataacaagtcagatgttggaaatgatggtggtgtcaatatctctgccatgtttgatgagaaatcagatgttttgccattagcatctgcatccctgcctgctccagaacccattttaataaatgaacaatgggtgtgctgcgacaagtgtgagaattggcgccttttaccctatgggatgaatccagatatacttcccaaaaaatggcggtgtagcatgcagagttggctgcctggaatgaatagctgcaaaataactgaagacgagaccacaaaagcccttcgggcactttatatggttcctgcacctgaaaataacattaaggatggtggtcatgataatgctatgtcaggcaaaggtacagctattgctccaacttttcagggaaatacacagtccatcagttcactggggaagctaaaaggttcccttgatggagccaatgtggcaaatactttggagtcagctggtatgtcaaagccctcaaagaatctgcatgctccttcaagtagaaacttctctaaactgaaggaaaaaaggaagctggtggaatcatcagataaaggagaaattgttggaaaagaccaatcacgtcgaatgagaagcagtgtaggggttgatcatgataacctgcgagcatcaaagaaaatgaagaaagaatccaatggccctgtgatgaagcatcaaccctctgagtttgaaataagcaaaagtagtcctgccagtgagactctgaaaaacattcagaagcgcagttgcatttctcctggcatgggaaagtatggtttatcttcatcaggtaaacattctcatggtgaggataaagatttctcagctgtggtcattaaaacatcagatacagagaactctggccctcgagactcatccattaagaagagaaaactgaaacaaaggcagtcaagccagcattttcgggatccacactgtagcaacaatgacacaaatggtattacaaaacaaaatattactgaaattaatgctgtgaagaaaaaatccaggtcagaattgaatttgttaaagacagataggatagctactgattctagaggcacagttggtggagttgatgataggatatctactgataaggagtgtttaagtgagcaacttcaagaaaatacccatttccagcatccgtcactcgtagaaggcaccacaaagagggaaatccgtcatgcacaaacacctatagctgcgacttcgagttcatccaagatgtctaactccaacaagtatatagctcattttcaggaaacgagggcctctcctgtagagtcagtttcttcctcacccttgagatcttctgataagaatcctttgggtcgacatagaagctcttcatggacaattacagaaaatgtgcattctcaagagtcagggaagataaattcttcatgctcgaacagaaactatgatcttgggtctgattgtgataaagctaaggctcgtatttctggttgctttaacggagatgtgagtcatcatgttcagaaggatagggactttctgaaagataaacaagatgtgatgaacgcatgtcttataaacaaaggttctggatttggtgctagaaatttccagctgagtcctgaacataaagtcaatccagatgtcctttcatcacatgacaacgatggtcacaagcaaccaacagttcgtcagaatgggaaaacacagccccatttcggttcaaaccaaggtgaccatgcaaatttgacttatgggcatattaagcctggtaaagggaatataccaaataaggaccagaaaacaaatccatctgcagtcaaagcaagcaagcagcagccatccttaaacaatgcatcaaatggtgatgcctcttacaaggcaaggcaaatagaaaaggctgttattgaaaatttggacacgaggaagcacatcactctcaatggtgatgcttcaaatctaacaagtgcatctgttctactgaaggaagctcgagatttgaagcacttgtctaaacgtcttaaggaaaaaggggatgactttgagagtacaagcatgtgctttgaggcgggtctgaaatttctccatgttgcttctctgtgggagaccccaaacattgatagctccaatcaaggggtttctatacaagctatgaaactgtattccgaaacaggaatcctctttggattctgcgctcacgaatttgagcgactcaagaaaatggcgaatgctgctctggcatataaatgtgtggaagtggcatatatgaaggctgctttctttagaagtcctggtgtaattaaagatagacatgcattgcatgcagcatctttgatggttgctccagctgagtctccatcatcttccgcttcagacatcgataatttaaataaccagagcacagttgctaaggctgtttctgcaagaggtgtatactctcctcagattgctagcaattccatatctcggaacaatcatcatttgatgggattgctttcttatgcagaggacacaaataattcatttgagggaaccagaaaatcacaaacttcattttcagcttatctttctggcattgggaagaatcaggtggatgaagttgctcttgtaaggaaagtacttgatttcagttttcataatgtcaagggattgctgcaactgattcgtcattcgttggagtctatcaaccatgaaagtggtaaatgatctaccaagtataggtatcttggaaaagagattaatgatgggaaggttgctttggcaactgtgctatacattggtacctcctccaatctggatgtagaagtaaacaagtttagagagtaatcagttgtgaatggaaagggttcacattgccttctcttggttgcatggaagtattatatgtgggtgatacaaatttcaccagcggcaaactgctaaaacgggtttctttaccaagtcatattgctacttttgttgcccggaatatttcttgtagatgatgactttgactagtgccgaactggcaaagggggttcttaccaagaattagcctgcaaatgttaattgctaagtccaacattcttggtttcagtgtctagtgaatgatcaaatccaagtcctcaatgggaatctaatatacatctaccatagtgttcgagggcagagtctcagttttctttccagggcgccagtgtaagcttaggtcagcacttttgtcctaaagtctccccaccttctattggccttgcggagaaggttctgacagttttggaggtgcttcaggatttagcagtctaatattttacaaatttgcggaggttcagtgaggattgtctgactccaatgatagatgttgcaaaattcattctttggtggcctggaaaaaactagtctagccctaaaacttcatcattgtttaggcaccttataactataaatattcttagcgtttgattcattttttccttttggggctgacctaacaacaaatgttagatgatgacactatctgctgcctatctgagtgttgtttgggttcctgactgagcattaccattgtaacgagaaagcgatgtaaaagcccttgctgctgtgctgacgaaagaggattcctttccaatgttacacgatgagtccggttgatttgtgtaacatgttctcgtctccgtccagactgaaaaggcagtggctcgttgagctgtacggcatgaagccttctttccgattttaatactagttctgggtgtactgctccaaagagtagcatctctttgcagtaaaaatggtttgttctgttcaagtatgtgagagaacaagaatgcattgagtgtttt

SEQ ID NO: 73208 - DNA, 5500 bp, Zea Mays
ctggggcggcgcggggagatggggtacgaggaaggggagctcgagctggaggagggcgaggcggcctccggcggcggccgtgagctggttattcccgacgcgctcacctgcatcgatgaaagaatccaaaatgtgttgggtcatttacgcaagaaatttgaaggtgaaataactcatatgaatttgggttcgatgtatggatgccatggttcgttcttgccaacatacccacgttcccctttgggctttcctcaatataggaacactgcagatccaaaaaaccatggcagtgcctcgagatccctgcatgtattaacagagaatgcgcaaaagaaccattttgttaagacggaattagacagcagcaggaaaaatgaatactgtcgaatatccaatgagagtgatggcaatcaacagatgttaaacagagcagtcattgggtctgagcagaaagcacgaaaaatacgtatcaagttgaacagcaataaaagtttgccaagaaatactgctgctatatatagtggcctgggcctagatatttccccttcatcatctgcagaagacaacctagatgagactgctggggctctggtgcctgaagttttgcctgatgaatctccacgtgccatacttgagataatgaccagccattatattcctggaggacacttgctctcacccctcaaggaaaatgttctagaattgaaacaaaagcctaaagtgatggtaaaacaagaagcacctgaatttcaagtcaaagtagaattgcatggagactggggctgtacaacctctgctactctggataacaaagataagtgtaccaaggaaatcaagtctgatgaaaagaaagacaagatccccattttcaggagttcaaaaatcagagttaacaaaccatctgctgtgaataagggaactaagcctttacaggatgttttagatgataccggttcaaacttgttgcctacaattgtaaatacagaacatacagttgaggagccagcgaaatttacaggtgcaatttcagataaaatgaagggatcgaaggatggtgcatcaaaaggacacattagtggcaagaacaaaaacattaaggaggaaccttcgcttgatcatggattttctcgtaaaaacagatgtgattctgatgagtacaatggtaaacctcatgccagttcatgtcagttgcaaaacattcccaacaaaacttcgccactggagagggacaaagggaaagtattgcatatggaagatgaaccatctcagtacaaaagcaaggaaaatggagacctgtttagtgcagattccatggctgtcatggtaggaaatgttgatagaaattctttagggatgatgaaagggaagaagaaagtttcttctttgcaagccaccctgtctgggaagttcaagttcaaggcaaaaaaacaattgaatgacaacattgatagaaaaaaatatggtgaagacgagcattatgctttagaccatagaattggtttggataattcatatcaaatagataagagtgtgaggcttgagaaaaagaccatctcatctggggagattgataacaagtcagatgttggaaatgatggtggtgtcaatatctctgccatgtttgatgagaaatcagatgttttgccattagcatctgcatccctgcctgctccagaacccattttaataaatgaacaatgggtgtgctgcgacaagtgtgagaattggcgccttttaccctatgggatgaatccagatatacttcccaaaaaatggcggtgtagcatgcagagttggctgcctggaatgaatagctgcaaaataactgaagacgagaccacaaaagcccttcgggcactttatatggttcctgcacctgaaaataacattaaggatggtggtcatgataatgctatgtcaggcaaaggtacagctattgctccaacttttcagggaaatacacagtccatcagttcactggggaagctaaaaggttcccttgatggagccaatgtggcaaatactttggagtcagctggtatgtcaaagccctcaaagaatctgcatgctccttcaagtagaaacttctctaaactgaaggaaaaaaggaagctggtggaatcatcagataaaggagaaattgttggaaaagaccaatcacgtcgaatgagaagcagtgtaggggttgatcatgataacctgcgagcatcaaagaaaatgaagaaagaatccaatggccctgtgatgaagcatcaaccctctgagtttgaaataagcaaaagtagtcctgccagtgagactctgaaaaacattcagaagcgcagttgcatttctcctggcatgggaaagtatggtttatcttcatcaggtaaacattctcatggtgaggataaagatttctcagctgtggtcattaaaacatcagatacagagaactctggccctcgagactcatccattaagaagagaaaactgaaacaaaggcagtcaagccagcattttcgggatccacactgtagcaacaatgacacaaatggtattacaaaacaaaatattactgaaattaatgctgtgaagaaaaaatccaggtcagaattgaatttgttaaagacagataggatagctactgattctagaggcacagttggtggagttgatgataggatatctactgataaggagtgtttaagtgagcaacttcaagaaaatacccatttccagcatccgtcactcgtagaaggcaccacaaagagggaaatccgtcatgcacaaacacctatagctgcgacttcgagttcatccaagatgtctaactccaacaagtatatagctcattttcaggaaacgagggcctctcctgtagagtcagtttcttcctcacccttgagatcttctgataagaatcctttgggtcgacatagaagctcttcatggacaattacagaaaatgtgcattctcaagagtcagggaagataaattcttcatgctcgaacagaaactatgatcttgggtctgattgtgataaagctaaggctcgtatttctggttgctttaacggagatgtgagtcatcatgttcagaaggatagggactttctgaaagataaacaagatgtgatgaacgcatgtcttataaacaaaggttctggatttggtgctagaaatttccagctgagtcctgaacataaagtcaatccagatgtcctttcatcacatgacaacgatggtcacaagcaaccaacagttcgtcagaatgggaaaacacagccccatttcggttcaaaccaaggtgaccatgcaaatttgacttatgggcatattaagcctggtaaagggaatataccaaataaggaccagaaaacaaatccatctgcagtcaaagcaagcaagcagcagccatccttaaacaatgcatcaaatggtgatgcctcttacaaggcaaggcaaatagaaaaggctgttattgaaaatttggacacgaggaagcacatcactctcaatggtgatgcttcaaatctaacaagtgcatctgttctactgaaggaagctcgagatttgaagcacttgtctaaacgtcttaaggaaaaaggggatgactttgagagtacaagcatgtgctttgaggcgggtctgaaatttctccatgttgcttctctgtgggagaccccaaacattgatagctccaatcaaggggtttctatacaagctatgaaactgtattccgaaacaggaatcctctttggattctgcgctcacgaatttgagcgactcaagaaaatggcgaatgctgctctggcatataaatgtgtggaagtggcatatatgaaggctgctttctttagaagtcctggtgtaattaaagatagacatgcattgcatgcagcatctttgatggttgctccagctgagtctccatcatcttccgcttcagacatcgataatttaaataaccagagcacagttgctaaggctgtttctgcaagaggtgtatactctcctcagattgctagcaattccatatctcggaacaatcatcatttgatgggattgctttcttatgcagaggacacaaataattcatttgagggaaccagaaaatcacaaacttcattttcagcttatctttctggcattgggaagaatcaggtggatgaagttgctcttgtaaggaaagtacttgatttcagttttcataatgtcaagggattgctgcaactgattcgtcattcgttggagtctatcaaccatgaaagtggtaaatgatctaccaagtataggtatcttggaaaagagattaatgatgggaaggttgctttggcaactgtgctatacattggtacctcctccaatctggatgtagaagtaaacaagtttagagagtaatcagttgtgaatggaaagggttcacattgccttctcttggttgcatggaagtattatatgtgggtgatacaaatttcaccagcggcaaactgctaaaacgggtttctttaccaagtcatattgctacttttgttgcccggaatatttcttgtagatgatgactttgactagtgccgaactggcaaagggggttcttaccaagaattagcctgcaaatgttaattgctaagtccaacattcttggtttcagtgtctagtgaatgatcaaatccaagtcctcaatgggaatctaatatacatctaccatagtgttcgagggcagagtctcagttttctttccagggcgccagtgtaagcttaggtcagcacttttgtcctaaagtctccccaccttctattggccttgcggagaaggttctgacaggcaagactccaccaattgcttcagtctaatattttacaaatttgcggaggttcagtgaggattgtctgactccaatgataggtgtgtatataggccaactttttagttaattcctgccctttttctcgatacatgtgtgtatattatacgagaaaaggaagaaaacaattttgtcataattttagctaatggttgtaattattgttcagatgttgcaaaattcattctttggtggcctggaaaaaactagtctagccctaaaacttcatcattgtttaggcaccttataactataaatattcttagcgtttgattcattttttccttttggggctgacctaacaacaaatgttagatgatgacactatctgctgcctatctgagtgttgtttgggttcctgactgagcattaccattgtaacgagaaagcgatgtaaaagcccttgctgctgtgctgacgaaagaggattcctttccaatgttacacgatgagtccggttgatttgtgtaacatgttctcgtctccgtccagactgaaaaggcagtggctcgttgagctgtacggcatgaagccttctttccgattttaatactagttctgggtgtactgctccaaagagtagcatctctttgcagtaaaaatggtttgttctgttcaagtatgtgagagaacaagaatgcattgagtgtttt

SEQ ID NO: 73209 - DNA, 5469 bp, Zea Mays
ctggggcggcgcggggagatggggtacgaggaaggggagctcgagctggaggagggcgaggcggcctccggcggcggccgtgagctggttattcccgacgcgctcacctgcatcgatgaaagaatccaaaatgtgttgggtcatttacgcaagaaatttgaaggtgaaataactcatatgaatttgggttcgatgtatggatgccatggttcgttcttgccaacatacccacgttcccctttgggctttcctcaatataggaacactgcagatccaaaaaaccatggcagtgcctcgagatccctgcatgtattaacagagaatgcgcaaaagaaccattttgttaagacggaattagacagcagcaggaaaaatgaatactgtcgaatatccaatgagagtgatggcaatcaacagatgttaaacagagcagtcattgggtctgagcagaaagcacgaaaaatacgtatcaagttgaacagcaataaaagtttgccaagaaatactgctgctatatatagtggcctgggcctagatatttccccttcatcatctgcagaagacaacctagatgagactgctggggctctggtgcctgaagttttgcctgatgaatctccacgtgccatacttgagataatgaccagccattatattcctggaggacacttgctctcacccctcaaggaaaatgttctagaattgaaacaaaagcctaaagtgatggtaaaacaagaagcacctgaatttcaagtcaaagtagaattgcatggagactggggctgtacaacctctgctactctggataacaaagataagtgtaccaaggaaatcaagtctgatgaaaagaaagacaagatccccattttcaggagttcaaaaatcagagttaacaaaccatctgctgtgaataagggaactaagcctttacaggatgttttagatgataccggttcaaacttgttgcctacaattgtaaatacagaacatacagttgaggagccagcgaaatttacaggtgcaatttcagataaaatgaagggatcgaaggatggtgcatcaaaaggacacattagtggcaagaacaaaaacattaaggaggaaccttcgcttgatcatggattttctcgtaaaaacagatgtgattctgatgagtacaatggtaaacctcatgccagttcatgtcagttgcaaaacattcccaacaaaacttcgccactggagagggacaaagggaaagtattgcatatggaagatgaaccatctcagtacaaaagcaaggaaaatggagacctgtttagtgcagattccatggctgtcatggtaggaaatgttgatagaaattctttagggatgatgaaagggaagaagaaagtttcttctttgcaagccaccctgtctgggaagttcaagttcaaggcaaaaaaacaattgaatgacaacattgatagaaaaaaatatggtgaagacgagcattatgctttagaccatagaattggtttggataattcatatcaaatagataagagtgtgaggcttgagaaaaagaccatctcatctggggagattgataacaagtcagatgttggaaatgatggtggtgtcaatatctctgccatgtttgatgagaaatcagatgttttgccattagcatctgcatccctgcctgctccagaacccattttaataaatgaacaatgggtgtgctgcgacaagtgtgagaattggcgccttttaccctatgggatgaatccagatatacttcccaaaaaatggcggtgtagcatgcagagttggctgcctggaatgaatagctgcaaaataactgaagacgagaccacaaaagcccttcgggcactttatatggttcctgcacctgaaaataacattaaggatggtggtcatgataatgctatgtcaggcaaaggtacagctattgctccaacttttcagggaaatacacagtccatcagttcactggggaagctaaaaggttcccttgatggagccaatgtggcaaatactttggagtcagctggtatgtcaaagccctcaaagaatctgcatgctccttcaagtagaaacttctctaaactgaaggaaaaaaggaagctggtggaatcatcagataaaggagaaattgttggaaaagaccaatcacgtcgaatgagaagcagtgtaggggttgatcatgataacctgcgagcatcaaagaaaatgaagaaagaatccaatggccctgtgatgaagcatcaaccctctgagtttgaaataagcaaaagtagtcctgccagtgagactctgaaaaacattcagaagcgcagttgcatttctcctggcatgggaaagtatggtttatcttcatcaggtaaacattctcatggtgaggataaagatttctcagctgtggtcattaaaacatcagatacagagaactctggccctcgagactcatccattaagaagagaaaactgaaacaaaggcagtcaagccagcattttcgggatccacactgtagcaacaatgacacaaatggtattacaaaacaaaatattactgaaattaatgctgtgaagaaaaaatccaggtcagaattgaatttgttaaagacagataggatagctactgattctagaggcacagttggtggagttgatgataggatatctactgataaggagtgtttaagtgagcaacttcaagaaaatacccatttccagcatccgtcactcgtagaaggcaccacaaagagggaaatccgtcatgcacaaacacctatagctgcgacttcgagttcatccaagatgtctaactccaacaagtatatagctcattttcaggaaacgagggcctctcctgtagagtcagtttcttcctcacccttgagatcttctgataagaatcctttgggtcgacatagaagctcttcatggacaattacagaaaatgtgcattctcaagagtcagggaagataaattcttcatgctcgaacagaaactatgatcttgggtctgattgtgataaagctaaggctcgtatttctggttgctttaacggagatgtgagtcatcatgttcagaaggatagggactttctgaaagataaacaagatgtgatgaacgcatgtcttataaacaaaggttctggatttggtgctagaaatttccagctgagtcctgaacataaagtcaatccagatgtcctttcatcacatgacaacgatggtcacaagcaaccaacagttcgtcagaatgggaaaacacagccccatttcggttcaaaccaaggtgaccatgcaaatttgacttatgggcatattaagcctggtaaagggaatataccaaataaggaccagaaaacaaatccatctgcagtcaaagcaagcaagcagcagccatccttaaacaatgcatcaaatggtgatgcctcttacaaggcaaggcaaatagaaaaggctgttattgaaaatttggacacgaggaagcacatcactctcaatggtgatgcttcaaatctaacaagtgcatctgttctactgaaggaagctcgagatttgaagcacttgtctaaacgtcttaaggaaaaaggggatgactttgagagtacaagcatgtgctttgaggcgggtctgaaatttctccatgttgcttctctgtgggagaccccaaacattgatagctccaatcaaggggtttctatacaagctatgaaactgtattccgaaacaggaatcctctttggattctgcgctcacgaatttgagcgactcaagaaaatggcgaatgctgctctggcatataaatgtgtggaagtggcatatatgaaggctgctttctttagaagtcctggtgtaattaaagatagacatgcattgcatgcagcatctttgatggttgctccagctgagtctccatcatcttccgcttcagacatcgataatttaaataaccagagcacagttgctaaggctgtttctgcaagaggtgtatactctcctcagattgctagcaattccatatctcggaacaatcatcatttgatgggattgctttcttatgcagaggacacaaataattcatttgagggaaccagaaaatcacaaacttcattttcagcttatctttctggcattgggaagaatcaggtggatgaagttgctcttgtaaggaaagtacttgatttcagttttcataatgtcaagggattgctgcaactgattcgtcattcgttggagtctatcaaccatgaaagtggtaaatgatctaccaagtataggtatcttggaaaagagattaatgatgggaaggttgctttggcaactgtgctatacattggtacctcctccaatctggatgtagaagtaaacaagtttagagagtaatcagttgtgaatggaaagggttcacattgccttctcttggttgcatggaagtattatatgtgggtgatacaaatttcaccagcggcaaactgctaaaacgggtttctttaccaagtcatattgctacttttgttgcccggaatatttcttgtagatgatgactttgactagtgccgaactggcaaagggggttcttaccaagaattagcctgcaaatgttaattgctaagtccaacattcttggtttcagtgtctagtgaatgatcaaatccaagtcttcgagggcagagtctcagttttctttccagggcgccagtgtaagcttaggtcagcacttttgtcctaaagtctccccaccttctattggccttgcggagaaggttctgacagttttggaggtgcttcaggatttagcagtctaatattttacaaatttgcggaggttcagtgaggattgtctgactccaatgataggtgtgtatataggccaactttttagttaattcctgccctttttctcgatacatgtgtgtatattatacgagaaaaggaagaaaacaattttgtcataattttagctaatggttgtaattattgttcagatgttgcaaaattcattctttggtggcctggaaaaaactagtctagccctaaaacttcatcattgtttaggcaccttataactataaatattcttagcgtttgattcattttttccttttggggctgacctaacaacaaatgttagatgatgacactatctgctgcctatctgagtgttgtttgggttcctgactgagcattaccattgtaacgagaaagcgatgtaaaagcccttgctgctgtgctgacgaaagaggattcctttccaatgttacacgatgagtccggttgatttgtgtaacatgttctcgtctccgtccagactgaaaaggcagtggctcgttgagctgtacggcatgaagccttctttccgattttaatactagttctgggtgtactgctccaaagagtagcatctctttgcagtaaaaatggtttgttctgttcaagtatgtgagagaacaagaatgcattgagtgtttt

SEQ ID NO: 73210 - DNA, 5072 bp, Zea Mays
ctggggcggcgcggggagatggggtacgaggaaggggagctcgagctggaggagggcgaggcggcctccggcggcggccgtgagctggttattcccgacgcgctcacctgcatcgatgaaagaatccaaaatgtgttgggtcatttacgcaagaaatttgaaggtgaaataactcatatgaatttgggttcgatgtatggatgccatggttcgttcttgccaacatacccacgttcccctttgggctttcctcaatataggaacactgcagatccaaaaaaccatggcagtgcctcgagatccctgcatgtattaacagagaatgcgcaaaagaaccattttgttaagacggaattagacagcagcaggaaaaatgaatactgtcgaatatccaatgagagtgatggcaatcaacagatgttaaacagagcagtcattgggtctgagcagaaagcacgaaaaatacgtatcaagttgaacagcaataaaagtttgccaagaaatactgctgctatatatagtggcctgggcctagatatttccccttcatcatctgcagaagacaacctagatgagactgctggggctctggtgcctgaagttttgcctgatgaatctccacgtgccatacttgagataatgaccagccattatattcctggaggacacttgctctcacccctcaaggaaaatgttctagaattgaaacaaaagcctaaagtgatggtaaaacaagaagcacctgaatttcaagtcaaagtagaattgcatggagactggggctgtacaacctctgctactctggataacaaagataagtgtaccaaggaaatcaagtctgatgaaaagaaagacaagatccccattttcaggagttcaaaaatcagagttaacaaaccatctgctgtgaataagggaactaagcctttacaggatgttttagatgataccggttcaaacttgttgcctacaattgtaaatacagaacatacagttgaggagccagcgaaatttacaggtgcaatttcagataaaatgaagggatcgaaggatggtgcatcaaaaggacacattagtggcaagaacaaaaacattaaggaggaaccttcgcttgatcatggattttctcgtaaaaacagatgtgattctgatgagtacaatggtaaacctcatgccagttcatgtcagttgcaaaacattcccaacaaaacttcgccactggagagggacaaagggaaagtattgcatatggaagatgaaccatctcagtacaaaagcaaggaaaatggagacctgtttagtgcagattccatggctgtcatggtaggaaatgttgatagaaattctttagggatgatgaaagggaagaagaaagtttcttctttgcaagccaccctgtctgggaagttcaagttcaaggcaaaaaaacaattgaatgacaacattgatagaaaaaaatatggtgaagacgagcattatgctttagaccatagaattggtttggataattcatatcaaatagataagagtgtgaggcttgagaaaaagaccatctcatctggggagattgataacaagtcagatgttggaaatgatggtggtgtcaatatctctgccatgtttgatgagaaatcagatgttttgccattagcatctgcatccctgcctgctccagaacccattttaataaatgaacaatgggtgtgctgcgacaagtgtgagaattggcgccttttaccctatgggatgaatccagatatacttcccaaaaaatggcggtgtagcatgcagagttggctgcctggaatgaatagctgcaaaataactgaagacgagaccacaaaagcccttcgggcactttatatggttcctgcacctgaaaataacattaaggatggtggtcatgataatgctatgtcaggcaaaggtacagctattgctccaacttttcagggaaatacacagtccatcagttcactggggaagctaaaaggttcccttgatggagccaatgtggcaaatactttggagtcagctggtatgtcaaagccctcaaagaatctgcatgctccttcaagtagaaacttctctaaactgaaggaaaaaaggaagctggtggaatcatcagataaaggagaaattgttggaaaagaccaatcacgtcgaatgagaagcagtgtaggggttgatcatgataacctgcgagcatcaaagaaaatgaagaaagaatccaatggccctgtgatgaagcatcaaccctctgagtttgaaataagcaaaagtagtcctgccagtgagactctgaaaaacattcagaagcgcagttgcatttctcctggcatgggaaagtatggtttatcttcatcaggtaaacattctcatggtgaggataaagatttctcagctgtggtcattaaaacatcagatacagagaactctggccctcgagactcatccattaagaagagaaaactgaaacaaaggcagtcaagccagcattttcgggatccacactgtagcaacaatgacacaaatggtattacaaaacaaaatattactgaaattaatgctgtgaagaaaaaatccaggtcagaattgaatttgttaaagacagataggatagctactgattctagaggcacagttggtggagttgatgataggatatctactgataaggagtgtttaagtgagcaacttcaagaaaatacccatttccagcatccgtcactcgtagaaggcaccacaaagagggaaatccgtcatgcacaaacacctatagctgcgacttcgagttcatccaagatgtctaactccaacaagtatatagctcattttcaggaaacgagggcctctcctgtagagtcagtttcttcctcacccttgagatcttctgataagaatcctttgggtcgacatagaagctcttcatggacaattacagaaaatgtgcattctcaagagtcagggaagataaattcttcatgctcgaacagaaactatgatcttgggtctgattgtgataaagctaaggctcgtatttctggttgctttaacggagatgtgagtcatcatgttcagaaggatagggactttctgaaagataaacaagatgtgatgaacgcatgtcttataaacaaaggttctggatttggtgctagaaatttccagctgagtcctgaacataaagtcaatccagatgtcctttcatcacatgacaacgatggtcacaagcaaccaacagttcgtcagaatgggaaaacacagccccatttcggttcaaaccaaggtgaccatgcaaatttgacttatgggcatattaagcctggtaaagggaatataccaaataaggaccagaaaacaaatccatctgcagtcaaagcaagcaagcagcagccatccttaaacaatgcatcaaatggtgatgcctcttacaaggcaaggcaaatagaaaaggctgttattgaaaatttggacacgaggaagcacatcactctcaatggtgatgcttcaaatctaacaagtgcatctgttctactgaaggaagctcgagatttgaagcacttgtctaaacgtcttaaggaaaaaggggatgactttgagagtacaagcatgtgctttgaggcgggtctgaaatttctccatgttgcttctctgtgggagaccccaaacattgatagctccaatcaaggggtttctatacaagctatgaaactgtattccgaaacaggaatcctctttggattctgcgctcacgaatttgagcgactcaagaaaatggcgaatgctgctctggcatataaatgtgtggaagtggcatatatgaaggctgctttctttagaagtcctggtgtaattaaagatagacatgcattgcatgcagcatctttgatggttgctccagctgagtctccatcatcttccgcttcagacatcgataatttaaataaccagagcacagttgctaaggctgtttctgcaagaggtgtatactctcctcagattgctagcaattccatatctcggaacaatcatcatttgatgggattgctttcttatgcagaggacacaaataattcatttgagggaaccagaaaatcacaaacttcattttcagcttatctttctggcattgggaagaatcaggtggatgaagttgctcttgtaaggaaagtacttgatttcagttttcataatgtcaagggattgctgcaactgattcgtcattcgttggagtctatcaaccatgaaagtggtaaatgatctaccaagtataggtatcttggaaaagagattaatgatgggaaggttgctttggcaactgtgctatacattggtacctcctccaatctggatgtagaagtaaacaagtttagagagtaatcagttgtgaatggaaagggttcacattgccttctcttggttgcatggaagtattatatgtgggtgatacaaatttcaccagcggcaaactgctaaaacgggtttctttaccaagtcatattgctacttttgttgcccggaatatttcttgtagatgatgactttgactagtgccgaactggcaaagggggttcttaccaagaattagcctgcaaatgttaattgctaagtccaacattcttggtttcagtgtctagtgaatgatcaaatccaagtcctcaatgggaatctaatatacatctaccatagtgttcgagggcagagtctcagttttctttccagggcgccagtgtaagcttaggtcagcacttttgtcctaaagtctccccaccttctattggccttgcggagaaggttctgacagttttggaggtgcttcaggatttagcagtctaatattttacaaatttgcggaggttcagtgaggattgtctgactccaatgatagggttcggggtcgcgtcctactccggacgatggtacaaacttcgccgaccagatcttcaacctgaccgacaacccacctcaagcttgatggtcttgtagatttattatataatgtttggacatgtttatgcgatgtttggacttgtgttgtatagacttatggatgattatgtatgtgtgtg

SEQ ID NO: 73211 - DNA, 4988 bp, Zea Mays
ctggggcggcgcggggagatggggtacgaggaaggggagctcgagctggaggagggcgaggcggcctccggcggcggccgtgagctggttattcccgacgcgctcacctgcatcgatgaaagaatccaaaatgtgttgggtcatttacgcaagaaatttgaaggtgaaataactcatatgaatttgggttcgatgtatggatgccatggttcgttcttgccaacatacccacgttcccctttgggctttcctcaatataggaacactgcagatccaaaaaaccatggcagtgcctcgagatccctgcatgtattaacagagaatgcgcaaaagaaccattttgttaagacggaattagacagcagcaggaaaaatgaatactgtcgaatatccaatgagagtgatggcaatcaacagatgttaaacagagcagtcattgggtctgagcagaaagcacgaaaaatacgtatcaagttgaacagcaataaaagtttgccaagaaatactgctgctatatatagtggcctgggcctagatatttccccttcatcatctgcagaagacaacctagatgagactgctggggctctggtgcctgaagttttgcctgatgaatctccacgtgccatacttgagataatgaccagccattatattcctggaggacacttgctctcacccctcaaggaaaatgttctagaattgaaacaaaagcctaaagtgatggtaaaacaagaagcacctgaatttcaagtcaaagtagaattgcatggagactggggctgtacaacctctgctactctggataacaaagataagtgtaccaaggaaatcaagtctgatgaaaagaaagacaagatccccattttcaggagttcaaaaatcagagttaacaaaccatctgctgtgaataagggaactaagcctttacaggatgttttagatgataccggttcaaacttgttgcctacaattgtaaatacagaacatacagttgaggagccagcgaaatttacaggtgcaatttcagataaaatgaagggatcgaaggatggtgcatcaaaaggacacattagtggcaagaacaaaaacattaaggaggaaccttcgcttgatcatggattttctcgtaaaaacagatgtgattctgatgagtacaatggtaaacctcatgccagttcatgtcagttgcaaaacattcccaacaaaacttcgccactggagagggacaaagggaaagtattgcatatggaagatgaaccatctcagtacaaaagcaaggaaaatggagacctgtttagtgcagattccatggctgtcatggtaggaaatgttgatagaaattctttagggatgatgaaagggaagaagaaagtttcttctttgcaagccaccctgtctgggaagttcaagttcaaggcaaaaaaacaattgaatgacaacattgatagaaaaaaatatggtgaagacgagcattatgctttagaccatagaattggtttggataattcatatcaaatagataagagtgtgaggcttgagaaaaagaccatctcatctggggagattgataacaagtcagatgttggaaatgatggtggtgtcaatatctctgccatgtttgatgagaaatcagatgttttgccattagcatctgcatccctgcctgctccagaacccattttaataaatgaacaatgggtgtgctgcgacaagtgtgagaattggcgccttttaccctatgggatgaatccagatatacttcccaaaaaatggcggtgtagcatgcagagttggctgcctggaatgaatagctgcaaaataactgaagacgagaccacaaaagcccttcgggcactttatatggttcctgcacctgaaaataacattaaggatggtggtcatgataatgctatgtcaggcaaaggtacagctattgctccaacttttcagggaaatacacagtccatcagttcactggggaagctaaaaggttcccttgatggagccaatgtggcaaatactttggagtcagctggtatgtcaaagccctcaaagaatctgcatgctccttcaagtagaaacttctctaaactgaaggaaaaaaggaagctggtggaatcatcagataaaggagaaattgttggaaaagaccaatcacgtcgaatgagaagcagtgtaggggttgatcatgataacctgcgagcatcaaagaaaatgaagaaagaatccaatggccctgtgatgaagcatcaaccctctgagtttgaaataagcaaaagtagtcctgccagtgagactctgaaaaacattcagaagcgcagttgcatttctcctggcatgggaaagtatggtttatcttcatcaggtaaacattctcatggtgaggataaagatttctcagctgtggtcattaaaacatcagatacagagaactctggccctcgagactcatccattaagaagagaaaactgaaacaaaggcagtcaagccagcattttcgggatccacactgtagcaacaatgacacaaatggtattacaaaacaaaatattactgaaattaatgctgtgaagaaaaaatccaggtcagaattgaatttgttaaagacagataggatagctactgattctagaggcacagttggtggagttgatgataggatatctactgataaggagtgtttaagtgagcaacttcaagaaaatacccatttccagcatccgtcactcgtagaaggcaccacaaagagggaaatccgtcatgcacaaacacctatagctgcgacttcgagttcatccaagatgtctaactccaacaagtatatagctcattttcaggaaacgagggcctctcctgtagagtcagtttcttcctcacccttgagatcttctgataagaatcctttgggtcgacatagaagctcttcatggacaattacagaaaatgtgcattctcaagagtcagggaagataaattcttcatgctcgaacagaaactatgatcttgggtctgattgtgataaagctaaggctcgtatttctggttgctttaacggagatgtgagtcatcatgttcagaaggatagggactttctgaaagataaacaagatgtgatgaacgcatgtcttataaacaaaggttctggatttggtgctagaaatttccagctgagtcctgaacataaagtcaatccagatgtcctttcatcacatgacaacgatggtcacaagcaaccaacagttcgtcagaatgggaaaacacagccccatttcggttcaaaccaaggtgaccatgcaaatttgacttatgggcatattaagcctggtaaagggaatataccaaataaggaccagaaaacaaatccatctgcagtcaaagcaagcaagcagcagccatccttaaacaatgcatcaaatggtgatgcctcttacaaggcaaggcaaatagaaaaggctgttattgaaaatttggacacgaggaagcacatcactctcaatggtgatgcttcaaatctaacaagtgcatctgttctactgaaggaagctcgagatttgaagcacttgtctaaacgtcttaaggaaaaaggggatgactttgagagtacaagcatgtgctttgaggcgggtctgaaatttctccatgttgcttctctgtgggagaccccaaacattgatagctccaatcaaggggtttctatacaagctatgaaactgtattccgaaacaggaatcctctttggattctgcgctcacgaatttgagcgactcaagaaaatggcgaatgctgctctggcatataaatgtgtggaagtggcatatatgaaggctgctttctttagaagtcctggtgtaattaaagatagacatgcattgcatgcagcatctttgatggttgctccagctgagtctccatcatcttccgcttcagacatcgataatttaaataaccagagcacagttgctaaggctgtttctgcaagaggtgtatactctcctcagattgctagcaattccatatctcggaacaatcatcatttgatgggattgctttcttatgcagaggacacaaataattcatttgagggaaccagaaaatcacaaacttcattttcagcttatctttctggcattgggaagaatcaggtggatgaagttgctcttgtaaggaaagtacttgatttcagttttcataatgtcaagggattgctgcaactgattcgtcattcgttggagtctatcaaccatgaaagtggtaaatgatctaccaagtataggtatcttggaaaagagattaatgatgggaaggttgctttggcaactgtgctatacattggtacctcctccaatctggatgtagaagtaaacaagtttagagagtaatcagttgtgaatggaaagggttcacattgccttctcttggttgcatggaagtattatatgtgggtgatacaaatttcaccagcggcaaactgctaaaacgggtttctttaccaagtcatattgctacttttgttgcccggaatatttcttgtagatgatgactttgactagtgccgaactggcaaagggggttcttaccaagaattagcctgcaaatgttaattgctaagtccaacattcttggtttcagtgtctagtgaatgatcaaatccaagtcctcaatgggaatctaatatacatctaccatagtgttcgagggcagagtctcagttttctttccagggcgccagtgtaagcttaggtcagcacttttgtcctaaagtctccccaccttctattggccttgcggagaaggttctgacagggttcggggtcgcgtcctactccggacgatggtacaaacttcgccgaccagatcttcaacctgaccgacaacccacctcaagcttgatggtcttgtagatttattatataatgtttggacatgtttatgcgatgtttggacttgtgttgtatagacttatggatgattatgtatgtgtgtg

SEQ ID NO: 73212 - DNA, 4925 bp, Zea Mays
ctggggcggcgcggggagatggggtacgaggaaggggagctcgagctggaggagggcgaggcggcctccggcggcggccgtgagctggttattcccgacgcgctcacctgcatcgatgaaagaatccaaaatgtgttgggtcatttacgcaagaaatttgaaggtgaaataactcatatgaatttgggttcgatgtatggatgccatggttcgttcttgccaacatacccacgttcccctttgggctttcctcaatataggaacactgcagatccaaaaaaccatggcagtgcctcgagatccctgcatgtattaacagagaatgcgcaaaagaaccattttgttaagacggaattagacagcagcaggaaaaatgaatactgtcgaatatccaatgagagtgatggcaatcaacagatgttaaacagagcagtcattgggtctgagcagaaagcacgaaaaatacgtatcaagttgaacagcaataaaagtttgccaagaaatactgctgctatatatagtggcctgggcctagatatttccccttcatcatctgcagaagacaacctagatgagactgctggggctctggtgcctgaagttttgcctgatgaatctccacgtgccatacttgagataatgaccagccattatattcctggaggacacttgctctcacccctcaaggaaaatgttctagaattgaaacaaaagcctaaagtgatggtaaaacaagaagcacctgaatttcaagtcaaagtagaattgcatggagactggggctgtacaacctctgctactctggataacaaagataagtgtaccaaggaaatcaagtctgatgaaaagaaagacaagatccccattttcaggagttcaaaaatcagagttaacaaaccatctgctgtgaataagggaactaagcctttacaggatgttttagatgataccggttcaaacttgttgcctacaattgtaaatacagaacatacagttgaggagccagcgaaatttacaggtgcaatttcagataaaatgaagggatcgaaggatggtgcatcaaaaggacacattagtggcaagaacaaaaacattaaggaggaaccttcgcttgatcatggattttctcgtaaaaacagatgtgattctgatgagtacaatggtaaacctcatgccagttcatgtcagttgcaaaacattcccaacaaaacttcgccactggagagggacaaagggaaagtattgcatatggaagatgaaccatctcagtacaaaagcaaggaaaatggagacctgtttagtgcagattccatggctgtcatggtaggaaatgttgatagaaattctttagggatgatgaaagggaagaagaaagtttcttctttgcaagccaccctgtctgggaagttcaagttcaaggcaaaaaaacaattgaatgacaacattgatagaaaaaaatatggtgaagacgagcattatgctttagaccatagaattggtttggataattcatatcaaatagataagagtgtgaggcttgagaaaaagaccatctcatctggggagattgataacaagtcagatgttggaaatgatggtggtgtcaatatctctgccatgtttgatgagaaatcagatgttttgccattagcatctgcatccctgcctgctccagaacccattttaataaatgaacaatgggtgtgctgcgacaagtgtgagaattggcgccttttaccctatgggatgaatccagatatacttcccaaaaaatggcggtgtagcatgcagagttggctgcctggaatgaatagctgcaaaataactgaagacgagaccacaaaagcccttcgggcactttatatggttcctgcacctgaaaataacattaaggatggtggtcatgataatgctatgtcaggcaaaggtacagctattgctccaacttttcagggaaatacacagtccatcagttcactggggaagctaaaaggttcccttgatggagccaatgtggcaaatactttggagtcagctggtatgtcaaagccctcaaagaatctgcatgctccttcaagtagaaacttctctaaactgaaggaaaaaaggaagctggtggaatcatcagataaaggagaaattgttggaaaagaccaatcacgtcgaatgagaagcagtgtaggggttgatcatgataacctgcgagcatcaaagaaaatgaagaaagaatccaatggccctgtgatgaagcatcaaccctctgagtttgaaataagcaaaagtagtcctgccagtgagactctgaaaaacattcagaagcgcagttgcatttctcctggcatgggaaagtatggtttatcttcatcaggtaaacattctcatggtgaggataaagatttctcagctgtggtcattaaaacatcagatacagagaactctggccctcgagactcatccattaagaagagaaaactgaaacaaaggcagtcaagccagcattttcgggatccacactgtagcaacaatgacacaaatggtattacaaaacaaaatattactgaaattaatgctgtgaagaaaaaatccaggtcagaattgaatttgttaaagacagataggatagctactgattctagaggcacagttggtggagttgatgataggatatctactgataaggagtgtttaagtgagcaacttcaagaaaatacccatttccagcatccgtcactcgtagaaggcaccacaaagagggaaatccgtcatgcacaaacacctatagctgcgacttcgagttcatccaagatgtctaactccaacaagtatatagctcattttcaggaaacgagggcctctcctgtagagtcagtttcttcctcacccttgagatcttctgataagaatcctttgggtcgacatagaagctcttcatggacaattacagaaaatgtgcattctcaagagtcagggaagataaattcttcatgctcgaacagaaactatgatcttgggtctgattgtgataaagctaaggctcgtatttctggttgctttaacggagatgtgagtcatcatgttcagaaggatagggactttctgaaagataaacaagatgtgatgaacgcatgtcttataaacaaaggttctggatttggtgctagaaatttccagctgagtcctgaacataaagtcaatccagatgtcctttcatcacatgacaacgatggtcacaagcaaccaacagttcgtcagaatgggaaaacacagccccatttcggttcaaaccaaggtgaccatgcaaatttgacttatgggcatattaagcctggtaaagggaatataccaaataaggaccagaaaacaaatccatctgcagtcaaagcaagcaagcagcagccatccttaaacaatgcatcaaatggtgatgcctcttacaaggcaaggcaaatagaaaaggctgttattgaaaatttggacacgaggaagcacatcactctcaatggtgatgcttcaaatctaacaagtgcatctgttctactgaaggaagctcgagatttgaagcacttgtctaaacgtcttaaggaaaaaggggatgactttgagagtacaagcatgtgctttgaggcgggtctgaaatttctccatgttgcttctctgtgggagaccccaaacattgatagctccaatcaaggggtttctatacaagctatgaaactgtattccgaaacaggaatcctctttggattctgcgctcacgaatttgagcgactcaagaaaatggcgaatgctgctctggcatataaatgtgtggaagtggcatatatgaaggctgctttctttagaagtcctggtgtaattaaagatagacatgcattgcatgcagcatctttgatggttgctccagctgagtctccatcatcttccgcttcagacatcgataatttaaataaccagagcacagttgctaaggctgtttctgcaagaggtgtatactctcctcagattgctagcaattccatatctcggaacaatcatcatttgatgggattgctttcttatgcagaggacacaaataattcatttgagggaaccagaaaatcacaaacttcattttcagcttatctttctggcattgggaagaatcaggtggatgaagttgctcttgtaaggaaagtacttgatttcagttttcataatgtcaagggattgctgcaactgattcgtcattcgttggagtctatcaaccatgaaagtggtaaatgatctaccaagtataggtatcttggaaaagagattaatgatgggaaggttgctttggcaactgtgctatacattggtacctcctccaatctggatgtagaagtaaacaagtttagagagtaatcagttgtgaatggaaagggttcacattgccttctcttggttgcatggaagtattatatgtgggtgatacaaatttcaccagcggcaaactgctaaaacgggtttctttaccaagtcatattgctacttttgttgcccggaatatttcttgtagatgatgactttgactagtgccgaactggcaaagggggttcttaccaagaattagcctgcaaatgttaattgctaagtccaacattcttggtttcagtgtctagtgaatgatcaaatccaagtcctcaatgggaatctaatatacatctaccatagtgttcgagggcagagtctcagttttctttccagggcgccagtgtaagcttagggttcggggtcgcgtcctactccggacgatggtacaaacttcgccgaccagatcttcaacctgaccgacaacccacctcaagcttgatggtcttgtagatttattatataatgtttggacatgtttatgcgatgtttggacttgtgttgtatagacttatggatgattatgtatgtgtgtg

SEQ ID NO: 73213 - DNA, 1093 bp, Zea Mays
cgagcatactagcgtgagtagttttcattttcacccctgcctctgtatccgagcatactagcggatcctggcccgatccctcttcccaccccacccacctccgcttctctccaagtgaggaaccccaagccctcgccatggcgtcgcggatcctggcccgatccaaggcccttcccctcgtcgccgccctcacccctgccgctgccaaagcagcaacgcctatcgccggagcccgcgcgctctcgtccctgccccgctacccgtctgccccgtcgccccatgggctcggcaaggttctgggatatgaaccaacatctcacctcagtggaccacaagttttacctcgttggttttcctctctagcatccaatggatctcagatctctgagacatacaagtcaggtggtgaaatgaaacagtctgagacacggaaatcaagtgaggaagccacaccaaaagttgtggcgttcagtccgctagaagcagctatcgctaaacctagaagtagtcccctgacaagtgagagttctaaagtaaggcgatcagagatagcaacccaagtcaccttttacatgatcccagccctgcttcttgcctccaagaacagcataagtacctcccttctggtcggcgccgtgttccatcaagtatacatgttccacaaggagattcttctggactacgtgcaccatgatatcaccagaaagtgggctttgatttacttcaagctgcttttgctggtgatggcgaaggacaccatcatgtacttcaatctgttctaagctcaccttctcagtttctcaaatatccagcaatgcatccgtctctgcactcgtagaataatgatgatggatgaattatgcagccttcgttcttgtattctccctaatgagcttgcttttttccagctgccagtttcactcttattaagtatatcagtctggatgggattgatagtgaccagtcagatgatatccctgattctgcacctcattaataatatgattaatgtcaattgtgcaattaaggatgtgtttggtttgaggtaaaagtaggatgaggcggcgtgacactgtccgctcgattttttggg

SEQ ID NO: 73214 - DNA, 849 bp, Zea Mays
aacagagtaatggaaacttctgacctttttaaaggttctgggatatgaaccaacatctcacctcagtggaccacaagttttacctcgttggttttcctctctagcatccaatggatctcaggtgcagaagtcacagatctctgagacatacaagtcaggtggtgaaatgaaacagtctgagacacggaaatcaagtgaggaagccacaccaaaagttgtggcgttcagtccgctagaagcagctatcgctaaacctagaagtagtcccctgacaagtgagagttctaaagtaaggcgatcagagatagcaacccaagtcaccttttacatgatcccagccctgcttcttgcctccaagaacagcataagtacctcccttctggtcggcgccgtgttccatcaagtatacatgttccacaaggagattcttctggactacgtgcaccatgatatcaccagaaagtgggctttgatttacttcaagctgcttttgctggtgatggcgaaggacaccatcatgtacttcaatctgttctaagctcaccttctcagtttctcaaatatccagcaatgcatccgtctctgcactcgtagaataatgatgatggatgaattatgcagccttcgttcttgtattctccctaatgagcttgcttttttccagctgccagtttcactcttattaagtatatcagtctggatgggattgatagtgaccagtcagatgatatccctgattctgcacctcattaataatatgattaatgtcaattgtgcaattaaggatgtgtttggtttgaggtaaaagtaggatgaggcggcgtgacactgtccgctcgattttttggg

SEQ ID NO: 73215 - DNA, 4445 bp, Zea Mays
gtcctgcttgctctctctagagctgactttaggacattggaggctttgacgccttcggtgtccttgcgtccgcgtcgtgtccgcgcgcctgctgcccgccaacccgcctctcccaaatcccatccaaattcctccgcgtctttcgaagatcatattttgggaggggcaccgcccccagatcggggaggaatccccattccgtctggtgggtcggtctcccctgtccgtttttggctcttttcccctctcacaagggcggctcttggatgggctgcctgccgtgcttcgggtcggctggtgagggggcggccaaggagggcggtgcgcgcaaggacggtctggaccttggtattacagaagcttggacttgtggcactagcacctgattctgatgtaacaagtttccccagctggtggtgtggtgctatcaagaagatacctaaggacgtgaggaaatgatttaacacttaaattatcctggtagcttggaaaatatggaagcatcgaaatgcatgtgttagctcaaacgtgcaaatggttttacaggcggtgggtactgagagaatcctttggtgctctccaggagcttctgctctttaggagctgctcccccccccccccttcagattaggtttgagttttcctggttgtggttatttgtattttttttaggtgtgggtgtgtgagtctcaaggttttcctgggagaaggttccatgccctctccccctggtgttctttcttccatcttaatgaaatgacatgcagctcttctgcatggttcgagaaaaaaattactgtaaggtatctctatctaatatcagaagcaatatggtttcttctagaaaccttcttgaactgtgcacatgaacagccatgttgtcccctgtctttccgttatcatccatgacgcttggaactagagttgtttatgtgcaaagttcagaatctatcttttgtatgccttctatgatccagtaagaatcaaaacacaattcacattctatcaatgcttactggtcaaacagtccatgtaccaaacggcaaacctcttactcatacatgcatgcagatgcaggcggcgtgttcgagcccaacacaccacatcattagagcatttgttttacaaaagaggctgccatggcatttttttatgaaagaagagatctgtgaggggaaaggataagctgtgctgtgtgcttgagcacatgagtctcatacgttattaggctgggagtgggagcgctggttgaggttaaagtgtgctggaccaggaagtggtggcccaagttgacctttattcattttattgtattacttttattgttctctttaaaacatgtaatttatgtatagcccaataaagatgtgcatcaaccagttgcttggaccctgggtcatcggcctcataaacttgggttgggtttgcataccaagtcctaaattgtcattaaatgatatattctattttctaaatgttgacagtaagatcgttactcttagcaacacatgggtatgtttgctagtaaagataggtgctaagtgctctagatcaacttattccgaaatacttgatgcaccgaatttcttttagttttcatttactgctttaacttcgcattttcggttgtagttcatcttgattatgttgaaccctttaacccggatgtgacctaactctagactaacttctgctttagataaatcaaaaccacagggtggactagactctaagaaggatgcagtcattttgagggaggggaataatcaacatattgcagcacacactttcacttttcgtgaacttgcagctgccactaagaacttcagacaagattgcttattgggtgagggaggttttggtcgtgtttataaaggacgtttggagaatggacaggttgttgcagtgaagcaacttgatcgcaatggccttcaaggaaacagggagtttctggttgaggttctaatgcttagtctgttgcaccatgacaatctagtaaacttaattggatactgcgctgatggagaccaacgtcttcttgtatacgagtttatgccattgggatcacttgaggatcatttgcatgatattccacctgataaggaacctctggactggaatacacgtatgaagattgctgctggtgccgccaagggcttagagtacttgcatgataaggcaagtcctcctgttatttacagggatttcaagtcctcaaacattctactcggtgaagggtttcatccgaagctatcagacttcggccttgccaaacttggccctgttggtgacaagactcacgtttcaacacgtgtcatgggaacttatggctactgtgctccagagtatgcaatgacagggcagcttacagctaaatctgatgtatatagttttggtgttgtgttccttgaactgattactggccgcaaagcaattgacaacacaaaaccccatggagagcaaaacctagttgcatgggctcgtcctctattcaaggaccgcagaaaattccctaaaatggctgatccgtcacttcagggctgtttccccatgaggggactgtatcaagctctagctgttgctgcaatgtgtttgcaagagcaggctgctacccgcccctttataggtgacgtggtcactgctctttcatacctagcttctcacacatatgatccaaatgcgcctgctcaacataatcggagtaattcatctactccgagggttagccgaggtggtgggagcaatgaccaacgccgtctccgctcatcaaaccaccactctccagatttgagaagggaagtcaccacagcatcaagatacgacgatgaggttagcagggcaaactctggtactggttctggtcgccggtctggcttggatgatgcggatatgtcaggctcacaattgggtagccctgctcacactggaaggaagaggggatctcctaggacttctgaaagccagcatgctatagcagaggccaaaacatatggggaaaattcaagaggcagaaagtgaccaaactctcagagcagcattgaccgtatgagcagaatgctgaaccagatggttcatccattcatcattcatagaaaaaaaaaatgataagttccttgctagcgccagacaggaacattgcatcagtccatctaggtcccttggtctttgtgaatagagctttcctcttttccctttacgggctattgccactgcttcttaacttctccatacaaatatcattgccaccacaaccaccatcagaactcccattcctgtcatctattcctcatgaatgcgatcatcatgcttacgagccttcgtcgtcacggtgtataacaacattcggttcacaatgtggaggtaaggcaaacatctgctctggggagcacaggatctcatccagttgggcatcttctgttgctgttgcatgctgggtgtcagcagtcacaccattgtcgaggggtgtgatgttctttttcttgaatggtttgtacctggggttacagcagttcacctgtgtttgatacatctgccttgtgacatttttgtgttgagttgtcggaacacatctattatcatctctaccataaaattgttgtggcccttgcatcttatcctatgcatgctgttttgaaaactgcttttgtccccccccccttttttttggtgcactaaactttcatccattagattttttatcgcatcagaactggatgcccatcatgaccggtgatatatccattcacttccaatgatcttttcttgaggatactccctctgtcacagaaatagtgcacctatggattcacgctggttaaacccttttttaaattgactagatttgtagaaaacattagcaatatttgtatctctaaataaatttaatgatactaattacgtacacttcagaagccatgagtctggaaactgggaaaccagcgttcaaagctggagtctgaaaggtaacattctatactattacaagcataccaaatctcagcaaccttggtctgttggataccaggacattgctatgtttgaccttcgcccaacacagcatgcggttgatgacagcttgcgtcttccctcccctttcaagagcactatccacctctgcggaaaagatgtaccgccggagaagaacacttcagaagatgtgtgcaacttctcaatcaccattttgttacgagaataccgaagagccccaagtcaattctttcagcagcttactcattttcatactcatattcaaacttcactctataaacagtataatttatagtacaaaacaatgttttagatagggctggcaaaatgctcgtgactcgtcggctcggattgacttgtttgaaattttttacgagttgagttaacattctagctcagttcgttaacaagcttgctcggtttgttaacgagacagctcgcgagctatcatatttcag

SEQ ID NO: 73216 - DNA, 3229 bp, Zea Mays
gtcctgcttgctctctctagagctgactttaggacattggaggctttgacgccttcggtgtccttgcgtccgcgtcgtgtccgcgcgcctgctgcccgccaacccgcctctcccaaatcccatccaaattcctccgcgtctttcgaagatcatattttgggaggggcaccgcccccagatcggggaggaatccccattccgtctggtgggtcggtctcccctgtccgtttttggctcttttcccctctcacaagggcggctcttggatgggctgcctgccgtgcttcgggtcggctggtgagggggcggccaaggagggcggtgcgcgcaaggacggtacgtcggatcttcgcgtcacccgggtcgaatcaggtctggaccttggtattacagaagcttggacttgtggcactagcacctgattctgatgtaacaagtttccccagctggtggtgtggtgctatcaagaagatacctaaggacataaatcaaaaccacagggtggactagactctaagaaggatgcagtcattttgagggaggggaataatcaacatattgcagcacacactttcacttttcgtgaacttgcagctgccactaagaacttcagacaagattgcttattgggtgagggaggttttggtcgtgtttataaaggacgtttggagaatggacaggttgttgcagtgaagcaacttgatcgcaatggccttcaaggaaacagggagtttctggttgaggttctaatgcttagtctgttgcaccatgacaatctagtaaacttaattggatactgcgctgatggagaccaacgtcttcttgtatacgagtttatgccattgggatcacttgaggatcatttgcatgatattccacctgataaggaacctctggactggaatacacgtatgaagattgctgctggtgccgccaagggcttagagtacttgcatgataaggcaagtcctcctgttatttacagggatttcaagtcctcaaacattctactcggtgaagggtttcatccgaagctatcagacttcggccttgccaaacttggccctgttggtgacaagactcacgtttcaacacgtgtcatgggaacttatggctactgtgctccagagtatgcaatgacagggcagcttacagctaaatctgatgtatatagttttggtgttgtgttccttgaactgattactggccgcaaagcaattgacaacacaaaaccccatggagagcaaaacctagttgcatgggctcgtcctctattcaaggaccgcagaaaattccctaaaatggctgatccgtcacttcagggctgtttccccatgaggggactgtatcaagctctagctgttgctgcaatgtgtttgcaagagcaggctgctacccgcccctttataggtgacgtggtcactgctctttcatacctagcttctcacacatatgatccaaatgcgcctgctcaacataatcggagtaattcatctactccgagggttagccgaggtggtgggagcaatgaccaacgccgtctccgctcatcaaaccaccactctccagatttgagaagggaagtcaccacagcatcaagatacgacgatgaggttagcagggcaaactctggtactggttctggtcgccggtctggcttggatgatgcggatatgtcaggctcacaattgggtagccctgctcacactggaaggaagaggggatctcctaggacttctgaaagccagcatgctatagcagaggccaaaacatatggggaaaattcaagaggcagaaagtgaccaaactctcagagcagcattgaccgtatgagcagaatgctgaaccagatggttcatccattcatcattcatagaaaaaaaaaatgataagttccttgctagcgccagacaggaacattgcatcagtccatctaggtcccttggtctttgtgaatagagctttcctcttttccctttacgggctattgccactgcttcttaacttctccatacaaatatcattgccaccacaaccaccatcagaactcccattcctgtcatctattcctcatgaatgcgatcatcatgcttacgagccttcgtcgtcacggtgtataacaacattcggttcacaatgtggaggtaaggcaaacatctgctctggggagcacaggatctcatccagttgggcatcttctgttgctgttgcatgctgggtgtcagcagtcacaccattgtcgaggggtgtgatgttctttttcttgaatggtttgtacctggggttacagcagttcacctgtgtttgatacatctgccttgtgacatttttgtgttgagttgtcggaacacatctattatcatctctaccataaaattgttgtggcccttgcatcttatcctatgcatgctgttttgaaaactgcttttgtccccccccccttttttttggtgcactaaactttcatccattagattttttatcgcatcagaactggatgcccatcatgaccggtgatatatccattcacttccaatgatcttttcttgaggatactccctctgtcacagaaatagtgcacctatggattcacgctggttaaacccttttttaaattgactagatttgtagaaaacattagcaatatttgtatctctaaataaatttaatgatactaattacgtacacttcagaagccatgagtctggaaactgggaaaccagcgttcaaagctggagtctgaaaggtaacattctatactattacaagcataccaaatctcagcaaccttggtctgttggataccaggacattgctatgtttgaccttcgcccaacacagcatgcggttgatgacagcttgcgtcttccctcccctttcaagagcactatccacctctgcggaaaagatgtaccgccggagaagaacacttcagaagatgtgtgcaacttctcaatcaccattttgttacgagaataccgaagagccccaagtcaattctttcagcagcttactcattttcatactcatattcaaacttcactctataaacagtataatttatagtacaaaacaatgttttagatagggctggcaaaatgctcgtgactcgtcggctcggattgacttgtttgaaattttttacgagttgagttaacattctagctcagttcgttaacaagcttgctcggtttgttaacgagacagctcgcgagctatcatatttcag

SEQ ID NO: 73217 - DNA, 3003 bp, Zea Mays
gtcctgcttgctctctctagagctgactttaggacattggaggctttgacgccttcggtgtccttgcgtccgcgtcgtgtccgcgcgcctgctgcccgccaacccgcctctcccaaatcccatccaaattcctccgcgtctttcgaagatcatattttgggaggggcaccgcccccagatcggggaggaatccccattccgtctggtgggtcggtctcccctgtccgtttttggctcttttcccctctcacaagggcggctcttggatgggctgcctgccgtgcttcgggtcggctggtgagggggcggccaaggagggcggtgcgcgcaaggacggtacgtcggatcttcgcgtcacccgggtcgaatcagataaatcaaaaccacagggtggactagactctaagaaggatgcagtcattttgagggaggggaataatcaacatattgcagcacacactttcacttttcgtgaacttgcagctgccactaagaacttcagacaagattgcttattgggtgagggaggttttggtcgtgtttataaaggacgtttggagaatggacaggttgttgcagtgaagcaacttgatcgcaatggccttcaaggaaacagggagtttctggttgaggttctaatgcttagtctgttgcaccatgacaatctagtaaacttaattggatactgcgctgatggagaccaacgtcttcttgtatacgagtttatgccattgggatcacttgaggatcatttgcatgggatttcaagtcctcaaacattctactcggtgaagggtttcatccgaagctatcagacttcggccttgccaaacttggccctgttggtgacaagactcacgtttcaacacgtgtcatgggaacttatggctactgtgctccagagtatgcaatgacagggcagcttacagctaaatctgatgtatatagttttggtgttgtgttccttgaactgattactggccgcaaagcaattgacaacacaaaaccccatggagagcaaaacctagttgcatgggctcgtcctctattcaaggaccgcagaaaattccctaaaatggctgatccgtcacttcagggctgtttccccatgaggggactgtatcaagctctagctgttgctgcaatgtgtttgcaagagcaggctgctacccgcccctttataggtgacgtggtcactgctctttcatacctagcttctcacacatatgatccaaatgcgcctgctcaacataatcggagtaattcatctactccgagggttagccgaggtggtgggagcaatgaccaacgccgtctccgctcatcaaaccaccactctccagatttgagaagggaagtcaccacagcatcaagatacgacgatgaggttagcagggcaaactctggtactggttctggtcgccggtctggcttggatgatgcggatatgtcaggctcacaattgggtagccctgctcacactggaaggaagaggggatctcctaggacttctgaaagccagcatgctatagcagaggccaaaacatatggggaaaattcaagaggcagaaagtgaccaaactctcagagcagcattgaccgtatgagcagaatgctgaaccagatggttcatccattcatcattcatagaaaaaaaaaatgataagttccttgctagcgccagacaggaacattgcatcagtccatctaggtcccttggtctttgtgaatagagctttcctcttttccctttacgggctattgccactgcttcttaacttctccatacaaatatcattgccaccacaaccaccatcagaactcccattcctgtcatctattcctcatgaatgcgatcatcatgcttacgagccttcgtcgtcacggtgtataacaacattcggttcacaatgtggaggtaaggcaaacatctgctctggggagcacaggatctcatccagttgggcatcttctgttgctgttgcatgctgggtgtcagcagtcacaccattgtcgaggggtgtgatgttctttttcttgaatggtttgtacctggggttacagcagttcacctgtgtttgatacatctgccttgtgacatttttgtgttgagttgtcggaacacatctattatcatctctaccataaaattgttgtggcccttgcatcttatcctatgcatgctgttttgaaaactgcttttgtccccccccccttttttttggtgcactaaactttcatccattagattttttatcgcatcagaactggatgcccatcatgaccggtgatatatccattcacttccaatgatcttttcttgaggatactccctctgtcacagaaatagtgcacctatggattcacgctggttaaacccttttttaaattgactagatttgtagaaaacattagcaatatttgtatctctaaataaatttaatgatactaattacgtacacttcagaagccatgagtctggaaactgggaaaccagcgttcaaagctggagtctgaaaggtaacattctatactattacaagcataccaaatctcagcaaccttggtctgttggataccaggacattgctatgtttgaccttcgcccaacacagcatgcggttgatgacagcttgcgtcttccctcccctttcaagagcactatccacctctgcggaaaagatgtaccgccggagaagaacacttcagaagatgtgtgcaacttctcaatcaccattttgttacgagaataccgaagagccccaagtcaattctttcagcagcttactcattttcatactcatattcaaacttcactctataaacagtataatttatagtacaaaacaatgttttagatagggctggcaaaatgctcgtgactcgtcggctcggattgacttgtttgaaattttttacgagttgagttaacattctagctcagttcgttaacaagcttgctcggtttgttaacgagacagctcgcgagctatcatatttcag

SEQ ID NO: 73218 - DNA, 2418 bp, Zea Mays
gtcctgcttgctctctctagagctgactttaggacattggaggctttgacgccttcggtgtccttgcgtccgcgtcgtgtccgcgcgcctgctgcccgccaacccgcctctcccaaatcccatccaaattcctccgcgtctttcgaagatcatattttgggaggggcaccgcccccagatcggggaggaatccccattccgtctggtgggtcggtctcccctgtccgtttttggctcttttcccctctcacaagggcggctcttggatgggctgcctgccgtgcttcgggtcggctggtgagggggcggccaaggagggcggtgcgcgcaaggacgataaatcaaaaccacagggtggactagactctaagaaggatgcagtcattttgagggaggggaataatcaacatattgcagcacacactttcacttttcgtgaacttgcagctgccactaagaacttcagacaagattgcttattgggtgagggaggttttggtcgtgtttataaaggacgtttggagaatggacaggttgttgcagtgaagcaacttgatcgcaatggccttcaaggaaacagggagtttctggttgaggttctaatgcttagtctgttgcaccatgacaatctagtaaacttaattggatactgcgctgatggagaccaacgtcttcttgtatacgagtttatgccattgggatcacttgaggatcatttgcatgggatttcaagtcctcaaacattctactcggtgaagggtttcatccgaagctatcagacttcggccttgccaaacttggccctgttggtgacaagactcacgtttcaacacgtgtcatgggaacttatggctactgtgctccagagtatgcaatgacagggcagcttacagctaaatctgatgtatatagttttggtgttgtgttccttgaactgattactggccgcaaagcaattgacaacacaaaaccccatggagagcaaaacctagttgcatgggctcgtcctctattcaaggaccgcagaaaattccctaaaatggctgatccgtcacttcagggctgtttccccatgaggggactgtatcaagctctagctgttgctgcaatgtgtttgcaagagcaggctgctacccgcccctttataggtgacgtggtcactgctctttcatacctagcttctcacacatatgatccaaatgcgcctgctcaacataatcggagtaattcatctactccgagggttagccgaggtggtgggagcaatgaccaacgccgtctccgctcatcaaaccaccactctccagatttgagaagggaagtcaccacagcatcaagatacgacgatgaggttagcagggcaaactctggtactggttctggtcgccggtctggcttggatgatgcggatatgtcaggctcacaattgggtagccctgctcacactggaaggaagaggggatctcctaggacttctgaaagccagcatgctatagcagaggccaaaacatatggggaaaattcaagaggcagaaagtgaccaaactctcagagcagcattgaccgtatgagcagaatgctgaaccagatggttcatccattcatcattcatagaaaaaaaaaatgataagttccttgctagcgccagacaggaacattgcatcagtccatctaggtcccttggtctttgtgaatagagctttcctcttttccctttacgggctattgccactgcttcttaacttctccatacaaatatcattgccaccacaaccaccatcagaactcccattcctgtcatctattcctcatgaatgcgatcatcatgcttacgagccttcgtcgtcacggtgtataacaacattcggttcacaatgtggagaagccatgagtctggaaactgggaaaccagcgttcaaagctggagtctgaaaggtaacattctatactattacaagcataccaaatctcagcaaccttggtctgttggataccaggacattgctatgtttgaccttcgcccaacacagcatgcggttgatgacagcttgcgtcttccctcccctttcaagagcactatccacctctgcggaaaagatgtaccgccggagaagaacacttcagaagatgtgtgcaacttctcaatcaccattttgttacgagaataccgaagagccccaagtcaattctttcagcagcttactcattttcatactcatattcaaacttcactctataaacagtataatttatagtacaaaacaatgttttagatagggctggcaaaatgctcgtgactcgtcggctcggattgacttgtttgaaattttttacgagttgagttaacattctagctcagttcgttaacaagcttgctcggtttgttaacgagacagctcgcgagctatcatatttcag

SEQ ID NO: 73219 - DNA, 819 bp, Zea Mays
ggaccaaggagtcgcgctggtagtctggtacagacgtacagtacagtcgctgcagcgaaagggggatcgcgcgaggcgagatggagctctcgccggtggggaggtgggccgacctccccgaggacatcgccgtagccgtcgcctcctgcctccaggaggccgacgtctgcgcgctcggcggctgctcgcgctcctggcgcagagcctgcgacgctgactgcatctgggagcgcctcttccgctgccgctggccatctgccgtggcgtcggcgtcccctgtgcaggtaccgcaaagaagggtaaagggatggaaagctctctacatcagccagcacagaagaatggctgttgcaatatctaatgtggttgaatttgtgggcagcagcttaaataatgagtcacttgaatccgaatactatctgaaagctattgctgatttggccttgatacctgatataggattcctcgatgtccagtttttcttgttctcaaggaatcatagtgcgataatcaaccttattggactgcactactcgatcgcatctttgcatgtgctggtgagttatgtactgctgatgattctattatggcggaacaggctttgtgtcgaaagaactcaacactgcttcgtttctaaattgctaaaacaactgtttctaatgctttactggaaacttcatcaacaataacgaagccttttttacttgtaactccataccttgttaaagcagctatgtaatgtcaatgttagaaaactgtttggctcctaactgattttctatttccttcgagaagctgtggtccttgcattcaaggctt

SEQ ID NO: 73220 - DNA, 398 bp, Zea Mays
ctgatgtcctctgtaccatctaccaaaaatcaaaatatggaaaatactcaaagccaactgaagtcagtaaagcactccaagctcaccgagtagcagaaagggtagtttgtgtgaacctggtcattaggtggttctatggtttccggttgcccgacgaatacgagtgccaccgaatctctctaggtgagctcaccgtggctgagggagcagagtttttcgccatccttaaccgtggagctgttcacacggtattccttctccggatcagtctggtgaacgtagacaagtgaccctaaagtacaaaaaggtacacacggccacacgccataattagctgcctggcttgttttgcgccctttgtaaatatgtgtaagcttttgttccctcgcccccccccc

SEQ ID NO: 73221 - DNA, 5154 bp, Zea Mays
tcacttcttcctcttgctcacgacatcccaaaccaatacctcgcatccgtcgctaaacttctagggaagattctggccgcgcctagtgctatggcgactgtgagtatcgcaatactgtggctttccctacgggccgcatcctcagttcaggagcatcacgaccacctccagtgctgcggccagcacgaccactgccggatcgccccagtgcgacgacgactgcgcacaacgccatagacctagcgctggctggcgcggaggagcgagccatattgcagcacatcgacaactatgcaagagacgcagggcgtcgcggacatcttcaatcaccagtgcttggctcagccagccacctgctgccagcaattagcatccatccagagtgcactcgcccaaaaggtacatccttcccccaaatcgattttatgtacagtctgctcctcttagccggtataagcattcttatatttatgcccggctctaactataaggatactttaactctgctactagcttcaaatttcaacataccccctgccagacgctaggataatattttttcagatacttgccgttgagggctttagataactttttcccttgtaaatcttcaacaaaatatgcgtttccatgtacaatgcctaccaccttgaatgggccttcccaattctacgaccatttgacgaatttattattcttatatcctataggcaaaatcgttttccataccaactctccaatctgaaacgatttcttcttcacctttttattataagctctcgccactctcagcttttctttttctatttcccttaaggctgttaatcgactttcaatatttccatcaattctgtctagcattagctcaccatatacctcagccgataaagaattctgacaagctactctgcaagcctgtaaattcacctcaataggaagcaccgcctcttgtccataaaccaattcaaatggtgtcactttagttgctccatgctgagatactcgatgagcccataacgcctctgacaacacttcatgccacctcttcggctgatctgcaattttcttctttatcaacctgatcaacaccttgtttctagattcgacctgcccattagcttgcgcatagtacggcgacgaattcaataacttgatccgcaaagatttgcaaaatctttaaattggtgagacataaaagcagctccttgatctgttgttaattttttgtggaatgccaaatctgctttcgctgtccagcaagcgacgacttaaataagccaccacactctccttctcgctatgttcttgtataagaacagcaccaatcaccctttcctgcgctgcaatatacaatctgaaaggcactcctgccttggatgccttcaacactggtggtgttaacaaatatttcttaatggcagcgaatgcttctctttgttcggctccccacctaaaatcagattcatgtttaagccgaacaaggggtgtgaacgattcaacctttccggctaaatttgatatgaacctcctcaagtaattaattttttctaataatttctgcacatcccttttgcatgtcggctcttctaattttccaatcgcttcaacctttttcggatcactcccgattccatgctcatgcacaataaagcctaaaaatctcccagccgacaccccaaatgcgcacttgaggggattcatctttaaatcatactttcgcatcctctccaatgccaaccgtaaatcagctacatgatcatcgaaaccagccgatttcaccacaacatcatcaatgtaaatctctaggttgatgcctaaaagataatgaaaaataaggttcatggcccgctgatatgttgcaccagcgttccttaatccaaatgtcatcacaacccattcaaattgtggcggaactgcccgaattattccaacttaagtgcctaagtcccgccttagaggctagaccacacttaaatgggaataacccgtcaatccctcggatctagtccgacaaggccactgacaggatcaagtaccacaatctcactcgatggtgagtcacagagcaaatacaataaaacgtaaaaccatacattaaggaatattaagttattacatcatcatcagagtttttacaaaagtaatcatcattgttcgaagtgcagcggaataaaactaacggtaaataaacagagagatggggaagcctgtcccatcactcctcatgctcctcctcagccgaggtagggtcccactcgacagtccaacccggtggcaagatggacgaccaagtcactccagcaaccatgtcctccagagaacctgaaaaattatgccacaagcaaggctgagtatactaatactcagctagacttacccggtgtgaggagtctactcctctacctctagacatacagctatttggctgtggggttgggttgccaaaagcactagctgagtttctaaatcaagttttaactttgtcaaatttaagtgtgactctcttaaggctaaaagtgtactatctactcatacatggtatcaaacatacttagcaatcaacatcttgtgtcaactcatcatatttccacttgttactcaatgtagcagctggatcaagcagtctcattagctgcgagaagcagacaattcgaatcgagtttttatccttgcaaggtaaaactaaacacacgacatgcaggggcactccgtccccacacacatcaaccgtccccatcgattccccgtcagcagagaggggctcaccgtcttggcgtacaatgcctcactgaccccgactgccgtcgtgcagtgaccgcacttgtacccaccataaccggaatgggagacctcgtctcaggtcgcgtgaggagggcaatctgctgtcaggttcaatcaggtactaggcttaccgatttaccatatttctcggtatatgtttagtacgttcaaacgcttgactcaccgtaccacactttaatccttattccaattttcatcccgtggacaaccaatccccatggattgttgtccacaacccagcatcattatgataagaaagtggatacaaccaatttcctgacctcgcgcgagtgctagaaaaatcactcgacttctaccgagatcctaattaataaagaagctacctcgacctagcatactagtattcatctcaacaggaatcctgagatcatgcaactagggtttcagtcaactcctacacctgagtgcacaatcagtcctacaatcattaagtatagtaaaatagcataaataacaggttatgcataaaccggggcttgccttccaaagcagtggcaggcagatcctctggtgcaggctctggggctggatccggggctacctcctgagcagctccttgctccggcacgaggacgtactctccgtcagcgaggttacagtctatcgaaatgcaatgaatctgtatgtcatgattatgcaggatttagtaacattatgctaaaggaagaaaaaccaagttaatgagtaacttagggtttcatggtcatacgtggcttttagtggtttatgcttatcactctaggtttaggattttgttaaagataagcatagcggattggtattccctttatatattttagtggacaatttacaaagggttttaggatgacactaatttccattattcattttcctttctttattttctatttatgaattctagtgtaggtttgaactacaacagtgaattaactttttccaaaaatcctgtaaaaattacagtggcttgccattggtcaatatagcctgttctaggactttgaggttcaaattaaaaaggctatgctctagacaaaaaaaacaaaaagttgtgtaaatgggccactttggactacaactcttaattaggggtgggttctgtcctaagggttatttttgttggcatctaacagtaataataagcttctgtgccaaaaatcatagaaagctaagggatggttatttagttgagattttccaaagtttaatgccaaaaaggcactttccactaccttgttatttgaaaaatgtcaaacagcagatttcatatttttcctatgttcttcataacaaaagattaactatcccacaggttggggtgttttcaccttggggtgattttcgtagggtttttataagtttttcttgttttcttaaaataaaaggtatcctatttattttatactaaaccagggtataatcaatttttctagtaaactacactgaataagtatactaataaaaatatgggggctccctggttctttatttaaatcacctttcctattttctttaaccttaatcataatgtaaaataaatggcaaactctaccttaatggggtgtacaaagaggtttatcatttttaaacaggttagtaggtggtcatgtacttctccaaattttcttaacctcagttaaatagtgcaactatttttcttcctattatttagcttttggccaaatcagtatttaattcagaaccctaaagttttctgtagcacataggggttttatatttttcttcagtagcttatattatttaagatctgacaaaattggtttgactcaatttggatgaataaaacagaagatatgaattattcaagtgctgtttaaattttaaatcagatttaattaaaggttttctggaaaaccactttgcaccgaagtcctcgggttatttccaaactaactctcttagttataccccccgcgctactattcatccgagtcactgacattgcgcaaaaccccctggctttctcttcttctcccccgcgatccctccctaggtttaaacagtacccgcgagaaagaaaagggtggcgcggcttaccggcggcgagagaggtccggcgagggtcggggttggctccgggaggttctgacggtcacaacggtgtacggctcgacggcggggatggccggaatctctcggtccacgtgcacaggcaggtgctctcgtcggcggcgggtgtgccggccaaaccacggcgacctagtccaatccaatggcacggtgagcttcacggggtgacgtagaggctgtgtgcacaaggaatcgaagaatggagtagaggattacccggtctacgctcgcgcggcggtcggatggagtccggcgaccgtg

SEQ ID NO: 73222 - DNA, 1200 bp, Zea Mays
tggggccccactctctgaaagtgacctatcctcgctggctatacgtctcccctccgcgcacaaaaaccctagcacgcaggcgcagccaggcctgcacccaaagcttccggagaattcctcccttgccccgccgtcgcatcctcttcgaagttcgaatcgaatcgcgccgcgatcacccacctcatggcggacaaggagcctgtcgtggagcggccagaggcgggtgaggaggaggaggacgcctcagccgccgccgccgcgggggaggaggaggacacgggcgcccaggtggctcccatcgtgcggcttgaggaggtagccgtcaccaccggcgaggaggacgaggacgtcctgctcgacatgaaggcgaagctgtaccgattcgacaaagacggtaaccaatggaaggaacggggcacgggcgctgtcaagcttctcaagcacaagcagaccggcaaggtccgcctagtcatgcgccaggctaaaacgcttaagatctgcgcgaaccacctcgtggcctccaccacgaagatgcaggagcatgcgggcagcgacaagtcgtgtgtttggcacgctgctgactttgccgatggcgaacttaaggaggagatgtttgccatcagactgcaagaagttcaaggagttggttgaggagatagctgagtcgcttacaaagaacgagggcaaggaaggtgaagatggtggttccacggctggattgctggcgaagctcactgtgagcgagggcaaatctgagggaagtggcaagtctgagtccactgattctggcaaagtgactgaaaccaaagccgacacagccccagctgagtagttggtgtggttgcacttgcacgcagattcgcctggtgctgaactagtttgtctgtccgcgtccagtggaagtttggtgccctttagccatggaatacgattgctatcatttgggcccgggccgagttggaggagtctcaggtgttcggtctggtttggtccgggcttgattttgctaaaaacttgggagtccatgggggttgggaacgtttgatatgtgagtcgctagtatttaactgcatggatcgttgtggattgcggtaaattcataaagtggaccctatatattttttatttcgttcaatacacattcatatcatcaatgatttataatggcagtgcctgtggggagacttgaatgtgtgtcca

SEQ ID NO: 73223 - DNA, 1281 bp, Zea Mays
tggggccccactctctgaaagtgacctatcctcgctggctatacgtctcccctccgcgcacaaaaaccctagcacgcaggcgcagccaggcctgcacccaaagcttccggagaattcctcccttgccccgccgtcgcatcctcttcgaagttcgaatcgaatcgcgccgcgatcacccacctcatggcggacaaggagcctgtcgtggagcggccagaggcgggtgaggaggaggaggacgcctcagccgccgccgccgcgggggaggaggaggacacgggcgcccaggtggctcccatcgtgcggcttgaggaggtagccgtcaccaccggcgaggaggacgaggacgtcctgctcgacatgaaggcgaagctgtaccgattcgacaaagacggtaaccaatggaaggaacggggcacgggcgctgtcaagcttctcaagcacaagcagaccggcaaggtccgcctagtcatgcgccaggctaaaacgcttaagatctgcgcgaaccacctcgtggcctccaccacgaagatgcaggagcatgcgggcagcgacaagtcgtgtgtttggcacgctgctgactttgccgatggcgaacttaaggaggagatgtttgccatcaggtttggttcggtagaaagcatccaattttggtggcctggggttgacattgctgcctgggaagcttccaaccaaatccaaaaactgcaagaagttcaaggagttggttgaggagatagctgagtcgcttacaaagaacgagggcaaggaaggtgaagatggtggttccacggctggattgctggcgaagctcactgtgagcgagggcaaatctgagggaagtggcaagtctgagtccactgattctggcaaagtgactgaaaccaaagccgacacagccccagctgagtagttggtgtggttgcacttgcacgcagattcgcctggtgctgaactagtttgtctgtccgcgtccagtggaagtttggtgccctttagccatggaatacgattgctatcatttgggcccgggccgagttggaggagtctcaggtgttcggtctggtttggtccgggcttgattttgctaaaaacttgggagtccatgggggttgggaacgtttgatatgtgagtcgctagtatttaactgcatggatcgttgtggattgcggtaaattcataaagtggaccctatatattttttatttcgttcaatacacattcatatcatcaatgatttataatggcagtgcctgtggggagacttgaatgtgtgtcca

SEQ ID NO: 73224 - DNA, 1971 bp, Zea Mays
aacagtaataaataaacaaatgaaaatgattacgattaagccgtcgacagcgtgtagtggagacgctattaacccaaccagcgacaaaagccgtaaaggatgctacactgccaaccagctagccgcttgtttcattctttcttcctgctttcttctaccttcttcccccatcgtccgtagtagcttgattccctatgccgggtaggcggtagcatcgctctctgatctcacctacaccgctacacttaaacagcaggtaccaggaacaggcagggatcggagagctgctggccatggagcctggtcccgacgggcctgctggtggccaaggaaccagtgcgccagcggaggccgggccgtctccgtcgtcgtcatcggccgccgcagccgcctcgtcgtcgagtcggaagcaggcagagcagcaagcgccgccgcagcaacaagcaggagcacagcagaggcaacagcaggcagcaagggcccagcatcaggaagctccagcgccgcaggcggcccaggcccaaccgcagccactggcgcagcagcctccgccgcctcctcctccagcggggctgagccggtacgagtcgcagaagcgccgcgactggaacacgttcctgcagtacctgcggaaccacaagccgccactgacgctggcccgctgcagcggcgcgcacgtcatcgagttcctccgctacctggaccagttcggcaagaccaaggtgcacaccgagggctgcgcccacttcggccagcccaacccgccggcgccctgcgcgtgcccgctgcgccaggcgtggggcagcctcgacgcgctcatcggccgcctccgcgccgcgtacgaggagtccggcggccgccccgagtccaacccgttcgcggccaaggccgtgcgcatctacctccgcgacgtgcgggaggcgcaggccaaggcgcgcggcatcccctacgagaagaggaagcgcaagcgcggaagcgcggccgcggcgcctccagttgcgccgcctcctgttgtaactgcagagaccgcagggaccacgtcagggaccgtctgtgacgaggaggaggaaccatcgccgtctgcaggtgatgaaccacagaagcagaccaccacgccgacgtccgcctcggctcctcctacaagtacttccagcgctagtgcaagtagtagcagtgccgccgcggccaccacgtcgacgacgacgacaaggaaggaggaagaaggatccgcgccaagctcgtgataagtgcagatcatctacatatcatcacctcccaattctaatcccacctccatcttaaatttttagttgcctattattactatatatttttattgcttattgatataagagaggtctaagggactaggatcatgttaggagtacatccatataaatgaaacatatatatatcagttcatttgaagagaaaaaaataaaatagattgcaggaacatgaagtagtagggaaagataagttctctgttccaactctctctctctctctctaacaaagtttatgaataatgaagatgttaagacattctagggtagatgatcatcacctatatatggaacaaataagcttttccgtctgctgattggaaatgatatggggtcacactgatatggatttctagtatatgatgtctgtgttcctgcttagcaagtaatcatgattgtgtcagtagtgcagctagcctgtggagactctcatcatccattattatattctcttaattaagcagtttattttccctccattttctgggtcccttgtttgcgagcaaggatattggagtggattacagaggttaaaattcccttatttaaaaaaatgaattggaaggagagattttagcccatccaatctactttgatatttttgctctcaaacaagctcttataggacccacacacctctctatatatacataatatttgaacagtagttgtctatatgaacctc

SEQ ID NO: 73225 - DNA, 1861 bp, Zea Mays
ttatgtaacttcctacggctttactctaggaagttatattttttattttaaacctctcctcaaccttatctcttctctcacctttctcaactcgtctctctctgtctcttgtagccgccagccgcccccgccgctcactccatgccacggccgcccctgtcgcgcccggccacccccggccccggtcgcccttgccgcggacgcccctgtgtgagccgccggcgcgcgctcgccgctccgcccctacgcgcagtcgccacgggagctcatatcgctcgatttcctctccggtggcagcaccctccacccctcatcaacccaacccgcaagaaaaacccgcagcagagaagaggagtcgtcgtgaccgagagctccagagcatgcccccgccacagcctctgacgatggatccaaagatgacagaggtgacccagatgttcgcccgcttcaagacggcctacgcctgcaacgacctcaacacctgtgtcaccctcctctcgcagctcaaggtccatctcacccaattccccagccatccggccttgtttcagcagacaccgaacattgtggaggagctcaaacttgcaagggacatttatgagcatgctgttgttttgagtatgaaatttgaggaccaagatgcgtttgaacgcaatttctgccagctgaagccttattacgtggatacatggttagttctttgtcacccaatttgtcgattttattttcctttattattttgatttctatttttttaggctgaattcatgtgatgcttcaggtaataaaaagtttaaagctgattgcgaaaggcatatttttcttatgcacaagcattattaaattggttgtggctgcatttgtaaattgagatactaaactagtggaagcaaaggacttatttgagttgtttaactagtctaagtgaaaactaaacccaacgtttctgtcagacccatcagattatcaagtacttttaagtattaactaaaagaatagcccgcacattgttgtgggactttcttagaaataaatttggtatatgcatatcgttactgtatgttctctggatactatgtatgtatatttatgatattgactcgcatgttattttattgcaacagatctggtaaaaaaggcaagctaatggaagaaaagccaatagaatattagagatcacattatagaaagataggatgatgaaacaaataacatatgttgataacttgtacattgatagattaaagattaaaagtattgtgcataatagggatgacgcggatatttttttataatcatcaaaggatggcattgacagtttgcatgaaagggtagcaagttagtagggcatttagtggggaagatgtggacaccttgcatgaagagagagatatagaacatctagtggggattagctttatagagtatatagataaattcataagcttccactattgctcgacgtcccggtgccccccccccacctctgttcattatccttggtcttcacctccacctgtacctacatctccatctaccgaacatcagacccctccaactaccttaccgacgcatgaacaagatggcgagttagacttagtagaaaccctcttcactagtggaggtatcgaccatcactcttcactgtaacccgatggtgatcagcgaccgtgagcttccatgttattgcgttatgatacttgagacttttattatgactatgtatgagatattgtctcttattagtactggatgatgagatgtgtcttattatgactatggatgagacttttgtgatgtaattgatgagactatggatgagacttttgtgatgtaattgatgagactatggatttaaata

SEQ ID NO: 73226 - DNA, 1480 bp, Zea Mays
gttttgtcatgtttgggctgctttcgatttatttgtagggtctgtttcgtgggtgtcgtccgcgccggagcagtttgcactctgaagcgggttacaaccttacagggagaaaggacatagtttagcaggtccatctcacccaattccccagccatccggccttgtttcagcagacaccgaacattgtggaggagctcaaacttgcaagggacatttatgagcatgctgttgttttgagtatgaaatttgaggaccaagatgcgtttgaacgcaatttctgccagctgaagccttattacgtggatacatggttagttctttgtcacccaatttgtcgattttattttcctttattattttgatttctatttttttaggctgaattcatgtgatgcttcaggtaataaaaagtttaaagctgattgcgaaaggcatatttttcttatgcacaagcattattaaattggttgtggctgcatttgtaaattgagatactaaactagtggaagcaaaggacttatttgagttgtttaactagtctaagtgaaaactaaacccaacgtttctgtcagacccatcagattatcaagtacttttaagtattaactaaaagaatagcccgcacattgttgtgggactttcttagaaataaatttggtatatgcatatcgttactgtatgttctctggatactatgtatgtatatttatgatattgactcgcatgttattttattgcaacagatctggtaaaaaaggcaagctaatggaagaaaagccaatagaatattagagatcacattatagaaagataggatgatgaaacaaataacatatgttgataacttgtacattgatagattaaagattaaaagtattgtgcataatagggatgacgcggatatttttttataatcatcaaaggatggcattgacagtttgcatgaaagggtagcaagttagtagggcatttagtggggaagatgtggacaccttgcatgaagagagagatatagaacatctagtggggattagctttatagagtatatagataaattcataagcttccactattgctcgacgtcccggtgccccccccccacctctgttcattatccttggtcttcacctccacctgtacctacatctccatctaccgaacatcagacccctccaactaccttaccgacgcatgaacaagatggcgagttagacttagtagaaaccctcttcactagtggaggtatcgaccatcactcttcactgtaacccgatggtgatcagcgaccgtgagcttccatgttattgcgttatgatacttgagacttttattatgactatgtatgagatattgtctcttattagtactggatgatgagatgtgtcttattatgactatggatgagacttttgtgatgtaattgatgagactatggatgagacttttgtgatgtaattgatgagactatggatttaaata

SEQ ID NO: 73227 - DNA, 1057 bp, Zea Mays
gtttgcactctgaagcgggttacaaccttacagggagaaaggacatagtttagcaggtccatctcacccaattccccagccatccggccttgtttcagcagacaccgaacattgtggaggagctcaaacttgcaagggacatttatgagcatgctgttgttttgagtatgaaatttgaggaccaagatgcgtttgaacgcaatttctgccagctgaagccttattacgtggatacatgatctggtaaaaaaggcaagctaatggaagaaaagccaatagaatattagagatcacattatagaaagataggatgatgaaacaaataacatatgttgataacttgtacattgatagattaaagattaaaagtattgtgcataatagggatgacgcggatatttttttataatcatcaaaggatggcattgacagtttgcatgaaagggtagcaagttagtagggcatttagtggggaagatgtggacaccttgcatgaagagagagatatagaacatctagtggggattagctttatagagtatatagataaattcataagcttccactattgctcgacgtcccggtgccccccccccacctctgttcattatccttggtcttcacctccacctgtacctacatctccatctaccgaacatcaggtatgcatattcatcatcatttatttgttgttagttatattatgatgtaactcaacaaatgttatttgtacatgtatattagacccctccaactaccttaccgacgcatgaacaagatggcgagttagacttagtagaaaccctcttcactagtggaggtatcgaccatcactcttcactgtaacccgatggtgatcagcgaccgtgagcttccatgttattgcgttatgatacttgagacttttattatgactatgtatgagatattgtctcttattagtactggatgatgagatgtgtcttattatgactatggatgagacttttgtgatgtaattgatgagactatggatgagacttttgtgatgtaattgatgagactatggatttaaata

SEQ ID NO: 73228 - DNA, 1330 bp, Zea Mays
agttttcgtccttatgactaagctatctagtgatttagtagcagaaaagatcaagaggggacatttatgagcatgctgttgttttgagtatgaaatttgaggaccaagatgcgtttgaacgcaatttctgccagctgaagccttattacgtggatacatggttagttctttgtcacccaatttgtcgattttattttcctttattattttgatttctatttttttaggctgaattcatgtgatgcttcaggtaataaaaagtttaaagctgattgcgaaaggcatatttttcttatgcacaagcattattaaattggttgtggctgcatttgtaaattgagatactaaactagtggaagcaaaggacttatttgagttgtttaactagtctaagtgaaaactaaacccaacgtttctgtcagacccatcagattatcaagtacttttaagtattaactaaaagaatagcccgcacattgttgtgggactttcttagaaataaatttggtatatgcatatcgttactgtatgttctctggatactatgtatgtatatttatgatattgactcgcatgttattttattgcaacagatctggtaaaaaaggcaagctaatggaagaaaagccaatagaatattagagatcacattatagaaagataggatgatgaaacaaataacatatgttgataacttgtacattgatagattaaagattaaaagtattgtgcataatagggatgacgcggatatttttttataatcatcaaaggatggcattgacagtttgcatgaaagggtagcaagttagtagggcatttagtggggaagatgtggacaccttgcatgaagagagagatatagaacatctagtggggattagctttatagagtatatagataaattcataagcttccactattgctcgacgtcccggtgccccccccccacctctgttcattatccttggtcttcacctccacctgtacctacatctccatctaccgaacatcagacccctccaactaccttaccgacgcatgaacaagatggcgagttagacttagtagaaaccctcttcactagtggaggtatcgaccatcactcttcactgtaacccgatggtgatcagcgaccgtgagcttccatgttattgcgttatgatacttgagacttttattatgactatgtatgagatattgtctcttattagtactggatgatgagatgtgtcttattatgactatggatgagacttttgtgatgtaattgatgagactatggatgagacttttgtgatgtaattgatgagactatggatttaaata

SEQ ID NO: 73229 - DNA, 1055 bp, Zea Mays
gagtgaacacgtcacccttggtattcttccagcttccaggctctacgccgcttctagcgccccgatacgcggcgccggcgcaggcgtgcagccatggcgatgagctggatccgatcggttgttaggagggccctcatcgctccgaagccgcggggctcccgccagtttactgtcaccgccgccggcggcggcgcgacgcagaccgaaagggtggcggcggagatggtccgctacgccctcggcggcgccgtgcaccggagctcgccagaggaggcgatgcggatactggagcaaggcgcctcgaacctgcagggaggaggcgagggcagtgccgaagctgttgggttgctcatgctcgctatgtccacgctgctttaccggaggtgcggtgcgctgcaccactcatttttgtaaatgcgaacatttcttttacaaatgtcgcggaccctcaaagctgcaatgtggtggatccggtttgggccaattgatcttgatctgggcggctagttatagagttttagcttggtataggtgaagtagttaggcatgtttgggcatatatgatagtatgacactagagtgcacttgacaaagctgagcagattggaggaggtgtgcttgtcttgtgggtgcatgctcccctactagagtgaatgtgtgcatattggaaatgtattggtgcatgatgatagtacagatgatacatcaacgtcgaatctcataccttttgcacttcggctttcaatccaataaaaaatttggcagcttttgctaaccctgtgccctgtatcatggtggttttggctcttctttttgctcaatttgtcctctgaccttaagttatttagatttatatatccgtgatatttaggaaggatttgggcatagcatacattatataaagaacataggatgagtggatgtgtcttccagagaccagagtgcaaattgggatattgtttatgcattaactcatgaggtagtctgaatctggaggataaacaaatggagaatataccttttacaaacgttttactttaacattacaactttcg

SEQ ID NO: 73230 - DNA, 1789 bp, Zea Mays
gagtgaacacgtcacccttggtattcttccagcttccaggctctacgccgcttctagcgccccgatacgcggcgccggcgcaggcgtgcagccatggcgatgagctggatccgatcggttgttaggagggccctcatcgctccgaagccgcggggctcccgccagtttactgtcaccgccgccggcggcggcgcgacgcagaccgaaagggtggcggcggagatggtccgctacgccctcggcggcgccgtgcaccggagctcgccagaggaggcgatgcggatactggagcaaggcgcctcgaacctgcagggaggaggcgagggcagtgccgaagctgttgggttgctcatgctcgctatgtccacgctgctttaccggagtggaagacgtcaagacgcagtggaaaagctcaaagcaacccaacaagttgccccttctgcagtttttagagcgtgggaagcactaatgggattacacatggaggcagggcaggagatgtcatacttgatttccccaaatgattcagttgatctgtcaatcaaatatgatagcaaatggtctgatcaggaccatcttaaatttcgggttaatgctgtcagaggacttgttacacttctgaatggagaaacagaatcagctgcccagctgttcgatggttggtgcagagacttttctagaggcgaaaaccaaacagaaaatgctgccgtttcatacggtgaatatttgcattgtgttggggattttcaaatggcagcacaagtgtatgagaaaattctcgaggcattttgcatggatgatatgtctggaaaccttttagcagctggaaacatggttcccgaggaggcttctcttggggccacttgctcatatggccagcttttatctcactctgggaagtttgctgaggcagaggattatctcacaagagctctacagaaggctgaagaacaatttggtgcaaaccacccaaaggtcggcattatattgacctgtgtagctagaatgtacaaactaaaggcaaaatctgaaggttctacttcaattatggtccaggaggggctgtacaggaaggccctagaagtattgaaagcccctgctattaattctgagggtaaaaacaacgatctcctatcaatgataaggttcctcttgatatgttgatattatttttattctgtaggtaccagcaaacaggttgactggagagatatcatctccctcgctagaggtgagtacgcggagctgttattaattcagtctaataggaaggcggaaggtgaacggatgaagcagtgggcagaagatgcttggaggaaccgtaggctaacgctagcacaagctctagagttttcagaaccttcaaagccgactgtcgttgttgacacccgaatcggcagggtcgtgtagcttcagtcaacaatctcgtgagatgcacaaatgaagcaatccgtggatgcacctcgtgtcgtgtatattttcgaaagtgttgctccttgcgggctgcatccggtttgatccgttcaagtcccagcacactcgcctgcttgtttttcatatcacctttttgaatagggggacattcgaggatcacaaagcttgtgcatgtgatcactttaaacatttaatagcatatgtatatgttattgtacacagaataacaccacttaaagcatctttacattttgattgctatatacatgaagctcttatattttttttatttccactccttttatgcataccatgaggtggagttacagttttgtgcagaagggatagagtgctt

SEQ ID NO: 73231 - DNA, 1644 bp, Zea Mays
gagtgaacacgtcacccttggtattcttccagcttccaggctctacgccgcttctagcgccccgatacgcggcgccggcgcaggcgtgcagccatggcgatgagctggatccgatcggttgttaggagggccctcatcgctccgaagccgcggggctcccgccagtttactgtcaccgccgccggcggcggcgcgacgcagaccgaaagggtggcggcggagatggtccgctacgccctcggcggcgccgtgcaccggagctcgccagaggaggcgatgcggatactggagcaaggcgcctcgaacctgcagggaggaggcgagggcagtgccgaagctgttgggttgctcatgctcgctatgtccacgctgctttaccggagtggaagacgtcaagacgcagtggaaaagctcaaagcaacccaacaagttgccccttctgcagtttttagagttgcagcgtgggaagcactaatgggattacacatggaggcagggcagttgatctgtcaatcaaatatgatagcaaatggtctgatcaggaccatcttaaatttcgggttaatgctgtcagaggacttgttacacttctgaatggagaaacagaatcagctgcccagctgttcgatggttggtgcagagacttttctagaggcgaaaaccaaacagaaaatgctgccgtttcatacggtgaatatttgcattgtgttggggattttcaaatggcagcacaagtgtatgagaaaattctcgaggcattttgcatggatgatatgtctggaaaccttttagcagctggaaacatggttcccgaggaggcttctcttggggccacttgctcatatggccagcttttatctcactctgggaagtttgctgaggcagaggattatctcacaagagctctacagaaggctgaagaacaatttggtgcaaaccacccaaaggtcggcattatattgacctgtgtagctagaatgtacaaactaaaggcaaaatctgaaggttctacttcaattatggtccaggaggggctgtacaggaaggccctagaagtattgaaagcccctgctattaattctgagggtgagtacgcggagctgttattaattcagtctaataggaaggcggaaggtgaacggatgaagcagtgggcagaagatgcttggaggaaccgtaggctaacgctagcacaagctctagagttttcagaaccttcaaagccgactgtcgttgttgacacccgaatcggcagggtcgtgtagcttcagtcaacaatctcgtgagatgcacaaatgaagcaatccgtggatgcacctcgtgtcgtgtatattttcgaaagtgttgctccttgcgggctgcatccggtttgatccgttcaagtcccagcacactcgcctgcttgtttttcatatcacctttttgaatagggggacattcgaggatcacaaagcttgtgcatgtgatcactttaaacatttaatagcatatgtatatgttattgtacacagaataacaccacttaaagcatctttacattttgattgctatatacatgaagctcttatattttttttatttccactccttttatgcataccatgaggtggagttacagttttgtgcagaagggatagagtgctt

SEQ ID NO: 73232 - DNA, 1675 bp, Zea Mays
gagtgaacacgtcacccttggtattcttccagcttccaggctctacgccgcttctagcgccccgatacgcggcgccggcgcaggcgtgcagccatggcgatgagctggatccgatcggttgttaggagggccctcatcgctccgaagccgcggggctcccgccagtttactgtcaccgccgccggcggcggcgcgacgcagaccgaaagggtggcggcggagatggtccgctacgccctcggcggcgccgtgcaccggagctcgccagaggaggcgatgcggatactggagcaaggcgcctcgaacctgcagggaggaggcgagggcagtgccgaagctgttgggttgctcatgctcgctatgtccacgctgctttaccggagtggaagacgtcaagacgcagtggaaaagctcaaagcaacccaacaagttgccccttctgcagtttttagagttgcagcgtgggaagcactaatgggattacacatggaggcagggcagttgatctgtcaatcaaatatgatagcaaatggtctgatcaggaccatcttaaatttcgggttaatgctgtcagaggacttgttacacttctgaatggagaaacagaatcagctgcccagctgttcgatggttggtgcagagacttttctagaggcgaaaaccaaacagaaaatgctgccgtttcatacggtgaatatttgcattgtgttggggattttcaaatggcagcacaagtgtatgagaaaattctcgaggcattttgcatggatgatatgtctggaaaccttttagcagctggaaacatggttcccgaggaggcttctcttggggccacttgctcatatggccagcttttatctcactctgggaagtttgctgaggcagaggattatctcacaagagctctacagaaggctgaagaacaatttggtgcaaaccacccaaaggtcggcattatattgacctgtgtagctagaatgtacaaactaaaggcaaaatctgaaggttctacttcaattatggtccaggaggggctgtacaggaaggccctagaagtattgaaagcccctgctattaattctgagggtaaaaacaacgatctcctatcaatgataaggtgagtacgcggagctgttattaattcagtctaataggaaggcggaaggtgaacggatgaagcagtgggcagaagatgcttggaggaaccgtaggctaacgctagcacaagctctagagttttcagaaccttcaaagccgactgtcgttgttgacacccgaatcggcagggtcgtgtagcttcagtcaacaatctcgtgagatgcacaaatgaagcaatccgtggatgcacctcgtgtcgtgtatattttcgaaagtgttgctccttgcgggctgcatccggtttgatccgttcaagtcccagcacactcgcctgcttgtttttcatatcacctttttgaatagggggacattcgaggatcacaaagcttgtgcatgtgatcactttaaacatttaatagcatatgtatatgttattgtacacagaataacaccacttaaagcatctttacattttgattgctatatacatgaagctcttatattttttttatttccactccttttatgcataccatgaggtggagttacagttttgtgcagaagggatagagtgctt

SEQ ID NO: 73233 - DNA, 1709 bp, Zea Mays
gagtgaacacgtcacccttggtattcttccagcttccaggctctacgccgcttctagcgccccgatacgcggcgccggcgcaggcgtgcagccatggcgatgagctggatccgatcggttgttaggagggccctcatcgctccgaagccgcggggctcccgccagtttactgtcaccgccgccggcggcggcgcgacgcagaccgaaagggtggcggcggagatggtccgctacgccctcggcggcgccgtgcaccggagctcgccagaggaggcgatgcggatactggagcaaggcgcctcgaacctgcagggaggaggcgagggcagtgccgaagctgttgggttgctcatgctcgctatgtccacgctgctttaccggagtggaagacgtcaagacgcagtggaaaagctcaaagcaacccaacaagttgccccttctgcagtttttagagttgcagcgtgggaagcactaatgggattacacatggaggcagggcaggagatgtcatacttgatttccccaaatgattcagttgatctgtcaatcaaatatgatagcaaatggtctgatcaggaccatcttaaatttcgggttaatgctgtcagaggacttgttacacttctgaatggagaaacagaatcagctgcccagctgttcgatggttggtgcagagacttttctagaggcgaaaaccaaacagaaaatgctgccgtttcatacggtgaatatttgcattgtgttggggattttcaaatggcagcacaagtgtatgagaaaattctcgaggcattttgcatggatgatatgtctggaaaccttttagcagctggaaacatggttcccgaggaggcttctcttggggccacttgctcatatggccagcttttatctcactctgggaagtttgctgaggcagaggattatctcacaagagctctacagaaggctgaagaacaatttggtgcaaaccacccaaaggtcggcattatattgacctgtgtagctagaatgtacaaactaaaggcaaaatctgaaggttctacttcaattatggtccaggaggggctgtacaggaaggccctagaagtattgaaagcccctgctattaattctgagggtaaaaacaacgatctcctatcaatgataaggtgagtacgcggagctgttattaattcagtctaataggaaggcggaaggtgaacggatgaagcagtgggcagaagatgcttggaggaaccgtaggctaacgctagcacaagctctagagttttcagaaccttcaaagccgactgtcgttgttgacacccgaatcggcagggtcgtgtagcttcagtcaacaatctcgtgagatgcacaaatgaagcaatccgtggatgcacctcgtgtcgtgtatattttcgaaagtgttgctccttgcgggctgcatccggtttgatccgttcaagtcccagcacactcgcctgcttgtttttcatatcacctttttgaatagggggacattcgaggatcacaaagcttgtgcatgtgatcactttaaacatttaatagcatatgtatatgttattgtacacagaataacaccacttaaagcatctttacattttgattgctatatacatgaagctcttatattttttttatttccactccttttatgcataccatgaggtggagttacagttttgtgcagaagggatagagtgctt

SEQ ID NO: 73234 - DNA, 1846 bp, Zea Mays
gccgccgcggcgatccctctcctccacttcctcatcacaacattcaagaacagaccggggccttgcgcaaaagaacaaaaaaaatctcagaacacacacacacacctctatcgccccgacctcgacgcgacccctctcgcttggatccggacggcccggtccctccgccctcccatgcgcacggcgccgccgccgccgccgcagccgacatgacgctcgcctccctcgcccgcgccctcggccggtccgcgcgctcctcccgcccgcgccagggtttccagctcgggggcctccggcagccgcccgcgccaccgctaccgccgcccgtccacggcggtgagggtggggcggcaggatttgttcgcagctacctgactgcggcctcgtcggcagctcttgggaagccatccgcgggcaagaccgtggattggagatatgtcctcgccagcccacatttccgacgcctcttctcggacgggtccaagaagaactacgagaactattaccccaagggtaagaaggaggtgcctaaaggagatggtacaaacaagtctgaatctaagcaggaatccaatacagatgaaggatggaattttcaggataatgctatgaaacacatgcagaatttccttgcgcctttattgattcttggcctgatgctatcatccatgtcatctagctctgcagaccagaaggaggtcattagcaaactggagcgccgtactgttgcttaccatgaatctggacatgcagttgctggatggttcttggaacatgctgagcctcttctaaaagttacaattgttcctcgtggaacagctgctttaggctttgcacaatacgtcccaaatgaaaatcttttgatgacaaaagagcagctttttgatatgacatgcatgacattaggtggccgtgctgcagaggaggttttgattggcaaaatctcaactggtgctcagaatgacctggagaaagttaccaaaatgacatatgcacaggtcgccgtgtatggttttagtgaaaaggttgggcttctgtccttcccccagaaagatggtggtttcgaaatgagcaagccttacagtaatcagacagcatccatcatcgacgatgaggtccgggaatgggttggcaaggcctacaagaaaacagttgaattgataacagagcacaaggagcaagttgcacagatcgcagaattgctgctcgagaaggaagtcctacaccaggacgatctaaccagggtactaggagaacgtccattcaaggcactggagccaaccaactacgacctctttaagaaaggtttcgaggatggtggtgacaacagccaagcaccagcagagaacgccgagctgcctgatgattcatctcccccagttggtgacgttgtacccacgtagtgtttctctcctcaacgtcagagctgtacattgagcgctcattctcgatagattcttgtttgttggttgcatcataaaaaagatctgtataaattcgcgcccaagctgattatgccactgtggaaatgcatttggatttccgtagtgtcagtccggtcgatagggtgccttgggttcttcatggcacgagcaaatgttctgattcttgtattcgaatgttttgaaatattctgtctgacgggactgcggagttggcgcgagaagtgtgcttgttcagttctatctgaaggcttagctgtctgtagctgtagctggtaacaacagtggctaaaatggtacctctgaaatctttgtgacagtaacaagccattttcctttgaatttttatcaggtagtcggcgcgattactttgtttgacaagcacaaactaaatgtcttggttt

SEQ ID NO: 73235 - DNA, 2553 bp, Zea Mays
aacgtcctctaaattcgaggaatccaatacagatgaaggatggaattttcaggataatgctatgaaacacatgcagaatttccttgcgcctttattgattcttggcctgatgctatcatccatgtcatctagctctgcagaccagaaggagataagcttccaagagttcaagaacaagttactagaacctggtttagttgatcgcattgttgtttcaaataaatcagtagcgaaggtctacatcaggagttcacctcatccaaagagccaaggccaagatagtgatatccatattactaccactgatgctccaggcaagcctgctcccagcagatgcaagtattacttcaatattggtagtgttgatttgtttgaagagaagttagaggaagcccaggaagctttgggaatagatccacatgattttgtcccagtaacttatgttgctgaagtaaattggttccaagaagttatgaggtttgccccaacagcattgattgttggtctattatatttcacgggaaaaaggatgcagagtggtttcaatattggaggtggtgctggcaaaggaagaggaggtattttcaacattggaaaagctacagtgatgaagatggacaagaactccaaaaataaggtgttttttaaggatgtagccggttgtgacgaagcaaaacaagaaataatggagtttgtgcatttccttaaaaaccctaagaagtatgaagatttgggagctaaaatacccaaaggtgctctacttgtaggccctcctgggacagggaagactttgctcgccaaagctacagcaggagagtctggtgtgccatttttgtctatttctggttcagatttcatggaaatgtttgttggtgttggaccgtccagggtacggaacttgttccaagaagctaggcagtgtgctcctagtattgtattcattgacgaaatcgatgctattggtcgtgcaagaggacgtggaggtttttcaggttcaaatgatgaacgtgagagtactttgaaccagctgcttgtagagatggatggatttggaacaacttctggtgttgttgttcttgctgggacaaatagacctgacatcctggataaggcattattaaggccaggaagatttgatcgccagatagcaattgacaaaccagatataaagggccgtgatcaaatattccgcatatatcttaaaaagcttaagttggacaacaaaccatcattttattctcaaaggctagctgccttgacacctgggttcgcaggagctgacattgccaatgtttgtaatgaagctgctttaattgctgcgagaagtgaggaaactcagattaccatgcagcattttgagtccgcaattgataggattatcggtggtttggagaagaaaaatagggtcattagcaaactggagcgccgtactgttgcttaccatgaatctggacatgcagttgctggatggttcttggaacatgctgagcctcttctaaaagttacaattgttcctcgtggaacagctgctttaggctttgcacaatacgtcccaaatgaaaatcttttgatgacaaaagagcagctttttgatatgacatgcatgacattaggtggccgtgctgcagaggaggttttgattggcaaaatctcaactggtgctcagaatgacctggagaaagttaccaaaatgacatatgcacaggtcgccgtgtatggttttagtgaaaaggttgggcttctgtccttcccccagaaagatggtggtttcgaaatgagcaagccttacagtaatcagacagcatccatcatcgacgatgaggtccgggaatgggttggcaaggcctacaagaaaacagttgaattgataacagagcacaaggagcaagttgcacagatcgcagaattgctgctcgagaaggaagtcctacaccaggacgatctaaccagggtactaggagaacgtccattcaaggcactggagccaaccaactacgacctctttaagaaaggtttcgaggatggtggtgacaacagccaagcaccagcagagaacgccgagctgcctgatgattcatctcccccagttggtgacgttgtacccacgtagtgtttctctcctcaacgtcagagctgtacattgagcgctcattctcgatagattcttgtttgttggttgcatcataaaaaagatctgtataaattcgcgcccaagctgattatgccactgtggaaatgcatttggatttccgtagtgtcagtccggtcgatagggtgccttgggttcttcatggcacgagcaaatgttctgattcttgtattcgaatgttttgaaatattctgtctgacgggactgcggagttggcgcgagaagtgtgcttgttcagttctatctgaaggcttagctgtctgtagctgtagctggtaacaacagtggctaaaatggtacctctgaaatctttgtgacagtaacaagccattttcctttgaatttttatcaggtagtcggcgcgattactttgtttgacaagcacaaactaaatgtcttggttt

SEQ ID NO: 73236 - DNA, 2475 bp, Zea Mays
ctttgactgtgaattcaatattgggaattcattgttttctgtaactaaaaactgtcaagcaatatcatttcatataagcttccaagagttcaagaacaagttactagaacctggtttagttgatcgcattgttgtttcaaataaatcagtagcgaaggtctacatcaggagttcacctcatccaaagagccaaggccaagatagtgatatccatattactaccactgatgctccaggcaagcctgctcccagcagatgcaagtattacttcaatattggtagtgttgatttgtttgaagagaagttagaggaagcccaggaagctttgggaatagatccacatgattttgtcccagtaacttatgttgctgaagtaaattggttccaagaagttatgaggtttgccccaacagcattgattgttggtctattatatttcacgggaaaaaggatgcagagtggtttcaatattggaggtggtgctggcaaaggaagaggaggtattttcaacattggaaaagctacagtgatgaagatggacaagaactccaaaaataaggtgttttttaaggatgtagccggttgtgacgaagcaaaacaagaaataatggagtttgtgcatttccttaaaaaccctaagaagtatgaagatttgggagctaaaatacccaaaggtgctctacttgtaggccctcctgggacagggaagactttgctcgccaaagctacagcaggagagtctggtgtgccatttttgtctatttctggttcagatttcatggaaatgtttgttggtgttggaccgtccagggtacggaacttgttccaagaagctaggcagtgtgctcctagtattgtattcattgacgaaatcgatgctattggtcgtgcaagaggacgtggaggtttttcaggttcaaatgatgaacgtgagagtactttgaaccagctgcttgtagagatggatggatttggaacaacttctggtgttgttgttcttgctgggacaaatagacctgacatcctggataaggcattattaaggccaggaagatttgatcgccagatagcaattgacaaaccagatataaagggccgtgatcaaatattccgcatatatcttaaaaagcttaagttggacaacaaaccatcattttattctcaaaggctagctgccttgacacctgggttcgcaggagctgacattgccaatgtttgtaatgaagctgctttaattgctgcgagaagtgaggaaactcagattaccatgcagcattttgagtccgcaattgataggattatcggtggtttggagaagaaaaatagggtcattagcaaactggagcgccgtactgttgcttaccatgaatctggacatgcagttgctggatggttcttggaacatgctgagcctcttctaaaagttacaattgttcctcgtggaacagctgctttaggctttgcacaatacgtcccaaatgaaaatcttttgatgacaaaagagcagctttttgatatgacatgcatgacattaggtggccgtgctgcagaggaggttttgattggcaaaatctcaactggtgctcagaatgacctggagaaagttaccaaaatgacatatgcacaggtcgccgtgtatggttttagtgaaaaggttgggcttctgtccttcccccagaaagatggtggtttcgaaatgagcaagccttacagtaatcagacagcatccatcatcgacgatgaggtccgggaatgggttggcaaggcctacaagaaaacagttgaattgataacagagcacaaggagcaagttgcacagatcgcagaattgctgctcgagaaggaagtcctacaccaggacgatctaaccagggtactaggagaacgtccattcaaggcactggagccaaccaactacgacctctttaagaaaggtttcgaggatggtggtgacaacagccaagcaccagcagagaacgccgagctgcctgatgattcatctcccccagttggtgacgttgtacccacgtagtgtttctctcctcaacgtcagagctgtacattgagcgctcattctcgatagattcttgtttgttggttgcatcataaaaaagatctgtataaattcgcgcccaagctgattatgccactgtggaaatgcatttggatttccgtagtgtcagtccggtcgatagggtgccttgggttcttcatggcacgagcaaatgttctgattcttgtattcgaatgttttgaaatattctgtctgacgggactgcggagttggcgcgagaagtgtgcttgttcagttctatctgaaggcttagctgtctgtagctgtagctggtaacaacagtggctaaaatggtacctctgaaatctttgtgacagtaacaagccattttcctttgaatttttatcaggtagtcggcgcgattactttgtttgacaagcacaaactaaatgtcttggttt

SEQ ID NO: 73237 - DNA, 947 bp, Zea Mays
gaggcaccgccgccgccgttactgttggttttgattggcaaaatctcaactggtgctcagaatgacctggagaaagttaccaaaatgacatatgcacaggtcgccgtgtatggttttagtgaaaaggttgggcttctgtccttcccccagaaagatggtggtttcgaaatgagcaagccttacagtaatcagacagcatccatcatcgacgatgaggtccgggaatgggttggcaaggcctacaagaaaacagttgaattgataacagagcacaaggagcaagttgcacagatcgcagaattgctgctcgagaaggaagtcctacaccaggacgatctaaccagggtactaggagaacgtccattcaaggcactggagccaaccaactacgacctctttaagaaaggtttcgaggatggtggtgacaacagccaagcaccagcagagaacgccgagctgcctgatgattcatctcccccagttggtgacgttgtacccacgtagtgtttctctcctcaacgtcagagctgtacattgagcgctcattctcgatagattcttgtttgttggttgcatcataaaaaagatctgtataaattcgcgcccaagctgattatgccactgtggaaatgcatttggatttccgtagtgtcagtccggtcgatagggtgccttgggttcttcatggcacgagcaaatgttctgattcttgtattcgaatgttttgaaatattctgtctgacgggactgcggagttggcgcgagaagtgtgcttgttcagttctatctgaaggcttagctgtctgtagctgtagctggtaacaacagtggctaaaatggtacctctgaaatctttgtgacagtaacaagccattttcctttgaatttttatcaggtagtcggcgcgattactttgtttgacaagcacaaactaaatgtcttggttt

SEQ ID NO: 73238 - DNA, 2964 bp, Zea Mays
cctgcctatccacctcataccgcctgcccgcctgccgtgttcaaaattcgaacgtcctccgccgccccaacgataccatcttccccagttccccacgccggcacacccaagctcggccactcgtcttgttgcgaccaaacccaaaatccgaacaccctctcgttccccatccccggcgtccggcgctgaccgcgtgatcctcgccccgatggcggccgcctccacacccgcccgttcttccgcgcacctttcgcagccggtgcgcgtcgtgctgcgtgtgcgcccgttcctgtcgtcggaggccgcctcagcgacagcgccttgcgtctccctcctcggctgccaccccggcggtggggtcaccgtccagctcaaggaccagcacacaagtcggagtgaacagtacaaactggatgcgttcttccgtcaagaggacagcgtcagccagatatttgaccaggaggttcgtgcagtgatcccaagcatcttcgaggggatcaacgcgacggtctttgcctatggggcaaccggcagcggcaagacctacacaatgcagggcacagaggattttccagggctaatccccttggcagcttcgaccatcctagcactctgcactggcacatggtgctctgttgagatctcgtactatgaggtgtacatggagcggtgctatgacctgctggagcctaaagcgaaggagatcatggccttggatgacaaagatggtaacatgcagctgaaaggcttaagctgggtccctgtgcgatccatggaggaattccaggagctctattccataggcgtgcagaggagaaaagttgcccacactggactgaacgatgtttctagtcggagccacgctgtgctctcactcagggtcagcagcactgatgtggtgaaagggaagcttaatctcattgatttagctggtagcgaggacaacaaaaggactttgaatgagggcatacgccttcaagaaagctccaagatcaaccagtcattgtttgcgttgtccaatgtcatttcagctctaaataagaatgagcatcggataccatatagacagagtaaactgactcggttacttagagattctctaggaggcggttgccgcactgtgatgatagcttgcctgaatcctgcagaataccaggagtcggccaacacagtaagtctggcggctcgttcatgccatattgagaatttcaccagttcaagcaaacaagaaactcccaaacttaagatcgacatggaagccaaattacgagcatggttggaatcaaaggggaaaacaaagagcatccaaagaatggatggtcttttctccccaattgccagcaagactccattgtctgtgagccatatgaagcaaccaacatcttcaagaattccttgtagagttaaggcaatggatcaggatggtggtaaaatcaagaagatactttttgatccagtagtccatgttcccactgaaaatataccacgagagcacaggcagacagaagtaaatacaccaaagaaagtggtgcttccttcagttactccatgcaatgaaaaacatgaagcttctctcaggaaagctctttctccaatttcttcaaacatggtgcctgtagagcagcaaatacctgataatggcaattgccccgttttattggagccccaaactccaatagaaaaacgtaatatagtcgaggagactcctggtgcaacaccactagagagatttaatgcactagggtctaacctaaaggaagctctagttcagcagtaccttgaccttttaaatgttgcaaacaagtaagtgcgaattctacaaacttttttgttggcaccccagtgttccagatttttattgaacttggctttatttgattgatgcgtaaaatggatgatgctgtacgtattgctgaaaactgactaaaatagcacaagggaagcaaaaatgcagtggatctaaattgtaaaaaagaccccctgatctaaaaaggcatgttcatcactctaacttttaggctaatctttcttctctagcatcttgtatgcttgtggtgtagcttcaaccgtgacaaaaaaacatggacatatcagttatggtttgtgaacatcacaaattaactaaggatcaattgcaaacatgacctgacattttgggaggtgggtgtgggggtgctaatgtagtttcctagtttttagttcaagtaatttgctccctagatgtcagttcgtatgagaggatcacattatgaaacttcatctgtcattcttcattgttatagtctgtaaaactctgactattggcttgtctgttcttaggttgaccttatgtcacaaaaaatatccagttttttccagtctttatttctaatgtttatctccctttacctatgagcagggaagagctacagcagctgaaaggaattggcgcgaggagagcagaatatattctggaattacgggaggactcaccaaaaccattcaaaactcttgaagatttgggaaacatcggcctctcgtcaaagcagatccgagacatccttaagaagacggccactgggatcttcaaatgatgacctcaatggatgatgatgtattggcgctagacattcataggtgtaacagctaaatgactggcttgtgttgctgacggagaagttagttcaatgtttgtgttggtgacttcaggcagtgccctgctgctactttcaactagattcccttgattgtgtgtagaattgcagttgaagtgttgaacaagtaaactatcggagttgtgatgctacttttacgtccaggggagtttttatggaacgagctattcgaacattttatatgatgaagtggagcatcagttttgctcatttgaataatgataacaagcagagtttttatcatttgataatgtcaacatgttccgcaggcagagtttttatgaacgagctattcgaacgttttatatga

SEQ ID NO: 73239 - DNA, 2302 bp, Zea Mays
cgcctgcccgcctgccgtgttcaaaattcgaacgtcctccgccgccccaacgataccatcttccccagttccccacgccggcacacccaagctcggccactcgtcttgttgcgaccaaacccaaaatccgaacaccctctcgttccccatccccggcgtccggcgctgaccgcgtgatcctcgccccgatggcggccgcctccacacccgcccgttcttccgcgcacctttcgcagccggtgcgcgtcgtgctgcgtgtgcgcccgttcctgtcgtcggaggccgcctcagcgacagcgccttgcgtctccctcctcggctgccaccccggcggtggggtcaccgtccagctcaaggaccagcacacaagtcggagtgaacagtacaaactggatgcgttcttccgtcaagaggacagcgtcagccagatatttgaccaggaggttcgtgcagtgatcccaagcatcttcgaggggatcaacgcgacggtctttgcctatggggcaaccggcagcggcaagacctacacaatgcagggcacagaggattttccagggctaatccccttggcagcttcgaccatcctagcactctgcactggcacatggtgctctgttgagatctcgtactatgaggtgtacatggagcggtgctatgacctgctggagcctaaagcgaaggagatcatggccttggatgacaaagatggtaacatgcagctgaaaggcttaagctgggtccctgtgcgatccatggaggaattccaggagctctattccataggcgtgcagaggagaaaagttgcccacactggactgaacgatgtttctagtcggagccacgctgtgctctcactcagggtcagcagcactgatgtggtgaaagggaagcttaatctcattgatttagctggtagcgaggacaacaaaaggactttgaatgagggcatacgccttcaagaaagctccaagatcaaccagtcattgtttgcgttgtccaatgtcatttcagctctaaataagaatgagcatcggataccatatagacagagtaaactgactcggttacttagagattctctaggaggcggttgccgcactgtgatgatagcttgcctgaatcctgcagaataccaggagtcggccaacacagtaagtctggcggctcgttcatgccatattgagaatttcaccagttcaagcaaacaagaaactcccaaacttaagatcgacatggaagccaaattacgagcatggttggaatcaaaggggaaaacaaagagcatccaaagaatggatggtcttttctccccaattgccagcaagactccattgtctgtgagccatatgaagcaaccaacatcttcaagaattccttgtagagttaaggcaatggatcaggatggtggtaaaatcaagaagatactttttgatccagtagtccatgttcccactgaaaatataccacgagagcacaggcagacagaagtaaatacaccaaagaaagtggtgcttccttcagttactccatgcaatgaaaaacatgaagcttctctcaggaaagctctttctccaatttcttcaaacatggtgcctgtagagcagcaaatacctgataatggcaattgccccgttttattggagccccaaactccaatagaaaaacgtaatatagtcgaggagactcctggtgcaacaccactagagagatttaatgcactagggtctaacctaaagggaagagctacagcagctgaaaggaattggcgcgaggagagcagaatatattctggaattacgggaggactcaccaaaaccattcaaaactcttgaagatttgggaaacatcggcctctcgtcaaagcagatccgagacatccttaagaagacggccactgggatcttcaaatgatgacctcaatggatgatgatgtattggcgctagacattcataggtgtaacagctaaatgactggcttgtgttgctgacggagaagttagttcaatgtttgtgttggtgacttcaggcagtgccctgctgctactttcaactagattcccttgattgtgtgtagaattgcagttgaagtgttgaacaagtaaactatcggagttgtgatgctacttttacgtccaggggagtttttatggaacgagctattcgaacattttatatgatgaagtggagcatcagttttgctcatttgaataatgataacaagcagagtttttatcatttgataatgtcaacatgttccgcaggcagagtttttatgaacgagctattcgaacgttttatatga

SEQ ID NO: 73240 - DNA, 2391 bp, Zea Mays
aaaattcgaacgtcctccgccgccccaacgataccatcttccccagttccccacgccggcacacccaagctcggccactcgtcttgttgcgaccaaacccaaaatccgaacaccctctcgttccccatccccggcgtccggcgctgaccgcgtgatcctcgccccgatggcggccgcctccacacccgcccgttcttccgcgcacctttcgcagccggtgcgcgtcgtgctgcgtgtgcgcccgttcctgtcgtcggaggccgcctcagcgacagcgccttgcgtctccctcctcggctgccaccccggcggtggggtcaccgtccagctcaaggaccagcacacaagtcggagtgaacagtacaaactggatgcgttcttccgtcaagaggacagcgtcagccagatatttgaccaggaggttcgtgcagtgatcccaagcatcttcgaggggatcaacgcgacggtctttgcctatggggcaaccggcagcggcaagacctacacaatgcagggcacagaggattttccagggctaatccccttggcagcttcgaccatcctagcactctgcactggcacatggtgctctgttgagatctcgtactatgaggtgtacatggagcggtgctatgacctgctggagcctaaagcgaaggagatcatggccttggatgacaaagatggtaacatgcagctgaaaggcttaagctgggtccctgtgcgatccatggaggaattccaggagctctattccataggcgtgcagaggagaaaagttgcccacactggactgaacgatgtttctagtcggagccacgctgtgctctcactcagggtcagcagcactgatgtggtgaaagggaagcttaatctcattgatttagctggtagcgaggacaacaaaaggactttgaatgagggcatacgccttcaagaaagctccaagatcaaccagtcattgtttgcgttgtccaatgtcatttcagctctaaataagaatgagcatcggataccatatagacagagtaaactgactcggttacttagagattctctaggaggcggttgccgcactgtgatgatagcttgcctgaatcctgcagaataccaggagtcggccaacacagtaagtctggcggctcgttcatgccatattgagaatttcaccagttcaagcaaacaagaaactcccaaacttaagatcgacatggaagccaaattacgagcatggttggaatcaaaggggaaaacaaagagcatccaaagaatggatggtcttttctccccaattgccagcaagactccattgtctgtgagccatatgaagcaaccaacatcttcaagaattccttgtagagttaaggcaatggatcaggatggtggtaaaatcaagaagatactttttgatccagtagtccatgttcccactgaaaatataccacgagagcacaggcagacagaagtaaatacaccaaagaaagttactccatgcaatgaaaaacatgaagcttctctcaggaaagctctttctccaatttcttcaaacatggtgcctgtagagcagcaaatacctgataatggcaattgccccgttttattggagccccaaactccaatagaaaaacgtaatatagtcgaggagactcctggtgcaacaccactagagagatttaatgcactagggtctaacctaaaggaagctctagttcagcagtaccttgaccttttaaatgttgcaaacaagttgaccttatgtcacaaaaaatatccagttttttccagtctttatttctaatgtttatctccctttacctatgagcagggaagagctacagcagctgaaaggaattggcgcgaggagagcagaatatattctggaattacgggaggactcaccaaaaccattcaaaactcttgaagatttgggaaacatcggcctctcgtcaaagcagatccgagacatccttaagaagacggccactgggatcttcaaatgatgacctcaatggatgatgatgtattggcgctagacattcataggtgtaacagctaaatgactggcttgtgttgctgacggagaagttagttcaatgtttgtgttggtgacttcaggcagtgccctgctgctactttcaactagattcccttgattgtgtgtagaattgcagttgaagtgttgaacaagtaaactatcggagttgtgatgctacttttacgtccaggggagtttttatggaacgagctattcgaacattttatatgatgaagtggagcatcagttttgctcatttgaataatgataacaagcagagtttttatcatttgataatgtcaacatgttccgcaggcagagtttttatgaacgagctattcgaacgttttatatga

SEQ ID NO: 73241 - DNA, 2551 bp, Zea Mays
cccgctcgttcgcctgcacacgcgccaccccgtcctcctcaccccgcctccctctctcgtctcgcccccattgcgcggcgcgggcggcagcgatcgcgcgcgggggaggcctagacctagttccggaggggcaccgacccaatgcaggggcaggcgtacagccgcctaggcagcttcggcgccgcggcgagcgcgccgccgccgccttcggctccggtgcggcctggggccggcgctggcggggccagccggacgcccgcgaaggctggtccagcgagggccatcccggggaccgcggcctcggcgacggcggcggcgcgggcgggggttgcccaccgtggtggcggcggcgcggcgcggagggtggccagggcggtgctcgcgacactgctgcggaggcaggcggtgttcctcttcgcgccgctcctgtacgtcgcagcgatgctgctgtacatgggctcgctcccgctcgacgccgtgccgcggattatcgcgcgccagccgcccgggtccgtgtaccgcagcccgcagctgtacgcgcggctccgcgccgacatggacgccgacaactctaccggcgcgcaactgtatggaggcacacttacaaaggtggcacatggtggccctgcataaacaacatgacaaatggtttacctgaatcaaatggctacatatacgttgaggcaaatggtggtttaaatcaacaaaggacatcaatatgcaatgcagtcgccattgctggttttctgaatgctactcttatcatcccaaatttccatttccatagcatttggagggatcctagcaaattcagtgatatctatgataaagatcactttgtacaacgtctacaaaatgatgttcgagtagttgacgaaattccggatttcatgatggagcgatttggtcataatctcagcaatgtgttcaatttcaagataaaggcttgggcacgcattcaatattacaaagatgttgttcttccaaaattagttgaagaaagagtcatcaggatttctccttttgccaaccgactctcatttgatgcaccttctgctgttcaacggttgagatgcttggcaaactttgaagccttaaaattctctaaaccaattgtatctttgtctgaaaccttagtttctcgaatgagagagagaagtgctgaaagcgatggaaaatatatctcagtgcatcttcggtttgaggaggatatgattgccttctcatgttgtgtttatgacggtggtgatgaggagaagaaagaaatggatgcagccagagaaataggttggagagggaaatttactaagagaggacgggtaataaggccaggagttatcagaatgaatggaaaatgtcctcttacacctttggaggttgggttaatgcttcgtggaatgggtttcagcaataagactgcaatttttttggcgtctggaaagatttacagagcagagaaaaacatggcttctcttcttgaaatgtttcctctcctacagacaaaagagacactggcatccgaagaggaacttgctccattcaagaatttctcctcaaggatggctgctgttgactatagtgtttgtgcccaaagtgaagtttttgtgaccacacaaggtggaaatttcccacatttccttatgggtcacaggagatacttgtatggtgggcattcaaaaacaatcaaaccagacaaaagaaggcttgtcgtactctttgataatccacgtatagggtggaaggcattgaagcggcacttgcttaatatgagagcacacagtgatgccaaggggattgaaatgaaaagaccaagcgaatccatatatacatttccatgtcctgactgcatgtgccgcttgaacagaacagaacactctaaatccaaacacagtagatagtatctcatagttgcatttccagactaaccctattctttctgacatccactttagtctgttcattcttcatttgctgtgcggcttttcacttcatcagcaagcatactcgccagttgccacagcattgagagcaacctattctccgtatatagcggtttttccttgtatagcatatgccagaataaccccagattcgtccgtggagtattaaaccaattgtgatgctaactatacatcatctgactataattctcaacaaccgatctggccccagtaggacaatgaagtatcaaatgtttttgggtagtagtattgctgttgtacatggttcattagcagtctgtcatcatgtacaaatttaaaatggtaaacaggcattgtaaaaaaattatcttgccctaaacatgggcccatagcctctctgtattcttttagctaggctttcacggttgtaactgtgtcttacacttctattcacaattctaacaatagaactgctcagtgcaactttattcttgcttcatcagtatagtcgcaatctttcttcttttttgatataatgtgttcaaaagctgcttgctgagtattcttttaattgtcattatccgatggtcttgacatcgacccattgtgcttagggatggcgaccctag

SEQ ID NO: 73242 - DNA, 2580 bp, Zea Mays
cccgctcgttcgcctgcacacgcgccaccccgtcctcctcaccccgcctccctctctcgtctcgcccccattgcgcggcgcgggcggcagcgatcgcgcgcgggggaggcctagacctagttccggaggggcaccgacccaatgcaggggcaggcgtacagccgcctaggcagcttcggcgccgcggcgagcgcgccgccgccgccttcggctccggtgcggcctggggccggcgctggcggggccagccggacgcccgcgaaggctggtccagcgagggccatcccggggaccgcggcctcggcgacggcggcggcgcgggcgggggttgcccaccgtggtggcggcggcgcggcgcggagggtggccagggcggtgctcgcgacactgctgcggaggcaggcggtgttcctcttcgcgccgctcctgtacgtcgcagcgatgctgctgtacatgggctcgctcccgctcgacgccgtgccgcggattatcgcgcgccagccgcccgggtccgtgtaccgcagcccgcagctgtacgcgcggctccgcgccgacatggacgccgacaactctaccggcgcgctagcaactgtatggaggcacacttacaaaggtggcacatggtggccctgcataaacaacatgacaaatggtttacctgaatcaaatggctacatatacgttgaggcaaatggtggtttaaatcaacaaaggacatcaatatgcaatgcagtcgccattgctggttttctgaatgctactcttatcatcccaaatttccatttccatagcatttggagggatcctagcaaattcagtgatatctatgataaagatcactttgtacaacgtctacaaaatgatgttcgagtagttgacgaaattccggatttcatgatggagcgatttggtcataatctcagcaatgtgttcaatttcaagataaaggcttgggcacgcattcaatattacaaagatgttgttcttccaaaattagttgaagaaagagtcatcaggatttctccttttgccaaccgactctcatttgatgcaccttctgctgttcaacggttgagatgcttggcaaactttgaagccttaaaattctctaaaccaattgtatctttgtctgaaaccttagtttctcgaatgagagagagaagtgctgaaagcgatggaaaatatatctcagtgcatcttcggtttgaggaggatatgattgccttctcatgttgtgtttatgacggtggtgatgaggagaagaaagaaatggatgcagccagagaaataggttggagagggaaatttactaagagaggacgggtaataaggccaggagttatcagaatgaatggaaaatgtcctcttacacctttggaggtatgtcagtatctaataacagaaggttgggttaatgcttcgtggaatgggtttcagcaataagactgcaatttttttggcgtctggaaagatttacagagcagagaaaaacatggcttctcttcttgaaatgtttcctctcctacagacaaaagagacactggcatccgaagaggaacttgctccattcaagaatttctcctcaaggatggctgctgttgactatagtgtttgtgcccaaagtgaagtttttgtgaccacacaaggtggaaatttcccacatttccttatgggtcacaggagatacttgtatggtgggcattcaaaaacaatcaaaccagacaaaagaaggcttgtcgtactctttgataatccacgtatagggtggaaggcattgaagcggcacttgcttaatatgagagcacacagtgatgccaaggggattgaaatgaaaagaccaagcgaatccatatatacatttccatgtcctgactgcatgtgccgcttgaacagaacagaacactctaaatccaaacacagtagatagtatctcatagttgcatttccagactaaccctattctttctgacatccactttagtctgttcattcttcatttgctgtgcggcttttcacttcatcagcaagcatactcgccagttgccacagcattgagagcaacctattctccgtatatagcggtttttccttgtatagcatatgccagaataaccccagattcgtccgtggagtattaaaccaattgtgatgctaactatacatcatctgactataattctcaacaaccgatctggccccagtaggacaatgaagtatcaaatgtttttgggtagtagtattgctgttgtacatggttcattagcagtctgtcatcatgtacaaatttaaaatggtaaacaggcattgtaaaaaaattatcttgccctaaacatgggcccatagcctctctgtattcttttagctaggctttcacggttgtaactgtgtcttacacttctattcacaattctaacaatagaactgctcagtgcaactttattcttgcttcatcagtatagtcgcaatctttcttcttttttgatataatgtgttcaaaagctgcttgctgagtattcttttaattgtcattatccgatggtcttgacatcgacccattgtgcttagggatggcgaccctag

SEQ ID NO: 73243 - DNA, 2560 bp, Zea Mays
cccgctcgttcgcctgcacacgcgccaccccgtcctcctcaccccgcctccctctctcgtctcgcccccattgcgcggcgcgggcggcagcgatcgcgcgcgggggaggcctagacctagttccggaggggcaccgacccaatgcaggggcaggcgtacagccgcctaggcagcttcggcgccgcggcgagcgcgccgccgccgccttcggctccggtgcggcctggggccggcgctggcggggccagccggacgcccgcgaaggctggtccagcgagggccatcccggggaccgcggcctcggcgacggcggcggcgcgggcgggggttgcccaccgtggtggcggcggcgcggcgcggagggtggccagggcggtgctcgcgacactgctgcggaggcaggcggtgttcctcttcgcgccgctcctgtacgtcgcagcgatgctgctgtacatgggctcgctcccgctcgacgccgtgccgcggattatcgcgcgccagccgcccgggtccgtgtaccgcagcccgcagctgtacgcgcggctccgcgccgacatggacgccgacaactctaccggcgcgctagcaactgtatggaggcacacttacaaaggtggcacatggtggccctgcataaacaacatgacaaatggtttacctgaatcaaatggctacatatacgttgaggcaaatggtggtttaaatcaacaaaggacatcaatatgcaatgcagtcgccattgctggttttctgaatgctactcttatcatcccaaatttccatttccatagcatttggagggatcctagcaaattcagtgatatctatgataaagatcactttgtacaacgtctacaaaatgatgttcgagtagttgacgaaattccggatttcatgatggagcgatttggtcataatctcagcaatgtgttcaatttcaagataaaggcttgggcacgcattcaatattacaaagatgttgttcttccaaaattagttgaagaaagtgcagagtcatcaggatttctccttttgccaaccgactctcatttgatgcaccttctgctgttcaacggttgagatgcttggcaaactttgaagccttaaaattctctaaaccaattgtatctttgtctgaaaccttagtttctcgaatgagagagagaagtgctgaaagcgatggaaaatatatctcagtgcatcttcggtttgaggaggatatgattgccttctcatgttgtgtttatgacggtggtgatgaggagaagaaagaaatggatgcagccagagaaataggttggagagggaaatttactaagagaggacgggtaataaggccaggagttatcagaatgaatggaaaatgtcctcttacacctttggaggttgggttaatgcttcgtggaatgggtttcagcaataagactgcaatttttttggcgtctggaaagatttacagagcagagaaaaacatggcttctcttcttgaaatgtttcctctcctacagacaaaagagacactggcatccgaagaggaacttgctccattcaagaatttctcctcaaggatggctgctgttgactatagtgtttgtgcccaaagtgaagtttttgtgaccacacaaggtggaaatttcccacatttccttatgggtcacaggagatacttgtatggtgggcattcaaaaacaatcaaaccagacaaaagaaggcttgtcgtactctttgataatccacgtatagggtggaaggcattgaagcggcacttgcttaatatgagagcacacagtgatgccaaggggattgaaatgaaaagaccaagcgaatccatatatacatttccatgtcctgactgcatgtgccgcttgaacagaacagaacactctaaatccaaacacagtagatagtatctcatagttgcatttccagactaaccctattctttctgacatccactttagtctgttcattcttcatttgctgtgcggcttttcacttcatcagcaagcatactcgccagttgccacagcattgagagcaacctattctccgtatatagcggtttttccttgtatagcatatgccagaataaccccagattcgtccgtggagtattaaaccaattgtgatgctaactatacatcatctgactataattctcaacaaccgatctggccccagtaggacaatgaagtatcaaatgtttttgggtagtagtattgctgttgtacatggttcattagcagtctgtcatcatgtacaaatttaaaatggtaaacaggcattgtaaaaaaattatcttgccctaaacatgggcccatagcctctctgtattcttttagctaggctttcacggttgtaactgtgtcttacacttctattcacaattctaacaatagaactgctcagtgcaactttattcttgcttcatcagtatagtcgcaatctttcttcttttttgatataatgtgttcaaaagctgcttgctgagtattcttttaattgtcattatccgatggtcttgacatcgacccattgtgcttagggatggcgaccctag

SEQ ID NO: 73244 - DNA, 2517 bp, Zea Mays
cccgctcgttcgcctgcacacgcgccaccccgtcctcctcaccccgcctccctctctcgtctcgcccccattgcgcggcgcgggcggcagcgatcgcgcgcgggggaggcctagacctagttccggaggggcaccgacccaatgcaggggcaggcgtacagccgcctaggcagcttcggcgccgcggcgagcgcgccgccgccgccttcggctccggtgcggcctggggccggcgctggcggggccagccggacgcccgcgaaggctggtccagcgagggccatcccggggaccgcggcctcggcgacggcggcggcgcgggcgggggttgcccaccgtggtggcggcggcgcggcgcggagggtggccagggcggtgctcgcgacactgctgcggaggcaggcggtgttcctcttcgcgccgctcctgtacgtcgcagcgatgctgctgtacatgggctcgctcccgctcgacgccgtgccgcggattatcgcgcgccagccgcccgggtccgtgtaccgcagcccgcagctgtacgcgcggctccgcgccgacatggacgccgacaactctaccggcgcgctagcaactgtatggaggcacacttacaaaggtggcacatggtggccctgcataaacaacatgacaaatggtttacctgaatcaaatggctacatatacgttgaggcaaatggtggtttaaatcaacaaaggacatcagtagtcgtcttaccttagtgtttcttgttactcctgacattttacattttctgttaactggtatgtggtatctttagttattaacttatgcctctattttttgttttttttgttttttttcagatatgcaatgcagtcgccattgctggttttctgaatgctactcttatcatcccaaatttccatttccatagcatttggagggatcctagcaaattcagtgatatctatgataaagatcactttgtacaacgtctacaaaatgatgttcgagtagttgacgaaattccggatttcatgatggagcgatttggtcataatctcagcaatgtgttcaatttcaagataaaggcttgggcacgcattcaatattacaaagatgttgttcttccaaaattagttgaagaaagtgcagagtcatcaggatttctccttttgccaaccgactctcatttgatgcaccttctgctgttcaacggttgagatgcttggcaaactttgaagccttaaaattctctaaaccaattgtatctttgtctgaaaccttagtttctcgaatgagagagagaagtgctgaaagcgatggaaaatatatctcagtgcatcttcggtttgaggaggatatgattgccttctcatgttgtgtttatgacggtggtgatgaggagaagaaagaaatggatgcagccagagaaataggttggagagggaaatttactaagagaggacgggtaataaggccaggagttatcagaatgaatggaaaatgtcctcttacacctttggaggtatgtcagtatctaataacagaaggttgggttaatgcttcgtggaatgggtttcagcaataagactgcaatttttttggcgtctggaaagatttacagagcagagaaaaacatggcttctcttcttgaaatgtttcctctcctacagacaaaagagacactggcatccgaagaggaacttgctccattcaaggtggaaggcattgaagcggcacttgcttaatatgagagcacacagtgatgccaaggggattgaaatgaaaagaccaagcgaatccatatatacatttccatgtcctgactgcatgtgccgcttgaacagaacagaacactctaaatccaaacacagtagatagtatctcatagttgcatttccagactaaccctattctttctgacatccactttagtctgttcattcttcatttgctgtgcggcttttcacttcatcagcaagcatactcgccagttgccacagcattgagagcaacctattctccgtatatagcggtttttccttgtatagcatatgccagaataaccccagattcgtccgtggagtattaaaccaattgtgatgctaactatacatcatctgactataattctcaacaaccgatctggccccagtaggacaatgaagtatcaaatgtttttgggtagtagtattgctgttgtacatggttcattagcagtctgtcatcatgtacaaatttaaaatggtaaacaggcattgtaaaaaaattatcttgccctaaacatgggcccatagcctctctgtattcttttagctaggctttcacggttgtaactgtgtcttacacttctattcacaattctaacaatagaactgctcagtgcaactttattcttgcttcatcagtatagtcgcaatctttcttcttttttgatataatgtgttcaaaagctgcttgctgagtattcttttaattgtcattatccgatggtcttgacatcgacccattgtgcttagggatggcgaccctag

SEQ ID NO: 73245 - DNA, 2307 bp, Zea Mays
atgtccagccccaaccctccaccttctccccaccacccgcagccgccaccatctccggggctgtcccagccgccgggtgcccagctacaggcaccggcatcccaggggacgaccgcccccatgctcggcgatcacacggcggccgcactggtgcccactgcgccgccagccgacgtcctggcaggctcttcccgcctccaggcattcacgcctcatgagatgacggcggccatcttggagctgggccaggcggtggccgggatccgcgccttcctggcaggaccctatacgccgccaccgcagctacctccgccgcagcaaccgcccgcgtcggcgccctcgtaccaatacgggatgccgccggactgggcaggttctgcttcatcttcttcaccacaggcgtcccagggcctccccatccatatggttcgatttccgccctcgccctcaccactgccggcgtgggcgaccgtgacatcggcgcccgtcttcggatcggccgccatacaaccacacacatttcattttggatacagcaaattcagtgatatctatgataaagatcactttgtacaacgtctacaaaatgatgttcgagtagttgacgaaattccggatttcatgatggagcgatttggtcataatctcagcaatgtgttcaatttcaagataaaggcttgggcacgcattcaatattacaaagatgttgttcttccaaaattagttgaagaaagagtcatcaggatttctccttttgccaaccgactctcatttgatgcaccttctgctgttcaacggttgagatgcttggcaaactttgaagccttaaaattctctaaaccaattgtatctttgtctgaaaccttagtttctcgaatgagagagagaagtgctgaaagcgatggaaaatatatctcagtgcatcttcggtttgaggaggatatgattgccttctcatgttgtgtttatgacggtggtgatgaggagaagaaagaaatggatgcagccagagaaataggttggagagggaaatttactaagagaggacgggtaataaggccaggagttatcagaatgaatggaaaatgtcctcttacacctttggaggtatgtcagtatctaataacagaaggttgggttaatgcttcgtggaatgggtttcagcaataagactgcaatttttttggcgtctggaaagatttacagagcagagaaaaacatggcttctcttcttgaaatgtttcctctcctacagacaaaagagacactggcatccgaagaggaacttgctccattcaagaatttctcctcaaggatggctgctgttgactatagtgtttgtgcccaaagtgaagtttttgtgaccacacaaggtggaaatttcccacatttccttatgggtcacaggagatacttgtatggtgggcattcaaaaacaatcaaaccagacaaaagaaggcttgtcgtactctttgataatccacgtatagggtggaaggcattgaagcggcacttgcttaatatgagagcacacagtgatgccaaggggattgaaatgaaaagaccaagcgaatccatatatacatttccatgtcctgactgcatgtgccgcttgaacagaacagaacactctaaatccaaacacagtagatagtatctcatagttgcatttccagactaaccctattctttctgacatccactttagtctgttcattcttcatttgctgtgcggcttttcacttcatcagcaagcatactcgccagttgccacagcattgagagcaacctattctccgtatatagcggtttttccttgtatagcatatgccagaataaccccagattcgtccgtggagtattaaaccaattgtgatgctaactatacatcatctgactataattctcaacaaccgatctggccccagtaggacaatgaagtatcaaatgtttttgggtagtagtattgctgttgtacatggttcattagcagtctgtcatcatgtacaaatttaaaatggtaaacaggcattgtaaaaaaattatcttgccctaaacatgggcccatagcctctctgtattcttttagctaggctttcacggttgtaactgtgtcttacacttctattcacaattctaacaatagaactgctcagtgcaactttattcttgcttcatcagtatagtcgcaatctttcttcttttttgatataatgtgttcaaaagctgcttgctgagtattcttttaattgtcattatccgatggtcttgacatcgacccattgtgcttagggatggcgaccctag

SEQ ID NO: 73246 - DNA, 1809 bp, Zea Mays
ggaagaaccggcattttggtggggcccaggatttccacacccttttataatggccaaaggaacttgatcctaagaaaatggcctcataagcaattttggccgagtatttatcatctgatgccaaacagaaaatatgtttgtcttctatgccaggctgcagctcaacatttgatagtaaatcccagatatggaggtagtccactaaagctccaactggtagagctcctatgatgtctgaaatcaatctcctattaaatgcagagtcatcaggatttctccttttgccaaccgactctcatttgatgcaccttctgctgttcaacggttgagatgcttggcaaactttgaagccttaaaattctctaaaccaattgtatctttgtctgaaaccttagtttctcgaatgagagagagaagtgctgaaagcgatggaaaatatatctcagtgcatcttcggtttgaggaggatatgattgccttctcatgttgtgtttatgacggtggtgatgaggagaagaaagaaatggatgcagccagagaaataggttggagagggaaatttactaagagaggacgggtaataaggccaggagttatcagaatgaatggaaaatgtcctcttacacctttggaggttgggttaatgcttcgtggaatgggtttcagcaataagactgcaatttttttggcgtctggaaagatttacagagcagagaaaaacatggcttctcttcttgaaatgtttcctctcctacagacaaaagagacactggcatccgaagaggaacttgctccattcaagaatttctcctcaaggatggctgctgttgactatagtgtttgtgcccaaagtgaagtttttgtgaccacacaaggtggaaatttcccacatttccttatgggtcacaggagatacttgtatggtgggcattcaaaaacaatcaaaccagacaaaagaaggcttgtcgtactctttgataatccacgtatagggtggaaggcattgaagcggcacttgcttaatatgagagcacacagtgatgccaaggggattgaaatgaaaagaccaagcgaatccatatatacatttccatgtcctgactgcatgtgccgcttgaacagaacagaacactctaaatccaaacacagtagatagtatctcatagttgcatttccagactaaccctattctttctgacatccactttagtctgttcattcttcatttgctgtgcggcttttcacttcatcagcaagcatactcgccagttgccacagcattgagagcaacctattctccgtatatagcggtttttccttgtatagcatatgccagaataaccccagattcgtccgtggagtattaaaccaattgtgatgctaactatacatcatctgactataattctcaacaaccgatctggccccagtaggacaatgaagtatcaaatgtttttgggtagtagtattgctgttgtacatggttcattagcagtctgtcatcatgtacaaatttaaaatggtaaacaggcattgtaaaaaaattatcttgccctaaacatgggcccatagcctctctgtattcttttagctaggctttcacggttgtaactgtgtcttacacttctattcacaattctaacaatagaactgctcagtgcaactttattcttgcttcatcagtatagtcgcaatctttcttcttttttgatataatgtgttcaaaagctgcttgctgagtattcttttaattgtcattatccgatggtcttgacatcgacccattgtgcttagggatggcgaccctag

SEQ ID NO: 73247 - DNA, 1396 bp, Zea Mays
tagagctcctatgatgtctgaaatcaatctcctattaaaagtcatcaggatttctccttttgccaaccgactctcatttgatgcaccttctgctgttcaacggttgagatgcttggcaaactttgaagccttaaaattctctaaaccaattgtatctttgtctgaaaccttagtttctcgaatgagagagagaagtgctgaaagcgatggaaaatatatctcagtgcatcttcggtttgaggaggatatgattgccttctcatgttgtgtttatgacggtggtgatgaggagaagaaagaaatggatgcagccagagaaataggttggagagggaaatttactaagagaggacgggtaataaggccaggagttatcagaatgaatggaaaatgtcctcttacacctttggaggttgggttaatgcttcgtggaatgggtttcagcaataagactgcaatttttttggcgtctggaaagatttacagagcagagaaaaacatggcttctcttcttgaaatgtttcctctcctacagacaaaagagacactggcatccgaagaggaacttgctccattcaaggtggaaggcattgaagcggcacttgcttaatatgagagcacacagtgatgccaaggggattgaaatgaaaagaccaagcgaatccatatatacatttccatgtcctgactgcatgtgccgcttgaacagaacagaacactctaaatccaaacacagtagatagtatctcatagttgcatttccagactaaccctattctttctgacatccactttagtctgttcattcttcatttgctgtgcggcttttcacttcatcagcaagcatactcgccagttgccacagcattgagagcaacctattctccgtatatagcggtttttccttgtatagcatatgccagaataaccccagattcgtccgtggagtattaaaccaattgtgatgctaactatacatcatctgactataattctcaacaaccgatctggccccagtaggacaatgaagtatcaaatgtttttgggtagtagtattgctgttgtacatggttcattagcagtctgtcatcatgtacaaatttaaaatggtaaacaggcattgtaaaaaaattatcttgccctaaacatgggcccatagcctctctgtattcttttagctaggctttcacggttgtaactgtgtcttacacttctattcacaattctaacaatagaactgctcagtgcaactttattcttgcttcatcagtatagtcgcaatctttcttcttttttgatataatgtgttcaaaagctgcttgctgagtattcttttaattgtcattatccgatggtcttgacatcgacccattgtgcttagggatggcgaccctag

SEQ ID NO: 73248 - DNA, 1019 bp, Zea Mays
cattccgctagggtttctcctcggtagcagctggctcacttctccaggtaaggaaagtgttcgtcctcatggcgccgccgcagccgaagtcgggcctcttcgtgggcatcaacaagggccatgtcgtcaccaagcgcgagctgcctctgcgcccgtcccaccgcaagggggggcctgatcagagaggttgctggctttgctccttatgagaagcgtatcaccgagcttctgaaggttggcaaggacaagcgcgctctgaagcttgccaagagaaagcttggaactcacaagagggcaaagaagaagagagaggagatgatgggcgtcctcaggaagatgagatcggctggtacgcacactgacaagaagaaataaagcatttcaagttcatgaatgtggcagccagagattatcaactgtgttttttccctacctctagaaactagacatggcaaagtatttttgaccgaaacattgtttgttagtaatgtattgaaccacctcgtggtattttgccccaacttccaatgcatcaatggtttgttaatcttttgctatgctatttcattaccgtgaattttatgttccattagatatcataggttgacctgttggttgtacaattactttaaaaactatagtcataaaagacttagtgagtgcatctaaggaactcttcatacaatccaatagacgctggtcgtttatatgggttgtataggtggaatgttatattgttggatctagagaatttccttaatcaagactagtcagttgctcgtgcgttgcgacgactcacaacaatacacacgtaaactatccaccaaaaaagatctcaatattttttattgattgtctctgctctccgcataattttttttttgatttgactaagtgagtcgacatcgtgataaaggaaaggccatgtagacagtcaatattgagccatcgaatgggtaccatagacagcaaatcagggatcccatccctcaccttccccacttccaaggtttcgtaga

SEQ ID NO: 73249 - DNA, 1047 bp, Zea Mays
cattccgctagggtttctcctcggtagcagctggctcacttctccaggtaaggaaagtgttcgtcctcatggcgccgccgcagccgaagtcgggcctcttcgtgggcatcaacaagggccatgtcgtcaccaagcgcgagctgcctctgcgcccgtcccaccgcaaggggaagcaacgaagagggtgtccatggtcaggggcctgatcagagaggttgctggctttgctccttatgagaagcgtatcaccgagcttctgaaggttggcaaggacaagcgcgctctgaagcttgccaagagaaagcttggaactcacaagagggcaaagaagaagagagaggagatgatgggcgtcctcaggaagatgagatcggctggtacgcacactgacaagaagaaataaagcatttcaagttcatgaatgtggcagccagagattatcaactgtgttttttccctacctctagaaactagacatggcaaagtatttttgaccgaaacattgtttgttagtaatgtattgaaccacctcgtggtattttgccccaacttccaatgcatcaatggtttgttaatcttttgctatgctatttcattaccgtgaattttatgttccattagatatcataggttgacctgttggttgtacaattactttaaaaactatagtcataaaagacttagtgagtgcatctaaggaactcttcatacaatccaatagacgctggtcgtttatatgggttgtataggtggaatgttatattgttggatctagagaatttccttaatcaagactagtcagttgctcgtgcgttgcgacgactcacaacaatacacacgtaaactatccaccaaaaaagatctcaatattttttattgattgtctctgctctccgcataattttttttttgatttgactaagtgagtcgacatcgtgataaaggaaaggccatgtagacagtcaatattgagccatcgaatgggtaccatagacagcaaatcagggatcccatccctcaccttccccacttccaaggtttcgtaga

SEQ ID NO: 73250 - DNA, 2072 bp, Zea Mays
ggaaaccgtgtttcgacgggccgcagtgggcagtggcttggcccatcgaacccacttgccactcacttccacctgaactttgccctgccttctctcgacgactcccctgtccccgccgccgccgccgccgcaaatccccttccgcgtctgtctggcctctggggcttctaggttagcgcgtgcgaccaccatggccgaggaggtccaggctccactttccgccaccatggcgaaggaggcccagtcgccgccgtccgcaaccatagcggaggcgacggcgccgccgcagctcttattatttaactcctttacgaagagggaggagccattccagccccgggtagaggggaaggtagggatgtacgtctgtggcgtcactccctacgactttagccacatcggccacgcgcgtgcctacgtcgccttcgacgtcctctacaggtaccttaaattcttggggtatgaagttgaatatgtccgtaatttcacggatattgatgacaagattattaagcgtgccaatgaacgcggtgaaacagtaacaagcttgagtagccagtttatcaatgaatttcttcttgacatgactgagctccagtgcttgcctcctacctgcgagccacgggtaacagaacacattgagcatattataaagttgataacacagataatggagaatggcaaagcctatgctattgaaggagatgtttacttttcagttgaaagttttcctgaatatctcagtttatctggaagaaaatttgatcaaaatcaggcaggtgcacgggttgcttttgatacaagaaagcgtaatcctgcagacttcgcactctggaaagctgcaaaggagggtgaacctttttgggatagcccttggggccgtggaagaccaggttggcatattgaatgcagcgcaatgagtgctcactatttaggacatgtattcgatattcatggtggggggaaagatttgatttttcctcatcatgagaatgagcttgcacaaagccgcgcagcttatcctgatagcgaggtcaaatgctggatgcacaatggctttgttaacaaggatgataaaaaaatggcaaaatcagataataactttttcacgattagagatatcattgctctttaccatccaatggctttaagatttttcttgatgcgcacacattatagatcagatgttaaccattctgatcaagcgcttgagattgcatctgatcgtgtctactacatttatcagactctatatgactgtgaggaagtgttagctacatatcgtgaagaggatgttctggaccgttgcttcatggagctgctgaaggccataaacagcagtctgaatgatttgaagaaactgcagcaaaaaatagaacagcaaaagaagaaacagcaacagcagaagaagcagcaacagcagaagcagcagcaacagaagcaacagcaattgcaaaaacagccagaagattatattcaagctctgattgcactggaaacagaacttaaaaacaaattgtctatacttggtctgatgccatcttcatctttggcagaggtactgaagcaattgaaggacaaatcattaaagcgagcagggctgactgaagaacaattgcaagagcagattgagcagagaaatgtcgcaaggaagaataagcagtttgagatatctgatggaatcaggaaaaaccttgctaccaaaggcatcgccctgatggacgaaccttctggtacagtatggagaccatgcgaaccagagcggtctgaagagtcatgattagctcactgactcaacaagtgatggcggtgtaaaatgagatttttgcctgagggcagttatcgcattttgaagactaacaaaaatcgccatctctggatgtggtattctacagggtaggggttccaggttgactcaccagttaaaacatgcatttctggttgtataacaagcaatgaaccccatatatatacttgacagttgactcctttggaggtttggtttttagttttggataagactttggtactctttgcttgtgtcgggtggttcctttagtcactaaagttta

SEQ ID NO: 73251 - DNA, 2159 bp, Zea Mays
ggaaaccgtgtttcgacgggccgcagtgggcagtggcttggcccatcgaacccacttgccactcacttccacctgaactttgccctgccttctctcgacgactcccctgtccccgccgccgccgccgccgcaaatccccttccgcgtctgtctggcctctggggcttctaggttagcgcgtgcgaccaccatggccgaggaggtccaggctccactttccgccaccatggcgaaggaggcccagtcgccgccgtccgcaaccatagcggaggcgacggcgccgccgcagctcttattatttaactcctttacgaagagggaggagccattccagccccgggtagaggggaaggtagggatgtacgtctgtggcgtcactccctacgactttagccacatcggccacgcgcgtgcctacgtcgccttcgacgtcctctacaggtaccttaaattcttggggtatgaagttgaatatgtccgtaatttcacggatattgatgacaagattattaagcgtgccaatgaacgcggtgaaacagtaacaagcttgagtagccagtttatcaatgaatttcttcttgacatgactgagctccagtgcttgcctcctacctgcgagccacgggtaacagaacacattgagcatattataaagttgataacacagataatggagaatggcaaagcctatgctattgaaggagatgtttacttttcagttgaaagttttcctgaatatctcagtttatctggaagaaaatttgatcaaaatcaggcaggtgcacgggttgcttttgatacaagaaagcgtaatcctgcagacttcgcactctggaaagctgcaaaggagggtgaacctttttgggatagcccttggggccgtggaagaccaggttggcatattgaatgcagcgcaatgagtgctcactatttaggacatgtattcgatattcatggtggggggaaagatttgatttttcctcatcatgagaatgagcttgcacaaagccgcgcagcttatcctgatagcgaggtcaaatgctggatgcacaatggctttgttaacaaggatgataaaaaaatggcaaaatcagataataactttttcacgattagagatatcattgctctttaccatccaatggctttaagatttttcttgatgcgcacacattatagatcagatgttaaccattctgatcaagcgcttgagattgcatctgatcgtgtctactacatttatcagactctatatgactgtgaggaagtgttagctacatatcgtgaagagggtacctctctcccagtgccgtctgaggagcaaaatctgattggtaagcaccattcagaattcttgaaacatatgtcgaatgatcttaaaaccacagatgttctggaccgttgcttcatggagctgctgaaggccataaacagcagtctgaatgatttgaagcaaaaaatagaacagcaaaagaagaaacagcaacagcagaagaagcagcaacagcagaagcagcagcaacagaagcaacagcaattgcaaaaacagccagaagattatattcaagctctgattgcactggaaacagaacttaaaaacaaattgtctatacttggtctgatgccatcttcatctttggcagaggtactgaagcaattgaaggacaaatcattaaagcgagcagggctgactgaagaacaattgcaagagcagattgagcagagaaatgtcgcaaggaagaataagcagtttgagatatctgatggaatcaggaaaaaccttgctaccaaaggcatcgccctgatggacgaaccttctggtacagtatggagaccatgcgaaccagagcggtctgaagagtcatgattagctcactgactcaacaagtgatggcggtgtaaaatgagatttttgcctgagggcagttatcgcattttgaagactaacaaaaatcgccatctctggatgtggtattctacagggtaggggttccaggttgactcaccagttaaaacatgcatttctggttgtataacaagcaatgaaccccatatatatacttgacagttgactcctttggaggtttggtttttagttttggataagactttggtactctttgcttgtgtcgggtggttcctttagtcactaaagttta

SEQ ID NO: 73252 - DNA, 1896 bp, Zea Mays
tcgaacccacttgccactcacttccacctgaactttgccctgccttctctcgacgactcccctgtccccgccgccgccgccgccgcaaatccccttccgcgtctgtctggcctctggggcttctaggttagcgcgtgcgaccaccatggccgaggaggtccaggctccactttccgccaccatggcgaaggaggcccagtcgccgccgtccgcaaccatagcggaggcgacggcgccgccgcagctcttattatttaactcctttacgaagagggaggagccattccagccccgggtagaggggaaggtagggatgtacgtctgtggcgtcactccctacgactttagccacatcggccacgcgcgtgcctacgtcgccttcgacgtcctctacaggtaccttaaattcttggggtatgaagttgaatatgtccgtaatttcacggatattgatgacaagattattaagcgtgccaatgaacgcggtgaaacagtaacaagcttgagtagccagtttatcaatgaatttcttcttgacatgactgagctccagtgcttgcctcctacctgcgagccacgggtaacagaacacattgagcatattataaagttgataacacagataatggagaatggcaaagcctatgctattgaaggagatgtttacttttcagttgaaagttttcctgaatatctcagtttatctggaagaaaatttgatcaaaatcaggcaggtgcacgggttgcttttgatacaagaaagcgtaatcctgcagacttcgcactctggaaagctgcaaaggagggtgaacctttttgggatagcccttggggccgtggaagaccagatcattgctctttaccatccaatggctttaagatttttcttgatgcgcacacattatagatcagatgttaaccattctgatcaagcgcttgagattgcatctgatcgtgtctactacatttatcagactctatatgactgtgaggaagtgttagctacatatcgtgaagagggtacctctctcccagtgccgtctgaggagcaaaatctgattggtaagcaccattcagaattcttgaaacatatgtcgaatgatcttaaaaccacagatgttctggaccgttgcttcatggagctgctgaaggccataaacagcagtctgaatgatttgaagaaactgcagcaaaaaatagaacagcaaaagaagaaacagcaacagcagaagaagcagcaacagcagaagcagcagcaacagaagcaacagcaattgcaaaaacagccagaagattatattcaagctctgattgcactggaaacagaacttaaaaacaaattgtctatacttggtctgatgccatcttcatctttggcagaggtactgaagcaattgaaggacaaatcattaaagcgagcagggctgactgaagaacaattgcaagagcagattgagcagagaaatgtcgcaaggaagaataagcagtttgagatatctgatggaatcaggaaaaaccttgctaccaaaggcatcgccctgatggacgaaccttctggtacagtatggagaccatgcgaaccagagcggtctgaagagtcatgattagctcactgactcaacaagtgatggcggtgtaaaatgagatttttgcctgagggcagttatcgcattttgaagactaacaaaaatcgccatctctggatgtggtattctacagggtaggggttccaggttgactcaccagttaaaacatgcatttctggttgtataacaagcaatgaaccccatatatatacttgacagttgactcctttggaggtttggtttttagttttggataagactttggtactctttgcttgtgtcgggtggttcctttagtcactaaagttta

SEQ ID NO: 73253 - DNA, 1004 bp, Zea Mays
agtccggaactctctcccaagcttcttataaatgctccaacctgttgccatctactgtcttcctcccgattccaagctgctctcgtccctagaaataaagcagctcctccgcggggcggcgaactactacccatcgccaaaaccctagccccgatccggtcgaggagcactacttcttggcatggcgggcacccctagccaggcaagcctcctgctccagaagcagctcaaggatcttgcgaagaaccccgtggatgggttctccgcagggcttgtagacgatagcaacgtcttcgagtggcaggtcaccatcatcggcccgcccgacaccctatatgatggaggctacttcaatgcaataatgaccttcccccagaactatcccaacagcccgccatcagtaagatttacttctgggatgtggcatccgaatgtttatccggatgggcgtgtttgcatttctattcttcatccacctggtgaagatcccagtggttatgagcttgcaagcgaacggtggacaccagtgcacacggttgaaagtatagttctgagcatcatttcaatgctctctagtccgaatgacgagtctccagcaaatattgaagctgccgattggagagagaagcgggatgagttcaagaagaaggttaggcaatgtgtccgcaggtctcaggaaatgctgtgaaggaggaacatgggggagttgaatgagtctgcaatcggtgtgctgcaattcacaaccaattatctcatgtcagcattcttttgctttcccctgtatattttttcaaccgatgtcactcgtatagtggtgttgggtctctttagacaaactcgggacggttgcttatcctaaaaattcgattgtactgcgtggcatgaaatgatcgattcgaagaatattttgaacatgctgccacctaatcaaaaaatttcatgtttaacatcataaggaataactgttgcttattctaatgattcgattgcattgcgtgattcta

SEQ ID NO: 73254 - DNA, 946 bp, Zea Mays
agtccggaactctctcccaagcttcttataaatgctccaacctgttgccatctactgtcttcctcccgattccaagctgctctcgtccctagaaataaagcagctcctccgcggggcggcgaactactacccatcgccaaaaccctagccccgatccggtcgaggagcactacttcttggcatggcgggcacccctagccaggcaagcctcctgctccagaagcagctcaaggtgatggaggctacttcaatgcaataatgaccttcccccagaactatcccaacagcccgccatcagtaagatttacttctgggatgtggcatccgaatgtttatccggatgggcgtgtttgcatttctattcttcatccacctggtgaagatcccagtggttatgagcttgcaagcgaacggtggacaccagtgcacacggttgaaagtatagttctgagcatcatttcaatgctctctagtccgaatgacgagtctccagcaaatattgaagctgccatgcctttggtttctgaagttatacacgactttgccttgcagaaggattggagagagaagcgggatgagttcaagaagaaggttaggcaatgtgtccgcaggtctcaggaaatgctgtgaaggaggaacatgggggagttgaatgagtctgcaatcggtgtgctgcaattcacaaccaattatctcatgtcagcattcttttgctttcccctgtatattttttcaaccgatgtcactcgtatagtggtgttgggtctctttagacaaactcgggacggttgcttatcctaaaaattcgattgtactgcgtggcatgaaatgatcgattcgaagaatattttgaacatgctgccacctaatcaaaaaatttcatgtttaacatcataaggaataactgttgcttattctaatgattcgattgcattgcgtgattcta

SEQ ID NO: 73255 - DNA, 976 bp, Zea Mays
agtccggaactctctcccaagcttcttataaatgctccaacctgttgccatctactgtcttcctcccgattccaagctgctctcgtccctagaaataaagcagctcctccgcggggcggcgaactactacccatcgccaaaaccctagccccgatccggtcgaggagcactacttcttggcatggcgggcacccctagccagatcttgcgaagaaccccgtggatgggttctccgcagggcttgtagacgatagcaacgtcttcgagtggcaggtcaccatcatcggcccgcccgacaccctatatgatggaggctacttcaatgcaataatgaccttcccccagaactatcccaacagcccgccatcagtaagatttacttctgggatgtggcatccgaatgtttatccggatgggcgtgtttgcatttctattcttcatccacctggtgaagatcccagtggttatgagcttgcaagcgaacggtggacaccagtgcacacggttgaaagtatagttctgagcatcatttcaatgctctctagtccgaatgacgagtctccagcaaatattgaagctgccaaggattggagagagaagcgggatgagttcaagaagaaggttaggcaatgtgtccgcaggtctcaggaaatgctgtgaaggaggaacatgggggagttgaatgagtctgcaatcggtgtgctgcaattcacaaccaattatctcatgtcagcattcttttgctttcccctgtatattttttcaaccgatgtcactcgtatagtggtgttgggtctctttagacaaactcgggacggttgcttatcctaaaaattcgattgtactgcgtggcatgaaatgatcgattcgaagaatattttgaacatgctgccacctaatcaaaaaatttcatgtttaacatcataaggaataactgttgcttattctaatgattcgattgcattgcgtgattcta

SEQ ID NO: 73256 - DNA, 873 bp, Zea Mays
agtccggaactctctcccaagcttcttataaatgctccaacctgttgccatctactgtcttcctcccgattccaagctgctctcgtccctagaaataaagcagctcctccgcggggcggcgaactactacccatcgccaaaaccctagccccgatccggtcgaggagcactacttcttggcatggcgggcacccctagccagtgatggaggctacttcaatgcaataatgaccttcccccagaactatcccaacagcccgccatcagtaagatttacttctgggatgtggcatccgaatgtttatccggatgggcgtgtttgcatttctattcttcatccacctggtgaagatcccagtggttatgagcttgcaagcgaacggtggacaccagtgcacacggttgaaagtatagttctgagcatcatttcaatgctctctagtccgaatgacgagtctccagcaaatattgaagctgccaaggattggagagagaagcgggatgagttcaagaagaaggttaggcaatgtgtccgcaggtctcaggaaatgctgtgaaggaggaacatgggggagttgaatgagtctgcaatcggtgtgctgcaattcacaaccaattatctcatgtcagcattcttttgctttcccctgtatattttttcaaccgatgtcactcgtatagtggtgttgggtctctttagacaaactcgggacggttgcttatcctaaaaattcgattgtactgcgtggcatgaaatgatcgattcgaagaatattttgaacatgctgccacctaatcaaaaaatttcatgtttaacatcataaggaataactgttgcttattctaatgattcgattgcattgcgtgattcta

SEQ ID NO: 73257 - DNA, 1049 bp, Zea Mays
agtccggaactctctcccaagcttcttataaatgctccaacctgttgccatctactgtcttcctcccgattccaagctgctctcgtccctagaaataaagcagctcctccgcggggcggcgaactactacccatcgccaaaaccctagccccgatccggtcgaggagcactacttcttggcatggcgggcacccctagccaggcaagcctcctgctccagaagcagctcaaggatcttgcgaagaaccccgtggatgggttctccgcagggcttgtagacgatagcaacgtcttcgagtggcaggtcaccatcatcggcccgcccgacaccctatatgatggaggctacttcaatgcaataatgaccttcccccagaactatcccaacagcccgccatcagtaagatttacttctgggatgtggcatccgaatgtttatccggatgggcgtgtttgcatttctattcttcatccacctggtgaagatcccagtggttatgagcttgcaagcgaacggtggacaccagtgcacacggttgaaagtatagttctgagcatcatttcaatgctctctagtccgaatgacgagtctccagcaaatattgaagctgccatgcctttggtttctgaagttatacacgactttgccttgcagaaggattggagagagaagcgggatgagttcaagaagaaggttaggcaatgtgtccgcaggtctcaggaaatgctgtgaaggaggaacatgggggagttgaatgagtctgcaatcggtgtgctgcaattcacaaccaattatctcatgtcagcattcttttgctttcccctgtatattttttcaaccgatgtcactcgtatagtggtgttgggtctctttagacaaactcgggacggttgcttatcctaaaaattcgattgtactgcgtggcatgaaatgatcgattcgaagaatattttgaacatgctgccacctaatcaaaaaatttcatgtttaacatcataaggaataactgttgcttattctaatgattcgattgcattgcgtgattcta

SEQ ID NO: 73258 - DNA, 6184 bp, Zea Mays
cccgcttgagctcgggccaagagcgccgatacacgatacggcagccgagcacactcttccccttcctgacctccacttcctagctcggccccggctccgcatctatctatctctcgccctgccgtctccggagaccggagctgctctcacatccccacgcgcgcgccctcgaccccgaccacgtcccccgcccgctcggcgctcgcacagattccctcgtccggggagcggcgctgaggtctcgcaccgatgagctcgggggccatcggggcctcggatcctgggggtggcgagacgaagccggtggcgggcggtgacgtcacgacgtcggaagctgcgggcgaggtgcctgctttcgccgccgatgtgaaagtggaggggaaagctacgttggcgacggatgtggatcgtgaagggggagatacggcggtgagcgacccgctctacgcgaacgagtcagctggtatggttggtgccgaaggccacggagatgagcccgcggagggcctggaggcggtgaatggtgaggaggagatgctagaagcaggagctcgtgatctgctcactgagacggagaagaatccggttcttgtggtacatgtgcctgctgctgctgctggtggtggttctgccattcctgaacatgctgaagccgaatctaacaaagttgaagatcatgtaaacgtggagcctgggacaaagaataatgaaagtgataatggcatagctcattttgataaggaaatacagaacaatgtgcctgatgacatagaggaaagctccaaggaacatgaaggtgatggagcacctgtagttgaccagacaaataatgcatctgaaatgctcccacaaaccggagagcagtttcctgatgttgaaaatagcacggacagcaacctagaggctgctagtctgggtagtgtggatcagggtgctagatactgcctgcctcctcatgataaaggcgggtttcaagttgctgatcttgtctggggtaaagtgaaaagtcatccttggtggcctggtgaaatttttgatccatcagatgcatctgaattggctctgaaacatcagaaaaagggcagccacttggtagcttattttggtgacaacacttttgcgtggtgcgatgaatcccagttgaagccttttgtgacaaattattcacaaatggagaaacagagcagttcagatgcctttgttgggtcagttaataatgcacttgaagaactgtcaaggcggatactgtcaggtatgagctgctcttgtttgccagaagagcttgctgataatggcatgtcctatacagttgataatgctgggctcaaggatggagttacttgctctgcagttaatcggcctgaaatcttaaactgtttcagtccagaaaaccttcttcattatattaaggagttagctctatttcctggccaaggaggtgatctgttggagttagttatagcatgttctcaacttacttctttctatcgatctaagggatgtcctgaacttgcatcatttcaaactggcgatgcgtgggttgaggatggtctggattgtacagacactttgtccacccagaatgtaatggttgaggaacctgtgattaatgaagtgcatcctactcaagataagcccaaaaggggcagggggagacctcggaaacaaaaacctggtggtgaccaggtggtgatggagaaaaggagcatatctaatcaggtcaatgatactagctacaatgagaaacaagtgggtatggactttgataactatggcaacctacagaacaagaacaaaagaaactttgaatcatttgaagattcagagaagtcatcagctccaactggtggtagttctttcaagattggtgagtgtattcggcgagctgcaagccagctgacaggatctccgtccattatgaaggctcagaatgctgctgaaggagagaatggggaatttgatatctttagtgatgatgctggtgatgaacttactgtagagaaacgagcaaaaaggagaagtctgcacaggaatcacactgcagatcccaaggaattactatcacagctatgcttggttgcaacagagccaatgaatggatataatttctcagtaatgataatcagttacttcagtgattacagaaactatattgtttctactactactgaagcaaacatcgttgataaaggtacatctaggagagggaggaagagaaaagaagttttaccttctcctgatgtagagacaacagatcatatgcaggactcgtattggtccggattgagcttgcataatcacccaatccatgacctcagaaaagagagtcccactacaaggccaagacgtaggcggagatcctcaagtcatgcatatgtacctttgtcagaacttggggagccagtacctaaaaaacagatacaagtgatggaaagatctatcatccatgttgacgagaagatgattgatgagttgaagcccactgcacttgttttgagctttgccaggtcagcttctattccttcagaattggatcttgttaagatgttcagtcgctttggtccactgaaagaaagggaggcagaagtacacagggaaacaaatactgttaaagttgtcttcaagaaacgtgccgatgctgaaagggcttttagcgctgctggcaagtatggcacttttggaccttcgcttcgaagttaccgtcttgtcagtatgccattttctctagagacacagtcagcaaacaatcctgtgaaacatcctgaaaatcatggcatggagattccaggttcaaatcagtccgaagctcctaaggattccatggaagttgacctggtacagaaaacagatgaagtagaagttgcaggagaaccgtcgtctgaagaagttgagactgtgaggcaaatatctcaagtgcaagctgcagacagtacatttgtcagtcaagacaggtttgatgaagctggaaatattgacgctgagctaattgaccatgttaatcaaattgggaaagctgcacaagctgcatctgtatctgaagagtcacgagatgttgagcaagtttacactcaaaaggaagtgtcagccaatgatctacccacagagacagaaatcttaaattctgatgctataacaaaagagttgcctcagaatgctccagataatgtggaaactgatatagtcgaagatccaaaacagagtcacaattcaagagataatgccgtatttgaagcagtcattgaagcaccgagtactgcacaagatcatacagaggaggatactgggaatgcagttccagaagagcccatggtatctcctgagttacaaagtcaaacccctggtgatctacccacagagacagaaaccttacattctgatgctatattaaaaaagttgcctcagaatgctccagataatatgcaaactgatatagccgaggatccaaaacagagtcacaattcaggagataatgccgtatttgaagcagtcactgaagcaccgagtactgcacaagatcatactgaggatgatactgggaatgaagttccagaagagcacatggtatctcttgagttacaaagtcaaacccctggtgatctacccacagagacagaaaccttacattctgatgctatagtaaaagagttgcctcataatgctccagataatatgcaaactgatatagccgaagatccaaaacagagtcacaatccaggaggtaatgccgtatttgatgcagtcactgaagcaagaagtactacacaagatcatactgaggatgatactgggaatgaagttccagaagaggacatggtatctcttgagttacaaagtcaaacccctggtgatctacccacagagacagaaaccttatattctgatgctatagtaaaagagttgcctcataatgctccagataatctgcaaactgatatagccagagatccaaaacagagtcacaatctaggagataatgctgtatttgaagcagtcactgaagcaccaagtactgcacaagatcatactgaggatgatactgggaatgaagttccagaagagcacatggtatctcctgagttacaaagtcaaacccctggtgatctacccacagagacagaaaccttacattctgatgctatgataaaagagttgcctcagaatgctccaaatagtatgcaaactgacatagctgaagatccaaaacagagtcacaatccaggagataatgccgtatttgaagcagtcactgaagcaccaagtactgcacaagatcatactgaggatgatactggtaataaagttccagaagagcacatggtatctcttgagttacaaagtcaaacccctggtgatccacccacagagacagaaaccttacattctgatgctatagtaaaagagttgcctcataatgctccagataatatgcaaactgatatagcggaagatccaaaacagagtcacaatccaggagatgctgtatttgaagcagtcactgaagcaccaagtactgcacaagatcatactgaggatgatactgggaatgaagttccagaagagcacatggtatctcctgagttacaaagtcaaacccctggtgatctacccacagagacagaaaccttacattctgatgctataatgaaagagttgcctcagattgctccagataatatgcaagttgatatagctgaacatccaaatcagagtcacaattcaggagataatgccgtatttgaagcagtcgctgaagcaccaagtactgcacacgatcatactgaggatgatactgggaatgaagttccagaagaggacatggtatcttctgagttacaaggtcaaacccctggtgagaaactagtggggcaatctgcaactgaacagatggtgggatctgaagatccaaagccgcaagccgaaaattttgttgctgaacctgttgtgctgggtgcagtcgggcaagtagaaattgaactggaatccaaaactactgttgaagtgtcaggcgaacaaggctatagtattgagcagactgttcaagtggaagctctaattgaagcgtcaggtggacaacttgaggtgggaaggcaaattccagaagatgaatctattgcttgtgcaactactgagcactctatggttgtcgatgaaactgtggaggcaaaagtggtactactcgatgagagtatagagaataatgctgctgtcataggagtagtcgaggagactgctgaaggtgaaactaaggaggaagcatcagacgagaagggaaaaatagaaaataatgaagatgctgacaaattagcaccagccgggaaggggaaaatagaaaataatgaaattataattgacgcaccagatgagaaaacagaaaataaagcagatgctgacacaccagctggggagaccaaagaaggtgaaattacagtagaggaaacagatgagaaaatagaatctaaagttactgctgaacctgtaatcggggagacaactgaaggtcaaactgcagctggagaaccagttgaagaagctagaacagctgaggacatggtagaagatgttaaggtgctagatgataaatctacagcagctgagaaacctgtagagaatgccacagttgtggcacatgagaattcgactacagttgagaatactctgaaggatgcgattgtcgcgccaccagatgcaaataccaccaacgccgaaaaaactgctattggtgccacaattgaaacacaaaatgaggacgctccagcggagaggactatagaggatacctcggttgaggcaccagatgtacaagcaggtgcaagtgagtaaaccagcttagcgatcctttgcattcctgtcagtttctgttgatatcgacgtagtttgctcaactgattctcttgtctagatgatgtgttctgtatagaaaacctggaaccactttagcatcataaggctgttaggttttaaataacttgggcatctatattttgccccttatttttcctatataaacttcatctagttgtattcgatgcgcacgtgtgagtttgtcataaacacaattttctcctatatgtcagttcagtgctcaggcgatcagtgactgagtggaagtctttgggctatctacttggatcaaatgattctggtaccatttgtcgtctgtaaccaactgtgttctcgaatcctt

SEQ ID NO: 73259 - DNA, 6193 bp, Zea Mays
cccgcttgagctcgggccaagagcgccgatacacgatacggcagccgagcacactcttccccttcctgacctccacttcctagctcggccccggctccgcatctatctatctctcgccctgccgtctccggagaccggagctgctctcacatccccacgcgcgcgccctcgaccccgaccacgtcccccgcccgctcggcgctcgcacagtccttccagattccctcgtccggggagcggcgctgaggtctcgcaccgatgagctcgggggccatcggggcctcggatcctgggggtggcgagacgaagccggtggcgggcggtgacgtcacgacgtcggaagctgcgggcgaggtgcctgctttcgccgccgatgtgaaagtggaggggaaagctacgttggcgacggatgtggatcgtgaagggggagatacggcggtgagcgacccgctctacgcgaacgagtcagctggtatggttggtgccgaaggccacggagatgagcccgcggagggcctggaggcggtgaatggtgaggaggagatgctagaagcaggagctcgtgatctgctcactgagacggagaagaatccggttcttgtggtacatgtgcctgctgctgctgctggtggtggttctgccattcctgaacatgctgaagccgaatctaacaaagttgaagatcatgtaaacgtggagcctgggacaaagaataatgaaagtgataatggcatagctcattttgataaggaaatacagaacaatgtgcctgatgacatagaggaaagctccaaggaacatgaaggtgatggagcacctgtagttgaccagacaaataatgcatctgaaatgctcccacaaaccggagagcagtttcctgatgttgaaaatagcacggacagcaacctagaggctgctagtctgggtagtgtggatcagggtgctagatactgcctgcctcctcatgataaaggcgggtttcaagttgctgatcttgtctggggtaaagtgaaaagtcatccttggtggcctggtgaaatttttgatccatcagatgcatctgaattggctctgaaacatcagaaaaagggcagccacttggtagcttattttggtgacaacacttttgcgtggtgcgatgaatcccagttgaagccttttgtgacaaattattcacaaatggagaaacagagcagttcagatgcctttgttgggtcagttaataatgcacttgaagaactgtcaaggcggatactgtcaggtatgagctgctcttgtttgccagaagagcttgctgataatggcatgtcctatacagttgataatgctgggctcaaggatggagttacttgctctgcagttaatcggcctgaaatcttaaactgtttcagtccagaaaaccttcttcattatattaaggagttagctctatttcctggccaaggaggtgatctgttggagttagttatagcatgttctcaacttacttctttctatcgatctaagggatgtcctgaacttgcatcatttcaaactggcgatgcgtgggttgaggatggtctggattgtacagacactttgtccacccagaatgtaatggttgaggaacctgtgattaatgaagtgcatcctactcaagataagcccaaaaggggcagggggagacctcggaaacaaaaacctggtggtgaccaggtggtgatggagaaaaggagcatatctaatcaggtcaatgatactagctacaatgagaaacaagtgggtatggactttgataactatggcaacctacagaacaagaacaaaagaaactttgaatcatttgaagattcagagaagtcatcagctccaactggtggtagttctttcaagattggtgagtgtattcggcgagctgcaagccagctgacaggatctccgtccattatgaaggctcagaatgctgctgaaggagagaatggggaatttgatatctttagtgatgatgctggtgatgaacttactgtagagaaacgagcaaaaaggagaagtctgcacaggaatcacactgcagatcccaaggaattactatcacagctatgcttggttgcaacagagccaatgaatggatataatttctcagtaatgataatcagttacttcagtgattacagaaactatattgtttctactactactgaagcaaacatcgttgataaaggtacatctaggagagggaggaagagaaaagaagttttaccttctcctgatgtagagacaacagatcatatgcaggactcgtattggtccggattgagcttgcataatcacccaatccatgacctcagaaaagagagtcccactacaaggccaagacgtaggcggagatcctcaagtcatgcatatgtacctttgtcagaacttggggagccagtacctaaaaaacagatacaagtgatggaaagatctatcatccatgttgacgagaagatgattgatgagttgaagcccactgcacttgttttgagctttgccaggtcagcttctattccttcagaattggatcttgttaagatgttcagtcgctttggtccactgaaagaaagggaggcagaagtacacagggaaacaaatactgttaaagttgtcttcaagaaacgtgccgatgctgaaagggcttttagcgctgctggcaagtatggcacttttggaccttcgcttcgaagttaccgtcttgtcagtatgccattttctctagagacacagtcagcaaacaatcctgtgaaacatcctgaaaatcatggcatggagattccaggttcaaatcagtccgaagctcctaaggattccatggaagttgacctggtacagaaaacagatgaagtagaagttgcaggagaaccgtcgtctgaagaagttgagactgtgaggcaaatatctcaagtgcaagctgcagacagtacatttgtcagtcaagacaggtttgatgaagctggaaatattgacgctgagctaattgaccatgttaatcaaattgggaaagctgcacaagctgcatctgtatctgaagagtcacgagatgttgagcaagtttacactcaaaaggaagtgtcagccaatgatctacccacagagacagaaatcttaaattctgatgctataacaaaagagttgcctcagaatgctccagataatgtggaaactgatatagtcgaagatccaaaacagagtcacaattcaagagataatgccgtatttgaagcagtcattgaagcaccgagtactgcacaagatcatacagaggaggatactgggaatgcagttccagaagagcccatggtatctcctgagttacaaagtcaaacccctggtgatctacccacagagacagaaaccttacattctgatgctatattaaaaaagttgcctcagaatgctccagataatatgcaaactgatatagccgaggatccaaaacagagtcacaattcaggagataatgccgtatttgaagcagtcactgaagcaccgagtactgcacaagatcatactgaggatgatactgggaatgaagttccagaagagcacatggtatctcttgagttacaaagtcaaacccctggtgatctacccacagagacagaaaccttacattctgatgctatagtaaaagagttgcctcataatgctccagataatatgcaaactgatatagccgaagatccaaaacagagtcacaatccaggaggtaatgccgtatttgatgcagtcactgaagcaagaagtactacacaagatcatactgaggatgatactgggaatgaagttccagaagaggacatggtatctcttgagttacaaagtcaaacccctggtgatctacccacagagacagaaaccttatattctgatgctatagtaaaagagttgcctcataatgctccagataatctgcaaactgatatagccagagatccaaaacagagtcacaatctaggagataatgctgtatttgaagcagtcactgaagcaccaagtactgcacaagatcatactgaggatgatactgggaatgaagttccagaagagcacatggtatctcctgagttacaaagtcaaacccctggtgatctacccacagagacagaaaccttacattctgatgctatgataaaagagttgcctcagaatgctccaaatagtatgcaaactgacatagctgaagatccaaaacagagtcacaatccaggagataatgccgtatttgaagcagtcactgaagcaccaagtactgcacaagatcatactgaggatgatactggtaataaagttccagaagagcacatggtatctcttgagttacaaagtcaaacccctggtgatccacccacagagacagaaaccttacattctgatgctatagtaaaagagttgcctcataatgctccagataatatgcaaactgatatagcggaagatccaaaacagagtcacaatccaggagatgctgtatttgaagcagtcactgaagcaccaagtactgcacaagatcatactgaggatgatactgggaatgaagttccagaagagcacatggtatctcctgagttacaaagtcaaacccctggtgatctacccacagagacagaaaccttacattctgatgctataatgaaagagttgcctcagattgctccagataatatgcaagttgatatagctgaacatccaaatcagagtcacaattcaggagataatgccgtatttgaagcagtcgctgaagcaccaagtactgcacacgatcatactgaggatgatactgggaatgaagttccagaagaggacatggtatcttctgagttacaaggtcaaacccctggtgagaaactagtggggcaatctgcaactgaacagatggtgggatctgaagatccaaagccgcaagccgaaaattttgttgctgaacctgttgtgctgggtgcagtcgggcaagtagaaattgaactggaatccaaaactactgttgaagtgtcaggcgaacaaggctatagtattgagcagactgttcaagtggaagctctaattgaagcgtcaggtggacaacttgaggtgggaaggcaaattccagaagatgaatctattgcttgtgcaactactgagcactctatggttgtcgatgaaactgtggaggcaaaagtggtactactcgatgagagtatagagaataatgctgctgtcataggagtagtcgaggagactgctgaaggtgaaactaaggaggaagcatcagacgagaagggaaaaatagaaaataatgaagatgctgacaaattagcaccagccgggaaggggaaaatagaaaataatgaaattataattgacgcaccagatgagaaaacagaaaataaagcagatgctgacacaccagctggggagaccaaagaaggtgaaattacagtagaggaaacagatgagaaaatagaatctaaagttactgctgaacctgtaatcggggagacaactgaaggtcaaactgcagctggagaaccagttgaagaagctagaacagctgaggacatggtagaagatgttaaggtgctagatgataaatctacagcagctgagaaacctgtagagaatgccacagttgtggcacatgagaattcgactacagttgagaatactctgaaggatgcgattgtcgcgccaccagatgcaaataccaccaacgccgaaaaaactgctattggtgccacaattgaaacacaaaatgaggacgctccagcggagaggactatagaggatacctcggttgaggcaccagatgtacaagcaggtgcaagtgagtaaaccagcttagcgatcctttgcattcctgtcagtttctgttgatatcgacgtagtttgctcaactgattctcttgtctagatgatgtgttctgtatagaaaacctggaaccactttagcatcataaggctgttaggttttaaataacttgggcatctatattttgccccttatttttcctatataaacttcatctagttgtattcgatgcgcacgtgtgagtttgtcataaacacaattttctcctatatgtcagttcagtgctcaggcgatcagtgactgagtggaagtctttgggctatctacttggatcaaatgattctggtaccatttgtcgtctgtaaccaactgtgttctcgaatcctt

SEQ ID NO: 73260 - DNA, 5849 bp, Zea Mays
cccgcttgagctcgggccaagagcgccgatacacgatacggcagccgagcacactcttccccttcctgacctccacttcctagctcggccccggctccgcatctatctatctctcgccctgccgtctccggagaccggagctgctctcacatccccacgcgcgcgccctcgaccccgaccacgtcccccgcccgctcggcgctcgcacagtccttccagattccctcgtccggggagcggcgctgaggtctcgcaccgatgagctcgggggccatcggggcctcggatcctgggggtggcgagacgaagccggtggcgggcggtgacgtcacgacgtcggaagctgcgggcgaggtgcctgctttcgccgccgatgtgaaagtggaggggaaagctacgttggcgacggatgtggatcgtgaagggggagatacggcggtgagcgacccgctctacgcgaacgagtcagctggtatggttggtgccgaaggccacggagatgagcccgcggagggcctggaggcggtgaatggtgaggaggagatgctagaagcaggagctcgtgatctgctcactgagacggagaagaatccggttcttgtggtacatgtgcctgctgctgctgctggtggtggttctgccattcctgaacatgctgaagccgaatctaacaaagttgaagatcatgtaaacgtggagcctgggacaaagaataatgaaagtgataatggcatagctcattttgataaggaaatacagaacaatgtgcctgatgacatagaggaaagctccaaggaacatgaaggtgatggagcacctgtagttgaccagacaaataatgcatctgaaatgctcccacaaaccggagagcagtttcctgatgttgaaaatagcacggacagcaacctagaggctgctagtctgggtagtgtggatcagggtgctagatactgcctgcctcctcatgataaaggcgggtttcaagttgctgatcttgtctggggtaaagtgaaaagtcatccttggtggcctggtgaaatttttgatccatcagatgcatctgaattggctctgaaacatcagaaaaagggcagccacttggtagcttattttggtgacaacacttttgcgtggtgcgatgaatcccagttgaagccttttgtgacaaattattcacaaatggagaaacagagcagttcagatgcctttgttgggtcagttaataatgcacttgaagaactgtcaaggcggatactgtcaggtatgagctgctcttgtttgccagaagagcttgctgataatggcatgtcctatacagttgataatgctgggctcaaggatggagttacttgctctgcagttaatcggcctgaaatcttaaactgtttcagtccagaaaaccttcttcattatattaaggagttagctctatttcctggccaaggaggtgatctgttggagttagttatagcatgttctcaacttacttctttctatcgatctaagggatgtcctgaacttgcatcatttcaaactggcgatgcgtgggttgaggatggtctggattgtacagacactttgtccacccagaatgtaatggttgaggaacctgtgattaatgaagtgcatcctactcaagataagcccaaaaggggcagggggagacctcggaaacaaaaacctggtggtgaccaggtggtgatggagaaaaggagcatatctaatcaggtcaatgatactagctacaatgagaaacaagtgggtatggactttgataactatggcaacctacagaacaagaacaaaagaaactttgaatcatttgaagattcagagaagtcatcagctccaactggtggtagttctttcaagattggtgagtgtattcggcgagctgcaagccagctgacaggatctccgtccattatgaaggctcagaatgctgctgaaggagagaatggggaatttgatatctttagtgatgatgctggtgatgaacttactgtagagaaacgagcaaaaaggagaagtctgcacaggaatcacactgcagatcccaaggaattactatcacagctatgcttggttgcaacagagccaatgaatggatataatttctcagtaatgataatcagttacttcagtgattacagaaactatattgtttctactactactgaagcaaacatcgttgataaaggtacatctaggagagggaggaagagaaaagaagttttaccttctcctgatgtagagacaacagatcatatgcaggactcgtattggtccggattgagcttgcataatcacccaatccatgacctcagaaaagagagtcccactacaaggccaagacgtaggcggagatcctcaagtcatgcatatgtacctttgtcagaacttggggagccagtacctaaaaaacagatacaagtgatggaaagatctatcatccatgttgacgagaagatgattgatgagttgaagcccactgcacttgttttgagctttgccaggtcagcttctattccttcagaattggatcttgttaagatgttcagtcgctttggtccactgaaagaaagggaggcagaagtacacagggaaacaaatactgttaaagttgtcttcaagaaacgtgccgatgctgaaagggcttttagcgctgctggcaagtatggcacttttggaccttcgcttcgaagttaccgtcttgtcagtatgccattttctctagagacacagtcagcaaacaatcctgtgaaacatcctgaaaatcatggcatggagattccaggttcaaatcagtccgaagctcctaaggattccatggaagttgacctggtacagaaaacagatgaagtagaagttgcaggagaaccgtcgtctgaagaagttgagactgtgaggcaaatatctcaagtgcaagctgcagacagtacatttgtcagtcaagacaggtttgatgaagctggaaatattgacgctgagctaattgaccatgttaatcaaattgggaaagctgcacaagctgcatctgtatctgaagagtcacgagatgttgagcaagtttacactcaaaaggaagtgtcagccaatgatctacccacagagacagaaatcttaaattctgatgctataacaaaagagttgcctcagaatgctccagataatgtggaaactgatatagtcgaagatccaaaacagagtcacaattcaagagataatgccgtatttgaagcagtcattgaagcaccgagtactgcacaagatcatacagaggaggatactgggaatgcagttccagaagagcccatggtatctcctgagttacaaagtcaaacccctggtgatctacccacagagacagaaaccttacattctgatgctatattaaaaaagttgcctcagaatgctccagataatatgcaaactgatatagccgaggatccaaaacagagtcacaattcaggagataatgccgtatttgaagcagtcactgaagcaccgagtactgcacaagatcatactgaggatgatactgggaatgaagttccagaagagcacatggtatctcttgagttacaaagtcaaacccctggtgatctacccacagagacagaaaccttacattctgatgctatagtaaaagagttgcctcataatgctccagataatatgcaaactgatatagccgaagatccaaaacagagtcacaatccaggaggtaatgccgtatttgatgcagtcactgaagcaagaagtactacacaagatcatactgaggatgatactgggaatgaagttccagaagaggacatggtatctcttgagttacaaagtcaaacccctggtgatctacccacagagacagaaaccttatattctgatgctatagtaaaagagttgcctcataatgctccagataatctgcaaactgatatagccagagatccaaaacagagtcacaatctaggagataatgctgtatttgaagcagtcactgaagcaccaagtactgcacaagatcatactgaggatgatactgggaatgaagttccagaagagcacatggtatctcctgagttacaaagtcaaacccctggtgatctacccacagagacagaaaccttacattctgatgctatgataaaagagttgcctcagaatgctccaaatagtatgcaaactgacatagctgaagatccaaaacagagtcacaatccaggagataatgccgtatttgaagcagtcactgaagcaccaagtactgcacaagatcatactgaggatgatactggtaataaagttccagaagagcacatggtatctcttgagttacaaagtcaaacccctggtgatccacccacagagacagaaaccttacattctgatgctatagtaaaagagttgcctcataatgctccagataatatgcaaactgatatagcggaagatccaaaacagagtcacaatccaggagatgctgtatttgaagcagtcactgaagcaccaagtactgcacaagatcatactgaggatgatactgggaatgaagttccagaagagcacatggtatctcctgagttacaaagtcaaacccctggtgatctacccacagagacagaaaccttacattctgatgctataatgaaagagttgcctcagattgctccagataatatgcaagttgatatagctgaacatccaaatcagagtcacaattcaggagataatgccgtatttgaagcagtcgctgaagcaccaagtactgcacacgatcatactgaggatgatactgggaatgaagttccagaagaggacatggtatcttctgagttacaaggtcaaacccctggtgagaaactagtggggcaatctgcaactgaacagatggtgggatctgaagatccaaagccgcaagccgaaaattttgttgctgaacctgttgtgctgggtgcagtcgggcaagtagaaattgaactggaatccaaaactactgttgaagtgtcaggcgaacaaggctatagtattgagcagactgttcaagtggaagctctaattgaagcgtcaggtggacaacttgaggtgggaaggcaaattccagaagatgaatctattgcttgtgcaactactgagcactctatggttgtcgatgaaactgtggaggcaaaagtggtactactcgatgagagtatagagaataatgctgctgtcataggagtagtcgaggagactgctgaaggtgaaactaaggaggaagcatcagacgagaagggaaaaatagaaaataatgaagatgctgacaaattagcaccagccgggaaggggaaaatagaaaataatgaaattataattgacgcaccagatgagaaaacagaaaataaagcagatgctgacacaccagctggggagaccaaagaaggtgaaattacagtagaggaaacagatgagaaaatagaatctaaagttactgctgaacctgtaatcggggagacaactgaaggtcaaactgcagctggagaaccagttgaagaagctagaacagctgaggacatggtagaagatgttaaggtgctagatgataaatctacagcagctgagaaacctgtagagaatgccacagttgtggcacatgagaattcgactacagttgagaatactctgaaggatgcgattgtcgcgccaccagatgcaaataccaccaacgccgaaaaaactgctattggtgccacaattgaaacacaaaatgaggacgctccagcggagaggactatagaggatacctcggttgaggcaccagatgtacaagcaggtgcaacgcgaggttacgagtcaactaaggagca

SEQ ID NO: 73261 - DNA, 3082 bp, Zea Mays
cctcgaacccccaggtcccccacacaacgcagatacggacactctcctactccgccctccccctgcgccccgcgcagcgcacgcccagcccagtccagccggaggagaccagatcaaagcgccaccgccacgccgtactctagctaatcccgccgccgcgccggggtcgcgaggaggaggatgaagcccaagagcctcccgttcatcgccttcgagcacaagcgggatgcatacggctttgctgtgcggccgcaacacctgcaacgttacaaggagtacgctggcatctacaaggaagaagaggaggagagatctgacaggtggaagaattttctggagaggcagcctgaatcatccggacaagatgctggtggtaatgctaaggatgatggttccgaatcactgcatgagaagacggtagttggaccacgaaagattgaaatatggacgccaattagaccgtccctgagcaacatcgagcagatgatgagcttgcgcatcgagaagaagcaatcctctgctagcaagcagcaagcaaaggatgtaatccatcctgtgaaagttgaggagggcaagttgtcagaggattcagacgacgagttctatgatgtagataaggttgatccgagccaagaagtgcagccgagcgatactgggaatgctgatgttggaagcaggagtcaagaagaaaattacatttcaaaggaagagttggagtgtctagtccatggtggactaccgatggctttgaggggagagctatggcaagcttttgttggtactggagctcgtagggtagaagggtattatgataatctggcagcagagggtgaattagataacaaacgttcagattctcgaacctcggaaggtgttcacgagaagtggattggacaaatagagaagaacttttcctggtcatcctgctttagatgaggatggaagaaatgctttgagacgcttgcttatagcttatgcgaaacacaacccatcagttggttactgccaggcaatgaacttttttgctggtctcttgcttctattgatgccggaggagaatgcgttttggacattggttgggattatggatgactattttgatggctacttttctgaagaaatgattgagtcacaggtggaccagcttgttttagaggagttagttcgagagaagttccctaaattagcaaatcacctggattaccttggacttcaagttgcatgggttactgggccatggttcttatccatcttcacgaatgtgcttccttgggaaagtgttctccgtgtatgggatgtgcttttgtttgatggaaacagagtaatgctgttccggacagctcttgcgctactggagttctatggccctgctcttgtgactacaaaagatgctggtgatgcagttacccttttgcagtctttagctggttccacttttgacagcagccagcttgtcttgacagctcgcatgggataccaatccgtaaatgaaacaatattgcaagaactgagtaataaacaccgcccacctgttatatctgcaatggaagaaagagcaaagggtctaggtgtttggacggataccaatggtcttgcatcaaaactgtataacttcaaacgtgaccctgaaccgctggtttctttaagtgattcaacagaccagttgagtgatgtgggagatggggataccaatcaagaaagtgatctgggaaacatggatgacgagtatggtggtgtaatagtgaattctgagattgattctttgcctgatccaaaggaccaggttgcctggctgaagttggagctgtgccgactcatagaggagagaagatcagctgttctcagagctgatgaactagaaacagcacttatggaaatggttaagcaagataacaggcgccaattaagtgcaaaggttgagcagtttgaacaagaaatatctgaactaagacaggccctgtcagacaagcaggagcaggagcaagcaatgtttcaggtcctgatgcgtgttgaacaagaactaaaaattgcagaggaagctcgcatctcagctgagcaggatgctgctgctcagagatacgcagcaaatgttctacaggaaaagtacgaggaagctatggcttcacttgcccaaatggagaacagagctgtaatggcagaaacaatgttggaggctacactgcagtaccaatctagccagcagaaagcaatgtccccttgcccttctccaagaccatcgatgctcgacgcatcccctagtcagtcaagccagaattcatcgcaggagttccagccaagaaggaaaaacttgcttggcccattttccctgagttggcgtgataagaacaaggaaaaaccgaacaacgctgatgactccaccaacacaaagtctacaaataatgatgaaatggtagaaacctccaacacaaatgatgagaagcatagagaaacactagatctaaatagtgagcagagagcagaatcacccaaagcagatgtcaagatgagagcagagacacctgagaaagacaacgacctgccaggggtccaactagtcactgacgatttgaatgggcaccacgaacagatgcaagaaataaaattggattgataagcattaagcacaatgctcccagcccaaatatcttcgccaccacgtaagtaatatcagagtatttatgatctgatcacacggtgccagttggtgacagcactgagggtggctaagttttgaaatgatactggtccccccctcctctcccctttccctttgtggttccccgaattctttttgccaccacatctaggttacatgtcatttctctccattttttataattttgaggagaaaatgagcaagttatatatggttgcccatccgttgctgcctcccaatgtaaatgcattggaagaactgtgagaaaaaagatgagaattgtgggcaattatgacacccttattcttgtaaattatcatatcatttagagtttatgcgtgctttcaattgaagaaatccgtgctggcgttaataacaccactgaaccctgatatagacgttggtgaaaacggatagggtatgtct

SEQ ID NO: 73262 - DNA, 2274 bp, Zea Mays
acaacgcagatacggacactctcctactccgccctccccctgcgccccgcgcagcgcacgcccagcccagtccagccggaggagaccagatcaaagcgccaccgccacgccgtactctagctaatcccgccgccgcgccggggtcgcgaggaggaggatgaagcccaagagcctcccgttcatcgccttcgagcacaagcggcaatgaacttttttgctggtctcttgcttctattgatgccggaggagaatgcgttttggacattggttgggattatggatgactattttgatggctacttttctgaagaaatgattgagtcacaggtggaccagcttgttttagaggagttagttcgagagaagttccctaaattagcaaatcacctggattaccttggacttcaagttgcatgggttactgggccatggttcttatccatcttcacgaatgtgcttccttgggaaagtgttctccgtgtatgggatgtgcttttgtttgatggaaacagagtaatgctgttccggacagctcttgcgctactggagttctatggccctgctcttgtgactacaaaagatgctggtgatgcagttacccttttgcagtctttagctggttccacttttgacagcagccagcttgtcttgacagctcgcatgggataccaatccgtaaatgaaacaatattgcaagaactgagtaataaacaccgcccacctgttatatctgcaatggaagaaagagcaaagggtctaggtgtttggacggataccaatggtcttgcatcaaaactgtataacttcaaacgtgaccctgaaccgctggtttctttaagtgattcaacagaccagttgagtgatgtgggagatggggataccaatcaagaaagtgatctgggaaacatggatgacgagtatggtggtgtaatagtgaattctgagattgattctttgcctgatccaaaggaccaggttgcctggctgaagttggagctgtgccgactcatagaggagagaagatcagctgttctcagagctgatgaactagaaacagcacttatggaaatggttaagcaagataacaggcgccaattaagtgcaaaggttgagcagtttgaacaagaaatatctgaactaagacaggccctgtcagacaagcaggagcaggagcaagcaatgtttcaggtcctgatgcgtgttgaacaagaactaaaaattgcagaggaagctcgcatctcagctgagcaggatgctgctgctcagagatacgcagcaaatgttctacaggaaaagtacgaggaagctatggcttcacttgcccaaatggagaacagagctgtaatggcagaaacaatgttggaggctacactgcagtaccaatctagccagcagaaagcaatgtccccttgcccttctccaagaccatcgatgctcgacgcatcccctagtcagtcaagccagaattcatcgcaggagttccagccaagaaggaaaaacttgcttggcccattttccctgagttggcgtgataagaacaaggaaaaaccgaacaacgctgatgactccaccaacacaaagtctacaaataatgatgaaatggtagaaacctccaacacaaatgatgagaagcatagagaaacactagatctaaatagtgagcagagagcagaatcacccaaagcagatgtcaagatgagagcagagacacctgagaaagacaacgacctgccaggggtccaactagtcactgacgatttgaatgggcaccacgaacagatgcaagaaataaaattggattgataagcattaagcacaatgctcccagcccaaatatcttcgccaccacgtaagtaatatcagagtatttatgatctgatcacacggtgccagttggtgacagcactgagggtggctaagttttgaaatgatactggtccccccctcctctcccctttccctttgtggttccccgaattctttttgccaccacatctaggttacatgtcatttctctccattttttataattttgaggagaaaatgagcaagttatatatggttgcccatccgttgctgcctcccaatgtaaatgcattggaagaactgtgagaaaaaagatgagaattgtgggcaattatgacacccttattcttgtaaattatcatatcatttagagtttatgcgtgctttcaattgaagaaatccgtgctggcgttaataacaccactgaaccctgatatagacgttggtgaaaacggatagggtatgtct

SEQ ID NO: 73263 - DNA, 3006 bp, Zea Mays
cgcttcccggggatctcggccagttgcggcgctgggatttctcttgccggttttttcccctggaaatgcggcgggaaattccgcgcgcttgcacgcgcccgctgggaatctggtcccctccgcgaatcggagaaaggggatgcatacggctttgctgtgcggccgcaacacctgcaacgttacaaggagtacgctggcatctacaaggaagaagaggaggagagatctgacaggtggaagaattttctggagaggcagcctgaatcatccggacaagatgctggtggtaatgctaaggatgatggttccgaatcactgcatgagaagacggtagttggaccacgaaagattgaaatatggacgccaattagaccgtccctgagcaacatcgagcagatgatgagcttgcgcatcgagaagaagcaatcctctgctagcaagcagcaagcaaaggatgtaatccatcctgtgaaagttgaggagggcaagttgtcagaggattcagacgacgagttctatgatgtagataaggttgatccgagccaagaagtgcagccgagcgatactgggaatgctgatgttggaagcaggagtcaagaagaaaattacatttcaaaggaagagttggagtgtctagtccatggtggactaccgatggctttgaggggagagctatggcaagcttttgttggtactggagctcgtagggtagaagggtattatgataatctggcagcagagggtgaattagataacaaacgttcagattctcgaacctcggaaggtgttcacgagaagtggattggacaaatagagaaggatttgcccagaacttttcctggtcatcctgctttagatgaggatggaagaaatgctttgagacgcttgcttatagcttatgcgaaacacaacccatcagttggttactgccaggcaatgaacttttttgctggtctcttgcttctattgatgccggaggagaatgcgttttggacattggttgggattatggatgactattttgatggctacttttctgaagaaatgattgagtcacaggtggaccagcttgttttagaggagttagttcgagagaagttccctaaattagcaaatcacctggattaccttggacttcaagttgcatgggttactgggccatggttcttatccatcttcacgaatgtgcttccttgggaaagtgttctccgtgtatgggatgtgcttttgtttgatggaaacagagtaatgctgttccggacagctcttgcgctactggagttctatggccctgctcttgtgactacaaaagatgctggtgatgcagttacccttttgcagtctttagctggttccacttttgacagcagccagcttgtcttgacagctcgcatgggataccaatccgtaaatgaaacaatattgcaagaactgagtaataaacaccgcccacctgttatatctgcaatggaagaaagagcaaagggtctaggtgtttggacggataccaatggtcttgcatcaaaactgtataacttcaaacgtgaccctgaaccgctggtttctttaagtgattcaacagaccagttgagtgatgtgggagatggggataccaatcaagaaagtgatctgggaaacatggatgacgagtatggtggtgtaatagtgaattctgagattgattctttgcctgatccaaaggaccaggttgcctggctgaagttggagctgtgccgactcatagaggagagaagatcagctgttctcagagctgatgaactagaaacagcacttatggaaatggttaagcaagataacaggcgccaattaagtgcaaaggttgagcagtttgaacaagaaatatctgaactaagacaggccctgtcagacaagcaggagcaggagcaagcaatgtttcaggtcctgatgcgtgttgaacaagaactaaaaattgcagaggaagctcgcatctcagctgagcaggatgctgctgctcagagatacgcagcaaatgttctacaggaaaagtacgaggaagctatggcttcacttgcccaaatggagaacagagctgtaatggcagaaacaatgttggaggctacactgcagtaccaatctagccagcagaaagcaatgtccccttgcccttctccaagaccatcgatgctcgacgcatcccctagtcagtcaagccagaattcatcgcaggagttccagccaagaaggaaaaacttgcttggcccattttccctgagttggcgtgataagaacaaggaaaaaccgaacaacgctgatgactccaccaacacaaagtctacaaataatgatgaaatggtagaaacctccaacacaaatgatgagaagcatagagaaacactagatctaaatagtgagcagagagcagaatcacccaaagcagatgtcaagatgagagcagagacacctgagaaagacaacgacctgccaggggtccaactagtcactgacgatttgaatgggcaccacgaacagatgcaagaaataaaattggattgataagcattaagcacaatgctcccagcccaaatatcttcgccaccacgtaagtaatatcagagtatttatgatctgatcacacggtgccagttggtgacagcactgagggtggctaagttttgaaatgatactggtccccccctcctctcccctttccctttgtggttccccgaattctttttgccaccacatctaggttacatgtcatttctctccattttttataattttgaggagaaaatgagcaagttatatatggttgcccatccgttgctgcctcccaatgtaaatgcattggaagaactgtgagaaaaaagatgagaattgtgggcaattatgacacccttattcttgtaaattatcatatcatttagagtttatgcgtgctttcaattgaagaaatccgtgctggcgttaataacaccactgaaccctgatatagacgttggtgaaaacggatagggtatgtct

SEQ ID NO: 73264 - DNA, 1867 bp, Zea Mays
ctgtgttgtatactattggtggttatgggatacccaggagaccatataaagcacactaactctttttctccgtgtatgggatgtgcttttgtttgatggaaacagagtaatgctgttccggacagctcttgcgctactggagttctatggccctgctcttgtgactacaaaagatgctggtgatgcagttacccttttgcagtctttagctggttccacttttgacagcagccagcttgtcttgacagctcgcatgggataccaatccgtaaatgaaacaatattgcaagaactgagtaataaacaccgcccacctgttatatctgcaatggaagaaagagcaaagggtctaggtgtttggacggataccaatggtcttgcatcaaaactgtataacttcaaacgtgaccctgaaccgctggtttctttaagtgattcaacagaccagttgagtgatgtgggagatggggataccaatcaagaaagtgatctgggaaacatggatgacgagtatggtggtgtaatagtgaattctgagattgattctttgcctgatccaaaggaccaggttgcctggctgaagttggagctgtgccgactcatagaggagagaagatcagctgttctcagagctgatgaactagaaacagcacttatggaaatggttaagcaagataacaggcgccaattaagtgcaaaggttgagcagtttgaacaagaaatatctgaactaagacaggccctgtcagacaagcaggagcaggagcaagcaatgtttcaggtcctgatgcgtgttgaacaagaactaaaaattgcagaggaagctcgcatctcagctgagcaggatgctgctgctcagagatacgcagcaaatgttctacaggaaaagtacgaggaagctatggcttcacttgcccaaatggagaacagagctgtaatggcagaaacaatgttggaggctacactgcagtaccaatctagccagcagaaagcaatgtccccttgcccttctccaagaccatcgatgctcgacgcatcccctagtcagtcaagccagaattcatcgcaggagttccagccaagaaggaaaaacttgcttggcccattttccctgagttggcgtgataagaacaaggaaaaaccgaacaacgctgatgactccaccaacacaaagtctacaaataatgatgaaatggtagaaacctccaacacaaatgatgagaagcatagagaaacactagatctaaatagtgagcagagagcagaatcacccaaagcagatgtcaagatgagagcagagacacctgagaaagacaacgacctgccaggggtccaactagtcactgacgatttgaatgggcaccacgaacagatgcaagaaataaaattggattgataagcattaagcacaatgctcccagcccaaatatcttcgccaccacgtaagtaatatcagagtatttatgatctgatcacacggtgccagttggtgacagcactgagggtggctaagttttgaaatgatactggtccccccctcctctcccctttccctttgtggttccccgaattctttttgccaccacatctaggttacatgtcatttctctccattttttataattttgaggagaaaatgagcaagttatatatggttgcccatccgttgctgcctcccaatgtaaatgcattggaagaactgtgagaaaaaagatgagaattgtgggcaattatgacacccttattcttgtaaattatcatatcatttagagtttatgcgtgctttcaattgaagaaatccgtgctggcgttaataacaccactgaaccctgatatagacgttggtgaaaacggatagggtatgtct

SEQ ID NO: 73265 - DNA, 1148 bp, Zea Mays
cgccttgggaaaatggtaggaggatgaggcggcacgcagggcacggtgcatgtcctgggccagccagtagaggaggaaggagagctgcaggggagggagaaggagagctgcgggggagggcaagagctgctggcggctgagatatttgtgtggtgactgctgaggaaaagtacgaggaagctatggcttcacttgcccaaatggagaacagagctgtaatggcagaaacaatgttggaggctacactgcagtaccaatctagccagcagaaagcaatgtccccttgcccttctccaagaccatcgatgctcgacgcatcccctagtcagtcaagccagaattcatcgcaggagttccagccaagaaggaaaaacttgcttggcccattttccctgagttggcgtgataagaacaaggaaaaaccgaacaacgctgatgactccaccaacacaaagtctacaaataatgatgaaatggtagaaacctccaacacaaatgatgagaagcatagagaaacactagatctaaatagtgagcagagagcagaatcacccaaagcagatgtcaagatgagagcagagacacctgagaaagacaacgacctgccaggggtccaactagtcactgacgatttgaatgggcaccacgaacagatgcaagaaataaaattggattgataagcattaagcacaatgctcccagcccaaatatcttcgccaccacgtaagtaatatcagagtatttatgatctgatcacacggtgccagttggtgacagcactgagggtggctaagttttgaaatgatactggtccccccctcctctcccctttccctttgtggttccccgaattctttttgccaccacatctaggttacatgtcatttctctccattttttataattttgaggagaaaatgagcaagttatatatggttgcccatccgttgctgcctcccaatgtaaatgcattggaagaactgtgagaaaaaagatgagaattgtgggcaattatgacacccttattcttgtaaattatcatatcatttagagtttatgcgtgctttcaattgaagaaatccgtgctggcgttaataacaccactgaaccctgatatagacgttggtgaaaacggatagggtatgtct

SEQ ID NO: 73266 - DNA, 1007 bp, Zea Mays
cttatgcgcctaaccgaaatatggaaaagtacgaggaagctatggcttcacttgcccaaatggagaacagagctgtaatggcagaaacaatgttggaggctacactgcagtaccaatctagccagcagaaagcaatgtccccttgcccttctccaagaccatcgatgctcgacgcatcccctagtcagtcaagccagaattcatcgcaggagttccagccaagaaggaaaaacttgcttggcccattttccctgagttggcgtgataagaacaaggaaaaaccgaacaacgctgatgactccaccaacacaaagtctacaaataatgatgaaatggtagaaacctccaacacaaatgatgagaagcatagagaaacactagatctaaatagtgagcagagagcagaatcacccaaagcagatgtcaagatgagagcagagacacctgagaaagacaacgacctgccaggggtccaactagtcactgacgatttgaatgggcaccacgaacagatgcaagaaataaaattggattgataagcattaagcacaatgctcccagcccaaatatcttcgccaccacgtaagtaatatcagagtatttatgatctgatcacacggtgccagttggtgacagcactgagggtggctaagttttgaaatgatactggtccccccctcctctcccctttccctttgtggttccccgaattctttttgccaccacatctaggttacatgtcatttctctccattttttataattttgaggagaaaatgagcaagttatatatggttgcccatccgttgctgcctcccaatgtaaatgcattggaagaactgtgagaaaaaagatgagaattgtgggcaattatgacacccttattcttgtaaattatcatatcatttagagtttatgcgtgctttcaattgaagaaatccgtgctggcgttaataacaccactgaaccctgatatagacgttggtgaaaacggatagggtatgtct

SEQ ID NO: 73267 - DNA, 1047 bp, Zea Mays
atgtcttctcgaaatgaagctccatcttctgtggctggtgagtatgatccgaagagcgatcctacccggaagccacggaagtctactgatccagggtggaagtatggattttggccagatcttcaaaataaagataaggtggaatgcaccctatgtggccaggttgttagtggagggataaagaggttaaagcaacatttggcaggggcatatggagatgcaaagttatgtcccaaggctaccagtggaataaggaaggagatgacaagttatttggaggcaaacaagagaaaaagaccaatgtttctagatgaagatgaagaagatgatgaagtggtggaggtggcagcagcagatgggacgaatgatacatctgctgtggagtctcaagcatccaaggtgcagcctagttctggtacagcagccaaaaaaagacaatcgaccttgcaatttaaggcaaacagtaaagcacagcaaaagacagccaagtccgtagttgagatgttgcggaaaacaccagaggaggtggtggatgagagactttcaggctcttatcagcccacaatcttggctagtgcaaaaagcaaggaggacaaacactatgtggacatgcagtgggctttgttcttctatgagtgcggtgtacctttcaatgccgcagcagctaggcagtttcagattgcaattgaggccacagcacagtttggttcagggtataagcctccaacaccttaccaactaggcgagccattgctacaagaggctgtgaagacaacaaatacaatgagggaggaacatgagcgtgcatggaaacactatggttgcacactcatgtctgatggatggtctgataggaggggacgccatctcattaacttcttagtgaacagcccagagggcacttattttttagagtccgttgatgcatctagtgaagtacacgatgcatacatgcttgctgatttgcttgagaaaaaagttgatgagattgggagagacaaggttgtacaagttgttactgataatggtgccaattacaaagctgca

SEQ ID NO: 73268 - DNA, 4198 bp, Zea Mays
atggggggcgggagacgcgcgacttggcccttgtgcggggtggcgaggatggagctcgtcccggacctggcgagcacgtcgcagagcgggcggggactgcggagggcgggcgggcggatcatggcgttcgcggctgtcgcggcgggcaggcaagaagggagcgcgctggcgtccgtcatcggcgagggctctggggctgcgacggcaagcgggagcccgccgatggatcgctgccggaagaggcccgactccgaccccgaaggctgcagcgaacccgaaccccccgccgataagcgcccgtgcacagcggaaccctcgacctccgcggccgcggtcgccgccgctcctccgcccggcgcgcgccaggctgagcagggcggctcggatatggacacctcgtcgtccggccaccacggcgatgctgatgtcgacgcggatgatggggacggtgatggcgatggcgatggcgatggcgatggggggtcgtcgtgcgagtcggatggggacgggagcccggggccgcgcggcagcgggggcgggaggttccagcggatggtggacgcggtggcagacgatggcgcggggcaggacgcgctgttggcggcgctcacggagctctgcgaggcgctatcgttctgtacggaggacgtcggtgggtacttccccacagaggcagccgcgcgagcgctggtgcgccgggccggcggcggcgatggcgcgggtactaccccggacgtgattctgctgtccgtacgcgccatcacgtacctctgcgacgccatgccgcgtgccgctgacgccgtcgtccgccacggcctcctccccgtgctctgctcccggctgctaaccatcgagtacgtcgatgttgctgagcagtgcttgcaagcatttgagaagatatcacggaggcagcctacccagtgcttgcaggctggcatgatcaacgctgtgctggcattcattgacttcttcgctgcaagtattcagagggttgcagtgtcagctgtcgcaaatgcctgcaaaaaggtcccgtcagattgctcccaatttgttctggatgcggtcccaactctctgtaatcttctgcaatctgaggacaaagtggtactgttgtcccccatctaattgagatcattctatcatgtaaagaatgctctgcttctggttgtaatcgatatcaatttccagatagtagagaaggttgcagcttgcctggtaagcattgcggactcctttagcacttcggttgatcttgtcgatcatctctgccaccagggtgttatggagaaggtcctacctttgatccacactggtggactcacggcccttagcccatcgacatgtagtaatctgattgggcttcttgctaagctagcctgtacttcacttgtggcagtgaaatctctgtttgagctgggtgttagtagcacaataaaggggattttgatcacttcagacatttcccatggcatgccatatttgcctctggaaaaacaaaacaatcagggcctcacttgtggaagtcagaatctacctgcagaaacatgtccgaagcaaggaacttcatcttctggtcaagcagaaagaaacacaacaatcttgagtgattacaccatacaacaaaaattggtatttagcttaaatgggaaagagcttgaccggtctgttactctatatcagtcaatcctgcaggatcatatcaatgcagggtctgagataattctggacatgcagttttggcgcagtgtacatgacataactttcaaagctgctaatccagaagcaaatagaacagctgttaacccagaagcaaatgattctcctaggcattcctctactgcaatgtcatcaataaatgagaatacaactgggtttacatggcagatgctcccattcttttctagtatgttgcttggtaaacttccttgcaaacttgacagatcaggtgcttcgtatgacatattgtttatgttacacattttagagggattaaacaggtattcctttcacctcgtgtctgatgagagaaaccgttcttttgcccatggaaggataactaaccttgatgatctgaaggctgaagttttctcgattcctcagcaagagtttgtcagcgccaaattaacagataaattggagcaacaaatgcatgatccattagtttcaaggtcttgctgcctgcctttatggtgcattgaactgatgtctgcatgtcctttcttattttcatttgaggcgagatggaagtatttccagttgacggcatttggttctttgaaaaatcatcatggccacatgatggatgcaagtgttaacagtgttgcggaaagggggtcttcccactcacggaaaaagttcaaagttgatcgtgatgatatactggtttcagcagcaaaaatgatgaagtcccatgctaagagcaatgctctacttgaagtagaatataaagaggaagtgggcactggtttaggtcctacaatggaattctatacattgataagtcatgaatttcagaagtctggtctaggcatgtggagaggggaacttccttgtaaatctggtacccatgatactcatgtttctagatttgtggttgcctctaatggacttttccctagaccttggtctgcttctgaagatcctgcttcctttcaagaagtgagcgagcgattccacttacttggtctggttgttgcaaaagcaattaaagacaacagaattcttgacattccattttctaaagcattctacaaacttatccttggacaggagcttaatatatatgatatccagtcattagattctgaactggccatatgccttgtggagtttcaagcgcttgcttgtcagagaaaatatgcagagtccaatttgacaagggactgccagatatcagatttgacttatcggggttgtagaattgaggatcttgctattgagttcgctctcccaggatatccagaatatgtgctctcgccaggaagtcgctctgactgtgtaagcgtgctttcttctgcctgcttctgaacagactaaatccccccacccaccccacacacaccaaattaattgctaatgctattgttcagttgaatgctgagaatttggaagaatatgttcgtcatgttgttgacgcaacggttaaaagtggaattgcaagacagatggaagcttttaagtcaggatttaatgaggtatttccgctaaaaaaactccaggttttttcagaggacgagctagagagattactttgtggtgaacaagatacatgggattttgcgaaacttgtggatcacatcaaatttgatcatggctacacttccagcagccctcctgtcattaatttgctggaaatcatacaagagtttggatccattcaacgtagagctttcttgcaatttataacgggttcacctcggcttccaccaggcggcttggctgcactaaatccaaagttcacagttgttcgaaagaataacagcaatgatgttgatcatgacctgccgagcgtgatgacttgtgccaactatcttaagttacctccatactcttcaaaggaaaagatgagagagaaactcctctatgcaattacagagggccagggatccttccacctatcttaaccaataagcgataatgatacttcgcatgcaacaggagtttctctttgtaagtatctcgtaggaaaggaaaacacggtgtaaatgtgggtggttcactgcttattttagctgacagcacgatctggtggagctgattttaggagagaaaaaaacggctaccgctctttgtacatactaggtttcaggtgtgatcaagcagatcactagtgtgcctagttcgctactcttttgttcaaactttcggtgtacatatgcgtgcctgcctgatagaagtgccagtgctatctttcattgttcgttggtgtttgccttcttaagcgtcgttgtgtgacttatggcgaaatatgtgcaaattatttgtggatttcatatgaacaatgtctgatccgagcgtgaggaatttgtgcttttggaataggacagtgccttttccttcggttcctatagtggcctgtcccttatcgtccctcatcgatcagacatttttcgtggcgattgctctgctatgttcctgttgttatctttggttctcaaaagtttcttgtgtgtgcgagaggtggcacacgaaggcacca

SEQ ID NO: 73269 - DNA, 5399 bp, Zea Mays
atggggggcgggagacgcgcgacttggcccttgtgcggggtggcgaggatggagctcgtcccggacctggcgagcacgtcgcagagcgggcggggactgcggagggcgggcgggcggatcatggcgttcgcggctgtcgcggcgggcaggcaagaagggagcgcgctggcgtccgtcatcggcgagggctctggggctgcgacggcaagcgggagcccgccgatggatcgctgccggaagaggcccgactccgaccccgaaggctgcagcgaacccgaaccccccgccgataagcgcccgtgcacagcggaaccctcgacctccgcggccgcggtcgccgccgctcctccgcccggcgcgcgccaggctgagcagggcggctcggatatggacacctcgtcgtccggccaccacggcgatgctgatgtcgacgcggatgatggggacggtgatggcgatggcgatggcgatggcgatggggggtcgtcgtgcgagtcggatggggacgggagcccggggccgcgcggcagcgggggcgggaggttccagcggatggtggacgcggtggcagacgatggcgcggggcaggacgcgctgttggcggcgctcacggagctctgcgaggcgctatcgttctgtacggaggacgtcggtgggtacttccccacagaggcagccgcgcgagcgctggtgcgccgggccggcggcggcgatggcgcgggtactaccccggacgtgattctgctgtccgtacgcgccatcacgtacctctgcgacgccatgccgcgtgccgctgacgccgtcgtccgccacggcctcctccccgtgctctgctcccggctgctaaccatcgagtacgtcgatgttgctgagcagtgcttgcaagcatttgagaagatatcacggaggcagcctacccagtgcttgcaggctggcatgatcaacgctgtgctggcattcattgacttcttcgctgcaagtattcagagggttgcagtgtcagctgtcgcaaatgcctgcaaaaaggtcccgtcagattgctcccaatttgttctggatgcggtcccaactctctgtaatcttctgcaatctgaggacaaagtgatagtagagaaggttgcagcttgcctggtaagcattgcggactcctttagcacttcggttgatcttgtcgatcatctctgccaccagggtgttatggagaaggtcctacctttgatccacactggtggactcacggcccttagcccatcgacatgtagtaatctgattgggcttcttgctaagctagcctgtacttcacttgtggcagtgaaatctctgtttgagctgggtgttagtagcacaataaaggggattttgatcacttcagacatttcccatggcatgccatatttgcctctggaaaaacaaaacaatcaggtcaatgaagctcttaaactagcaaaccagttgattccttcagcagcaagggatgttgaagacacccagatcatactagcgaaagaaaaaatacttacggatgaaccaaggttcttgtgtcaattctctagggatattcttcctgtcttgatcaaggcggtgaactctggtgccaattcatacatttgctatgggtgtgcttcaattgttaacaatatttgttacttcagtaaatcagaaatacttcaggacttgctcaaggaaacaaacataccaagcttcttggctggtttattgtctagaaaggatcatcatgtgctgacctcatcactaaagatagtcgagattctcatgcaaaagcttcctaatgcataccttggtttctttatcaaggaaggtgtcgtcaatgcagttgaggcgcttcttaatcaacaggattgttcaaaatccacccatatgcctgataacatgcaacaacctgagactcaacctgtcataagaaataagactacatgtttctgctacgcatttgatgcctgtagatctgaagctgctgaaaaaaggacttgcaggattgggaaggacagtctttttacttttgccaggcatgtgaagacaacttactttactaaggatgtagtgagctctgagatggggttaactgagattttgcagaaactcaaaaattgctgtgcagttttgaatgagaccacagacaagtcatctgaacaatgcaatcttcaaaatgaagaatacttatctaccattttaagtgaggtgatgatggagcttcatgggggagaaacaatgacaacctttgaatttcttgagagtggattggttaaatctttatcaaattacctctcaaatggcaagtacctccaggtggaggacaatatgggttgcagttctgaccatcttttggctgtggtgaaaagatttcagtcattttctcggatgtctttctcaagaatgggccaaggttgggatgacatgctcctgacacttttagtaaggaagctgcagaatgctcttacttctcttgacaactttccagttataatgagccacaacttcaagccaaggagcagtattgctgatatccctacaaggcactcaacaattactccatgtatccgagtaagattcaagaaagacgaagatgaaactaaattgtcaagctataacagtgccgtgaatgtggaaatatcgtcatccttgcaaaccattgaagaatttctatggcccaaagttagtatagatgtcaatagtcaaaaggctgaatcaccacctagtgacactgctttggaaatcaaatatgctgacgatgactctcaggaacaagattccacacctagtcagaaggctgattcaccatcagagggcctcacttgtggaagtcagaatctacctgcagaaacatgtccgaagcaaggaacttcatcttctggtcaagcagaaagaaacacaacaatcttgagtgattacaccatacaacaaaaattggtatttagcttaaatgggaaagagcttgaccggtctgttactctatatcagtcaatcctgcaggatcatatcaatgcagggtctgagataattctggacatgcagttttggcgcagtgtacatgacataactttcaaagctgctaatccagaagcaaatagaacagctgttaacccagaagcaaatgattctcctaggcattcctctactgcaatgtcatcaataaatgagaatacaactgggtttacatggcagatgctcccattcttttctagtatgttgcttggtaaacttccttgcaaacttgacagatcaggtgcttcgtatgacatattgtttatgttacacattttagagggattaaacaggtattcctttcacctcgtgtctgatgagagaaaccgttcttttgcccatggaaggataactaaccttgatgatctgaaggctgaagttttctcgattcctcagcaagagtttgtcagcgccaaattaacagataaattggagcaacaaatgcatgatccattagtttcaaggtcttgctgcctgcctttatggtgcattgaactgatgtctgcatgtcctttcttattttcatttgaggcgagatggaagtatttccagttgacggcatttggttctttgaaaaatcatcatggccacatgatggatgcaagtgttaacagtgttgcggaaagggggtcttcccactcacggaaaaagttcaaagttgatcgtgatgatatactggtttcagcagcaaaaatgatgaagtcccatgctaagagcaatgctctacttgaagtagaatataaagaggaagtgggcactggtttaggtcctacaatggaattctatacattgataagtcatgaatttcagaagtctggtctaggcatgtggagaggggaacttccttgtaaatctggtacccatgatactcatgtttctagatttgtggttgcctctaatggacttttccctagaccttggtctgcttctgaagatcctgcttcctttcaagaagtgagcgagcgattccacttacttggtctggttgttgcaaaagcaattaaagacaacagaattcttgacattccattttctaaagcattctacaaacttatccttggacaggagcttaatatatatgatatccagtcattagattctgaactggccatatgccttgtggagtttcaagcgcttgcttgtcagagaaaatatgcagagtccaatttgacaagggactgccagatatcagatttgacttatcggggttgtagaattgaggatcttgctattgagttcgctctcccaggatatccagaatatgtgctctcgccaggaagtcgctctgactgtttgaatgctgagaatttggaagaatatgttcgtcatgttgttgacgcaacggttaaaagtggaattgcaagacagatggaagcttttaagtcaggatttaatgaggtatttccgctaaaaaaactccaggttttttcagaggacgagctagagagattactttgtggtgaacaagatacatgggattttgcgaaacttgtggatcacatcaaatttgatcatggctacacttccagcagccctcctgtcattaatttgctggaaatcatacaagagtttggatccattcaacgtagagctttcttgcaatttataacgggttcacctcggcttccaccaggcggcttggctgcactaaatccaaagttcacagttgttcgaaagaataacagcaatgatgttgatcatgacctgccgagcgtgatgacttgtgccaactatcttaagttacctccatactcttcaaagatgagagagaaactcctctatgcaattacagagggccagggatccttccacctatcttaaccaataagcgataatgatacttcgcatgcaacaggagtttctctttgtaagtatctcgtaggaaaggaaaacacggtgtaaatgtgggtggttcactgcttattttagctgacagcacgatctggtggagctgattttaggagagaaaaaaacggctaccgctctttgtacatactaggtttcaggtgtgatcaagcagatcactagtgtgcctagttcgctactcttttgttcaaactttcggtgtacatatgcgtgcctgcctgatagaagtgccagtgctatctttcattgttcgttggtgtttgccttcttaagcgtcgttgtgtgacttatggcgaaatatgtgcaaattatttgtggatttcatatgaacaatgtctgatccgagcgtgaggaatttgtgcttttggaataggacagtgccttttccttcggttcctatagtggcctgtcccttatcgtccctcatcgatcagacatttttcgtggcgattgctctgctatgttcctgttgttatctttggttctcaaaagtttcttgtgtgtgcgagaggtggcacacgaaggcacca

SEQ ID NO: 73270 - DNA, 5400 bp, Zea Mays
atggggggcgggagacgcgcgacttggcccttgtgcggggtggcgaggatggagctcgtcccggacctggcgagcacgtcgcagagcgggcggggactgcggagggcgggcgggcggatcatggcgttcgcggctgtcgcggcgggcaggcaagaagggagcgcgctggcgtccgtcatcggcgagggctctggggctgcgacggcaagcgggagcccgccgatggatcgctgccggaagaggcccgactccgaccccgaaggctgcagcgaacccgaaccccccgccgataagcgcccgtgcacagcggaaccctcgacctccgcggccgcggtcgccgccgctcctccgcccggcgcgcgccaggctgagcagggcggctcggatatggacacctcgtcgtccggccaccacggcgatgctgatgtcgacgcggatgatggggacggtgatggcgatggcgatggcgatggcgatggggggtcgtcgtgcgagtcggatggggacgggagcccggggccgcgcggcagcgggggcgggaggttccagcggatggtggacgcggtggcagacgatggcgcggggcaggacgcgctgttggcggcgctcacggagctctgcgaggcgctatcgttctgtacggaggacgtcggtgggtacttccccacagaggcagccgcgcgagcgctggtgcgccgggccggcggcggcgatggcgcgggtactaccccggacgtgattctgctgtccgtacgcgccatcacgtacctctgcgacgccatgccgcgtgccgctgacgccgtcgtccgccacggcctcctccccgtgctctgctcccggctgctaaccatcgagtacgtcgatgttgctgagcagtgcttgcaagcatttgagaagatatcacggaggcagcctacccagtgcttgcaggctggcatgatcaacgctgtgctggcattcattgacttcttcgctgcaagtattcagagggttgcagtgtcagctgtcgcaaatgcctgcaaaaaggtcccgtcagattgctcccaatttgttctggatgcggtcccaactctctgtaatcttctgcaatctgaggacaaagtgatagtagagaaggttgcagcttgcctggtaagcattgcggactcctttagcacttcggttgatcttgtcgatcatctctgccaccagggtgttatggagaaggtcctacctttgatccacactggtggactcacggcccttagcccatcgacataatctgattgggcttcttgctaagctagcctgtacttcacttgtggcagtgaaatctctgtttgagctgggtgttagtagcacaataaaggggattttgatcacttcagacatttcccatggcatgccatatttgcctctggaaaaacaaaacaatcaggtcaatgaagctcttaaactagcaaaccagttgattccttcagcagcaagggatgttgaagacacccagatcatactagcgaaagaaaaaatacttacggatgaaccaaggttcttgtgtcaattctctagggatattcttcctgtcttgatcaaggcggtgaactctggtgccaattcatacatttgctatgggtgtgcttcaattgttaacaatatttgttacttcagtaaatcagaaatacttcaggacttgctcaaggaaacaaacataccaagcttcttggctggtttattgtctagaaaggatcatcatgtgctgacctcatcactaaagatagtcgagattctcatgcaaaagcttcctaatgcataccttggtttctttatcaaggaaggtgtcgtcaatgcagttgaggcgcttcttaatcaacaggattgttcaaaatccacccatatgcctgataacatgcaacaacctgagactcaacctgtcataagaaataagactacatgtttctgctacgcatttgatgcctgtagatctgaagctgctgaaaaaaggacttgcaggattgggaaggacagtctttttacttttgccaggcatgtgaagacaacttactttactaaggatgtagtgagctctgagatggggttaactgagattttgcagaaactcaaaaattgctgtgcagttttgaatgagaccacagacaagtcatctgaacaatgcaatcttcaaaatgaagaatacttatctaccattttaagtgaggtgatgatggagcttcatgggggagaaacaatgacaacctttgaatttcttgagagtggattggttaaatctttatcaaattacctctcaaatggcaagtacctccaggtggaggacaatatgggttgcagttctgaccatcttttggctgtggtgaaaagatttcagtcattttctcggatgtctttctcaagaatgggccaaggttgggatgacatgctcctgacacttttagtaaggaagctgcagaatgctcttacttctcttgacaactttccagttataatgagccacaacttcaagccaaggagcagtattgctgatatccctacaaggcactcaacaattactccatgtatccgagtaagattcaagaaagacgaagatgaaactaaattgtcaagctataacagtgccgtgaatgtggaaatatcgtcatccttgcaaaccattgaagaatttctatggcccaaagttagtatagatgtcaatagtcaaaaggctgaatcaccacctagtgacactgctttggaaatcaaatatgctgacgatgactctcaggaacaagattccacacctagtcagaaggctgattcaccatcagagggcctcacttgtggaagtcagaatctacctgcagaaacatgtccgaagcaaggaacttcatcttctggtcaagcagaaagaaacacaacaatcttgagtgattacaccatacaacaaaaattggtatttagcttaaatgggaaagagcttgaccggtctgttactctatatcagtcaatcctgcaggatcatatcaatgcagggtctgagataattctggacatgcagttttggcgcagtgtacatgacataactttcaaagctgctaatccagaagcaaatagaacagctgttaacccagaagcaaatgattctcctaggcattcctctactgcaatgtcatcaataaatgagaatacaactgggtttacatggcagatgctcccattcttttctagtatgttgcttggtaaacttccttgcaaacttgacagatcaggtgcttcgtatgacatattgtttatgttacacattttagagggattaaacaggtattcctttcacctcgtgtctgatgagagaaaccgttcttttgcccatggaaggataactaaccttgatgatctgaaggctgaagttttctcgattcctcagcaagagtttgtcagcgccaaattaacagataaattggagcaacaaatgcatgatccattagtttcaaggtcttgctgcctgcctttatggtgcattgaactgatgtctgcatgtcctttcttattttcatttgaggcgagatggaagtatttccagttgacggcatttggttctttgaaaaatcatcatggccacatgatggatgcaagtgttaacagtgttgcggaaagggggtcttcccactcacggaaaaagttcaaagttgatcgtgatgatatactggtttcagcagcaaaaatgatgaagtcccatgctaagagcaatgctctacttgaagtagaatataaagaggaagtgggcactggtttaggtcctacaatggaattctatacattgataagtcatgaatttcagaagtctggtctaggcatgtggagaggggaacttccttgtaaatctggtacccatgatactcatgtttctagatttgtggttgcctctaatggacttttccctagaccttggtctgcttctgaagatcctgcttcctttcaagaagtgagcgagcgattccacttacttggtctggttgttgcaaaagcaattaaagacaacagaattcttgacattccattttctaaagcattctacaaacttatccttggacaggagcttaatatatatgatatccagtcattagattctgaactggccatatgccttgtggagtttcaagcgcttgcttgtcagagaaaatatgcagagtccaatttgacaagggactgccagatatcagatttgacttatcggggttgtagaattgaggatcttgctattgagttcgctctcccaggatatccagaatatgtgctctcgccaggaagtcgctctgactgtttgaatgctgagaatttggaagaatatgttcgtcatgttgttgacgcaacggttaaaagtggaattgcaagacagatggaagcttttaagtcaggatttaatgaggtatttccgctaaaaaaactccaggttttttcagaggacgagctagagagattactttgtggtgaacaagatacatgggattttgcgaaacttgtggatcacatcaaatttgatcatggctacacttccagcagccctcctgtcattaatttgctggaaatcatacaagagtttggatccattcaacgtagagctttcttgcaatttataacgggttcacctcggcttccaccaggcggcttggctgcactaaatccaaagttcacagttgttcgaaagaataacagcaatgatgttgatcatgacctgccgagcgtgatgacttgtgccaactatcttaagttacctccatactcttcaaaggaaaagatgagagagaaactcctctatgcaattacagagggccagggatccttccacctatcttaaccaataagcgataatgatacttcgcatgcaacaggagtttctctttgtaagtatctcgtaggaaaggaaaacacggtgtaaatgtgggtggttcactgcttattttagctgacagcacgatctggtggagctgattttaggagagaaaaaaacggctaccgctctttgtacatactaggtttcaggtgtgatcaagcagatcactagtgtgcctagttcgctactcttttgttcaaactttcggtgtacatatgcgtgcctgcctgatagaagtgccagtgctatctttcattgttcgttggtgtttgccttcttaagcgtcgttgtgtgacttatggcgaaatatgtgcaaattatttgtggatttcatatgaacaatgtctgatccgagcgtgaggaatttgtgcttttggaataggacagtgccttttccttcggttcctatagtggcctgtcccttatcgtccctcatcgatcagacatttttcgtggcgattgctctgctatgttcctgttgttatctttggttctcaaaagtttcttgtgtgtgcgagaggtggcacacgaaggcacca

SEQ ID NO: 73271 - DNA, 5320 bp, Zea Mays
atggggggcgggagacgcgcgacttggcccttgtgcggggtggcgaggatggagctcgtcccggacctggcgagcacgtcgcagagcgggcggggactgcggagggcgggcgggcggatcatggcgttcgcggctgtcgcggcgggcaggcaagaagggagcgcgctggcgtccgtcatcggcgagggctctggggctgcgacggcaagcgggagcccgccgatggatcgctgccggaagaggcccgactccgaccccgaaggctgcagcgaacccgaaccccccgccgataagcgcccgtgcacagcggaaccctcgacctccgcggccgcggtcgccgccgctcctccgcccggcgcgcgccaggctgagcagggcggctcggatatggacacctcgtcgtccggccaccacggcgatgctgatgtcgacgcggatgatggggacggtgatggcgatggcgatggcgatggcgatggggggtcgtcgtgcgagtcggatggggacgggagcccggggccgcgcggcagcgggggcgggaggttccagcggatggtggacgcggtggcagacgatggcgcggggcaggacgcgctgttggcggcgctcacggagctctgcgaggcgctatcgttctgtacggaggacgtcggtgggtacttccccacagaggcagccgcgcgagcgctggtgcgccgggccggcggcggcgatggcgcgggtactaccccggacgtgattctgctgtccgtacgcgccatcacgtacctctgcgacgccatgccgcgtgccgctgacgccgtcgtccgccacggcctcctccccgtgctctgctcccggctgctaaccatcgagtacgtcgatgttgctgagcagtgcttgcaagcatttgagaagatatcacggaggcagcctacccagtgcttgcaggctggcatgatcaacgctgtgctggcattcattgacttcttcgctgcaagtattcagagggttgcagtgtcagctgtcgcaaatgcctgcaaaaaggtcccgtcagattgctcccaatttgttctggatgcggtcccaactctctgtaatcttctgcaatctgaggacaaagtgatagtagagaaggttgcagcttgcctggtaagcattgcggactcctttagcacttcggttgatcttgtcgatcatctctgccaccagggtgttatggagaaggtcctacctttgatccacactggtggactcacggcccttagcccatcgacatgtagtaatctgattgggcttcttgctaagctagcctgtacttcacttgtggcagtgaaatctctgtttgagctgggtgttagtagcacaataaaggggattttgatcacttcagacatttcccatggcatgccatatttgcctctggaaaaacaaaacaatcaggtcaatgaagctcttaaactagcaaaccagttgattccttcagcagcaagggatgttgaagacacccagatcatactagcgaaagaaaaaatacttacggatgaaccaaggttcttgtgtcaattctctagggatattcttcctgtcttgatcaaggcggtgaactctggtgccaattcatacatttgctatgggtgtgcttcaattgttaacaatatttgttacttcagtaaatcagaaatacttcaggacttgctcaaggaaacaaacataccaagcttcttggctggtttattgtctagaaaggatcatcatgtgctgacctcatcactaaagatagtcgagattctcatgcaaaagcttcctaatgcataccttggtttctttatcaaggaaggtgtcgtcaatgcagttgaggcgcttcttaatcaacaggattgttcaaaatccacccatatgcctgataacatgcaacaacctgagactcaacctgtcataagaaataagactacatgtttctgctacgcatttgatgcctgtagatctgaagctgctgaaaaaaggacttgcaggattgggaaggacagtctttttacttttgccaggcatgtgaagacaacttactttactaaggatgtagtgagctctgagatggggttaactgagattttgcagaaactcaaaaattgctgtgcagttttgaatgagaccacagacaagtcatctgaacaatgcaatcttcaaaatgaagaatacttatctaccattttaagtgaggtgatgatggagcttcatgggggagaaacaatgacaacctttgaatttcttgagagtggattggttaaatctttatcaaattacctctcaaatggcaagtacctccaggtggaggacaatatgggttgcagttctgaccatcttttggctgtggtgaaaagatttcagtcattttctcggatgtctttctcaagaatgggccaaggttgggatgacatgctcctgacacttttagtaaggaagctgcagaatgctcttacttctcttgacaactttccagttataatgagccacaacttcaagccaaggagcagtattgctgatatccctacaaggcactcaacaattactccatgtatccgagtaagattcaagaaagacgaagatgaaactaaattgtcaagctataacagtgccgtgaatgtggaaatatcgtcatccttgcaaaccattgaagaatttctatggcccaaagttagtatagatgtcaatagtcaaaaggctgaatcaccacctagtgacactgctttggaaatcaaatatgctgacgatgactctcaggaacaagattccacacctagtcagaaggctgattcaccatcagagggcctcacttgtggaagtcagaatctacctgcagaaacatgtccgaagcaaggaacttcatcttctggtcaagcagaaagaaacacaacaatcttgagtgattacaccatacaacaaaaattggtatttagcttaaatgggaaagagcttgaccggtctgttactctatatcagtcaatcctgcaggatcatatcaatgcagggtctgagataattctggacatgcagttttggcgcagtgtacatgacataactttcaaagctgctaatccagaagcaaatagaacagctgttaacccagaagcaaatgattctcctaggcattcctctactgcaatgtcatcaataaatgagaatacaactgggtttacatggcagatgctcccattcttttctagtatgttgcttggtaaacttccttgcaaacttgacagatcaggtgcttcgtatgacatattgtttatgttacacattttagagggattaaacaggtattcctttcacctcgtgtctgatgagagaaaccgttcttttgcccatggaaggataactaaccttgatgatctgaaggctgaagttttctcgattcctcagcaagagtttgtcagcgccaaattaacagataaattggagcaacaaatgcatgatccattagtttcaaggtcttgctgcctgcctttatggtgcattgaactgatgtctgcatgtcctttcttattttcatttgaggcgagatggaagtatttccagttgacggcatttggttctttgaaaaatcatcatggccacatgatggatgcaagtgttaacagtgttgcggaaagggggtcttcccactcacggaaaaagttcaaagttgatcgtgatgatatactggtttcagcagcaaaaatgatgaagtcccatgctaagagcaatgctctacttgaagtagaatataaagaggaagtgggcactggtttaggtcctacaatggaattctatacattgataagtcatgaatttcagaagtctggtctaggcatgtggagaggggaacttccttgtaaatctggtacccatgatactcatgtttctagatttgtggttgcctctaatggacttttccctagaccttggtctgcttctgaagatcctgcttcctttcaagaagtgagcgagcgattccacttacttggtctggttgttgcaaaagcaattaaagacaacagaattcttgacattccattttctaaagcattctacaaacttatccttggacaggagcttaatatatatgatatccagtcattagattctgaactggccatatgccttgtggagtttcaagcgcttgcttgtcagagaaaatatgcagagtccaatttgacaagggactgccagatatcagatttgacttatcggggttgtagaattgaggatcttgctattgagttcgctctcccaggatatccagaatatgtgctctcgccaggaagtcgctctgactgtttgaatgctgagaatttggaagaatatgttcgtcatgttgttgacgcaacggttaaaagtggaattgcaagacagatggaagcttttaagtcaggatttaatgaggtatttccgctaaaaaaactccaggttttttcagaggacgagctagagagattactttgtggtgaacaagatacatgggattttgcgaaacttgtggatcacatcaaatttgatcatggctacacttccagcagccctcctgtcattaatgcggcttggctgcactaaatccaaagttcacagttgttcgaaagaataacagcaatgatgttgatcatgacctgccgagcgtgatgacttgtgccaactatcttaagttacctccatactcttcaaaggaaaagatgagagagaaactcctctatgcaattacagagggccagggatccttccacctatcttaaccaataagcgataatgatacttcgcatgcaacaggagtttctctttgtaagtatctcgtaggaaaggaaaacacggtgtaaatgtgggtggttcactgcttattttagctgacagcacgatctggtggagctgattttaggagagaaaaaaacggctaccgctctttgtacatactaggtttcaggtgtgatcaagcagatcactagtgtgcctagttcgctactcttttgttcaaactttcggtgtacatatgcgtgcctgcctgatagaagtgccagtgctatctttcattgttcgttggtgtttgccttcttaagcgtcgttgtgtgacttatggcgaaatatgtgcaaattatttgtggatttcatatgaacaatgtctgatccgagcgtgaggaatttgtgcttttggaataggacagtgccttttccttcggttcctatagtggcctgtcccttatcgtccctcatcgatcagacatttttcgtggcgattgctctgctatgttcctgttgttatctttggttctcaaaagtttcttgtgtgtgcgagaggtggcacacgaaggcacca

SEQ ID NO: 73272 - DNA, 1161 bp, Zea Mays
atacctccagccccgcatcgcaccctccctggccgccttctcttctccagcgtccgatctctcccactcgccttcctcaccgcagctctcccggctcggtcgcttcgccacctccgtcctccccccgcgctcggtcgctcgccacctgctctcccctccctccacgttgctcgcgcccgcgcttatataagtgcaggaggagctcatggcggacgctccggcgagccctgggggcggtggcagcgtcagggagcaggacaggttcctgcccatcgccaacatcagtcgcatcatgaagaaggccatcccggctaacgggaagatcgccaaggacgctaaggagaccgtgcaggagtgcgtctcggagttcatctccttcatcactagcgaggcgagtgacaagtgccagagggagaagcggaagaccatcaatggcgacgacctgctgtgggccatggccacgctggggtttgaggactatattgaacccctcaaggtgtacctgcagaagtacagagaggtgcagggtgatagtaagttaacttcaaaatccagcgatggctccattaaaaaggatgcccttggtcatgtgggagcaagtagctcagctgtacaagggatgggtcagcaaggaacatacaaccaaggaatgggttatatgcaacctcagtaccataacggagatatctcgaactaatgaagacatggaccttttctgcaacagctgctcttccccgaggcgggtttttggtcgcagttatttactaagtaagacaccttgcggtgaccattaaagagtaaccaatcaccctgggtaggtcaatttttatctgcaagaactgatgaggccgcttggtaggagtaaatcgcttttcctgggaacgattgttggttagcgccgctactgtatgtatattgagataccttaacgattggtcttttggctgccatttggttacatgtatttgtatttggaggcataagtatcgtgtaatttgtgttatgactagtgtattgactattgaattatgagaagagctgctttagttgtaagatcacatgacacatccaagaattcccaaaaaaatgttcgtaaaactaatgagttctctaagatgtcaacaaatattggaagtaccacttcagttataagaatcgaaa

SEQ ID NO: 73273 - DNA, 1194 bp, Zea Mays
cagccccgcatcgcaccctccctggccgccttctcttctccagcgtccgatctctcccactcgccttcctcaccgcagctctcccggctcggtcgcttcgccacctccgtcctccccccgcgctcggtcgctcgccacctgctctcccctccctccacgttgctcgcgcccgcgcttatataaggaggagctcatggcggacgctccggcgagccctgggggcggaggcgggagccacgagagcgggagccccaggggcggcggaggtggaggcggtggcagcgtcagggagcaggacaggttcctgcccatcgccaacatcagtcgcatcatgaagaaggccatcccggctaacgggaagatcgccaaggacgctaaggagaccgtgcaggagtgcgtctcggagttcatctccttcatcactagcgaggcgagtgacaagtgccagagggagaagcggaagaccatcaatggcgacgacctgctgtgggccatggccacgctggggtttgaggactatattgaacccctcaaggtgtacctgcagaagtacagagagggtgatagtaagttaacttcaaaatccagcgatggctccattaaaaaggatgcccttggtcatgtgggagcaagtagctcagctgtacaagggatgggtcagcaaggaacatacaaccaaggaatgggttatatgcaacctcagtaccataacggagatatctcgaactaatgaagacatggaccttttctgcaacagctgctcttccccgaggcgggtttttggtcgcagttatttactaagtaagacaccttgcggtgaccattaaagagtaaccaatcaccctgggtaggtcaatttttatctgcaagaactgatgaggccgcttggtaggagtaaatcgcttttcctgggaacgattgttggttagcgccgctactgtatgtatattgagataccttaacgattggtcttttggctgccatttggttacatgtatttgtatttggaggcataagtatcgtgtaatttgtgttatgactagtgtattgactattgaattatgagaagagctgctttagttgtaagatcacatgacacatccaagaattcccaaaaaaatgttcgtaaaactaatgagttctctaagatgtcaacaaatattggaagtaccacttcagttataagaatcgaaa

SEQ ID NO: 73274 - DNA, 1953 bp, Zea Mays
cagccccgcatcgcaccctccctggccgccttctcttctccagcgtccgatctctcccactcgccttcctcaccgcagctctcccggctcggtcgcttcgccacctccgtcctccccccgcgctcggtcgctcgccacctgctctcccctccctccacgttgctcgcgcccgcgcttatataagtgcaggaggagctcatggcggacgctccggcgagccctgggggcggaggcgggagccacgagagcgggagccccaggggcggcggaggtggaggcggtggcagcgtcagggagcaggacaggttcctgcccatcgccaacatcagtcgcatcatgaagaaggccatcccggctaacgggaagatcgccaaggacgctaaggagaccgtgcaggagtgcgtctcggagttcatctccttcatcactagcgaggcgagtgacaagtgccagagggagaagcggaagaccatcaatggcgacgacctgctgtgggccatggccacgctggggtttgaggactatattgaacccctcaaggtgtacctgcagaagtacagagaggtgcgtactgatgaaggtattggggacttcaggttaattggattgatttggtggtcaggttgtgcaatcaccaatctgtcaccttgtcgattgtacctctgattgaacttaaaaatcctgttggcaatttacttccctctcgatgcttctggtacatatttgtacttatactgcttttaagttgagaatataaagagaccccctgttcctatgtactattgtcagtttgtcggaaagagtttctccccctagtagtttgtcttataagacgaatcaattcgaaagaacttatatccattgaacactgatcaaaacctgcatttgctgttcttaggcgggtttgagcatccattgaacactgatcggaacctccatttgctgttcttagatggggatgggttaacacgcgtgctggggaacattatacatctattcacaaacctatgctttctatgacgaaaagtagatgtaatgcaattggaatttataacagcagaaagagctcctgtaggagtgtaatgtaattagagcatgttgtagtgcaagctcttagttacttgaataacggacctttacacaaataatacccgaaactatttcactgtaggtcatatacaatcttgtttagggtccggagtttatttagttgtatttttttgtacgcccatctggtctatgagctgaataatctgtctaatgatgtctctcttttggtctcatgtctggtggatggcgtcacgaattgcagatggagggtgatagtaagttaacttcaaaatccagcgatggctccattaaaaaggatgcccttggtcatgtgggagcaagtagctcagctgtacaagggatgggtcagcaaggaacatacaaccaaggaatgggttatatgcaacctcagtaccataacggagatatctcgaactaatgaagacatggaccttttctgcaacagctgctcttccccgaggcgggtttttggtcgcagttatttactaagtaagacaccttgcggtgaccattaaagagtaaccaatcaccctgggtaggtcaatttttatctgcaagaactgatgaggccgcttggtaggagtaaatcgcttttcctgggaacgattgttggttagcgccgctactgtatgtatattgagataccttaacgattggtcttttggctgccatttggttacatgtatttgtatttggaggcataagtatcgtgtaatttgtgttatgactagtgtattgactattgaattatgagaagagctgctttagttgtaagatcacatgacacatccaagaattcccaaaaaaatgttcgtaaaactaatgagttctctaagatgtcaacaaatattggaagtaccacttcagttataagaatcgaaa

SEQ ID NO: 73275 - DNA, 1948 bp, Zea Mays
cagccccgcatcgcaccctccctggccgccttctcttctccagcgtccgatctctcccactcgccttcctcaccgcagctctcccggctcggtcgcttcgccacctccgtcctccccccgcgctcggtcgctcgccacctgctctcccctccctccacgttgctcgcgcccgcgcttatataaggaggagctcatggcggacgctccggcgagccctgggggcggaggcgggagccacgagagcgggagccccaggggcggcggaggtggaggcggtggcagcgtcagggagcaggacaggttcctgcccatcgccaacatcagtcgcatcatgaagaaggccatcccggctaacgggaagatcgccaaggacgctaaggagaccgtgcaggagtgcgtctcggagttcatctccttcatcactagcgaggcgagtgacaagtgccagagggagaagcggaagaccatcaatggcgacgacctgctgtgggccatggccacgctggggtttgaggactatattgaacccctcaaggtgtacctgcagaagtacagagaggtgcgtactgatgaaggtattggggacttcaggttaattggattgatttggtggtcaggttgtgcaatcaccaatctgtcaccttgtcgattgtacctctgattgaacttaaaaatcctgttggcaatttacttccctctcgatgcttctggtacatatttgtacttatactgcttttaagttgagaatataaagagaccccctgttcctatgtactattgtcagtttgtcggaaagagtttctccccctagtagtttgtcttataagacgaatcaattcgaaagaacttatatccattgaacactgatcaaaacctgcatttgctgttcttaggcgggtttgagcatccattgaacactgatcggaacctccatttgctgttcttagatggggatgggttaacacgcgtgctggggaacattatacatctattcacaaacctatgctttctatgacgaaaagtagatgtaatgcaattggaatttataacagcagaaagagctcctgtaggagtgtaatgtaattagagcatgttgtagtgcaagctcttagttacttgaataacggacctttacacaaataatacccgaaactatttcactgtaggtcatatacaatcttgtttagggtccggagtttatttagttgtatttttttgtacgcccatctggtctatgagctgaataatctgtctaatgatgtctctcttttggtctcatgtctggtggatggcgtcacgaattgcagatggagggtgatagtaagttaacttcaaaatccagcgatggctccattaaaaaggatgcccttggtcatgtgggagcaagtagctcagctgtacaagggatgggtcagcaaggaacatacaaccaaggaatgggttatatgcaacctcagtaccataacggagatatctcgaactaatgaagacatggaccttttctgcaacagctgctcttccccgaggcgggtttttggtcgcagttatttactaagtaagacaccttgcggtgaccattaaagagtaaccaatcaccctgggtaggtcaatttttatctgcaagaactgatgaggccgcttggtaggagtaaatcgcttttcctgggaacgattgttggttagcgccgctactgtatgtatattgagataccttaacgattggtcttttggctgccatttggttacatgtatttgtatttggaggcataagtatcgtgtaatttgtgttatgactagtgtattgactattgaattatgagaagagctgctttagttgtaagatcacatgacacatccaagaattcccaaaaaaatgttcgtaaaactaatgagttctctaagatgtcaacaaatattggaagtaccacttcagttataagaatcgaaa

SEQ ID NO: 73276 - DNA, 2105 bp, Zea Mays
cagccccgcatcgcaccctccctggccgccttctcttctccagcgtccgatctctcccactcgccttcctcaccgcagctctcccggctcggtcgcttcgccacctccgtcctccccccgcgctcggtcgctcgccacctgctctcccctccctccacgttgctcgcgcccgcgcttatataagtgcaggaggagctcatggcggacgctccggcgagccctgggggcggaggcgggagccacgagagcgggagccccaggggcggcggaggtggaggcggtggcagcgtcagggagcaggacaggttcctgcccatcgccaacatcagtcgcatcatgaagaaggccatcccggctaacgggaagatcgccaaggacgctaaggagaccgtgcaggagtgcgtctcggagttcatctccttcatcactagcgaggcgagtgacaagtgccagagggagaagcggaagaccatcaatggcgacgacctgctgtgggccatggccacgctggggtttgaggactatattgaacccctcaaggtgtacctgcagaagtacagagaggtgcgtactgatgaaggtattggggacttcaggttaattggattgatttggtggtcaggttgtgcaatcaccaatctgtcaccttgtcgattgtacctctgattgaacttaaaaatcctgttggcaatttacttccctctcgatgcttctggtacatatttgtacttatactgcttttaagttgagaatataaagagaccccctgttcctatgtactattgtcagtttgtcggaaagagtttctccccctagtagtttgtcttataagacgaatcaattcgaaagaacttatatccattgaacactgatcaaaacctgcatttgctgttcttaggcgggtttgagcatccattgaacactgatcggaacctccatttgctgttcttagatggggatgggttaacacgcgtgctggggaacattatacatctattcacaaacctatgctttctatgacgaaaagtagatgtaatgcaattggaatttataacagcagaaagagctcctgtaggagtgtaatgtaattagagcatgttgtagtgcaagctcttagttacttgaataacggacctttacacaaataatacccgaaactatttcactgtaggtcatatacaatcttgtttagggtccggagtttatttagttgtatttttttgtacgcccatctggtctatgagctgaataatctgtctaatgatgtctctcttttggtctcatgtctggtggatggcgtcacgaattgcagatggagggtgatagtaagttaacttcaaaatccagcgatggctccattaaaaaggatgcccttggtcatgtgggagcaagtagctcagctgtacaagggatgggtcagcaaggaacatacaaccaaggaatgggttatatgcaacctcagattagcacccttatttattgcaaatttgcaaatcagttcacagcatttgcctagctgtaatgagtattgattaggtgcccccacaacaacttgctccttgtgcttaccggtcgtgactattgaggtgcccccactaacaattttcagtattgtaccataacggagatatctcgaactaatgaagacatggaccttttctgcaacagctgctcttccccgaggcgggtttttggtcgcagttatttactaagtaagacaccttgcggtgaccattaaagagtaaccaatcaccctgggtaggtcaatttttatctgcaagaactgatgaggccgcttggtaggagtaaatcgcttttcctgggaacgattgttggttagcgccgctactgtatgtatattgagataccttaacgattggtcttttggctgccatttggttacatgtatttgtatttggaggcataagtatcgtgtaatttgtgttatgactagtgtattgactattgaattatgagaagagctgctttagttgtaagatcacatgacacatccaagaattcccaaaaaaatgttcgtaaaactaatgagttctctaagatgtcaacaaatattggaagtaccacttcagttataagaatcgaaa

SEQ ID NO: 73277 - DNA, 3375 bp, Zea Mays
cagccccgcatcgcaccctccctggccgccttctcttctccagcgtccgatctctcccactcgccttcctcaccgcagctctcccggctcggtcgcttcgccacctccgtcctccccccgcgctcggtcgctcgccacctgctctcccctccctccacgttgctcgcgcccgcgcttatataagtgcaggaggagctcatggcggacgctccggcgagccctgggggcggaggcgggagccacgagagcgggagccccaggggcggcggaggtggaggcggtggcagcgtcagggagcaggacaggttcctgcccatcgccaacatcagtcgcatcatgaagaaggccatcccggctaacgggaagatcgccaaggacgctaaggagaccgtgcaggagtgcgtctcggagttcatctccttcatcactagcgaggcgagtgacaagtgccagagggagaagcggaagaccatcaatggcgacgacctgctgtgggccatggccacgctggggtttgaggactatattgaacccctcaaggtgtacctgcagaagtacagagaggtgcgtactgatgaaggtattggggacttcaggttaattggattgatttggtggtcaggttgtgcaatcaccaatctgtcaccttgtcgattgtacctctgattgaacttaaaaatcctgttggcaatttacttccctctcgatgcttctggtacatatttgtacttatactgcttttaagttgagaatataaagagaccccctgttcctatgtactattgtcagtttgtcggaaagagtttctccccctagtagtttgtcttataagacgaatcaattcgaaagaacttatatccattgaacactgatcaaaacctgcatttgctgttcttaggcgggtttgagcatccattgaacactgatcggaacctccatttgctgttcttagatggggatgggttaacacgcgtgctggggaacattatacatctattcacaaacctatgctttctatgacgaaaagtagatgtaatgcaattggaatttataacagcagaaagagctcctgtaggagtgtaatgtaattagagcatgttgtagtgcaagctcttagttacttgaataacggacctttacacaaataatacccgaaactatttcactgtaggtcatatacaatcttgtttagggtccggagtttatttagttgtatttttttgtacgcccatctggtctatgagctgaataatctgtctaatgatgtctctcttttggtctcatgtctggtggatggcgtcacgaattgcagatggaggtatgttgtattaagcattgtctgatggtgaaatattctattgtttttcatgttttaatacattggcctgtaaatgttctataacatggacttttgttgttataaacttagaattggcctggggtaatttgagctagctgatcctgttttcagttttcaccctgacttgaagcacatgtgcacagttaaaatttgttttgttcacattccagaggcataaccttagtaaccgggaactgggaacttggccacgttcctcgttccgggaacgttcgttccgttccgggaaccagtggcgtagctagaattttttcgtgaggtatgccattagaatttttataaataatttgatatatagttcaaaatataaagataaaaataacatataacactatagatttaacatttaagtctataaatgtatatattacaatgcaaatataatatatatcagtattttttatatggatcttgtggactagtgatccggtgggccggcttaggatatgccgtggcccacctggaccacccgctgtctacgccactgccgggaacgtgggaacaatctcgttccgatagtgttaaatcctagtttttgtagcgtaccgcgtaccacgttcccgttcctcgatcccatcgatccgggaacctggttactaagggcataacacattaactgaatgtcatggagtactgcagatgtcttttcaggaaggggagggttcttgtgaattgcacctttttgtgaacaaatctagttcgtgtagttcatatatcgattccctactggcatgccaataaaaattaaatgaaacagtgaaccccatgcatgtttttattggaaaatcatactagggggtataaatgtgatcaaaatcccaggtcttcaccataaaaactactgtatgtttgcctaatggacttgacctccacctgattctgatacatatatttatttggtttcactgactgtttagcaagttctaattcctgtaaaatggttcgtacagggttctgataatttctttctttgtagttagtatgggagtagctcttctcattctccatgctttagctaccaatcttgtagattctgagatataatgaacattgttcttgtttctttgattaacaacagggtgatagtaagttaacttcaaaatccagcgatggctccattaaaaaggatgcccttggtcatgtgggagcaagtagctcagctgtacaagggatgggtcagcaaggaacatacaaccaaggaatgggttatatgcaacctcaggtgattgacaaaaaaattcttggtagttgttatttgttgtttatttgtgtttataagcacaatgtatagcttgggtccctgctgtatttgtttatttactaggctgaaaacttgaacatcttggattggcagattagcacccttatttattgcaaatttgcaaatcagttcacagcatttgcctagctgtaatgagtattgattaggtgcccccacaacaacttgctccttgtgcttaccggtcgtgactattgaggtgcccccactaacaattttcagtattgtaccataacggagatatctcgaactaatgaagacatggaccttttctgcaacagctgctcttccccgaggcgggtttttggtcgcagttatttactaagtaagacaccttgcggtgaccattaaagagtaaccaatcaccctgggtaggtcaatttttatctgcaagaactgatgaggccgcttggtaggagtaaatcgcttttcctgggaacgattgttggttagcgccgctactgtatgtatattgagataccttaacgattggtcttttggctgccatttggttacatgtatttgtatttggaggcataagtatcgtgtaatttgtgttatgactagtgtattgactattgaattatgagaagagctgctttagttgtaagatcacatgacacatccaagaattcccaaaaaaatgttcgtaaaactaatgagttctctaagatgtcaacaaatattggaagtaccacttcagttataagaatcgaaa

SEQ ID NO: 73278 - DNA, 1624 bp, Zea Mays
cagccccgcatcgcaccctccctggccgccttctcttctccagcgtccgatctctcccactcgccttcctcaccgcagctctcccggctcggtcgcttcgccacctccgtcctccccccgcgctcggtcgctcgccacctgctctcccctccctccacgttgctcgcgcccgcgcttatataagtgcaggaggagctcatggcggacgctccggcgagccctgggggcggaggcgggagccacgagagcgggagccccaggggcggcggaggtggaggcggtggcagcgtcagggagcaggacaggttcctgcccatcgccaacatcagtcgcatcatgaagaaggccatcccggctaacgggaagatcgccaaggacgctaaggagaccgtgcaggagtgcgtctcggagttcatctccttcatcactagcgaggcgagtgacaagtgccagagggagaagcggaagaccatcaatggcgacgacctgctgtgggccatggccacgctggggtttgaggactatattgaacccctcaaggtgtacctgcagaagtacagagaggtgcagggtgatagtaagttaacttcaaaatccagcgatggctccattaaaaaggatgcccttggtcatgtgggagcaagtagctcagctgtacaagggatgggtcagcaaggaacatacaaccaaggaatgggttatatgcaacctcaggtgattgacaaaaaaattcttggtagttgttatttgttgtttatttgtgtttataagcacaatgtatagcttgggtccctgctgtatttgtttatttactaggctgaaaacttgaacatcttggattggcagattagcacccttatttattgcaaatttgcaaatcagttcacagcatttgcctagctgtaatgagtattgattaggtgcccccacaacaacttgctccttgtgcttaccggtcgtgactattgaggtgcccccactaacaattttcagtattggttggttccacttccataatgctacctccatatgttaagtttttttgttcatctatgactataaatggtttttttaatcacactgtggttggcatccatatgtttgctgatagaccatctctttcccttctccagtaccataacggagatatctcgaactaatgaagacatggaccttttctgcaacagctgctcttccccgaggcgggtttttggtcgcagttatttactaagtaagacaccttgcggtgaccattaaagagtaaccaatcaccctgggtaggtcaatttttatctgcaagaactgatgaggccgcttggtaggagtaaatcgcttttcctgggaacgattgttggttagcgccgctactgtatgtatattgagataccttaacgattggtcttttggctgccatttggttacatgtatttgtatttggaggcataagtatcgtgtaatttgtgttatgactagtgtattgactattgaattatgagaagagctgctttagttgtaagatcacatgacacatccaagaattcccaaaaaaatgttcgtaaaactaatgagttctctaagatgtcaacaaatattggaagtaccacttcagttataagaatcgaaa

SEQ ID NO: 73279 - DNA, 1227 bp, Zea Mays
cagccccgcatcgcaccctccctggccgccttctcttctccagcgtccgatctctcccactcgccttcctcaccgcagctctcccggctcggtcgcttcgccacctccgtcctccccccgcgctcggtcgctcgccacctgctctcccctccctccacgttgctcgcgcccgcgcttatataaggaggagctcatggcggacgctccggcgagccctgggggcggaggcgggagccacgagagcgggagccccaggggcggcggaggtggaggcggtggcagcgtcagggagcaggacaggttcctgcccatcgccaacatcagtcgcatcatgaagaaggccatcccggctaacgggaagatcgccaaggacgctaaggagaccgtgcaggagtgcgtctcggagttcatctccttcatcactagcgaggcgagtgacaagtgccagagggagaagcggaagaccatcaatggcgacgacctgctgtgggccatggccacgctggggtttgaggactatattgaacccctcaaggtgtacctgcagaagtacagagagatggaggtatgttgtattaagcattgtctgatgggtgatagtaagttaacttcaaaatccagcgatggctccattaaaaaggatgcccttggtcatgtgggagcaagtagctcagctgtacaagggatgggtcagcaaggaacatacaaccaaggaatgggttatatgcaacctcagtaccataacggagatatctcgaactaatgaagacatggaccttttctgcaacagctgctcttccccgaggcgggtttttggtcgcagttatttactaagtaagacaccttgcggtgaccattaaagagtaaccaatcaccctgggtaggtcaatttttatctgcaagaactgatgaggccgcttggtaggagtaaatcgcttttcctgggaacgattgttggttagcgccgctactgtatgtatattgagataccttaacgattggtcttttggctgccatttggttacatgtatttgtatttggaggcataagtatcgtgtaatttgtgttatgactagtgtattgactattgaattatgagaagagctgctttagttgtaagatcacatgacacatccaagaattcccaaaaaaatgttcgtaaaactaatgagttctctaagatgtcaacaaatattggaagtaccacttcagttataagaatcgaaa

SEQ ID NO: 73280 - DNA, 955 bp, Zea Mays
acccctccgcccccaggggcggcggaggtggaggcggtggcagcgtcagggagcaggacaggttcctgcccatcgccaacatcagtcgcatcatgaagaaggccatcccggctaacgggaagatcgccaaggacgctaaggagaccgtgcaggagtgcgtctcggagttcatctccttcatcactagcgaggcgagtgacaagtgccagagggagaagcggaagaccatcaatggcgacgacctgctgtgggccatggccacgctggggtttgaggactatattgaacccctcaaggtgtacctgcagaagtacagagagggtgatagtaagttaacttcaaaatccagcgatggctccattaaaaaggatgcccttggtcatgtgggagcaagtagctcagctgtacaagggatgggtcagcaaggaacatacaaccaaggaatgggttatatgcaacctcagtaccataacggagatatctcgaactaatgaagacatggaccttttctgcaacagctgctcttccccgaggcgggtttttggtcgcagttatttactaagtaagacaccttgcggtgaccattaaagagtaaccaatcaccctgggtaggtcaatttttatctgcaagaactgatgaggccgcttggtaggagtaaatcgcttttcctgggaacgattgttggttagcgccgctactgtatgtatattgagataccttaacgattggtcttttggctgccatttggttacatgtatttgtatttggaggcataagtatcgtgtaatttgtgttatgactagtgtattgactattgaattatgagaagagctgctttagttgtaagatcacatgacacatccaagaattcccaaaaaaatgttcgtaaaactaatgagttctctaagatgtcaacaaatattggaagtaccacttcagttataagaatcgaaa

SEQ ID NO: 73281 - DNA, 2858 bp, Zea Mays
ccgagatggagctgatggatctagggtttcggttgcggcgggaggcggtggcagcgtcagggagcaggacaggttcctgcccatcgccaacatcagtcgcatcatgaagaaggccatcccggctaacgggaagatcgccaaggacgctaaggagaccgtgcaggagtgcgtctcggagttcatctccttcatcactagcgaggcgagtgacaagtgccagagggagaagcggaagaccatcaatggcgacgacctgctgtgggccatggccacgctggggtttgaggactatattgaacccctcaaggtgtacctgcagaagtacagagaggtgcgtactgatgaaggtattggggacttcaggttaattggattgatttggtggtcaggttgtgcaatcaccaatctgtcaccttgtcgattgtacctctgattgaacttaaaaatcctgttggcaatttacttccctctcgatgcttctggtacatatttgtacttatactgcttttaagttgagaatataaagagaccccctgttcctatgtactattgtcagtttgtcggaaagagtttctccccctagtagtttgtcttataagacgaatcaattcgaaagaacttatatccattgaacactgatcaaaacctgcatttgctgttcttaggcgggtttgagcatccattgaacactgatcggaacctccatttgctgttcttagatggggatgggttaacacgcgtgctggggaacattatacatctattcacaaacctatgctttctatgacgaaaagtagatgtaatgcaattggaatttataacagcagaaagagctcctgtaggagtgtaatgtaattagagcatgttgtagtgcaagctcttagttacttgaataacggacctttacacaaataatacccgaaactatttcactgtaggtcatatacaatcttgtttagggtccggagtttatttagttgtatttttttgtacgcccatctggtctatgagctgaataatctgtctaatgatgtctctcttttggtctcatgtctggtggatggcgtcacgaattgcagatggaggtatgttgtattaagcattgtctgatggtgaaatattctattgtttttcatgttttaatacattggcctgtaaatgttctataacatggacttttgttgttataaacttagaattggcctggggtaatttgagctagctgatcctgttttcagttttcaccctgacttgaagcacatgtgcacagttaaaatttgttttgttcacattccagaggcataaccttagtaaccgggaactgggaacttggccacgttcctcgttccgggaacgttcgttccgttccgggaaccagtggcgtagctagaattttttcgtgaggtatgccattagaatttttataaataatttgatatatagttcaaaatataaagataaaaataacatataacactatagatttaacatttaagtctataaatgtatatattacaatgcaaatataatatatatcagtattttttatatggatcttgtggactagtgatccggtgggccggcttaggatatgccgtggcccacctggaccacccgctgtctacgccactgccgggaacgtgggaacaatctcgttccgatagtgttaaatcctagtttttgtagcgtaccgcgtaccacgttcccgttcctcgatcccatcgatccgggaacctggttactaagggcataacacattaactgaatgtcatggagtactgcagatgtcttttcaggaaggggagggttcttgtgaattgcacctttttgtgaacaaatctagttcgtgtagttcatatatcgattccctactggcatgccaataaaaattaaatgaaacagtgaaccccatgcatgtttttattggaaaatcatactagggggtataaatgtgatcaaaatcccaggtcttcaccataaaaactactgtatgtttgcctaatggacttgacctccacctgattctgatacatatatttatttggtttcactgactgtttagcaagttctaattcctgtaaaatggttcgtacagggttctgataatttctttctttgtagttagtatgggagtagctcttctcattctccatgctttagctaccaatcttgtagattctgagatataatgaacattgttcttgtttctttgattaacaacagggtgatagtaagttaacttcaaaatccagcgatggctccattaaaaaggatgcccttggtcatgtgggagcaagtagctcagctgtacaagggatgggtcagcaaggaacatacaaccaaggaatgggttatatgcaacctcagtaccataacggagatatctcgaactaatgaagacatggaccttttctgcaacagctgctcttccccgaggcgggtttttggtcgcagttatttactaagtaagacaccttgcggtgaccattaaagagtaaccaatcaccctgggtaggtcaatttttatctgcaagaactgatgaggccgcttggtaggagtaaatcgcttttcctgggaacgattgttggttagcgccgctactgtatgtatattgagataccttaacgattggtcttttggctgccatttggttacatgtatttgtatttggaggcataagtatcgtgtaatttgtgttatgactagtgtattgactattgaattatgagaagagctgctttagttgtaagatcacatgacacatccaagaattcccaaaaaaatgttcgtaaaactaatgagttctctaagatgtcaacaaatattggaagtaccacttcagttataagaatcgaaa

SEQ ID NO: 73282 - DNA, 1221 bp, Zea Mays
gttctcccaatcgcggctaagtctccgcctccagagacagatgtcggcggcgacggaggttgcgccagttcagcaaccgagccatccggcggcggcggggtggctcggcctcggtctgctcttccagatcctgctccggatcatccgctcctcctgggcgcagcttctctccttcgtgcgcctgcgccaccggctcctcccagttaccgcgtcgcctgagctggccttcgtgcagctcccacccgaggcgcctgctgacgcgtcgcctccgccgcttcggcggctcatggtcgtgcttgacttggatgagactttagtttgcgcgtacgagtcatcgagccttccttctactatgcgcacacatgctgttgaggcaggattgcatcgctttgacatggaggaatacagagagcatgtaaaagacctttcttgtttgtccaaagatttccagagaattgtccttgttgacaacaacccatacagtttcttactgcaaccattgaatggaataccatgcgttacgttttcggctggacaacctgttgacgaccagcttatgggaacgatgtttccgcttctcaagcatctcgctctccaaaaagatgtgaggcctgcattgtatgaagcatttcacatgccagagtggttccaaagacaaggaatcccacaaattgaacaggcagtctaggaattgcagctaccacattggacaattgaaagtctcaaaaacctgctactgtacagtagaactcttttagctctcccctaccagcgttattaattcccttgacggagtctcagcagcacaaccaccgtggcatcctgctcgtagccgccaggcgtggcgggagggcgaggttggagtctgcgtgctgcatcaatccaagcagtcgacgcagactggttcgcagcacggcgcaacccattcatggcacgtcacttccctaggagctggaccacttcatcttcatccgtgcatggcctttcatcaatggcaacaacttctattagaggccgagtgaagcacttccagagccgaaccaaacggataacgtttttagttcctctgtagtagtaacagttagcactgttagtagctagttgcattaccattcccgcactccctcttgaaacaaacagcaccatggttgtagtgctcccaaccattatttaggtcaagaaccagaaatccggttgaaaacacagtgcatcagattaaac

SEQ ID NO: 73283 - DNA, 1361 bp, Zea Mays
gttctcccaatcgcggctaagtctccgcctccagagacagatgtcggcggcgacggaggttgcgccagttcagcaaccgagccatccggcggcggcggggtggctcggcctcggtctgctcttccagatcctgctccggatcatccgctcctcctgggcgcagcttctctccttcgtgcgcctgcgccaccggctcctcccagttaccgcgtcgcctgagctggccttcgtgcagctcccacccgaggcgcctgctgacgcgtcgcctccgccgcttcggcggctcatggtcgtgcttgacttggatgagactttagtttgcgcgtacgagtcatcgagccttccttctactatgcgcacacatgctgttgaggcaggattgcatcgctttgacatggagtgcgtattgtctgaaaaggatactgagggaaggcagaggataaatcgtgtaactgtctttgagcgtcctggcttacatgagtttttgcagcgaactagcgaatttgctgaccttgttctctttacagctggtttggaagggaatacagagagcatgtaaaagacctttcttgtttgtccaaagatttccagagaattgtccttgttgacaacaacccatacagtttcttactgcaaccattgaatggaataccatgcgttacgttttcggctggacaacctgttgacgaccagcttatgggaacgatgtttccgcttctcaagcatctcgctctccaaaaagatgtgaggcctgcattgtatgaagcatttcacatgccagagtggttccaaagacaaggaatcccacaaattgaacaggcagtctaggaattgcagctaccacattggacaattgaaagtctcaaaaacctgctactgtacagtagaactcttttagctctcccctaccagcgttattaattcccttgacggagtctcagcagcacaaccaccgtggcatcctgctcgtagccgccaggcgtggcgggagggcgaggttggagtctgcgtgctgcatcaatccaagcagtcgacgcagactggttcgcagcacggcgcaacccattcatggcacgtcacttccctaggagctggaccacttcatcttcatccgtgcatggcctttcatcaatggcaacaacttctattagaggccgagtgaagcacttccagagccgaaccaaacggataacgtttttagttcctctgtagtagtaacagttagcactgttagtagctagttgcattaccattcccgcactccctcttgaaacaaacagcaccatggttgtagtgctcccaaccattatttaggtcaagaaccagaaatccggttgaaaacacagtgcatcagattaaac

SEQ ID NO: 73284 - DNA, 1225 bp, Zea Mays
gaggaccctgccatcactaccctgcaccagatcggtacagggcacccaagatgcccgacgaccggcgcgccgaaagagagggagagccaagccgcctcccgccgcgacgcacgatggatcgcgcgcagttgctcctcgtcggactcccggccttgctcttcttctccgacctcactcacatcttcgcgccgccgcctccccacctccgccacccccatcaccaccctcctcaccaccaacatccgcatccgccgcatcatccccactcgcctcatccccatccgcacccgccgcatcatccccacccgcacccgccgcaccaccaccagcaccccgacccctccacggcaatcatacaggagccacgtgtggatgaggctggattcggcagcacagtggagctgcaattctgtgcctcctgctcgtacaagggaactgcagtgaccatgaagcgcatgctggaaacctcatttcctggcattcatgttatcttgcataattatcctcctccattccccaagcgtgtactcagcaaagttatcccaattgttcaagttggagccgttgcaacaataatggctggtgaccagattttccccagaattggaatggttgctcctccatggtactactcgcttcgtgccaatagattcggaaccatggcaacaatctggctatttggcaactttgctcagtcctttctacaaagctctggtgcctttgaagtttactgcaatggagatttggtattctcaaaacttgctgagcagaggttccctagcgagttcgagttgcgggaccttgttggcagcagattgcctgggtctccatttgggaggaatccggggaaaaccctgacttgatgatgaccccggaaatcagagctcagaatgccacaatttattatgttgcttttaaggtattagtagatagtaactatttggtattgatctatcgaggctgcagcttgtctgtaaacacaactttccagcttgtataatggatcaacggatcacctgacatgtgacggtggccgaagtactacgaactctaatgacattggaacggtaaagatattgtgatggcctgttagtttatgggaggtgtactgtttggcattgatctcgatgtaaacaaacaatgttagcattgtcccatggggaagattaagcgagcaggatgttaaagatacaatcattggcatcaagaggtcgttagatctttt

SEQ ID NO: 73285 - DNA, 1033 bp, Zea Mays
cctgccatcactaccctgcaccagatcggtacagggcacccaagatgcccgacgaccggcggttggtactcccactgatgaatgggactcacataccctgattcggtccaccttgcagtgtacacacagttacacagaggaggtttcctccctgcgaatctgcgatactgactctgccttcttcgttccagcgccgaaagagagggagagccaagccgcctcccgccgcgacgcacgatggatcgcgcgcagttgctcctcgtcggactcccggccttgctcttcttctccgacctcactcacatcttcgcgccgccgcctccccacctccgccacccccatcaccaccctcctcaccaccaacatccgcatccgccgcatcatccccactcgcctcatccccatccgcacccgccgcatcatccccacccgcacccgccgcaccaccaccagcaccccgacccctccacggcaatcatacaggagccacgtgtggatgaggctggattcggcagcacagtggagctgcaattctgtgcctcctgctcgtacaagtattctcaaaacttgctgagcagaggttccctagcgagttcgagttgcgggaccttgttggcagcagattgcctgggtctccatttgggaggaatccggggaaaaccctgacttgatgatgaccccggaaatcagagctcagaatgccacaatttattatgttgcttttaaggtattagtagatagtaactatttggtattgatctatcgaggctgcagcttgtctgtaaacacaactttccagcttgtataatggatcaacggatcacctgacatgtgacggtggccgaagtactacgaactctaatgacattggaacggtaaagatattgtgatggcctgttagtttatgggaggtgtactgtttggcattgatctcgatgtaaacaaacaatgttagcattgtcccatggggaagattaagcgagcaggatgttaaagatacaatcattggcatcaagaggtcgttagatctttt

SEQ ID NO: 73286 - DNA, 871 bp, Zea Mays
ctggagttctagacgtccacaagctcagcgcactgacaagatttgtcaagtctgtcactctgttgtctgtgacaaggggaactgcagtgaccatgaagcgcatgctggaaacctcatttcctggcattcatgttatcttgcataattatcctcctccattccccaagcgtgtactcagcaaagttatcccaattgttcaagttggagccgttgcaacaataatggctggtgaccagattttccccagaattggaatggttgctcctccatggtactactcgcttcgtgccaatagattcggaaccatggcaacaatctggctatttggcaactttgctcagtcctttctacaaagctctggtgcctttgaagtttactgcaatggagatttggtattctcaaaacttgctgagcagaggttccctagcgagttcgagttgcgggaccttgttggcagcagattgcctgggtctccatttgggaggaatccggggaaaaccctgacttgatgatgaccccggaaatcagagctcagaatgccacaatttattatgttgcttttaaggtattagtagatagtaactatttggtattgatctatcgaggctgcagcttgtctgtaaacacaactttccagcttgtataatggatcaacggatcacctgacatgtgacggtggccgaagtactacgaactctaatgacattggaacggtaaagatattgtgatggcctgttagtttatgggaggtgtactgtttggcattgatctcgatgtaaacaaacaatgttagcattgtcccatggggaagattaagcgagcaggatgttaaagatacaatcattggcatcaagaggtcgttagatctttt

SEQ ID NO: 73287 - DNA, 829 bp, Zea Mays
atcctaagtattggaggccagttgttggatgacagggaactgcagtgaccatgaagcgcatgctggaaacctcatttcctggcattcatgttatcttgcataattatcctcctccattccccaagcgtgtactcagcaaagttatcccaattgttcaagttggagccgttgcaacaataatggctggtgaccagattttccccagaattggaatggttgctcctccatggtactactcgcttcgtgccaatagattcggaaccatggcaacaatctggctatttggcaactttgctcagtcctttctacaaagctctggtgcctttgaagtttactgcaatggagatttggtattctcaaaacttgctgagcagaggttccctagcgagttcgagttgcgggaccttgttggcagcagattgcctgggtctccatttgggaggaatccggggaaaaccctgacttgatgatgaccccggaaatcagagctcagaatgccacaatttattatgttgcttttaaggtattagtagatagtaactatttggtattgatctatcgaggctgcagcttgtctgtaaacacaactttccagcttgtataatggatcaacggatcacctgacatgtgacggtggccgaagtactacgaactctaatgacattggaacggtaaagatattgtgatggcctgttagtttatgggaggtgtactgtttggcattgatctcgatgtaaacaaacaatgttagcattgtcccatggggaagattaagcgagcaggatgttaaagatacaatcattggcatcaagaggtcgttagatctttt

SEQ ID NO: 73288 - DNA, 4327 bp, Zea Mays
gccggcccgcccgcccgctccctccctccccaagtccccagtccgcactgaccactgccaccaccaaaaactcatggcctctcgcgcacccatccctcctgctccgccccacctccgcctccacgccgcgtccctcttctcgcagcgcctcccactccctcgcgcgcgtgccccgcgatgccgcggcggacggagccgcctcctctcagcgctgccgtcgccgcccccctcgccagcctcgcgctcgcagggcgtctccaccgctccgatcgagcgcgaaccaccgggactcgcgcccacgcccgcgcctacccccgctcagcagccgcaccaggatccagcgatcgccgcggaggtcgctcgcctctccgccgcccgcgagaggctccgcgcggcgcacacgctccacgagaaactccgcgcgctcgacgctgagccccgcgtcgcggcgttcttcggcgaggagtccagccgcggggtgttgggcgtgctcgagccccgcgaggtgctcctgctgaaatgcctcgtcgcggcaggacaggagcacgtgctcggccatgagctcgattggtacggcggcgacggcggccatcacgagcaccaccaccgcaacggggtcagtggtgggagtgccctgcgggatgcgctgtatagcctggccggtttggtcgggaagtggacctcggagggagtggtggctgccaaggagagaagggaggaaatggaggtgctacctagactgctcaagttcctcgacaacgtcgaggagttctacgactgcattggtggcatcatcggtcatacaagaagctatcaaattatggtattggagctcctttcagcctctaaggatcgcatgcaccgacctagcaaagacaagtttgttgatttccatgttcccagtggacttaatttattgaaggataaagaatatgcatctcaagcagctctgtggggaattgagggtctgccagaattaggtgaaatttacccaattggtggtgcgggtgatcgtcttggtttagtggactcagatactggtgagtcccttcctgctgcgttgctcccttactgtgggagatccctgttggaagggctgatacgggatctgcaggctagagagtttctccacttcaagatctttggaggtcaatgtataaccccagttgcaatcatgaccagttctgtgaaggataatcatgaacatataattgcgatatgcgaaagacttgattggtttggtagaggccgtgacaatttccggttgtttgaacagcctttggtacctgtagtaaatgccaaagatggtaaatggttaatcagcaaatcacttttccctgttggtaaacctggtggtcatggtgctatttggaaacttgcatatgatagaggtgtactccaatggttacaaaattgtggcaggaaaggtgcaactgtacgccaagtcagcaatgtggttgctgcaactgatttgaccatgatggcattggcaggaataggccttcgatgcaacaagaaattaggttttgcatcttgtgagcgaagacctggggctactgaaggagtgaatgtccttattgagaaacaaaatcttgaggggctatggtcatatggcatcacttgtatcgagtacactgagtttgaaaagtatggcatcccagaacctacactaaccaacagttcgcaggttagctttccagcaaatacgaacattctctatgttgatctacaagcggtacaggaagttggatctcgcaaaaatgctagttgcttaccagggatggtgctgaatttgaaaaaggcagtatcgtaccccaaccatcttggctttgagtgtagtgctgctggaggcaggctagagtgcacaatgcaaaacattgcagatgattttatgaacacttttaactacagatgcagcaaaggaatagaaagtgagcttaacactttcattgtatataatgaaaggaaaagagtcacttcatcagctaaaaggaagctgaaatcagaagacagatcattgcaccagactccggagggttcactccttgatattatgcgtaatgctcatgacctcctttccagttgcggcatagatattcccatggttcaagacaacagtgaatatatgcattctggaccgccgtttctcatatttcttcatcctgctttaggcccattttgggatatcatacgacaaaagttcgtaggtggttctgtttctaaaggttcagagttgcaaatagaggtggctgagtttctatggaaagatgttgaggtaacaatcaagacgataagtttgcatgcactttgcctgtttctgcaaactaagtttattatgttaaattcttataagctggatggaagctttattattctagctgacaacgtcatgggttcaaccaagaatagcaaaaatggtgaacagatactgcactatggttccaggttgtaactcactcttaaacacatggttgctataaatatttatccagtaagtgtggaactctaatgccatgtttgttgaaaggtgtgggagatgcagactgcaaagtgttaaaattgttaatgaagggatcaattggacttctcccaataatgtctattggaagcatgatgtagagagatcagaatctgtaaagattattcttcatggaaacgcagaatttgaggcaaaagatgtagtcttgaaggatttgttgttaaattggatcttatacgtgacgaattgatggacagtggaacctggcattggaagtatgcagttgatggtgtccatgtaaagttgaacatggtagaactataaggggtatcaactatagattcttgattcattgatttgtggccagcttaattttattgaggacacacttgacgttggttgactttagtctagattgtaggcgatgacatgttgtaaagataagggagctttgttttcgtacattaggtctgaactgttcccttcattgaagaggtgatgtactagaatatgtatttttcaaatatatggagaatgcttgttctccgaagttatcaaagaacattggtcttgtttgcttccaatgttgtatttgtgttagtttgtgggtgtcagactgtcagtggcacccggtagtaggtttcagcatcgtaatcgatctggaacatggtgatgaaacctgaaactggctacttcaaaggtaaggagaactatgtactgtaccaaataatgggtctgaggcaactgaatagtgttagcacttagcaaagttagggtcttagggaactcaacatggtgtttacatttgagcttcatcaacacaggtttgtgtattgtctgcatgccattgttgttttgtactccatccgttccaaactatagttctttctagttcacttttttcagtccacattcattcgaatgataataaatatagacatacatacaaactacattcatatgttacttaatgaatatatgattaatctaaaacgaattatgttttgggatggagagagtattgaatagcagtcactttcggattctcctctaatcgctgttcaaagatgttgacttatatttgacaaacaaaattgatttgccaaaatgtattctttgaatgaatggcatctgtatagtcatattagacattctattaccaatggctgagatatcaatttgcaattgtgcattttgtaacatgcaaacaggattgtcttagactatctccaaccgagtagccaatacaatacacatacataaattgcttggtcttgtagcattgtagcgcttaggaaatgcttccaacggactatgcaaactaaatacgcatctacgacactcaacccctcgacacctaaaaccgagtcctctccacccacgactcaaactctggcaaaccaactgtcgagaggggaccattgtagcagcagtctttcctattgtcatttgcgtctgccgttggagaacatcataaatacgtatgcgaccttgtgctctggcgtaacgcagattgctgaatgcatctctgattttaggtagcatggttggagacaatcttagctattaaattgtttgttgtaatgtttgttgtaagattcacattttcgtagtattagttgatcaggttgtacatcaattttgtctgattttaggtagcatggttggagacaatcttagctattaaattttttgttgtaatgtttgttgtaagattcacattttcgtagtattagttgatcaggttgtatatcaattttctctgattttaggtagcatggttggagacaatcttaggtattaaattgtttgttgtaagattcacattttcgtagtattagttgatca

SEQ ID NO: 73289 - DNA, 4712 bp, Zea Mays
ccgcccgctccctccctccccaagtccccagtccgcactgaccactgccaccaccaaaaactcatggcctctcgcgcacccatccctcctgctccgccccacctccgcctccacgccgcgtccctcttctcgcagcgcctcccactccctcgcgcgcgtgccccgcgatgccgcggcggacggagccgcctcctctcagcgctgccgtcgccgcccccctcgccagcctcgcgctcgcagggcgtctccaccgctccgatcgagcgcgaaccaccgggactcgcgcccacgcccgcgcctacccccgctcagcagccgcaccaggatccagcgatcgccgcggaggtcgctcgcctctccgccgcccgcgagaggctccgcgcggcgcacacgctccacgagaaactccgcgcgctcgacgctgagccccgcgtcgcggcgttcttcggcgaggagtccagccgcggggtgttgggcgtgctcgagccccgcgaggtgctcctgctgaaatgcctcgtcgcggcaggacaggagcacgtgctcggccatgagctcgattggtacggcggcgacggcggccatcacgagcaccaccaccgcaacggggtcagtggtgggagtgccctgcgggatgcgctgtatagcctggccggtttggtcgggaagtggacctcggagggagtggtggctgccaaggagagaagggaggaaatggaggtgctacctagactgctcaagttcctcgacaacgtcgaggagttctacgactgcattggtggcatcatcggtcatacaagaagctatcaaattatggtattggagctcctttcagcctctaaggatcgcatgcaccgacctagcaaagacaagtttgttgatttccatgttcccagtggacttaatttattgaaggataaagaatatgcatctcaagcagctctgtggggaattgagggtctgccagaattaggtgaaatttacccaattggtggtgcgggtgatcgtcttggtttagtggactcagatactggtgagtcccttcctgctgcgttgctcccttactgtgggagatccctgttggaagggctgatacgggatctgcaggctagagagtttctccacttcaagatctttggaggtcaatgtataaccccagttgcaatcatgaccagttctgtgaaggataatcatgaacatataattgcgatatgcgaaagacttgattggtttggtagaggccgtgacaatttccggttgtttgaacagcctttggtacctgtagtaaatgccaaagatggtaaatggttaatcagcaaatcacttttccctgttggtaaacctggtggtcatggtgctatttggaaacttgcatatgatagaggtgtactccaatggttacaaaattgtggcaggaaaggtgcaactgtacgccaagtcagcaatgtggttgctgcaactgatttgaccatgatggcattggcaggaataggccttcgatgcaacaagaaattaggttttgcatcttgtgagcgaagacctggggctactgaaggagtgaatgtccttattgagaaacaaaatcttgaggggctatggtcatatggcatcacttgtatcgagtacactgagtttgaaaagtatggcatcccagaacctacactaaccaacagttcgcaggttagctttccagcaaatacgaacattctctatgttgatctacaagcggtacaggaagttggatctcgcaaaaatgctagttgcttaccagggatggtgctgaatttgaaaaaggcagtatcgtaccccaaccatcttggctttgagtgtagcgatatggaggtcaacttgcaacacaaggtgctggattctgaagtgaaggcgtcgattcaagcaaggaagctcgatttcaactacaagcatgggcataaaaattcttgccgagctgagctagattgtgcgccaaaaccagttctggagactggcaaacacattgataggatctggaatcctaccgcggctgttgctgctggaggcaggctagagtgcacaatgcaaaacattgcagatgattttatgaacacttttaactacagatgcagcaaaggaatagaaagtgagcttaacactttcattgtatataatgaaaggaaaagagtcacttcatcagctaaaaggaagctgaaatcagaagacagatcattgcaccagttactttgtattcctgagttgtgttcgactccggagggttcactccttgatattatgcgtaatgctcatgacctcctttccagttgcggcatagatattcccatggttcaagacaacagtgaatatatgcattctggaccgccgtttctcatatttcttcatcctgctttaggcccattttgggatatcatacgacaaaagttcgtaggtggttctgtttctaaaggttcagagttgcaaatagaggtggctgagtttctatggaaagatgttgagctggatggaagctttattattctagctgacaacgtcatgggttcaaccaagaatagcaaaaatggtgaacagatactgcactatggttccaggtgtgggagatgcagactgcaaagtgttaaaattgttaatgaagggatcaattggacttctcccaataatgtctattggaagcatgatgtagagagatcagaatctgtaaagattattcttcatggaaacgcagaatttgaggcaaaagatgtagtcttgaagggtaaccatgtatttgaagttcctgatggtcatagaatgtgcatcattcaggacagagcaggtttgttaattagcagtggcatatgattctttctgtgctcttttttattcatttactagttgatgagtgggggtgaacattttagattttactttgcaagttgtgaaattcgttggccttcagccccccactagatatagccatataggtcaattatccattctaattacaaattcatgttctgaagtgtgaatcgttttattcctgctactatgtgcaatggatataacttggtcaaatttcgttctcaataatgactgatttggtgaccagggaattggagtggattcatgggggaggaatctcctggctattcaattttgaatagcgaggagattcctccctcatggatcctcttgaatagcgagggaatttctccctcgtggatcccctccaatttcttggtcaccaaacgagccctaagagtagtaataattagatttcagaaaagattatgcacatatgcataacaataaaatatttttggattgaaagttcacttctgtcttaactctcccaccccactattatgtcatggacccaacgctcctgatgaatgaattccttcttgtccaataggatttgttgttaaattggatcttatacgtgacgaattgatggacagtggaacctggcattggaagtatgcagttgatggtgtccattttgtgggtgtcagactgtcagtggcacccggtagtaggtttcagcatcgtaatcgatctggaacatggtgatgaaacctgaaactggctacttcaaaggtaaggagaactatgtactgtaccaaataatgggtctgaggcaactgaatagtgttagcacttagcaaagttagggtcttagggaactcaacatggtgtttacatttgagcttcatcaacacaggtttgtgtattgtctgcatgccattgttgttttgtactccatccgttccaaactatagttctttctagttcacttttttcagtccacattcattcgaatgataataaatatagacatacatacaaactacattcatatgttacttaatgaatatatgattaatctaaaacgaattatgttttgggatggagagagtattgaatagcagtcactttcggattctcctctaatcgctgttcaaagatgttgacttatatttgacaaacaaaattgatttgccaaaatgtattctttgaatgaatggcatctgtatagtcatattagacattctattaccaatggctgagatatcaatttgcaattgtgcattttgtaacatgcaaacaggattgtcttagactatctccaaccgagtagccaatacaatacacatacataaattgcttggtcttgtagcattgtagcgcttaggaaatgcttccaacggactatgcaaactaaatacgcatctacgacactcaacccctcgacacctaaaaccgagtcctctccacccacgactcaaactctggcaaaccaactgtcgagaggggaccattgtagcagcagtctttcctattgtcatttgcgtctgccgttggagaacatcataaatacgtatgcgaccttgtgctctggcgtaacgcagattgctgaatgcatctctgattttaggtagcatggttggagacaatcttagctattaaattgtttgttgtaatgtttgttgtaagattcacattttcgtagtattagttgatcaggttgtacatcaattttgtctgattttaggtagcatggttggagacaatcttagctattaaattttttgttgtaatgtttgttgtaagattcacattttcgtagtattagttgatcaggttgtatatcaattttctctgattttaggtagcatggttggagacaatcttaggtattaaattgtttgttgtaagattcacattttcgtagtattagttgatca

SEQ ID NO: 73290 - DNA, 2993 bp, Zea Mays
ctccctccccaagtccccagtccgcactgaccactgccaccaccaaaaactcatggcctctcgcgcacccatccctcctgctccgccccacctccgcctccacgccgcgtccctcttctcgcagcgcctcccactccctcgcgcgcgtgccccgcgatgccgcggcggacggagccgcctcctctcagcgctgccgtcgccgcccccctcgccagcctcgcgctcgcagggcgtctccaccgctccgatcgagcgcgaaccaccgggactcgcgcccacgcccgcgcctacccccgctcagcagccgcaccaggatccagcgatcgccgcggaggtcgctcgcctctccgccgcccgcgagaggctccgcgcggcgcacacgctccacgagaaactccgcgcgctcgacgctgagccccgcgtcgcggcgttcttcggcgaggagtccagccgcggggtgttgggcgtgctcgagccccgcgaggtgctcctgctgaaatgcctcgtcgcggcaggacaggagcacgtgctcggccatgagctcgattggtacggcggcgacggcggccatcacgagcaccaccaccgcaacggggtcagtggtgggagtgccctgcgggatgcgctgtatagcctggccggtttggtcgggaagtggacctcggagggagtggtggctgccaaggagagaagggaggaaatggaggtgctacctagactgctcaagttcctcgacaacgtcgaggagttctacgactgcattggtggcatcatcggtcatacaagaagctatcaaattatggtattggagctcctttcagcctctaaggatcgcatgcaccgacctagcaaagacaagtttgttgatttccatgttcccagtggacttaatttattgaaggataaagaatatgcatctcaagcagctctgtggggaattgagggtctgccagaattaggtgaaatttacccaattggtggtgcgggtgatcgtcttggtttagtggactcagatactggtgagtcccttcctgctgcgttgctcccttactgtgggagatccctgttggaagggctgatacgggatctgcaggctagagagtttctccacttcaagatctttggaggtcaatgtataaccccagttgcaatcatgaccagttctgtgaaggataatcatgaacatataattgcgatatgcgaaagacttgattggtttggtagaggccgtgacaatttccggttgtttgaacagcctttggtacctgtagtaaatgccaaagatggtaaatggttaatcagcaaatcacttttccctgttggtaaacctggtggtcatggtgctatttggaaacttgcatatgatagaggtgtactccaatggttacaaaattgtggcaggaaaggtgcaactgtacgccaagtcagcaatgtggttgctgcaactgatttgaccatgatggcattggcaggaataggccttcgatgcaacaagaaattaggttttgcatcttgtgagcgaagacctggggctactgaaggagtgaatgtccttattgagaaacaaaatcttgaggggctatggtcatatggcatcacttgtatcgagtacactgagtttgaaaagtatggcatcccagaacctacactaaccaacagttcgcaggttagctttccagcaaatacgaacattctctatgttgatctacaagcggtacaggaagttggatctcgcaaaaatgctagttgcttaccagggatggtgctgaatttgaaaaaggcagtatcgtaccccaaccatcttggctttgagtgtagtgctgctggaggcaggctagagtgcacaatgcaaaacattgcagatgattttatgaacacttttaactacagatgcagcaaaggaatagaaagtgagcttaacactttcattgtatataatgaaaggaaaagagtcacttcatcagctaaaaggaagctgaaatcagaagacagatcattgcaccagttactttgtattcctgagttgtgttcgactccggagggttcactccttgatattatgcgtaatgctcatgacctcctttccagttgcggcatagatattcccatggttcaagacaacagtgaatatatgcattctggaccgccgtttctcatatttcttcatcctgctttaggcccattttgggatatcatacgacaaaagttcgtaggtggttctgtttctaaaggttcagagttgcaaatagaggtggctgagtttctatggaaagatgttgagctggatggaagctttattattctagctgacaacgtcatgggttcaaccaagaatagcaaaaatggtgaacagatactgcactatggttccaggtgtgggagatgcagactgcaaagtgttaaaattgttaatgaagggatcaattggacttctcccaataatgtctattggaagcatgatgtagagagatcagaatctgtaaagattattcttcatggaaacgcagaatttgaggcaaaagatgtagtcttgaagggtaaccatgtatttgaagttcctgatggtcatagaatgtgcatcattcaggacagagcaggatttgttgttaaattggatcttatacgtgacgaattgatggacagtggaacctggcattggaagtatgcagttgatggtgtccatgtaaagttgaacatggtagaactataaggggtatcaactatagattcttgattcattgatttgtggccagcttaattttattgaggacacacttgacgttggttgactttagtctagattgtaggcgatgacatgttgtaaagataagggagctttgttttcgtacattaggtctgaactgttcccttcattgaagaggtgatgtactagaatatgtatttttcaaatatatggagaatgcttgttctccgaagttatcaaagaacattggtcttgtttgcttccaatgttgtatttgtgttagtttgtg

SEQ ID NO: 73291 - DNA, 2902 bp, Zea Mays
atggcctctcgcgcacccatccctcctgctccgccccacctccgcctccacgccgcgtccctcttctcgcagcgcctcccactccctcgcgcgcgtgccccgcgatgccgcggcggacggagccgcctcctctcagcgctgccgtcgccgcccccctcgccagcctcgcgctcgcagggcgtctccaccgctccgatcgagcgcgaaccaccgggactcgcgcccacgcccgcgcctacccccgctcagcagccgcaccaggatccagcgatcgccgcggaggtcgctcgcctctccgccgcccgcgagaggctccgcgcggcgcacacgctccacgagaaactccgcgcgctcgacgctgagccccgcgtcgcggcgttcttcggcgaggagtccagccgcggggtgttgggcgtgctcgagccccgcgaggtgctcctgctgaaatgcctcgtcgcggcaggacaggagcacgtgctcggccatgagctcgattggtacggcggcgacggcggccatcacgagcaccaccaccgcaacggggtcagtggtgggagtgccctgcgggatgcgctgtatagcctggccggtttggtcgggaagtggacctcggagggagtggtggctgccaaggagagaagggaggaaatggaggtgctacctagactgctcaagttcctcgacaacgtcgaggagttctacgactgcattggtggcatcatcggctatcaaattatggtattggagctcctttcagcctctaaggatcgcatgcaccgacctagcaaagacaagtttgttgatttccatgttcccagtggacttaatttattgaaggataaagaatatgcatctcaagcagctctgtggggaattgagggtctgccagaattaggtgaaatttacccaattggtggtgcgggtgatcgtcttggtttagtggactcagatactggtgagtcccttcctgctgcgttgctcccttactgtgggagatccctgttggaagggctgatacgggatctgcaggctagagagtttctccacttcaagatctttggaggtcaatgtataaccccagttgcaatcatgaccagttctgtgaaggataatcatgaacatataattgcgatatgcgaaagacttgattggtttggtagaggccgtgacaatttccggttgtttgaacagcctttggtacctgtagtaaatgccaaagatggtaaatggttaatcagcaaatcacttttccctgttggtaaacctggtggtcatggtgctatttggaaacttgcatatgatagaggtgtactccaatggttacaaaattgtggcaggaaaggtgcaactgtacgccaagtcagcaatgtggttgctgcaactgatttgaccatgatggcattggcaggaataggccttcgatgcaacaagaaattaggttttgcatcttgtgagcgaagacctggggctactgaaggagtgaatgtccttattgagaaacaaaatcttgaggggctatggtcatatggcatcacttgtatcgagtacactgagtttgaaaagtatggcatcccagaacctacactaaccaacagttcgcaggttagctttccagcaaatacgaacattctctatgttgatctacaagcggtacaggaagttggatctcgcaaaaatgctagttgcttaccagggatggtgctgaatttgaaaaaggcagtatcgtaccccaaccatcttggctttgagtgtagtgctgctggaggcaggctagagtgcacaatgcaaaacattgcagatgattttatgaacacttttaactacagatgcagcaaaggaatagaaagtgagcttaacactttcattgtatataatgaaaggaaaagagtcacttcatcagctaaaaggaagctgaaatcagaagacagatcattgcaccagactccggagggttcactccttgatattatgcgtaatgctcatgacctcctttccagttgcggcatagatattcccatggttcaagacaacagtgaatatatgcattctggaccgccgtttctcatatttcttcatcctgctttaggcccattttgggatatcatacgacaaaagttcgtaggtggttctgtttctaaaggttcagagttgcaaatagaggtggctgagtttctatggaaagatgttgagctggatggaagctttattattctagctgacaacgtcatgggttcaaccaagaatagcaaaaatggtgaacagatactgcactatggttccaggtgtgggagatgcagactgcaaagtgttaaaattgttaatgaagggatcaattggacttctcccaataatgtctattggaagcatgatgtagagagatcagaatctgtaaagattattcttcatggaaacgcagaatttgaggcaaaagatgtagtcttgaagggtaaccatgtatttgaagttcctgatggtcatagaatgtgcatcattcaggacagagcaggatttgttgttaaattggatcttatacgtgacgaattgatggacagtggaacctggcattggaagtatgcagttgatggtgtccatgtaaagttgaacatggtagaactataaggggtatcaactatagattcttgattcattgatttgtggccagcttaattttattgaggacacacttgacgttggttgactttagtctagattgtaggcgatgacatgttgtaaagataagggagctttgttttcgtacattaggtctgaactgttcccttcattgaagaggtgatgtactagaatatgtatttttcaaatatatggagaatgcttgttctccgaagttatcaaagaacattggtcttgtttgcttccaatgttgtatttgtgttagtttgtg

SEQ ID NO: 73292 - DNA, 2914 bp, Zea Mays
atggcctctcgcgcacccatccctcctgctccgccccacctccgcctccacgccgcgtccctcttctcgcagcgcctcccactccctcgcgcgcgtgccccgcgatgccgcggcggacggagccgcctcctctcagcgctgccgtcgccgcccccctcgccagcctcgcgctcgcagggcgtctccaccgctccgatcgagcgcgaaccaccgggactcgcgcccacgcccgcgcctacccccgctcagcagccgcaccaggatccagcgatcgccgcggaggtcgctcgcctctccgccgcccgcgagaggctccgcgcggcgcacacgctccacgagaaactccgcgcgctcgacgctgagccccgcgtcgcggcgttcttcggcgaggagtccagccgcggggtgttgggcgtgctcgagccccgcgaggtgctcctgctgaaatgcctcgtcgcggcaggacaggagcacgtgctcggccatgagctcgattggtacggcggcgacggcggccatcacgagcaccaccaccgcaacggggtcagtggtgggagtgccctgcgggatgcgctgtatagcctggccggtttggtcgggaagtggacctcggagggagtggtggctgccaaggagagaagggaggaaatggaggtgctacctagactgctcaagttcctcgacaacgtcgaggagttctacgactgcattggtggcatcatcggtcatacaagaagctatcaaattatggtattggagctcctttcagcctctaaggatcgcatgcaccgacctagcaaagacaagtttgttgatttccatgttcccagtggacttaatttattgaaggataaagaatatgcatctcaagcagctctgtggggaattgagggtctgccagaattaggtgaaatttacccaattggtggtgcgggtgatcgtcttggtttagtggactcagatactggtgagtcccttcctgctgcgttgctcccttactgtgggagatccctgttggaagggctgatacgggatctgcaggctagagagtttctccacttcaagatctttggaggtcaatgtataaccccagttgcaatcatgaccagttctgtgaaggataatcatgaacatataattgcgatatgcgaaagacttgattggtttggtagaggccgtgacaatttccggttgtttgaacagcctttggtacctgtagtaaatgccaaagatggtaaatggttaatcagcaaatcacttttccctgttggtaaacctggtggtcatggtgctatttggaaacttgcatatgatagaggtgtactccaatggttacaaaattgtggcaggaaaggtgcaactgtacgccaagtcagcaatgtggttgctgcaactgatttgaccatgatggcattggcaggaataggccttcgatgcaacaagaaattaggttttgcatcttgtgagcgaagacctggggctactgaaggagtgaatgtccttattgagaaacaaaatcttgaggggctatggtcatatggcatcacttgtatcgagtacactgagtttgaaaagtatggcatcccagaacctacactaaccaacagttcgcaggttagctttccagcaaatacgaacattctctatgttgatctacaagcggtacaggaagttggatctcgcaaaaatgctagttgcttaccagggatggtgctgaatttgaaaaaggcagtatcgtaccccaaccatcttggctttgagtgtagtgctgctggaggcaggctagagtgcacaatgcaaaacattgcagatgattttatgaacacttttaactacagatgcagcaaaggaatagaaagtgagcttaacactttcattgtatataatgaaaggaaaagagtcacttcatcagctaaaaggaagctgaaatcagaagacagatcattgcaccagactccggagggttcactccttgatattatgcgtaatgctcatgacctcctttccagttgcggcatagatattcccatggttcaagacaacagtgaatatatgcattctggaccgccgtttctcatatttcttcatcctgctttaggcccattttgggatatcatacgacaaaagttcgtaggtggttctgtttctaaaggttcagagttgcaaatagaggtggctgagtttctatggaaagatgttgagctggatggaagctttattattctagctgacaacgtcatgggttcaaccaagaatagcaaaaatggtgaacagatactgcactatggttccaggtgtgggagatgcagactgcaaagtgttaaaattgttaatgaagggatcaattggacttctcccaataatgtctattggaagcatgatgtagagagatcagaatctgtaaagattattcttcatggaaacgcagaatttgaggcaaaagatgtagtcttgaagggtaaccatgtatttgaagttcctgatggtcatagaatgtgcatcattcaggacagagcaggatttgttgttaaattggatcttatacgtgacgaattgatggacagtggaacctggcattggaagtatgcagttgatggtgtccatgtaaagttgaacatggtagaactataaggggtatcaactatagattcttgattcattgatttgtggccagcttaattttattgaggacacacttgacgttggttgactttagtctagattgtaggcgatgacatgttgtaaagataagggagctttgttttcgtacattaggtctgaactgttcccttcattgaagaggtgatgtactagaatatgtatttttcaaatatatggagaatgcttgttctccgaagttatcaaagaacattggtcttgtttgcttccaatgttgtatttgtgttagtttgtg

SEQ ID NO: 73293 - DNA, 2925 bp, Zea Mays
atggcctctcgcgcacccatccctcctgctccgccccacctccgcctccacgccgcgtccctcttctcgcagcgcctcccactccctcgcgcgcgtgccccgcgatgccgcggcggacggagccgcctcctctcagcgctgccgtcgccgcccccctcgccagcctcgcgctcgcagggcgtctccaccgctccgatcgagcgcgaaccaccgggactcgcgcccacgcccgcgcctacccccgctcagcagccgcaccaggatccagcgatcgccgcggaggtcgctcgcctctccgccgcccgcgagaggctccgcgcggcgcacacgctccacgagaaactccgcgcgctcgacgctgagccccgcgtcgcggcgttcttcggcgaggagtccagccgcggggtgttgggcgtgctcgagccccgcgaggtgctcctgctgaaatgcctcgtcgcggcaggacaggagcacgtgctcggccatgagctcgattggtacggcggcgacggcggccatcacgagcaccaccaccgcaacggggtcagtggtgggagtgccctgcgggatgcgctgtatagcctggccggtttggtcgggaagtggacctcggagggagtggtggctgccaaggagagaagggaggaaatggaggtgctacctagactgctcaagttcctcgacaacgtcgaggagttctacgactgcattggtggcatcatcggctatcaaattatggtattggagctcctttcagcctctaaggatcgcatgcaccgacctagcaaagacaagtttgttgatttccatgttcccagtggacttaatttattgaaggataaagaatatgcatctcaagcagctctgtggggaattgagggtctgccagaattaggtgaaatttacccaattggtggtgcgggtgatcgtcttggtttagtggactcagatactggtgagtcccttcctgctgcgttgctcccttactgtgggagatccctgttggaagggctgatacgggatctgcaggctagagagtttctccacttcaagatctttggaggtcaatgtataaccccagttgcaatcatgaccagttctgtgaaggataatcatgaacatataattgcgatatgcgaaagacttgattggtttggtagaggccgtgacaatttccggttgtttgaacagcctttggtacctgtagtaaatgccaaagatggtaaatggttaatcagcaaatcacttttccctgttggtaaacctggtggtcatggtgctatttggaaacttgcatatgatagaggtgtactccaatggttacaaaattgtggcaggaaaggtgcaactgtacgccaagtcagcaatgtggttgctgcaactgatttgaccatgatggcattggcaggaataggccttcgatgcaacaagaaattaggttttgcatcttgtgagcgaagacctggggctactgaaggagtgaatgtccttattgagaaacaaaatcttgaggggctatggtcatatggcatcacttgtatcgagtacactgagtttgaaaagtatggcatcccagaacctacactaaccaacagttcgcaggttagctttccagcaaatacgaacattctctatgttgatctacaagcggtacaggaagttggatctcgcaaaaatgctagttgcttaccagggatggtgctgaatttgaaaaaggcagtatcgtaccccaaccatcttggctttgagttgctgctggaggcaggctagagtgcacaatgcaaaacattgcagatgattttatgaacacttttaactacagatgcagcaaaggaatagaaagtgagcttaacactttcattgtatataatgaaaggaaaagagtcacttcatcagctaaaaggaagctgaaatcagaagacagatcattgcaccagttactttgtattcctgagttgtgttcgactccggagggttcactccttgatattatgcgtaatgctcatgacctcctttccagttgcggcatagatattcccatggttcaagacaacagtgaatatatgcattctggaccgccgtttctcatatttcttcatcctgctttaggcccattttgggatatcatacgacaaaagttcgtaggtggttctgtttctaaaggttcagagttgcaaatagaggtggctgagtttctatggaaagatgttgagctggatggaagctttattattctagctgacaacgtcatgggttcaaccaagaatagcaaaaatggtgaacagatactgcactatggttccaggtgtgggagatgcagactgcaaagtgttaaaattgttaatgaagggatcaattggacttctcccaataatgtctattggaagcatgatgtagagagatcagaatctgtaaagattattcttcatggaaacgcagaatttgaggcaaaagatgtagtcttgaagggtaaccatgtatttgaagttcctgatggtcatagaatgtgcatcattcaggacagagcaggatttgttgttaaattggatcttatacgtgacgaattgatggacagtggaacctggcattggaagtatgcagttgatggtgtccatgtaaagttgaacatggtagaactataaggggtatcaactatagattcttgattcattgatttgtggccagcttaattttattgaggacacacttgacgttggttgactttagtctagattgtaggcgatgacatgttgtaaagataagggagctttgttttcgtacattaggtctgaactgttcccttcattgaagaggtgatgtactagaatatgtatttttcaaatatatggagaatgcttgttctccgaagttatcaaagaacattggtcttgtttgcttccaatgttgtatttgtgttagtttgtg

SEQ ID NO: 73294 - DNA, 2888 bp, Zea Mays
atggcctctcgcgcacccatccctcctgctccgccccacctccgcctccacgccgcgtccctcttctcgcagcgcctcccactccctcgcgcgcgtgccccgcgatgccgcggcggacggagccgcctcctctcagcgctgccgtcgccgcccccctcgccagcctcgcgctcgcagggcgtctccaccgctccgatcgagcgcgaaccaccgggactcgcgcccacgcccgcgcctacccccgctcagcagccgcaccaggatccagcgatcgccgcggaggtcgctcgcctctccgccgcccgcgagaggctccgcgcggcgcacacgctccacgagaaactccgcgcgctcgacgctgagccccgcgtcgcggcgttcttcggcgaggagtccagccgcggggtgttgggcgtgctcgagccccgcgaggtgctcctgctgaaatgcctcgtcgcggcaggacaggagcacgtgctcggccatgagctcgattggtacggcggcgacggcggccatcacgagcaccaccaccgcaacggggtcagtggtgggagtgccctgcgggatgcgctgtatagcctggccggtttggtcgggaagtggacctcggagggagtggtggctgccaaggagagaagggaggaaatggaggtgctacctagactgctcaagttcctcgacaacgtcgaggagttctacgactgcattggtggcatcatcggctatcaaattatggtattggagctcctttcagcctctaaggatcgcatgcaccgacctagcaaagacaagtttgttgatttccatgttcccagtggacttaatttattgaaggataaagaatatgcatctcaagcagctctgtggggaattgagaattaggtgaaatttacccaattggtggtgcgggtgatcgtcttggtttagtggactcagatactggtgagtcccttcctgctgcgttgctcccttactgtgggagatccctgttggaagggctgatacgggatctgcaggctagagagtttctccacttcaagatctttggaggtcaatgtataaccccagttgcaatcatgaccagttctgtgaaggataatcatgaacatataattgcgatatgcgaaagacttgattggtttggtagaggccgtgacaatttccggttgtttgaacagcctttggtacctgtagtaaatgccaaagatggtaaatggttaatcagcaaatcacttttccctgttggtaaacctggtggtcatggtgctatttggaaacttgcatatgatagaggtgtactccaatggttacaaaattgtggcaggaaaggtgcaactgtacgccaagtcagcaatgtggttgctgcaactgatttgaccatgatggcattggcaggaataggccttcgatgcaacaagaaattaggttttgcatcttgtgagcgaagacctggggctactgaaggagtgaatgtccttattgagaaacaaaatcttgaggggctatggtcatatggcatcacttgtatcgagtacactgagtttgaaaagtatggcatcccagaacctacactaaccaacagttcgcaggttagctttccagcaaatacgaacattctctatgttgatctacaagcggtacaggaagttggatctcgcaaaaatgctagttgcttaccagggatggtgctgaatttgaaaaaggcagtatcgtaccccaaccatcttggctttgagttgctgctggaggcaggctagagtgcacaatgcaaaacattgcagatgattttatgaacacttttaactacagatgcagcaaaggaatagaaagtgagcttaacactttcattgtatataatgaaaggaaaagagtcacttcatcagctaaaaggaagctgaaatcagaagacagatcattgcaccagactccggagggttcactccttgatattatgcgtaatgctcatgacctcctttccagttgcggcatagatattcccatggttcaagacaacagtgaatatatgcattctggaccgccgtttctcatatttcttcatcctgctttaggcccattttgggatatcatacgacaaaagttcgtaggtggttctgtttctaaaggttcagagttgcaaatagaggtggctgagtttctatggaaagatgttgagctggatggaagctttattattctagctgacaacgtcatgggttcaaccaagaatagcaaaaatggtgaacagatactgcactatggttccaggtgtgggagatgcagactgcaaagtgttaaaattgttaatgaagggatcaattggacttctcccaataatgtctattggaagcatgatgtagagagatcagaatctgtaaagattattcttcatggaaacgcagaatttgaggcaaaagatgtagtcttgaagggtaaccatgtatttgaagttcctgatggtcatagaatgtgcatcattcaggacagagcaggatttgttgttaaattggatcttatacgtgacgaattgatggacagtggaacctggcattggaagtatgcagttgatggtgtccatgtaaagttgaacatggtagaactataaggggtatcaactatagattcttgattcattgatttgtggccagcttaattttattgaggacacacttgacgttggttgactttagtctagattgtaggcgatgacatgttgtaaagataagggagctttgttttcgtacattaggtctgaactgttcccttcattgaagaggtgatgtactagaatatgtatttttcaaatatatggagaatgcttgttctccgaagttatcaaagaacattggtcttgtttgcttccaatgttgtatttgtgttagtttgtg

SEQ ID NO: 73295 - DNA, 494 bp, Zea Mays
gaaaaccgaacttttgagatacaaaaaccgaaaccgaaccgaactaccgaaaaaaccaaaatttcggttcggtacggttcggtacggttcgggtaaaaatgtgcccacccctactcttaacgtacgtaaagcacgtaaagctgcccacatgacgtactcttcgtcacacaataagctaagcacatgtgaagttcccttttattcgatcaaaattacatggtagccacacaagcaaatacaaagcacgccaacaaagatatctctgagtgtgtgtgttagttgttggcgacgactccctggaacacggcgatcagctcggcttcttccagcacgtgcccgtcgatcgcctccatgagcttatccctggtcacctgcatgcaattaattaattcgaccgcaaatcgataactactcccaacaaattaaatctcagcatcaaacgtaccttgttgccgagtgttggatttctacgtactagttctagtcagttgttc

SEQ ID NO: 73296 - DNA, 1032 bp, Zea Mays
ccccgtcgcacttgccagttgcctctgccacccccgcgacgacgacgacgacgacggcgctccttccgcttctcccccgtcgtcgtcccatgcccctctgccacatacagtgaccggcagcggcgaggagcgaccaataatggcagcgcaggagagcgccgcagggaacccgcaggtggtggtgacgcggtggcggtacggggacgtgggcgacagcaacttcgcggtgcgcggccgcgcggcgccgctgctggcggggctgctgtgcgccgtcgtcgtcttcgccgcgctctgcctgtacctctgctggaggtgccagcgccagcgccaccgctacgacccggaggcggacgcctcgtcgtcgtcgtcgccgtcgccagccggcgcggcggcgctgcccggcctcgacgccgacgccatccgcggcctgcccgtgacgctgcaccggccgtccgcgtcgccgcggcttcccggcggggacgacgaggcgctgtgctccatctgcatcagcgcgctggtggccggggagaaggtgaaggtgctcccgccctgcggccactgcttccacccggactgcgtcgacgcatggctccggtcccaccccagctgcccgctctgccgccgccgcctcctcctcgccgacgccgacgccaaagtgtgatcagcggcgggcccctgccccgaccaggagtttttaagcagcgcattactagtgacgtggccgctgctctgctctgctctccgagggaggccgtcacctgacctgaccccgaccaagccactcactgttcaaggaatgcctttccagctttttctctgtggcgcaaggctctcgagtgcaggagaaaagtgatgtaggctgcgctgcacatagcttttgagtatttaaaccagaggagataatttaacgtatgcggtggtggttcagatgttgtgttgttgtgcttgtgcctttttgttttgattccatatactgctacactttggccgtaaaataaaagtggcggttgcagatatctctgctgcccaaat

SEQ ID NO: 73297 - DNA, 1819 bp, Zea Mays
ctgccttcagcttcagacccgttccgtgctatataaatccccacgatgggaggggttgcccaccccacccatcatcagtcagtcagtcagcagccgcaacctcgtacaatcacgaaagcagcacacgagtccacaacagcaccccgcctctttttcttcacgtgcgttgcgtgccctgcccccatggagaccctcctggctggcaaccccgccaacggcgtggcgaagccgacgtgcaatggcgtcggcgccctgcccgtggccaactcccacgccatcatcgccacgccgccggctgcggcgacgctggccccggctggcgccacgctcggccggcacctggcgcgccgcctcgtgcagatcggcgcctccgacgtcttcgccgtcccgggggacttcaacctcaccctgctcgactacctcatcgccgagccgggcctgaccctcgtcggctgctgcaacgagctcaacgccgggtacgccgccgacgggtacgcgcggtcgcggggcgtcggcgcctgcgccgtcacgttcaccgtcggtgggctcagcgtgctcaacgccatcgccggcgcgtacagcgagaacctccccgtcgtctgcatcgtgggcgggcccaactccaacgactacggcaccaaccgcatcctgcaccacaccatcggcctccctgacttctcccaggagctccgctgcttccagacgatcacctgctaccaggccatcatcaacaacctggacgacgcgcatgagcagatcgacacggccatcgcgacggcgctgagggagagcaagcccgtgtacatcagcgtcagctgcaacctggccggcctctcccacccgaccttcagccgggatccggtgcccatgttcatctcgccgaggctgagcaacaaggccaacctggagtacgccgtggaggcggcggccgacttcctcaacaaggcggtgaagccggtgatggtgggcgggcccaagatccgggtgacggcgcaggacgtgtccacgatgctccggtgcgggcagaagagcatcatcttcctcatcaacaacggcggctacaccatcgaggtggagatccacgacggcccgtacaacgtgatcaagaactgggactacacgggcctggtcaacgccatccataactccgagggcaactgctggaccatgaaggttcggacggaggagcagctcaaggaggcgatcgccacggcgacgggcgccaagaaagactgcctctgcttcatcgaggtaatcgtgcacaaggacgacacgagcaaggagctcctcgagtgggggtccagggtctccgccgccaacagcaggccgcccaatccccagtgatgagcccgtcgatcggtctcgagcgttcctgcaatggcgcctgcgcctgcgtctgtctgccctgaaattttttcgggtcgtttactcgttttcagtcagttactcagtttgtccgtcttcgtcgagcagaactacatccctgctgagggaagctgccaatctttatcctacgatgataatgtttgcaatttcacttgcttccaattgaattctgttataaatttttgcaacatttttttcccgcatcaataaaattcgttcgcgacgccggtctccttggagtcctcggttactgtgcgccgggtgtgtatccgcatgaccaatacggatttacgtctacaataggtgatttaggactagtttggcaaccttattttttcaatagatttctattttttcaaggtatattagtttattttctcttgataaaatgagaatatctggaaaaatataattgtcaaactagcacttatta

SEQ ID NO: 73298 - DNA, 2445 bp, Zea Mays
cagcttcagacccgttccgtgctatataaatccccacgatgggaggggttgcccaccccacccatcatcagtcagtcagtcagcagccgcaacctcgtacaatcacgaaagcagcacacgagtccacaacagcaccccgcctctttttcttcacgtgcgttgcgtgccctgcccccatggagaccctcctggctggcaaccccgccaacggcgtggcgaagccgacgtgcaatggcgtcggcgccctgcccgtggccaactcccacgccatcatcgccacgccgccggctgcggcgacgctggccccggctggcgccacgctcggccggcacctggcgcgccgcctcgtgcagatcggcgcctccgacgtcttcgccgtcccgggggacttcaacctcaccctgctcgactacctcatcgccgagccgggcctgaccctcgtcggctgctgcaacgagctcaacgccgggtacgccgccgacgggtacgcgcggtcgcggggcgtcggcgcctgcgccgtcacgttcaccgtcggtgggctcagcgtgctcaacgccatcgccggcgcgtacagcgagaacctccccgtcgtctgcatcgtgggcgggcccaactccaacgactacggcaccaaccgcatcctgcaccacaccatcggcctccctgacttctcccaggagctccgctgcttccagacgatcacctgctaccagatcgacacggccatcgcgacggcgctgagggagagcaagcccgtgtacatcagcgtcagctgcaacctggccggcctctcccacccgaccttcagccgggatccggtgcccatgttcatctcgccgaggctgagcaacaaggccaacctggagtacgccgtggaggcggcggccgacttcctcaacaaggcggtgaagccggtgatggtgggcgggcccaagatccgggtggccaaggccagggaggcgttcgccgccgtcgcggacgccagcgggtaccctttcgccgtcatgccggccgccaagggcctggtgccggagcaccacccgcgcttcatcggcacctactggggcgccgtcagcaccaccttctgcgccgagatcgtggagtccgccgacgcctacctcttcgccgggcccatcttcaacgactacagctccgtcggctactccctcctgctcaagcgggagaaggccgtcatcgtgcagcccgaccgcatggtggtcggcgacggcccggcgttcggctgcatcctcatgcccgagttcctccgcgcgctcgccaagcgcctcaggcgcaacaccacggcgtacgacaactaccgccgcatcttcgtccccgaccgcgagccgcccaacggcaagcccaacgagccgcttagggtcaacgtcctcttcaagcacatcaagggcatgctgtccggcgactccgcggtcgtcgccgagaccggcgactcgtggttcaactgccagaagctcaggctccccgagggctgcggctacgagttccagatgcagtacggctccatcgggtggtcggtcggcgccacgctcgggtacgcccaggcggccaaggacaagcgtgtcatcgcgtgcatcggcgacggaagcttccaggtgacggcgcaggacgtgtccacgatgctccggtgcgggcagaagagcatcatcttcctcatcaacaacggcggctacaccatcgaggtggagatccacgacggcccgtacaacgtgatcaagaactgggactacacgggcctggtcaacgccatccataactccgagggcaactgctggaccatgaaggttcggacggaggagcagctcaaggaggcgatcgccacggcgacgggcgccaagaaagactgcctctgcttcatcgaggtaatcgtgcacaaggacgacacgagcaaggagctcctcgagtgggggtccagggtctccgccgccaacagcaggccgcccaatccccagtgatgagcccgtcgatcggtctcgagcgttcctgcaatggcgcctgcgcctgcgtctgtctgccctgaaattttttcgggtcgtttactcgttttcagtcagttactcagtttgtccgtcttcgtcgagcagaactacatccctgctgagggaagctgccaatctttatcctacgatgataatgtttgcaatttcacttgcttccaattgaattctgttataaatttttgcaacatttttttcccgcatcaataaaattcgttcgcgacgccggtctccttggagtcctcggttactgtgcgccgggtgtgtatccgcatgaccaatacggatttacgtctacaataggtgatttaggactagtttggcaaccttattttttcaatagatttctattttttcaaggtatattagtttattttctcttgataaaatgagaatatctggaaaaatataattgtcaaactagcacttatta

SEQ ID NO: 73299 - DNA, 2178 bp, Zea Mays
ctctttctctttctccctctctctccgtgtgacagcattcccaattcctcaccctcaccgccgccgccgcgtcgccgccctcgcagccaccaactccaccgaatctgaagccatagctgccgactgcggccgcctcgaggagcggtgccccctatgcgccgaactccagcggtttctttagcctgttcgcgcgggccccgcgccggggcctgccatggtggggcggagctaggaaggcgtgagcttcgcgaccgcgccggcggaggaagaggtgtgatagcgcgctacaattaaggcgggcgtctcgcccgccggatggccgccgatgacgcggcgcggagcagcagacggatggatctgaacctctacctcggtctcccccgggccccgcgcgccccacgccccgatctcggctccgacctcgcgctgggcactccgatgctgtcttcgtcgtctccctcgtcctcggccgcctccgcggacgcgccgccgctggagacggatccactccacccgccctactcgccgtcccgcgccgaactggtgcgcccgccgaccccggtgcacgagccctacagcccgttcgcgcccgaggcgcatcccccctatgtgcctccgccaccactgccggttccaggggctttacctgtgctcgctgatgagcttgagtttggtttttccgacgcgcaactcggtctggtcgagcgtttagaccggccttcgtcgtcgaccgcatcttcttcattccgcccggatcgtgccgagcgctaccgccgcttgatgtccttgggcggatctaggtacttccggccaagacggttccgctccgaccttccacctctaagctcagaggcccctagtctggagaatgatgctgcagtgcaaccacctgaacccgaagaacctgtccatgatactgtggaggagaacaaggtggctgctgagggtgcagttgtgggtgtctcagaggacgatggaacagagcatgtggttgcatgtccactccagccataaggaatgccctgtctgcaaaggagaggttactgaagggaacattactcctatctatgggagagggaattcaggttcggctatggagaaggtcgcagaggatggtaacgcatctggccccaagattccaccaaggccacatgggaatcggctagagagcttccggcagcagttccaccatttgcgacccatatctagacggcttggtgaggcacatggttttttgtctacgtggaggcgcatttttgatcagcacttagcgaatagcatgagtagatttgaagggactcctgaactatctgtttcggaaactgctcagcatgcaagccgtcttggccgaatgactactaggttgagagcgaggaggttgcaaagggaagcggaaaaccctacacccattgtttcatctgcaccagatagtgggcagcctagaaacaatacacccgatctgccaaggcgctcttcaagcccatttccctcagaagggatggatttgttgcgacagattgccttcgctggtcttgaagactcagagaggtttgcgactgctgtcagtgaacttaggcgaatcgctaggccaagccactacggggcatcaacttcatcaaacccaccaaatcctgagcctattgatggaactcatattgccatggcactggctgcagatcaagcttctaattcgagcaccatggctgtcattcaggaagatgcagcttttgctgaaaacagctaaaatcaagccagcaggttgcagcgatattctaatttgctcggtgtgctcttctcagttaagcaatgttctaatgaagctagtaggtaatatctgctgtgtggtatgaagttgtttctctggtactagtttactaggcagctcctggttcgttgccttaattccttccggcctgttcaatttatgcgatcactcaagacatgtatactgcggaaacctggtggttgtcatcagatgtattttccttgatagtaaattgtatgtgcagatctgtaattttcttcatagtaaattgtatgtgcaaatctgtactcagtgaatttggtctctagctgagaaataacacatgagcggacaccagggcttatttgtggatagcttctgattccaccgaaatcatacatatttttgccctgttgctctctgcagctgcttga

SEQ ID NO: 73300 - DNA, 442 bp, Zea Mays
gctagctaagctagcaaggttaacctcacctttctatcaggaagcggcggcggcgacgtacgagtcgatggcgacgatggaaagctaatcgatagtacacgctggctggctattgcagtcccgattggaaatttctgcgtgcgtacgtcatagatctcctccgagatcggttgggccggatggcggtgccgtcgcgtcgccactccaatgcacaccgagacctgacgtcaacaaggcaggcaggaatgtaggatgcggccggagagagagcgttggacgtcggaagcatatatagagaggctcgagctaaatgaaaaaatatataaatgaaggtctcttcacgagagcatgtctctacatgactttttatatatatgttatcttttaaactatatttatagtctaaggctcagagttatatatcatgcagtatatatattag

SEQ ID NO: 73301 - DNA, 1039 bp, Zea Mays
aacaaacgcggacgctgctcacggcacatgacttttctacccctgctcatcattctcacttttctgtcctgctcctagcgacagggcctgtctgttctccttccgccgcgccacaaaacctccatggatgagccgtctcccctagagttggccgacggagatgcagtcctatggctcccagagccggccgccgtagatctagctccgcagctcccagatgaggtggatgtggaaccagacggagtggatccggcatccccgctgctcgtcgtcagccccagcctcgtcgtggatccttccccaccactccctctcgattgcaaggtggatcgacacagagatgacccctttcagcccgccgtggagacgatgcttgccttccagtctgacacggagaggatcctgctactgcgttctctgtccatccccaggacacaagatgatgaatcagccttagcggttttggaaccatcacgaatcgattgggatgcaattgaaatcgaacctagatgggatgaggaaggaacagagggagttgctagtgaacatgggttgtatgttaaactaggactgcaaaaggaggatgaaaaggggaaaaaggttagagaatctagagctaaaaagagaggtgtcagcacctttgaaaatgaatatattgacgatcatgaagggatggcttatcttgagcatataccagaagacagggctatcgtgtatgactggacgaatccagtgatgaaagttggtgccttgtatccaaatatgtcagtgtttcgacttgctgtgcgacactatgcaattatgaaagagtttgagctaggcatcgagactacttctacctctcgatatagagggttatgtatgggtgatgattgtccctggagacttcatgcagtgttggaagtgccaggatcagcaactatcattgtaacagcgatgacagatcggcatacttgtacttcaagtgccaggagaaggaccaccactcccactagctcgtgggttgctggactagctcttccaatcttgatgaagaaac

SEQ ID NO: 73302 - DNA, 3289 bp, Zea Mays
  misc_feature (3289)..(3289): n is a, c, g, or t
gtgcttgggaggacagctttcgactattatttagttggaaggaggcggttttggaaaaaatgccagatagtgttattgagattgatgctgaagaagaggatggaaaggtgtttttcagtaggtttttctgtgcttttggaccatgcataaaaaggtttcttcaaggatgcagaccatatctgagtgttgattcgacagctttgaacggtagatggaatggacatctaccgtcagctaccagcgtggatggacaaaattggatgtttccagtcgcatttggtttttttgatttcgaaactgagaagaactggacttggttcatgaaacaacttcataaggccgtcggagacttacctgttcttgctgtgtgttcagatgcttgcaaaggattactcaattctgtgaagtctgttttcccgtatgcagagaagagagaatgttttaggcacctagttcagaattttatcaagttgttccaaggttcacaacacttgtttccagctgcacgtgcatacatgcctgaggtgtttgagcaatattatgctaatgtggaaagtgttcctggtgtgagcaattggtttaacaaacaccataacatgctttggtacagaagtgggttcaacccggccataaagtgtgactacatcaccaataacatcgctgaggttttcaacaattgggtcaaagactacaaggacctacctgtatgtgagctggctgacaaaataagagagttgctgatggatcttttccatagaaggaggaggattggagagaagtttcaaggaaaaatcctaccagctgtcatcagtgttctgaatgctagaacaagggggttaggccatttgtctgttacgcaaggtgactactttgatgccgaggtacgggaccataatgattgtattactagacatattgtgaaggcaaaagataggtattgttcttgccaagagtggatgcacaccggtaagccatgccaacatggactggttgtaatcatatcccaacaatatagaaatgttaagttagaggactttgtggatgattcctactccgtggagaagttccgaaaagcttatgaggggagggtggaacaactccgagacaagttcttttggccgagagtagattttgcaaatgaagtgagtgccccacttgggaaaagaggtgtaggacgacaatggaagaatagaattaagggatgccttgaaggtggtagcgggagaaaacataagggaaatgagactgagaaagatagaaaagtgatccgaagaaagtataagtgccccaactgtggggaattgggacatcgcaagaacagcccgaagtgtccccaaaatgggacaaagaaaaagccaagaaaaccaagaaagaataccacgaaaggatggattcctccagcaccaagggaagatgtcggctcatcacagacaccactcgccttgtctcatgcattggaagacgccggttcatcgcagccttctgcaagggtagctgagtcccctccaaggcaaactaggatagctgtacgcaaaatgacaccgaagaagaagaaaatttcgtccatgatttaaattgtagttgtatgatttggaatgtagttgtacggtttgaattattgttctatggtcactttgaatactgtgtgatttcaatatccaaactgcagccagacaaaactgcaattgtggacagaaatgttcttcttcttgctcactgtttggacaaaactgctatgttttttctaataatctagattcattcatggttgtggcatgagttataacctttgtcagttggtctcactgtttgggtgcacaaccttgatgatgattttttttgaaattccttgatgatgaattgaatggaagctgagtgactcactgcctctttagagttaaaaatggactgagaaacatagcagtggtggcggtgggttacagagagaggacagtggatggagtggagcctgcatctcatacaggagaaagggggttcggatacaggagaacgagaaggagcaggggcagaaaagtcctatgccatgagcagcatccgtgtttgttgtgcacgcgcaaacagttcgaaacgagcgagcgtatggctgtctccgtccggttgtagcgaagtccgacggcgggatcgaattgtggcgaagtcacgcccgtgcagtgcgcccacagcaaaaagctcggcaggcgaggccacatgttctcgtgaaggcaaaacaacacagcgcgagcaacagcagcgaggtttaccccaattccccatttcccgtagcacggcagacgcgctcccttctgatttctgaatccccgacgccatggcctccgcaccgacgccgccgcccctcctcccggtgaccaaccctgcgtccggatcgtccccggccgccgccggaggctccgatgcgccgatcgctacgccggctttccggctcttcctgagccggatctccgactcggcgcggcgctcgctgtcggatcgccggccgtggggagagctcctcgaccgttcggcgttctcgaagccagactctctctccgacgccacctcccgcctgcgtcgcaacctcgcttacttccgcgtcaactacgccgccgtggtcgccttcgcgctgggggcctcgctcctggcgcaccccttctcgctcctcatcctcctgggcctcctcgccgcctggtgcttcctctacctcttccgcccctccgaccagcctgttgtcctcttcggccgaaccttttccgaccgcgagacgctgctggggctcgtcggcgcgtccttcatcctgcttttcttcacctccgtcgcgtcgctcatcatctccgggctgctcgtcggcggggccctcgtcgcggcgcacggcgcgttccgggtgccggaggacctcttcctcgacgagcccaacgcgccccccggcagcagcgcggcccaagggctgctgtcattccttggcggacccggatctggggtttgaggcggcggagggcaagatctggtagggttcttgggctcgacagatctactggcttagtggtggtttcgattgatgcaccggcttctgcgaagattagcaaattcatcgagattttaccatatggctgagtttagtgccaagtatcgagtaatatgagtttgtggtgtcagactttcgatatggactgtatcttcattcgcacgcagtaatgatacgttgatatgcttcactcactcgttcagtattctattagtatttccttttcctacacttgataaatgcttgtggaaacttgtgataatttctgan

SEQ ID NO: 73303 - DNA, 2283 bp, Zea Mays
  misc_feature (2283)..(2283): n is a, c, g, or t
gactggttgtaatcatatcccaacaatatagaaatgttaagttagaggactttgtggatgattcctactccgtggagaagttccgaaaagcttatgaggggagggtggaacaactccgagacaagttcttttggccgagagtagattttgcaaatgaagtgagtgccccacttgggaaaagaggtgtaggacgacaatggaagaatagaattaagggatgccttgaaggtggtagcgggagaaaacataagggaaatgagactgagaaagatagaaaagtgatccgaagaaagtataagtgccccaactgtggggaattgggacatcgcaagaacagcccgaagtgtccccaaaatgggacaaagaaaaagccaagaaaaccaagaaagaataccacgaaaggatggattcctccagcaccaagggaagatgtcggctcatcacagacaccactcgccttgtctcatgcattggaagacgccggttcatcgcagccttctgcaagggtagctgagtcccctccaaggcaaactaggatagctgtacgcaaaatgacaccgaagaagaagaaaatttcgtccatgatttaaattgtagttgtatgatttggaatgtagttgtacggtttgaattattgttctatggtcactttgaatactgtgtgatttcaatatccaaactgcagccagacaaaactgcaattgtggacagaaatgttcttcttcttgctcactgtttggacaaaactgctatgttttttctaataatctagattcattcatggttgtggcatgagttataacctttgtcagttggtctcactgtttgggtgcacaaccttgatgatgattttttttgaaattccttgatgatgaattgaatggaagctgagtgactcactgcctctttagagttaaaaatggactgagaaacatagcagtggtggcggtgggttacagagagaggacagtggatggagtggagcctgcatctcatacaggagaaagggggttcggatacaggagaacgagaaggagcaggggcagaaaagtcctatgccatgagcagcatccgtgtttgttgtgcacgcgcaaacagttcgaaacgagcgagcgtatggctgtctccgtccggttgtagcgaagtccgacggcgggatcgaattgtggcgaagtcacgcccgtgcagtgcgcccacagcaaaaagctcggcaggcgaggccacatgttctcgtgaaggcaaaacaacacagcgcgagcaacagcagcgaggtttaccccaattccccatttcccgtagcacggcagacgcgctcccttctgatttctgaatccccgacgccatggcctccgcaccgacgccgccgcccctcctcccggtgaccaaccctgcgtccggatcgtccccggccgccgccggaggctccgatgcgccgatcgctacgccggctttccggctcttcctgagccggatctccgactcggcgcggcgctcgctgtcggatcgccggccgtggggagagctcctcgaccgttcggcgttctcgaagccagactctctctccgacgccacctcccgcctgcgtcgcaacctcgcttacttccgcgtcaactacgccgccgtggtcgccttcgcgctgggggcctcgctcctggcgcaccccttctcgctcctcatcctcctgggcctcctcgccgcctggtgcttcctctacctcttccgcccctccgaccagcctgttgtcctcttcggccgaaccttttccgaccgcgagacgctgctggggctcgtcggcgcgtccttcatcctgcttttcttcacctccgtcgcgtcgctcatcatctccgggctgctcgtcggcggggccctcgtcgcggcgcacggcgcgttccgggtgccggaggacctcttcctcgacgagcccaacgcgccccccggcagcagcgcggcccaagggctgctgtcattccttggcggacccggatctggggtttgaggcggcggagggcaagatctgatctactggcttagtggtggtttcgattgatgcaccggcttctgcgaagattagcaaattcatcgagattttaccatatggctgagtttagtgccaagtatcgagtaatatgagtttgtggtgtcagactttcgatatggactgtatcttcattcgcacgcagtaatgatacgttgatatgcttcactcactcgttcagtattctattagtatttccttttcctacacttgataaatgcttgtggaaacttgtgataatttctgan

SEQ ID NO: 73304 - DNA, 3375 bp, Zea Mays
atcaccagatcttgtaacccagttctgatctttcttatactccaccagctttgggtgagggacgttgttgtaccaaatctggatgtgcagtgaaatgaaacaaaatcagatagtcagccacctaatggcataacaaaaaaaaactgtctggcaaaggtaattataaagagtaattcattaactgatacatcagacacttgaaacaagtagccccataagttatttgttaaaaaagtccacgtgcagaatattttaatatgagaataaaaaaaaattggatcccgatccatggcttgtacttcctccattccaaattataagtttttttttgtagagctaaagcatattactttaaccaaaattatagaaaatagaaatcttgcttaacaaaagtcaaacaacactaagtttaacaatgtttatacaaaaacagtataagtgtttatatctttagataagtttattataaaatatattctataaatattctagtgatacttaagtaaaatagtatagtacagcactagcaccgctggcagccctataaacgaactagctgtatgcccgtacgttgttacggcggcaacatgttatgataaaatacattaatatgaagaaacattaatcgtcattctacctatgtgctccccaatgaacaaacagatgtcaggaaaacaaaacatgttgtgacagctgctcccctccccaacggtcgtggctgttgtgcgggggagggggactgcagagggagcaggggcggagggagcggacactgtgcgaggaggggatcgactgggttggtagtcgtgcggaggggataaacagtgagaggatggggcggatgtggcatgcagatggcccatgcgtggctcacagatgtggcggtttgtgcgggcgagggaaacggaggcgggtgcgggcgcggaggagaggcgagggcatggctgtggtctacactatcatcttaatagttagtagagaagtagagattttctgccaagtggctcacttccataatcctaaaagagcgaaggggcggaataatagagtgacgaagccactggacaagcatgttacaatcccaattatctccctagttagagtacctagtcgagctattgctcggcgcctccgcctcgtccacaccacacagccgttgagtccacttcgctcactcaccgtcaaacccacacctcaaactccttcccttcaagaatgtcagattatccactgcggcctcttcctcctcttcctccgcccctcccaccatgattgccacccatctctccccagccctcaagcagtaccgcttctcgtccccgctccactccacctctcacaaccaccaccttctcgtgcacctcccgctcccccgccaccaccgcaacttcgctaagcccgccgcggccgcgccaggcctcctcgccagcgtcgagtccgtggcctccgcggcctccgtcctggccgctatcgtgctcgtccacgagtccgggtacttcctagccgcggcgtcccggggcatccacgtctcccagttctccatctgcttcggcccgccgctcgctcgcttccacctcggccccgtgaagtacgcgctccacgccatctgttagcagcccctaggaaggggatcgagagaactggaagaagagctcgtagattgagatttcggaagaggaaagtgatcggctgggatagagacttggagaagaagagagatagagacaaaggagcacgaaggcttctcgatagagttctgatatttcttctttgataccttttacagatgtctgagcatgtatttataactccttaataccacataacctatagcccatctagtatacatgaccatagcccatagtatacctaacattccccactccttgaaatgtggcttgcccccaagtcgctgatggtgtaggatcagcttcttctgctgcatcattgttgaatgcataacgtttcctctgcagccctccatctgaaattcgacaactcttgcaacactggaacgacacttgaagctggcaatatgacagcacaatcaccaggatcccaaacaaaaattgaaaagttgccttggcgacttctgacggcactcaaaccagaggtaaccaagcccacgctagtaccaatccctaccttccgaagacttggtaaatcctcaacacaaaaccttgacacacttttccagttttcatctctgcaactcactgtgtgcaacaatgaaggggctgcaacctttcttgatataagcatgaaccctccagttgagttatcagttgtattcatggcttccaaaataagttgcaatggaacccaatgcagaggatatttgaaacgggctacatccaagatgagcaccatattctgctcggcatggtagccaccatttgggaagaaatgaccagatacagtctgtccgaaaggccatattgtgaactgatgggcttcgacagcttttctgttggtaaatatcccctctggcccatcctcgtccttgactggtaatccaagccgtgcagcaaaaatcgagaaacccatgatctcagcaacaagcttgcacacaaggttgtcattgatgtggatgtcggtgatgctcgcgacaggattggggcgcggcactgcatccttgctgcaatggaataaaggcgagaaacaacactgtatgatacccattgcaccgtcctcgagtgcctgcgcaaggaaggagattttggcctcagcaaacagagggtccccggcttctcccagcggcaggagacgatagcttccctcccaacacggcgtgcagcagcaagcctcgatccagagcactccgaccagcacggcgagttggcagttccatcgcataaggggaaagttgacatatgtcgccgtcggatattgaccaagcatctgccgatttgcgctgtagggcaaggtgaacacaagcgtctcaatttcagggccaataacattgcttggcttgcgttcgtagccgttgcaggtgtgcacgatttgggtggcaacgtagctgctctggggaaggcatagtcgcacagcgaggccgttgactcgaaggaggtcaaggaaagtggtgtaggtgcagagcctcgcgatgatcgtgtcctccgtgaggtccccgacactcttcttcgccatggtggccatggcctgcgtgtcgcgcgaggacgcctgttggcactgcgacgcgacgtggactgcgagccgcgcgttgcccactgtgaacgccagtgaccatgctggctgccatgtcgcggcaaggtctcccctctcacagggcagttgccagtcatagcgcgcctgcttcagcttctcgatgtaccgcatctgttcgcgggtctcgagacccatgaccttggggtcgtc

SEQ ID NO: 73305 - DNA, 1951 bp, Zea Mays
actgccccatggcccattgcttacgcataactgcggcggggacacgcgacgctaccgacttcgccgccgcctccttccttccgcccgtcgagtcgaccgaccgattgttcgcgggtcgcggcctccctcctagtcagatccactcaatcccaagaggccaagtccaaaccctacccaccacccttctcaaccagcgatgatggcagcggagccctcgccgtcggttccctccaccgccgctgacgccctggaaaccctcgccctcgactcatcctcgtcgtccgccgccgctaccgcctccacttccaccgaccccctcctccggccacctacctccccgaccgccgccgcgagcgacgacccattcgtcatcgacgacttcgacgaggacgacttctccaccgccccggcgcccaacgtcgcccgccagccgcgcgctgcgcgtggtgatgcggcgtccccagtgttcgccaaaatcaccgtatcggatcccaagaagcacgcggagcccagcggcgggggtgccgccggtgtgatcccggggtccggtagctacttctcttacctcatcaccacccgtcttgcgggcggcggcggggaggtccgcgtgcggcggcgcttccgcgacgtggtgaccctcgcggaccgccttgccgcagcccaccgtggcctcttcgtcccggcccgacccgacaagagcgtcctcgaggggcaggtcatgcagcgccacgacttcgtgagccagcggtgcgctgcgctccagcgctacctccgccgccttgccgtgcaccccatcgtcggccacagccctgacctccgcacgttcctcacggagcctggtgccgtccctgcctttcagggtgagcccccgcggtactggactaccacgctgaatgctgctgctccgctggtgccaacgaaagctaggagggacttgtttgggatgtttaagggtctcaagcagacggtggtgaatggactggttgcaacaaagcctccacctgtggagcaggagacagacacagagttcctggcgcacaaggccaggtttgatgacttacagcagcagcttaccataacatcacagcaggcggaagcgcttgttaaagcccaagatgatcttagagaaactacaggtcacttgggaatgacattgattaagctggcaaaatttgaaagagagcaggcaacatgtaattccctaagaagacgtgctggtgaaatccataattttgcaaattctgttttaaagatgagcaggtcacagataaaattaaactctgaaatggtgaaacacctgggcagtatccatgaatacttggagatgatgatatcagttcatcatgcattcacagatcgctctaatgctttatattacgtgcaaagtctgtcagcagatttgttttccttgcacaccagggcagggggacttgaatcttcatcagcaagagatatggggcatgagtggtcaacatatcagaaggtagaggggttgaaagaagcaataagatctgcggaagcagccaaaagtgatgccgttagagaatatgaaagcattaaggaaaacaacatgattgaaataaaaagatttgacaaggaaagacgtcatgatttcattgagatgctgaaaggttttgtggtaactcaggtgtcttattcagaccattttgctaatatgtggacaaaggtaacagaggaaacagaagtatatgccaacaggagcaactgatttgtgaaattgggtcccggcagatgagcaaattggctccacgagaactggcatatgttgcctgcgggagagtctaagaggtttggtgttgtcaagttgttcctatattctcaggtgctatgtcctatttgtaggatcttcaaagtttaggaattcaaatgtgagaagaacaacatgttattgtactatacccacaaaaaacagagaatgaattgagctaca

SEQ ID NO: 73306 - DNA, 2072 bp, Zea Mays
actgccccatggcccattgcttacgcataactgcggcggggacacgcgacgctaccgacttcgccgccgcctccttccttccgcccgtcgagtcgaccgaccgattgttcgcgggtcgcggcctccctcctagtcagatccactcaatcccaagaggccaagtccaaaccctacccaccacccttctcaaccagcgatgatggcagcggagccctcgccgtcggttccctccaccgccgctgacgccctggaaaccctcgccctcgactcatcctcgtcgtccgccgccgctaccgcctccacttccaccgaccccctcctccggccacctacctccccgaccgccgccgcgagcgacgacccattcgtcatcgacgacttcgacgaggacgacttctccaccgccccggcgcccaacgtcgcccgccagccgcgcgctgcgcgtggtgatgcggcgtccccagtgttcgccaaaatcaccgtatcggatcccaagaagcacgcggagcccagcggcgggggtgccgccggtgtgatcccggggtccggtagctacttctcttacctcatcaccacccgtcttgcgggcggcggcggggaggtccgcgtgcggcggcgcttccgcgacgtggtgaccctcgcggaccgccttgccgcagcccaccgtggcctcttcgtcccggcccgacccgacaagagcgtcctcgaggggcaggtcatgcagcgccacgacttcgtgagccagcgggtgagcccccgcggtactggactaccacgctgaatgctgctgctccgctggtgccaacgaaagctaggagggacttgtttgggatgtttaagggtctcaagcagacggtggtgaatggactggttgcaacaaagcctccacctgtggagcaggagacagacacagagttcctggcgcacaaggccaggtttgatgacttacagcagcagcttaccataacatcacagcaggtattgatctactcacggatcttgtgaaatagctcagttgcatagcatcacaacaggtattgatctactcacagatcttgtgaaatggtggcatttatctacttacagatcttgtgaaatggctcagttgcatgtgttggcccatgcttcctcttttacatacatattattatgcgaagaatacaaaattgctctggccaatcctttaaactttgtattttatatatatgcaggcggaagcgcttgttaaagcccaagatgatcttagagaaactacaggtcacttgggaatgacattgattaagctggcaaaatttgaaagagagcaggcaacatgtaattccctaagaagacgtgctggtgaaatccataattttgcaaattctgttttaaagatgagcaggtcacagataaaattaaactctgaaatggtgaaacacctgggcagtatccatgaatacttggagatgatgatatcagttcatcatgcattcacagatcgctctaatgctttatattacgtgcaaagtctgtcagcagatttgttttccttgcacaccagggcagggggacttgaatcttcatcagcaagagatatggggcatgagtggtcaacatatcagaaggtagaggggttgaaagaagcaataagatctgcggaagcagccaaaagtgatgccgttagagaatatgaaagcattaaggaaaacaacatgattgaaataaaaagatttgacaaggaaagacgtcatgatttcattgagatgctgaaaggttttgtggtaactcaggtgtcttattcagaccattttgctaatatgtggacaaaggtaacagaggaaacagaagtatatgccaacaggagcaactgatttgtgaaattgggtcccggcagatgagcaaattggctccacgagaactggcatatgttgcctgcgggagagtctaagaggtttggtgttgtcaagttgttcctatattctcaggtgctatgtcctatttgtaggatcttcaaagtttaggaattcaaatgtgagaagaacaacatgttattgtactatacccacaaaaaacagagaatgaattgagctaca

SEQ ID NO: 73307 - DNA, 2692 bp, Zea Mays
agaattggcgttgaaaatgacgagatcgcgattttttttttcttctttctctagtgccgctgcctgtgaatcgattcacagtttatccacgagaccacgacatccccagactcccagcatcggctctcgcgatcagcaagcacagctccaagcaggctgccagcaatgctgtcccacgcgccgtctcaaatccccgccgcctccaaaccgcgcctctcctctcgcaggcgcagctcccgcctaggcgccaaacacctcacggccaccgccgctgcggcctcaacactccgcagcgtatccgcctcccgccgcggcttcgtcctcttcgttccctcgctcgccgccgcatccgccgtcctccgcccgctcccgtccgccgccaccgaggccgatgacaccgaaagcccggctccacatccaccgcccaccgaagaatccctctccccgcagcccgccgcggatgcggcggagacgaagcctgaggccagcgagtcggccatgtcgagggtgtacgacgcgacggtcctcggggagccagaggcgttggcaggggacgcgcgggggcgggtgtgggagaagctggcggctgcgagggtggtgtacctcggcgaggccgagctcgaacccgaccccgacgaccgtgtggtcgagctcgagatcgtcaggggcctcgcgggccgctgcgctgacgctggaaggggcctggcgctcgcgctggaggcgttcccctgcgacctacagcagcagctcgaccagttcatggacggcaggtgaaaagaactgtccaagcagatgggattagagctctcaaaaaagcagaaagagaagcatatgcccctccagcaggctcaggattcatctctagtttcatgtttggctcaggaaggtcattgatagacaagatctcatcgattgacgactctatgtttggctctacctcgtatctatcagaacaggcaagagtagttgatgattataccatttcccaggttattacgagagaacttagtgatggagatgtttcacggttgctaattgttgtgacgggtgcaagccatgttatgtacgggccacgaggaagtggtgttcctgggagaatatctaaaaaggtgccaaagaaagaccaagttgtggtactgcttgatcctgaaagacaggttataaggagggaaggtgaagtccccattgctgatttcttatggtattcagcggctaaaccttgcactagaaattgttttgaccgtgccgaaatcgctcgagtgatgaatgctgctggtaggaggcctgaagctttacctcaggatcttcagaaaggactagatcttggtgtagtttcacctgaaatattgcagaacttttttgacctcgagaaataccctgttatgacagaactgattcatcgatttcaaggtttcagagaaaggctgttggcagaccctaaattccttcaaagattagccattgaagaggtcatatcaataacaaccactctactagcgcagtatgaaaggcggaaagggaggttctttgaagaaattgactatgtcctcacagatactattagagggtctgttgttgatttctttacagtgtggcttcctgctcctactatttcagtccttcagtatgctgatgatggttctggttcgagtttggagtttgtcaaaggccttttaggatcattgccagataatgcattccaaaagaacatcttgggccaggattggagtatcaagcaaagaattgcagcagtgttggttggtggtctgaaacttgccagtgttggtttcatttctagtgttggggctggggtttcctcagatctcatctatgctgcccgaggaattgtgaaaccttcagaaaatgtggaaacgggaaggaagagatctcccatctggaagtcagcagctgtttatagttgctttcttggaacatcagcaaatttgcggtatcagattattgctggtctagtggagtatcgactaggagagagcctggtgacatactacaaccaaccccttattgctggtttgttgtcattcgtggctaggacactgaactcatactggggaacacagcaatgggttgatcttgcgcggtacactgggttacagagaagcgaggaaaagcctcctgctgaggccactatgccacctgattcagcacatttggagggttgtacgacggaaggacatgattttgatgacagcagcaataacaccaacaaatcgactggtccgagctagtgatttgattacttcacagtggctgcagatcacatggcctattttcatagacaatgaaagtggctgccttcctgctcttgggatcacaaggaagcggaaatttgaggaaatattagtcacaaaaatttgttcagattctttttcagcgttaccacaagagtgcacatacagttctcgtttctattcgttagagtaagtattgttttgtacaatctacatctgtaagaactgcagcacctaaaggatgttcagcaatgagggctttaacttgtcgcattgcatgctcgtaagcatgtttgttgcggctttaatcaagctgtttgttgcggctttaatcaagccgcgactacggcttctacaatattttgtctctatagattgcagctgcagcagtccgaaagtgtagggcataaaaaatcccctctcaaataaaaaatttgcagcac

SEQ ID NO: 73308 - DNA, 2166 bp, Zea Mays
cttctttctctagtgccgctgcctgtgaatcgattcacagtttatccacgagaccacgacatccccagactcccagcatcggctctcgcgatcagcaagcacagctccaagcaggctgccagcaatgctgtcccacgcgccgtctcaaatccccgccgcctccaaaccgcgcctctcctctcgcaggcgcagctcccgcctaggcgccaaacacctcacggccaccgccgctgcggcctcaacactccgcagcgtatccgcctcccgccgcggcttcgtcctcttcgttccctcgctcgccgccgcatccgccgtcctccgcccgctcccgtccgccgccaccgaggccgatgacaccgaaagcccggctccacatccaccgcccaccgaagaatccctctccccgcagcccgccgcggatgcggcggagacgaagcctgaggccagcgagtcggccatgtcgagggtgtacgacgcgacggtcctcggggagccagaggcgttggcaggggacgcgcgggggcgggtgtgggagaagctggcggctgcgagggtggtgtacctcggcgaggccgagctcgaacccgaccccgacgaccgtgtggtcgagctcgagatcgtcaggggcctcgcgggccgctgcgctgacgctggaaggggcctggcgctcgcgctggaggcgttcccctgcgacctacagcagcagctcgaccagttcatggacggcaggattgatggtggaatcttaaagttatacacatcgcactggtcgcaggagctatggcaggagtatgaacctcttctgtgttactgccgtgatactggaattaagcttattgcttgtggaacaccactggaggtgaaaagaactgtccaagcagatgggattagagctctcaaaaaagcagaaagagaagcatatgcccctccagcaggctcaggattcatctctagtttcatgtttggctcaggaaggtcattgatagacaagatctcatcgattgacgactctatgtttggctctacctcgtatctatcagaacaggcaagagtagttgatgattataccatttcccaggttattacgagagaacttagtgatggagatgtttcacggttgctaattgttgtgacgggtgcaagccatgttatgtacgggccacgaggaagtggtgttcctgggagaatatctaaaaaggtgccaaagaaagaccaagttgtggtactgcttgatcctgaaagacaggttataaggagggaaggtgaagtccccattgctgatttcttatggtattcagcggctaaaccttgcactagaaattgttttgaccgtgccgaaatcgctcgagtgatgaatgctgctggtaggaggcctgaagctttacctcaggatcttcagaaaggactagatcttggtgtagtttcacctgaaatattgcagaacttttttgacctcgagaaataccctgttatgacagaactgattcatcgatttcaaggtttcagagaaaggctgttggcagaccctaaattccttcaaagattagccattgaagaggtcatatcaataacaaccactctactagcgcagtatgaaaggcggaaagggaggttctttgaagaaattgactatgtcctcacagatactattagagggtctgttgttgatttctttacagtgtggcttcctgctcctactatttcagtccttcagtatgctgatgatggttctggttcgagtttggagtttgtcaaaggccttttaggatcattgccagataatgcattccaaaagaacatcttgggccaggattggagtatcaagcaaagaattgcagcagtgttggttggtggtctgaaacttgccagtgttggtttcatttctagtgttggggctggggtttcctcagatctcatctatgctgcccgaggaattgtgaaaccttcagaaaatgtggaaacgggaaggaagagatctcccatctggaagtcagcagctgtttatagttgctttcttggaacatcagcaaatttgcggtatcagaagttgtactaatcttcaagaacaaaggagatgttcaaagttgtactaattaccgtggaattaagctcatgagccatacaatgaagctatgggagagagtcattgaacaccgcctgcgaaag

SEQ ID NO: 73309 - DNA, 2892 bp, Zea Mays
cttctttctctagtgccgctgcctgtgaatcgattcacagtttatccacgagaccacgacatccccagactcccagcatcggctctcgcgatcagcaagcacagctccaagcaggctgccagcaatgctgtcccacgcgccgtctcaaatccccgccgcctccaaaccgcgcctctcctctcgcaggcgcagctcccgcctaggcgccaaacacctcacggccaccgccgctgcggcctcaacactccgcagcgtatccgcctcccgccgcggcttcgtcctcttcgttccctcgctcgccgccgcatccgccgtcctccgcccgctcccgtccgccgccaccgaggccgatgacaccgaaagcccggctccacatccaccgcccaccgaagaatccctctccccgcagcccgccgcggatgcggcggagacgaagcctgaggccagcgagtcggccatgtcgagggtgtacgacgcgacggtcctcggggagccagaggcgttggcaggggacgcgcgggggcgggtgtgggagaagctggcggctgcgagggtggtgtacctcggcgaggccgagctcgaacccgaccccgacgaccgtgtggtcgagctcgagatcgtcaggggcctcgcgggccgctgcgctgacgctggaaggggcctggcgctcgcgctggaggcgttcccctgcgacctacagcagcagctcgaccagttcatggacggcaggattgatggtggaatcttaaagttatacacatcgcactggtcgcaggagctatggcaggagtatgaacctcttctgtgttactgccgtgatactggaattaagcttattgcttgtggaacaccactggaggtttctacacagctgcttagcaagcatgccatcagcatggttctagtatatagagaactccgtgcaaactagtggaaaaaccttgttttgcacacttaagatacagttgctgtgaaaagaactgtccaagcagatgggattagagctctcaaaaaagcagaaagagaagcatatgcccctccagcaggctcaggattcatctctagtttcatgtttggctcaggaaggtcattgatagacaagatctcatcgattgacgactctatgtttggctctacctcgtatctatcagaacaggcaagagtagttgatgattataccatttcccaggttattacgagagaacttagtgatggagatgtttcacggttgctaattgttgtgacgggtgcaagccatgttatgtacgggccacgaggaagtggtgttcctgggagaatatctaaaaaggtgccaaagaaagaccaagttgtggtactgcttgatcctgaaagacaggttataaggagggaaggtgaagtccccattgctgatttcttatggtattcagcggctaaaccttgcactagaaattgttttgaccgtgccgaaatcgctcgagtgatgaatgctgctggtaggaggcctgaagctttacctcaggatcttcagaaaggactagatcttggtgtagtttcacctgaaatattgcagaacttttttgacctcgagaaataccctgttatgacagaactgattcatcgatttcaaggtttcagagaaaggctgttggcagaccctaaattccttcaaagattagccattgaagaggtcatatcaataacaaccactctactagcgcagtatgaaaggcggaaagggaggttctttgaagaaattgactatgtcctcacagatactattagagggtctgttgttgatttctttacagtgtggcttcctgctcctactatttcagtccttcagtatgctgatgatggttctggttcgagtttggagtttgtcaaaggccttttaggatcattgccagataatgcattccaaaagaacatcttgggccaggattggagtatcaagcaaagaattgcagcagtgttggttggtggtctgaaacttgccagtgttggtttcatttctagtgttggggctggggtttcctcagatctcatctatgctgcccgaggaattgtgaaaccttcagaaaatgtggaaacgggaaggaagagatctcccatctggaagtcagcagctgtttatagttgctttcttggaacatcagcaaatttgcggtatcagattattgctggtctagtggagtatcgactaggagagagcctggtgacatactacaaccaaccccttattgctggtttgttgtcattcgtggctaggacactgaactcatactggggaacacagcaatgggttgatcttgcgcggtacactgggttacagagaagcgaggaaaagcctcctgctgaggccactatgccacctgattcagcacatttggagggttgtacgacggaaggacatgattttgatgacagcagcaataacaccaacaaatcgactggtccgagctagtgatttgattacttcacagtggctgcagatcacatggcctattttcatagacaatgaaagtggctgccttcctgctcttgggatcacaaggaagcggaaatttgaggaaatattagtcacaaaaatttgttcagattctttttcagcgttaccacaagagtgcacatacagttctcgtttctattcgttagagtaagtattgttttgtacaatctacatctgtaagaactgcagcacctaaaggatgttcagcaatgagggctttaacttgtcgcattgcatgctcgtaagcatgtttgttgcggctttaatcaagctgtttgttgcggctttaatcaagccgcgactacggcttctacaatattttgtctctatagattgcagctgcagcagtccgaaagtgtagggcataaaaaatcccctctcaaataaaaaatttgcagcac

SEQ ID NO: 73310 - DNA, 2735 bp, Zea Mays
cttctttctctagtgccgctgcctgtgaatcgattcacagtttatccacgagaccacgacatccccagactcccagcatcggctctcgcgatcagcaagcacagctccaagcaggctgccagcaatgctgtcccacgcgccgtctcaaatccccgccgcctccaaaccgcgcctctcctctcgcaggcgcagctcccgcctaggcgccaaacacctcacggccaccgccgctgcggcctcaacactccgcagcgtatccgcctcccgccgcggcttcgtcctcttcgttccctcgctcgccgccgcatccgccgtcctccgcccgctcccgtccgccgccaccgaggccgatgacaccgaaagcccggctccacatccaccgcccaccgaagaatccctctccccgcagcccgccgcggatgcggcggagacgaagcctgaggccagcgagtcggccatgtcgagggtgtacgacgcgacggtcctcggggagccagaggcgttggcaggggacgcgcgggggcgggtgtgggagaagctggcggctgcgagggtggtgtacctcggcgaggccgagctcgaacccgaccccgacgaccgtgtggtcgagctcgagatcgtcaggggcctcgcgggccgctgcgctgacgctggaaggggcctggcgctcgcgctggaggcgttcccctgcgacctacagcagcagctcgaccagttcatggacggcaggagctatggcaggagtatgaacctcttctgtgttactgccgtgatactggaattaagcttattgcttgtggaacaccactggaggtgaaaagaactgtccaagcagatgggattagagctctcaaaaaagcagaaagagaagcatatgcccctccagcaggctcaggattcatctctagtttcatgtttggctcaggaaggtcattgatagacaagatctcatcgattgacgactctatgtttggctctacctcgtatctatcagaacaggcaagagtagttgatgattataccatttcccaggttattacgagagaacttagtgatggagatgtttcacggttgctaattgttgtgacgggtgcaagccatgttatgtacgggccacgaggaagtggtgttcctgggagaatatctaaaaaggtgccaaagaaagaccaagttgtggtactgcttgatcctgaaagacaggttataaggagggaaggtgaagtccccattgctgatttcttatggtattcagcggctaaaccttgcactagaaattgttttgaccgtgccgaaatcgctcgagtgatgaatgctgctggtaggaggcctgaagctttacctcaggatcttcagaaaggactagatcttggtgtagtttcacctgaaatattgcagaacttttttgacctcgagaaataccctgttatgacagaactgattcatcgatttcaaggtttcagagaaaggctgttggcagaccctaaattccttcaaagattagccattgaagaggtcatatcaataacaaccactctactagcgcagtatgaaaggcggaaagggaggttctttgaagaaattgactatgtcctcacagatactattagagggtctgttgttgatttctttacagtgtggcttcctgctcctactatttcagtccttcagtatgctgatgatggttctggttcgagtttggagtttgtcaaaggccttttaggatcattgccagataatgcattccaaaagaacatcttgggccaggattggagtatcaagcaaagaattgcagcagtgttggttggtggtctgaaacttgccagtgttggtttcatttctagtgttggggctggggtttcctcagatctcatctatgctgcccgaggaattgtgaaaccttcagaaaatgtggaaacgggaaggaagagatctcccatctggaagtcagcagctgtttatagttgctttcttggaacatcagcaaatttgcggtatcagattattgctggtctagtggagtatcgactaggagagagcctggtgacatactacaaccaaccccttattgctggtttgttgtcattcgtggctaggacactgaactcatactggggaacacagcaatgggttgatcttgcgcggtacactgggttacagagaagcgaggaaaagcctcctgctgaggccactatgccacctgattcagcacatttggagggttgtacgacggaaggacatgattttgatgacagcagcaataacaccaacaaatcgactggtccgagctagtgatttgattacttcacagtggctgcagatcacatggcctattttcatagacaatgaaagtggctgccttcctgctcttgggatcacaaggaagcggaaatttgaggaaatattagtcacaaaaatttgttcagattctttttcagcgttaccacaagagtgcacatacagttctcgtttctattcgttagagtaagtattgttttgtacaatctacatctgtaagaactgcagcacctaaaggatgttcagcaatgagggctttaacttgtcgcattgcatgctcgtaagcatgtttgttgcggctttaatcaagctgtttgttgcggctttaatcaagccgcgactacggcttctacaatattttgtctctatagattgcagctgcagcagtccgaaagtgtagggcataaaaaatcccctctcaaataaaaaatttgcagcac

SEQ ID NO: 73311 - DNA, 1975 bp, Zea Mays
ccgcacgctgccgctacggagtacggacagccagagccgaaaaaccgcagcagcgcttacagtcacgggcgcccacctgggcaggacaggagtacaggacactgccattgcccttccccgccgcgcccccccccccaagaccccagtactccactaacactcatcagcgcgccgcggggcgcgggcggacgtgcggcgctcctcggacggccgcgatggcggaagtggcggcgcggcgcgccgtcggcgtcccagcagggggcggcggcgaccaggcgaaccttgcggcggtggcggcggctatgcgggggcgcggcgaggtggacacgtcgtcgccgttccagtcagtgcgccaggccgtcgacctgttcggcggcggggctgccgccgtctcccagtggcgccacccgcaggctccgccgcgcgtccacctccgcccagaggaagaagaacttatgaaagttgaggaacaaacagtgaagctggagatggaactgttcgttaaggaaaaggaaacatttaaggtcttgaaggaactacaggaaacaaagcaggttatagatggcttgaaaatacaaatagagaaggtaacatgggaggacacaaatgctgcaaaaggccatgctgatacagggatggtacatccacttcctgctgtcgaacaaaataccgagccaccagtccagagcgcaaaagagccagatacagaaggagaaaggctcgcttgagaaaacccgcgaaaggttacaattcaacctggggaaggcttcatcgttagaagcagatttgacgaaaactgtcgcacggctgcaagcagcaaaagctccacagcctgtccttgagccttctgaaatctggttgcagatgaagcacctgaatgctgacaaggcgaggcacaagaaggcgtcagaggatttgaggaacgagatctgtgagctgacagctgcaatcgagcacacgaggtctaagacgaagactctgcagttcagaatcctcatggctgagaaactgaaggaagcttcccaacgtggagaatctgttgctcttgcagagatggaaaaactgagcaacgggcgggacccgaacggcagtacttctgatgctgtcacactctccgttgaggagcactccacgctcgtgctcaaagcgcaagaagcggatggtgccgccaggaagaaagtggacgcggcaatgcaagggctcgatcaagcaaaccggtgtaagctcgaactcttggaaagagtagaggaagcaatggcggctgtcgagacgagcaggaaggctctggaggaggcccagaggagggaggagtcagagaccaaggcaaagctagtagccgaagagacgctccgaaagctgcggtcggaccaaataatccagaactggcgcccgaccaacagcagctccgtaaaattcaagaacacggcgctgctggcgccccggagagcagcagcgggcgctgggatatacgacgtgaacggcctgagcctggtggccgccgggccgaacagcgtgaagacggtgtccatcgggcagatcctgagcatgaagctggaccgcgagctcgagatgacgaggacgaccacgacgagcgcgaggaagaagaaggtctctctcgggcagatcctgagccagaagtacgagatgttctccccgctgcggatcgaccacgactgtgcctcgcacaggcagttccagcagccgaggaggaagaggatgggcttcgtcgtgtacgcgctgctgctcgcgcggcagaggcataggaggcggaaggctgcctcctgcactcgtggtggcttgagctagctagctagtttggatggtcggtgggtgctcagccgcgtcgtagtcgtttatatgcttttattaagagataagcgatcggaataatcgttatatttgtaatatagctagttctatgaacaaaaagttggtatttttagcagctactcgccttgctctggccacgttgatt

SEQ ID NO: 73312 - DNA, 2683 bp, Zea Mays
cgcctgccgcagccccattcccgcgccccgacctttcctgtaccatccccgctggcccgctcgctctcttccggcctcgcgttccgtctccgaagccgcaggcagccatggacgtcaacgaggaggcaatggcggcgcacaagcgcgccttcctcgacttcctcgaccaagacgtcgggaagggggtttacatgcaggccgtccgcgacatggtccagaacaagcgccaccggctcatcatcggcatggacgacctccgcaaccacaacctcgatctcgcccgcagggtgattcggagccccggggagtatatgcagcctgcgtcggacgcggtttcggaggtagcgaagaaccttgatcccaaatttttgaaggaaggggagcgggtgatggtgggcttctcgggtccgttcgggttccacagggtcacgcccagggatctcatgtcctccttcatcggcaccatggtctgcgttgagggcatcgtcaccaaatgttcattggtaaggccaaaagttgttaagagtgttcacttttgccctgtgactggggcctttctctcgcgtgaatatagagacatcacttcttttgtaggcttgcctactggctctgtttatccaacaagggatgacaacggcaacttgttggtcaccgagtatggaatgtgtgaatataaggatcaccagacattgtccatgcaagaagtgcctgaaaattctgcacctggacagcttccaaggactgttgatgttattgtagaagatgatcttgtagattgttgcaaacctggcgaccgtgtctcaattgttggtgtgtacaaggctctaccagggaaaagcaagggaagtgttagtggtgtgttcagaactgtccttattgcaaataatgtgtcgcttcttaacaaagaggcaaatgcacctgtgtatactcgggaagatttgaagcgtatgaaagaaatatcaaggagaaatgacacctttgacttactgggaaactcacttgctccgtccatttatggccatctatggataaagaaggcagtagtactattgatgcttggtggtgttgaaaagaatctaaaaaatggaactcacttgagaggagatataaacatgatgatggtgggagatccttcagttgccaagtcccagctcctaagagctgtcatgaacattgctcctttggctatatcaacaactggcagaggttcatctggcgttggattgactgctgctgtgacttctgatcaagagactggggaaagaaggcttgaagctggtgccatggttcttgctgatcgtggtgtcgtctgcattgatgagtttgataaaatgaatgatcaagaccgagttgctattcatgaagttatggaacagcaaactgtaaccattgcaaaggcaggaatacatgcctcgctaaatgcgagatgtagtgtgattgctgcagcaaatccaatatatggaacttatgatcgttcattgactccaacaaagaatattgggcttcctgattcactgctttcccgttttgatttactttttattgttcttgatcaaatggatcctgagattgaccggcaaatttcagaacacgttgcacgaatgcatagatattgcactgatgatggaggagcaaggtctcttgataaacagggatatgctgaggaagatgatggtgatgctaatgcagccatctttgttaagtatgatagaatgctccatggtcaggatagaagaagaggaaagaaagccaagcaggacaggctaactgtcaaatttttgaagaaatatattcattatgcgaagaaccttattcaaccaaagctcactgatgaggcatctgatcatattgcgacttcatatgctgagctcagggatggtagtgcaaatgcaaagtctggtggaggtacacttccaattacagcaaggacattggaaaccataattcggctatcgacagctcataccaagatgaaactgaggcatgaggtactgaaatctgatgttgaggctgcattgcaagttctaaattttgcaatataccacaaggaattgactgagatggaagagcgagaacagagagaagcggagatgaaacagcaagctgatcacgatgcagatgcaactggtggcactgtggatggacatggaagctccggaaatgatccaatggatgtggatgttgggaacacttcaaacgatcagaatgttcctttagcgagaatggaagcatttgaagcatttctgggtcagcatgtgttggcaaaccatatagatcaaatgtcaatcgatgaaatcgagcaggtggttaatagggaatcaactgcaccttacaccagaagccaagtagagtttattttggaggatgcaaacagggtaatgatacgagatggtgttgttcgaatcatataactgccagtctaccgggacgtttacctgtggattccctggtcatgctggatcaagttggctgtctgtctgtaaccaacttacctgttgaagtatttgtttgttaatttttgtcaacaaaggattgggacaatcattggtccccttggtacttctagttcatctaatgtattgcttacctgacctagtgatattagtacctagtcatatctatttgtgttcgagttaatttgcaactcgtttgcaatggcattctgacgagtaaaattcacaca

SEQ ID NO: 73313 - DNA, 2175 bp, Zea Mays
caggatacagcctacaggcttgggctccacgcgacgcgaccacgctactcctgcacggctgcactcgccatccgtccgtccgccgacaacacgagacgtcgcgacactcacccgtccggccgtccgccgaccgccgtccaggccatcctgctgttcgccgaccgccgtccaggttgtcctgctgttcgccgaccgccgtcgaggccgtcctgctatcgccaacactgctgtccaggcgtccaggcgtcgttctccagccgtcgaagccgtcccgtcggtccagccgtccaggcgtcgaagacacggccgtcgaagtcgtcggtccagccgtccaggcgtcgttctccagcctccaggctccatctgccgtctgccgagccgagtgccgaagacacggccagtaccgcagccgcagtacgtacgttagttgagactcgatatgtctcactctggaacaggacccggaggaggaggagcacgccattcagactcaatgcctgcggagtcagagactgggaacaacaacctaggtttggaaagcatattgccactgcctccacagccgcagcgaccaccactacctccttctgtgagaggcagcagcagcagctctgtttcagcaggaaacaagagaaaaacaagtggaagctctatgggtgcaccaattgttcagtcgtcatcttcagcacaagcagctgaaaataaagatgcaaataaattggttgtcgcagacacaagtaatactggtactagagctgtagcttctgttgatatagcgggccttgatgatgatgaggaggacataccagaggatatgactggaacaggaaagagacaaaagaggcgcacatctattgtatggaagtattttaccaaagaaactgtggaagtggaggtgaatggcaagaagtttgagcagctttgggcctactgtaactttccaaaatgtaagcagagatatagagctgagtctaatcatggaacaaatgcattccgcaaccatctgaggtcacatcatagtattgtcaaaggacagctagaactaaaggcagaaaaggataatggaaaagatgtcaccactattcagccttttaggtatgatccggatgctagtcttagaaaattctatttagcagtaatcatgcatgagtacccattcaacattgttgagcatgattattttgttgatttcatcaagtcgttgaggcctaattttgccttcaagtctagagtgactgctaggaaagatatacttgacatatactttgaagaaaaagaaaaattgtatgcccaattgaaaaatgtaacatgtcgctttagtgcaacaatggatatttggacatcatgccagaacaaatcatacatgtgtgtgacattgcactggatagatgattcttggcatattcagaagagaattgtggggttttttcatgtagaaggaaggcatactggtattaagttggcacagtgctttactgaagtgatggtaaaatggtttgctgagaagaaattgttttcattgaccttggataatgcatcaaataatttagtggcagtcaaagacattattcaagatcttagagtgaatgcttcttcttgtttgatttgtgatggaatattctttcatattagatgtgcatgccacatactcaacttggttgctagagatgggcttgctgttatttcaaaagcactggaaaagataaaagatttggtactaactgtgaagggctctcccttgcaatgggaggaacttatgaagcgtgctactgagtgtggattggatacatcaaagggaattcaactagatgtttccacaaggtggaattcaacttacatgatgctaagggatgcattgcactatgtgtgtttgatgtccgagatagtgattcccaattcatgaatgaagatggcgagctgtgaagaaatcttgcaaatgtgtgtttgatgtcatggactcatgaagacattgaagaacttatattgtgtccatatgtgtgtgtccgtgtgtgactgagactattattttgttaactattattgtgtctggactgaatttatgtaagtttacttgttggatttggatttgtgctatgtgctcatgtactattgtggacttattttcttgttgttcaatggctatgtcggtggacttattttcctgttgttcaattg

SEQ ID NO: 73314 - DNA, 2110 bp, Zea Mays
caggatacagcctacaggcttgggctccacgcgacgcgaccacgctactcctgcacggctgcactcgccatccgtccgtccgccgacaacacgagacgtcgcgacactcacccgtccggccgtccgccgaccgccgtccaggttgtcctgctgttcgccgaccgccgtcgaggccgtcctgctatcgccaacactgctgtccaggcgtccaggcgtcgttctccagccgtcgaagccgtcccgtcggtccagccgtccaggcgtcgaagacacggccgtcgaagtcgtcggtccagccgtccaggcgtcgttctccagcctccaggctccatctgccgtctgccgagccgagtgccgaagacacggccagtaccgcagccgcagtacgtacgtgacccggaggaggaggagcacgccattcagactcaatgcctgcggagtcagagactgggaacaacaacctaggtttggaaagcatattgccactgcctccacagccgcagcgaccaccactacctccttctgtgagaggcagcagcagcagctctgtttcagcaggaaacaagagaaaaacaagtggaagctctatgggtgcaccaattgttcagtcgtcatcttcagcacaagcagctgaaaataaagatgcaaataaattggttgtcgcagacacaagtaatactggtactagagctgtagcttctgttgatatagcgggccttgatgatgatgaggaggacataccagaggatatgactggaacaggaaagagacaaaagaggcgcacatctattgtatggaagtattttaccaaagaaactgtggaagtggaggtgaatggcaagaagtttgagcagctttgggcctactgtaactttccaaaatgtaagcagagatatagagctgagtctaatcatggaacaaatgcattccgcaaccatctgaggtcacatcatagtattgtcaaaggacagctagaactaaaggcagaaaaggataatggaaaagatgtcaccactattcagccttttaggtatgatccggatgctagtcttagaaaattctatttagcagtaatcatgcatgagtacccattcaacattgttgagcatgattattttgttgatttcatcaagtcgttgaggcctaattttgccttcaagtctagagtgactgctaggaaagatatacttgacatatactttgaagaaaaagaaaaattgtatgcccaattgaaaaatgtaacatgtcgctttagtgcaacaatggatatttggacatcatgccagaacaaatcatacatgtgtgtgacattgcactggatagatgattcttggcatattcagaagagaattgtggggttttttcatgtagaaggaaggcatactggtattaagttggcacagtgctttactgaagtgatggtaaaatggtttgctgagaagaaattgttttcattgaccttggataatgcatcaaataatttagtggcagtcaaagacattattcaagatcttagagtgaatgcttcttcttgtttgatttgtgatggaatattctttcatattagatgtgcatgccacatactcaacttggttgctagagatgggcttgctgttatttcaaaagcactggaaaagataaaagatttggtactaactgtgaagggctctcccttgcaatgggaggaacttatgaagcgtgctactgagtgtggattggatacatcaaagggaattcaactagatgtttccacaaggtggaattcaacttacatgatgctaagggatgcattgcactatgtgtgtttgatgtccgagatagtgattcccaattcatgaatgaagatggcgagctgtgaagaaatcttgcaaatgtgtgtttgatgtcatggactcatgaagacattgaagaacttatattgtgtccatatgtgtgtgtccgtgtgtgactgagactattattttgttaactattattgtgtctggactgaatttatgtaagtttacttgttggatttggatttgtgctatgtgctcatgtactattgtggacttattttcttgttgttcaatggctatgtcggtggacttattttcctgttgttcaattg

SEQ ID NO: 73315 - DNA, 2150 bp, Zea Mays
tttttcttccagccatccgtccgtccgccgacaacacgagacgtcgcgacactcacccgtccggccgtccgccgaccgccgtccaggccatcctgctgttcgccgaccgccgtccaggttgtcctgctgttcgccgaccgccgtcgaggccgtcctgctatcgccaacactgctgtccaggcgtccaggcgtcgttctccagccgtcgaagccgtcccgtcggtccagccgtccaggcgtcgaagacacggccgtcgaagtcgtcggtccagccgtccaggcgtcgttctccagcctccaggctccatctgccgtctgccgagccgagtgccgaagacacggccagtaccgcagccgcagtacgtacgtagtggcgtattggcatttgattgtttgcagtagttgagactcgatatgtctcactctggaacaggacccggaggaggaggagcacgccattcagactcaatgcctgcggagtcagagactgggaacaacaacctaggtttggaaagcatattgccactgcctccacagccgcagcgaccaccactacctccttctgtgagaggcagcagcagcagctctgtttcagcaggaaacaagagaaaaacaagtggaagctctatgggtgcaccaattgttcagtcgtcatcttcagcacaagcagctgaaaataaagatgcaaataaattggttgtcgcagacacaagtaatactggtactagagctgtagcttctgttgatatagcgggccttgatgatgatgaggaggacataccagaggatatgactggaacaggaaagagacaaaagaggcgcacatctattgtatggaagtattttaccaaagaaactgtggaagtggaggtgaatggcaagaagtttgagcagctttgggcctactgtaactttccaaaatgtaagcagagatatagagctgagtctaatcatggaacaaatgcattccgcaaccatctgaggtcacatcatagtattgtcaaaggacagctagaactaaaggcagaaaaggataatggaaaagatgtcaccactattcagccttttaggtatgatccggatgctagtcttagaaaattctatttagcagtaatcatgcatgagtacccattcaacattgttgagcatgattattttgttgatttcatcaagtcgttgaggcctaattttgccttcaagtctagagtgactgctaggaaagatatacttgacatatactttgaagaaaaagaaaaattgtatgcccaattgaaaaatgtaacatgtcgctttagtgcaacaatggatatttggacatcatgccagaacaaatcatacatgtgtgtgacattgcactggatagatgattcttggcatattcagaagagaattgtggggttttttcatgtagaaggaaggcatactggtattaagttggcacagtgctttactgaagtgatggtaaaatggtttgctgagaagaaattgttttcattgaccttggataatgcatcaaataatttagtggcagtcaaagacattattcaagatcttagagtgaatgcttcttcttgtttgatttgtgatggaatattctttcatattagatgtgcatgccacatactcaacttggttgctagagatgggcttgctgttatttcaaaagcactggaaaagataaaagatttggtactaactgtgaagggctctcccttgcaatgggaggaacttatgaagcgtgctactgagtgtggattggatacatcaaagggaattcaactagatgtttccacaaggtggaattcaacttacatgatgctaagggatgcattgcactatgtgtgtttgatgtccgagatagtgattcccaattcatgaatgaagatggcgagctgtgaagaaatcttgcaaatgtgtgtttgatgtcatggactcatgaagacattgaagaacttatattgtgtccatatgtgtgtgtccgtgtgtgactgagactattattttgttaactattattgtgtctggactgaatttatgtaagtttacttgttggatttggatttgtgctatgtgctcatgtactattgtggacttattttcttgttgttcaatggctatgtcggtggacttattttcctgttgttcaattg

SEQ ID NO: 73316 - DNA, 2076 bp, Zea Mays
tttttcttccagccatccgtccgtccgccgacaacacgagacgtcgcgacactcacccgtccggccgtccgccgaccgccgtccaggccatcctgctgttcgccgaccgccgtccaggttgtcctgctgttcgccgaccgccgtcgaggccgtcctgctatcgccaacactgctgtccaggcgtccaggcgtcgttctccagccgtcgaagccgtcccgtcggtccagccgtccaggcgtcgaagacacggccgtcgaagtcgtcggtccagccgtccaggcgtcgttctccagcctccaggctccatctgccgtctgccgagccgagtgccgaagacacggccagtaccgcagccgcagacccggaggaggaggagcacgccattcagactcaatgcctgcggagtcagagactgggaacaacaacctaggtttggaaagcatattgccactgcctccacagccgcagcgaccaccactacctccttctgtgagaggcagcagcagcagctctgtttcagcaggaaacaagagaaaaacaagtggaagctctatgggtgcaccaattgttcagtcgtcatcttcagcacaagcagctgaaaataaagatgcaaataaattggttgtcgcagacacaagtaatactggtactagagctgtagcttctgttgatatagcgggccttgatgatgatgaggaggacataccagaggatatgactggaacaggaaagagacaaaagaggcgcacatctattgtatggaagtattttaccaaagaaactgtggaagtggaggtgaatggcaagaagtttgagcagctttgggcctactgtaactttccaaaatgtaagcagagatatagagctgagtctaatcatggaacaaatgcattccgcaaccatctgaggtcacatcatagtattgtcaaaggacagctagaactaaaggcagaaaaggataatggaaaagatgtcaccactattcagccttttaggtatgatccggatgctagtcttagaaaattctatttagcagtaatcatgcatgagtacccattcaacattgttgagcatgattattttgttgatttcatcaagtcgttgaggcctaattttgccttcaagtctagagtgactgctaggaaagatatacttgacatatactttgaagaaaaagaaaaattgtatgcccaattgaaaaatgtaacatgtcgctttagtgcaacaatggatatttggacatcatgccagaacaaatcatacatgtgtgtgacattgcactggatagatgattcttggcatattcagaagagaattgtggggttttttcatgtagaaggaaggcatactggtattaagttggcacagtgctttactgaagtgatggtaaaatggtttgctgagaagaaattgttttcattgaccttggataatgcatcaaataatttagtggcagtcaaagacattattcaagatcttagagtgaatgcttcttcttgtttgatttgtgatggaatattctttcatattagatgtgcatgccacatactcaacttggttgctagagatgggcttgctgttatttcaaaagcactggaaaagataaaagatttggtactaactgtgaagggctctcccttgcaatgggaggaacttatgaagcgtgctactgagtgtggattggatacatcaaagggaattcaactagatgtttccacaaggtggaattcaacttacatgatgctaagggatgcattgcactatgtgtgtttgatgtccgagatagtgattcccaattcatgaatgaagatggcgagctgtgaagaaatcttgcaaatgtgtgtttgatgtcatggactcatgaagacattgaagaacttatattgtgtccatatgtgtgtgtccgtgtgtgactgagactattattttgttaactattattgtgtctggactgaatttatgtaagtttacttgttggatttggatttgtgctatgtgctcatgtactattgtggacttattttcttgttgttcaatggctatgtcggtggacttattttcctgttgttcaattg

SEQ ID NO: 73317 - DNA, 2110 bp, Zea Mays
tttttcttccagccatccgtccgtccgccgacaacacgagacgtcgcgacactcacccgtccggccgtccgccgaccgccgtccaggccatcctgctgttcgccgaccgccgtccaggttgtcctgctgttcgccgaccgccgtcgaggccgtcctgctatcgccaacactgctgtccaggcgtccaggcgtcgttctccagccgtcgaagccgtcccgtcggtccagccgtccaggcgtcgaagacacggccgtcgaagtcgtcggtccagccgtccaggcgtcgttctccagcctccaggctccatctgccgtctgccgagccgagtgccgaagacacggccagtaccgcagccgcatagttgagactcgatatgtctcactctggaacaggacccggaggaggaggagcacgccattcagactcaatgcctgcggagtcagagactgggaacaacaacctaggtttggaaagcatattgccactgcctccacagccgcagcgaccaccactacctccttctgtgagaggcagcagcagcagctctgtttcagcaggaaacaagagaaaaacaagtggaagctctatgggtgcaccaattgttcagtcgtcatcttcagcacaagcagctgaaaataaagatgcaaataaattggttgtcgcagacacaagtaatactggtactagagctgtagcttctgttgatatagcgggccttgatgatgatgaggaggacataccagaggatatgactggaacaggaaagagacaaaagaggcgcacatctattgtatggaagtattttaccaaagaaactgtggaagtggaggtgaatggcaagaagtttgagcagctttgggcctactgtaactttccaaaatgtaagcagagatatagagctgagtctaatcatggaacaaatgcattccgcaaccatctgaggtcacatcatagtattgtcaaaggacagctagaactaaaggcagaaaaggataatggaaaagatgtcaccactattcagccttttaggtatgatccggatgctagtcttagaaaattctatttagcagtaatcatgcatgagtacccattcaacattgttgagcatgattattttgttgatttcatcaagtcgttgaggcctaattttgccttcaagtctagagtgactgctaggaaagatatacttgacatatactttgaagaaaaagaaaaattgtatgcccaattgaaaaatgtaacatgtcgctttagtgcaacaatggatatttggacatcatgccagaacaaatcatacatgtgtgtgacattgcactggatagatgattcttggcatattcagaagagaattgtggggttttttcatgtagaaggaaggcatactggtattaagttggcacagtgctttactgaagtgatggtaaaatggtttgctgagaagaaattgttttcattgaccttggataatgcatcaaataatttagtggcagtcaaagacattattcaagatcttagagtgaatgcttcttcttgtttgatttgtgatggaatattctttcatattagatgtgcatgccacatactcaacttggttgctagagatgggcttgctgttatttcaaaagcactggaaaagataaaagatttggtactaactgtgaagggctctcccttgcaatgggaggaacttatgaagcgtgctactgagtgtggattggatacatcaaagggaattcaactagatgtttccacaaggtggaattcaacttacatgatgctaagggatgcattgcactatgtgtgtttgatgtccgagatagtgattcccaattcatgaatgaagatggcgagctgtgaagaaatcttgcaaatgtgtgtttgatgtcatggactcatgaagacattgaagaacttatattgtgtccatatgtgtgtgtccgtgtgtgactgagactattattttgttaactattattgtgtctggactgaatttatgtaagtttacttgttggatttggatttgtgctatgtgctcatgtactattgtggacttattttcttgttgttcaatggctatgtcggtggacttattttcctgttgttcaattg

SEQ ID NO: 73318 - DNA, 662 bp, Zea Mays
gacccactggaattaattaaaagggaaacaataacctgctggctctataaacataagcagcatactgaccggcaaatgcttggcaaaaataaaccctggaaattcgtgcaagcaaaaggatccatgcaagcagaagaaagcatggaggttccagaatacagtctcggaggccctggaggacatcacagctctatactatgacgaagatcgtgacgagatctacactggcaaccggcatggccttgtccatgtgtggtcgaactgaaagccgaaatagtggcggctttcacccacagcatggtgatcttcacctgtatgtgtattaacagcttgtacctcacatggcaggggggcacgaagacggaccccccagccaccaggtacggacgtgatgcttcattgttgaggcaattcttatttatcccaccagcgtggcaagagctctcaccacataggcacccattcagaaatcagaacaccccctccccgatttgttgtaggattgacaatcgttgtgcgttttaaatatagcatgtgtgttaattttttgttgttgttgggaatgtcgattatgtcccacaactcagtcagtgagttcaagtgttacggatgtaccttgcaagtaatgagattcattcgttgagttgtgatttcgttcaact

SEQ ID NO: 73319 - DNA, 2686 bp, Zea Mays
atggccacggtggcgacgagccacccggcggcgccgtgcgtgccactggccgcgggcgtggcggctggggccgtgcgtgctggcgtcggacgccgctggtaccgagcgcgccggtgcggcagccccggtgccatggcctacgcaaggccgtggagtacgacatccagctcgagacggaggagtgcgtgcggtctgctgccgcttgcgcacagtgtaggaggcggggctggcgccacgcggtcagtggcggggcttgcggacgagcaccgggagcttgaggcggtgctcaggaagatgacgccgcccaacggccgtaccgtgcttatcttccgtgcgccatgcgggtgccctaaggacaggatggaggtctggggcgccggatgaagaagtagggtggccatgaagaacaaacagctgaaggctctcctcccatggagaaataatgagcgagggtgacagctccatcagtttctacatacacgagatattttggcgccatagaggtttgcagggcccaaattctgttttccaagtgtctcttgtgcctgctccaaaactgcctgaagatatttcccttgggcttcaattcgtagttgtagatgcctttgcacctgttgccagtttaaatttcagatcagaatcactgcaggacaactccatttatagacactacaagtgggactttgctggaccattaaaatcagtagtggacattggactccaatatttggtgtccgaagccgtagaaaataattcaagatgcttcccctcacaatcatggccctgaaccctgcacttctacaagctgtctaatgatcagcacaaaagaggctgaggtggttccgtggttggccccgggaaaccctatttgtagcagacgggcaggagaaagaagcctagaggcgagagaaaccagatgagaatggttttgcttttcaagcatgcagcttcaagattactaattgattcaatggtcaccatctgtgtcagacagaatgcacaagtgcacttaggccaacaggagtcatcagtctgccacaacacgggaggtgcgacttgcaacgaggatagcttgcaaacagaggaagaacacactccacccgttccaaatcatagttcactttagctctatcctaagttaaacttattttctgctgagttcttagaaaaaatattaacatctacaaattcaatgaaactaatttgatgtcatagatattgatgtgttttttctacaaacttggacaaaggtattgacttaggacaaagctgaagtaaacaataatttggaacagagagatcatataaaggttgaatgccatttgttgaagattgcatactcgcattaatgggaattttcatcaacgtttaaaagttcactaatagaattggtgtttgaaatatctgttttcatgtttaatttttaacagactatttgtttcttcaccctgtactaactaatgagtatgtgtgcatttcatggttcagctcaaacaatcttgttccttaatctaaaagggtaattagcttgtactccctctgttccaaatcgtaagttgtttttagtgccttaagtcaaagtttttttagctttgaccaggtttgtagaaaaatattataatacctacaatatcaaatagatacactgatacactatatactatcaaaacatattcatagtgcatttaatgacccttgtttaatgatgtagatgtttgttcatttttctacaaattagtcaaatttagacaggtatcttaggacaaaattttaaaacaacttataagttgaaacgtagggagtatataagtattacttactaactataacttttttgctaaaaaaattgggtctacaggtatacacccttgtcatcataatgaaaatgtttggtctaaaacagatccggatttaaattattttgtcattgttaaaggaggtagtaatttggaatcgtagtctttccttgtgctcttccaaagtttgggactgtgctagccaaaatgcttgagctggcccatcgttcatttaactgtctagaacaaaagcgttatcttcgtggtgtcagtaactcacctcaagttgttcatttaactgtctttgaacctggatttgcatctgcagtgcttcaccaatttgaatagtccttgaacccaggaaaagagtattatttcagtattgggattttatacaattacagagtgttaacatagtccttacttctctgcctgaggaagaacatttgtactgctcattgttgctgcggttgttccgggaatcctatcagcaacgggcgtacatcctatggttacaagttactaactcttatattgtttcattataatagtaaatatgggagttacagcttgttcttaccattcttcgatgtactggcatttgcttgagcttggaggttcttgctgagcctgtatttctgtaacacccaagaaatggtgattactgcagcagttaagaatatcatttttagcaggcgggtttctgattccaaagtacctggagatggcttttcaaatggtacaaggtgagtcctggaattcccatgagcctcatgactgtttttggagtagcttctgggtgatgaatagaaatataagaattcagctggtctctatatcttgagaaggtataagaatataatacttactctcttctccacctaattgat

SEQ ID NO: 73320 - DNA, 644 bp, Zea Mays
ctaagttttgcatcgaatgcaggtactaaaactatcttcacttcagttctataggaacaagagcagcaagctgtcctagagagaaggcagagattagttaggagtcaataatagggtcccaattccaagatttctatttgaagaacaagattgtattccaaaagaaggtattgagagccccatgcccgagccccatcacaagtacttgtggttcccgcaacacaaaaactaatcccttgccctctctcatgactcactcacattgcattattcgcaaactcatccccaatcccctcaacaagaaatccccaatcttctaccaagcagcaaaggcgacccacacctttaatttcatcagacaacacaagccaccaagaagaagaggaggaggtagagttcgcgcgaagagaccaacgactgacctccgcgccggctgttcccctgctagcggatccgctcgttctccgcctgcgcccgtcctcagtagtagcttcgatgggagtagaacgacgaaagaagaagaagttacgcgggcaggtggctggattcttcacttgctggcggtcatcgtcgcctgtttccattaaatggtggagagatataatacgtatattttatttggtcccggcgcaaatatccaacca

SEQ ID NO: 73321 - DNA, 1511 bp, Zea Mays
tgcagtctactccagcctcaccgcctcaggtcggtcctacacggtcccgttctgcctggtgcctgcaacctgccttttcttcttccgtcgccacccagcgtgctctctctccctctttctctctctctcgtggcggcgcctgggcagccgtcgctgccgcctgcgctaggtgccaggtcttcttcgggcccttcgccggcgacgagtaccaccagattcagatggtgctgtcacaggcaagcctgatcggacctcgagcctgcagcgacaggggagcatcctgatgcctccgcagttgagcaagaagactgttgacgaggtgtggaagggcatccagggtggaccagagaccagtactgtggtggatggtctgcagaggcgagagaggcatccaacacttggggagatgacacttgaggacttcttggtcaaagctggggttgttactgaaggacttgtgaaggattcagctgattttccaagcaatatggatacagctggcagcagtgttgttgtggctgctgcttctagtttgaaccctggagcacagtggttgcaacagtaccagcagcaagttttggggtcccagcaattgagtttggcaggttcatacatggctagtcagttgcgccctcagccattgtctattgctacaggtgctactttggattcaatttactctgatgaccagattacttcgccatcatttggtgcactttcggaccctcagacacctgggcgcaagcgtggtgccttaggggaggtagtggataaggtggttgaaagaaggcagaagaggatgataaagaatagggaatcagctgcgcgatcaagagcgagaaagcaggcttatactaatgaacttgaaaacaaggtattccgtctagaagaggagaataagaggctaaagaaacagcaggagttggatgagatactgagctctgctcctcccccagaacccaaatatcaactcaggagaacgggttcggctgccttttgagtttcggcgctgacaatgctcatagtgatttttgtacattatacaaggattctactttatatggtttccttccttttgtattagaaacatttgatagattgagggtatagctttttcccggcccggtaggtcagtgtatgtaggtcgctagcaagctgtagcatgtcctggcggatcatttccttggtgtctgtcagtgtgtacatcttctagacacatgtctaagtctgagagcttccttatacgagaaggtattcaggtatgtgttgcgcaggtgtctcctgctgttctgtttcaacggtgcaggctattttttgtgaggtcatcattttgatcacacatttgtgaggtcagaatattgcaagcgctcctcttaacgtctgtgtcaaatcgttcacaggatctatgtatcttaacttcttaacacaagattataatcttgtgactaacgtatattttgtagagctaatttaagttaggtcataataatgattattgtttgggagatcaa

SEQ ID NO: 73322 - DNA, 1813 bp, Zea Mays
tgcagtctactccagcctcaccgcctcaggtcggtcctacacggtcccgttctgcctggtgcctgcaacctgccttttcttcttccgtcgccacccagcgtgctctctctccctctttctctctctctcgtggcggcgcctgggcagccgtcgctgccgcctgcgctaggtgccaggtcttcttcgggcccttcgccggcgacgagtaccaccaggttgtacatgtatacacccatgtgctttactgggtcggaccctactcatcctccacactaaggccatctccatagactgcactgtttagactccactgtttagagagtggagatagggagtgagatagagagtggaatagggaggatgctggagatagcctaaggttgccactgagtgtgtgcatgattcagaggcaatgtcatcacaaactggaggtggcaaagagagtgacgccggccctgggcaacacaggcagatgcaaagtttggcaagacaagggtctttatacaaccttaccctcgatgagatggtgctgtcacaggcaagcctgatcggacctcgagcctgcagcgacaggggagcatcctgatgcctccgcagttgagcaagaagactgttgacgaggtgtggaagggcatccagggtggaccagagaccagtactgtggtggatggtctgcagaggcgagagaggcatccaacacttggggagatgacacttgaggacttcttggtcaaagctggggttgttactgaaggacttgtgaaggattcagctgattttccaagcaatatggatacagctggcagcagtgttgttgtggctgctgcttctagtttgaaccctggagcacagtggttgcaacagtaccagcagcaagttttggggtcccagcaattgagtttggcaggttcatacatggctagtcagttgcgccctcagccattgtctattgctacaggtgctactttggattcaatttactctgatgaccagattacttcgccatcatttggtgcactttcggaccctcagacacctgggcgcaagcgtggtgccttaggggaggtagtggataaggtggttgaaagaaggcagaagaggatgataaagaatagggaatcagctgcgcgatcaagagcgagaaagcaggcttatactaatgaacttgaaaacaaggtattccgtctagaagaggagaataagaggctaaagaaacagcaggagttggatgagatactgagctctgctcctcccccagaacccaaatatcaactcaggagaacgggttcggctgccttttgagtttcggcgctgacaatgctcatagtgatttttgtacattatacaaggattctactttatatggtttccttccttttgtattagaaacatttgatagattgagggtatagctttttcccggcccggtaggtcagtgtatgtaggtcgctagcaagctgtagcatgtcctggcggatcatttccttggtgtctgtcagtgtgtacatcttctagacacatgtctaagtctgagagcttccttatacgagaaggtattcaggtatgtgttgcgcaggtgtctcctgctgttctgtttcaacggtgcaggctattttttgtgaggtcatcattttgatcacacatttgtgaggtcagaatattgcaagcgctcctcttaacgtctgtgtcaaatcgttcacaggatctatgtatcttaacttcttaacacaagattataatcttgtgactaacgtatattttgtagagctaatttaagttaggtcataataatgattattgtttgggagatcaa

SEQ ID NO: 73323 - DNA, 1755 bp, Zea Mays
gcgtcctcgtctaatcaatctccgcctccctgcctccataccctgaccggaccccgatcccgccggcgtctcgcggaatcgcggcggtcaaagcctatacgccaccccacctcacgtcgcgccgcatcgccgcggtttccgcgtgctagtgctctcgggagctcggatcagaggggcgggctagggttcgccaatcgccagcgtgggtactgccgtcgggcgccggcggccgagtagtacgaggagagatggacgcgttcctgcacaggctcaagcggctggacgcgtaccccaaggtgaacgaagatttctacaagcggacgctctccggaggcatcgtcacgctcgtcgccgccgtcgttatgctgctcctcttcatctccgagaccaagactaagttagtcgtggacacatcaagaggggaaaggctacgagtaaattttgatattacttttccgagcattccttgcacactcctcagcgttgatacaacggatattagtggagagcagcatcatgacattaggcatgacatcgagaaaagaagattaaattcacatggtaatgttattgaagcaagaaaagaaggcattggcggagcaaaggtcgagaggccgttgcaaaaacatggaggaaggcttgacaaaggtgaacaatattgtggcacgtgttatggtgctgaagagtcggatgagcaatgctgtaattcttgcgaagaagtcagggaagcatataagaagaaagggtgggctctaacaaatcctgacctaattgaccagatgtcagtaaagttgctggaaattttcacttcgccccaggcaaaggattttatgaatcaaacatagatgtgcctgagctgtcattacttgagggtggtttcaacattagccacaaaataaacaaactgtcctttgggacagaattccctggtgttgttaatccacttgatggtgctcagtggacacagccagcttcagatgggacataccagtatttcataaaagttgtccctacaatatacactgatattagaggacgcggtattcattcaaaccagttctcggtaacggaacattttagagatggaaatgttcgtccgaaatcccaacctggagtatttttcttctatgatttctcacctataaaggtgatattcacagaagaaaatagatccctactccactacctgacaaacctttgtgctatagtgggaggtgtgttcaccgtttctggtatcattgactcgttcatataccatggacagaaggcgctcaagaagaaaatggagttaggcaaatacagatgatcaacttggaccttgtactggccccgtcgtttccaaattttgaggcatgtaaggagcttatatgcctgctaaacatgacgagtaccacttaagtcggagactgcaaggccatcaaactgatgttattgcacattagctgatcagataacttgtaaaatgacaaggaatagcctggtctgaggggtgggtggcggtgtgtgtgggtgtgtgctttgatgcctatcattgttgactgttgttgaatgacatgtttgaaggtggataggtcagatcacagaatgtttctcatgaaagtttgttcaaggaaacagcttcactcatggtgtcacccatctttctaactttgttcattggttatcgccgctctttattatattgctttacacctaatgaccttagaggattccgttatatcattttatttccagttgaggtatccagtaaatata

SEQ ID NO: 73324 - DNA, 1729 bp, Zea Mays
gcgtcctcgtctaatcaatctccgcctccctgcctccataccctgaccggaccccgatcccgccggcgtctcgcggaatcgcggcggtcaaagcctatacgccaccccacctcacgtcgcgccgcatcgccgcggtttccgcgtgctagtgctctcgggagctcggatcagaggggcgggctagggttcgccaatcgccagcgtgggtactgccgtcgggcgccggcggccgagtagtacgaggagagatggacgcgttcctgcacaggctcaagcggctggacgcgtaccccaaggtgaacgaagatttctacaagcggacgctctccggaggcatcgtcacgctcgtcgccgccgtcgttatgctgctcctcttcatctccgagaccaggtcatatttttattcgtcaacagagactaagttagtcgtggacacatcaagaggggaaaggctacgagtaaattttgatattacttttccgagcattccttgcacactcctcagcgttgatacaacggatattagtggagagcagcatcatgacattaggcatgacatcgagaaaagaagattaaattcacatggtaatgttattgaagcaagaaaagaaggcattggcggagcaaaggtcgagaggccgttgcaaaaacatggaggaaggcttgacaaaggtgaacaatattgtggcacgtgttatggtgctgaagagtcggatgagcaatgctgtaattcttgcgaagaagtcagggaagcatataagaagaaagggtgggctctaacaaatcctgacctaattgaccagatgtcagtaaagttgctggaaattttcacttcgccccaggcaaaggattttatgaatcaaacatagatgtgcctgagctgtcattacttgagggtggtttcaacattagccacaaaataaacaaactgtcctttgggacagaattccctggtgttgttaatccacttgatggtgctcagtggacacagccagcttcagatgggacataccagtatttcataaaagttgtccctacaatatacactgatattagaggacgcggtattcattcaaaccagttctcggtaacggaacattttagagatggaaatgttcgtccgaaatcccaacctggagtatttttcttctatgatttctcacctataaaggtgatattcacagaagaaaatagatccctactccactacctgacaaacctttgtgctatagtgggagaaggcgctcaagaagaaaatggagttaggcaaatacagatgatcaacttggaccttgtactggccccgtcgtttccaaattttgaggcatgtaaggagcttatatgcctgctaaacatgacgagtaccacttaagtcggagactgcaaggccatcaaactgatgttattgcacattagctgatcagataacttgtaaaatgacaaggaatagcctggtctgaggggtgggtggcggtgtgtgtgggtgtgtgctttgatgcctatcattgttgactgttgttgaatgacatgtttgaaggtggataggtcagatcacagaatgtttctcatgaaagtttgttcaaggaaacagcttcactcatggtgtcacccatctttctaactttgttcattggttatcgccgctctttattatattgctttacacctaatgaccttagaggattccgttatatcattttatttccagttgaggtatccagtaaatata

SEQ ID NO: 73325 - DNA, 1742 bp, Zea Mays
aacaagtctacattttttataataaaaacagacaagtatgtacaattacatatatcataagcaatctaaatatttaaatttagatactcaacactgttgaaaaacagtaatttaaatgagcacaatgttcgtctgattataattgtagaaaatcagagacaaaaaataataaattttggagttctaaatggcctatgtggtccaaccaagccaagacagcccattagggccatcttagcaaagccataaggggtggcggctagggttagaaaccctaaccggccacccaaaccaaccggcggccagagcacggcccctggcggtgcaaccccacgcggacgcggcctccggcggctctgagccaggcggccatcggctccgacggcgcacggcctcgtgcggcctccggtggtgcgtgggcggcctgggcgcggccagccctagccacggcatggcggtcgcggcctcaggcgtagatgtggcggcgtgcggccctcggcctagaagcggcggcgcggggcacgacaccctggcggcccgggcgcgcggctcccccggcggcacgagcgcacaggccctggcggcgccggccccgacgcggttgcagcgcgggggtccagacccggcggcacctgcaccggcgcgtgggcgggcacggcagcccggcctcgtgcggctccgtccccgacgcaggcgcgggtgtggtggcccggcagcgcgggcgcgatggcctcttatcaggttgggccccggtgcgggctcagcctccggcgcgatgcctcagcaccggcgtgtgtgggccccgcggtcccgtcgaggacgcagacttggcagccccatcggcggtgctggtagccccagcgtggggcgcgacgatcagccacgacacaggattcgggtgtgggtgcccgatcccagcggactcccgcgatcctggccgcgcgctggtcaggtgccgcggacgcgattgacgtctgtgcagcgccacggccaccagcgccttgacttccaactgccccggtgcatcaatcgagcacaagaaattttaagaagcagcagagtatcctcctacaagcatgcaagcagacagcaaagcctagtgcgtctactcctacggaacttacacttttagtgcatccaaagcagcagagtatcctactacaagcatgcagcggcgtgaggatctccgattccctggcctcgtcttgctgttcgtcgatggagagcatgtgtcttcctgttgattctagaggcccagccctccaattttcttcaacagcgagcgtttcgttttctccattctcgcgtgagcagtgctgataacgtgccgtaactcagtgaaaacaagattcgagagaatagtgtaaatgacagttgtagatctttattgcagagattctggtttatatacatgtagatacagtgtctcctaaagggtgtgtcctttgggagaaaattgtgtgtcctttggaagaaaattgtcagggaagagatcgtcggggaagagggttgatcacatgacaatatatgacaatattttgtaacagaatcaaccatggcgtgaacagacctggcggggcccagctgacgggccgagacatgggcataggcccacttgcacgctcagtcggcatgggcgaccatgcccctcaccgatcgcggtggcaagggccatagcgcagccttgtgtgtccccgtcggatcaataatgaacaacgctacacacaaaccatccagccgca

SEQ ID NO: 73326 - DNA, 4942 bp, Zea Mays
gagcgttgctgtaagcaaaattaatccttgagctgcatcccaaggaaaaaataaatgtgtgctgcagtaatcagcacatgataagccctattttacagtccggtatacttttgtaaacctactgctttgcatagtttctcagtgcatgatgtgttggcaaagtacttctaaaccaaagattcaccaaacaaagaactcgaaaattccaatataattgttggattctttttagccccttactccagtagttgttttctaccataagttgttttctacaacacatgagaatcagaagatacaacaagttagtgcaatcgagaaaacttggcacccatacaacaaagagaccctgctactacagaagatcgtccgaaaggcagattttcgtactaatttccaacgtagaggatcaagaggaacgccacttggatgtgaagcactagttgtgagagcaagattaggatgctctcgcaacttggcactactcagtgcatgcaccaatggacaagaaccattaggtttttctcacaactctgacgcgctatttccaatcagaggtctcaccaaagctatccttggtaaagcacgcatcattgacactctattgagcaaaggcattttgctctagtgaagaagaatgtcaggtccaaaaggatttatatagacaatcaatcatgcatgggggctgaaagcaataatggagacaaatcagatccatcaaaaaataggaaaaggcagagtcgcgggtacaaggtacatattgcatggaaaaacaataatggaaggcatatcagagagagaatcagatgacagatttcatatcaacaaagtaatgagacagacacatccgatacaacaataaaagtccaaaaaacattgataagtgttgcagaacatcaacactaacctcgacgacaatgcatcaaggttcgtcgaagaggttaatcgaaggagggcaatgtgtcatctttggagaagagcgcacaagagagtgagcaagactccgattagatgtgggattggaagagcttccggaggcttaagacaaatataccacctccgacggcctaccaagatatattctagtcccactaatgatcacctaacctccaatactggaacaacccgaataacggatagatgaacaagagtgaccgactgaacaggcatattcacccattagaaggattctcctagctacagctgataactattcgactttgggttgaaccctatcagaagaattcttctagctacaatgctactgcaactacttcaactgagcctaggggctcaagcctctcggatattataatattcattatgggaacactaaagtgtgtgccaacaacgagttgactatacaactggtatatgtttcaaaaaactcgaccggggaggaaaagaccgtcctcccggtattatattaagaagagaccaaaacatggtcccagccaagaaaattcctgaaccctggcccccatcactagcgggtcatcaccgcccactctgcacctgcccagccggagggtggcgcgcaggacgtaacccgggagcgggcggggcacaacagggggggggcttaaccaatcccgaaatcaacccccgaggaggatcgaactcggggcctggaggtgctactcggaagccttaaccattacactagaggcccttttcgcaccggtagatgtttcaaaccatcaaagtacatttatagccaggaaccgccacaagcaaacaacaacatcaatcttgtgacaagccgatacatttattcgtcggcaaccttttcaaagttgcatttatgagacgacaacaccttttttattttggacagatacaaggacaaaacttggtgctcccctgacctcgcaaaacaacaaagtacctcaatgatgaatggtacttcagaatcagaacaataaatgggaaacatttcatccggtacagatacacttccacaaacaacatatatatcttacaactcgtcaatgacatgcaacactataatccacttggactacgttccctaaggactaaaaggacatatacacaatctcggagatgatttttttccaaaatacacctccaagcttggggctacaaggggtaacacctaaacggtttttttttctttttagattctgtagaagatctttgatctaattgctactcaatacaactcgaagttcaaggggtacaccatatggtgtgcatctagtgatgtgccccatatttttcaacttggctccccttcaagatgattctacaaatcctcatgaagctcaagggtttctagaaagtatgtaccacaggatcccgtgagtataggaaataacacatctagttggtggaccaattagcgtgttgaaggggatacagtacaagacggtgtattctatgcaacagaaggatgaagttctaaccggttacgatttccggtatgattagtactcaaattgtaagttggttaggtctatagctcataaccgactcataactctagccaatgcatatacaaagggagatagagatcttccatagaggcaacgggaattgattttatcgcatagaactagagtcgattgcatctatagatagagtaccagaccggagttgaacacatccaactgaacacactctaatcaagcatacaaactcatatatacatatcatagcatcaaccaccccatccaggacgtagggtacaacgatttggttgtctaaaactatctaaatcatgtgtcatttgtcctataccccatcacaactcttcatttccatcctctatgaactaaacccaccacatgaaccatcctatggtgtactgtgtagtactaaacaccaacaccattgattatcacaaactctatgtaacacaaaattattagccattatgaacacataacccacaaacatgccaaaagcatacacatacaagcaaaccccgtgcccttgtggccttgcgttattcaacgtgaatagtcttgaatcctaccatccacaccaaccaaaccatccaaaccaacaagtgggagcggcaagaagttttgaaatatagaatcattagtgaattcaatgttgttatggattatgctcttgtgaaagggcatctatgagtttgttaggtggtctgagtagcactcctcaggtcctgaatttgattctccgtgagagcgaattcaggttgtggttaaaaaaaatccccttgtatgtcccatgtcaaagcacaggtctaaggcccggccccggtcgcggtcgttctcatatggctacgatgtagatgtgtatgggtgggataggggttcgagggttttctcgacctgtgtgaggtcttcttcttgatataatgcccggaggctgtcttaccacaccccactcccccacccccgcagatcaagttttggattgcgctcttgcactggtagacctgttcatggtttcgttccaaactgttcaactgccaaaccaacctgtaccaaactgcaatacaggattcaaatgggttggattaaccggtctggaaaaccattgaacccatcaacatcacacgctgcaccaagggcacgctagtgctggctatggacacgccaaccaaattgctcgtatgccacccatccatcggccacatgacaccactcatcaacaacaccatgtggcacaacctcaccgccttctagatcagtgtccttctgggcactacagtaccgtgggctcgacatctttggcatcaatgagaaggccaacagcaccatgatcttcaatgcattgctctaccgccacatcttctggtcaagcactgacagtgtgcagcatgtgggctgcaacaacaattacagaggcagcggcagacaggaagagcatgacatggcgcttgaagatggatcacgcgttcctagacagagaatggtaccgcaagggagtgaatcaacaaagggcagtcaatagctccatgaaaaagatcgaggattttgcaatcagtggtgatggcggcagcactagcattattggactacctgatcatagatatggcccacatgcatttgctcctagttcagcccaatgaataattttctgatggttgaaccagtctaacccaccaaaaaacaaaccatgaaactgtgagttcagtaggttgggctggtctcaatagcaacagctctggaagcagtgggtgaacaggactacacactggaaccagggtgtcgatgacgataaagtcaaagaagttagcaggtgatcaactgggaaattggaaatgagttcattgagtggggaataaaatagggtgtactggaagaaaagtttactcaatgaaatggtcatttgtatggtttcactgcaatgtttccattatagtccaaatgagacgtgattttcaacgagagccatgaggttatgaaatttgaagggcagaaggttggatgaagatgtaaatcatgggtttacaatttcaaggtagagatcaaacagatgccagattctcgctggcgtggttccacctgggattctagctcaggagcagttatgatgacccaaaaaaaaaccaagtggactggccatagccacttagccaggacggacccagtaaagaacacacacctaattgtgtttgcaaaaatgtgatcaaaaaaagttgcatgcataaaacatgtatacacttgtaacaggatcggatcagatccgaatacaaatagctagggtttgggggctcggtttcgcacagcgagagcggaagggaaggggtgcgcctacctggtggtgggtgctcgtctccagcgaaggtccggaagatggagacctgcgcacgtaggtcggcggcagcggccgccgcccagtcgtcgtcactacagagcgcaggcacgcacaagagaacagagagagaatgcagggggggaatgggttgcagagagtgaagaaaaaagctgggccgcagggtccg

SEQ ID NO: 73327 - DNA, 2280 bp, Zea Mays
gtagtacggctaggctggttcgggatcgcgacgccgcgagactgttccagaagcttttaggctgtttggatcaatggtgcaccaccgcaaccaaacaaacaccctttgttttttccgcttgcgtttcgtctcgtccagggaacaacagcacggggggcagtcggccaacgcccaccgtcagtgctcagcgcggcgctcgcacagggagggattagcgcgtaatagtcgagatatttagaggggtggagtgcgttcgatgcctgggagggattggtccccttgtcgcgcgtccataaagacacaaacacgacgcgaatcgggtccgtgtccgtgtccgtgtccgcgcacagcgcactgcacctgaccgccggcagcggacgggcgtatataaccggctacggcctgtgaaaattgcggcacgccgatattggacaccgaatgagcgagctgcgagcaccagtttaggcaagtgagcagctcgccagttgtcggtcgcggcctcctgcgctcagcgcttcgctcgcggtgccggtgcgtgaggtgaggttgatgggcgcggagggatgagcgagagcgccttgaccataaggcggctgagcgggccgtcgaacggcggcggcaatgcgggagctagctcttgcgcggtcggcacctggggaggaggaggcggcggcggcggcaatgcggcgcgcatccggggcgtcaacgtggggctcatggacgagaaggtgctgcagctcgtgttcctggcgctcaactgggacccgcagtcgctgtgcgcggtggcgcgggtgagccggcgcctgcgcgccgtggcggagcgggtgctgtggcgggagctctgcgtctcgcgggcgccgcggatggtggcggcgctgacgggaggccccgcgggctcggcgccggcggccgggcgcgtcggcggcgggtggccggcgctggcgaagctgctgctcttctgctgcggcgccgcgggcgcgggcgtgacgggccacttcgccccggtctcccgcttctccaagacgtccgggcggagcttcctgccgcgccgctgcgcgggggacctgctgtacgtgtcggacccctgcgagcacgccgtggcgggcgccgacgacgtcggcgtctaccgcggcgtgttccgcggcttcatgcggtcccggacgcgggcgtggctggtgggccaccgcgccgcgctggacccccgcgcgcgatgcccctactgcggcgcgcgcgtctggagcatggccgccgcgggtctcgccccgcgcagcgcgtcccgcaggctcggcgcctacgagggccggctcgagtacttcgtctgcgtcagcggccacctccacggcagctgctggctcgcgcgcctctccgacagcgagggcaccggacccgacgccgacgacacgtccgccggcgccagcgacgaggacgacgccgacctgtgacgccgatcgacgggagggacgtgtacagagtattagatagcgtcaacttgccatttctccaccttgttgtctttgattcatcttgtaaagttgtaaattgtaatgcggtagttctagcgttctgcacttgccctgttggctattgctgcattgcatttcactgcaacccacttcgtgcttgagcactagccaccgtggtctgctcggtgcctcggtatttcacatgggccacggcctttccttattactagatcaggcggcgcccattcaggcgccctatccagcacgaggaaagcaccatcaagcaccaggaaaaaataggagtgaggtgtcacttagaaacttcttcagaaagaatcagaatcctagcatcctcagaaatttctatatatgtgtaaagaagggacatgtttaaggtcattaccctccactcgataacacaaaatggtactgcttgaactgattacttagtcctcaattcaggatcacaaagtggaattttgttggcgttgctaaggcatcaacatttaggatcatttttaacactcattactgtaagtgacatggaagatatacttctccaaagaatttttttcaaaatatttctatgtaatgcaaattttaatcctcagctattattgtgcataaaccagacagaatcttgtgataatttggtactgggacaaatgttaaataaatattgtatacaagtaacaatatacagtacaacgatgtgaaaaaacatgcatgtacatgaaaacaaacggtaatctttttattattatcattgtgaaaaaaatgaatgatacgatgttttcttcaaaactatatcctaaac

SEQ ID NO: 73328 - DNA, 2308 bp, Zea Mays
ctcagttccgtttagccccccactaatgactaaaagtagactgaaaagttgagacgcgcgcacatgcagctacgccgctacgctatggctggttcacccaccggagcctgcaacgcgctccctgtggagagagaaaagaagctctgccacccgtccacacattcctgtgatagatcgcattcatgcagctggctactgaatgcgcgttgtgctgcgtaggacacgtatggcgagctagcctacagataagcctggggaatggtttcatatgcatccggctcgcgcaggtttctggcatcgagcagtctgcgagatctcgattcgtctggaagacatcgctactaccccagccacagtacccattgggtatttatctgctcccttgctgaagctggaatgtgcagctcgatcggttagcgctacgagtcctcgctgaatccagccaaatgatccccttgagcttgccagttagagcacggtgagtcagcaaagattaaaatagcctccgcacctaatataatgctggccttccgtcagaagtaacagctagctaagagaagcacaagaaaaatctggtagcttgagttctgactcgaactcagagatggcttatgcaagccccgggactgatgatacgtcgacagatctagatactgacgagaagaatcacatgttggagctagggcagcttgtgtcccttacagcttctgattccggcaacaaagcaaaggacaagctactaggtcaaaaggcactgcgccgtctggcccagaaccgtgaagctgctaggaaaagccgtctaagaaagaaggcatacgttgagcaacttgagaatagcaggctgaaacttagccagctggagcaggaactccagcgtgctcgccaacagggcatcttcattcctactccgggagacgaccagcagccaaactctactagtgaaaaagcaggtgctttggcgtttgacaaggactacgctggatgggaagacgagcacaggaagcagataagcgagctgagggccgcgctcagcgcacacgccggtgacgacgagctccggcgcatcgtggacggcgtcatggcgcatcaccacgaagcgttcaggctcaagtgcgtggcagccagggccgacgccttccacgtgctgtcggggatgtggaagacccccgtggagaggtgctttatgtggctgggcggatttcgaccgtcagagattctaaagttcctcgcaagccatctggaccccctcaccgagcggcagctcgcgagcgtacacggcctgcagcagtcctcgcagcaagccgaagagggcatctcgcagcgggtgcaagcgctgcagcagtcggtcgcggagaccctcgcgtcgtcagggtccccgtgcctgcctgtgcctgcaggtcgtgctcctccgcctggcgacgacgccgctccagactgctcggggacgatggcggcggcggttgcgaagcttgtcgctcttgaaagcttggtgcatgaggctgacggtctgcggaggcagactcttgagcagatgcagcgcgtgctgaccacccgccagtccgcgcgggcgctgcttgtgatcagtgactacctttcccggctacgcgctctgagttctctctggatcgcacgaccacgggaatgaattcagctcggcttatgtatctttgtttgacccggccgtggagaaaaataagaatcgaagatgcctccgctccttccatcatcactgcatgtaattgtaatctgaacatcattataaacagccgtaaccgttggccatcatcagggttaaagacgcatctgctcggagtcgacggagctgtgactagctagctgagcgtggccgatcgtgcactgcagcatgaatatgcatgcccacgaacgatatgacgagcgagcgggccatcgctgtcgctgtaccgtggcgtacgctgctggctacctgcagagatgagtgcgtacatgacgagaaggcttggtcgtagtgttcggatcacgaactgaagcaaatcaagtcatgcgttcgtgggcgtgaagaccagagagaaggagcgtaggcgctgcatcacctcggagtataaaagatgctgcacaataccgtcgtgaagggcggagacgacagcatccttaaccctagccgctatctgccactgccagcccacacggccaccgttcgcagccgccaggagaccgagtggaggcgaccagagggagagggttttcagccacacgccagacacgcaggccgccactgttgacttcagctcgacgtcgagaacgaccaatcagtcgaggattgaagaag

SEQ ID NO: 73329 - DNA, 2330 bp, Zea Mays
gctccctgtggagagagaaaagaagctctgccacccgtccacacattcctgtgatagatcgcattcatgcagctggctactgaatgcgcgttgtgctgcgtaggacacgtatggcgagctagcctacagataagcctggggaatggtttcatatgcatccggctcgcgcaggtttctggcatcgagcagtctgcgagatctcgattcgtctggaagacatcgctactaccccagccacagtacccattgggtatttatctgctcccttgctgaagctggaatgtgcagctcgatcggttagcgctacgagtcctcgctgaatccagccaaatgatccccttgagcttgccagttagagcacggtgagtcagcaaagattaaaatagcctccggtgagtcgatgactgttcccagtttaatttcttagaacaagattaaaatagcctcaccctcacagcaggcttttatacggttcagatctgcagatctgtctgtctcccattaattcttctttgctttttttgtattttttttttggaagcgcagcacctaatataatgctggccttccgtcagaagtaacagctagctaagagaagcacaagaaaaatctggtagcttgagttctgactcgaactcagagatggcttatgcaagccccgggactgatgatacgtcgacagatctagatactgacgagaagaatcacatgttggagctagggcagcttgtgtcccttacagcttctgattccggcaacaaagcaaaggacaagctactaggtcaaaagaaccgtgaagctgctaggaaaagccgtctaagaaagaaggcatacgttgagcaacttgagaatagcaggctgaaacttagccagctggagcaggaactccagcgtgctcgccaacagggcatcttcattcctactccgggagacgaccagcagccaaactctactagtgaaaaagcaggtgctttggcgtttgacaaggactacgctggatgggaagacgagcacaggaagcagataagcgagctgagggccgcgctcagcgcacacgccggtgacgacgagctccggcgcatcgtggacggcgtcatggcgcatcaccacgaagcgttcaggctcaagtgcgtggcagccagggccgacgccttccacgtgctgtcggggatgtggaagacccccgtggagaggtgctttatgtggctgggcggatttcgaccgtcagagattctaaagtacagttcctcgcaagccatctggaccccctcaccgagcggcagctcgcgagcgtacacggcctgcagcagtcctcgcagcaagccgaagagggcatctcgcagcgggtgcaagcgctgcagcagtcggtcgcggagaccctcgcgtcgtcagggtccccgtgcctgcctgtgcctgcaggtcgtgctcctccgcctggcgacgacgccgctccagactgctcggggacgatggcggcggcggttgcgaagcttgtcgctcttgaaagcttggtgcatgaggctgacggtctgcggaggcagactcttgagcagatgcagcgcgtgctgaccacccgccagtccgcgcgggcgctgcttgtgatcagtgactacctttcccggctacgcgctctgagttctctctggatcgcacgaccacgggaatgaattcagctcggcttatgtatctttgtttgacccggccgtggagaaaaataagaatcgaagatgcctccgctccttccatcatcactgcatgtaattgtaatctgaacatcattataaacagccgtaaccgttggccatcatcagggttaaagacgcatctgctcggagtcgacggagctgtgactagctagctgagcgtggccgatcgtgcactgcagcatgaatatgcatgcccacgaacgatatgacgagcgagcgggccatcgctgtcgctgtaccgtggcgtacgctgctggctacctgcagagatgagtgcgtacatgacgagaaggcttggtcgtagtgttcggatcacgaactgaagcaaatcaagtcatgcgttcgtgggcgtgaagaccagagagaaggagcgtaggcgctgcatcacctcggagtataaaagatgctgcacaataccgtcgtgaagggcggagacgacagcatccttaaccctagccgctatctgccactgccagcccacacggccaccgttcgcagccgccaggagaccgagtggaggcgaccagagggagagggttttcagccacacgccagacacgcaggccgccactgttgacttcagctcgacgtcgagaacgaccaatcagtcgaggattgaagaag

SEQ ID NO: 73330 - DNA, 2046 bp, Zea Mays
tgcgcgttgtgctgcgtaggacacgtatggcgagctagcctacagataagcctggggaatggtttcatatgcatccggctcgcgcaggtttctggcatcgagcagtctgcgagatctcgattcgtctggaagacatcgctactaccccagccacagtacccattgggtatttatctgctcccttgctgaagctggaatgtgcagctcgatcggttagcgctacgagtcctcgctgaatccagccaaatgatccccttgagcttgccagttagagcacgaagtaacagctagctaagagaagcacaagaaaaatctggtagcttgagttctgactcgaactcagagatggcttatgcaagccccgggactgatgatacgtcgacagatctagatactgacgagaagaatcacatgttggagctagggcagcttgtgtcccttacagcttctgattccggcaacaaagcaaaggacaagctactaggtcaaaaggcactgcgccgtctggcccagaaccgtgaagctgctaggaaaagccgtctaagaaagaaggcatacgttgagcaacttgagaatagcaggctgaaacttagccagctggagcaggaactccagcgtgctcgccaacagggcatcttcattcctactccgggagacgaccagcagccaaactctactagtgaaaaaggtgctttggcgtttgacaaggactacgctggatgggaagacgagcacaggaagcagataagcgagctgagggccgcgctcagcgcacacgccggtgacgacgagctccggcgcatcgtggacggcgtcatggcgcatcaccacgaagcgttcaggctcaagtgcgtggcagccagggccgacgccttccacgtgctgtcggggatgtggaagacccccgtggagaggtgctttatgtggctgggcggatttcgaccgtcagagattctaaagttcctcgcaagccatctggaccccctcaccgagcggcagctcgcgagcgtacacggcctgcagcagtcctcgcagcaagccgaagagggcatctcgcagcgggtgcaagcgctgcagcagtcggtcgcggagaccctcgcgtcgtcagggtccccgtgcctgcctgtgcctgcaggtcgtgctcctccgcctggcgacgacgccgctccagactgctcggggacgatggcggcggcggttgcgaagcttgtcgctcttgaaagcttggtgcatgaggctgacggtctgcggaggcagactcttgagcagatgcagcgcgtgctgaccacccgccagtccgcgcgggcgctgcttgtgatcagtgactacctttcccggctacgcgctctgagttctctctggatcgcacgaccacgggaatgaattcagctcggcttatgtatctttgtttgacccggccgtggagaaaaataagaatcgaagatgcctccgctccttccatcatcactgcatgtaattgtaatctgaacatcattataaacagccgtaaccgttggccatcatcagggttaaagacgcatctgctcggagtcgacggagctgtgactagctagctgagcgtggccgatcgtgcactgcagcatgaatatgcatgcccacgaacgatatgacgagcgagcgggccatcgctgtcgctgtaccgtggcgtacgctgctggctacctgcagagatgagtgcgtacatgacgagaaggcttggtcgtagtgttcggatcacgaactgaagcaaatcaagtcatgcgttcgtgggcgtgaagaccagagagaaggagcgtaggcgctgcatcacctcggagtataaaagatgctgcacaataccgtcgtgaagggcggagacgacagcatccttaaccctagccgctatctgccactgccagcccacacggccaccgttcgcagccgccaggagaccgagtggaggcgaccagagggagagggttttcagccacacgccagacacgcaggccgccactgttgacttcagctcgacgtcgagaacgaccaatcagtcgaggattgaagaag

SEQ ID NO: 73331 - DNA, 8223 bp, Zea Mays
cttgatgattaggttacgccctctgcgctctgagtctagctgttttgaccaaacaacatttcttcccggtagcctgatgccaattatgggagtgagaaacactgcagttccctccacatttctcatccgggcttggaccggcaaaggcagtgttaaaccgcaaacaaacaacaaatcaggaaatacaaacaattacacaaagaaatcgtgttcccagacataatttgaaaaaaaaaacaaatcgtataaccggttctgcgtcgaacatattagttgaatggtcagagcacttgtatacctaattcgaataacctaatgatctcgaggactgaacagcaacaggaaccagctttaataaaaatcataccatcaacaaagatccatagaaatttgagcaagtgcaaagctaaaaaaacagccagtgtacaatgtacactcgtgcaatcttatgtacagttaagacttccaacatcctagcttgcatgaccaaacatatcctagctaggttaaggtactattgtcatcgccaatgttacctggacaattttgcaaggacctaaccaaatgcaatcctagtgttaaattagcctaactactcaatcaccattataacaagatgaatgaacatgctaatttggagatagtacagaattacagaaacagaagcaatcatatcctagcttgcatgaccaaacaccaagctgtacagatgacacaaatggaaccaaccattcaagttcactcaaggtcaagattcaagaaacccagttgtaacagatttaagcaagcactaagcttccactgactttagcacaaccttatttgatctataaattaggatgagtcaacttgaacccaaacttgtgataaattgaaaatccatgtatataaggcactactgctagtccacgacagaaatggtcaaacaataagcacatagaagccaagtttgttcagagagattttcttttggcatgcacagaagcactaacatcctttcttgactttcataaacaatgcagtcaacagccttatactaataatgcataactgaaccagtaagtggactaggggttataccacagaaagtaaaattagaagcaaaccagaaactagattaaacattagtaggggtcctaaaagaaaatttgggtatttgggaccataaagaatacgatgcacatatgctcaagtacctacaatttcagtaacaaaacaattttgctcaatgaaggtatgtatgtcaagaaagagttcttgctggatatcagcgcaaatagtggacctgagccatcagatgaggcatgcagattaataaggacagcttcaaaataaaggtagtgcaaaggagtagcctaaccttagctccaaatggatccaatttccaatgtaaaatggcagtatgagcaaagagtatttgagtgcctcctcactcctaacatccaagcattaattctctcaaataactggaaaccaagcaaaccaccaaaaatccaaatcaaacaattgaaatggaaagtgatatgcagtcaatattcaggaacagtagttagtgcaatctctggacaatgtatcgtctcggttgtgatcatgtagatcatataactatagcatggaggattcaaagcatctgaaacagtagatcagtccaagtaatcaagcttcaatacacactatgcacactatctgaaagttctctggctagcaaaattgaaggtactaaatttcagaagataggcacacattatgatcaggatcagactgaactttaaagtttcaagtgcaaaacctacatttactaaagagaccatctatgatgatttgtctattttggttcagtgataggcttaaaaaaccttcaaattcaaggcaaatcaaatggccaatggaacagggatgggctttgaagacagcaccgatggttggagattctatctcagcttctgtgtgccacacctgcacaaacttgaaagactggttgaagaaagtaactggataggactgttggcagaaatgaaggattagaagcatccttgtaatttagattgttgcagcacaaagagctactggttgaagaaagaaactggataggactgttgacagaaatgaattagaagcacccttgtaatttagattgttgaagcacaaaacaactcataggcgttttgtaaattagataagtttagtactccccacacatattccgtgtgacaagcccatgcaaaaatatgagaaggcctgcaacaatgaccccaatcattatctacttccaggtagtagacactgaacaaacacaaagtttagtactccccacacatattccgtgtgacaagcccatgctaaaatatgagaaggcctgcaacaatgaccacaatcattatctacttccaggtagaagacactgaacaaacacaatgagttaaaggttgttgtaggtttgaatagatctggatccttctgtgcccatgcaagtatcccacctagagatctgcaatcagcaagaccaacctctggtaactatccaattgatagtgagaacagagaacacttaaacagcacgaacattcgtcaaataatgtgggataggaagtccaatcatccgccaacaagttcaactgcaaagtcctatctccattgcgatgcctccaaaactgcagattacaatcgaatcattgaaggtagcctacaagtgaactaactttagaagaacatttgacatataggatgggttttttttttgaacaaacaaggaaccctgaagagttcagaacttattattgctgacgcagaagcagaatcgaactcaggcaccaatccatccatttacaatccagttgctggagaagaacaccagcccaaaaataagaaacaacaaattcaagagtaccaataaaagagagcatgcccatgaacttagtccagtcaaagcttcaatctacgtccaaaacatcacctctgttgcctctacatttttccaatcaaggacaatcaagtttaattaatcgggtggcgatcttcacgccaccatgatcataagaatagccatgtaacaaatcaaaaccaacgaatttaagcaaacctccacccttcaacggatctctccataaccagaggacctttccttccgcatctaggaggacaaaaccagcaaggacctttcattttgcatctagccagacaagctctgcagattcactaaccaagcattaaagggagcctatgtgtgcagttaattttcaaagatcattgacaggaggatggttagtgaacaaacaactctgaacatttccaaacttctgatagcaaaagcagaagcaggatctaactcgcctccaacccatccatccaaaaatcgagttgctggagaaaaccaccatcccaacataagaaattaaaatggcagcggatagaaatctaagaatatgaagagcgataggtaaattaattcaaacgatcttatcgccgatactatgaactcgagtcgagtcaaggccttaatctactttccaaaactcggttgcccttgcagatccaaccagcaacatttccaatcagcagatagacatttaaggatgtgaagaacgataggtaaatttatccaaacgatctcatcgatgatactacgaactccagtcgagtcaaggcctcaatctactttacacaactctattgcccctgcagatcgagccagcagcatttccaatcaagcttagagcaagtctggttctaataatattcgcaccaatacgatgatatcagaatgagaaacgacgagtgagccataagcaaacctccacccttcaactgatctctccataaccagaaaggacccttctgcatctgatgaagtttgaggacaaacaaccaaaaggccacaagtgagatcagtcgttaacataagaacgaaggtctccaaattcacatggtgcacaagctacgactgcgctatttgattctgatggtaccacaccagggacagacaattgagcctgaaaccaccaaatccatgtccaagtgacaaaaccaatgaaccgttggatctaacagaatactgacctgcctccgaacttgggcaaacagatcgccacacgacaccacgacgaacccccaacaccagatcggacccaatcctgcaacccacgcacagagaaaacgaagacgaaacaagattcgacacaaaaactagacgggttgcaggaaaaaacaaactacaaacccaaccaaccctgccacaactcaggctcactccccgggtcgcaggaaagcggaacgccccaaagggatctgcgagagcacaaaagcgcaacagcagcagaagagatcagccagagaagaaactgacccaactcgaagtcgaaacggagtgtacaaagaaggaagaaatggaaaacgcaaacgcgccgagatgaataaacggagagcgaggaaaatccacctccaacctgcacctctaaaggacacaaccacatactatgatcatttgatatacagtaccaaataaatccagattacaatcgaatcattgaaggtagcctacaagtgaactaaatttcgaagaacatttgacatataggatggttttttttgaacaaacaaggaaccctgaagagttcagaacttattattgctgacgcagaagcagaatcgaactcaggccccaatccatccatttgcaatccagtcaaagcttcaatctacgtccaaaacatcacctatgttgcctctacatcatttttccaatcaaggacaattaggcttctaattaatcaggtggcaatcatcacgccaccatgattgacataagaacagtcatataacaaatcaaaaccaacgaaagtaagcaaacctccacccttcaactgatctttccataacaaggcggacctttccttccacatctaggaggacaaaaccagaaggtacctttcattttgcagcaacacaaccggaatgatttctgacctgcccccagttttaaatatcagttcttcgctacagggatttttgattgccaaacttaccctacaaccacatgtaaaagcaaccacaacatagataaagctagacaaaagcatccacagaaatcccaaaccaaaacaagtatcgtgaccgttggactaccaattatttgagccaaatgatctgcagacacagaaattccagcagcacaagaattaaagctccagtcgaagcatatagcatgataaagcagaaacaagtttgattaaatgaaagttgtagggctgtagttctaccaatatctgcttaaatctcccacatcccaaacttgcccagtgacttctatcgctgcagattaaataagaattatctgaattttatcatggttcatatactagcattttgtaaattggataagtttactctaaacatattctgcgtgacaagcccacccaaaaatatgagaagacatctatccatatacaatccagttgctggaaaaaaaatactagcccgaatataagaaacaagaaatttgagtaccaataagtgagagatacatatatccaaacgatgttatcggcatgccatgaacttagtccagtcaaagcttcaatctacgtccaaaacatcacctctgttgcctctacatttttccaatcaaggacaatcaagtttctaattaatcgggtggcaatcttcacgccaccatgattaacataagaatagccatgtaacaaatcaaaaccaacgaatttaagcaaacctccacccttcaacggatctctccataaccagaggacctttccttccgcatctaggaggacaaaaccagcaaggacctttcattttgcatctagccagacaaactctgcagattcactaaccaagcattaaagggggcctatgtgtgcagttcattttcaaagatcattgacaggaggatggttagtgaacaaacaactctgaacatttccaaacttctgatggcaaaagcagaagcaggatctaactcgcctccaacccatccatccacaaatcgagttgctggagaaaaccaccatcccaacataagaaattaaaatggcagcggatagaaatctaagaatttgaagggcgataggtaaattaattcaaacgattttatcgccgatactatgaacgagtcgagtcaaggccttaatctactttccaaaactcggttgcccctgcagatccaaccagcaacatttccaatcagcagatagacatttaaggatgtgaagaacgataggtaaatttatccaaacgatctcatcgatgatactacaaactccattcgagtcaaggcctcaatctactttacaaaactctgttgcccctgcagatcgagccagcagcatttccaatcaagcttagagcaagtctggttctaataatcttcgcaccaatatgatgatatcagaatgagaaatgacgagtgagccataagcaaacctccacccttcaactgatctctccataaccagaaaggacccttctgcatctgatgaagtttaaggaggacaaacaaccaaaaggccacaagcgagatcagtcgttaacataagaacgaaggtctccaaattcacctggtgcacaagctacgactgcgctatctgattctgatggtaccacaccagggacagacaattgagcctgaaaccaccaaatccatgtccaagtgacaaaacctccaatcaagcttagagcaagtctggttctaataatcttcgcaccaatatgatgatatcagaatgagaaatgacgagtgagccataagcaaacctccacccttcaactgatctctccataaccagaaaggacccttctgcatctgatgaagtttaaggaggacaaacaaccaaaaggccacaagcgagatcagtcgttaacataagaagaaaggtctccaaattcacctggtgcacaagctacgactgcgctatctgattctgatggtaccacaccagggacagacaattgagcctgaaaccaccaaatccatgtccaattgacaaaaccagaaagccgtaggatctaacacaatactgacctgcctccgaacttgggcaaacagatcgccacacggcaccacgacgaacccccaacaccagatcggacccaatcctgcaacccacgcacagagaaaacgaagacgaaacaagattcgacacaaaaactagacgggttgcaggaaaaaacaaactacaaacccaaccaaccctgccacaactcaggctcactccccgggtcgcaggaaagcggaacgccccaaagggatctgcgagagcacaaaagcgcaacagcagcagaagagatcagccagagaagaaactgacccaactcgaagtcgaaacggagtgtacaaagaaggaagaaatggaaaacgcaaacgcgccgagatgaataaacggagagcgaggaaaatccacctccaatgtcctgcacctcttttcgataaaggagactttatattaaaaggttacaaagagcgatacatcaagagaatacatagtcttggtacataaaggacacaacgacatactatgatcatttgaaatacagtaccaaatagatttgatatacagtaccaaatagatccagatcttgtgcttcactactgctataccagcaatatccatagagggcagaatgttagccaaccattcagatctgaaatcactggaagcaagtgatgaaaccaacacaaccagaatgacttctgaccagggcccagttttaaatatcagttttcgctacagggatttccaattgccaaacttaccatacaaccacatgtaaaagcaaccagccaaccacaacaacatagataaagtagacaaaagcacagaaatcccaaaccaaaacaagtatcgtgaccgttggactaccaattatttgagctaaatgatctgcagaacagaaattccaacagcacaagaattaaagcttcagtcgaagcagaaacaagttcgattaaatgaaagttgtagactgtagtactgtagttctacccgtatctgcttaaatctcccacatcccaaacatgcccggtgtcttctatcactgcagattaaataagaattatctgaattttatcatggttcatatactagcattttgtaaattagataagtttactcaacacatattccgcgtgacatgctcatccaaaaatatgagaagacctgcaataaaggccccaatcattatctacttcaagatagaagacactgaacaaac

SEQ ID NO: 73332 - DNA, 8739 bp, Zea Mays
cttgatgattaggttacgccctctgcgctctgagtctagctgttttgaccaaacaacatttcttcccggtagcctgatgccaattatgggagtgagaaacactgcagttccctccacatttctcatccgggcttggaccggcaaaggcagtgttaaaccgcaaacaaacaacaaatcaggaaatacaaacaattacacaaagaaatcgtgttcccagacataatttgaaaaaaaaaacaaatcgtataaccggttctgcgtcgaacatattagttgaatggtcagagcacttgtatacctaattcgaataacctaatgatctcgaggactgaacagcaacaggaaccagctttaataaaaatcataccatcaacaaagatccatagaaatttgagcaagtgcaaagctaaaaaaacagccagtgtacaatgtacactcgtgcaatcttatgtacagttaagacttccaacatcctagcttgcatgaccaaacatatcctagctaggttaaggtactattgtcatcgccaatgttacctggacaattttgcaaggacctaaccaaatgcaatcctagtgttaaattagcctaactactcaatcaccattataacaagatgaatgaacatgctaatttggagatagtacagaattacagaaacagaagcaatcatatcctagcttgcatgaccaaacaccaagctgtacagatgacacaaatggaaccaaccattcaagttcactcaaggtcaagattcaagaaacccagttgtaacagatttaagcaagcactaagcttccactgactttagcacaaccttatttgatctataaattaggatgagtcaacttgaacccaaacttgtgataaattgaaaatccatgtatataaggcactactgctagtccacgacagaaatggtcaaacaataagcacatagaagccaagtttgttcagagagattttcttttggcatgcacagaagcactaacatcctttcttgactttcataaacaatgcagtcaacagccttatactaataatgcataactgaaccagtaagtggactaggggttataccacagaaagtaaaattagaagcaaaccagaaactagattaaacattagtaggggtcctaaaagaaaatttgggtatttgggaccataaagaatacgatgcacatatgctcaagtacctacaatttcagtaacaaaacaattttgctcaatgaaggtatgtatgtcaagaaagagttcttgctggatatcagcgcaaatagtggacctgagccatcagatgaggcatgcagattaataaggacagcttcaaaataaaggtagtgcaaaggagtagcctaaccttagctccaaatggatccaatttccaatgtaaaatggcagtatgagcaaagagtatttgagtgcctcctcactcctaacatccaagcattaattctctcaaataactggaaaccaagcaaaccaccaaaaatccaaatcaaacaattgaaatggaaagtgatatgcagtcaatattcaggaacagtagttagtgcaatctctggacaatgtatcgtctcggttgtgatcatgtagatcatataactatagcatggaggattcaaagcatctgaaacagtagatcagtccaagtaatcaagcttcaatacacactatgcacactatctgaaagttctctggctagcaaaattgaaggtactaaatttcagaagataggcacacattatgatcaggatcagactgaactttaaagtttcaagtgcaaaacctacatttactaaagagaccatctatgatgatttgtctattttggttcagtgataggcttaaaaaaccttcaaattcaaggcaaatcaaatggccaatggaacagggatgggctttgaagacagcaccgatggttggagattctatctcagcttctgtgtgccacacctgcacaaacttgaaagactggttgaagaaagtaactggataggactgttggcagaaatgaaggattagaagcatccttgtaatttagattgttgcagcacaaagagctactggttgaagaaagaaactggataggactgttgacagaaatgaattagaagcacccttgtaatttagattgttgaagcacaaaacaactcataggcgttttgtaaattagataagtttagtactccccacacatattccgtgtgacaagcccatgcaaaaatatgagaaggcctgcaacaatgaccccaatcattatctacttccaggtagtagacactgaacaaacacaaagtttagtactccccacacatattccgtgtgacaagcccatgctaaaatatgagaaggcctgcaacaatgaccacaatcattatctacttccaggtagaagacactgaacaaacacaatgagttaaaggttgttgtaggtttgaatagatctggatccttctgtgcccatgcaagtatcccacctagagatctgcaatcagcaagaccaacctctggtaactatccaattgatagtgagaacagagaacacttaaacagcacgaacattcgtcaaataatgtgggataggaagtccaatcatccgccaacaagttcaactgcaaagtcctatctccattgcgatgcctccaaaactgcagattacaatcgaatcattgaaggtagcctacaagtgaactaactttagaagaacatttgacatataggatgggttttttttttgaacaaacaaggaaccctgaagagttcagaacttattattgctgacgcagaagcagaatcgaactcaggcaccaatccatccatttacaatccagttgctggagaagaacaccagcccaaaaataagaaacaacaaattcaagagtaccaataaaagagagcatgcccatgaacttagtccagtcaaagcttcaatctacgtccaaaacatcacctctgttgcctctacatttttccaatcaaggacaatcaagtttaattaatcgggtggcgatcttcacgccaccatgatcataagaatagccatgtaacaaatcaaaaccaacgaatttaagcaaacctccacccttcaacggatctctccataaccagaggacctttccttccgcatctaggaggacaaaaccagcaaggacctttcattttgcatctagccagacaagctctgcagattcactaaccaagcattaaagggagcctatgtgtgcagttaattttcaaagatcattgacaggaggatggttagtgaacaaacaactctgaacatttccaaacttctgatagcaaaagcagaagcaggatctaactcgcctccaacccatccatccaaaaatcgagttgctggagaaaaccaccatcccaacataagaaattaaaatggcagcggatagaaatctaagaatatgaagagcgataggtaaattaattcaaacgatcttatcgccgatactatgaactcgagtcgagtcaaggccttaatctactttccaaaactcggttgcccttgcagatccaaccagcaacatttccaatcagcagatagacatttaaggatgtgaagaacgataggtaaatttatccaaacgatctcatcgatgatactacgaactccagtcgagtcaaggcctcaatctactttacacaactctattgcccctgcagatcgagccagcagcatttccaatcaagcttagagcaagtctggttctaataatattcgcaccaatacgatgatatcagaatgagaaacgacgagtgagccataagcaaacctccacccttcaactgatctctccataaccagaaaggacccttctgcatctgatgaagtttgaggacaaacaaccaaaaggccacaagtgagatcagtcgttaacataagaacgaaggtctccaaattcacatggtgcacaagctacgactgcgctatttgattctgatggtaccacaccagggacagacaattgagcctgaaaccaccaaatccatgtccaagtgacaaaaccaatgaaccgttggatctaacagaatactgacctgcctccgaacttgggcaaacagatcgccacacgacaccacgacgaacccccaacaccagatcggacccaatcctgcaacccacgcacagagaaaacgaagacgaaacaagattcgacacaaaaactagacgggttgcaggaaaaaacaaactacaaacccaaccaaccctgccacaactcaggctcactccccgggtcgcaggaaagcggaacgccccaaagggatctgcgagagcacaaaagcgcaacagcagcagaagagatcagccagagaagaaactgacccaactcgaagtcgaaacggagtgtacaaagaaggaagaaatggaaaacgcaaacgcgccgagatgaataaacggagagcgaggaaaatccacctccaacctgcacctctaaaggacacaaccacatactatgatcatttgatatacagtaccaaataaatccagattacaatcgaatcattgaaggtagcctacaagtgaactaaatttcgaagaacatttgacatataggatggttttttttgaacaaacaaggaaccctgaagagttcagaacttattattgctgacgcagaagcagaatcgaactcaggccccaatccatccatttgcaatccagtcaaagcttcaatctacgtccaaaacatcacctatgttgcctctacatcatttttccaatcaaggacaattaggcttctaattaatcaggtggcaatcatcacgccaccatgattgacataagaacagtcatataacaaatcaaaaccaacgaaagtaagcaaacctccacccttcaactgatctttccataacaaggcggacctttccttccacatctaggaggacaaaaccagaaggtacctttcattttgcagcaacacaaccggaatccatctgattggttgccgtagcagcgtagccagactgctcgacatgagccaggataagtagcacccgattgagctcatgcaagtcatatttgtttggttgtttgcacaaactcatgcatactagatatagactatgtttggttgtgtaaattaaaacataagggtacataaataaatgttcaaatatatataagtatcaatggtttagttttgttcataaaaatcttagaaacataaatatgaaattagtttagtaattaaatcgtttaattaaaagatataataaaaaacaaattaaaataatattttgtatttggcgctgctgcatgcgggcggcaagcttggagcctgcacgcgccaatacgcgctccaccggcgtatctgtggagcctggccgaatgacatatcttgcatccgatgagcctgcatgggtagagaagagaaccaaacaaggctggatttaaaactccacgcgtgcagttgcacaacggcgtgctccaaccaaacagtcggaatgatttctgacctgcccccagttttaaatatcagttcttcgctacagggatttttgattgccaaacttaccctacaaccacatgtaaaagcaaccacaacatagataaagctagacaaaagcatccacagaaatcccaaaccaaaacaagtatcgtgaccgttggactaccaattatttgagccaaatgatctgcagacacagaaattccagcagcacaagaattaaagctccagtcgaagcatatagcatgataaagcagaaacaagtttgattaaatgaaagttgtagggctgtagttctaccaatatctgcttaaatctcccacatcccaaacttgcccagtgacttctatcgctgcagattaaataagaattatctgaattttatcatggttcatatactagcattttgtaaattggataagtttactctaaacatattctgcgtgacaagcccacccaaaaatatgagaagacatctatccatatacaatccagttgctggaaaaaaaatactagcccgaatataagaaacaagaaatttgagtaccaataagtgagagatacatatatccaaacgatgttatcggcatgccatgaacttagtccagtcaaagcttcaatctacgtccaaaacatcacctctgttgcctctacatttttccaatcaaggacaatcaagtttctaattaatcgggtggcaatcttcacgccaccatgattaacataagaatagccatgtaacaaatcaaaaccaacgaatttaagcaaacctccacccttcaacggatctctccataaccagaggacctttccttccgcatctaggaggacaaaaccagcaaggacctttcattttgcatctagccagacaaactctgcagattcactaaccaagcattaaagggggcctatgtgtgcagttcattttcaaagatcattgacaggaggatggttagtgaacaaacaactctgaacatttccaaacttctgatggcaaaagcagaagcaggatctaactcgcctccaacccatccatccacaaatcgagttgctggagaaaaccaccatcccaacataagaaattaaaatggcagcggatagaaatctaagaatttgaagggcgataggtaaattaattcaaacgattttatcgccgatactatgaacgagtcgagtcaaggccttaatctactttccaaaactcggttgcccctgcagatccaaccagcaacatttccaatcagcagatagacatttaaggatgtgaagaacgataggtaaatttatccaaacgatctcatcgatgatactacaaactccattcgagtcaaggcctcaatctactttacaaaactctgttgcccctgcagatcgagccagcagcatttccaatcaagcttagagcaagtctggttctaataatcttcgcaccaatatgatgatatcagaatgagaaatgacgagtgagccataagcaaacctccacccttcaactgatctctccataaccagaaaggacccttctgcatctgatgaagtttaaggaggacaaacaaccaaaaggccacaagcgagatcagtcgttaacataagaacgaaggtctccaaattcacctggtgcacaagctacgactgcgctatctgattctgatggtaccacaccagggacagacaattgagcctgaaaccaccaaatccatgtccaagtgacaaaacctccaatcaagcttagagcaagtctggttctaataatcttcgcaccaatatgatgatatcagaatgagaaatgacgagtgagccataagcaaacctccacccttcaactgatctctccataaccagaaaggacccttctgcatctgatgaagtttaaggaggacaaacaaccaaaaggccacaagcgagatcagtcgttaacataagaagaaaggtctccaaattcacctggtgcacaagctacgactgcgctatctgattctgatggtaccacaccagggacagacaattgagcctgaaaccaccaaatccatgtccaattgacaaaaccagaaagccgtaggatctaacacaatactgacctgcctccgaacttgggcaaacagatcgccacacggcaccacgacgaacccccaacaccagatcggacccaatcctgcaacccacgcacagagaaaacgaagacgaaacaagattcgacacaaaaactagacgggttgcaggaaaaaacaaactacaaacccaaccaaccctgccacaactcaggctcactccccgggtcgcaggaaagcggaacgccccaaagggatctgcgagagcacaaaagcgcaacagcagcagaagagatcagccagagaagaaactgacccaactcgaagtcgaaacggagtgtacaaagaaggaagaaatggaaaacgcaaacgcgccgagatgaataaacggagagcgaggaaaatccacctccaatgtcctgcacctcttttcgataaaggagactttatattaaaaggttacaaagagcgatacatcaagagaatacatagtcttggtacataaaggacacaacgacatactatgatcatttgaaatacagtaccaaatagatttgatatacagtaccaaatagatccagatcttgtgcttcactactgctataccagcaatatccatagagggcagaatgttagccaaccattcagatctgaaatcactggaagcaagtgatgaaaccaacacaaccagaatgacttctgaccagggcccagttttaaatatcagttttcgctacagggatttccaattgccaaacttaccatacaaccacatgtaaaagcaaccagccaaccacaacaacatagataaagtagacaaaagcacagaaatcccaaaccaaaacaagtatcgtgaccgttggactaccaattatttgagctaaatgatctgcagaacagaaattccaacagcacaagaattaaagcttcagtcgaagcagaaacaagttcgattaaatgaaagttgtagactgtagtactgtagttctacccgtatctgcttaaatctcccacatcccaaacatgcccggtgtcttctatcactgcagattaaataagaattatctgaattttatcatggttcatatactagcattttgtaaattagataagtttactcaacacatattccgcgtgacatgctcatccaaaaatatgagaagacctgcaataaaggccccaatcattatctacttcaagatagaagacactgaacaaac

SEQ ID NO: 73333 - DNA, 6124 bp, Zea Mays
ctctgcgctctgagtctagctgttttgaccaaacaacatttcttcccggtagcctgatgccaattatgggagtgagaaacactgcagttccctccacatttctcatccgggcttggaccggcaaaggcagtgttaaaccgcaaacaaacaacaaatcaggaaatacaaacaattacacaaagaaatcgtgttcccagacataatttgaaaaaaaaaacaaatcgtataaccggttctgcgtcgaacatattagttgaatggtcagagcacttgtatacctaattcgaataacctaatgatctcgaggactgaacagcaacaggaaccagctttaataaaaatcataccatcaacaaagatccatagaaatttgagcaagtgcaaagctaaaaaaacagccagtgtacaatgtacactcgtgcaatcttatgtacagttaagacttccaacatcctagcttgcatgaccaaacatatcctagctaggttaaggtactattgtcatcgccaatgttacctggacaattttgcaaggacctaaccaaatgcaatcctagtgttaaattagcctaactactcaatcaccattataacaagatgaatgaacatgctaatttggagatagtacagaattacagaaacagaagcaatcatatcctagcttgcatgaccaaacaccaagctgtacagatgacacaaatggaaccaaccattcaagttcactcaaggtcaagattcaagaaacccagttgtaacagatttaagcaagcactaagcttccactgactttagcacaaccttatttgatctataaattaggatgagtcaacttgaacccaaacttgtgataaattgaaaatccatgtatataaggcactactgctagtccacgacagaaatggtcaaacaataagcacatagaagccaagtttgttcagagagattttcttttggcatgcacagaagcactaacatcctttcttgactttcataaacaatgcagtcaacagccttatactaataatgcataactgaaccagtaagtggactaggggttataccacagaaagtaaaattagaagcaaaccagaaactagattaaacattagtaggggtcctaaaagaaaatttgggtatttgggaccataaagaatacgatgcacatatgctcaagtacctacaatttcagtaacaaaacaattttgctcaatgaaggtatgtatgtcaagaaagagttcttgctggatatcagcgcaaatagtggacctgagccatcagatgaggcatgcagattaataaggacagcttcaaaataaaggtagtgcaaaggagtagcctaaccttagctccaaatggatccaatttccaatgtaaaatggcagtatgagcaaagagtatttgagtgcctcctcactcctaacatccaagcattaattctctcaaataactggaaaccaagcaaaccaccaaaaatccaaatcaaacaattgaaatggaaagtgatatgcagtcaatattcaggaacagtagttagtgcaatctctggacaatgtatcgtctcggttgtgatcatgtagatcatataactatagcatggaggattcaaagcatctgaaacagtagatcagtccaagtaatcaagcttcaatacacactatgcacactatctgaaagttctctggctagcaaaattgaaggtactaaatttcagaagataggcacacattatgatcaggatcagactgaactttaaagtttcaagtgcaaaacctacatttactaaagagaccatctatgatgatttgtctattttggttcagtgataggcttaaaaaaccttcaaattcaaggcaaatcaaatggccaatggaacagggatgggctttgaagacagcaccgatggttggagattctatctcagcttctgtgtgccacacctgcacaaacttgaaagactggttgaagaaagtaactggataggactgttggcagaaatgaaggattagaagcatccttgtaatttagattgttgcagcacaaagagctactggttgaagaaagaaactggataggactgttgacagaaatgaattagaagcacccttgtaatttagattgttgaagcacaaaacaactcataggcgttttgtaaattagataagtttagtactccccacacatattccgtgtgacaagcccatgcaaaaatatgagaaggcctgcaacaatgaccccaatcattatctacttccaggtagtagacactgaacaaacacaaagtttagtactccccacacatattccgtgtgacaagcccatgctaaaatatgagaaggcctgcaacaatgaccacaatcattatctacttccaggtagaagacactgaacaaacacaatgagttaaaggttgttgtaggtttgaatagatctggatccttctgtgcccatgcaagtatcccacctagagatctgcaatcagcaagaccaacctctggtaactatccaattgatagtgagaacagagaacacttaaacagcacgaacattcgtcaaataatgtgggataggaagtccaatcatccgccaacaagttcaactgcaaagtcctatctccattgcgatgcctccaaaactgcagattacaatcgaatcattgaaggtagcctacaagtgaactaactttagaagaacatttgacatataggatgggttttttttttgaacaaacaaggaaccctgaagagttcagaacttattattgctgacgcagaagcagaatcgaactcaggcaccaatccatccatttacaatccagttgctggagaagaacaccagcccaaaaataagaaacaacaaattcaagagtaccaataaaagagagcatgcccatgaacttagtccagtcaaagcttcaatctacgtccaaaacatcacctctgttgcctctacatttttccaatcaaggacaatcaagtttaattaatcgggtggcgatcttcacgccaccatgatcataagaatagccatgtaacaaatcaaaaccaacgaatttaagcaaacctccacccttcaacggatctctccataaccagaggacctttccttccgcatctaggaggacaaaaccagcaaggacctttcattttgcatctagccagacaagctctgcagattcactaaccaagcattaaagggagcctatgtgtgcagttaattttcaaagatcattgacaggaggatggttagtgaacaaacaactctgaacatttccaaacttctgatagcaaaagcagaagcaggatctaactcgcctccaacccatccatccaaaaatcgagttgctggagaaaaccaccatcccaacataagaaattaaaatggcagcggatagaaatctaagaatatgaagagcgataggtaaatatatccaaacgatgttatcggcatgccatgaacttagtccagtcaaagcttcaatctacgtccaaaacatcacctctgttgcctctacatttttccaatcaaggacaatcaagtttctaattaatcgggtggcaatcttcacgccaccatgattaacataagaatagccatgtaacaaatcaaaaccaacgaatttaagcaaacctccacccttcaacggatctctccataaccagaggacctttccttccgcatctaggaggacaaaaccagcaaggacctttcattttgcatctagccagacaaactctgcagattcactaaccaagcattaaagggggcctatgtgtgcagttcattttcaaagatcattgacaggaggatggttagtgaacaaacaactctgaacatttccaaacttctgatggcaaaagcagaagcaggatctaactcgcctccaacccatccatccacaaatcgagttgctggagaaaaccaccatcccaacataagaaattaaaatggcagcggatagaaatctaagaatttgaagggcgataggtaaattaattcaaacgattttatcgccgatactatgaacgagtcgagtcaaggccttaatctactttccaaaactcggttgcccctgcagatccaaccagcaacatttccaatcagcagatagacatttaaggatgtgaagaacgataggtaaatttatccaaacgatctcatcgatgatactacaaactccattcgagtcaaggcctcaatctactttacaaaactctgttgcccctgcagatcgagccagcagcatttccaatcaagcttagagcaagtctggttctaataatcttcgcaccaatatgatgatatcagaatgagaaatgacgagtgagccataagcaaacctccacccttcaactgatctctccataaccagaaaggacccttctgcatctgatgaagtttaaggaggacaaacaaccaaaaggccacaagcgagatcagtcgttaacataagaacgaaggtctccaaattcacctggtgcacaagctacgactgcgctatctgattctgatggtaccacaccagggacagacaattgagcctgaaaccaccaaatccatgtccaagtgacaaaacctccaatcaagcttagagcaagtctggttctaataatcttcgcaccaatatgatgatatcagaatgagaaatgacgagtgagccataagcaaacctccacccttcaactgatctctccataaccagaaaggacccttctgcatctgatgaagtttaaggaggacaaacaaccaaaaggccacaagcgagatcagtcgttaacataagaagaaaggtctccaaattcacctggtgcacaagctacgactgcgctatctgattctgatggtaccacaccagggacagacaattgagcctgaaaccaccaaatccatgtccaattgacaaaaccagaaagccgtaggatctaacacaatactgacctgcctccgaacttgggcaaacagatcgccacacggcaccacgacgaacccccaacaccagatcggacccaatcctgcaacccacgcacagagaaaacgaagacgaaacaagattcgacacaaaaactagacgggttgcaggaaaaaacaaactacaaacccaaccaaccctgccacaactcaggctcactccccgggtcgcaggaaagcggaacgccccaaagggatctgcgagagcacaaaagcgcaacagcagcagaagagatcagccagagaagaaactgacccaactcgaagtcgaaacggagtgtacaaagaaggaagaaatggaaaacgcaaacgcgccgagatgaataaacggagagcgaggaaaatccacctccaatgtcctgcacctcttttcgataaaggagactttatattaaaaggttacaaagagcgatacatcaagagaatacatagtcttggtacataaaggacacaacgacatactatgatcatttgaaatacagtaccaaatagatttgatatacagtaccaaatagatccagatcttgtgcttcactactgctataccagcaatatccatagagggcagaatgttagccaaccattcagatctgaaatcactggaagcaagtgatgaaaccaacacaaccagaatgacttctgaccagggcccagttttaaatatcagttttcgctacagggatttccaattgccaaacttaccatacaaccacatgtaaaagcaaccagccaaccacaacaacatagataaagtagacaaaagcacagaaatcccaaaccaaaacaagtatcgtgaccgttggactaccaattatttgagctaaatgatctgcagaacagaaattccaacagcacaagaattaaagcttcagtcgaagcagaaacaagttcgattaaatgaaagttgtagactgtagtactgtagttctacccgtatctgcttaaatctcccacatcccaaacatgcccggtgtcttctatcactgcagattaaataagaattatctgaattttatcatggttcatatactagcattttgtaaattagataagtttactcaacacatattccgcgtgacatgctcatccaaaaatatgagaagacctgcaataaaggccccaatcattatctacttcaagatagaagacactgaacaaac

SEQ ID NO: 73334 - DNA, 966 bp, Zea Mays
ctttcgtactgacgcagtgacgctaggtataccgtccgtccgctccttctacgccaaaatagcgtagcacacccagtcaaccactgcagcaaaatttgtacgctatatcgggtatggtggcggcccttacgaatgagagtgcaaccagcaaatcagtatacttttcactttgcacatcggaaatgatatacatcactcatcttctagcaccagagcccgagaaacttgcaggacccttattagctgatacatacgtcacactgctgaaaggtcgcaatgcatggtatgggcagaagttagctaagggagaactgactctagaaatgggggacagcatcaagggcaaagggactatccagggtgtttctgcagtcaatgcattttatgaactgctgagccagggaagcctaagcgtgatgcatccagaaaccaagaaggctgttgctcctgttgagctatgcccaatactcaaaacactatacaaaattttgatcaagagggagcttacgaccaattccatcctccaggcaatacgtgatgaatcaatgtatgatccacgggaaagaattgagatggcacagaggcagtctctttaccggccatctcttcttggcctgcctaaagctgatgcgaaggcctaagatatggtgtttcttcctacctgatgagagcttgcaggagccaggaggcgcttactggtcttcaagatccttacgtgcctcagatgtgtgttgtgtcatgcgtgtacactaatacactatagagttgggtgatggcatatttagcatgccaggataaactttattgcccgtgtctgaaatacaagctgttgtgattcaaatttatttgtcacttagactggagtaaagatgtgtatgccttttattttatgatggcttcagagtctcaaaattggttgtaagattactccctgcgtctcaaaatataattcgttttagattaatc

SEQ ID NO: 73335 - DNA, 1621 bp, Zea Mays
cgatgatcacctagcccacgcgactgccagatcggagcgccaatagacagctcggcaccccacccaaaagtccaaagccccaccagctctgctcagccaccaccatcctcctcttcctcgaacggtcgaaccgccgaaagcacgcaccccgccgccgcgtaccctcccctcacccgctcaccatcgccggccgccgttcggcgcgacgcggattcgaatccggaaagcgggcgatgggggcgaagcgcgcggtgctggtgggcatcaattaccagggcaccaaagcggagctcaagggctgccacaacgacgtcgctcgcatgcgccggtgcctcgtcgaccgcttcggattcgacgagtccggcatccgcgtcctcatagatgacggctccgcgccgcagcccacgggggccaacatccggcgggaactcgcgcgcctcgtcggggacgcgcggcccggggacctcctcttcttccactacagcgggcacggcatacggctgcccgccgagaccgggaaggacgacgacaccggctacgacgagtgcatcgtgccctgcgacatgaaccttatcacagtggagggctacttgacaagaccaaggagcagattgggcacagcaccaagcagaagcagaagcagacccagacccagacccagagccgggaacttgaggaacggtctccttctggcaccagcttccgggaattcctcaaaggtactgttcgggaagcgtttgagtctcaaggaattcacctgccccaccgtagccgtagccaccagcaagggagcggtcacggcgacgacggtgaccaagagtcgcgctacatcaacacagccgatgcccacgtcaaaaaccggtcgctacctctctcgacattgatcgagatgctgaaggagaagactgggaaggacgacattgatgtagggtcaatccggctaacgctttttaacctcttcaaagacgatgccagcccgaagataaagaagttcatgaaggtcatgctgaacaagttacagcaggggcagcacggaggcattgtgggcttcatgggcgctctggcacaggaggtcctgaaagccaagctcgatggcaaggaagaagaagagttcgacccggcaatgaaacagcacgtgcacagcgatcaagaggtgtacgccgggacgacggcaagggtgccgagcaacggtgtcctgatcagtgggtgccagaccgaccagacgtctgccgacgcgaccacgccgaagggggtgtcctacggtgcgctcagcaatgccatccaggccatcctcgcggagcgtgggacggtaacgaacaaggagctcgtgctgaaagcgcgcaagatgctgtcgaaacagggctacacccaacagcctgggctctactgcagcgatgagaatgccagtgcggcttttatatgctgatgatgattcattgggtttgtcctgtggattgcaatatttgtattttgtctctaagtgcatgtgagttggactggtggttatgttttttcgctgagatttgggaatgtatcgtttctttcgcaggatgacattctttgaggatattagtcatttaaacataaaataaattttattttaataaagcacaaaatatac

SEQ ID NO: 73336 - DNA, 980 bp, Zea Mays
aggcaggcagccagcgagtcgagccgagcagtcgccgcacgcggccacgcgcatcggcaccaacccaaagttacacgacacaggggcaggggcagcgctgcacggcccgcaccgggcacccccttcccctgcctcgcgttcgcgttcgcctagtctccttccttttcctctcgctctccgcctccatcagctcgagccgcttccttccacccaccacgcaccacctgacctcccttccctcatcggctcctcctcgttcccactaggcaggaacgccgcgcgccgagccgagctagcggccggaatgcccgcgcagaagcgcccgctcccgtcgtctgcctcgcccggctccgacgccgacgtcgaggaagctcctggcgccgacgcggacggctgcggcggggccgaccaacggtcgccgaaggtgacgctgaacggagtggaggagcgggacggcgggccgctgcaggccaaggaccagcgccacgattccgacgctgacgacgaggaggaaggagaccgcgaaggcggcggcggcggggacgggagcgggagcggaggcgacgacgactgcgacagccagtcgtcgcagagtgacggcgtgatggacgagtttacgcttgtgaaattagtggatgttcggaaggaagtgcaatgccctatatgcctaggagaactgcacatcttatataaaagagaggaagaaaagccatacaaaagaggctatcttgctgagcaagttccccaaggatccttactgttattagatgtcaggttattattaatatttgctacaaaataggaaaccagcaaattccatagaatacatgtgtgcaagtatgttagttgttgttatcttccaaaaaataagcagatgtacatgaattatgtatctttttcttttaactctcagaaaagcctgaaagtcaaactcgtcacatttataatctttttctttatgtgctcctagtactagttgg

SEQ ID NO: 73337 - DNA, 1525 bp, Zea Mays
gaaataacgaatgcccagcgtgccgcactcattgtgctagtagacgttccttgagggatgatcctaactacgatgctttgattctagctttatatccagatattgataagtatgaggaagaggaacttgcattcagtgaagaggaaaggacccgtaacaaaaggaatccattgctgagacatttcggaggcaaacagaagcacttgtgaagaagcgctccactgtaaaagcaacagatgcagcttctacaaggaagactcgacggaatatgcgaccaaggaggagaggacgaattagttctcctgatattgccccaactgattttgacgatgatgatagagaagagaacggtgatgatggaagcaaggagtcgtcttctgttgatgatcactccccagatgtaaggccaaaaagatctcggaggtggcccatgccacgccgttcccctgctaaggccattggcaataccgacaatagcattgaggataatgacgactcaggaggtgctagggactttatgactgcttctccgctgcggggagagatgcttgcatgggggaaaaatggcacccgcagccaaacccggcatggcaactccagtggctccagcggaaggatgggcaggagtggccgtgttgccaagttggtagatcagttccgtaatgctgatgacttcgataatgagttgaacctgtatcttgtcctgcttccacttgatggtcaaagtgtgcctaaactggaaaagccctacctcagttgcctgccaacactatctgttcggcatctctgccagtttgttgctctccagttgtctcggcaacccaaagaagtcgagatatatatcaggaaaagcaaggatgcatgcttgtcagccaattacacctgtaaatacgagacaaagccagaacagcctaatggtttagagagactgtgggaagagaagtctctttcggatctctacccttccctcgccacccgtcaaggagatctggaattgttatactctctgaaagcacaaggacaggggtagatcagatattcactatcaactcgaccagtcgcctcaacgccactgtctgcaaggaccttcaactggtggaagcttgtacataaggctttcaatatagaaaaagatctgaaagtagcttacttgttttaaatttgctctgatatcttgtgaggtatatggtatacccaggttcattagtaaaaatgtgtggagttgagcagtagcaaaccaaccatctgaaacaggctgagcaaagcttgtctatttctgcagccagtattaattgtgtcccatttgaactgatgcaagtactgaggacctctgttccaggatgatccgtggcttgctgtcgtcgccttgtgtgacgcgttcgcgttatccatgttgtcacgccacgtgtccgcgaattagaatgtccagttgttaaccagtaggaaatggtaaacatctgcagctttgtagggacagtattgaaatttttattgtttatacaataaagctcacgggtcgttgctg

SEQ ID NO: 73338 - DNA, 1519 bp, Zea Mays
gaaataacgaatgcccagcgtgccgcactcattgtgctagtagacgttccttgagggatgatcctaactacgatgctttgattctagctttatatccagatattgataagaacttgcattcagtgaagaggaaaggacccgtaacaaaaggattcaagaatccattgctgagacatttcggaggcaaacagaagcacttgtgaagaagcgctccactgtaaaagcaacagatgcagcttctacaaggaagactcgacggaatatgcgaccaaggaggagaggacgaattagttctcctgatattgccccaactgattttgacgatgatgatagagaagagaacggtgatgatggaagcaaggagtcgtcttctgttgatgatcactccccagatgtaaggccaaaaagatctcggaggtggcccatgccacgccgttcccctgctaaggccattggcaataccgacaatagcattgaggataatgacgactcaggaggtgctagggactttatgactgcttctccgctgcggggagagatgcttgcatgggggaaaaatggcacccgcagccaaacccggcatggcaactccagtggctccagcggaaggatgggcaggagtggccgtgttgccaagttggtagatcagttccgtaatgctgatgacttcgataatgagttgaacctgtatcttgtcctgcttccacttgatggtcaaagtgtgcctaaactggaaaagccctacctcagttgcctgccaacactatctgttcggcatctctgccagtttgttgctctccagttgtctcggcaacccaaagaagtcgagatatatatcaggaaaagcaaggatgcatgcttgtcagccaattacacctgtaaatacgagacaaagccagaacagcctaatggtttagagagactgtgggaagagaagtctctttcggatctctacccttccctcgccacccgtcaaggagatctggaattgttatactctctgaaagcacaaggacaggggtagatcagatattcactatcaactcgaccagtcgcctcaacgccactgtctgcaaggaccttcaactggtggaagcttgtacataaggctttcaatatagaaaaagatctgaaagtagcttacttgttttaaatttgctctgatatcttgtgaggtatatggtatacccaggttcattagtaaaaatgtgtggagttgagcagtagcaaaccaaccatctgaaacaggctgagcaaagcttgtctatttctgcagccagtattaattgtgtcccatttgaactgatgcaagtactgaggacctctgttccaggatgatccgtggcttgctgtcgtcgccttgtgtgacgcgttcgcgttatccatgttgtcacgccacgtgtccgcgaattagaatgtccagttgttaaccagtaggaaatggtaaacatctgcagctttgtagggacagtattgaaatttttattgtttatacaataaagctcacgggtcgttgctg

SEQ ID NO: 73339 - DNA, 881 bp, Zea Mays
ctaacatgccgatggatacatttgttagaaaagttactgagttgaacctgtatcttgtcctgcttccacttgatggtcaaagtgtgcctaaactggaaaagccctacctcagttgcctgccaacactatctgttcggcatctctgccagtttgttgctctccagttgtctcggcaacccaaagaagtcgagatatatatcaggaaaagcaaggatgcatgcttgtcagccaattacacctgtaaatacgagacaaagccagaacagcctaatggtttagagagactgtgggaagagaagtctctttcggatctctacccttccctcgccacccgtcaaggagatctggaattgttatactctctgaaagcacaaggacaggggtagatcagatattcactatcaactcgaccagtcgcctcaacgccactgtctgcaaggaccttcaactggtggaagcttgtacataaggctttcaatatagaaaaagatctgaaagtagcttacttgttttaaatttgctctgatatcttgtgaggtatatggtatacccaggttcattagtaaaaatgtgtggagttgagcagtagcaaaccaaccatctgaaacaggctgagcaaagcttgtctatttctgcagccagtattaattgtgtcccatttgaactgatgcaagtactgaggacctctgttccaggatgatccgtggcttgctgtcgtcgccttgtgtgacgcgttcgcgttatccatgttgtcacgccacgtgtccgcgaattagaatgtccagttgttaaccagtaggaaatggtaaacatctgcagctttgtagggacagtattgaaatttttattgtttatacaataaagctcacgggtcgttgctg

SEQ ID NO: 73340 - DNA, 1311 bp, Zea Mays
atggcattgatgcgaggactgcaaagggcggttgcatcccggacgcaccctcccggctcccgcacgccgcctctcagtgagatgttgccatcgctggtgcgcgctcgcagcgcccctctccgccgcctcgtctccacgttctcctcgacgctagccgtattgcctcgcgtcccgcacgtcatcagtagcggcggtaacctcaacctcccgttctccgctcacccctcgccggcccgcgacggcccgagcggtccggctggtggagcccagcgagggataagcttcagcacccgcgcggtggacgccagggacgaggcagcctccagctccgccgcggcggactctgacctctccgcgccttacctctccgtccgcatacgatgccgcaggcacgacgtggaagtactctccgaggcgctcttgagcttcggtgctagctccgtgaccgtggatgacatttccgatgctgaaaatctcgatgaaatctccataacttcattatatgctgatggggaagacgtggactccagtgtaagaagtgccgcgaggaaacatacgagtcgactgaagtggctgatggcctttgggttgttcctaaatggagaactccccctgatccagaggccacaaacataatcatcgatccaggtttggcttttgggatgggggagcacccgacaactaagctgtgccttctatttctacgagaagttattaaaggtggtgaatgtgtgttggattatggaacaggcacgggagtattggggattgcagctctgaagatgggtgctactcaatcaactgggatagatattgaccctcaagccatagcctctgcttcagaaaacttgttgctgaatggtttacattcgaaccaaatgcctgtttatttggtatcaacaaatgcccagccttcatgccttccaagcttcatcgacaaatcagaagagcatcactcaaccaataaccttgacttgaagttatcaagaggaacttatgatgtagttgcagcaaatatccttctaaatcccttactggagctggtcgaggacatagttggttatgcaaaacctggtggaataattgctgtttctggaatattggaggagcaggtgccaaaaatcaaagaagtttactcgaggtatttggacagaatattggtatccgaaatggatgggtgggcctgtcttcagggaaccaggagagtgtagaggaattaagtatttcaccacgttgaagaagggttttgaccttacatgtttttttttttaagagaggactaggtatatacccgtgcgtgcaacagggaca

SEQ ID NO: 73341 - DNA, 525 bp, Zea Mays
cttcaacaaccaagtttcatgtctgatctcaacgtctagcttccatccacctttggttcatatggcctgtgtaatgcaagggcgtagagttggagtggcatactatgattcagatacacgccaactttttgtgttagaaatctgggaagacagcgttggggaatttcctctgattgatcttgaaaatgaacctttgggattcgtggaaaatgaaaccatatagctgacactttgtgatcctggttttacatcagtgaaatttcagtcaaaagcgagcacaatatacacaagcacaaaaacagaagaagcacttttgtcggctttacaaaggaatgatggtaacggtgaggctcctgttgtgaagctcacgaaaagctcaacattcagctatgagcaagcctggcacatattgatctacttgaaagttgcagctatggatgatggactaagtgcaaaagaaaggatatgctttgtcctgcatctgaaattccaccccaataccagccacccgacgacttcttctcg

SEQ ID NO: 73342 - DNA, 1789 bp, Zea Mays
tttttttattctgtactcactgaatggctttctgattacatttcaggttcatatggcctgtgtaatgcaagggcgtagagttggagtggcatactatgattcagatacacgccaactttttgtgttagaaatctgggaagacagcgttggggaatttcctctgattgatcttgtgaaatttcagtcaaaagcgagcacaatatacacaagcacaaaaacagaagaagcacttttgtcggctttacaaaggaatgatggtaacggtgaggctcctgttgtgaagctcacgaaaagctcaacattcagctatgagcaagcctggcacggaataagcataacaaggtcactagaacaaagtggtggaagcttaaaggggatgtggctcaaactttcaaggagagagatatcgaggagggcccttgggcagaagagggagacacaaacatcatgtggaggaagatggcgacatgcatccaaaagatagcttcagaagagtttgggttgagtcaaggaaacagaaggaaagttaaagacacttggtggtggaacgaagatgtccaaaaggctatcaaggagaagatagattgctacaaacgcttacatcatgacaagtgtgcagacaaaatagagaagtacaggatagcgaagaagtctgcaaagcgagcggttagtagagctcggggtcaagcctatgacgacctttatcaacggttgaacacaaagcagggagaaaaggatatctataggatggccaagatacgtgaaaggaagacaagggatgtcaaccaagtcaaatgcatcaaggatgaagcaaaccaactattagtgaagaatgaggagatgaagaacagatggaaggagtacttcaacaaattgttcaatggagggaatgagagttccacaatagaattggacgaaccattcgatgacaacaacaggggttttgtacgaaggatacaagaatatgaagttaaggaggcgctaaaaaggatgaaggtaggaaaggcgatgggccctgatggtatccctatcgaggtatggagatgccttggagacatagcgatagtatgggtgactaagcttttcaacaccatctttcggacaaacagaatgcccgacgagtggtggtggagtacgttagtaccaatcttcaagaacaaaggagatgttcaaagttgtactaattaatcttattaattagtgtaatgtggtgggccttggaaaaacacaaagcatcaacaaagtacattaatcttattaaagatatgtacactaatgttgtgacaagtgtccgaacaagtgatggagacaccgatgactttccaattaacataggactacatcaagggtcggctttgagcccttatcttttcgctttggtgatagatgtggtcacaagggacatacaaggagatataccgtggtgtatgctttttgccgatgatgtggtacttattgaggagattaggagtggtgtttcgcaaaagttggaattgtggaggcagacgctggaagcaaaaggttttaggcttagtaggtctaaaacagagtatatgaagtgtgattttagtgccatggggtatgaggatggcgatgttagtcttgatgggcaagtggtacccaagaaagacacttttcgttacttaggatcaatgcttcagaaggagggagacatcgatgatgatgtcagtcatagaattaaagctggatggttgaagaagcgggaagctgcatgtgtcttatgtgacccccgggtgccacacaaactaaaaggcaaattctacaggac

SEQ ID NO: 73343 - DNA, 848 bp, Zea Mays
tttttttattctgtactcactgaatggctttctgattacatttcaggttcatatggcctgtgtaatgcaagggcgtagaaatctgggaagacagcgttggggaatttcctctgattgatcttgaaaatgaacctttgggattcgtggaaaatgaaaccatatagctgacactttgtgatcctggttttacatcagtgaaatttcagtcaaaagcgagcacaatatacacaagcacaaaaacagaagaagcacttttgtcggctttacaaaggaatgatggtaacggtgaggctcctgttgtgaagctcacgaaaagctcaacattcagctatgagcaagcctggcacatattgatctacttgaaagttgcagctatggatgatggactaagtgcaaaagaaaggatatgctttcttaattccatgatggatcttggaagcgatgttcaagttcgtgctgctggaggtctcctagcaatattagacaatgagagacttcttgacaccattgagcagatggaaggtggagcatccattgcgatcgattctgtggtacagatctcattttatcctctgatggagataaattgaacacactgatgtgttgagatttaattatatcttctgtcatgggctgggcttatggccccagatggcagtatgccagatcagatccgaccttatatactgctgctgccctggccggccgcccgtacccaacagattgcccatgacaactttcagtggcagtctagtttgtaatcaacaaaattatatacataatttatttcctactttcaaggatatagttactctcacgtgtgtatctctagatttatggtgtatatg

SEQ ID NO: 73344 - DNA, 834 bp, Zea Mays
tttttttattctgtactcactgaatggctttctgattacatttcaggttcatatggcctgtgtaatgcaagggcgtagagttggagtggcatactatgattcagatacacgccaactttttgtgttagaaatctgggaagacagcgttggggaatttcctctgattgatcttgaaaatgaacctttgggattcgtggaaaatgaaaccatatagctgacactttgtgatcctggttttacatcagtgaaatttcagtcaaaagcgagcacaatatacacaagcacaaaaacagaagaagcacttttgtcggctttacaaaggaatgatggtaacggtgaggctcctgttgtgaagctcacgaaaagctcaacattcagctatgagcaagcctggcacatcttaattccatgatggatcttggaagcgatgttcaagttcgtgctgctggaggtctcctagcaatattagacaatgagagacttcttgacaccattgagcagatggaaggtggagcatccattgcgatcgattctgtggtacagatctcattttatcctctgatggagataaattgaacacactgatgtgttgagatttaattatatcttctgtcatgggctgggcttatggccccagatggcagtatgccagatcagatccgaccttatatactgctgctgccctggccggccgcccgtacccaacagattgcccatgacaactttcagtggcagtctagtttgtaatcaacaaaattatatacataatttatttcctactttcaaggatatagttactctcacgtgtgtatctctagatttatggtgtatatg

SEQ ID NO: 73345 - DNA, 826 bp, Zea Mays
tttttttattctgtactcactgaatggctttctgattacatttcaggttcatatggcctgtgtaatgcaagggcgtagagttggagtggcatactatgattcagatacacgccaactttttgtgttagaaatctgggaagacagcgttggggaatttcctctgattgatcttgtgaaatttcagtcaaaagcgagcacaatatacacaagcacaaaaacagaagaagcacttttgtcggctttacaaaggaatgatggtaacggtgaggctcctgttgtgaagctcacgaaaagctcaacattcagctatgagcaagcctggcacatattgatctacttgaaagttgcagctatggatgatggactaagtgcaaaagaaaggatatgctttcttaattccatgatggatcttggaagcgatgttcaagttcgtgctgctggaggtctcctagcaatattagacaatgagagacttcttgacaccattgagcagatggaaggtggagcatccattgcgatcgattctgtggtacagatctcattttatcctctgatggagataaattgaacacactgatgtgttgagatttaattatatcttctgtcatgggctgggcttatggccccagatggcagtatgccagatcagatccgaccttatatactgctgctgccctggccggccgcccgtacccaacagattgcccatgacaactttcagtggcagtctagtttgtaatcaacaaaattatatacataatttatttcctactttcaaggatatagttactctcacgtgtgtatctctagatttatggtgtatatg

SEQ ID NO: 73346 - DNA, 898 bp, Zea Mays
tttttttattctgtactcactgaatggctttctgattacatttcaggttcatatggcctgtgtaatgcaagggcgtagagttggagtggcatactatgattcagatacacgccaactttttgtgttagaaatctgggaagacagcgttggggaatttcctctgattgatcttgaaaatgaacctttgggattcgtggaaaatgaaaccatatagctgacactttgtgatcctggttttacatcagtgaaatttcagtcaaaagcgagcacaatatacacaagcacaaaaacagaagaagcacttttgtcggctttacaaaggaatgatggtaacggtgaggctcctgttgtgaagctcacgaaaagctcaacattcagctatgagcaagcctggcacatattgatctacttgaaagttgcagctatggatgatggactaagtgcaaaagaaaggatatgctttcttaattccatgatggatcttggaagcgatgttcaagttcgtgctgctggaggtctcctagcaatattagacaatgagagacttcttgacaccattgagcagatggaaggtggagcatccattgcgatcgattctgtggtacagatctcattttatcctctgatggagataaattgaacacactgatgtgttgagatttaattatatcttctgtcatgggctgggcttatggccccagatggcagtatgccagatcagatccgaccttatatactgctgctgccctggccggccgcccgtacccaacagattgcccatgacaactttcagtggcagtctagtttgtaatcaacaaaattatatacataatttatttcctactttcaaggatatagttactctcacgtgtgtatctctagatttatggtgtatatg

SEQ ID NO: 73347 - DNA, 745 bp, Zea Mays
tttttttattctgtactcactgaatggctttctgattacatttcaggttcatatggcctgtgtaatgcaagggcgtagagttggagtggcatactatgattcagatacacgccaactttttgtgttagaaatctgggaagacagcgttggggaatttcctctgattgatcttgatggtaacggtgaggctcctgttgtgaagctcacgaaaagctcaacattcagctatgagcaagcctggcacatattgatctacttgaaagttgcagctatggatgatggactaagtgcaaaagaaaggatatgctttcttaattccatgatggatcttggaagcgatgttcaagttcgtgctgctggaggtctcctagcaatattagacaatgagagacttcttgacaccattgagcagatggaaggtggagcatccattgcgatcgattctgtggtacagatctcattttatcctctgatggagataaattgaacacactgatgtgttgagatttaattatatcttctgtcatgggctgggcttatggccccagatggcagtatgccagatcagatccgaccttatatactgctgctgccctggccggccgcccgtacccaacagattgcccatgacaactttcagtggcagtctagtttgtaatcaacaaaattatatacataatttatttcctactttcaaggatatagttactctcacgtgtgtatctctagatttatggtgtatatg

SEQ ID NO: 73348 - DNA, 642 bp, Zea Mays
attcagaacactccattagctgaacatctacaaccaaacatgcttagtctggcccatttggaaaaaagggacaagaagctatgtgatgacctatgctatgactatcaattttctctttgtgtatatctctattctgggaacttattgatctacttgaaagttgcagctatggatgatggactaagtgcaaaagaaaggatatgctttcttaattccatgatggatcttggaagcgatgttcaagttcgtgctgctggaggtctcctagcaatattagacaatgagagacttcttgacaccattgagcagatggaaggtggagcatccattgcgatcgattctgtggtacagatctcattttatcctctgatggagataaattgaacacactgatgtgttgagatttaattatatcttctgtcatgggctgggcttatggccccagatggcagtatgccagatcagatccgaccttatatactgctgctgccctggccggccgcccgtacccaacagattgcccatgacaactttcagtggcagtctagtttgtaatcaacaaaattatatacataatttatttcctactttcaaggatatagttactctcacgtgtgtatctctagatttatggtgtatatg

SEQ ID NO: 73349 - DNA, 524 bp, Zea Mays
gttgttgacaaaatcctccctgcgtgatctccctgcgagcccttcatcttcaacattctgagccaatctagagggcgccaacagagcagcttaattccatgatggatcttggaagcgatgttcaagttcgtgctgctggaggtctcctagcaatattagacaatgagagacttcttgacaccattgagcagatggaaggtggagcatccattgcgatcgattctgtggtacagatctcattttatcctctgatggagataaattgaacacactgatgtgttgagatttaattatatcttctgtcatgggctgggcttatggccccagatggcagtatgccagatcagatccgaccttatatactgctgctgccctggccggccgcccgtacccaacagattgcccatgacaactttcagtggcagtctagtttgtaatcaacaaaattatatacataatttatttcctactttcaaggatatagttactctcacgtgtgtatctctagatttatggtgtatatg

SEQ ID NO: 73350 - DNA, 3125 bp, Zea Mays
aggagcaccggtcacatgaatgacgccataattattaattaatatgggtccgattaccaaatttcacacaacaatacaatcgaaaccaccacgaaaacatggaatgcatatcatacctcgtgtacatgtaataacgaggacatatctggtgtacatggaagcttagtatatatggtgcacatattaaatcatcactatttattttagatttaacgtctctagttgatcattgcaatttataaataatattttccaccgctatacttcaccacgtcggagggtgttcttagcaaaatataccaacaactagagacattatatctaaaatgagtaatgctgatttaatatatgcaccatgtacactaaatttatatatgcaccagatatgttccctataataattatgtatacgtataggagggtgcgagcgatatcaggcggagccgcccttgagcctcttggcgatgccggcgaagtacttgccctggtggaaggcgtgctccagctccagttccgtcggccaccgcgacccgtccccggcgaacgtgcccgcgccgtacgggctgccgccgtgcacgctctccatgtcgaatatcttggcgccgaacgtgtaccccacaggcacgaacaccatcccgtggtgcgtcagctgcgtcaccgccgtcagcctggccgccacgccaagggggaaacgttacccactgcttctgcgattcgatcggttggtgctgcaaggggaaggaaacatgttgtgaaaaaaggagaggagacggctgctcacggcgtggtctcctggccgccaccctgggagccggtgctgaagaagaggccggcgggcttgccggccaggctctgctcgcgccacagcccgccggtcgcgtcgaagaaggccttcatctgcgccgccatcatgccgaaccgcgtggggaacccgaagaggacgccgtcggcctccgccagctcctgcggggtgatgaccggcgcgtcggtcttgggtggcgcgcccatcttgccgagcacctcctcggacagaatctccgggacctgccatactttgacctccacgccttcaactgaagcggcgcctttcttcatctcctcagcaagcttggcaacgtgcccgtaggtggagtaaaacctgttgagaaaatgggagcgctttttactgatgcccgatcgagaagagaaccaaaacaatctagtagtacagtacacaggtcagtttctcactttcagtaaatacacaattctcattcatcaatcaaggaacattatgaatagtaagtgtcaaatagatttcggcgtaaagatgtactggaaagaaacaggtgttcgacatcttctaatcaagggtttctagatgctcttgctttttgggtagttggacaatctcattcaggcaggcagcaaaactaaggcatgggtgtaatattatttacttataccaaacggcattagagtggttgtctatccttttaacctgtcatatagatgtgactacagccaaagatcgagatgcgttgtggattgaaacctacaccgtgggttaccaataacaatatgatgctaattttttgctgctcaaaagcgacatcatgtgaggtgtgtgtgttcctcaaaactgaaatgctgcctgttccatggtgaatcgtactcagaagacgaatggacccgcatgccatgttgtttggatgctagttttctacgaaacaaatactcaagagaagcaaaactgtccatcaagtaaagggtccatgagtgtgatgcgaaagttggaagcaacagcaacgagagtcaagaggtagcaaaccaagcatgcatgcccatcagcagacagagtggaactgcactgttgtagtggaaaatacctatcaacagaaaaagggcatctgtggattgcataattgcccacaagagaaaaaagtaatgtgtcgttgaggtggtgcattctagaagtttgcgtgtacagacggagactcggtcacacaaaaaaacaggaaagagtatattattacgactgatgcatttttttaaatctttttgaacaaaagagaaagtgatgcattatttttatctttttgagcaaaagagaaatcggtatcattttccattgtagtaggagtaggtttcacgtccatgcttggatttccatctcaaacaaaagatagaaagtaaatatgataaagatccctgataagtgatagattaacctcgagttcagttacttggacatgtggttcactctgcctaatacaaatgtaggttccatattttaaatgttgagtcgtccttttatatgtatataaatataaaaaaggggggatgttccgttgtactacgtactagcagcaggagggaaacaaaaaaaaactaaaatcgcatcgctaaatcaaatgcccttatgctctcagcagctggtgggagcaaggagttggtgaagatgtcatacatgaccaaatgaaatggttttcaaagcagccgtccttgataataatgatagcagcaacctaatcaatcggcatagagcccccgcctattaggctgagcgacaacaacgccaatatcatcaggacgttagcgcttccacgacatatatttagaacccctagccagctaacaaactattagccatgtaataaactaattgtttgcgtaaccgagaaaccggtaaaatttaccgttctcagcgtcattgttattaaaacgtcgcttaaacgtcgtttaaacgataaaacgtagttagagtttagaacgtccgatcgttttagcaaaaacacgtagaacgtccgtttatcacgtttaaacatcgcttaaacgttgttttctcgttttcgaacgttctaggcgtgttcaggacgttctacgtgttattgggcctttcacaagccaaaaaatacacagggctgccaggcgtcctgtgctgacagcctccctcctctcctctcctctgccccctccccctctccatcccccaacagtccagcactgccaggccagtgaagcgccaccctccctagttttagactttcaatcatcaagacttccaagttcagtcttccagttcagacagtggtgccctccctagtttcagactttcagtcattaagagtttatggttactgatc

SEQ ID NO: 73351 - DNA, 3402 bp, Zea Mays
cccagattgagctaaagaggccagatataatgctaccgaaactcgaccagcccatcgcagcccggcttacacttaagccgacgggtctgttcgtatgggcctgatccgaagcccagatctaccactaaaactgcagtgtccgtcccaatggcaatgacggactgaccagacgcctgaccacgacacgagccaaccatacgggtgctgtcatcttgtccaccccgtgcgactgcgagctcgttgctccgctagttcactcgccgcgacgcgatggttctgactctgctgctgcttctgcttctccccgcggcttcccgcgccagggacaccatcacgccgggccagccgctgcggggaaacgacacgctcgtatcgtccggcgccggcagcttcgtgctcggcttcttctccccgccgggctccaacagcacctacgtcgggatctggtacgccaaggtgcccgtccgcaccgtcgtctgggtggccaaccgcgccgcccccgtgcgcggcgcggcgagcgagagcgccggcgccacgctctccgtgtccagcgagtgcgcgctcgccgtggcggacgccaacgccacggtggtgtggcggtcgttgtcgtcgtcttccccgcggccgtgcgcggcgcggatccaggacgacggcaacctggtggtgtcggaccagcgcgggcgggtggtgtggcaggggttcgaccaccccaccgacacgctgctcccggggatgcggctcggggtggacttcgcggcgggggcgaacatgacgctgacggcgtgggcgagcccctccgacccgtcgccgagccccgtggtggcggccatggacacgtcgggcgacccggaggtgttcatctggaacgggccggccaaggtgtggcggtcggggccctgggacggcgtgcagttcacgggagtcccggacaccgtcacctacaagggcatgggcttcagcttccgcttcgtcaacgacgggcgcgaggccacctacagcttccaggtccgggacgcgggcatcgtctcgaggctggtgctcaacagcacgggcgtcggcggcgggctgatgcagaggtggacgtggctggatgtcgccggcgcgtgggccctctactggtacgcgcccaaggaccagtgcgacgccttgtccccgtgcgggcccaacggggtgtgcgacaccaacaaggtcccggcctgctcctgcctccccgggttcacgccgcggtccccggcgtcgtgggcgatgcgggacgggcgggacggctgcgtccgggccacgccgctggactgcgccaaccgcaccgacggcttcctggtgctgccgcacgccaaggtgcccgacgcgacgcgggcggtggtggacttcaactccagcctggagcagtgccggcagcggtgcctgaggaactgctcctgcacggcgtacgccagcgccaacctcaccgccgcgccggggcgccgcggctgcgtgatgtggaccggcggcctcgaggacctccgcgtgtacccctccttcggccaggaactctacttccggctcgccgccgcagacctcgcttcaaaaggcaagtcaaagaaggtcagtattgtggttgcaattgctgtcagcataactgctgccctggccgttcttctagcaatcacagggttttacatttggagagcaaataaaacaaaagcaagaaaatcaggatcatccatatgggcagctggttcacacaataaggatggcagtgaaggaaaggataatggggacgacctggaactgccagtatatgatttcgagacaatagcagcagccacggagggtttctcagctgagaacaagcttggtgaaggcggctttgggcctgtatacaagggtaagcttgaggatggacaagaagtagctgttaaaacactttcaagaacatcaagacaaggtcttgaggaattcaagaatgaggttttgttgatagctaaactccagcatcggaatcttgttcgactaattggatgcagcatttctggaccagaaaagatacttatatatgaatacatggaaaacaagagcttggacttctttatgtttgacacgaccaggagcaagctacttgactggcaaacacgatatcgtataatcgagggaattgcccgaggtttactgtatcttcaccaggactcgcgatatagaatcatacacagagatctcaagacaagcaacattcttctggataaggatatgactcccaaaatttcagacttcggcatggctagaatgtttggcagtgatgacgcagagatcaatactctcagagtagttggcacatatggttatatggctcccgagtacgcaatggatggggtgttctcggtgaaatcagatgtatttagctttggcgttatagtgctggaaatcattgctggtaaaaggaaccgaggtgtctacagatactctggccacctcaaccttctagcacatgcctggagcttattgaatgaggggaatggcttagatttagtcgacgagaatctgaatggctccttcaactcagatgaagtgctaaaatgcctcaaagtggggcttctttgcgtgcaagagaacccagacgaccgtcccctgatgtctcaggtgctgatgatgctggccagcactgacactgcctcgttgccgactcccaaacagccaggcttcgctgcaagaactgcggccgctgaagacacgtcgtggagcaagcctgactgcagcatcgtggacagcatgaccatcacaatggtcgaaggtcggtagaaagctactccctccgtctcgttttagttgtcgctggatagtgcaaaattgaactatccagcgacaactaaaaagaaacggagggagtatatcagagcacaagatgtatgtatactcatgatatcagtcagagcaaaagatgtatactgtagagtagtagagtggcatctcttcctttgttatcttatttgacaagtgtataaatgtttcctcgagaaaaatgaagaaatcagggaaactaaagttttgcgggttgtgatcgtttacttctgataacgaatataatgtgcaatcaatgctaatattgaaaagaacatatagattgtagagtaaaactgaaggcgttgtcagagtgaaacctcaactcatattgcattgcaggcggtgccaagagaccaataatccgctatctcctggattcagttccccgtctcatcaaccgatctacacaatgagaagctggcgaaattgcgaaacgacattgatattcgagcgaatcgggatacctcctgcgcatccccagaactgcatgatattcgagcgaatgagacgcgcacctcagctattcacctcctctcctcgcgcgtccgtctcctgcggtcctgccccgcagccacatccctctccgat

SEQ ID NO: 73352 - DNA, 3334 bp, Zea Mays
cacttaagccgacgggtctgttcgtatgggcctgatccgaagcccagatctaccactaaaactgcagtgtccgtcccaatggcaatgacggactgaccagacgcctgaccacgacacgagccaaccatacgggtgctgtcatcttgtccaccccgtgcgactgcgagctcgttgctccgctagttcactcgccgcgacgcgatggttctgactctgctgctgcttctgcttctccccgcggcttcccgcgccagggacaccatcacgccgggccagccgctgcggggaaacgacacgctcgtatcgtccggcgccggcagcttcgtgctcggcttcttctccccgccgggctccaacagcacctacgtcgggatctggtacgccaaggtgcccgtccgcaccgtcgtctgggtggccaaccgcgccgcccccgtgcgcggcgcggcgagcgagagcgccggcgccacgctctccgtgtccagcgagtgcgcgctcgccgtggcggacgccaacgccacggtggtgtggcggtcgttgtcgtcgtcttccccgcggccgtgcgcggcgcggatccaggacgacggcaacctggtggtgtcggaccagcgcgggcgggtggtgtggcaggggttcgaccaccccaccgacacgctgctcccggggatgcggctcggggtggacttcgcggcgggggcgaacatgacgctgacggcgtgggcgagcccctccgacccgtcgccgagccccgtggtggcggccatggacacgtcgggcgacccggaggtgttcatctggaacgggccggccaaggtgtggcggtcggggccctgggacggcgtgcagttcacgggagtcccggacaccgtcacctacaagggcatgggcttcagcttccgcttcgtcaacgacgggcgcgaggccacctacagcttccaggtccgggacgcgggcatcgtctcgaggctggtgctcaacagcacgggcgtcggcggcgggctgatgcagaggtggacgtggctggatgtcgccggcgcgtgggccctctactggtacgcgcccaaggaccagtgcgacgccttgtccccgtgcgggcccaacggggtgtgcgacaccaacaaggtcccggcctgctcctgcctccccgggttcacgccgcggtccccggcgtcgtgggcgatgcgggacgggcgggacggctgcgtccgggccacgccgctggactgcgccaaccgcaccgacggcttcctggtgctgccgcacgccaaggtgcccgacgcgacgcgggcggtggtggacttcaactccagcctggagcagtgccggcagcggtgcctgaggaactgctcctgcacggcgtacgccagcgccaacctcaccgccgcgccggggcgccgcggctgcgtgatgtggaccggcggcctcgaggacctccgcgtgtacccctccttcggccaggaactctacttccggctcgccgccgcagacctcgcttcaaaaggcaagtcaaagaaggtcagtattgtggttgcaattgctgtcagcataactgctgccctggccgttcttctagcaatcacagggttttacatttggagagcaaataaaacaaaagcaagaaaatcagggatcatccatatgggcagctggttcacacaataaggatggcagtgaaggaaaggataatggggacgacctggaactgccagtatatgatttcgagacaatagcagcagccacggagggtttctcagctgagaacaagcttggtgaaggcggctttgggcctgtatacaagggtaagcttgaggatggacaagaagtagctgttaaaacactttcaagaacatcaagacaaggtcttgaggaattcaagaatgaggttttgttgatagctaaactccagcatcggaatcttgttcgactaattggatgcagcatttctggaccagaaaagatacttatatatgaatacatggaaaacaagagcttggacttctttatgtttgacacgaccaggagcaagctacttgactggcaaacacgatatcgtataatcgagggaattgcccgaggtttactgtatcttcaccaggactcgcgatatagaatcatacacagagatctcaagacaagcaacattcttctggataaggatatgactcccaaaatttcagacttcggcatggctagaatgtttggcagtgatgacgcagagatcaatactctcagagtagttggcacatatggttatatggctcccgagtacgcaatggatggggtgttctcggtgaaatcagatgtatttagctttggcgttatagtgctggaaatcattgctggtaaaaggaaccgaggtgtctacagatactctggccacctcaaccttctagcacatgcctggagcttattgaatgaggggaatggcttagatttagtcgacgagaatctgaatggctccttcaactcagatgaagtgctaaaatgcctcaaagtggggcttctttgcgtgcaagagaacccagacgaccgtcccctgatgtctcaggtgctgatgatgctggccagcactgacactgcctcgttgccgactcccaaacagccaggcttcgctgcaagaactgcggccgctgaagacacgtcgtggagcaagcctgactgcagcatcgtggacagcatgaccatcacaatggtcgaaggtcggtagaaagctactccctccgtctcgttttagttgtcgctggatagtgcaaaattgaactatccagcgacaactaaaaagaaacggagggagtatatcagagcacaagatgtatgtatactcatgatatcagtcagagcaaaagatgtatactgtagagtagtagagtggcatctcttcctttgttatcttatttgacaagtgtataaatgtttcctcgagaaaaatgaagaaatcagggaaactaaagttttgcgggttgtgatcgtttacttctgataacgaatataatgtgcaatcaatgctaatattgaaaagaacatatagattgtagagtaaaactgaaggcgttgtcagagtgaaacctcaactcatattgcattgcaggcggtgccaagagaccaataatccgctatctcctggattcagttccccgtctcatcaaccgatctacacaatgagaagctggcgaaattgcgaaacgacattgatattcgagcgaatcgggatacctcctgcgcatccccagaactgcatgatattcgagcgaatgagacgcgcacctcagctattcacctcctctcctcgcgcgtccgtctcctgcggtcctgccccgcagccacatccctctccgat

SEQ ID NO: 73353 - DNA, 1666 bp, Zea Mays
gtcagtctagcctcttagacctctggggccaccggacagacagacctaaccctacctgtcattgactacaaactgcacagcaccccctcgttttccattctgctctgcatactcgaagtcgaaggcagcgcggcaggtagcagcagtacgccagcacgcacaccaccagcagcagttgccggttggccaccacccgacgccggaggcctggacgaggaggcggcggcgatggcggggaagcacgggcgcaacggcttcgacgacgacaacgtcaaccccttcgcgaataacaatccagctgaagctggtacaaaatataaaatagtatgatcactgagctgagtctcccaactattccctatcttgcagggtggaagtgttccacctgccaccaattctcgtctctcacctctatcacatgaaccggctgatttctacaatgtggacattcctctcgagtcgtcaaaggatctgaagaaaaaggagaaagaactccaggctatggaggctgagctaaacaaaagagaacgggaattgaaaaggaaggaagatgcggcatcccgagctggcattgtgatagaagagaaaaattggcctccctttttccccctcatccaccatgacatttctaatgagatacctatccatctacaaaggatgcaataccttgcattctcgtcatttttgggattgatagcgtgcctcttttggaatatcatagcaactacaacagcatggattaaaggggaaggtgttatgatctggctgcttgccattatctacttcatatctggtgtgcccggggcttatgtgttatggtatcggcctctttataatgcaatgagaactgagagcgctttgaagtttgggtggttttttctattttacatgattcatataatcttctgtgtctgggcagctgtggctcctccatttcctttcaaaggaaaatctttggctgggattttgccagcaattgatgtcataggcaagaatgctattgtggggatattttacttcgttggattcggcttgttctgccttgaatcacttatgagtatcggtgtcattcagcaagtatacatgtatttccgtggaagtggaaaagctgcagagattaaacgtgaggcagcacgtagtgctctaagttcagccttctgatgaacatctttttgtaaggtctggttacagccagtcgatggatagaagggaacgagatgtgccgattgagccacgggacggtgtcttgtacatcactgcagtacgtggatttggatctctgaaagcgtacagctgatacctgataatctttttgcacttctgtaaaatatgaactatcctcatggatgcgtcagtgtgctggtgccatttcttgtcatggtttaggtgtggttgatagggaaaacggtgttttttttttagtggcgaatataatgtatcttcacgtgagtgtaatagccagtttatttttgtggcatgaatgcagttcgctgtgttttttggccaagacaatccacatgtcaggacacttctctgcccgcacctgtacctgaggcttgcagtcctacagttctagcaaacggtcggtatctacagtagacttcgtatccctgtatcccacctattctctcactctgtgagtctatgtttcaaactctattctgag

SEQ ID NO: 73354 - DNA, 1364 bp, Zea Mays
cagcaccccctcgttttccattctgctctgcatactcgaagtcgaaggcagcgcggcaggtagcagcagtacgccagcacgcacaccaccagcagcagttgccggttggccaccacccgacgccggaggcctggacgaggaggcggcggcgatggcggggaagcacgggcgcaacggcttcgacgacgacaacgtcaaccccttcgcgaataacaatccagctgaagctggtacaaaatataaaatagtatgatcactgagctgagtctcccaactattccctatcttgcagggtggaagtgttccacctgccaccaattctcgtctctcacctctatcacatgaaccggctgatttctacaatgtggacattcctctcgagtcgtcaaaggatctgaagaaaaaggagaaagaactccaggctatggaggctgagctaaacaaaagagaacgggaattgaaaaggaaggaagatgcggcatcccgagctggcattgtgatagaagagaaaaattggcctccctttttccccctcatccaccatgacatttctaatgagatacctatccatctacaaaggatgcaataccttgcattctcgtcatttttgggattgatagcgtgcctcttttggaatatcatagcaactacaacagcatggattaaaggggaaggtgttatgatctggctgcttgccattatctacttcatatctggtgtgcccggggcttatgtgttatggtatcggcctctttataatgcaatgagaactgagagcgctttgaagtttgggtggttttttctattttacatgattcatataatcttctgtgtctgggcagctgtggctcctccatttcctttcaaaggaaaatctttggctgggattttgccagcaattgatgtcataggcaagaatgctattgtggggatattttacttcgttggattcggcttgttctgccttgaatcacttatgagtatcggtgtcattcagcaagtatacatgtatttccgtggaagtggaaaagctgcagagattaaacgtgaggcagcacgtagtgctctaagttcagccttctgatgaacatctttttgtaaggtctggttacagccagtcgatggatagaagggaacgagatgtgccgattgagccacgggacggtgtcttgtacatcactgcattcgctgtgttttttggccaagacaatccacatgtcaggacacttctctgcccgcacctgtacctgaggcttgcagtcctacagttctagcaaacggtcggtatctacagtagacttcgtatccctgtatcccacctattctctcactctgtgagtctatgtttcaaactctattctgag

SEQ ID NO: 73355 - DNA, 1418 bp, Zea Mays
atatggcttgccaggttttgatcatgcatgtttactgaataacaatccagctgaagctggtacaaaatataaaatagtatgatcactgagctgagtctcccaactattccctatcttgcagggtggaagtgttccacctgccaccaattctcgtctctcacctctatcacatgaaccggctgatttctacaatgtggacattcctctcgagtcgtcaaaggatctgaagaaaaaggagaaagaactccaggctatggaggctgagctaaacaaaagagaacgggaattgaaaaggaaggaagatgcggcatcccgagctggcattgtgatagaagagaaaaattggcctccctttttccccctcatccaccatgacatttctaatgagatacctatccatctacaaaggatgcaataccttgcattctcgtcatttttgggattgatagcgtgcctcttttggaatatcatagcaactacaacagcatggattaaaggggaaggtgttatgatctggctgcttgccattatctacttcatatctggtgtgcccggggcttatgtgttatggtatcggcctctttataatgcaatgagaactgagagcgctttgaagtttgggtggttttttctattttacatgattcatataatcttctgtgtctgggcagctgtggctcctccatttcctttcaaaggaaaatctttggctgggattttgccagcaattgatgtcataggcaagaatgctattgtggggatattttacttcgttggattcggcttgttctgccttgaatcacttatgagtatcggtgtcattcagcaagtatacatgtatttccgtggaagtggaaaagctgcagagattaaacgtgaggcagcacgtagtgctctaagttcagccttctgatgaacatctttttgtaaggtctggttacagccagtcgatggatagaagggaacgagatgtgccgattgagccacgggacggtgtcttgtacatcactgcagtacgtggatttggatctctgaaagcgtacagctgatacctgataatctttttgcacttctgtaaaatatgaactatcctcatggatgcgtcagtgtgctggtgccatttcttgtcatggtttaggtgtggttgatagggaaaacggtgttttttttttagtggcgaatataatgtatcttcacgtgagtgtaatagccagtttatttttgtggcatgaatgcagttcgctgtgttttttggccaagacaatccacatgtcaggacacttctctgcccgcacctgtacctgaggcttgcagtcctacagttctagcaaacggtcggtatctacagtagacttcgtatccctgtatcccacctattctctcactctgtgagtctatgtttcaaactctattctgag

SEQ ID NO: 73356 - DNA, 1324 bp, Zea Mays
ccaggttttgatcatgcatgtttactgggtggaagtgttccacctgccaccaattctcgtctctcacctctatcacatgaaccggctgatttctacaatgtggacattcctctcgagtcgtcaaaggatctgaagaaaaaggagaaagaactccaggctatggaggctgagctaaacaaaagagaacgggaattgaaaaggaaggaagatgcggcatcccgagctggcattgtgatagaagagaaaaattggcctccctttttccccctcatccaccatgacatttctaatgagatacctatccatctacaaaggatgcaataccttgcattctcgtcatttttgggattgatagcgtgcctcttttggaatatcatagcaactacaacagcatggattaaaggggaaggtgttatgatctggctgcttgccattatctacttcatatctggtgtgcccggggcttatgtgttatggtatcggcctctttataatgcaatgagaactgagagcgctttgaagtttgggtggttttttctattttacatgattcatataatcttctgtgtctgggcagctgtggctcctccatttcctttcaaaggaaaatctttggctgggattttgccagcaattgatgtcataggcaagaatgctattgtggggatattttacttcgttggattcggcttgttctgccttgaatcacttatgagtatcggtgtcattcagcaagtatacatgtatttccgtggaagtggaaaagctgcagagattaaacgtgaggcagcacgtagtgctctaagttcagccttctgatgaacatctttttgtaaggtctggttacagccagtcgatggatagaagggaacgagatgtgccgattgagccacgggacggtgtcttgtacatcactgcagtacgtggatttggatctctgaaagcgtacagctgatacctgataatctttttgcacttctgtaaaatatgaactatcctcatggatgcgtcagtgtgctggtgccatttcttgtcatggtttaggtgtggttgatagggaaaacggtgttttttttttagtggcgaatataatgtatcttcacgtgagtgtaatagccagtttatttttgtggcatgaatgcagttcgctgtgttttttggccaagacaatccacatgtcaggacacttctctgcccgcacctgtacctgaggcttgcagtcctacagttctagcaaacggtcggtatctacagtagacttcgtatccctgtatcccacctattctctcactctgtgagtctatgtttcaaactctattctgag

SEQ ID NO: 73357 - DNA, 1915 bp, Zea Mays
attctgagtccgaaggtacctgttcacataatccacttggaaaacattgtcaaatcatgtttttgaggaccttcggaggacgaaggcccccaacatccagcgcaccggcggacaagtcggcaaccatctcaggaagtggaaaaggatttatgcgaagatcgagaagctgaagaacctggatggagctgtctgggatgaacataattgcgtaatcagtcttgacgcagagcattacaataaccatattaaggaccaactacttgaacattccggtcgagcattatcatgagatggccattatatctggcaacagttcggcaaccgctgctgcatatgttcaaggatcaaatgagccacttggtgttgaagtgactgaaacagatagtgcaccagctgtgactgaaacaggcaatgcaccaactgtgactggaagacccacgtgtagtgtgccaagtgaacaattcggtggtgacgacggaacgcactcaggcaacaatggcgcagaagagtcttcagatactaagcagccaccaccgtcgaagaagcagagggtatacactgacgatgacttggttgtgacaatgagtcggagcctcggcgagcttgcttcggctataaaaaggctttccgaacaacccggccttcctgttccgaaggggttgtacgaagagctgaagagcatcccagggttcgaggaggcacatcttgagcactactatgcttacctgtgcgagaatcctccgcttgcgagggcattctatgcgctgcctcagctttctagcaaagttacgtgggttgctaggtacgtcaagagtcacagctccgaactgatgtaggtactttgatgatgtggtgctattttggtctagtcactagggatgaaaaaaaaactctttttgttgtatgacaggcagtatggaacgtgattatagtagagaccttttaatataacataacgtagactagtggtgaattgtcttgcttaattatgttctttactatcggttgttgttttcaaacagcattttcccccaaatgtgtggatggacctatacagccaaccgggcatgattttgtaccaactcataccatacagccatccgaacaaaaatcatgtatcataggtaaccaaacaatcaacctataacatctcacccagattgcgaaacacccagattacgaaagagcctctagccgagttggttaagtggtccgagtagcactcctcagatttaggttcacaaagcacaagtcatcttaatataataccgtcgagtttttttaacatctctcagatttgtcatgtcgatcctcttctcaaccagggtatacagagagagaaagaaagagagagtacttcaaatagggccatactttcacaacacacccaaacaacagtgctcgtatgatcgtatttcgcaacacatgttcatcttccatttcatccggccccaaggtgtgttcaggattcagacaccgatcaggtagcctacgtctcgctcacgctcatccttcgcttccagtctccatgcccaaggtgcattgagtattcagacactgatcagtagcttcgaagccgcgtctccaagcgggcattccttagcttgtcctcgtgctggagctcggagatgaatgacgtgtgcgctcatgacaggcggacccatctgtcggttctcccttgctggttttcatttcctgttgatccgtccattcaggagtagttcatttcagcctttagacaggacagcagtaataaggtgtcaatgtgtcgcgttgttcatcgtgaagccagagctgagctgacctccccgatccatggagttatagcacgaaatttcacataaaatactgaaggacttgcacagattcacatcatatagggctacaacgtttccagattcacggtgcaactgtg

SEQ ID NO: 73358 - DNA, 384 bp, Zea Mays
attttttttaggacacaccaaatagcacatggaatcaacacgggtgcaggggggcagcccaacaaaaaaggacaccctaatatgatatttacaaaacttagttcccgtgaatgaactaaaacatacatctacatacacacaaattcgaccaagacattttgctttgtgctatttacaaaaaaaaaaaatgtgtaaaggtgacctggctgtattcttttcagtatttcacaattatgcaagaatactaaaacttgagctaccgaacagacaactattggaattcagtttaaagtgaagtgtacctctcacatctgaagctttcaaaatgtcatctccccatagttagaacgaattcatctcaagactgtaggtcctctgcttgag

SEQ ID NO: 73359 - DNA, 930 bp, Zea Mays
atcgatcttgttgaaagtgtgattgcaaattgttaggtgactaattttaagaccagatgacataatcgaattccttgttcaagatggaattggctcaaactaacaccgggaatacacctaagagctactctttgaatatgttcaaagatttcgttcctatgtgtgttttctccgaatctaaccaagggaaactttcatgtgaaggaaaagtcgagcataaatttgacatggaacctcacagcgataatttggcgaactatggaaagttatgccgtgaaagaacacaaaagtacatggttaaatctagacaagtgcaggtacttgacaatgaccatggaatgagcatgaggccaatgcctggcattgttggtctcatatcttctagttcaaaggaaaagaagaagcaagcaccagtgaaaccatctgatgccaaaagaactcgtagggatcgcacggagatggaaaacgttatattcaagctttttgaaaggcagcccaattgggccctaaaggcactcgtgcaagaaactgaccagccagagcaattcctgaaggagatattgaacgatctgtgtgtgtataataaacgaggtccaaaccagggaacgcatgagctcaagcctgagtacaagaaatccacaggggacactgatactgcttgaagatgagagacgacttggtagaatcgatagttctctgttggtaactcaggccacacaaacacaattgtgatccagtttcatgtgtatgctttcagaggcgttcttttctgtaacaatataagctggatacacgttttttagggaaaggaaaaaagttttgaaacaattgcctgataaatgtgcttcatgggtataaaatattactatatataacgctaagttttagccacgtaacacagagaaagtggaggatctgaaatttcagtaa

SEQ ID NO: 73360 - DNA, 1185 bp, Zea Mays
ggtgacaagtgaagcggcgcttcagcctgtggtcggtgctttcgtccataaaaagtggggaggacggctcggggagcttgacgacactgcacacctctcaccagtccccacacggccacaccacacccagctgtccccatcgcgcgcacactctctcggtctctccctcccagtcccagcgtttgcggtccagtccagagagctcgagcagccatggcggctcccctgttcctcctcctcctgctgctggctatgttcacaggctcagcagacgcggcgttctgcgtgtgcaagacgggcgtgcccgaccaggcgatgcaggcggcgatcgactacgcctgcgccaagggggccgactgcgcctccgcctccaagggcgcgccctgctacggcaacggcaacaaggtggccgtctgctcctacatctgcaacagctactaccagagccgcagcgccacgggcgccacctgcgacttcaacggcgtcgccacgctcaccggcaccgaccccagctccggcacctgcaagttcgcctccggccccagcagcgcaggcaccggcggtggcatgggcgctggcgcgggtaccggcggtggcatgggcgcaggggtcgcgacccccgggagcgccctgagcccaccgttcggcggcactggcgcgtacggcccgtcaggggcaggcagcacggactacaacgacgccgtcgccccgcgcgccgccgggctgcacgtggtggctgccctcgctctcgccgtcgccgtcgccgcacctctccaccgctaggggcggtgccatggcaactgggagctggcgggcacgacactcgcagacgggatcccgcctcggcggcccgccagcgcgggctctggtcgatgtccggcgttagtgcgtgcgcgtacctgatgaagtgatgatgggttttgatcgaccagccgtcagcgtagtgcggtcacggggtttacagtgttattcgaactgacctctctgcttcctcgtgctagtagtggtggctgccatgtgtgtgtgctgctggtagagaactagggattctttttttttcttctgtcgcttccttgcttatatgtcccgtcgtgttaggctgtgtttactatgcagtgtttggtggtggccgctttccatgagaatatttggtgtgcgcgctcatgttgcactgcacgtttggcc

SEQ ID NO: 73361 - DNA, 1172 bp, Zea Mays
gacgacactgcacacctctcaccagtccccacacggccacaccacacccagctgtccccatcgcgcgcacactctctcggtctctccctcccagtcccagcgtttgcggtccagtccagagagctcgagcagccatggcggctcccctgttcctcctcctcctgctgctggctatgttcacaggctcaggtgagcgagctctccggatctgcatgctgctccctgcggcgcttaacgtttgtgtgagaagatgagcagacgcggcgttctgcgtgtgcaagacgggcgtgcccgaccaggcgatgcaggcggcgatcgactacgcctgcgccaagggggccgactgcgcctccgcctccaagggcgcgccctgctacggcaacggcaacaaggtggccgtctgctcctacatctgcaacagctactaccagagccgcagcgccacgggcgccacctgcgacttcaacggcgtcgccacgctcaccggcaccgaccccagctccggcacctgcaagttcgcctccggccccagcagcgcaggcaccggcggtggcatgggcgctggcgcgggtaccggcggtggcatgggcgcaggggtcgcgacccccgggagcgccctgagcccaccgttcggcggcactggcgcgtacggcccgtcaggggcaggcagcacggactacaacgacgccgtcgccccgcgcgccgccgggctgcacgtggtggctgccctcgctctcgccgtcgccgtcgccgcacctctccaccgctaggggcggtgccatggcaactgggagctggcgggcacgacactcgcagacgggatcccgcctcggcggcccgccagcgcgggctctggtcgatgtccggcgttagtgcgtgcgcgtacctgatgaagtgatgatgggttttgatcgaccagccgtcagcgtagtgcggtcacggggtttacagtgttattcgaactgacctctctgcttcctcgtgctagtagtggtggctgccatgtgtgtgtgctgctggtagagaactagggattctttttttttcttctgtcgcttccttgcttatatgtcccgtcgtgttaggctgtgtttactatgcagtgtttggtggtggccgctttccatgagaatatttggtgtgcgcgctcatgttgcactgcacgtttggcc

SEQ ID NO: 73362 - DNA, 1169 bp, Zea Mays
gacgacactgcacacctctcaccagtccccacacggccacaccacacccagctgtccccatcgcgcgcacactctctcggtctctccctcccagtcccagcgtttgcggtccagtccagagagctcgagcagccatggcggctcccctgttcctcctcctcctgctgctggctatgttcacaggctcaggtgagcgagctctccggatctgcatgctgctccctgcggcgcttaacgtttgtgtgagaagatgagacgcggcgttctgcgtgtgcaagacgggcgtgcccgaccaggcgatgcaggcggcgatcgactacgcctgcgccaagggggccgactgcgcctccgcctccaagggcgcgccctgctacggcaacggcaacaaggtggccgtctgctcctacatctgcaacagctactaccagagccgcagcgccacgggcgccacctgcgacttcaacggcgtcgccacgctcaccggcaccgaccccagctccggcacctgcaagttcgcctccggccccagcagcgcaggcaccggcggtggcatgggcgctggcgcgggtaccggcggtggcatgggcgcaggggtcgcgacccccgggagcgccctgagcccaccgttcggcggcactggcgcgtacggcccgtcaggggcaggcagcacggactacaacgacgccgtcgccccgcgcgccgccgggctgcacgtggtggctgccctcgctctcgccgtcgccgtcgccgcacctctccaccgctaggggcggtgccatggcaactgggagctggcgggcacgacactcgcagacgggatcccgcctcggcggcccgccagcgcgggctctggtcgatgtccggcgttagtgcgtgcgcgtacctgatgaagtgatgatgggttttgatcgaccagccgtcagcgtagtgcggtcacggggtttacagtgttattcgaactgacctctctgcttcctcgtgctagtagtggtggctgccatgtgtgtgtgctgctggtagagaactagggattctttttttttcttctgtcgcttccttgcttatatgtcccgtcgtgttaggctgtgtttactatgcagtgtttggtggtggccgctttccatgagaatatttggtgtgcgcgctcatgttgcactgcacgtttggcc

SEQ ID NO: 73363 - DNA, 1225 bp, Zea Mays
gtcgaccaggacgcgggcccctccgttgcgcgctctacaagtctggatccatcatcgtgctcggtggagcatcttcaaacaagaacgaccaggtacggttcctcaagttgatgaaaaggttgtcgtttgttcttgagctggacttcgagctatccaatgcctccttccccttctctgtcaaagtccattggcaatggtgtgcagttcctcaacgggcacctgtcatcaaagcctcttacatgacaaggagatcatgtaccactttcttaacttcatttgcgttcacaactacaaggggatggtgagccattattttatctgtttctttatgtaaatgttgtcgatattgtctagaagttgtcattaagactagcatgtgattcatgccgggtaaaaattgtcgttttcttgtgttttccatttttagcaataccttcagcgctaaataatgagttgctgatctgctgaaaattttgacctgtcagttaataatcacaaatagtaatcatacaatatttttaatcacaagacaccttaaacttttcaccactattcaggtgccactattcaggttcctgacctccctgacaggggacacctctgaaggatataacaagtgggtccataaaaataccatgttagctgaggaagtagccaagaaaacaatggagcttgaacctaggagcattgggtctcatgtagtattgtcaaatatgtattcagcttctgggagatggaatgaagcagcacacctacgagaatccatgagaaaaaagggattattgatgcactgaatgctttctcagagcagatggcacgcgaaggtcatgtacccaatacagaggatgttttccaggatattgaagaagatcacaagtcatatgtgttatgtggtcacagtgagaaacttgctatagtgtttggtattataagcacgcctgctggaaaaaacattcgtgtgatgaagaatctccgagtctgtattgattggcacacagtaactaaatttatttcaaagttagctgatagggagattgtgctgtgtgatgcaaaccgtttccaccactttaaggatggaaattgttcccgcggggacttttggtgatcgggtaaccacttgggattatcatatgtgttgcgatataaagtgaattgcttatttttctctatcaacttaagcttttaggttgaattggtcggatcatgcaacgagtttcaatcattg

SEQ ID NO: 73364 - DNA, 2094 bp, Zea Mays
ctggatccatcatcgtgctcggtggagcatcttcaaacaagaacgaccaggtacggttcctcaagttgatgaaaaggttgtcgtttgttcttgagctggacttcgagctatccaatgcctccttccccttctctgtcaaagtccattggcaatggtgtgcagttcctcaacgggcacctgtcatcaaagcctcttacatgacaaggagatcatgtaccactttcttaacttcatttgcgttcacaactacaaggggatggtgagccattattttatctgtttctttatgtaaatgttgtcgatattgtctagaagttgtcattaagactagcatgtgattcatgccgggtaaaaattgtcgttttcttgtgttttccatttttagcaataccttcagcgctaaataatgagttgctgatctgctgaaaattttgacctgtcagttaataatcacaaatagtaatcatacaatatttttaatcacaagacaccttaaacttttcaccactattcaggtgccactattcaggttcctgacctccctgacaggggacacctctgaaggatataacaagtgaaaatctattcgacgtggtgcagttcctggcgtgacatctcctatcagaccactaagaccaacctatacaaggtgatccaatcccccaagccctattttgtcttattagtctattttgttttggtatccttgttcttgggagtggcaatagattatctgacgtgttagattatgcagttcctattcagtgacgttattgctcctctgactttgtttaactttcagaaatcagaaatggtacatgtgcttattcctttagaggatgtgacctatggtgttattttctactctcttttttaagtgctaaagtagttgccatctgttgaacattatatatacaagcttactaaatgtgatatatgtttgtaccttactaaattactgaatgcatctttatttattttttaattacttggagttgtgaatcaacaagaaatttttaccactaaattactaagggcttgcagggtccataaaaataccatgttagctgaggaagtagccaagaaaacaatggagcttgaacctaggagcattgggtctcatgtagtattgtcaaatatgtattcagcttctgggagatggaatgaagcagcacacctacgagaatccatgagaaaaaagggattattgatgcactgaatgctttctcagagcagatggcacgcgaaggtcatgtacccaatacagaggatgttttccaggatattgaagaagatcacaagtcatatgtgttatgtggtcacagtgagaaacttgctatagtgtttggtattataagcacgcctgctggaaaaaacattcgtgtgatgaagaatctccgagtctgtattgattggcacacagtaactaaatttatttcaaagttagctgatagggagattgtgctgtgtgatgcaaaccgtttccaccactttaaggatggaaattgttcccgcggggacttttggtgatcgggtaaccacttgggattatcatatgtgttgcgatataaagtgaattgcttatttttctctatcaacttaagcttttaggttgaattggtcggatcatgcaacgagtttcaatcattgcgagaacattagagccatctaaacactatatgttcttactctttgattatattaagtttcatctgcttttgatgccaattctgcaatccatcaaagtactagctacagtgtgctcaatttctcaaattatgttttcattgttgaatcatggtcaccttatccccaccttgcataaagaataaagaaaggtatggattcttgaagtgtgcttcaatagttaatcatccaacctcaatgtccaccttaacagtggtaaacactgaatgatagcaccaatacccatactatattgaatgtagcatcaccttgcattgtgtagctgtattgaatatagcaccaacactcatacttgtaatcatttgactgagtgagcaccctgcagcaatctttttctgaatcaagatctttcatgggctgttatctcagtttcttctcatgtttgac

SEQ ID NO: 73365 - DNA, 1465 bp, Zea Mays
ctggatccatcatcgtgctcggtggagcatcttcaaacaagaacgaccaggtacggttcctcaagttgatgaaaaggttgtcgtttgttcttgagctggacttcgagctatccaatgcctccttccccttctctgtcaaagtccattggcaatggtgtgcagttcctcaacgggcacctgtcatcaaagcctcttacatgacaaggagatcatgtaccactttcttaacttcatttgcgttcacaactacaaggggatggtgccactattcaggttcctgacctccctgacaggggacacctctgaaggatataacaagtgggtccataaaaataccatgttagctgaggaagtagccaagaaaacaatggagcttgaacctaggagcattgggtctcatgtagtattgtcaaatatgtattcagcttctgggagatggaatgaagcagcacacctacgagaatccatgagaaaaaagggtatgaagaaggatccagcttgtagttggattgaagtgaagagcaaactgcatgtctttgtagctcatgattggtcccacccttggtatgacaggattattgatgcactgaatgctttctcagagcagatggcacgcgaaggtcatgtacccaatacagaggatgttttccaggatattgaagaagatcacaagtcatatgtgttatgtggtcacagtgagaaacttgctatagtgtttggtattataagcacgcctgctggaaaaaacattcgtgtgatgaagaatctccgagtctgtattgattggcacacagtaactaaatttatttcaaagttagctgatagggagattgtgctgtgtgatgcaaaccgtttccaccactttaaggatggaaattgttcccgcggggacttttggtgatcgggtaaccacttgggattatcatatgtgttgcgatataaagtgaattgcttatttttctctatcaacttaagcttttaggttgaattggtcggatcatgcaacgagtttcaatcattgcgagaacattagagccatctaaacactatatgttcttactctttgattatattaagtttcatctgcttttgatgccaattctgcaatccatcaaagtactagctacagtgtgctcaatttctcaaattatgttttcattgttgaatcatggtcaccttatccccaccttgcataaagaataaagaaaggtatggattcttgaagtgtgcttcaatagttaatcatccaacctcaatgtccaccttaacagtggtaaacactgaatgatagcaccaatacccatactatattgaatgtagcatcaccttgcattgtgtagctgtattgaatatagcaccaacactcatacttgtaatcatttgactgagtgagcaccctgcagcaatctttttctgaatcaagatctttcatgggctgttatctcagtttcttctcatgtttgac

SEQ ID NO: 73366 - DNA, 987 bp, Zea Mays
cgaccaggtacggttcctcaagttgatgaaaaggttgtcgtttgttcttgagctggacttcgagctatccaatgcctccttccccttctctgtcaaagtccattggcaatggtgtgcagttcctcaacgggcacctgtcatcaaagcctcttacatgacaaggagatcatgtaccactttcttaacttcatttgcgttcacaactacaaggggatggtgccactattcaggttcctgacctccctgacaggggacacctctgaaggatataacaagtgggcttgcagggtccataaaaataccatgttagctgaggaagtagccaagaaaacaatggagcttgaacctaggagcattgggtctcatgtagtattgtcaaatatgtattcagcttctgggagatggaatgaagcagcacacctacgagaatccatgagaaaaaagggtatgaagaaggatccagcttgtagttggattgaagtgaagagcaaactgcatgtctttgtagctcatgattggtcccacccttggtatgacaggattattgatgcactgaatgctttctcagagcagatggcacgcgaaggtcatgtacccaatacagaggatgttttccaggatattgaagaagatcacaagtcatatgtgttatgtggtcacagtgagaaacttgctatagtgtttggtattataagcacgcctgctggaaaaaacattcgtgtgatgaagaatctccgagtctgtattgattggcacacagtaactaaatttatttcaaagttagctgatagggagattgtgctgtgtgatgcaaaccgtttccaccactttaaggatggaaattgttcccgcggggacttttggtgatcgggtaaccacttgggattatcatatgtgttgcgatataaagtgaattgcttatttttctctatcaacttaagcttttaggttgaattggtcggatcatgcaacgagtttcaatcattg

SEQ ID NO: 73367 - DNA, 1186 bp, Zea Mays
ctcaagttgatgaaaaggttgtcgtttgttcttgagctggacttcgagctatccaatgcctccttccccttctctgtcaaagtccattggcaatggtgtgcagttcctcaacgggcacctgtcatcaaagcctcttacatgacaaggagatcatgtaccactttcttaacttcatttgcgttcacaactacaaggggatggtgagccattattttatctgtttctttatgtaaatgttgtcgatattgtctagaagttgtcattaagactagcatgtgattcatgccgggtaaaaattgtcgttttcttgtgttttccatttttagcaataccttcagcgctaaataatgagttgctgatctgctgaaaattttgacctgtcagttaataatcacaaatagtaatcatacaatatttttaatcacaagacaccttaaacttttcaccactattcaggtgccactattcaggttcctgacctccctgacaggggacacctctgaaggatataacaagtgaaaatctattcgacgtggtgcagttcctggcgtgacatctcctatcagaccactaagaccaacctatacaagcttctgggagatggaatgaagcagcacacctacgagaatccatgagaaaaaagggtatgaagaaggatccagcttgtagttggattgaagtgaagagcaaactgcatgtctttgtagctcatgattggtcccacccttggtatgacaggattattgatgcactgaatgctttctcagagcagatggcacgcgaaggtcatgtacccaatacagaggatgttttccaggatattgaagaagatcacaagtcatatgtgttatgtggtcacagtgagaaacttgctatagtgtttggtattataagcacgcctgctggaaaaaacattcgtgtgatgaagaatctccgagtctgtattgattggcacacagtaactaaatttatttcaaagttagctgatagggagattgtgctgtgtgatgcaaaccgtttccaccactttaaggatggaaattgttcccgcggggacttttggtgatcgggtaaccacttgggattatcatatgtgttgcgatataaagtgaattgcttatttttctctatcaacttaagcttttaggttgaattggtcggatcatgcaacgagtttcaatcattg

SEQ ID NO: 73368 - DNA, 800 bp, Zea Mays
aacatgatgcaacatttcatgactcatatggtttggacaaaataaataattaatctcttcgtaattaaactaattctacaaaaaagaaaaagagagggtgaaactagaaagagagaagagtaacaactgaatttggttggtaatttagaaagaaattttatacctcaaattcagggtgttacacaccggagcaaacgacatcgcaccggggctgcgtggatcgggtcggcgcacatgttgtagagatccctcggctgctgctgtgtgccaaggcctcgacttgggccgatcggggccctgagcgatttgcaccatggatctgaggagctctcgtcaatgaaggagaggagcaatagggggaggcacgactgttggaggggaggaactcgggtgtcaagtagagttggaagcagccgagcaggggctgggcgcctgggcaccatgttttagccctagaaaagccatcctccatggaattgagtggagcaggggacgaagccagtgcatgctgcaggggagatggtgagttgtactaatgggatgccgagctggtccatgaagtggacgccgagcggctgatggcgggcagccatggaggagcagggagcgtcggcctgctgcaccatggtgaggagagggaggagcagaggaggagcttgggcatccactaaggatgggccgatgcgcgcctcctggagctaggtgtccggcgcaggggacagggaggagctcggctccatggggctggcgacatcgagtgggaataagtgggggagatgagggcggcgactgggaggtgg

SEQ ID NO: 73369 - DNA, 871 bp, Zea Mays
cttaatgtttctgcatttccatttcacatttctaaaatagtccctgtagtatagtaggttcacagtttctgtttttttctttctttcttacaagtgaaaaacattcgaccattttagatcagtatattgacgaaaaggcgaaaaagcgaaaaggcgattctggaggcgccctgggggcaaagccttcgctcgtccccgcccggcgacccagctcaggcgagtctcctctccgacgcggtcgacgccttgccccggtcggccgggttcggcggcccataccatggccgcaatacctcgggcatcggagggcatggagagatcagagttcgtgcgcgttggatctgagccgccctccaacctccagatgcatcaatcgaagatgaatcctgggattttgcggaaggatcacagaaggcctgagcaagaaggagttgcaggatttacttcatgatggggccaagcttctgctgaaagctgcaaatgcgaggaattctgggagagagctgcaagggaacactgaagatggtgaccagatgatggatatggagtgaccgtcggtctctgggtgctggatggttgcttagtggcttgggtctcctttatctagtcggtcctgtttagactgcgttctggttttgcgctttgtcgcagtttggtgctgtatttttggctcctttggatgatgtccttctacttgttgtcatgaatttagacaatgcctggtagatgtctttgacctaaatcaggtcggttatgttttcttccctgtatgttggtgcttggttgcttttgcaactggtacgcacgtttgtatttctgttatgcaagtaatagaaatggaggttctctggtcaaaaaaagtcaaaaacat

SEQ ID NO: 73370 - DNA, 1025 bp, Zea Mays
ctcgtcgatttttttttccagctccacttgagtcatgtgacgagaagatttgcagctagtatatcagaacggtggatttgggcccgagtgatagcgccggaggaagcgtgctccgtgtgggccctccctccggagcccgcccgcgaccgtttctgccgcatggaggaccgccgccgcgtgcggcgttagtcggccgggcggccccgccttccagttccagccgcttggaagccgtcgaggtactccccgccggcgtccaaccttacacagtccgtgttacggggcttgcccgtggcagcttcttctaccagtgcgtgtgcgtctacctccttctggagcccacccccgaggaggtgggagcgagcgatcactgctgtgccgacttcggttataggagaaaaactcatgatgatgatgaattgatgaggaggcaaagaagaagatagatgagctgatcaaggatatctgtggaatagagtttgatatcactgagcttgtgctttatagaaggatgccatagatataagcttggagtcatgggaattggtggaggtgtgccatcttgagaagaagtgattagtttcctctccaagtgttatggagtccagcaggaggcaaacatgcccgcatgatgctgaagccgaaggagcggtgcgctccgtactcctcggtcaatattaaacatgagaaaagaagaagcatatcttccccggagataacaaaaaaatgttcgcaaaaggcacgcgatccaatacgagaacactcggaacactgcttttgtatatctttactgagtggacgatattcgcctgcccttgtgattctctgttttgctcgaatggaatggaatgtacatagcctggtgtaggttttcttgcacatgctggtcgtctagatagccatcgtcaggatcatgtgtcgctggacttgtaatgaaagtatatgattttactggagtaacaatgcctcctctcgtaatggaagtatatgtaatgtaatccgctggtgttgtttgccagcattcc

SEQ ID NO: 73371 - DNA, 1048 bp, Zea Mays
ctcgtcgatttttttttccagctccacttgagtcatgtgacgagaagatttgcagctagtatatcagaacggtggatttgggcccgagtgatagcgccggaggaagcgtgctccgtgtgggccctccctccggagcccgcccgcgaccgtttctgccgcatggaggaccgccgccgcgtgcggcgttagtcggccgggcggccccgccttccagttccagccgcttggaagccgtcgaggtactccccgccggcgtccaaccttacacagtccgtgttacggggcttgcccgtggcagcttcttctaccagtgcgtgtgcgtctacctccttctggagcccacccccgaggaggtgggagcgagcgatcactgctgtgccgacttcggttataggagaaaaactcactcttatatggagactttacagatgatgatgatgaattgatgaggaggcaaagaagaagatagatgagctgatcaaggatatctgtggaatagagtttgatatcactgagcttgtgctttatagaaggatgccatagatataagcttggagtcatgggaattggtggaggtgtgccatcttgagaagaagtgattagtttcctctccaagtgttatggagtccagcaggaggcaaacatgcccgcatgatgctgaagccgaaggagcggtgcgctccgtactcctcggtcaatattaaacatgagaaaagaagaagcatatcttccccggagataacaaaaaaatgttcgcaaaaggcacgcgatccaatacgagaacactcggaacactgcttttgtatatctttactgagtggacgatattcgcctgcccttgtgattctctgttttgctcgaatggaatggaatgtacatagcctggtgtaggttttcttgcacatgctggtcgtctagatagccatcgtcaggatcatgtgtcgctggacttgtaatgaaagtatatgattttactggagtaacaatgcctcctctcgtaatggaagtatatgtaatgtaatccgctggtgttgtttgccagcattcc

SEQ ID NO: 73372 - DNA, 1021 bp, Zea Mays
ctcgtcgatttttttttccagctccacttgagtcatgtgacgagaagatttgcagctagtatatcagaacggtggatttgggcccgagtgatagcgccggaggaagcgtgctccgtgtgggccctccctccggagcccgcccgcgaccgtttctgccgcatggaggaccgccgccgcgtgcggcgttagtcggccgggcggccccgccttccagttccagccgcttggaagccgtcgaggtactccccgccggcgtccaaccttacacagtccgtgttacggggcttgcccgtggcagcttcttctaccagtgcgtgtgcgtctacctccttctggagcccacccccgaggaggtgggagcgagcgatcactgctgtgccgacttcggttataggagaaaaactcactcttatatggagactttacagatgatgatgatgaattgatgaggaggcaaagaagaagatagatgagctgatcaaggatatctgtggaatagagtttgatatcactgagcttgtgctttatagaaggatgccatagatataagcttggagtcatgggaattggtggaggtgtgccatcttgagaagaagtgattagtttcctctccaaggtgattctgctatgctgaagccgaaggagcggtgcgctccgtactcctcggtcaatattaaacatgagaaaagaagaagcatatcttccccggagataacaaaaaaatgttcgcaaaaggcacgcgatccaatacgagaacactcggaacactgcttttgtatatctttactgagtggacgatattcgcctgcccttgtgattctctgttttgctcgaatggaatggaatgtacatagcctggtgtaggttttcttgcacatgctggtcgtctagatagccatcgtcaggatcatgtgtcgctggacttgtaatgaaagtatatgattttactggagtaacaatgcctcctctcgtaatggaagtatatgtaatgtaatccgctggtgttgtttgccagcattcc

SEQ ID NO: 73373 - DNA, 1059 bp, Zea Mays
ctcgtcgatttttttttccagctccacttgagtcatgtgacgagaagatttgcagctagtatatcagaacggtggatttgggcccgagtgatagcgccggaggaagcgtgctccgtgtgggccctccctccggagcccgcccgcgaccgtttctgccgcatggaggaccgccgccgcgtgcggcgttagtcggccgggcggccccgccttccagttccagccgcttggaagccgtcgaggtactccccgccggcgtccaaccttacacagtccgtgttacggggcttgcccgtggcagcttcttctaccagtgcgtgtgcgtctacctccttctggagcccacccccgaggaggtgggagcgagcgatcactgctgtgccgacttcggttataggagaaaaactcactcttatatggagactttacagatgatgatgatgaattgatgaggaggcaaagaagaagatagatgagctgatcaaggatatctgtggaatagagtttgatatcactgagcttgtgctttatagaaggatgccatagatataagcttggagtcatgggaattggtggaggtgtgccatcttgagaagaagtgattagtttcctctccaaggtgattctgcttgttatggagtccagcaggaggcaaacatgcccgcatgatgctgaagccgaaggagcggtgcgctccgtactcctcggtcaatattaaacatgagaaaagaagaagcatatcttccccggagataacaaaaaaatgttcgcaaaaggcacgcgatccaatacgagaacactcggaacactgcttttgtatatctttactgagtggacgatattcgcctgcccttgtgattctctgttttgctcgaatggaatggaatgtacatagcctggtgtaggttttcttgcacatgctggtcgtctagatagccatcgtcaggatcatgtgtcgctggacttgtaatgaaagtatatgattttactggagtaacaatgcctcctctcgtaatggaagtatatgtaatgtaatccgctggtgttgtttgccagcattcc

SEQ ID NO: 73374 - DNA, 1064 bp, Zea Mays
ctcgtcgatttttttttccagctccacttgagtcatgtgacgagaagatttgcagctagtatatcagaacggtggatttgggcccgagtgatagcgccggaggaagcgtgctccgtgtgggccctccctccggagcccgcccgcgaccgtttctgccgcatggaggaccgccgccgcgtgcggcgttagtcggccgggcggccccgccttccagttccagccgcttggaagccgtcgaggtactccccgccggcgtccaaccttacacagtccgtgttacggggcttgcccgtggcagcttcttctaccagtgcgtgtgcgtctacctccttctggagcccacccccgaggaggtgggagcgagcgatcactgctgtgccgacttcggttataggagaaaaactcactcttatatggagactttacagatgatgatgatgaattgatgaggaggcaaagaagaagatagatgagctgatcaaggatatctgtggaatagagtttgatatcactgagcttgtgctttatagaaggatgccatagatataagcttggagtcatgggaattggtggaggtgtgccatcttgagaagaagtgattagtttcctctccaaggtgattctgcttgtagtgttatggagtccagcaggaggcaaacatgcccgcatgatgctgaagccgaaggagcggtgcgctccgtactcctcggtcaatattaaacatgagaaaagaagaagcatatcttccccggagataacaaaaaaatgttcgcaaaaggcacgcgatccaatacgagaacactcggaacactgcttttgtatatctttactgagtggacgatattcgcctgcccttgtgattctctgttttgctcgaatggaatggaatgtacatagcctggtgtaggttttcttgcacatgctggtcgtctagatagccatcgtcaggatcatgtgtcgctggacttgtaatgaaagtatatgattttactggagtaacaatgcctcctctcgtaatggaagtatatgtaatgtaatccgctggtgttgtttgccagcattcc

SEQ ID NO: 73375 - DNA, 1030 bp, Zea Mays
ctcgtcgatttttttttccagctccacttgagtcatgtgacgagaagatttgcagctagtatatcagaacggtggatttgggcccgagtgatagcgccggaggaagcgtgctccgtgtgggccctccctccggagcccgcccgcgaccgtttctgccgcatggaggaccgccgccgcgtgcggcgttagtcggccgggcggccccgccttccagttccagccgcttggaagccgtcgaggtactccccgccggcgtccaaccttacacagtccgtgttacggggcttgcccgtggcagcttcttctaccagtgcgtgtgcgtctacctccttctggagcccacccccgaggaggtgggagcgagcgatcactgctgtgccgacttcggttataggagaaaaactcatgatgatgatgaattgatgaggaggcaaagaagaagatagatgagctgatcaaggatatctgtggaatagagtttgatatcactgagcttgtgctttatagaaggatgccatagatataagcttggagtcatgggaattggtggaggtgtgccatcttgagaagaagtgattagtttcctctccaagtgtagtgttatggagtccagcaggaggcaaacatgcccgcatgatgctgaagccgaaggagcggtgcgctccgtactcctcggtcaatattaaacatgagaaaagaagaagcatatcttccccggagataacaaaaaaatgttcgcaaaaggcacgcgatccaatacgagaacactcggaacactgcttttgtatatctttactgagtggacgatattcgcctgcccttgtgattctctgttttgctcgaatggaatggaatgtacatagcctggtgtaggttttcttgcacatgctggtcgtctagatagccatcgtcaggatcatgtgtcgctggacttgtaatgaaagtatatgattttactggagtaacaatgcctcctctcgtaatggaagtatatgtaatgtaatccgctggtgttgtttgccagcattcc

SEQ ID NO: 73376 - DNA, 659 bp, Zea Mays
gtcgatttttttttccagctccacttgagtcatgtgacgagaagatttgcagctagtatatcagaacggtggatttgggcccgagtgatagcgccggaggaagcgtgctccgtgtgggccctccctccggagcccgcccgcgaccgtttctgccgcatggaggaccgccgccgcgtgcggcgttagtcggccgggcggccccgccttccagttccagccgcttggaagccgtcgaggaggtgggagcgagcgatcactgctgtgccgacttcggttataggagaaaaactcactcttatatggagactttacagatgatgatgatgaattgatgaggaggcaaagaagaagatagatgagctgatcaaggatatctgtggaatagagtttgatatcactgagcttgtgctttatagaaggatgccatagatataagcttggagtcatgggaattggtggaggtgtgccatcttgagaagaagtgattagtttcctctccaaggtgattctgctgtaagttaattctgagaatttgtaatgctttatagcgtcttgttgactactttctaagcaactggggcacaatactttgaatgtgaataaggtataatgtgctcttctgattggagcaaggaataatatacactatgtgatgctgt

SEQ ID NO: 73377 - DNA, 1038 bp, Zea Mays
gtcgatttttttttccagctccacttgagtcatgtgacgagaagatttgcagctagtatatcagaacggtggatttgggcccgagtgatagcgccggaggaagcgtgctccgtgtgggccctccctccggagcccgcccgcgaccgtttctgccgcatggaggaccgccgccgcgtgcggcgttagtcggccgggcggccccgccttccagttccagccgcttggaagccgtcgaggtactccccgccggcgtccaaccttacacagtccgtgttacggggcttgcccgtggcagcttcttctaccagtgcgtgtgcgtctacctccttctggagcccacccccgaggaggtgggagcgagcgatcactgctgtgccgacttcggttataggagaaaaactcatgatgatgatgaattgatgaggaggcaaagaagaagatagatgagctgatcaaggatatctgtggaatagagtttgatatcactgagcttgtgctttatagaaggatgccatagatataagcttggagtcatgggaattggtggaggtgtgccatcttgagaagaagtgattagtttcctctccaaggtgattctgcttgtagtgttatggagtccagcaggaggcaaacatgcccgcatgatgctgaagccgaaggagcggtgcgctccgtactcctcggtcaatattaaacatgagaaaagaagaagcatatcttccccggagataacaaaaaaatgttcgcaaaaggcacgcgatccaatacgagaacactcggaacactgcttttgtatatctttactgagtggacgatattcgcctgcccttgtgattctctgttttgctcgaatggaatggaatgtacatagcctggtgtaggttttcttgcacatgctggtcgtctagatagccatcgtcaggatcatgtgtcgctggacttgtaatgaaagtatatgattttactggagtaacaatgcctcctctcgtaatggaagtatatgtaatgtaatccgctggtgttgtttgccagcattcc

SEQ ID NO: 73378 - DNA, 497 bp, Zea Mays
agctcttggcctgcgagagcatcctgacattatatactgaatagttcaaggagcactgaatgtagtgttatggagtccagcaggaggcaaacatgcccgcatgatgctgaagccgaaggagcggtgcgctccgtactcctcggtcaatattaaacatgagaaaagaagaagcatatcttccccggagataacaaaaaaatgttcgcaaaaggcacgcgatccaatacgagaacactcggaacactgcttttgtatatctttactgagtggacgatattcgcctgcccttgtgattctctgttttgctcgaatggaatggaatgtacatagcctggtgtaggttttcttgcacatgctggtcgtctagatagccatcgtcaggatcatgtgtcgctggacttgtaatgaaagtatatgattttactggagtaacaatgcctcctctcgtaatggaagtatatgtaatgtaatccgctggtgttgtttgccagcattcc

SEQ ID NO: 73379 - DNA, 3208 bp, Zea Mays
atggcggccgccggcacgtcgttctccatccgggagtacgcggtgcgtgcgcgggcgcgggccgagggcggcgggggcgggagctggcctttcggcggggacgcgggggcgctaccgcccatggaggtgcggcggttccggtggtggcgggacgaggcggcagcggtggaggaggaggaggccgaggtggagaggaggttggcggccaagcgccgcaagcgctccgtcgccgagctcttcgccgcggtcccgcgggtgccccgaggcggccaggggcgtggcaaggggaaggctgccaagaggaaggcggagaaagacaagggaaagctagtgctcgctgccagtgttaagaccaacaagaagaaaaaggtcccgactgggatcgatgccagaccaaaggagaaaaacagtggggtaaaggtgaactcagttagcatttctaagtcatttcagcatcctataaaaaatagggaacccaagagttcttgcaagaaaaagggaaaacaagaggtctcagtcttactggataagaaaagtaagaagggaaacagaaagtcagttttggaaatacacaaaaaggatatggcaaacagtgttcaaactcaaagcatttgtaaggatcagtcaaaagcaggttctagcacagcaccgaatacaacagatatgaggaccgcacatctacctgcagataatacaaagcaaccacaatctgtacagacattccagcaagccactcaggaaggtcgtgaccaccgtgatagagatgatcaacagttggtttatcaacaagctgaagctatatcccggactgttgagattaccaattctttgtctgaaaatgtagtactagctggtgtttgccgtacaatcccacttaccaaaccaaaagatatcactatactgggaaactcagtggatctgaatcactgcatagaaacttgtcatggcagtaactgtttgaactccacgagtttggcaagcttatctagtaagatgccatgtcaaaaattccaaggtgtgaactctcatctgaatggcaacaatgtttcaagtcttgatgttcagtatcttggagaacaaaaccatatgatatcacaagcatcatttaatcctgttagtttggcacccaagggagtatcaggtgatatgagcccattgtcagagccttccagttgttgtttatatgataggagcagtatcacgttccacgagaaggctgatgctaattaccacttgggaaaagttagttctgagattcttagatctggtaacgtggtgagaagcataagctcttcaacaggatcaaataaaccagcacaagccatcgattgtgtatctgctgcattcaggaacatgcacagccgccgtgacgattatgtcggccttcctatcaattcacgaggtgaattcgtcaaggttcatcctggtggcacccctaattctgttgacatttttacgaggcagtgtttgggggagaattcctcatgcccctcagattatccaaccatcttcagttctattacccgcatggatcatgtacccaactatcatgctcgacaattctatacaatagaccagtctgcttttcatgcagatcctcgttttcctccagcgggcccaatggcatatgggatggatgtgaggcagtggccaagttctgaaagagcaaaagttcattactacacaattccaaacaaaaagtatccatgcgccaaacagcaagagctttcaatggatcacaattcacagcagaagctacttgggctgcgaagccgctgtcccagccagaactctgggcagggtatgcagcacaacgccgaaacgacactgcgcctcatgggaaaaacggtcacacttgggaccagcagcagcatgcactgtagaggcctgaacaacggaaccccagcttgttccagtaaacaaagccaagctgaagaccggggaacgcgtacgaaagttttcccacagctgtttcacggaggactggctctggctgatcccgctgctgcgtgtaggatatcagatggagagaggcaaccgtctggacacccgtcacgtttctctttggctccagcagctgttcgggcttttctgcctggtaccagcagtttcagaacaggtggccacaaccagcaacctgaactagcaacagccagtaagaatccttatctttcaatacactgcagacatgcaccggagtcatctttcaatgcaaggaacagtttcagaaacttcacggaaaaggggccagcggcaccgtaccagtcgtccagttacctgacgcagcagctcagcagcaacatggcgcagagaaccgccgccgccgcctcctcttctgcgtcaggctacggcgttcagagaccccctggtctaagtctaacaacagcccagacgaaattcacgtcgctccggccgttgccgccttcggtcgtcccttcccatgcctacggcgcgccgcctcacggacccgtcaccgtctttcacccgtcagctcctcccgtgccgtatccagcgagcaattctggcggtcctggcagcagcgacgcggtgttggagatcgagagcgtgaggtggagcgtggtgggatcgaagcctgagggctcggagcgtctgaggagctgcaaaagggcagcagagatggacgccgacgtgtccgtggcgttgctgaagaagcctctcaccgtcgccgccgccgccgcagcacggcaggggctagatatgttgctaccggtcgcagagacggggtcggagttccgtggatccaccaggccggagccggaggcgcagccgcggcctagtggtacgagtacgacgcctatttgtgtcgacgacgagccttgagctgatgatcttcgacttggagacgcaggcaggatcgcgtcccacacggtcatcgaaagatgtcagcgcgatggtaaggtactactactactaccagtggagctgaaacctggagcgaagcgtgtatggcagtcagcagccaagtgccagcagcagcgtgtgccagccagggaaatcccctggcctgtgcgcgcgttcggttacaccgctagcccctcgaggaggcgcgggaggtcagcatgcatgttctaggtgtggtctttggccctctttgttcacctgtatacattgaaacactcatcagtggtttttggctggaagggggaccggggcagggccagagccagagccttctgctgtattgttt

SEQ ID NO: 73380 - DNA, 3580 bp, Zea Mays
atctagctgtctagaaaacgcgaaacttgcaagacccctccgtcgctcgctcccataaaagcctcaatccctccacccacccacctcgcctgcatatcactcgtgtgctcgcaaacaagcgtccgagttggaggcgtggcggcccgttttgcatgccgtagctctcccggtgttcctccccttccgaacccctcgccgcctctccgtctcgtgattcgaatcactgccccattgcgaacgagccgccacagctgctgccagcctcaaggaagggccccggttcccaatcccagacgggccagcggatcgatcgaacaggcggccggccactcgggatcgggccggggccgcggcggcgcatgagctctgacgccgcgagggggcagcgcggcatcaactgcacgaggggcgacgcggcggcgatgccaacctcatcgccctttgtcggcgacagcggcggcgcgggctccccgatccgcgtcgagcgaatggtccgcgagcgtagccgccgctacgacatcttcgcgtcggacgcgatggataccgacgccgaggcggccttcgcgctggatggggtccagtcgcctggacgtgcgtcacccgccaacatggaggatgctggcggcgcggccgcagcgcgaccgccgctcgccggctcccgcagcggtttccgccgcctaggcctccgtggcatgaagcagcgcctcctcgtcgtggccaaccgcctgcctgtatccgccaaccgccgcggagaggaccactggtcgcttgagatcagcgccggcggccttgtgagcgccctccttggcgtgaaggacgtcgacgcgaagtggattggctgggcaggcgtcaacgtaccggacgaggttggtcagcgagccctcactaaagctcttgcggagaagagatgcataccagtgttcctggacgaggagattgtgcaccagtactacaatggatactgcaacaacatcctgtggccactgttccactacctaggactaccacaggaggacaggctggcaacaacgaggaactttgagtcacagttcgacgcgtacaagcgtgctaaccagatgttcgctgatgtcgtgtacgagcactaccaggacggggatgtgatctggtgccatgactaccacctcatgtttctgcccaagtgcctcaaggaccatgacatcaatatgaaggtcgggtggttcctgcacacgccgttcccgtcatcagagatttaccggacactgccgtcccgcttggagctgcttcggtcggtgctgtgtgccgatttagttggatttcatacttacgactatgcgaggcattttgtgagtgcttgcactagaatacttggacttgagggtacccctgagggcgttgaagatcaaggaaggctaaccagggttgcagcgtttcctattgggatagactctgatcgtttcaagcgagcattggagcttccagcagtgaaaaggcacgtcagtgaattgacagaacgttttgccggtcgaaaggtaatgcttggtgttgaccgacttgacatgattaagggaattccgcaaaagattttggcctttgaaaagtttcttgaggaaaacccagactggaacaacaaagttgttctactgcagattgctgtgccaacaagaactgacgtccctgaatatcaaaagctaacgagccaagtgcatgaaattgttgggcgcataaacggtcgatttggaacgttgactgctgtccctattcatcatctggaccgatctcttgatttccatgccttgtgtgctctttatgcagtcactgatgttgctcttgtaacatcactgagagatgggatgaaccttgtgagctatgaatatgttgcatgccaagggtctaagaaaggagttctgatacttagcgagtttgctggggcagcacaatcacttggagctggtgccattctagtaaacccttggaatattacagaagttgcagactcaatacggcatgctttaacgatgccatccgatgagagagagaaacgacacagacacaactacgcacatgtcacaactcacacggctcaagattgggctgaaacttttgtatttgagctaaatgacacggttgctgaagcactactgaggacaagacaagttcctcctggtcttcctagtcaaatggcaattcagcaatatttgcgctctaaaaatcgtctgctcatattgggtttcaattcgacattgactgagccagtcgaatcctctgggagaaggggtggtgaccaaatcaaggaaatggaactcaagttgcatcctgacttaaagggtcctctgagagccctctgtgaggatgagcgcactacagttattgttcttagcggcagtgacaggagtgttcttgatgaaaattttggagaatttaaaatgtggttggcggcagagcatgggatgtttttacgcccgacttacggagaatggatgacaacaatgcctgagcatctgaacatggattgggttgacagcgtaaagcatgtttttgaatactttacagaaagaaccccaagatcccatttcgaacatcgtgaaacatcatttgtgtggaactataagtatgctgatgttgagttcggaaggctacaagcaagagatatgctgcagcacttgtggacaggtccgatctcaaatgcagctgttgatgttgttcaagggagtcgatcagttgaagttcggtctgttggagttaccaagggtgctgcaattgatcgtattttaggggagatagttcacagcgaaaacatgattactccaattgactatgtcctgtgcatagggcatttccttgggaaggatgaggacatctacgtcttctttgatcccgagtacccttctgaatccaaagtaaagccagagggcggctcagcatcacttgaccggaggccgaacgggaggccaccatcgaatggcaggagtaactccaggaacccacagtccaggacacagaaggcgcagcaggctgcatccgagaggtcatcctcatcaagtcacagcagcacgagcagcaaccacgactggcgcgaagggtcctcggtccttgatctcaagggcgagaactacttctcctgcgccgtcgggaggaagcggtccaacgcccgctacctgctgagctcgtcggaggaggttgtctccttcctcaaagagttggcgacagcgacagctggcttccaggccacctgtgctgactacatgcatgttcttggataggcagtaaatagactgaagttgaagcctccgtgctttaccagagacagagagaagaagaatattcattcctcgtatgcgcgacagagctacacccgtagctagtcagcgtgctgtacaatcatgtacaaaatttatgctcgtgataaaactgcgagaggggagctagcaaatgggaaaggataaaggagtttagttgcttctggtacgagacacaatcgcctgattttgagttctcttcgatttgttgtcctttaaattgcgcttttgaactggtttgggtgcacctgaaatacgcctgcgctatatatgagaccacatctcatatttttcatcttaac

SEQ ID NO: 73381 - DNA, 3545 bp, Zea Mays
gcgaaacttgcaagacccctccgtcgctcgctcccataaaagcctcaatccctccacccacccacctcgcctgcatatcactcgtgtgctcgcaaacaagcgtccgagttggaggcgtggcggcccgttttgcatgccgtagctctcccggtgttcctccccttccgaacccctcgccgcctctccgtctcgtgattcgaatcactgccccattgcgaacgagccgccacagctgctgccagcctcaaggaagggccccggttcccaatcccagacgggccagcggatcgatcgaacaggcggccggccactcgggatcgggccggggccgcggcggcgcatgagctctgacgccgcgagggggcagcgcggcatcaactgcacgaggggcgacgcggcggcgatgccaacctcatcgccctttgtcggcgacagcggcggcgcgggctccccgatccgcgtcgagcgaatggtccgcgagcgtagccgccgctacgacatcttcgcgtcggacgcgatggataccgacgccgaggcggccttcgcgctggatggggtccagtcgcctggacgtgcgtcacccgccaacatggaggatgctggcggcgcggccgcagcgcgaccgccgctcgccggctcccgcagcggtttccgccgcctaggcctccgtggcatgaagcagcgcctcctcgtcgtggccaaccgcctgcctgtatccgccaaccgccgcggagaggaccactggtcgcttgagatcagcgccggcggccttgcgtgaaggacgtcgacgcgaagtggattggctgggcaggcgtcaacgtaccggacgaggttggtcagcgagccctcactaaagctcttgcggagaagagatgcataccagtgttcctggacgaggagattgtgcaccagtactacaatggatactgcaacaacatcctgtggccactgttccactacctaggactaccacaggaggacaggctggcaacaacgaggaactttgagtcacagttcgacgcgtacaagcgtgctaaccagatgttcgctgatgtcgtgtacgagcactaccaggacggggatgtgatctggtgccatgactaccacctcatgtttctgcccaagtgcctcaaggaccatgacatcaatatgaaggtcgggtggttcctgcacacgccgttcccgtcatcagagatttaccggacactgccgtcccgcttggagctgcttcggtcggtgctgtgtgccgatttagttggatttcatacttacgactatgcgaggcattttgtgagtgcttgcactagaatacttggacttgagggtacccctgagggcgttgaagatcaaggaaggctaaccagggttgcagcgtttcctattgggatagactctgatcgtttcaagcgagcattggagcttccagcagtgaaaaggcacgtcagtgaattgacagaacgttttgccggtcgaaaggtaatgcttggtgttgaccgacttgacatgattaagggaattccgcaaaagattttggcctttgaaaagtttcttgaggaaaacccagactggaacaacaaagttgttctactgcagattgctgtgccaacaagaactgacgtccctgaatatcaaaagctaacgagccaagtgcatgaaattgttgggcgcataaacggtcgatttggaacgttgactgctgtccctattcatcatctggaccgatctcttgatttccatgccttgtgtgctctttatgcagtcactgatgttgctcttgtaacatcactgagagatgggatgaaccttgtgagctatgaatatgttgcatgccaagggtctaagaaaggagttctgatacttagcgagtttgctggggcagcacaatcacttggagctggtgccattctagtaaacccttggaatattacagaagttgcagactcaatacggcatgctttaacgatgccatccgatgagagagagaaacgacacagacacaactacgcacatgtcacaactcacacggctcaagattgggctgaaacttttgtatttgagctaaatgacacggttgctgaagcactactgaggacaagacaagttcctcctggtcttcctagtcaaatggcaattcagcaatatttgcgctctaaaaatcgtctgctcatattgggtttcaattcgacattgactgagccagtcgaatcctctgggagaaggggtggtgaccaaatcaaggaaatggaactcaagttgcatcctgacttaaagggtcctctgagagccctctgtgaggatgagcgcactacagttattgttcttagcggcagtgacaggagtgttcttgatgaaaattttggagaatttaaaatgtggttggcggcagagcatgggatgtttttacgcccgacttacggagaatggatgacaacaatgcctgagcatctgaacatggattgggttgacagcgtaaagcatgtttttgaatactttacagaaagaaccccaagatcccatttcgaacatcgtgaaacatcatttgtgtggaactataagtatgctgatgttgagttcggaaggctacaagcaagagatatgctgcagcacttgtggacaggtccgatctcaaatgcagctgttgatgttgttcaagggagtcgatcagttgaagttcggtctgttggagttaccaagggtgctgcaattgatcgtattttaggggagatagttcacagcgaaaacatgattactccaattgactatgtcctgtgcatagggcatttccttgggaaggatgaggacatctacgtcttctttgatcccgagtacccttctgaatccaaagtaaagccagagggcggctcagcatcacttgaccggaggccgaacgggaggccaccatcgaatggcaggagtaactccaggaacccacagtccaggacacagaaggcgcagcaggctgcatccgagaggtcatcctcatcaagtcacagcagcacgagcagcaaccacgactggcgcgaagggtcctcggtccttgatctcaagggcgagaactacttctcctgcgccgtcgggaggaagcggtccaacgcccgctacctgctgagctcgtcggaggaggttgtctccttcctcaaagagttggcgacagcgacagctggcttccaggccacctgtgctgactacatgcatgttcttggataggcagtaaatagactgaagttgaagcctccgtgctttaccagagacagagagaagaagaatattcattcctcgtatgcgcgacagagctacacccgtagctagtcagcgtgctgtacaatcatgtacaaaatttatgctcgtgataaaactgcgagaggggagctagcaaatgggaaaggataaaggagtttagttgcttctggtacgagacacaatcgcctgattttgagttctcttcgatttgttgtcctttaaattgcgcttttgaactggtttgggtgcacctgaaatacgcctgcgctatatatgagaccacatctcatatttttcatcttaac

SEQ ID NO: 73382 - DNA, 3586 bp, Zea Mays
atatcactcgtgtgctcgcaaacaagcgtccgagttggaggcgtggcggcccgttttgcatgccgtagctctcccggtgttcctccccttccgaacccctcgccgcctctccgtctcgtgattcgaatcactgccccattgcgaacgagccgccacagctgctgccagcctcaaggaagggccccggttcccaatcccagacgggccagcggatcgatcgaacaggcggccggccactcgggatcgggtgggtgagtcgttccgcttccgaaaccagcctccctgcgtgatgggcctgcttgggtccgcctgttgccgcctcctcgtcgtcgctcaccgctcgcgtccgcctaatgctgcaggccggggccgcggcggcgcatgagctctgacgccgcgagggggcagcgcggcatcaactgcacgaggggcgacgcggcggcgatgccaacctcatcgccctttgtcggcgacagcggcggcgcgggctccccgatccgcgtcgagcgaatggtccgcgagcgtagccgccgctacgacatcttcgcgtcggacgcgatggataccgacgccgaggcggccttcgcgctggatggggtccagtcgcctggacgtgcgtcacccgccaacatggaggatgctggcggcgcggccgcagcgcgaccgccgctcgccggctcccgcagcggtttccgccgcctaggcctccgtggcatgaagcagcgcctcctcgtcgtggccaaccgcctgcctgtatccgccaaccgccgcggagaggaccactggtcgcttgagatcagcgccggcggccttgtgagcgccctccttggcgtgaaggacgtcgacgcgaagtggattggctgggcaggcgtcaacgtaccggacgaggttggtcagcgagccctcactaaagctcttgcggagaagagatgcataccagtgttcctggacgaggagattgtgcaccagtactacaatggatactgcaacaacatcctgtggccactgttccactacctaggactaccacaggaggacaggctggcaacaacgaggaactttgagtcacagttcgacgcgtacaagcgtgctaaccagatgttcgctgatgtcgtgtacgagcactaccaggacggggatgtgatctggtgccatgactaccacctcatgtttctgcccaagtgcctcaaggaccatgacatcaatatgaaggtcgggtggttcctgcacacgccgttcccgtcatcagagatttaccggacactgccgtcccgcttggagctgcttcggtcggtgctgtgtgccgatttagttggatttcatacttacgactatgcgaggcattttgtgagtgcttgcactagaatacttggacttgagggtacccctgagggcgttgaagatcaaggaaggctaaccagggttgcagcgactctgatcgtttcaagcgagcattggagcttccagcagtgaaaaggcacgtcagtgaattgacagaacgttttgccggtcgaaaggtaatgcttggtgttgaccgacttgacatgattaagggaattccgcaaaagattttggcctttgaaaagtttcttgaggaaaacccagactggaacaacaaagttgttctactgcagattgctgtgccaacaagaactgacgtccctgaatatcaaaagctaacgagccaagtgcatgaaattgttgggcgcataaacggtcgatttggaacgttgactgctgtccctattcatcatctggaccgatctcttgatttccatgccttgtgtgctctttatgcagtcactgatgttgctcttgtaacatcactgagagatgggatgaaccttgtgagctatgaatatgttgcatgccaagggtctaagaaaggagttctgatacttagcgagtttgctggggcagcacaatcacttggagctggtgccattctagtaaacccttggaatattacagaagttgcagactcaatacggcatgctttaacgatgccatccgatgagagagagaaacgacacagacacaactacgcacatgtcacaactcacacggctcaagattgggctgaaacttttgtatttgagctaaatgacacggttgctgaagcactactgaggacaagacaagttcctcctggtcttcctagtcaaatggcaattcagcaatatttgcgctctaaaaatcgtctgctcatattgggtttcaattcgacattgactgagccagtcgaatcctctgggagaaggggtggtgaccaaatcaaggaaatggaactcaagttgcatcctgacttaaagggtcctctgagagccctctgtgaggatgagcgcactacagttattgttcttagcggcagtgacaggagtgttcttgatgaaaattttggagaatttaaaatgtggttggcggcagagcatgggatgtttttacgcccgacttacggagaatggatgacaacaatgcctgagcatctgaacatggattgggttgacagcgtaaagcatgtttttgaatactttacagaaagaaccccaagatcccatttcgaacatcgtgaaacatcatttgtgtggaactataagtatgctgatgttgagttcggaaggctacaagcaagagatatgctgcagcacttgtggacaggtccgatctcaaatgcagctgttgatgttgttcaagggagtcgatcagttgaagttcggtctgttggagttaccaagggtgctgcaattgatcgtattttaggggagatagttcacagcgaaaacatgattactccaattgactatgtcctgtgcatagggcatttccttgggaaggatgaggacatctacgtcttctttgatcccgagtacccttctgaatccaaagtaaagccagagggcggctcagcatcacttgaccggaggccgaacgggaggccaccatcgaatggcaggagtaactccaggaacccacagtccaggacacagaaggcgcagcaggctgcatccgagaggtcatcctcatcaagtcacagcagcacgagcagcaaccacgactggcgcgaagggtcctcggtccttgatctcaagggcgagaactacttctcctgcgccgtcgggaggaagcggtccaacgcccgctacctgctgagctcgtcggaggaggttgtctccttcctcaaagagttggcgacagcgacagctggcttccaggccacctgtgctgactacatgcatgttcttggataggcagtaaatagactgaagttgaagcctccgtgctttaccagagacagagagaagaagaatattcattcctcgtatgcgcgacagagctacacccgtagctagtcagcgtgctgtacaatcatgtacaaaatttatgctcgtgataaaactgcgagaggggagctagcaaatgggaaaggataaaggagtttagttgcttctggtacgagacacaatcgcctgattttgagttctcttcgatttgttgtcctttaaattgcgcttttgaactggtttgggtgcacctgaaatacgcctgcgctatatatgagaccacatctcatatttttcatcttaac

SEQ ID NO: 73383 - DNA, 3491 bp, Zea Mays
atatcactcgtgtgctcgcaaacaagcgtccgagttggaggcgtggcggcccgttttgcatgccgtagctctcccggtgttcctccccttccgaacccctcgccgcctctccgtctcgtgattcgaatcactgccccattgcgaacgagccgccacagctgctgccagcctcaaggaagggccccggttcccaatcccagacgggccagcggatcgatcgaacaggcggccggccactcgggatcgggtgggccggggccgcggcggcgcatgagctctgacgccgcgagggggcagcgcggcatcaactgcacgaggggcgacgcggcggcgatgccaacctcatcgccctttgtcggcgacagcggcggcgcgggctccccgatccgcgtcgagcgaatggtccgcgagcgtagccgccgctacgacatcttcgcgtcggacgcgatggataccgacgccgaggcggccttcgcgctggatggggtccagtcgcctggacgtgcgtcacccgccaacatggaggatgctggcggcgcggccgcagcgcgaccgccgctcgccggctcccgcagcggtttccgccgcctaggcctccgtggcatgaagcagcgcctcctcgtcgtggccaaccgcctgcctgtatccgccaaccgccgcggagaggaccactggtcgcttgagatcagcgccggcggccttgtgagcgccctccttggcgtgaaggacgtcgacgcgaagtggattggctgggcaggcgtcaacgtaccggacgaggttggtcagcgagccctcactaaagctcttgcggagaagagatgcataccagtgttcctggacgaggagattgtgcaccagtactacaatggatactgcaacaacatcctgtggccactgttccactacctaggactaccacaggaggacaggctggcaacaacgaggaactttgagtcacagttcgacgcgtacaagcgtgctaaccagatgttcgctgatgtcgtgtacgagcactaccaggacggggatgtgatctggtgccatgactaccacctcatgtttctgcccaagtgcctcaaggaccatgacatcaatatgaaggtcgggtggttcctgcacacgccgttcccgtcatcagagatttaccggacactgccgtcccgcttggagctgcttcggtcggtgctgtgtgccgatttagttggatttcatacttacgactatgcgaggcattttgtgagtgcttgcactagaatacttggacttgagggtacccctgagggcgttgaagatcaaggaaggctaaccagggttgcagcgtttcctattgggatagactctgatcgtttcaagcgagcattggagcttccagcagtgaaaaggcacgtcagtgaattgacagaacgttttgccggtcgaaaggtaatgcttggtgttgaccgacttgacatgattaagggaattccgcaaaagattttggcctttgaaaagtttcttgaggaaaacccagactggaacaacaaagttgttctactgcagattgctgtgccaacaagaactgacgtccctgaatatcaaaagctaacgagccaagtgcatgaaattgttgggcgcataaacggtcgatttggaacgttgactgctgtccctattcatcatctggaccgatctcttgatttccatgccttgtgtgctctttatgcagtcactgatgttgctcttgtaacatcactgagagatgggatgaaccttgtgagctatgaatatgttgcatgccaagggtctaagaaaggagttctgatacttagcgagtttgctggggcagcacaatcacttggagctggtgccattctagtaaacccttggaatattacagaagttgcagactcaatacggcatgctttaacgatgccatccgatgagagagagaaacgacacagacacaactacgcacatgtcacaactcacacggctcaagattgggctgaaacttttgtatttgagctaaatgacacggttgctgaagcactactgaggacaagacaagttcctcctggtcttcctagtcaaatggcaattcagcaatatttgcgctctaaaaatcgtctgctcatattgggtttcaattcgacattgactgagccagtcgaatcctctgggagaaggggtggtgaccaaatcaaggaaatggaactcaagttgcatcctgacttaaagggtcctctgagagccctctgtgaggatgagcgcactacagttattgttcttagcggcagtgacaggagtgttcttgatgaaaattttggagaatttaaaatgtggttggcggcagagcatgggatgtttttacgcccgacttacggagaatggatgacaacaatgcctgagcatctgaacatggattgggttgacagcgtaaagcatgtttttgaatactttacagaaagaaccccaagatcccatttcgaacatcgtgaaacatcatttgtgtggaactataagtatgctgatgttgagttcggaaggctacaagcaagagatatgctgcagcacttgtggacaggtccgatctcaaatgcagctgttgatgttgttcaagggagtcgatcagttgaagttcggtctgttggagttaccaagggtgctgcaattgatcgtattttaggggagatagttcacagcgaaaacatgattactccaattgactatgtcctgtgcatagggcatttccttgggaaggatgaggacatctacgtcttctttgatcccgagtacccttctgaatccaaagtaaagccagagggcggctcagcatcacttgaccggaggccgaacgggaggccaccatcgaatggcaggagtaactccaggaacccacagtccaggacacagaaggcgcagcaggctgcatccgagaggtcatcctcatcaagtcacagcagcacgagcagcaaccacgactggcgcgaagggtcctcggtccttgatctcaagggcgagaactacttctcctgcgccgtcgggaggaagcggtccaacgcccgctacctgctgagctcgtcggaggaggttgtctccttcctcaaagagttggcgacagcgacagctggcttccaggccacctgtgctgactacatgcatgttcttggataggcagtaaatagactgaagttgaagcctccgtgctttaccagagacagagagaagaagaatattcattcctcgtatgcgcgacagagctacacccgtagctagtcagcgtgctgtacaatcatgtacaaaatttatgctcgtgataaaactgcgagaggggagctagcaaatgggaaaggataaaggagtttagttgcttctggtacgagacacaatcgcctgattttgagttctcttcgatttgttgtcctttaaattgcgcttttgaactggtttgggtgcacctgaaatacgcctgcgctatatatgagaccacatctcatatttttcatcttaac

SEQ ID NO: 73384 - DNA, 3610 bp, Zea Mays
atatcactcgtgtgctcgcaaacaagcgtccgagttggaggcgtggcggcccgttttgcatgccgtagctctcccggtgttcctccccttccgaacccctcgccgcctctccgtctcgtgattcgaatcactgccccattgcgaacgagccgccacagctgctgccagcctcaaggaagggccccggttcccaatcccagacgggccagcggatcgatcgaacaggcggccggccactcgggatcgggtgggtgagtcgttccgcttccgaaaccagcctccctgcgtgatgggcctgcttgggtccgcctgttgccgcctcctcgtcgtcgctcaccgctcgcgtccgcctaatgctgcaggccggggccgcggcggcgcatgagctctgacgccgcgagggggcagcgcggcatcaactgcacgaggggcgacgcggcggcgatgccaacctcatcgccctttgtcggcgacagcggcggcgcgggctccccgatccgcgtcgagcgaatggtccgcgagcgtagccgccgctacgacatcttcgcgtcggacgcgatggataccgacgccgaggcggccttcgcgctggatggggtccagtcgcctggacgtgcgtcacccgccaacatggaggatgctggcggcgcggccgcagcgcgaccgccgctcgccggctcccgcagcggtttccgccgcctaggcctccgtggcatgaagcagcgcctcctcgtcgtggccaaccgcctgcctgtatccgccaaccgccgcggagaggaccactggtcgcttgagatcagcgccggcggccttgtgagcgccctccttggcgtgaaggacgtcgacgcgaagtggattggctgggcaggcgtcaacgtaccggacgaggttggtcagcgagccctcactaaagctcttgcggagaagagatgcataccagtgttcctggacgaggagattgtgcaccagtactacaatggatactgcaacaacatcctgtggccactgttccactacctaggactaccacaggaggacaggctggcaacaacgaggaactttgagtcacagttcgacgcgtacaagcgtgctaaccagatgttcgctgatgtcgtgtacgagcactaccaggacggggatgtgatctggtgccatgactaccacctcatgtttctgcccaagtgcctcaaggaccatgacatcaatatgaaggtcgggtggttcctgcacacgccgttcccgtcatcagagatttaccggacactgccgtcccgcttggagctgcttcggtcggtgctgtgtgccgatttagttggatttcatacttacgactatgcgaggcattttgtgagtgcttgcactagaatacttggacttgagggtacccctgagggcgttgaagatcaaggaaggctaaccagggttgcagcgtttcctattgggatagactctgatcgtttcaagcgagcattggagcttccagcagtgaaaaggcacgtcagtgaattgacagaacgttttgccggtcgaaaggtaatgcttggtgttgaccgacttgacatgattaagggaattccgcaaaagattttggcctttgaaaagtttcttgaggaaaacccagactggaacaacaaagttgttctactgcagattgctgtgccaacaagaactgacgtccctgaatatttgcagatcaaaagctaacgagccaagtgcatgaaattgttgggcgcataaacggtcgatttggaacgttgactgctgtccctattcatcatctggaccgatctcttgatttccatgccttgtgtgctctttatgcagtcactgatgttgctcttgtaacatcactgagagatgggatgaaccttgtgagctatgaatatgttgcatgccaagggtctaagaaaggagttctgatacttagcgagtttgctggggcagcacaatcacttggagctggtgccattctagtaaacccttggaatattacagaagttgcagactcaatacggcatgctttaacgatgccatccgatgagagagagaaacgacacagacacaactacgcacatgtcacaactcacacggctcaagattgggctgaaacttttgtatttgagctaaatgacacggttgctgaagcactactgaggacaagacaagttcctcctggtcttcctagtcaaatggcaattcagcaatatttgcgctctaaaaatcgtctgctcatattgggtttcaattcgacattgactgagccagtcgaatcctctgggagaaggggtggtgaccaaatcaaggaaatggaactcaagttgcatcctgacttaaagggtcctctgagagccctctgtgaggatgagcgcactacagttattgttcttagcggcagtgacaggagtgttcttgatgaaaattttggagaatttaaaatgtggttggcggcagagcatgggatgtttttacgcccgacttacggagaatggatgacaacaatgcctgagcatctgaacatggattgggttgacagcgtaaagcatgtttttgaatactttacagaaagaaccccaagatcccatttcgaacatcgtgaaacatcatttgtgtggaactataagtatgctgatgttgagttcggaaggctacaagcaagagatatgctgcagcacttgtggacaggtccgatctcaaatgcagctgttgatgttgttcaagggagtcgatcagttgaagttcggtctgttggagttaccaagggtgctgcaattgatcgtattttaggggagatagttcacagcgaaaacatgattactccaattgactatgtcctgtgcatagggcatttccttgggaaggatgaggacatctacgtcttctttgatcccgagtacccttctgaatccaaagtaaagccagagggcggctcagcatcacttgaccggaggccgaacgggaggccaccatcgaatggcaggagtaactccaggaacccacagtccaggacacagaaggcgcagcaggctgcatccgagaggtcatcctcatcaagtcacagcagcacgagcagcaaccacgactggcgcgaagggtcctcggtccttgatctcaagggcgagaactacttctcctgcgccgtcgggaggaagcggtccaacgcccgctacctgctgagctcgtcggaggaggttgtctccttcctcaaagagttggcgacagcgacagctggcttccaggccacctgtgctgactacatgcatgttcttggataggcagtaaatagactgaagttgaagcctccgtgctttaccagagacagagagaagaagaatattcattcctcgtatgcgcgacagagctacacccgtagctagtcagcgtgctgtacaatcatgtacaaaatttatgctcgtgataaaactgcgagaggggagctagcaaatgggaaaggataaaggagtttagttgcttctggtacgagacacaatcgcctgattttgagttctcttcgatttgttgtcctttaaattgcgcttttgaactggtttgggtgcacctgaaatacgcctgcgctatatatgagaccacatctcatatttttcatcttaac

SEQ ID NO: 73385 - DNA, 1993 bp, Zea Mays
tgcggcctctgtttctgtattaggacctaacttttcttaagcgttataccacactgctgagaaggcactacccatttgaccgatctcttgatttccatgccttgtgtgctctttatgcagtcactgatgttgctcttgtaacatcactgagagatgggatgaaccttgtgagctatgaatatgttgcatgccaagggtctaagaaaggagttctgatacttagcgaggtagctgatcgattatgcatgacttataatcaaggggtggaggatgttttgtttatttacttgtttttgctatcactgcaatttcagtttgctggggcagcacaatcacttggagctggtgccattctagtaaacccttggaatattacagaagttgcagactcaatacggcatgctttaacgatgccatccgatgagagagagaaacgacacagacacaactacgcacatgtcacaactcacacggctcaagattgggctgaaacttttgtatttgagctaaatgacacggttgctgaagcactactgaggacaagacaagttcctcctggtcttcctagtcaaatggcaattcagcaatatttgcgctctaaaaatcgtctgctcatattgggtttcaattcgacattgactgagccagtcgaatcctctgggagaaggggtggtgaccaaatcaaggaaatggaactcaagttgcatcctgacttaaagggtcctctgagagccctctgtgaggatgagcgcactacagttattgttcttagcggcagtgacaggagtgttcttgatgaaaattttggagaatttaaaatgtggttggcggcagagcatgggatgtttttacgcccgacttacggagaatggatgacaacaatgcctgagcatctgaacatggattgggttgacagcgtaaagcatgtttttgaatactttacagaaagaaccccaagatcccatttcgaacatcgtgaaacatcatttgtgtggaactataagtatgctgatgttgagttcggaaggctacaagcaagagatatgctgcagcacttgtggacaggtccgatctcaaatgcagctgttgatgttgttcaagggagtcgatcagttgaagttcggtctgttggagttaccaagggtgctgcaattgatcgtattttaggggagatagttcacagcgaaaacatgattactccaattgactatgtcctgtgcatagggcatttccttgggaaggatgaggacatctacgtcttctttgatcccgagtacccttctgaatccaaagtaaagccagagggcggctcagcatcacttgaccggaggccgaacgggaggccaccatcgaatggcaggagtaactccaggaacccacagtccaggacacagaaggcgcagcaggctgcatccgagaggtcatcctcatcaagtcacagcagcacgagcagcaaccacgactggcgcgaagggtcctcggtccttgatctcaagggcgagaactacttctcctgcgccgtcgggaggaagcggtccaacgcccgctacctgctgagctcgtcggaggaggttgtctccttcctcaaagagttggcgacagcgacagctggcttccaggccacctgtgctgactacatgcatgttcttggataggcagtaaatagactgaagttgaagcctccgtgctttaccagagacagagagaagaagaatattcattcctcgtatgcgcgacagagctacacccgtagctagtcagcgtgctgtacaatcatgtacaaaatttatgctcgtgataaaactgcgagaggggagctagcaaatgggaaaggataaaggagtttagttgcttctggtacgagacacaatcgcctgattttgagttctcttcgatttgttgtcctttaaattgcgcttttgaactggtttgggtgcacctgaaatacgcctgcgctatatatgagaccacatctcatatttttcatcttaac

SEQ ID NO: 73386 - DNA, 1805 bp, Zea Mays
ggcagatgtgttttcttccacttcgatgttgctcttgtaacatcactgagagatgggatgaaccttgtgagctatgaatatgttgcatgccaagggtctaagaaaggagttctgatacttagcgagtttgctggggcagcacaatcacttggagctggtgccattctagtaaacccttggaatattacagaagttgcagactcaatacggcatgctttaacgatgccatccgatgagagagagaaacgacacagacacaactacgcacatgtcacaactcacacggctcaagattgggctgaaacttttgtatttgagctaaatgacacggttgctgaagcactactgaggacaagacaagttcctcctggtcttcctagtcaaatggcaattcagcaatatttgcgctctaaaaatcgtctgctcatattgggtttcaattcgacattgactgagccagtcgaatcctctgggagaaggggtggtgaccaaatcaaggaaatggaactcaagttgcatcctgacttaaagggtcctctgagagccctctgtgaggatgagcgcactacagttattgttcttagcggcagtgacaggagtgttcttgatgaaaattttggagaatttaaaatgtggttggcggcagagcatgggatgtttttacgcccgacttacggagaatggatgacaacaatgcctgagcatctgaacatggattgggttgacagcgtaaagcatgtttttgaatactttacagaaagaaccccaagatcccatttcgaacatcgtgaaacatcatttgtgtggaactataagtatgctgatgttgagttcggaaggctacaagcaagagatatgctgcagcacttgtggacaggtccgatctcaaatgcagctgttgatgttgttcaagggagtcgatcagttgaagttcggtctgttggagttaccaagggtgctgcaattgatcgtattttaggggagatagttcacagcgaaaacatgattactccaattgactatgtcctgtgcatagggcatttccttgggaaggatgaggacatctacgtcttctttgatcccgagtacccttctgaatccaaagtaaagccagagggcggctcagcatcacttgaccggaggccgaacgggaggccaccatcgaatggcaggagtaactccaggaacccacagtccaggacacagaaggcgcagcaggctgcatccgagaggtcatcctcatcaagtcacagcagcacgagcagcaaccacgactggcgcgaagggtcctcggtccttgatctcaagggcgagaactacttctcctgcgccgtcgggaggaagcggtccaacgcccgctacctgctgagctcgtcggaggaggttgtctccttcctcaaagagttggcgacagcgacagctggcttccaggccacctgtgctgactacatgcatgttcttggataggcagtaaatagactgaagttgaagcctccgtgctttaccagagacagagagaagaagaatattcattcctcgtatgcgcgacagagctacacccgtagctagtcagcgtgctgtacaatcatgtacaaaatttatgctcgtgataaaactgcgagaggggagctagcaaatgggaaaggataaaggagtttagttgcttctggtacgagacacaatcgcctgattttgagttctcttcgatttgttgtcctttaaattgcgcttttgaactggtttgggtgcacctgaaatacgcctgcgctatatatgagaccacatctcatatttttcatcttaac

SEQ ID NO: 73387 - DNA, 2247 bp, Zea Mays
ccgcttcgctcacgctcacgccgtccccagtccccactctcccccgcccccctcgccccacgcatgagaggagagcggccggacctggaagcttctccgcggcgctgcgtcgccagctcgcagcggtgactggtgtcctttcaacttgaccttcgccaccgttagctagactcgttcgtgatctcagatggacaccctagtgacactataccatggaggaagcgtggagcaagatgtttatgggaatgttagtttttatgctatgaagaatgtgaccgtgatgttcgatgaaagaccctcttttggccagattttcgctcgggcttgtgaggagattagttgcaatttaaacgaccctagcatatcaattgagggtttattgtcccatgttacatctgggacagttgttcgacggttgatctccattgcctctgaagatgactgggtgaaatatgtcaaaattgtgaagacaattgttcccccatatttggatgtggttgttcgaaagttatcgtttagtcattgcgatgctccagtcgggttatctccacaaatgccaaatgcatgtcgtattgaagctcctttgcctgagcttccggaagaagtggttgttgtgccagatgctcaatcggcctcgaacgagtttaagatttctcgtcctgttcgcggcgtttgtgggtcttcgaatccggtggtaccccctcaggagatcccattgatacaggatccaatccaggatcatcctagatctccacaactagataatggtgcttatcttcatgtgcccctatcattcaatatggaacacatatgcagtgcctcaaatagtgttgatgttcagattgaggatgaggaggagccatatgaggctgcacgagccttagattctgatgatgaccgcccggttcaagaaatgaccgagcaagaaattgaactcataagacgtttgtgtcccgagcgtgaccctgcagtacatgaatctagcagtctaagtcattgcaacggtgcatatgcagaaggacgtgatgatgaattgctagaggcttcggataacgccgacaacattgatattaaggtaggcttacttttcaaagatctgtctacactgagacaatggctactggaatattccgtgaaccgcaagaggccgttcaaggtgagacactcatatgcacagcgtcgttacacagttgtgtgcgaggtgtcagaatgtaattggagggtatgtgcccgaaggcagaaggaaaccggaaagtttaaaatcacaaaaattgtaggtccacacacttgtgcccagacagagctgagctctaagcatcgtcatttgacatctaccctaattgcgaaaaggctattggggacattgaagggtcagccaaacttgaaggtgaagtcaattatgaccatgacttgggagttgtttggttacaagatcaagtatgggaaagcatggagggcaaagcaacgagcatggaagatgatatacggggattgggaggagggttacgagaagttgccagcattgttcaatgcaatgaaagctaaaaacccaggcatgcattacgagtacatccctaaacccaacgaatggaggaatggcagagagatcttctttcgtgctttctggtgtttctcgcaatgcgtagaggccttcaggcattgtcgtcccgtgctgtctattgatggtacttttctgcttgggaagtataagggcacattgttggttgccatatcatgtgacgcggacaacacattggttcctttggcatttgctttggtggagagggagaacagagagagttgggcttggttcttgcgacttgttcggatccatgtcgtgggtcctggtcgcgaggttggtgtcatatctgacagacatcagggtattcttaatgcagtgcaagagcagattcctggctacgcacccatgcaccacagatggtgcactcgacatctagcagaaaatcttcttcgaaaggatcgtagcaaggctaatttccccctttttgaggagatctgtcaacaattggaggtttcgtttttcgaggacaagttgaagaaactaaaagatgcaacaaatgctgaaggtaagaactggattgctggattgttgagggaaccccaaaaatggacaagtgcctatgacgaaggtggttggaggttcgagttccagactagcaacatggccgagttatttaacagtgtgcttaagggtatacgcggaatgccagtcaatgctatagtaac

SEQ ID NO: 73388 - DNA, 2542 bp, Zea Mays
cgcccatttccgagcagtctgcgcgtgccggcgtgcgtcagtctccgcgaccgcccgtgagccgtgatctgacgaggaggcgcacctgcttcgcccgcgctgcgacgactgacgactgacgaggcgtgcggcgcgcgtgaggaggaaggcttctccatctggcaaccggcggcaggaggacgatcaactccgcgactccacttcctcacgcggcgtgtcctctccccggaggaggcggaggcggctcacgggctctgattggcggatggcgcgtcggatcggagcagtcgagcttcggggatttcctgtccctctggaagggatgaaatgcggcgactacctggtgaactgggtggagctctagtgccagccagtgttcctgctgacgcctgcctcatctagtccccccttcgttcagttcttgtggcgagttgttaatccaccgtgtccgggatccgtttggcctggggttttgaggagatggacgacgaggactactcgtgggtgcggcgcaccaggttctcgcagtccatcgtcagatccagctctggcagggagcagtatggcgcgttcatcgagcagttcagccgtggcgccgagctgaggcagaatgggttgggcacagggtacaggaaccctcgccagagtgtacagcccttggcgaagggatccggggtctccaactctgcaaggctgccgattcccaaggcgaagtcagcagttgcccagtcggaacggaagctgaagcatgcgtcttccgaaggccaattgaacagagacggtgatcgcccgttgcaagaatcatcggcgaagcagagccggaaaggggccgtcggcctcagtctggacattccgcagctgcatgtggttcggccatccaaggagagcccagacgcgctggatttctctttccactcggacgagcacagccagaggctccagagagtgtgttccagcccggctcctttctctacgaaggatggtacggcaccagctggtgattccagagcgagcagtgcatctatgaagatcatcggacaagtgtccaaacccgcgccgaaacgaagagccaagtcccctatccccaagcgcgtcatctcggatgtgtttaaggaggcgaaagcagccaccaagaggttctccagcccgcagcggcagaggaagcccacatctccacggtcactagatgacagccctccattcggctttgcttcgctaagaacaccaagcaagctgaagattaatagcagaacctcctcatggccgagaaggaacctcgacagtgggctggcgaaagttgctgcactggagatccttgagaggtggacggtcgatcgctctgagttgctcattggacataggtttgcatccggggcttatagccgattgttccatgggatctacaaggagcaacctgttgctgtaaagtttatcagacagcctgacgatggtgaggatgacgaattatctgctaagcttgagaagcagttcacttcagaggttaccattctggcaaggctccaacatcgtaatgtcattaagcttgttggggcctgtaattgcccgccagtattctgtgtaatcactgagtttctgtctgggggttctttgagggctttcttgcgaaagttggagcgcaaagctcttcctttggagaaggtcatttccatcgctttggatatcgcccgcggcctggaatatattcacctccagggaatcgtacaccgtgacgtcaaacccgagaacatcttatttgatggagaattctgtgctaaagttgtcgattttggagtggcgtgtgaagaaacatactgcaatttgttaggggatgatccaggtacttatagatggatggcaccagagatgtacaagcacaagccctatggccggaaagttgatgtgtatagctttgggcttctcttgtgggaattggtcaccggttcactcccttatgaagatatgactccgcttcaggcagctttcgccgttgttaataagaacttgaggccggtcattccattgagctgcccagcagcgctgaagcttctgattgagcagtgttggtcctggcaaccagaaaagaggcccgactttcagcagatagtttctatcctcgaagatctcaagacagttcttgaaacagacggaacactccacaaggtcccaagctcgatctgccaggccttggaatccaatgatcagaacaagaagaaggccggtaactggatccagaggctgtcatacgctcaacctgatttctccgggcctccacccccaaagttactgtagctacgcgtcttcttgttcttggtagcttgtttatctggttggtagcaactgtgtaaattgaacctttcttgtttcttgttgagagaccacagatttcgtcatggtatatactcggacaaagtacatacatcaattcttttttcggctaccttaacaacttctatcttgatgatacatgggagcgatatgatagcaatctagctagcaggttggtggtcgaagataactgagattaaagaaatcttaagataac

SEQ ID NO: 73389 - DNA, 2591 bp, Zea Mays
cgagcagtctgcgcgtgccggcgtgcgtcagtctccgcgaccgcccgtgagccgtgatctgacgaggaggcgcacctgcttcgcccgcgctgcgacgactgacgactgacgaggcgtgcggcgcgcgtgaggaggaaggcttctccatctggcaaccggcggcaggaggacgatcaactccgcgactccacttcctcacgcggcgtgtcctctccccggaggaggcggaggcggctcacgggctctgattggcggatggcgcgtcggatcggagcagtcgagcttcggggatttcctgtccctctggaagggatgaaatgcggcgactacctggtgaactgggtggagctctagtgccagccagtgttcctgctgacgcctgcctcatctagtccccccttcgttcagttcttgtggcgagttgttaatccaccgtgtccgggatccgtttggcctggggttttgaggagatggacgacgaggactactcgtgggtgcggcgcaccaggttctcgcagtccatcgtcagatccagctctggcagggagcagtatggcgcgttcatcgagcagttcagccgtggcgccgagctgaggcagaatgggttgggcacagggtacaggaaccctcgccagagtgtacagcccttggcgaagggatccggggtctccaactctgcaaggctgccgattcccaaggcgaagtcagcagttgcccagtcggaacggaagctgaagcatgcgtcttccgaaggccaattgaacagagacggtgatcgcccgttgcaagaatcatcggcgaagcagagccggaaaggggccgtcggcctcagtctggacattccgcagctgcatgtggttcggccatccaaggagagcccagacgcgctggatttctctttccactcggacgagcacagccagaggctccagagagtgtgttccagcccggctcctttctctacgaaggatggtacggcaccagctggtgattccagagcgagcagtgcatctatgaagatcatcggacaagtgtccaaacccgcgccgaaacgaagagccaagtcccctatccccaagcgcgtcatctcggatgtgtttaaggaggcgaaagcagccaccaagaggttctccagcccgcagcggcagaggaagcccacatctccacggtcactagatgacagccctccattcggctttgcttcgctaagaacaccaagcaagctgaagattaatagcagaacctcctcatggccgagaaggaacctcgacagtgggctggcgaaagttgctgcactggagatccttgagaggtggacggtcgatcgctctgagttgctcattggacataggtttgcatccggggcttatagccgattgttccatgggatctacaaggagcaacctgttgctgtaaagtttatcagacagcctgacgatggtgaggatgacgaattatctgctaagcttgagaagcagttcacttcagaggttaccattctggcaaggctccaacatcgtaatgtcattaagacaaatgaaaagctaaagtattgtcgttactattgacttgtcagaattacgtgacaaagcttgttggggcctgtaattgcccgccagtattctgtgtaatcactgagtttctgtctgggggttctttgagggctttcttgcgaaagttggagcgcaaagctcttcctttggagaaggtcatttccatcgctttggatatcgcccgcggcctggaatatattcacctccagggaatcgtacaccgtgacgtcaaacccgagaacatcttatttgatggagaattctgtgctaaagttgtcgattttggagtggcgtgtgaagaaacatactgcaatttgttaggggatgatccaggtacttatagatggatggcaccagagatgtacaagcacaagccctatggccggaaagttgatgtgtatagctttgggcttctcttgtgggaattggtcaccggttcactcccttatgaagatatgactccgcttcaggcagctttcgccgttgttaataagaacttgaggccggtcattccattgagctgcccagcagcgctgaagcttctgattgagcagtgttggtcctggcaaccagaaaagaggcccgactttcagcagatagtttctatcctcgaagatctcaagacagttcttgaaacagacggaacactccacaaggtcccaagctcgatctgccaggccttggaatccaatgatcagaacaagaagaaggccggtaactggatccagaggctgtcatacgctcaacctgatttctccgggcctccacccccaaagttactgtagctacgcgtcttcttgttcttggtagcttgtttatctggttggtagcaactgtgtaaattgaacctttcttgtttcttgttgagagaccacagatttcgtcatggtatatactcggacaaagtacatacatcaattcttttttcggctaccttaacaacttctatcttgatgatacatgggagcgatatgatagcaatctagctagcaggttggtggtcgaagataactgagattaaagaaatcttaagataac

SEQ ID NO: 73390 - DNA, 1062 bp, Zea Mays
cggcggcaggaggacgatcaactccgcgactccacttcctcacgcggcgtgtcctctccccgcttgttggggcctgtaattgcccgccagtattctgtgtaatcactgagtttctgtctgggggttctttgagggctttcttgcgaaagttggagcgcaaagctcttcctttggagaaggtcatttccatcgctttggatatcgcccgcggcctggaatatattcacctccagggaatcgtacaccgtgacgtcaaacccgagaacatcttatttgatggagaattctgtgctaaagttgtcgattttggagtggcgtgtgaagaaacatactgcaatttgttaggggatgatccaggtacttatagatggatggcaccagagatgtacaagcacaagccctatggccggaaagttgatgtgtatagctttgggcttctcttgtgggaattggtcaccggttcactcccttatgaagatatgactccgcttcaggcagctttcgccgttgttaataagaacttgaggccggtcattccattgagctgcccagcagcgctgaagcttctgattgagcagtgttggtcctggcaaccagaaaagaggcccgactttcagcagatagtttctatcctcgaagatctcaagacagttcttgaaacagacggaacactccacaaggtcccaagctcgatctgccaggccttggaatccaatgatcagaacaagaagaaggccggtaactggatccagaggctgtcatacgctcaacctgatttctccgggcctccacccccaaagttactgtagctacgcgtcttcttgttcttggtagcttgtttatctggttggtagcaactgtgtaaattgaacctttcttgtttcttgttgagagaccacagatttcgtcatggtatatactcggacaaagtacatacatcaattcttttttcggctaccttaacaacttctatcttgatgatacatgggagcgatatgatagcaatctagctagcaggttggtggtcgaagataactgagattaaagaaatcttaagataac

SEQ ID NO: 73391 - DNA, 2406 bp, Zea Mays
cacactttttctccgccccccccaaaccacatcgattattgcgttgagcgcttagactcttgttgtctttgtttttgtggtcggcgagcatggaggaggcggaggcggctcacgggctctgattggcggatggcgcgtcggatcggagcagtcgagcttcggggatttcctgtccctctggaagggatgaaatgcggcgactacctggtgaactgggtggagctctagtgccagccagtgttcctgctgacgcctgcctcatctagtccccccttcgttcagttcttgtggcgagttgttaatccaccgtgtccgggatccgtttggcctggggttttgaggagatggacgacgaggactactcgtgggtgcggcgcaccaggttctcgcagtccatcgtcagatccagctctggcagggagcagtatggcgcgttcatcgagcagttcagccgtggcgccgagctgaggcagaatgggttgggcacagggtacaggaaccctcgccagagtgtacagcccttggcgaagggatccggggtctccaactctgcaaggctgccgattcccaaggcgaagtcagcagttgcccagtcggaacggaagctgaagcatgcgtcttccgaaggccaattgaacagagacggtgatcgcccgttgcaagaatcatcggcgaagcagagccggaaaggggccgtcggcctcagtctggacattccgcagctgcatgtggttcggccatccaaggagagcccagacgcgctggatttctctttccactcggacgagcacagccagaggctccagagagtgtgttccagcccggctcctttctctacgaaggatggtacggcaccagctggtgattccagagcgagcagtgcatctatgaagatcatcggacaagtgtccaaacccgcgccgaaacgaagagccaagtcccctatccccaagcgcgtcatctcggatgtgtttaaggaggcgaaagcagccaccaagaggttctccagcccgcagcggcagaggaagcccacatctccacggtcactagatgacagccctccattcggctttgcttcgctaagaacaccaagcaagctgaagattaatagcagaacctcctcatggccgagaaggaacctcgacagtgggctggcgaaagttgctgcactggagatccttgagaggtggacggtcgatcgctctgagttgctcattggacataggtttgcatccggggcttatagccgattgttccatgggatctacaaggagcaacctgttgctgtaaagtttatcagacagcctgacgatggtgaggatgacgaattatctgctaagcttgagaagcagttcacttcagaggttaccattctggcaaggctccaacatcgtaatgtcattaagcttgttggggcctgtaattgcccgccagtattctgtgtaatcactgagtttctgtctgggggttctttgagggctttcttgcgaaagttggagcgcaaagctcttcctttggagaaggtcatttccatcgctttggatatcgcccgcggcctggaatatattcacctccagggaatcgtacaccgtgacgtcaaacccgagaacatcttatttgatggagaattctgtgctaaagttgtcgattttggagtggcgtgtgaagaaacatactgcaatttgttaggggatgatccaggtacttatagatggatggcaccagagatgtacaagcacaagccctatggccggaaagttgatgtgtatagctttgggcttctcttgtgggaattggtcaccggttcactcccttatgaagatatgactccgcttcaggcagctttcgccgttgttaataagaacttgaggccggtcattccattgagctgcccagcagcgctgaagcttctgattgagcagtgttggtcctggcaaccagaaaagaggcccgactttcagcagatagtttctatcctcgaagatctcaagacagttcttgaaacagacggaacactccacaaggtcccaagctcgatctgccaggccttggaatccaatgatcagaacaagaagaaggccggtaactggatccagaggctgtcatacgctcaacctgatttctccgggcctccacccccaaagttactgtagctacgcgtcttcttgttcttggtagcttgtttatctggttggtagcaactgtgtaaattgaacctttcttgtttcttgttgagagaccacagatttcgtcatggtatatactcggacaaagtacatacatcaattcttttttcggctaccttaacaacttctatcttgatgatacatgggagcgatatgatagcaatctagctagcaggttggtggtcgaagataactgagattaaagaaatcttaagataac

SEQ ID NO: 73392 - DNA, 2337 bp, Zea Mays
ctttgtttttgtggtcggcgagcatggaggcggaggcggctcacgggctctgattggcggatggcgcgtcggatcggagcagtcgagcttcggggatttcctgtccctctggaagggatgaaatgcggcgactacctggtgaactgggtggagctctagtgccagccagtgttcctgctgacgcctgcctcatctagtccccccttcgttcagttcttgtggcgagttgttaatccaccgtgtccgggatccgtttggcctggggttttgaggagatggacgacgaggactactcgtgggtgcggcgcaccaggttctcgcagtccatcgtcagatccagctctggcagggagcagtatggcgcgttcatcgagcagttcagccgtggcgccgagctgaggcagaatgggttgggcacagggtacaggaaccctcgccagagtgtacagcccttggcgaagggatccggggtctccaactctgcaaggctgccgattcccaaggcgaagtcagcagttgcccagtcggaacggaagctgaagcatgcgtcttccgaaggccaattgaacagagacggtgatcgcccgttgcaagaatcatcggcgaagcagagccggaaaggggccgtcggcctcagtctggacattccgcagctgcatgtggttcggccatccaaggagagcccagacgcgctggatttctctttccactcggacgagcacagccagaggctccagagagtgtgttccagcccggctcctttctctacgaaggatggtacggcaccagctggtgattccagagcgagcagtgcatctatgaagatcatcggacaagtgtccaaacccgcgccgaaacgaagagccaagtcccctatccccaagcgcgtcatctcggatgtgtttaaggaggcgaaagcagccaccaagaggttctccagcccgcagcggcagaggaagcccacatctccacggtcactagatgacagccctccattcggctttgcttcgctaagaacaccaagcaagctgaagattaatagcagaacctcctcatggccgagaaggaacctcgacagtgggctggcgaaagttgctgcactggagatccttgagaggtggacggtcgatcgctctgagttgctcattggacataggtttgcatccggggcttatagccgattgttccatgggatctacaaggagcaacctgttgctgtaaagtttatcagacagcctgacgatggtgaggatgacgaattatctgctaagcttgagaagcagttcacttcagaggttaccattctggcaaggctccaacatcgtaatgtcattaagcttgttggggcctgtaattgcccgccagtattctgtgtaatcactgagtttctgtctgggggttctttgagggctttcttgcgaaagttggagcgcaaagctcttcctttggagaaggtcatttccatcgctttggatatcgcccgcggcctggaatatattcacctccagggaatcgtacaccgtgacgtcaaacccgagaacatcttatttgatggagaattctgtgctaaagttgtcgattttggagtggcgtgtgaagaaacatactgcaatttgttaggggatgatccaggtacttatagatggatggcaccagagatgtacaagcacaagccctatggccggaaagttgatgtgtatagctttgggcttctcttgtgggaattggtcaccggttcactcccttatgaagatatgactccgcttcaggcagctttcgccgttgttaataagaacttgaggccggtcattccattgagctgcccagcagcgctgaagcttctgattgagcagtgttggtcctggcaaccagaaaagaggcccgactttcagcagatagtttctatcctcgaagatctcaagacagttcttgaaacagacggaacactccacaaggtcccaagctcgatctgccaggccttggaatccaatgatcagaacaagaagaaggccggtaactggatccagaggctgtcatacgctcaacctgatttctccgggcctccacccccaaagttactgtagctacgcgtcttcttgttcttggtagcttgtttatctggttggtagcaactgtgtaaattgaacctttcttgtttcttgttgagagaccacagatttcgtcatggtatatactcggacaaagtacatacatcaattcttttttcggctaccttaacaacttctatcttgatgatacatgggagcgatatgatagcaatctagctagcaggttggtggtcgaagataactgagattaaagaaatcttaagataac

SEQ ID NO: 73393 - DNA, 2108 bp, Zea Mays
gaggggtatatgcggaagctgaaaaaattcggggtgcgcccgtgcatcccagcacccgaagctggatccgcccctgcggtggcagcatgagcggcggggcgtcgctggggctcaggtcgtcggggagctacggatcgctgccgcagcagcagttaggcggctgccagtcgtcgtccccaccgctggccgcgcggaagcccgcgaagatgtccctcggcgggaccagcggcccgcgcgtctgcgcccggatctgcaagctcgccggacgccgccagcggatgctcctcctcctcctcgtctccgtcgccgtggcattctgcttcctcttctcatcacttacgaagatgcatcacctggtgttgagaccatgcttgtgttttctgatcatgtccggagctttgtgaaccctgtttggacatcgtcaggcagaccagtagctcagagaggttcgctgactgtgaatggtttgaatacaccatcgcagatggaaaaacaatctgatagtaaacaagttcaggaactcatgcagagttttccaccggctattgttgtggatcaccatccttgtgaaaacttttcattgtctcctccaccagttgatagaaaacgcactggaccacgaccttgtccagtttgttatttgccagttgagcaagcactggcactgagaccagctaaaccatcattgtcaccagtccttcaaagcttaaattatgttcttgaagagattttgattcccaaagagtccaagagcggttctttgtttggaggttttccatccctggaggaacgagataagtcttatgacataaaagactcgatgactgtacattgtggatttgtaagagggaaggtacctggtcttaatactgggtttgacatagatgaagctgatcattctgagatgcagctgtgccagagtacagttgttgcctctgctatttttggtaattatgacgtaatgcaacaaccagaaaatatcagcaaattttcaaaagatacagtttgcttctttatgtttctggatgaagaaacagaagctgcaataaagaacactactattggtcatactaaaaagattgggctgtggcgggtagttgttgtccgcaacctaccatttacagatgctagacgcaatggaaaggttccaaagctattacttcatcggctttttcccaatgcgcgatattcaatttggattgatgggaaacttaagctagtgagggatccttatcaggttcttgtggaggaagaatgttagctttgcaatttccaggcattacagacgcttcgatgttttcgaggaagctgaggccaacaaggctggtggaaaatatgataacacatcaattgactaccagatagagttctacaaaagagagggtctaacccattattcatcagccaaacttcctataacgagtgacgtcccggagggctgtgtgataattagggaacatatccccataacaaacttgtttacatgcctttggttcaatgaagttgaccgcttcacgtccagagatcagctaagcttcagcacagttagggataaaataaggtggcgagttaattggactgcagacatgttcctggattgtgaaaggcgtgattttgttgttcagtcgtaccaccgagaactgttggaacagaggcagtctgccttacgaagatggcctccccagcggtctcccgtcgcgcgcttccaacctagaaagatgcttccagacaatgcagcaagggaaccatggaaggcttctgcaaccaagaagttatcacggaagcgagcacgggataagaaatcaagctcgagacgaactcattgaactagtgggaaggaagcaattcaactgtaaatgctggcgattttgctcctacacaactgcatatctaacggacagcattccaacattgttttactacttttaacttcctttcatgctcctagctcccctccccaagggcgccaaaattttgtcagggattgttgatagagagctgaaattctttgttgtaaataaacatttttagatcagagatgtattcaactagcagctgattcaattcaatccattttggaggtagtctttggcagggtttcaaataca

SEQ ID NO: 73394 - DNA, 3757 bp, Zea Mays
gaggggtatatgcggaagctgaaaaaattcggggtgcgcccgtgcatcccagcacccgaagctggatccgcccctgcggtggcagcatgagcggcggggcgtcgctggggctcaggtcgtcggggagctacggatcgctgccgcagcagcagttaggcggctgccagtcgtcgtccccaccgctggccgcgcggaagcccgcgaagatgtccctcggcgggaccagcggcccgcgcgtctgcgcccggatctgcaagctcgccggacgccgccagcggatgctcctcctcctcctcgtctccgtcgccgtggcattctgcttcctcttctcatcacttgtcagtaaaggtggtggttgccttgcctcgtgttccagttctaatctatgaggctgtttcagtcactagactttgctgttttattttcctgtcgtgcaattatgtagccagtaagttcagggaaatgacgcagtgccactgacaagtgatattactctataatccacgtcaatgtttctgtgtatcttatgcaattatgtctaattagacatgtgttctgggatcttagcgtgtgttaatgtgcattctttatcccgcatcaactttaacttcagctgactgatatgatgcaaagaggattagtatattactatattatcctcctgcagttcaggccaatcggatcagtcccaatgtctgggcgatttgcattgagagactaaacaataatattgggggtgcgatctgaagttttgaattctatggttctgactgcagatcagccagttttctggaactgaagtacatacttattgagagatatagtgtttaatctagctaatgtgtcattgacatttctacaagtttatacctggtgataatgctgtcaaggtttgtgcctttgtggtgacagctttgtagatgagctcatattcaccaaccgtttgtttaaaatcattataggtaaactgcacatctgtgtttgtgcccggttttttttcttttcagtatgcacctcatttggcttctgctgaccattttaatttgacatttaatagttcactagggatttttggtccattttgtcaagaagccaatttccatgcattttcattgttaccaacttataatttacacattacaatgacaaaaagccggtttgtttcttctgagtctaatttaagacttggggtcttatttccctcctggggtagtgggaagctaaatgtttccagaccttttatcaaggtctcgtaacggacaaaatattctatgtgatgccaataagttctgacaaattttatgggatggctttctacttatagatgcacaccatcttcttgcctccagtttttcattagcttgaaaatttattgagaaaataagaaaagagtttcactgggatttagtgtaattgaatgttttttctagcaatatgccaaacaagaagtctatcttctactacagctaatgccattaacatatttctgagcttgcagctgcagttagagcgcatctttcacatgcatctgttcacgttagtgattcaactggatttctgtttgcgaaacccactgttgtgtgctaaaaacattcttattttgaataataattgactgaaaaatctgttgtaaaaaatgccatactgaagtaggatgtaacattcagttgtaagaatatgttttcttgtccttttttcaccatagtatgtgtgttccaatactgacctactaaacatttttttcctgttttagacgaagatgcatcacctggtgttgagaccatgcttgtgttttctgatcatgtccggagctttgtgaaccctgtttggacatcgtcaggcagaccagtagctcagagaggttcgctgactgtgaatggtttgaatacaccatcgcagatggaaaaacaatctgatagtaaacaagttcaggaactcatgcagagttttccaccggctattgttgtggatcaccatccttgtgaaaacttttcattgtctcctccaccagttgatagaaaacgcactggaccacgaccttgtccagtttgttatttgccagttgagcaagcactggcactgagaccagctaaaccatcattgtcaccagtccttcaaagcttaaattatgttcttgaagagattttgattcccaaagagtccaagagcggttctttgtttggaggttttccatccctggaggaacgagataagtcttatgacataaaagactcgatgactgtacattatttgtaagagggaaggtacctggtcttaatactgggtttgacatagatgaagctgatcattctgagatgcagctgtgccagagtacagttgttgcctctgctatttttggtaattatgacgtaatgcaacaaccagaaaatatcagcaaattttcaaaagatacagtttgcttctttatgtttctggatgaagaaacagaagctgcaataaagaacactactattggtcatactaaaaagattgggctgtggcgggtagttgttgtccgcaacctaccatttacagatgctagacgcaatggaaaggtacctatgcggttggcgattttgatttttctcatccaaacctgtgttattcgcaatctaccatgttgttctgtgtttttctccatgaactgaataaggaatactggactcatgttatccttgttatcccattctgaaactttgcttgacttgacatttgttaatgcaaatcagaaccaacaagttaattgggtctggttttaccatctatggcccctgtgatcttttcctcctacaggttccaaagctattacttcatcggctttttcccaatgcgcgatattcaatttggattgatgggaaacttaagctagtgagggatccttatcaggttcttgtggaggaagaatgttagctttgcaatttccaggcattacagacgcttcgatgttttcgaggaagctgaggccaacaaggctggtggaaaatatgataacacatcaattgactaccagatagagttctacaaaagagagggtctaacccattattcatcagccaaacttcctataacgagtgacgtcccggagggctgtgtgataattagggaacatatccccataacaaacttgtttacatgcctttggttcaatgaagttgaccgcttcacgtccagagatcagctaagcttcagcacagttagggataaaataaggtggcgagttaattggactgcagacatgttcctggattgtgaaaggcgtgattttgttgttcagtcgtaccaccgagaactgttggaacagaggcagtctgccttacgaagatggcctccccagcggtctcccgtcgcgcgcttccaacctagaaagatgcttccagacaatgcagcaagggaaccatggaaggcttctgcaaccaagaagttatcacggaagcgagcacgggataagaaatcaagctcgagacgaactcattgaactagtgggaaggaagcaattcaactgtaaatgctggcgattttgctcctacacaactgcatatctaacggacagcattccaacattgttttactacttttaacttcctttcatgctcctagctcccctccccaagggcgccaaaattttgtcagggattgttgatagagagctgaaattctttgttgtaaataaacatttttagatcagagatgtattcaactagcagctgattcaattcaatccattttggaggtagtctttggcagggtttcaaataca

SEQ ID NO: 73395 - DNA, 2556 bp, Zea Mays
gtgggaagctaaatgtttccagaccttttatcaaggtctcgtaacggacaaaatattctatgtgatgccaataagttctgacaaattttatgggatggctttctacttatagatgcacaccatcttcttgcctccagtttttcattagcttgaaaatttattgagaaaataagaaaagagtttcactgggatttagtgtaattgaatgttttttctagcaatatgccaaacaagaagtctatcttctactacagctaatgccattaacatatttctgagcttgcagctgcagttagagcgcatctttcacatgcatctgttcacgttagtgattcaactggatttctgtttgcgaaacccactgttgtgtgctaaaaacattcttattttgaataataattgactgaaaaatctgttgtaaaaaatgccatactgaagtaggatgtaacattcagttgtaagaatatgttttcttgtccttttttcaccatagtatgtgtgttccaatactgacctactaaacatttttttcctgttttagacgaagatgcatcacctggtgttgagaccatgcttgtgttttctgatcatgtccggagctttgtgaaccctgtttggacatcgtcaggcagaccagtagctcagagaggttcgctgactgtgaatggtttgaatacaccatcgcagatggaaaaacaatctgatagtaaacaagttcaggaactcatgcagagttttccaccggctattgttgtggatcaccatccttgtgaaaacttttcattgtctcctccaccagttgatagaaaacgcactggaccacgaccttgtccagtttgttatttgccagttgagcaagcactggcactgagaccagctaaaccatcattgtcaccagtccttcaaagcttaaattatgttcttgaagagattttgattcccaaagagtccaagagcggttctttgtttggaggttttccatccctggaggaacgagataagtcttatgacataaaagactcgatgactgtacattatttgtaagagggaaggtacctggtcttaatactgggtttgacatagatgaagctgatcattctgagatgcagctgtgccagagtacagttgttgcctctgctatttttggtaattatgacgtaatgcaacaaccagaaaatatcagcaaattttcaaaagatacagtttgcttctttatgtttctggatgaagaaacagaagctgcaataaagaacactactattggtcatactaaaaagattgggctgtggcgggtagttgttgtccgcaacctaccatttacagatgctagacgcaatggaaaggtacctatgcggttggcgattttgatttttctcatccaaacctgtgttattcgcaatctaccatgttgttctgtgtttttctccatgaactgaataaggaatactggactcatgttatccttgttatcccattctgaaactttgcttgacttgacatttgttaatgcaaatcagaaccaacaagttaattgggtctggttttaccatctatggcccctgtgatcttttcctcctacaggttccaaagctattacttcatcggctttttcccaatgcgcgatattcaatttggattgatgggaaacttaagctagtgagggatccttatcaggtattagaaaggttcttgtggaggaagaatgttagctttgcaatttccaggcattacagacgcttcgatgttttcgaggaagctgaggccaacaaggctggtggaaaatatgataacacatcaattgactaccagatagagttctacaaaagagagggtctaacccattattcatcagccaaacttcctataacgagtgacgtcccggagggctgtgtgataattagggaacatatccccataacaaacttgtttacatgcctttggttcaatgaagttgaccgcttcacgtccagagatcagctaagcttcagcacagttagggataaaataaggtggcgagttaattggactgcagacatgttcctggattgtgaaaggcgtgattttgttgttcagtcgtaccaccgagaactgttggaacagaggcagtctgccttacgaagatggcctccccagcggtctcccgtcgcgcgcttccaacctagaaagatgcttccagacaatgcagcaagggaaccatggaaggcttctgcaaccaagaagttatcacggaagcgagcacgggataagaaatcaagctcgagacgaactcattgaactagtgggaaggaagcaattcaactgtaaatgctggcgattttgctcctacacaactgcatatctaacggacagcattccaacattgttttactacttttaacttcctttcatgctcctagctcccctccccaagggcgccaaaattttgtcagggattgttgatagagagctgaaattctttgttgtaaataaacatttttagatcagagatgtattcaactagcagctgattcaattcaatccattttggaggtagtctttggcagggtttcaaataca

SEQ ID NO: 73396 - DNA, 2420 bp, Zea Mays
gaacagaactgaaccagaacacggctgtgacgacggcggcgatcagttttgacgctggccggagtgaaactgtgagcgtgatatcgtgagtctaacatctggtattcggagcgaggctggagcccacgcacgactacttcacccgagctcaggcgaagggcgtagcaatggcgccgccgcggaacgaagacccgatggcgcagatcatggctaaaattgaggaaggtaacaaggagacccatcggcgtatggagaccgtccaagcctccctggcaacagttgaggcgacgatgaaaggcatgataaaggaacaaggtgaattccggaaatggcgaccggaggtggagatgaaggtcacggaggtggcagaggcgttgaagacaatccaggcaaaggtggatcaattcggaccatcatcatcgacggagccccttcctgacgggaaacaaacgaagaagggtgtgccgatctccgttcaactggagatcccgccggtcgacgcgacgaacgggcaatttcgccaccgctttgctgaaaaccaccggaggccgggtgttgaggagaatctccgaacacccgctccggtcggaggtatgccaatccctcctgagacctttactccgttcttcgattggggatcattaggccggaactcagtagccaattggtcacagatgagtggcccaactatgcccaatatggtgttccctgttttttatggatccaacccaaagctctggaaacacagatgcgagacctattttgatttctatgctgtgccttttgagaaatgggttagaattgctactatgcattttgagggtcctgccatgtattgggttcagtctatggagcacagaatcagggaactgagttgggaagcgctctgtgctacgctgaacactaggtttggtagagatcagcataacctgcttattagacacttctatcacatccaccaaaccaactcagtagctgaatatgtagaacaattcgaccagcttatgcatcaattattagcccatgagaaccacctcacttccactatgatcactggtcggtttgtagatgggttgaaagacgagattaaaagtgctgtaattattcagcgtccatccgattgggatactgcttgttccctggctttattgcaggaggatgtgctgctgcactcggggcgaagagatggtcgaagaactgaatttggtgcttattccagccgaccgtcagttaagccaacgcctatgccactacccttaccaccattggggggcaacagggcggtgagcaacactgaagaacgtcgaggccatggaccacaacaaggcagaagagatgagggcaagctatcagctctgaaggcgtacagaaaggctaaaggactgtgtttcaagtgtgggaacaaatggggctatgaacaccgctgctcaactaatgttcctctgtacttggtggaagaaatgtgggaattggttgtcaatgaagaggagaagctggaggactgtatcggggacagtaaggaaactaatgaagacagtgtgctagcattgtctgctgctgctgctgagggtggtgagggcagcaggactatccgactttgggcttcagtttattgtcaacaattgctggtgctagtagattcaggcagctctgctagttttctgggaagtcacttgatgaatgtcttaccagggattcagctgttgaccaagccaatgcaagttaaagtagcagatgggggaattctttggagccaacactggttgccaaactgcaaatggttgtgtggaggcaccacttttacaacggatttcaaattcattcccctagggggttacgacatgattcttggcatggactggctagaacgccactgtcctatgtcagttcactgggctgcaaaatggatggagtttgattatgataagaagagagttcacgtgcagggtgtgttaccaaaggttcagacctgttacagcctgaacggggaacagttgggtttcatgataaagcaagaagcagtgcaacattggttggaattgcagactgtaactgaattgattgttaaaaataccccagaagctgtgcagaaattattggaacaatatcagcacttgtttctccggccagacagcctgccaccgaaaagacaggttgaccacgccattgaattgttacctggagcacaaccatttaggcttcgaccttatcggtacacctgtaatactcaaaagtgaaataaagggattgatataatctcaatagcttgtggcctctaccattcatcacatgtgatcaacactagttaaaaatttgataatttgaacaaagaaacacataaataacctgtgcatcatgctggatctttttttgtgtgcatttgtgtgacaatattacagtaatgcaaaaaaatgttaaat

SEQ ID NO: 73397 - DNA, 1769 bp, Zea Mays
cagaactgaaccagaacacggctgtgacgacggcggcgatcagttttgacgctggccggagtgaaactgtgagcgtgatatcgtgagtctaacatctggtattcggagcgaggctggagcccacgcacgactacttcacccgagctcaggcgaagggcgtagcaatggcgccgccgcggaacgaagacccgatggcgcagatcatggctaaaattgaggaaggtaacaaggagacccatcggcgtatggagaccgtccaagcctccctggcaacagttgaggcgacgatgaaaggcatgataaaggaacaaggtgaattccggaaatggcgaccggaggtggagatgaaggtcacggaggtggcagaggcgttgaagacaatccaggcaaaggtggatcaattcggaccatcatcatcgacggagccccttcctgacgggaaacaaacgaagaagggtgtgccgatctccgttcaactggagatcccgccggtcgacgcgacgaacgggcaatttcgccaccgctttgctgaaaaccaccggaggccgggtgttgaggagaatctccgaacacccgctccggtcggaggaggatgtgctgctgcactcggggcgaagagatggtcgaagaactgaatttggtgcttattccagccgaccgtcagttaagccaacgcctatgccactacccttaccaccattggggggcaacagggcggtgagcaacactgaagaacgtcgaggccatggaccacaacaaggcagaagagatgagggcaagctatcagctctgaaggcgtacagaaaggctaaaggactgtgtttcaagtgtgggaacaaatggggctatgaacaccgctgctcaactaatgttcctctgtacttggtggaagaaatgtgggaattggttgtcaatgaagaggagaagctggaggactgtatcggggacagtaaggaaactaatgaagacagtgtgctagcattgtctgctgctgctgctgagggtggtgagggcagcaggactatccgactttgggcttcagtttattgtcaacaattgctggtgctagtagattcaggcagctctgctagttttctgggaagtcacttgatgaatgtcttaccagggattcagctgttgaccaagccaatgcaagttaaagtagcagatgggggaattctttggagccaacactggttgccaaactgcaaatggttgtgtggaggcaccacttttacaacggatttcaaattcattcccctagggggttacgacatgattcttggcatggactggctagaacgccactgtcctatgtcagttcactgggctgcaaaatggatggagtttgattatgataagaagagagttcacgtgcagggtgtgttaccaaaggttcagacctgttacagcctgaacggggaacagttgggtttcatgataaagcaagaagcagtgcaacattggttggaattgcagactgtaactgaattgattgttaaaaataccccagaagctgtgcagaaattattggaacaatatcagcacttgtttctccggccagacagcctgccaccgaaaagacaggttgaccacgccattgaattgttacctggagcacaaccatttaggcttcgaccttatcggtacacctgtaatactcaaaagtgaaataaagggattgatataatctcaatagcttgtggcctctaccattcatcacatgtgatcaacactagttaaaaatttgataatttgaacaaagaaac

SEQ ID NO: 73398 - DNA, 1683 bp, Zea Mays
caaaagcaaccagcttctcgccccgcccccggcgcggctcgtcgtcactcgtgagccgcgtccgtcgtccgcgcacgcccgtgatctccttaaattcccccctccgggaattataataacccccggccgcttgctagttctcgcaggccagcggtgaccgcggccacagggcacctccaccgcgcgacgacgacaaccatggccgtgccatcgcggctcctcctctgctccgccgtcgtcgccgtggcgctgctcgtcgcgccgggagaggtggccggcgccgcgggacacgggcacacgcacacgaggcgcctgcggcccaagaagagcgcggcggcggccgccgcgaagctgtacccggcgaacgcgacgcgggcggaggcgatcgagcggcagttcacgcggtgggtgcgcttcgtgggcggccgcctcggccacggcacctacaactacaaccggccggcgctcacgctcctgcccgcgcgcacgctcgtcgtcgacaggaggccgggcgccggggacttcacgtccatccaggccgccgtcgactcgctcccgctcatcaacctcgcccgcgtcgtcatcagggtcaacgccggcacgtacacggagaaggtgaacatctcgccgatgcgcgcgttcgtcaccgtggagggcgccggcgcagacaagacggtggtgcagtggggcgacacggcggacacggccgggtcctggggcaggcccatgggcacgttcggctccgccacgttcgccgtcaactccatgttcttcgtcgccaagaacatcaccttcaagaacacggcccctgtgccgcggcccggcgctctgggcaagcagggggtggcgctgcggatatcggcggacaacgcggcgttcgtggggtgcaacttcctgggcgcgcaggacacgctgtacgaccacctcggccgccactactaccgcgactgctacatcgagggctccgtcgacttcatcttcggcaacgcgctctccctctacgaggggtgccatgtgcacgcgatcgcgcggaactacggcgcgctgacggcgcagaaccggcagagcctgctggaggacacggggttctcgttcgtcaagtgccgggtgacggggtccggcgcgctgtacctgggccgcgcctggggaaccttctcccgcgtcgtcttcgcctacacctacatggacaacatcatcatcccgcgcggctggtacaactggggcgacccgacgcgggagatgacggtgttctacgggcagtacaagtgcacggggccgggcgcgaactacgccggcagggtgcagtggtcgcgggagctcaccgacgaggaggccaagcccttcatctcgctcgacttcatcgacggcttccagtggctccggttgtagcacgccacattgttgacacacacacacacacacaccatgcatgaccttaattagttgatgtgaatgaagagcaaacaaaaacacaaggcaaatacaaatccaattgttggcgcaactgcgtacgatgagagttggtggttggctggctgatgagtgagcgctgcagaactacgtcctgcactctttttgttcgactcctttcctgtgcatcacatcgctgcaggttttcatgaacatgggcttccttggcccaggccggaatagcgtcaggtttggtccacatgctgacacgcg

SEQ ID NO: 73399 - DNA, 1521 bp, Zea Mays
ccccggccgcttgctagttctcgcaggccagcggtgaccgcggccacagggcacctccaccgcgcgacgacgacaaccatggccgtgccatcgcggctcctcctctgctccgccgtcgtcgccgtggcgctgctcgtcgcgccgggagaggtggccggcgccgcgggacacgggcacacgcacacgaggcgcctgcggcccaagaagagcgcggcggcggccgccgcgaagctgtacccggcgaacgcgacgcgggcggaggcgatcgagcggcagttcacgcggtgggtgcgcttcgtgggcggccgcctcggccacggcacctacaactacaaccggccggcgctcacgctcctgcccgcgcgcacgctcgtcgtcgacaggaggccgggcgccggggacttcacgtccatccaggccgccgtcgactcgctcccgctcatcaacctcgcccgcgtcgtcatcagggtcaacgccggcacgtacacggagaaggtgaacatctcgccgatgcgcgcgttcgtcaccgtggagggcgccggcgcagacaagacggtggtgcagtggggcgacacggcggacacggccgggtcctggggcaggcccatgggcacgttcggctccgccacgttcgccgtcaactccatgttcttcgtcgccaagaacatcaccttcaagggggtggcgctgcggatatcggcggacaacgcggcgttcgtggggtgcaacttcctgggcgcgcaggacacgctgtacgaccacctcggccgccactactaccgcgactgctacatcgagggctccgtcgacttcatcttcggcaacgcgctctccctctacgaggggtgccatgtgcacgcgatcgcgcggaactacggcgcgctgacggcgcagaaccggcagagcctgctggaggacacggggttctcgttcgtcaagtgccgggtgacggggtccggcgcgctgtacctgggccgcgcctggggaaccttctcccgcgtcgtcttcgcctacacctacatggacaacatcatcatcccgcgcggctggtacaactggggcgacccgacgcgggagatgacggtgttctacgggcagtacaagtgcacggggccgggcgcgaactacgccggcagggtgcagtggtcgcgggagctcaccgacgaggaggccaagcccttcatctcgctcgacttcatcgacggcttccagtggctccggttgtagcacgccacattgttgacacacacacacacacacaccatgcatgaccttaattagttgatgtgaatgaagagcaaacaaaaacacaaggcaaatacaaatccaattgttggcgcaactgcgtacgatgagagttggtggttggctggctgatgagtgagcgctgcagaactacgtcctgcactctttttgttcgactcctttcctgtgcatcacatcgctgcaggttttcatgaacatgggcttccttggcccaggccggaatagcgtcaggtttggtccacatgctgacacgcg

SEQ ID NO: 73400 - DNA, 1898 bp, Zea Mays
gtaaacggctccccgctccctgtctgatcttgcatccccttttcctttctttttctttttcccttccagttccagttccagggtgtgattgactgattgtgatctgggccgcgtgagctttgtgatccgagacatgccggcttctcgtgggaaagaaaaaaaaggcacatacggacgtgatctggactcaaaagcgtgtccttgatcgcgtaagcttggcgaaacctttttattggcaaatcagagatgaacatgggctgttttatgcactggatcttggagggaccaacttccgtgtgctgcgagtccagctaggaggaaaggagaaacgtgttgtcaaacaacagtatgaggaggtttccattccaccacatttgatggtcgggacttccatggaactatttgatttcattgctgctgcattggctaaatttgtcggtactgaaggtgaagatttccaactcccagagggtaggcagagagaacttggtttcactttttccttcccggtgaaccaaacatcaatatcatcaggaacactcatcaagtggacaaagggcttttccatcaatggcacggttggtgaagatgttgtttctgagttgagcagggccatggagaggcagggactagatatgaaagctacggcattagtcaatgatacagtgggcacattggctggtgggagatatatggataccgatgtagttgcagctgtaatattgggcactggtacaaatgcagcatatgtggagcatgcaaatgcaattcctaaatggactgggttactgcctaaatctggaaagatggtaattaatacagagtgggggagcttcaaatccaacaaacttcctctttcagaatatgacaaagccatggactttgaaagtttgaaccctggagagcagatatacgagaaaatgatttctggtatgtatctcggagagattgttcgaagaattttactgaagttggcacatgaagcttctctatttggggatgttgttccacctaagctggagctgccatttatattgaggacgccagatatgtcagccatgcatcatgactcctcacatgacctcaaaactcttggagctaaactgaaggacatagtcggggtcgcggacacttccctggaagtaaggtacatcactcgtcacatctgtgaccttgtcgcagagcgtgcagcacgcctggccgccgcaggcgtgtacagcatcctgaagaagataggccgggacaaagtaccaagcggtggcggtaaaatgccgaggaccgtagttgccttggacggtgggctctacgaacactacaagaagttcagcagttgcgtagaagcgactctcacagacttgctcggcgaggaggcttcttcctccgtggtcgccaagctggccaacgacggctctggcattggagctgcgcttctcgcagcctcacactcccagtatcagtatggcgcgagtgactagtagtcctgaaatgggcgcggatcgagattttgagtgtagctctcatttatcttttcttttttcccttttcaaaacatctttttggggatttttttcggcttccttttgttggctattccgtggatgcacttacggctctgcattgggatgtagctagtatagagccaatgagtttggaggttatctaatggcacaaggcaggagcatggaaatggaagcagagcaatgacattcatgctctgcccattcttttttccccttgtatggtgttgtaaaccaataaaaaaatgttaacccttttttttgtgtgtgttggcaataaagagaatacgataatttgaccatgtgtcaagtatatgacttgattttttttgaaacatgtaagggcggattttttttcagatcatatggttttaagactgg

SEQ ID NO: 73401 - DNA, 1829 bp, Zea Mays
ccctgtctgatcttgcatccccttttcctttctttttctttttcccttccagttccagttccagggtgtgattgactgattgtgatctgggccgcgtgagctttgtgatccgagacatgccggcttctcgtgggaaagaaaaaaaaggcacatacggacgtgatctggactcaaaagcgtgtccttgatcgcgtaagcttggcgaaacctttttattggcaaatcagagatgaacatgggctgttttatgcactggatcttggagggaccaacttccgtgtgctgcgagtccagctaggaggaaaggagaaacgtgttgtcaaacaacagtatgaggaggtttccattccaccacatttgatggtcgggacttccatggtgaagatttccaactcccagagggtaggcagagagaacttggtttcactttttccttcccggtgaaccaaacatcaatatcatcaggaacactcatcaagtggacaaagggcttttccatcaatggcacggttggtgaagatgttgtttctgagttgagcagggccatggagaggcagggactagatatgaaagctacggcattagtcaatgatacagtgggcacattggctggtgggagatatatggataccgatgtagttgcagctgtaatattgggcactggtacaaatgcagcatatgtggagcatgcaaatgcaattcctaaatggactgggttactgcctaaatctggaaagatggtaattaatacagagtgggggagcttcaaatccaacaaacttcctctttcagaatatgacaaagccatggactttgaaagtttgaaccctggagagcagatatacgagaaaatgatttctggtatgtatctcggagagattgttcgaagaattttactgaagttggcacatgaagcttctctatttggggatgttgttccacctaagctggagctgccatttatattgaggacgccagatatgtcagccatgcatcatgactcctcacatgacctcaaaactcttggagctaaactgaaggacatagtcggggtcgcggacacttccctggaagtaaggtacatcactcgtcacatctgtgaccttgtcgcagagcgtgcagcacgcctggccgccgcaggcgtgtacagcatcctgaagaagataggccgggacaaagtaccaagcggtggcggtaaaatgccgaggaccgtagttgccttggacggtgggctctacgaacactacaagaagttcagcagttgcgtagaagcgactctcacagacttgctcggcgaggaggcttcttcctccgtggtcgccaagctggccaacgacggctctggcattggagctgcgcttctcgcagcctcacactcccagtatcagtatggcgcgagtgactagtagtcctgaaatgggcgcggatcgagattttgagtgtagctctcatttatcttttcttttttcccttttcaaaacatctttttggggatttttttcggcttccttttgttggctattccgtggatgcacttacggctctgcattgggatgtagctagtatagagccaatgagtttggaggttatctaatggcacaaggcaggagcatggaaatggaagcagagcaatgacattcatgctctgcccattcttttttccccttgtatggtgttgtaaaccaataaaaaaatgttaacccttttttttgtgtgtgttggcaataaagagaatacgataatttgaccatgtgtcaagtatatgacttgattttttttgaaacatgtaagggcggattttttttcagatcatatggttttaagactgg

SEQ ID NO: 73402 - DNA, 1760 bp, Zea Mays
gcatccccttttcctttctttttctttttcccttccagttccagttccagggtgtgattgactgattgtgatctgggccgcgtgagctttgtgatccgagacatgccggcttctcgtgggaaagaaaaaaaaggcacatacggacgtgatctggactcaaaagcgtgtccttgatcgcgtaagcttggcgaaacctttttattggcaaatcagagatgaacatgggctgttttatgcactggatcttggagggaccaacttccgtgtgctgcgagtccagctaggaggaaaggagaaacgtgttgtcaaacaacagtatgaggaggtttccattccaccacatttgatggtcgggacttccatggaactatttgatttcattgctgctgcattggctaaatttgtcggtactgaaggtgaagatttccaactcccagagggttggtgaagatgttgtttctgagttgagcagggccatggagaggcagggactagatatgaaagctacggcattagtcaatgatacagtgggcacattggctggtgggagatatatggataccgatgtagttgcagctgtaatattgggcactggtacaaatgcagcatatgtggagcatgcaaatgcaattcctaaatggactgggttactgcctaaatctggaaagatggtaattaatacagagtgggggagcttcaaatccaacaaacttcctctttcagaatatgacaaagccatggactttgaaagtttgaaccctggagagcagatatacgagaaaatgatttctggtatgtatctcggagagattgttcgaagaattttactgaagttggcacatgaagcttctctatttggggatgttgttccacctaagctggagctgccatttatattgaggacgccagatatgtcagccatgcatcatgactcctcacatgacctcaaaactcttggagctaaactgaaggacatagtcggggtcgcggacacttccctggaagtaaggtacatcactcgtcacatctgtgaccttgtcgcagagcgtgcagcacgcctggccgccgcaggcgtgtacagcatcctgaagaagataggccgggacaaagtaccaagcggtggcggtaaaatgccgaggaccgtagttgccttggacggtgggctctacgaacactacaagaagttcagcagttgcgtagaagcgactctcacagacttgctcggcgaggaggcttcttcctccgtggtcgccaagctggccaacgacggctctggcattggagctgcgcttctcgcagcctcacactcccagtatcagtatggcgcgagtgactagtagtcctgaaatgggcgcggatcgagattttgagtgtagctctcatttatcttttcttttttcccttttcaaaacatctttttggggatttttttcggcttccttttgttggctattccgtggatgcacttacggctctgcattgggatgtagctagtatagagccaatgagtttggaggttatctaatggcacaaggcaggagcatggaaatggaagcagagcaatgacattcatgctctgcccattcttttttccccttgtatggtgttgtaaaccaataaaaaaatgttaacccttttttttgtgtgtgttggcaataaagagaatacgataatttgaccatgtgtcaagtatatgacttgattttttttgaaacatgtaagggcggattttttttcagatcatatggttttaagactgg

SEQ ID NO: 73403 - DNA, 1858 bp, Zea Mays
ccccttttcctttctttttctttttcccttccagttccagttccagggtgtgattgactgattgtgatctgggccgcgtgagctttgtgatccgagacatgccggcttctcgtgggaaagaaaaaaaaggcacatacggacgtgatctggactcaaaagcgtgtccttgatcgcgtaagcttggcgaaacctttttattggcaaatcagagatgaacatgggctgttttatgcactggatcttggagggaccaacttccgtgtgctgcgagtccagctaggaggaaaggagaaacgtgttgtcaaacaacagtatgaggaggtttccattccaccacatttgatggtcgggacttccatggaactatttgatttcattgctgctgcattggctaaatttgtcggtactgaaggtgaagatttccaactcccagagggtaggcagagagaacttggtttcactttttccttcccggtgaaccaaacatcaatatcatcaggaacactcatcaagtggacaaagggcttttccatcaatggttggtgaagatgttgtttctgagttgagcagggccatggagaggcagggactagatatgaaagctacggcattagtcaatgatacagtgggcacattggctggtgggagatatatggataccgatgtagttgcagctgtaatattgggcactggtacaaatgcagcatatgtggagcatgcaaatgcaattcctaaatggactgggttactgcctaaatctggaaagatggtaattaatacagagtgggggagcttcaaatccaacaaacttcctctttcagaatatgacaaagccatggactttgaaagtttgaaccctggagagcagatatacgagaaaatgatttctggtatgtatctcggagagattgttcgaagaattttactgaagttggcacatgaagcttctctatttggggatgttgttccacctaagctggagctgccatttatattgaggacgccagatatgtcagccatgcatcatgactcctcacatgacctcaaaactcttggagctaaactgaaggacatagtcggggtcgcggacacttccctggaagtaaggtacatcactcgtcacatctgtgaccttgtcgcagagcgtgcagcacgcctggccgccgcaggcgtgtacagcatcctgaagaagataggccgggacaaagtaccaagcggtggcggtaaaatgccgaggaccgtagttgccttggacggtgggctctacgaacactacaagaagttcagcagttgcgtagaagcgactctcacagacttgctcggcgaggaggcttcttcctccgtggtcgccaagctggccaacgacggctctggcattggagctgcgcttctcgcagcctcacactcccagtatcagtatggcgcgagtgactagtagtcctgaaatgggcgcggatcgagattttgagtgtagctctcatttatcttttcttttttcccttttcaaaacatctttttggggatttttttcggcttccttttgttggctattccgtggatgcacttacggctctgcattgggatgtagctagtatagagccaatgagtttggaggttatctaatggcacaaggcaggagcatggaaatggaagcagagcaatgacattcatgctctgcccattcttttttccccttgtatggtgttgtaaaccaataaaaaaatgttaacccttttttttgtgtgtgttggcaataaagagaatacgataatttgaccatgtgtcaagtatatgacttgattttttttgaaacatgtaagggcggattttttttcagatcatatggttttaagactgg

SEQ ID NO: 73404 - DNA, 1672 bp, Zea Mays
aggcaccctccaatccaaagatgaacatgggctgttttatgcactggatcttggagggaccaacttccgtgtgctgcgagtccagctaggaggaaaggagaaacgtgttgtcaaacaacagtatgaggaggtttccattccaccacatttgatggtcgggacttccatggaactatttgatttcattgctgctgcattggctaaatttgtcggtactgaaggtgaagatttccaactcccagagggtaggcagagagaacttggtttcactttttccttcccggtgaaccaaacatcaatatcatcaggaacactcatcaagtggacaaagggcttttccatcaatggcacggttggtgaagatgttgtttctgagttgagcagggccatggagaggcagggactagatatgaaagctacggcattagtcaatgatacagtgggcacattggctggtgggagatatatggataccgatgtagttgcagctgtaatattgggcactggtacaaatgcagcatatgtggagcatgcaaatgcaattcctaaatggactgggttactgcctaaatctggaaagatggtaattaatacagagtgggggagcttcaaatccaacaaacttcctctttcagaatatgacaaagccatggactttgaaagtttgaaccctggagagcagatatacgagaaaatgatttctggtatgtatctcggagagattgttcgaagaattttactgaagttggcacatgaagcttctctatttggggatgttgttccacctaagctggagctgccatttatattgaggacgccagatatgtcagccatgcatcatgactcctcacatgacctcaaaactcttggagctaaactgaaggacatagtcggggtcgcggacacttccctggaagtaaggtacatcactcgtcacatctgtgaccttgtcgcagagcgtgcagcacgcctggccgccgcaggcgtgtacagcatcctgaagaagataggccgggacaaagtaccaagcggtggcggtaaaatgccgaggaccgtagttgccttggacggtgggctctacgaacactacaagaagttcagcagttgcgtagaagcgactctcacagacttgctcggcgaggaggcttcttcctccgtggtcgccaagctggccaacgacggctctggcattggagctgcgcttctcgcagcctcacactcccagtatcagtatggcgcgagtgactagtagtcctgaaatgggcgcggatcgagattttgagtgtagctctcatttatcttttcttttttcccttttcaaaacatctttttggggatttttttcggcttccttttgttggctattccgtggatgcacttacggctctgcattgggatgtagctagtatagagccaatgagtttggaggttatctaatggcacaaggcaggagcatggaaatggaagcagagcaatgacattcatgctctgcccattcttttttccccttgtatggtgttgtaaaccaataaaaaaatgttaacccttttttttgtgtgtgttggcaataaagagaatacgataatttgaccatgtgtcaagtatatgacttgattttttttgaaacatgtaagggcggattttttttcagatcatatggttttaagactgg

SEQ ID NO: 73405 - DNA, 1080 bp, Zea Mays
cttatccggccgtcttggttctagccactccccactcctcacggctcacgagggtacggcacctcgccgtggcccgcggctgtttccgaggcaagcggactcaccggcgtcctgcgcacgcgaggcgagcagcggctccgtcgacctgcgagccaatccgtctttatttctccaccccaatatccaaacataagataaaaatctatccaacactcatttcccacgccactcccccactccctctccaccctgcttccgttttcggccggcgatggcgacgaccgccgccgcatccacgtcgctccggccgctgtcaccgtccccacctcgcatcgcgagtttgccccgtcggtggtgttggggaatcccggtgcagtcctccgggcggagcgcattccatgctgaacggcggaggcggagcactttattatgcgctgctgataaagctcctgaagaatccctcaagaagaccattgaagtggataggcttattgatatgctgagggacgcaaatcctagagagcttgatcaaatagtggttgaaaatgttctggcattcgacgcaggtttctgggttcgactggcagctagaattgatctctgcaaatcagatgatgataaaaaagattatgaagagctggcggaaaatgtcatgaacattgttgaccggcttgttcacaagactaatcaaaagattgaacaatcaactgatgtgctgaaggcaattattagtcctgcaatgcatgaaggagatgtgaagtggccaccaagagatccagatacactcaaattgatggagaaagaaataacacgccgagaacaagaaggacaacttgatgagggatttctgtcagaagttagtgctcagttgaggcaattatctttatatgtgtttaggctaaacaagacggagataagccagggcttcaggctatgctgcaaaaggtgttgcagttatatgcttctaaatctctccaaaaacgtagttatgcatacaaaggggggcaagttgtagttcctgaaaagtttctcgaatgtgtaatacagggtctgtatttccacgtagagattttcttcgtt

SEQ ID NO: 73406 - DNA, 987 bp, Zea Mays
cttggttctagccactccccactcctcacggctcacgagggtacggcacctcgccgtggcccgcggctgtttccgaggcaagcggactcaccggcgtcctgcgcacgcgaggcgagcagcggctccgtcgacctgcgagccaatccgtctttatttctccaccccaatatccaaacataagataaaaatctatccaacactcatttcccacgccactcccccactccctctccaccctgcttccgttttcggccggcgatggcgacgaccgccgccgcatccacgtcgctccggccgctgtcaccgtccccacctcgcatcgcgagtttgccccgtcggtggtgttggggaatcccggtgcagtcctccgggcggagcgcattccatgctgaacggcggaggcggagcactttattatgcgctgctgataaagctcctgaagaatccctcaagaagaccattgaagtggataggcttattgatatgctgagggacgcaaatcctagagagcttgatcaaatagtggttgaaaatgttctggcattcgacgcagaaagattatgaagagctggcggaaaatgtcatgaacattgttgaccggcttgttcacaagactaatcaaaagattgaacaatcaactgatgtgctgaaggcaattattagtcctgcaatgcatgaaggagatgtgaagtggccaccaagagatccagatacactcaaattgatggagaaagaaataacacgccgagaacaagaaggacaacttgatgagggatttctgtcagaagttagtgctcagttgaggctaaacaagacggagataagccagggcttcaggctatgctgcaaaaggtgttgcagttatatgcttctaaatctctccaaaaacgtagttatgcatacaaaggggggcaagttgtagttcctgaaaagtttctcgaatgtgtaatacagggtctgtatttccacgtagagattttcttcgtt

SEQ ID NO: 73407 - DNA, 1010 bp, Zea Mays
gttctagccactccccactcctcacggctcacgagggtacggcacctcgccgtggcccgcggctgtttccgaggcaagcggactcaccggcgtcctgcgcacgcgaggcgagcagcggctccgtcgacctgcgagccaatccgtctttatttctccaccccaatatccaaacataagataaaaatctatccaacactcatttcccacgccactcccccactccctctccaccctgcttccgttttcggccggcgatggcgacgaccgccgccgcatccacgtcgctccggccgctgtcaccgtccccacctcgcatcgcgagtttgccccgtcggtggtgttggggaatcccggtgcagtcctccgggcggagcgcattccatgctgaacggcggaggcgctcctgaagaatccctcaagaagaccattgaagtggataggcttattgatatgctgagggacgcaaatcctagagagcttgatcaaatagtggttgaaaatgttctggcattcgacgcaggtttctgggttcgactggcagctagaattgatctctgcaaatcagatgatgataaaaaagattatgaagagctggcggaaaatgtcatgaacattgttgaccggcttgttcacaagactaatcaaaagattgaacaatcaactgatgtgctgaaggcaattattagtcctgcaatgcatgaaggagatgtgaagtggccaccaagagatccagatacactcaaattgatggagaaagaaataacacgccgagaacaagaaggacaacttgatgagggatttctgtcagaagttagtgctcagttgaggctaaacaagacggagataagccagggcttcaggctatgctgcaaaaggtgttgcagttatatgcttctaaatctctccaaaaacgtagttatgcatacaaaggggggcaagttgtagttcctgaaaagtttctcgaatgtgtaatacagggtctgtatttccacgtagagattttcttcgtt

SEQ ID NO: 73408 - DNA, 1108 bp, Zea Mays
tctagccactccccactcctcacggctcacgagggtacggcacctcgccgtggcccgcggctgtttccgaggcaagcggactcaccggcgtcctgcgcacgcgaggcgagcagcggctccgtcgacctgcgagccaatccgtctttatttctccaccccaatatccaaacataagataaaaatctatccaacactcatttcccacgccactcccccactccctctccaccctgcttccgttttcggccggcgatggcgacgaccgccgccgcatccacgtcgctccggccgctgtcaccgtccccacctcgcatcgcgagtttgccccgtcggtggtgttggggaatcccggtgcagtcctccgggcggagcgcattccatgctgaacggcggaggcggagcactttattatgcgctgctgataaagctcctgaagaatccctcaagaagaccattgaagtggataggcttattgatatgctgagggacgcaaatcctagagagcttgatcaaatagtggttgaaaatgttctggcattcgacgcaggtttctgggttcgactggcagctagaattgatctctgcaaatcagatgatgataaagcatgatttcacatatgtagaaaattttactttctatggatggtgttatcttttatctcaaattaatctaactttgcagttggtttctctcttttgccttctcagaaagattatgaagagctggcggaaaatgtcatgaacattgttgaccggcttgttcacaagactaatcaaaagattgaacaatcaactgatgtgctgaaggcaattattagtcctgcaatgcatgaaggagatgtgaagtggccaccaagagatccagatacactcaaattgatggagaaagaaataacacgccgagaacaagaaggacaacttgatgagggatttctgtcagaagttagtgctcagttgaggcaattatctttatatgtgtttaggctaaacaagacggagataagccagggcttcaggctatgctgcaaaaggtgttgcagttatatgcttctaaatctctccaaaaacgtagttatgcatacaaagttcatgagcaccttcctttttt

SEQ ID NO: 73409 - DNA, 1001 bp, Zea Mays
tctagccactccccactcctcacggctcacgagggtacggcacctcgccgtggcccgcggctgtttccgaggcaagcggactcaccggcgtcctgcgcacgcgaggcgagcagcggctccgtcgacctgcgagccaatccgtctttatttctccaccccaatatccaaacataagataaaaatctatccaacactcatttcccacgccactcccccactccctctccaccctgcttccgttttcggccggcgatggcgacgaccgccgccgcatccacgtcgctccggccgctgtcaccgtccccacctcgcatcgcgagtttgccccgtcggtggtgttggggaatcccggtgcagtcctccgggcggagcgcattccatgctgaacggcggaggcggagcactttattatgcgctgctgataaagctcctgaagaatccctcaagaagaccattgaagtggataggcttattgatatgctgagggacgcaaatcctagagaggtaaatgtgaatcttgatcaaatagtggttgaaaatgttctggcattcgacgcaggtttctggaaagattatgaagagctggcggaaaatgtcatgaacattgttgaccggcttgttcacaagactaatcaaaagattgaacaatcaactgatgtgctgaaggcaattattagtcctgcaatgcatgaaggagatgtgaagtggccaccaagagatccagatacactcaaattgatggagaaagaaataacacgccgagaacaagaaggacaacttgatgagggatttctgtcagaagttagtgctcagttgaggctaaacaagacggagataagccagggcttcaggctatgctgcaaaaggtgttgcagttatatgcttctaaatctctccaaaaacgtagttatgcatacaaaggggggcaagttgtagttcctgaaaagtttctcgaatgtgtaatacagggtctgtatttccacgtagagattttcttcgtt

SEQ ID NO: 73410 - DNA, 1745 bp, Zea Mays
tctagccactccccactcctcacggctcacgagggtacggcacctcgccgtggcccgcggctgtttccgaggcaagcggactcaccggcgtcctgcgcacgcgaggcgagcagcggctccgtcgacctgcgagccaatccgtctttatttctccaccccaatatccaaacataagataaaaatctatccaacactcatttcccacgccactcccccactccctctccaccctgcttccgttttcggccggcgatggcgacgaccgccgccgcatccacgtcgctccggccgctgtcaccgtccccacctcgcatcgcgagtttgccccgtcggtggtgttggggaatcccggtgcagtcctccgggcggagcgcattccatgctgaacggcggaggcggagcactttattatgcgctgctgataaagctcctgaagaatccctcaagaagaccattgaagtggataggcttattgatatgctgagggacgcaaatcctagagagattttatagtgtgctcagttagagcttccatcctgtgttgcctgttcagaattttcggagccaaacgaagaactcattgacaaatctatcaccggacctaagttttatcaactgctttgactatagagctagatgacagcttgttttttttgaacaaatggcaggagctctgcctctcaattaagattgaagagtttatgtacagaaaattccgaaggctacaggctcccataggcgcacgagcattaagcacacacccaactaaggcaaattactcaacaccctcgtgtgtaggtcaatgtcctccttggctctacaggccacctgccgtgcatctagcaagctgctttcaaagatcctcctatttcttgctttctaaatgttgcaaactgtgtatatcaccaccccgttgaaatgtcgccgccgttgccttggtatattggtggctgcctcttcacaccaagcagcgatttctcttggttgggcctatggtctaactatatcggcatcaaagtaggcatatgctcttcggaatttgtccaggtcagacaccccaagtcctccaagctcctttggcttggacactattggccactttactaagcagtatccttcgttggcgttctcttcccccttccaaaggatcttcagattttgaggggaagatggtgaggtgatatatagacatggacaacagaaccgagcttgatcaaatagtggttgaaaatgttctggcattcgacgcaggtttctgggttcgactggcagctagaattgatctctgcaaatcagatgatgataaaaaagattatgaagagctggcggaaaatgtcatgaacattgttgaccggcttgttcacaagactaatcaaaagattgaacaatcaactgatgtgctgaaggcaattattagtcctgcaatgcatgaaggagatgtgaagtggccaccaagagatccagatacactcaaattgatggagaaagaaataacacgccgagaacaagaaggacaacttgatgagggatttctgtcagaagttagtgctcagttgaggcaagctaaacaagacggagataagccagggcttcaggctatgctgcaaaaggtgttgcagttatatgcttctaaatctctccaaaaacgtagttatgcatacaaaggggggcaagttgtagttcctgaaaagtttctcgaatgtgtaatacagggtctgtatttccacgtagagattttcttcgtt

SEQ ID NO: 73411 - DNA, 1018 bp, Zea Mays
tctagccactccccactcctcacggctcacgagggtacggcacctcgccgtggcccgcggctgtttccgaggcaagcggactcaccggcgtcctgcgcacgcgaggcgagcagcggctccgtcgacctgcgagccaatccgtctttatttctccaccccaatatccaaacataagataaaaatctatccaacactcatttcccacgccactcccccactccctctccaccctgcttccgttttcggccggcgatggcgacgaccgccgccgcatccacgtcgctccggccgctgtcaccgtccccacctcgcatcgcgagtttgccccgtcggtggtgttggggaatcccggtgcagtcctccgggcggagcgcattccatgctgaacggcggaggcggagcactttattatgcgctgctgataaagctcctgaagaatccctcaagaagaccattgaagtggataggcttattgatatgctgagggacgcaaatcctagagaggtttctgggttcgactggcagctagaattgatctctgcaaatcagatgatgataaaaaagattatgaagagctggcggaaaatgtcatgaacattgttgaccggcttgttcacaagactaatcaaaagattgaacaatcaactgatgtgctgaaggcaattattagtcctgcaatgcatgaaggagatgtgaagtggccaccaagagatccagatacactcaaattgatggagaaagaaataacacgccgagaacaagaaggacaacttgatgagggatttctgtcagaagttagtgctcagttgaggcaattatctttatatgtgtttaggctaaacaagacggagataagccagggcttcaggctatgctgcaaaaggtgttgcagttatatgcttctaaatctctccaaaaacgtagttatgcatacaaaggggggcaagttgtagttcctgaaaagtttctcgaatgtgtaatacagggtctgtatttccacgtagagattttcttcgtt

SEQ ID NO: 73412 - DNA, 1757 bp, Zea Mays
tctagccactccccactcctcacggctcacgagggtacggcacctcgccgtggcccgcggctgtttccgaggcaagcggactcaccggcgtcctgcgcacgcgaggcgagcagcggctccgtcgacctgcgagccaatccgtctttatttctccaccccaatatccaaacataagataaaaatctatccaacactcatttcccacgccactcccccactccctctccaccctgcttccgttttcggccggcgatggcgacgaccgccgccgcatccacgtcgctccggccgctgtcaccgtccccacctcgcatcgcgagtttgccccgtcggtggtgttggggaatcccggtgcagtcctccgggcggagcgcattccatgctgaacggcggaggcggagcactttattatgcgctgctgataaagctcctgaagaatccctcaagaagaccattgaagtggataggcttattgatatgctgagggacgcaaatcctagagagattttatagtgtgctcagttagagcttccatcctgtgttgcctgttcagaattttcggagccaaacgaagaactcattgacaaatctatcaccggacctaagttttatcaactgctttgactatagagctagatgacagcttgttttttttgaacaaatggcaggagctctgcctctcaattaagattgaagagtttatgtacagaaaattccgaaggctacaggctcccataggcgcacgagcattaagcacacacccaactaaggcaaattactcaacaccctcgtgtgtaggtcaatgtcctccttggctctacaggccacctgccgtgcatctagcaagctgctttcaaagatcctcctatttcttgctttctaaatgttgcaaactgtgtatatcaccaccccgttgaaatgtcgccgccgttgccttggtatattggtggctgcctcttcacaccaagcagcgatttctcttggttgggcctatggtctaactatatcggcatcaaagtaggcatatgctcttcggaatttgtccaggtcagacaccccaagtcctccaagctcctttggcttggacactattggccactttactaagcagtatccttcgttggcgttctcttcccccttccaaaggatcttcagattttgaggggaagatggtgaggtgatatatagacatggacaacagaaccgagcttgatcaaatagtggttgaaaatgttctggcattcgacgcaggtttctgggttcgactggcagctagaattgatctctgcaaatcagatgatgataaagcatgatttcacatataaagattatgaagagctggcggaaaatgtcatgaacattgttgaccggcttgttcacaagactaatcaaaagattgaacaatcaactgatgtgctgaaggcaattattagtcctgcaatgcatgaaggagatgtgaagtggccaccaagagatccagatacactcaaattgatggagaaagaaataacacgccgagaacaagaaggacaacttgatgagggatttctgtcagaagttagtgctcagttgaggctaaacaagacggagataagccagggcttcaggctatgctgcaaaaggtgttgcagttatatgcttctaaatctctccaaaaacgtagttatgcatacaaaggggggcaagttgtagttcctgaaaagtttctcgaatgtgtaatacagggtctgtatttccacgtagagattttcttcgtt

SEQ ID NO: 73413 - DNA, 1037 bp, Zea Mays
tctagccactccccactcctcacggctcacgagggtacggcacctcgccgtggcccgcggctgtttccgaggcaagcggactcaccggcgtcctgcgcacgcgaggcgagcagcggctccgtcgacctgcgagccaatccgtctttatttctccaccccaatatccaaacataagataaaaatctatccaacactcatttcccacgccactcccccactccctctccaccctgcttccgttttcggccggcgatggcgacgaccgccgccgcatccacgtcgctccggccgctgtcaccgtccccacctcgcatcgcgagtttgccccgtcggtggtgttggggaatcccggtgcagtcctccgggcggagcgcattccatgctgaacggcggaggcggagcactttattatgcgctgctgataaagctcctgaagaatccctcaagaagaccattgaagtggataggcttattgatatgctgagggacgcaaatcctagagagcttgatcaaatagtggttgaaaatgttctggcattcgacgcaggtttctgggttcgactggcagctagaattgatctctgcaaatcagatgatgataaaattatgaagagctggcggaaaatgtcatgaacattgttgaccggcttgttcacaagactaatcaaaagattgaacaatcaactgatgtgctgaaggcaattattagtcctgcaatgcatgaaggagatgtgaagtggccaccaagagatccagatacactcaaattgatggagaaagaaataacacgccgagaacaagaaggacaacttgatgagggatttctgtcagaagttagtgctcagttgaggcaagctaaacaagacggagataagccagggcttcaggctatgctgcaaaaggtgttgcagttatatgcttctaaatctctccaaaaacgtagttatgcatacaaaggggggcaagttgtagttcctgaaaagtttctcgaatgtgtaatacagggtctgtatttccacgtagagattttcttcgtt

SEQ ID NO: 73414 - DNA, 1057 bp, Zea Mays
tctagccactccccactcctcacggctcacgagggtacggcacctcgccgtggcccgcggctgtttccgaggcaagcggactcaccggcgtcctgcgcacgcgaggcgagcagcggctccgtcgacctgcgagccaatccgtctttatttctccaccccaatatccaaacataagataaaaatctatccaacactcatttcccacgccactcccccactccctctccaccctgcttccgttttcggccggcgatggcgacgaccgccgccgcatccacgtcgctccggccgctgtcaccgtccccacctcgcatcgcgagtttgccccgtcggtggtgttggggaatcccggtgcagtcctccgggcggagcgcattccatgctgaacggcggaggcggagcactttattatgcgctgctgataaagctcctgaagaatccctcaagaagaccattgaagtggataggcttattgatatgctgagggacgcaaatcctagagagcttgatcaaatagtggttgaaaatgttctggcattcgacgcaggtttctgggttcgactggcagctagaattgatctctgcaaatcagatgatgataaagcatgatttcacatataaagattatgaagagctggcggaaaatgtcatgaacattgttgaccggcttgttcacaagactaatcaaaagattgaacaatcaactgatgtgctgaaggcaattattagtcctgcaatgcatgaaggagatgtgaagtggccaccaagagatccagatacactcaaattgatggagaaagaaataacacgccgagaacaagaaggacaacttgatgagggatttctgtcagaagttagtgctcagttgaggcaagctaaacaagacggagataagccagggcttcaggctatgctgcaaaaggtgttgcagttatatgcttctaaatctctccaaaaacgtagttatgcatacaaaggggggcaagttgtagttcctgaaaagtttctcgaatgtgtaatacagggtctgtatttccacgtagagattttcttcgtt

SEQ ID NO: 73415 - DNA, 1781 bp, Zea Mays
tctagccactccccactcctcacggctcacgagggtacggcacctcgccgtggcccgcggctgtttccgaggcaagcggactcaccggcgtcctgcgcacgcgaggcgagcagcggctccgtcgacctgcgagccaatccgtctttatttctccaccccaatatccaaacataagataaaaatctatccaacactcatttcccacgccactcccccactccctctccaccctgcttccgttttcggccggcgatggcgacgaccgccgccgcatccacgtcgctccggccgctgtcaccgtccccacctcgcatcgcgagtttgccccgtcggtggtgttggggaatcccggtgcagtcctccgggcggagcgcattccatgctgaacggcggaggcggagcactttattatgcgctgctgataaagctcctgaagaatccctcaagaagaccattgaagtggataggcttattgatatgctgagggacgcaaatcctagagagattttatagtgtgctcagttagagcttccatcctgtgttgcctgttcagaattttcggagccaaacgaagaactcattgacaaatctatcaccggacctaagttttatcaactgctttgactatagagctagatgacagcttgttttttttgaacaaatggcaggagctctgcctctcaattaagattgaagagtttatgtacagaaaattccgaaggctacaggctcccataggcgcacgagcattaagcacacacccaactaaggcaaattactcaacaccctcgtgtgtaggtcaatgtcctccttggctctacaggccacctgccgtgcatctagcaagctgctttcaaagatcctcctatttcttgctttctaaatgttgcaaactgtgtatatcaccaccccgttgaaatgtcgccgccgttgccttggtatattggtggctgcctcttcacaccaagcagcgatttctcttggttgggcctatggtctaactatatcggcatcaaagtaggcatatgctcttcggaatttgtccaggtcagacaccccaagtcctccaagctcctttggcttggacactattggccactttactaagcagtatccttcgttggcgttctcttcccccttccaaaggatcttcagattttgaggggaagatggtgaggtgatatatagacatggacaacagaaccgagcttgatcaaatagtggttgaaaatgttctggcattcgacgcaggtttctgggttcgactggcagctagaattgatctctgcaaatcagatgatgataaagcatgatttcacatataaagattatgaagagctggcggaaaatgtcatgaacattgttgaccggcttgttcacaagactaatcaaaagattgaacaatcaactgatgtgctgaaggcaattattagtcctgcaatgcatgaaggagatgtgaagtggccaccaagagatccagatacactcaaattgatggagaaagaaataacacgccgagaacaagaaggacaacttgatgagggatttctgtcagaagttagtgctcagttgaggcaattatctttatatgtgtttaggctaaacaagacggagataagccagggcttcaggctatgctgcaaaaggtgttgcagttatatgcttctaaatctctccaaaaacgtagttatgcatacaaaggggggcaagttgtagttcctgaaaagtttctcgaatgtgtaatacagggtctgtatttccacgtagagattttcttcgtt

SEQ ID NO: 73416 - DNA, 2561 bp, Zea Mays
tctagccactccccactcctcacggctcacgagggtacggcacctcgccgtggcccgcggctgtttccgaggcaagcggactcaccggcgtcctgcgcacgcgaggcgagcagcggctccgtcgacctgcgagccaatccgtctttatttctccaccccaatatccaaacataagataaaaatctatccaacactcatttcccacgccactcccccactccctctccaccctgcttccgttttcggccggcgatggcgacgaccgccgccgcatccacgtcgctccggccgctgtcaccgtccccacctcgcatcgcgagtttgccccgtcggtggtgttggggaatcccggtgcagtcctccgggcggagcgcattccatgctgaacggcggaggcggagcactttattatgcgctgctgataaagctcctgaagaatccctcaagaagaccattgaagtggataggcttattgatatgctgagggacgcaaatcctagagagattttatagtgtgctcagttagagcttccatcctgtgttgcctgttcagaattttcggagccaaacgaagaactcattgacaaatctatcaccggacctaagttttatcaactgctttgactatagagctagatgacagcttgttttttttgaacaaatggcaggagctctgcctctcaattaagattgaagagtttatgtacagaaaattccgaaggctacaggctcccataggcgcacgagcattaagcacacacccaactaaggcaaattactcaacaccctcgtgtgtaggtcaatgtcctccttggctctacaggccacctgccgtgcatctagcaagctgctttcaaagatcctcctatttcttgctttctaaatgttgcaaactgtgtatatcaccaccccgttgaaatgtcgccgccgttgccttggtatattggtggctgcctcttcacaccaagcagcgatttctcttggttgggcctatggtctaactatatcggcatcaaagtaggcatatgctcttcggaatttgtccaggtcagacaccccaagtcctccaagctcctttggcttggacactattggccactttactaagcagtatccttcgttggcgttctcttcccccttccaaaggatcttcagattttgaggggaagatggtgaggtgatatatagacatggacaacagaaccgaggtgactaatgtcaaacacctgactttgtttaatagctttcctttctgtaggaacatatgaggaggctagaactgcattgattcattgcataacagggtagagaggttacacatatataggcaaggatcacagggtttatagaaatacccaatcacagattgatccttgcctaatcagctcatataccctacctattctggttagaatacattgggaaggtaatcatatgtctagccctgattttagcttaccaaaactgactaacactttccaacctggaagtctctgccacattccatgagaggttgcacatgcactttttggagaggcctggtatgtattgtagcccaaggtagcggcagggaaaagtgcctctggctcccaagaaaggtgagatcacttgatcaaggtctatgtcctcacaacgaattgggtggatggagcttttagcaaagtttacatgggtctgacactttgctgaaggcgtcaaggatggatttaagtgcctcgtgcctcgatatcttcgttcaaaaaaaagtgcctcgatatcctcttttacttttgacttatttctttgtcttcttactatcccgttctacaccttctacatgcttgcacagtgtttgggtttgtctaaaaggtatccctagattggacaaatgtgtcatgtctctctctctctctctttaaatgaaggccttattctctgctgaatgaactggaagaatccttgctcgttttattgtttatttttaaatagtagttcagattaaagtactaatacacctttttttttgtaaacagcttgatcaaatagtggttgaaaatgttctggcattcgacgcaggtttctgggttcgactggcagctagaattgatctctgcaaatcagatgatgataaagcatgatttcacatataaagattatgaagagctggcggaaaatgtcatgaacattgttgaccggcttgttcacaagactaatcaaaagattgaacaatcaactgatgtgctgaaggcaattattagtcctgcaatgcatgaaggagatgtgaagtggccaccaagagatccagatacactcaaattgatggagaaagaaataacacgccgagaacaagaaggacaacttgatgagggatttctgtcagaagttagtgctcagttgaggctaaacaagacggagataagccagggcttcaggctatgctgcaaaaggtgttgcagttatatgcttctaaatctctccaaaaacgtagttatgcatacaaaggggggcaagttgtagttcctgaaaagtttctcgaatgtgtaatacagggtctgtatttccacgtagagattttcttcgtt

SEQ ID NO: 73417 - DNA, 577 bp, Zea Mays
tctcaattaagattgaagagtttatgtacagaaaattccgaaggctacaggctcccataggcgcacgagcattaagcacacacccaactaagcttgatcaaatagtggttgaaaatgttctggcattcgacgcaggtttctggaaagattatgaagagctggcggaaaatgtcatgaacattgttgaccggcttgttcacaagactaatcaaaagattgaacaatcaactgatgtgctgaaggcaattattagtcctgcaatgcatgaaggagatgtgaagtggccaccaagagatccagatacactcaaattgatggagaaagaaataacacgccgagaacaagaaggacaacttgatgagggatttctgtcagaagttagtgctcagttgaggctaaacaagacggagataagccagggcttcaggctatgctgcaaaaggtgttgcagttatatgcttctaaatctctccaaaaacgtagttatgcatacaaaggggggcaagttgtagttcctgaaaagtttctcgaatgtgtaatacagggtctgtatttccacgtagagattttcttcgtt

SEQ ID NO: 73418 - DNA, 584 bp, Zea Mays
cgagcattaagcacacacccaactaagcttgatcaaatagtggttgaaaatgttctggcattcgacgcaggtttctgggttcgactggcagctagaattgatctctgcaaatcagatgatgataaaaaagattatgaagagctggcggaaaatgtcatgaacattgttgaccggcttgttcacaagactaatcaaaagattgaacaatcaactgatgtgctgaaggcaattattagtcctgcaatgcatgaaggagatgtgaagtggccaccaagagatccagatacactcaaattgatggagaaagaaataacacgccgagaacaagaaggacaacttgatgagggatttctgtcagaagttagtgctcagttgaggcaattatctttatatgtgtttaggctaaacaagacggagataagccagggcttcaggctatgctgcaaaaggtgttgcagttatatgcttctaaatctctccaaaaacgtagttatgcatacaaaggggggcaagttgtagttcctgaaaagtttctcgaatgtgtaatacagggtctgtatttccacgtagagattttcttcgtt

SEQ ID NO: 73419 - DNA, 638 bp, Zea Mays
atcaaagtaggcatatgctcttcggaatttgtccaggatcttcagattttgaggggaagatggtgaggtgatatatagacatggacaacagaaccgaggtgcttgatcaaatagtggttgaaaatgttctggcattcgacgcaggtttctgggttcgactggcagctagaattgatctctgcaaatcagatgatgataaaaaagattatgaagagctggcggaaaatgtcatgaacattgttgaccggcttgttcacaagactaatcaaaagattgaacaatcaactgatgtgctgaaggcaattattagtcctgcaatgcatgaaggagatgtgaagtggccaccaagagatccagatacactcaaattgatggagaaagaaataacacgccgagaacaagaaggacaacttgatgagggatttctgtcagaagttagtgctcagttgaggcaagctaaacaagacggagataagccagggcttcaggctatgctgcaaaaggtgttgcagttatatgcttctaaatctctccaaaaacgtagttatgcatacaaaggggggcaagttgtagttcctgaaaagtttctcgaatgtgtaatacagggtctgtatttccacgtagagattttcttcgtt

SEQ ID NO: 73420 - DNA, 5196 bp, Zea Mays
caaaaatcctagcaaccgctcaggtttcttccccttcagtagccgtagcccttgctttcgtcgtccttgcggcagcttggcgagaatttttctcgctgcggttgagtgcgagccattccggtgggtaagacagagttgggggagcgtcggttagttaattcttcgcccatcatcagtcggaggagagacaggaggaggtgcatggccggcatggagggttccaattccagctcgcagccgccgccgttcctcatcaagacctacgagatggtggaggacccggcgaccaaccacgtcgtgtcgtggggccccggcggcgcaagcttcgtggtgtggaacccgccggacttctcacgggacctgctgcccaagtacttcaagcacaacaacttctccagcttcatcaggcagctcaacacatacggtttccgaaagatcgatcccgagagatgggagttcgccaacgacgacttcgttagggggcacacgcacctcctgaagaacatccaccggcgcaagccggtgcacagccactcgccgcagacccaggtgaacggcccactggcggagtcggagaggcgcgagctcgaggacgagatcagcaggctcaagtacgagaagagcctgctcctgacggacctccagaggcagagccagcagcggtgcgggatcagctggcagatgcagtcgctggaacgcaggctggcgcagatggaggagcgccagaggaacatcgtggcctccctgcgcgacatcctgctgccggtcggacacggggtcgtttcgtgggggtcggcgacgggggcggaccacttcagcaagaagaggagggttccgaagatggacttcttcgtcgacgaacccaaggtcgaagaacagcaggtgccgttcctgcagacggtgggcgcggagacgccaggcatgtctccgatccgccttctgagcgccgagccgtttgagaagatggagctggccctggtgtcgctggagagtttcttgcagagggcaacagcgcatacgtctgctgctcaaggcatgttgtacgccgctggtgttgctgaacccagccctgctctggctctaggcgagatgctctcggcaccaatggataccgagatcgatctgcagccatcagcttgccagaaccccttcgcttcgacctcagggcaagaccagtcgtcttctccgttggcagaacccccgagctactacgcccagagcccgatgctgccgatggcacagctccatgaacatgcccataggacagctgctggagtcgatatgaactctgacaccacaaccggcgacacctcgcaagatgataccaccagtgaaactggaggttcccatgtgccggccaaagtgaacgatgtattctgggagcggtttctcacagacgccgccgagggtaaaagcgaggcaatagaagcaaaagaggatgtgaagactgccgtagaccgctgctgtcctcgtctccaggacaatgttgatcagatcactgagcagatggggcagcttgattcagcttcttatgcacccgagaattactgataccacaccatcggtgttgccgctgtacattatagtttaggctagctaagtcttttctagcatttcctactgtaaaaagtaaaatcatatgctgacccatgtacattacgtatgtcctcgtgctgttgagctagagcacagattcagttatttgctgccctaatctcttccgttgttgtgcttgcacgtgtgccctttctcataaatcctctggagatgcatcttacaatacctaaaatagtaattttatctgatgaagtgatgattgtgcacttgctgtgacatctaattactgtctctcctgttatgtcagagttgacactggtacatcaacgggtaaactttcttttcagttttcaatggaacattttcagccttaggtaccatgctagcacgatcaccttagggcatcgggatcaaatgggattggagtgattaaatctctcactagtcaaaattgaatataaggggatttaatccccctcaagctttgtttgaataatctagtatttacatctatgcacatggattgaggtgtaagttagtttaatttacattttaatctatcccaatccatatgtactgagataaatactagagtatccaaacaaagcctcagggctaatttggtgatacgggaaatagagaggatgcatgggagagatatccacttgctattcaatttcaaataggaaggagatttctccccattaatcccctccatttccctggtcatcaaaccagctctcaatctcctttgatccaaacacaaccaaacaaggcaaagaaaaaaacatgtccaaggactaaagaaaggccgaacaaaactcgcataatctaattgaggaagaaggcctggggctcgcatgtggcctcttgtttaggaccttaggtgacaatcatctcggcaaccaggacatacctgtacggtccacatgctccagaaaatataatctaccggaggattatatatggccattatgtacagcacgaatgtaatttgaaagtccatggggtgcatcaaggattgtgcttgggaagccaatcatgtcatcaggctcaaagaactctcagctgcgttagaaaggcggaacacaagtccagaaagaggagttgtggtccactgaccctttgcaggtcaagaaggtacttctcatccctcgttttgtaaagctgcaatcagtggaagtgtattagaattgggtacattttccaagtagactttatgctaacaaaaagggagcgtctaatctataggtatgaacggaagtacaaattatggagtatgctaattttaatcacaaatatacttggtcctaagggattgtgaacattgaaacaattcagaaataatctggcatgcaaatgtaatcctaacaaaattatgtttgttgcataaacatagcacataaagaagtcaaggacatatgttaaagagttatgcatagtgtggttcatagcctgcacagcaagtcttctcaaaactgagagcacctagaggggggggtgaataggtgatcctgaataacttcaaaacttaagccacaaaaacttgttaagtgttagcacaattatggccaagtggctagagaggagtcaaaacacaataaccacaagaaatcaatcacagagatgacacggtggttatcccgtggttcggccaagtacaaaacttgcctacttccacgttgtggcgtcccaacggacgagagttgcactcaactcctctcaagtgatccaatgatcaacttgaataccacggtgttcttgcttttcttttctcaatcccgcttgcgaggaatctccacaatttggagcctctcgcccttacaaaagatgttcacagagaatcacggagcaggggagggaatgagcgacgcacacaagacttcaaaagatcagagcaacacgcacacaagcagcaataagagctcgcaacacaactcaaagagtacacaactccacaagagctctatatgctatcacaatgaatcgaatgcgctagatcaatgtcttggtgcttagaaaggttgtaggaatgcttggttgtactcctccatgcgccaaggggtcccttttatagccccaaggcacctaggagccgttgagagcacatctggaaggctattcttgccttctgtcgtcgggcgcaccggacagtccggtgcacaccggacagtgtccggtgcccgattcctttccttaattggcgaagccgaccgttgccgaccgttgcagatctggcgcaccggccagtccggtgcacaccggacagtccggtgcttccctccgaccgttggctcggccacgtgtcgcgcgccgatcacgcggccgactgttggcccggccgaccgttggctcaccggacagtccggtgcacaccggacagtccggtgaattttagccgaagtcgccggagaaaaacccgagagcggcctcttcggccaaggcggcttggcgcaccggacactgtccggtgcaccatcggacactgtccggtgcaccaccggacagtccggtgccctagaccgaagcagccccttggctgcacacagccaagtcttctcttctcttcttctttctgtttctaacacttagacaaatatattagtacacaaaaccaatgtactaagacttagaaacatacctttgttgaagatttgcagtttgttcatccatgggcattgatttacatttaagcacttgtgttggcacttaatcaccaaaatacttagaaatggcccaaaggcacatttccctttcaatctccccctttttggtgatttatgccaacaccacataaagcaactagaacaagtgcaaaatcacttcaaataaaaactcaaattggttttgattcaattttggcatatatggatcatcctttgccaccacttggtttgtttttgcaaatcaaactcaaatctctatctctaagtcaaacacacatgttgaagcataaagagagtcattccaaaagagattgatcaaggatttcaaaaactccccctatttcccataatcaacacttctccccacaagaagccaacttttgacaatagagacaataagagacaataaaagcttttgacaaaacaaaaactctattctactattttcaaaatctctcaagtggtagctgatccatttatcactttggcctttattttctccccctttggcatcaagcaccaaaacgggattaatcttggcctcttaaccccattgcctcaccaaagtcttcaattaagagcaaatggcaataagatttcatgagatgaacttggaattagttagcctctcatcggagtgcagtggaagtctttcatggtccaagtccaccttttccctttcaatcctccttcgagactcaatcaagcaaactcaagcaaatggttagtctcaaagggtcaagttgtaacacatctccccctaaacatgtgcatcactttgcaacggatttgtgaggtccagggagtgttggtacaacttgagcaccataataagcaacaaaatgcaaaaaggaacatgatcaaaagcataagtacatgtatgctacaattcaatccaggttccgcgaatctatgacatttagctcactacgcaacctgcaaaaggtcttctcatctagaggcttggtaaaga

SEQ ID NO: 73421 - DNA, 1999 bp, Zea Mays
gtttatttgttggcgggtcagtgtactccgtattcattagtcgcagtaagcggcagtcagccagacagccagtcggccgtggacagtggcgacggcgaggcgaagccgtatttggaacttggaagcaaccgccccgcaggcgcgagcgccgtcgtccgtctcgcctcgcctcgcctcgcctggcactgcacgcgcaaaatcgcatcgcatcacgagctctactctccccggctccactgcccgctcgctctccgactccatacaggcaaaccgcgccgccgcgcttctaacccccacccaactctgcctccgatcccaccctcccagcccagcgcgtcaagtaccccgcctcggttcgctccccgtgtgatctggttcccacccgcggccatcgcatcgccgccgccgccgccgccgccgcagaacctcgcgctcccggcgcgggatctcgcgggccccggccccacggtccggcgatcgggatgacagcggcgcgccggcgatgaccggctcggcggcctcgctgggcctgcggtccgggagctacggctccctcgcggccgccgccgtcgtcggcagcggcgggaggaaggccggcgccaccgcctgccgcacgctgcgcgtggagaaggagcgcctgcaccgcgcgctgcggctggtcggacgccgcaggaccggcgtcctgctgctgctcgccgtcgcgtccgccgctctcttctgctccctcttcgccgtcgtcaaagatgacgccaattcaactagtattgtaaataattacgaagtcccaaatgccatacagaagtcagtgtatcccagcagaacacgacctctaatgatgtctggaaaccaagagtccaccagtgttgtcaacaaaattgattttccaaatcggcttcatctttcatttgcaaacttcacacatccttgtgaaggtttctcagttcctcctcccctggttgataagaaacgcactggaccccggccatgccctgtttgctatgtttccgtggaccaggcatttgccttgatgcccctacaagcttcaccatcacctgtcctaaaggacttaaactatgtatcagaagatggtgttactgcaaatttatcaaatcagggatctggatttggagggcatccatccctggatcagagaaacgattctttcaacattaatgagtcaatgactgtccactgcggctttgtcagaggaaagaagcctggccaaggtactggattcgatatcaaggatgacgatctgctagagatggagcaatgccacgatctagtcgtagcttctgctatttttggaaattatgatatgattcagcatccgaggaacatcagtgatttttcaaaggcaaatgcatgcttttatatgtttgtagatgaagaaacagaggcttatgtcaagaattctagttctctgtacaacaataataaagttggactgtggaggctggtggttgtccgaaacctcccttatgaagacccaaggcgtacgggaaagattccaaaacttctgctccataggctttttccaaatgtgagattttcagtttggatagatgcaaaacttgagcttgttgtggatccctatctcctgcttgagaggttcctttggaggaagaataccacttttgcaatctctcggcattacaaacgctttgatgtgtttgaagaagcagaagcgaacaaagctgctggaaagtacgacaacgcgtcaatcgattaccaaatagagttctacagaaacgagggcctaacgcattattcttctgctaagcttcccatcacaagcgatgtccccgaaggctgtgtgatcatcagagagcacatccccatcacgaacctgttcacgtgcgtatggttcaatgaggttgatcgcttcacctccagggaccagatcagtttcagcacggtccgggacaaaatcagggctagagttggctggatgcctgagatgttcatggactgcgaaaggcgcaactttgtcgttcag

SEQ ID NO: 73422 - DNA, 2681 bp, Zea Mays
gtaagcggcagtcagccagacagccagtcggccgtggacagtggcgacggcgaggcgaagccgtatttggaacttggaagcaaccgccccgcaggcgcgagcgccgtcgtccgtctcgcctcgcctcgcctcgcctggcactgcacgcgcaaaatcgcatcgcatcacgagctctactctccccggctccactgcccgctcgctctccgactccatacaggcaaaccgcgccgccgcgcttctaacccccacccaactctgcctccgatcccaccctcccagcccagcgcgtcaagtaccccgcctcggttcgctccccgtgtgatctggttcccacccgcggccatcgcatcgccgccgccgccgccgccgccgcagaacctcgcgctcccggcgcgggatctcgcgggccccggccccacggtccggcgatcgggatgacagcggcgcgccggcgatgaccggctcggcggcctcgctgggcctgcggtccgggagctacggctccctcgcggccgccgccgtcgtcggcagcggcgggaggaaggccggcgccaccgcctgccgcacgctgcgcgtggagaaggagcgcctgcaccgcgcgctgcggctggtcggacgccgcaggaccggcgtcctgctgctgctcgccgtcgcgtccgccgctctcttctgctccctcttcgccgtcgtcaaagatgacgccaattcaactagtattgtaaataattacgaagtcccaaatgccatacagaagtcagtgtatcccagcagaacacgacctctaatgatgtctggaaaccaagagtccaccagtgttgtcaacaaaattgattttccaaatcggcttcatctttcatttgcaaacttcacacatccttgtgaaggtttctcagttcctcctcccctggttgataagaaacgcactggaccccggccatgccctgtttgctatgtttccgtggaccaggcatttgccttgatgcccctacaagcttcaccatcacctgtcctaaaggacttaaactatgtatcagaagatggtgttactgcaaatttatcaaatcagggatctggatttggagggcatccatccctggatcagagaaacgattctttcaacattaatgagtcaatgactgtccactgcggctttgtcagaggaaagaagcctggccaaggtactggattcgatatcaaggatgacgatctgctagagatggagcaatgccacgatctagtcgtagcttctgctatttttggaaattatgatatgattcagcatccgaggaacatcagtgatttttcaaaggcaaatgcatgcttttatatgtttgtagatgaagaaacagaggcttatgtcaagaattctagttctctgtacaacaataataaagttggactgtggaggctggtggttgtccgaaacctcccttatgaagacccaaggcgtacgggaaagattccaaaacttctgctccataggctttttccaaatgtgagattttcagtttggatagatgcaaaacttgagcttgttgtggatccctatctcctgcttgagaggtattcttgatgtagagagctttacttgtaatgtcctacattttgatggttctataactattcttaaaagagaaaatctggagaagatatatgacctgtgaaattgaggtaaatgaatttggggctgtcttgcaccctagcaacttcacttcaatttcttagtgccaatgctatcgtgaactggtcccagcaaatttggatctgtggtagggttttgttgcatctgtatcccatcattgtagtacgacatttatttgactgatccatgaaagttgggctgctgtaagtgataatgagtaatctgatttctcactctacctgttaggttcctttggaggaagaataccacttttgcaatctctcggcattacaaacgctttgatgtgtttgaagaagcagaagcgaacaaagctgctggaaagtacgacaacgcgtcaatcgattaccaaatagagttctacagaaacgagggcctaacgcattattcttctgctaagcttcccatcacaagcgatgtccccgaaggctgtgtgatcatcagagagcacatccccatcacgaacctgttcacgtgcgtatggttcaatgaggttgatcgcttcacctccagggaccagatcagtttcagcacggtccgggacaaaatcagggctagagttggctggatgcctgagatgttcatggactgcgaaaggcgcaactttgtcgttcaggtataccacagggagctactggagcagatgattgcatctggtaggatgccccctttggcggcggctgtgacgcacgcgaatgtccgggtaggtagcaggaaagctcctccgacaaagaagccctccgtgaaacggaaaagggagaaaaaatcgagctcgcgacggcgtctcccgaaacccatcgcccaggggttggatgccaatgtgacgcaagtttttttctcagtagcagagtctggatagtcccacacaggaacattgttccattaggtctggggcctgtaatcgtgccccggcgagatttgttcatagctattcttcatcattgttgtacataacagcggcaacccaacattcaattttctccattcatattatcttcggttccattgatattatgtt

SEQ ID NO: 73423 - DNA, 2278 bp, Zea Mays
gtaagcggcagtcagccagacagccagtcggccgtggacagtggcgacggcgaggcgaagccgtatttggaacttggaagcaaccgccccgcaggcgcgagcgccgtcgtccgtctcgcctcgcctcgcctcgcctggcactgcacgcgcaaaatcgcatcgcatcacgagctctactctccccggctccactgcccgctcgctctccgactccatacaggcaaaccgcgccgccgcgcttctaacccccacccaactctgcctccgatcccaccctcccagcccagcgcgtcaagtaccccgcctcggttcgctccccgtgtgatctggttcccacccgcggccatcgcatcgccgccgccgccgccgccgccgcagaacctcgcgctcccggcgcgggatctcgcgggccccggccccacggtccggcgatcgggatgacagcggcgcgccggcgatgaccggctcggcggcctcgctgggcctgcggtccgggagctacggctccctcgcggccgccgccgtcgtcggcagcggcgggaggaaggccggcgccaccgcctgccgcacgctgcgcgtggagaaggagcgcctgcaccgcgcgctgcggctggtcggacgccgcaggaccggcgtcctgctgctgctcgccgtcgcgtccgccgctctcttctgctccctcttcgccgtcgtcaaagatgacgccaattcaactagtattgtaaataattacgaagtcccaaatgccatacagaagtcagtgtatcccagcagaacacgacctctaatgatgtctggaaaccaagagtccaccagtgttgtcaacaaaattgattttccaaatcggcttcatctttcatttgcaaacttcacacatccttgtgaaggtttctcagttcctcctcccctggttgataagaaacgcactggaccccggccatgccctgtttgctatgtttccgtggaccaggcatttgccttgatgcccctacaagcttcaccatcacctgtcctaaaggacttaaactatgtatcagaagatggtgttactgcaaatttatcaaatcagggatctggatttggagggcatccatccctggatcagagaaacgattctttcaacattaatgagtcaatgactgtccactgcggctttgtcagaggaaagaagcctggccaaggtactggattcgatatcaaggatgacgatctgctagagatggagcaatgccacgatctagtcgtagcttctgctatttttgatgaagaaacagaggcttatgtcaagaattctagttctctgtacaacaataataaagttggactgtggaggctggtggttgtccgaaacctcccttatgaagacccaaggcgtacgggaaagattccaaaacttctgctccataggctttttccaaatgtgagattttcagtttggatagatgcaaaacttgagcttgttgtggatccctatctcctgcttgagaggttcctttggaggaagaataccacttttgcaatctctcggcattacaaacgctttgatgtgtttgaagaagcagaagcgaacaaagctgctggaaagtacgacaacgcgtcaatcgattaccaaatagagttctacagaaacgagggcctaacgcattattcttctgctaagcttcccatcacaagcgatgtccccgaaggctgtgtgatcatcagagagcacatccccatcacgaacctgttcacgtgcgtatggttcaatgaggttgatcgcttcacctccagggaccagatcagtttcagcacggtccgggacaaaatcagggctagagttggctggatgcctgagatgttcatggactgcgaaaggcgcaactttgtcgttcaggtataccacagggagctactggagcagatgattgcatctggtaggatgccccctttggcggcggctgtgacgcacgcgaatgtccgggtaggtagcaggaaagctcctccgacaaagaagccctccgtgaaacggaaaagggagaaaaaatcgagctcgcgacggcgtctcccgaaacccatcgcccaggggttggatgccaatgtgacgcaagtttttttctcagtagcagagtctggatagtcccacacaggaacattgttccattaggtctggggcctgtaatcgtgccccggcgagatttgttcatagctattcttcatcattgttgtacataacagcggcaacccaacattcaattttctccattcatattatcttcggttccattgatattatgtt

SEQ ID NO: 73424 - DNA, 1712 bp, Zea Mays
ctggtttgttgtgttttaaacaacggggaacaatgtgtgtgcatacttttagagatgacgccaattcaactagtattgtaaataattacgaagtcccaaatgccatacagaagtcagtgtatcccagcagaacacgacctctaatgatgtctggaaaccaagagtccaccagtgttgtcaacaaaattgattttccaaatcggcttcatctttcatttgcaaacttcacacatccttgtgaaggtttctcagttcctcctcccctggttgataagaaacgcactggaccccggccatgccctgtttgctatgtttccgtggaccaggcatttgccttgatgcccctacaagcttcaccatcacctgtcctaaaggacttaaactatgtatcagaagatggtgttactgcaaatttatcaaatcagggatctggatttggagggcatccatccctggatcagagaaacgattctttcaacattaatgagtcaatgactgtccactgcggctttgtcagaggaaagaagcctggccaaggtactggattcgatatcaaggatgacgatctgctagagatggagcaatgccacgatctagtcgtagcttctgctatttttggaaattatgatatgattcagcatccgaggaacatcagtgatttttcaaaggcaaatgcatgcttttatatgtttgtagatgaagaaacagaggcttatgtcaagaattctagttctctgtacaacaataataaagttggactgtggaggctggtggttgtccgaaacctcccttatgaagacccaaggcgtacgggaaagattccaaaacttctgctccataggctttttccaaatgtgagattttcagtttggatagatgcaaaacttgagcttgttgtggatccctatctcctgcttgagaggttcctttggaggaagaataccacttttgcaatctctcggcattacaaacgctttgatgtgtttgaagaagcagaagcgaacaaagctgctggaaagtacgacaacgcgtcaatcgattaccaaatagagttctacagaaacgagggcctaacgcattattcttctgctaagcttcccatcacaagcgatgtccccgaaggctgtgtgatcatcagagagcacatccccatcacgaacctgttcacgtgcgtatggttcaatgaggttgatcgcttcacctccagggaccagatcagtttcagcacggtccgggacaaaatcagggctagagttggctggatgcctgagatgttcatggactgcgaaaggcgcaactttgtcgttcaggtataccacagggagctactggagcagatgattgcatctggtaggatgccccctttggcggcggctgtgacgcacgcgaatgtccgggtaggtagcaggaaagctcctccgacaaagaagccctccgtgaaacggaaaagggagaaaaaatcgagctcgcgacggcgtctcccgaaacccatcgcccaggggttggatgccaatgtgacgcaagtttttttctcagtagcagagtctggatagtcccacacaggaacattgttccattaggtctggggcctgtaatcgtgccccggcgagatttgttcatagctattcttcatcattgttgtacataacagcggcaacccaacattcaattttctccattcatattatcttcggttccattgatattatgtt

SEQ ID NO: 73425 - DNA, 3325 bp, Zea Mays
ccttcctccgccttccgcgcgcagcgcagagcgcacgggacacccgccgcccacgccttccgccccagacccactgcacgtgcacggccacgcgacccagcccacacatccactccgctttttccaaccgccgcccacgcgaaccccgacgcggccgcctcgagctccactccgtttaccctgcaaccccatcctcctcggcttcccatgtcgtgctcggcggcggcgggcgccgaggccaccgctctcctgttccgcagcgccgctccgtccacgatcgtcgggcgtcaccgcctcgctatgtctcgccggacttcgcgccgaaacctcaggactggtgtgcaccctcatcagaagagtgcacctagtgctaaccatcgtaacagggctagcattcagagagatagagcatcagcttccattgatgaagaacagaaacagatgtctgaagatgaaaatggcctactagacattcaactggaagatctggtaggaatgatacagaatacccagaagaatatattgcttctgaatcaagctcgtcttcaagcattggaacgtgctgacaaaattcttaaagagaaagaaactttgcaacagaagataaacattttagagatgaaactgtcagaaacaggtaaacaatctgtgctttctagtgaagtaaagtctgatgaagagagtctggagtttgatgtcgtaaaggaagagaatatgctactgaaggatgagatgaattttctaaaaggaaagcttattgagataactgagacagaggagagtctattcaagttggagaaagagtgtgctcttctaaatgcttcccttagggagctcgagtgtacatccacttctgcccaatctgatgtgttgaaacttggccctctgcaacaagatgcctggtgggagaaagtagaaaatttggaagacttgcttgattccacagcaaaccaagtggagcatgcttctttgacgctagatggttaccgtgatttccaggataaggttgacaaactaaaagcatcattgggaacaacaaacgtatcagagttctgtctttatttggttgatattttgcagcaaagggtaaaatcagtagaagagcgctttcaagcatgtaatcatgaaatgcattcacaaattgaactttatgaacactcaatagtggagtttcatggtactctcagcaaactaataaatgaaagtgagaaaaagtcaatggagcattatgcagaaggcatgccatcagagttctggagtaggatctctcttctgattgatgggtggtcgcttgagaagaaaatatccattaatgatgcaagtatgttgagagaaatggcttggaaaagggataatcgcctccgggaagcttacttgtcatccagaggaatggaagagagggaactgatagatagttttctaaagatggcactaccaggaacaagttctggtttgcacattgtccacatagcagcagagatggctcctgtcgcaaaggttggtggtctggcagatgtgatctctggtcttgggaaggcacttcaaaaaaaggggcaccttgtagagattattcttcccaaatatgattgcatgcagcataaccaaataaataatcttaaggttctagatgttgtggtgaagtcttactttgaaggaaatatgtttgccaacaagatatggactggaactgttgaaggtcttccggtctactttattgaaccgcaacatccaggcacctctttactgggatgtatatgcaaacctgggcttcaactcagctagaatttgttttacctgtcacaattttgaatatcaaggaatcgctccagctcaggacttagcatattgtggtcttgatgttgatcacctggatagaccagacagaatgcgggataattcacatggcagaataaatgttgttaagggtgcagttgtatattccaacattgtgacaactgtatcaccaacatatgcacaagaggttcgctcagagggtgggcgtgggctccaagatacactcaaagtgcactccaagaaatttgttggaatacttaatggcattgacacagatacttggaatccgtctacggataggtttctcaaggttcaatacagtgctaatgatctatatggaaagtcagcaaacaaagcagctcttaggaagcagttgaagcttgcttccacacaagcttctcaaccattagttggttgcattacgaggctagttcctcaaaagggtgtacatctcatcaggcatgcaatatataaaataactgagttgggtggtcaatttgttctgctgggttcaagtccagtacagcatatccagagagagttcgagggtattgcggaccaatttcagaacaacaacaatgtcaggctgcttttgaagtatgatgatgctctggcacatatgatctttgcagcatcagacatgttcattgttccttctatgtttgaaccatgtggcctcactcagatggtagctatgcgatatggttctgtgccagttgttcggagaaccggcggtttgaatgacagtgtcttcgatttggacgatgaaacgatacccatggaggtgcgaaatggcttcacctttttgaaggctgatgagcaggattttggtaatgcactggaaagagctttcaactactaccacagaaaacctgaagtttggaaacagttggtgcagaaagacatgaagatagatttcagctgggatacttcagtttctcaatacgaagaaatctatcagaaaacagccactcgagccagggcagcggcataaacagcagagacattgagacagttccctgctgtctccatgaagtctcctagatgctgtgcttaaccgtatggtaaagaaatatggtctgtatcagctcagaattaagcatctgccgaggaagcgcggtgcatccggactcgggtgtacaaggggcgacgtggcgttacgtgcagtccccaacgaagcaaagagacagaagtacagctgtacagaacggatatcttgtgaagcacacattgggatcaggacgtttggtgctgcagctactttcggtgcagaagcacatatatacgagacctgccagggcgagcaaatacccagttatacacgcgattgctcagctctatcaagctgtgaattgaaagatttctatagtgtattcacgcgacgttttcataaactagtgtgagttatgtactctgaccagtgaccagtgcgaagtctgtgttgtctcaacaatgttgcttggtataaaatgctaaaatgacgtttaagacgagaggggtttttagaaaagagagaaaataagagttttat

SEQ ID NO: 73426 - DNA, 3480 bp, Zea Mays
ccgccttccgcgcgcagcgcagagcgcacgggacacccgccgcccacgccttccgccccagacccactgcacgtgcacggccacgcgacccagcccacacatccactccgctttttccaaccgccgcccacgcgaaccccgacgcggccgcctcgagctccactccgtttaccctgcaaccccatcctcctcggcttcccatgtcgtgctcggcggcggcgggcgccgaggccaccgctctcctgttccgcagcgccgctccgtccacgatcgtcgggcgtcaccgcctcgctatgtctcgccggacttcgcgccgaaacctcaggactggtgtgcaccctcatcagaagagtgcacctagtgctaaccatcgtaacagggctagcattcagagagatagagcatcagcttccattgatgaagaacagaaacagatgtctgaagatgaaaatggcctactagacattcaactggaagatctggtaggaatgatacagaatacccagaagaatatattgcttctgaatcaagctcgtcttcaagcattggaacgtgctgacaaaattcttaaagagaaagaaactttgcaacagaagataaacattttagagatgaaactgtcagaaacaggtaaacaatctgtgctttctagtgaagtaaagtctgatgaagagagtctggagtttgatgtcgtaaaggaagagaatatgctactgaaggatgagatgaattttctaaaaggaaagcttattgagataactgagacagaggagagtctattcaagttggagaaagagtgtgctcttctaaatgcttcccttagggagctcgagtgtacatccacttctgcccaatctgatgtgttgaaacttggccctctgcaacaagatgcctggtgggagaaagtagaaaatttggaagacttgcttgattccacagcaaaccaagtggagcatgcttctttgacgctagatggttaccgtgatttccaggataaggttgacaaactaaaagcatcattgggaacaacaaacgtatcagagttctgtctttatttggttgatattttgcagcaaagggtaaaatcagtagaagagcgctttcaagcatgtaatcatgaaatgcattcacaaattgaactttatgaacactcaatagtggagtttcatggtactctcagcaaactaataaatgaaagtgagaaaaagtcaatggagcattatgcagaaggcatgccatcagagttctggagtaggatctctcttctgattgatgggtggtcgcttgagaagaaaatatccattaatgatgcaagtatgttgagagaaatggcttggaaaagggataatcgcctccgggaagcttacttgtcatccagaggaatggaagagagggaactgatagatagttttctaaagatggcactaccaggaacaagttctggtttgcacattgtccacatagcagcagagatggctcctgtcgcaaaggttggtggtctggcagatgtgatctctggtcttgggaaggcacttcaaaaaaaggggcaccttgtagagattattcttcccaaatatgattgcatgcagcataaccaaataaataatcttaaggttctagatgttgtggtgaagtcttactttgaaggaaatatgtttgccaacaagatatggactggaactgttgaaggtcttccggtctactttattgaaccgcaacatccaggtaagttcttctggagggcacaatactacggagagcatgatgacttcaaacgtttttcgtactttagccgtgttgcactggaattgctttaccaatctgggaagaaagttgacataattcactgccatgactggcagactgcatttgttgcacctctttactgggatgtatatgcaaacctgggcttcaactcagctagaatttgttttacctgtcacaattttgaatatcaaggaatcgctccagctcaggacttagcatattgtggtcttgatgttgatcacctggatagaccagacagaatgcgggataattcacatggcagaataaatgttgttaagggtgcagttgtatattccaacattgtgacaactgtatcaccaacatatgcacaagaggttcgctcagagggtgggcgtgggctccaagatacactcaaagtgcactccaagaaatttgttggaatacttaatggcattgacacagatacttggaatccgtctacggataggtttctcaaggttcaatacagtgctaatgatctatatggaaagtcagcaaacaaagcagctcttaggaagcagttgaagcttgcttccacacaagcttctcaaccattatttcctcaagcaggttggttgcattacgaggctagttcctcaaaagggtgtacatctcatcaggcatgcaatatataaaataactgagttgggtggtcaatttgttctgctgggttcaagtccagtacagcatatccagagagagttcgagggtattgcggaccaatttcagaacaacaacaatgtcaggctgcttttgaagtatgatgatgctctggcacatatgatctttgcagcatcagacatgttcattgttccttctatgtttgaaccatgtggcctcactcagatggtagctatgcgatatggttctgtgccagttgttcggagaaccggcggtttgaatgacagtgtcttcgatttggacgatgaaacgatacccatggaggtgcgaaatggcttcacctttttgaaggctgatgagcaggattttggtaatgcactggaaagagctttcaactactaccacagaaaacctgaagtttggaaacagttggtgcagaaagacatgaagatagatttcagctgggatacttcagtttctcaatacgaagaaatctatcagaaaacagccactcgagccagggcagcggcataaacagcagagacattgagacagttccctgctgtctccatgaagtctcctagatgctgtgcttaaccgtatggtaaagaaatatggtctgtatcagctcagaattaagcatctgccgaggaagcgcggtgcatccggactcgggtgtacaaggggcgacgtggcgttacgtgcagtccccaacgaagcaaagagacagaagtacagctgtacagaacggatatcttgtgaagcacacattgggatcaggacgtttggtgctgcagctactttcggtgcagaagcacatatatacgagacctgccagggcgagcaaatacccagttatacacgcgattgctcagctctatcaagctgtgaattgaaagatttctatagtgtattcacgcgacgttttcataaactagtgtgagttatgtactctgaccagtgaccagtgcgaagtctgtgttgtctcaacaatgttgcttggtataaaatgctaaaatgacgtttaagacgagaggggtttttagaaaagagagaaaataagagttttat

SEQ ID NO: 73427 - DNA, 3299 bp, Zea Mays
actccgtttaccctgcaaccccatcctcctcggcttcccatgtcgtgctcggcggcggcgggcgccgaggccaccgctctcctgttccgcagcgccgctccgtccacgatcgtcgggcgtcaccgcctcgctatgtctcgccggacttcgcgccgaaacctcaggactggtgtgcaccctcatcagaagagtgcacctagtgctaaccatcgtaacagggctagcattcagagagatagagcatcagcttccattgatgaagaacagaaacagatgtctgaagatgaaaatggcctactagacattcaactggaagatctggtaggaatgatacagaatacccagaagaatatattgcttctgaatcaagctcgtcttcaagcattggaacgtgctgacaaaattcttaaagagaaagaaactttgcaacagaagataaacattttagagatgaaactgtcagaaacaggtaaacaatctgtgctttctagtgaagtaaagtctgatgaagagagtctggagtttgatgtcgtaaaggaagagaatatgctactgaaggatgagatgaattttctaaaaggaaagcttattgagataactgagacagaggagagtctattcaagttggagaaagagtgtgctcttctaaatgcttcccttagggagctcgagtgtacatccacttctgcccaatctgatgtgttgaaacttggccctctgcaacaagatgcctggtgggagaaagtagaaaatttggaagacttgcttgattccacagcaaaccaagtggagcatgcttctttgacgctagatggttaccgtgatttccaggataaggttgacaaactaaaagcatcattgggaacaacaaacgtatcagagttctgtctttatttggttgatattttgcagcaaagggtaaaatcagtagaagagcgctttcaagcatgtaatcatgaaatgcattcacaaattgaactttatgaacactcaatagtggagtttcatggtactctcagcaaactaataaatgaaagtgagaaaaagtcaatggagcattatgcagaaggcatgccatcagagttctggagtaggatctctcttctgattgatgggtggtcgcttgagaagaaaatatccattaatgatgcaagtatgttgagagaaatggcttggaaaagggataatcgcctccgggaagcttacttgtcatccagaggaatggaagagagggaactgatagatagttttctaaagatggcactaccaggaacaagttctggtttgcacattgtccacatagcagcagagatggctcctgtcgcaaaggttggtggtctggcagatgtgatctctggtcttgggaaggcacttcaaaaaaaggggcaccttgtagagattattcttcccaaatatgattgcatgcagcataaccaaataaataatcttaagatgttgtggtgaagtcttactttgaaggaaatatgtttgccaacaagatatggactggaactgttgaaggtcttccggtctactttattgaaccgcaacatccaggtaagttcttctggagggcacaatactacggagagcatgatgacttcaaacgtttttcgtactttagccgtgttgcactggaattgctttaccaatctgggaagaaagttgacataattcactgccatgactggcagactgcatttgttgcacctctttactgggatgtatatgcaaacctgggcttcaactcagctagaatttgttttacctgtcacaattttgaatatcaaggaatcgctccagctcaggacttagcatattgtggtcttgatgttgatcacctggatagaccagacagaatgcgggataattcacatggcagaataaatgttgttaagggtgcagttgtatattccaacattgtgacaactgtatcaccaacatatgcacaagaggttcgctcagagggtgggcgtgggctccaagatacactcaaagtgcactccaagaaatttgttggaatacttaatggcattgacacagatacttggaatccgtctacggataggtttctcaaggttcaatacagtgctaatgatctatatggaaagtcagcaaacaaagcagctcttaggaagcagttgaagcttgcttccacacaagcttctcaaccattagttggttgcattacgaggctagttcctcaaaagggtgtacatctcatcaggcatgcaatatataaaataactgagttgggtggtcaatttgttctgctgggttcaagtccagtacagcatatccagagagagttcgagggtattgcggaccaatttcagaacaacaacaatgtcaggctgcttttgaagtatgatgatgctctggcacatatgatctttgcagcatcagacatgttcattgttccttctatgtttgaaccatgtggcctcactcagatggtagctatgcgatatggttctgtgccagttgttcggagaaccggcggtttgaatgacagtgtcttcgatttggacgatgaaacgatacccatggaggtgcgaaatggcttcacctttttgaaggctgatgagcaggattttggtaatgcactggaaagagctttcaactactaccacagaaaacctgaagtttggaaacagttggtgcagaaagacatgaagatagatttcagctgggatacttcagtttctcaatacgaagaaatctatcagaaaacagccactcgagccagggcagcggcataaacagcagagacattgagacagttccctgctgtctccatgaagtctcctagatgctgtgcttaaccgtatggtaaagaaatatggtctgtatcagctcagaattaagcatctgccgaggaagcgcggtgcatccggactcgggtgtacaaggggcgacgtggcgttacgtgcagtccccaacgaagcaaagagacagaagtacagctgtacagaacggatatcttgtgaagcacacattgggatcaggacgtttggtgctgcagctactttcggtgcagaagcacatatatacgagacctgccagggcgagcaaatacccagttatacacgcgattgctcagctctatcaagctgtgaattgaaagatttctatagtgtattcacgcgacgttttcataaactagtgtgagttatgtactctgaccagtgaccagtgcgaagtctgtgttgtctcaacaatgttgcttggtataaaatgctaaaatgacgtttaagacgagaggggtttttagaaaagagagaaaataagagttttat

SEQ ID NO: 73428 - DNA, 998 bp, Zea Mays
acgcaaatggtaaaacgcttgggaaacacaattcagccctggcctttttccagttgagttcacctcttggctcttgcctcctgcatctctagagaggcacatcccagctccaagcttcgcgccttgttggatcgtggcgtccaagcaacggtggtagcggagcgcgaggcagtggccgcagaaggaagcgcgaagcatccatggaccaacgccaggtggttagcgagaattatgccaatcccataacatgcttcttccatgtgctattcaagcgcttgacttctgggtggtgaagaacgtcagtggcaggatactagtcgggctgcggtggtggaatgagatcgatgatgacggaaacagtgtgtggaagtttgaatgccttgatggggagtctctcgctcggatgaacaagaaggattcatggctgttctggtggactctttacttgactgctgctgcatggatcgttcttggtatattttcactcatcaggcttgaggctgattaccttcttgttgttggagtttgcttgagtctaagcattgcaaacattgttggattcaccaagtgcaacaaagatgccaagaagaacatccagactttcgctcaaaatgcactcgcttcccgtgtcacatcatcgctgcaatcagcattcggtgtcatctgaagtcccacgcggaggccctggtattagtatattactcacagcggtgtacaatttgtcaaaaggatgagcttgcattctacgtttactgcctttcctctgattgcaaggatgtaattctaccagcgtagacagcaagcatattgtactgtcccgttatcattcttttttacctcatacaacaaataggtcgattttgatgtcattaccagaatcctttggtttatctcttgggtgatttatccatgaagcatacacttgtctcatgcactgaggagtctgcatcaagcgctgtttttactttttttttctggccatggaaattaaaagtacg

SEQ ID NO: 73429 - DNA, 651 bp, Zea Mays
ccattgtcatacagaacttgtttggctttgtctcaacttaccgagatggcttgtctgacctcgccgacgatctctgtgatcttcttgtcccactgatcggacggtgtgtgcgccacaccaaccatgtcgttgtggccgatgtccatcatgtacagagcgctctcaaacccctccttgctcaccgggccttccagtcctgatgaaagcacgtctttcaggctcagaactgagtactgtgtagattcgatggcacagatgtccaacaaacctcgttcgaacatctcaagggatctgtgcctgaagtagacgaactggtcgacctggacgttcaaggagtagggagagacgccgtgggtcaccgtcgagcctgccatggcgaagttgacgccgttgctgtagtccgaaccaattcccctgaggtatgggttcagttcacgcgtgcccagactctcacctgaatagcaagagtgagaaaccgttaatgaatttaatctctgtttttactggtgttcagacttcagatagctcttattagtcactgtatgcatgtagattgctcgtgtgttctttttaatttaccatgtgtttgaaccttctcacaaagaataaatttaggtcccgtttgtttcctttcattttgaggaattagaa

SEQ ID NO: 73430 - DNA, 461 bp, Zea Mays
ctctctgctagacacgttagcacactgctacaccccccattgtacatctgggccctctacttacgcctataaaaggaaggtccagggctctcgtacgagggggttggccgcgcgggagaacgggccggcggacggtctctctctctccctcgcggacgcttgtaacccccctactgcaagcgcacccgacctgggcgcggggcaacacgaaggccgcgggtttccccttttgccgtttctccccccttcgtgctccgtctcgcgccgacccatctgggctgggacacgcggcgtcaatttactcgtcggtccagggaccccctggggtcgaaacaccgacagaaggggttgcatgcaccggggcttgcctgggtaacactaggttagtgttgttagacgatgtccacttgacgatcctcttcaggtttgtccattagcatcatcctgtggattggcccatg

SEQ ID NO: 73431 - DNA, 411 bp, Zea Mays
atgggtggagcaagaagccgggcgtggccatgggcaccagctgagatgcgcgcggtaagggtcaagctcggcagggcaccggacttgggagcaggaaaggcgccgagcgcgggatggaacgcgcgcgcagggaagaacagaggcgctggagctgccgaacgacggcgaggtcgcggccgagccccaaggagcagtgtgcgcggcgctgggagcgaagacggccagagggactcgcgcgcgaagcaggagcagatgagaaacagaaaccgggctgaagaaagggcgagctcgtcgcggccaataggggagcagcgcgcgcgtagactccacggcgagcagaggcaggaaccaggggcgcggctggcgtccatgggaggtagagggagtcggctgccagtgagcagggaatag

SEQ ID NO: 73432 - DNA, 533 bp, Zea Mays
gacgtctctccatccatggtacctaggtctccatccccatgcccctgcagcttgttctcaagcagccaaccatggagaaactttccggtgttggagggcgaagagctcgaagttctaaaggtaacgcccgccgggtgcttggtggaacgtctcaacccggaggttgttgtcgatctctcgggttcgaggcgatttagttgtggtacgttaattaatcacgtgatgtggagggcaagagttggattaatctcaagtgaagatgatgaatgaacctgaagcttggatgatctgatcaagtaccaggatcggatgagagatgctccccaagcggacgtcatctaacaacactgacttagtgttatcccaggatatccctaccacgactccaaggaagacgaggactacgcgcgtgacggagagcgaggacgactgcaaagcctctcaacgtgctgccaggtccagtggagttcagggagtttgaagttctatttggtgccaagctcctaaactgagaaggcataacaggcacacac

SEQ ID NO: 73433 - DNA, 523 bp, Zea Mays
ctccatccatggtacctaggtctccatccccatgcccctgcagcttgttctcaagcagccaaccatgaaactttccggtgttggagggcgaagagctcgaagttctaaaggtaacgcccgccgggtgcttggtggaacgtctcaacccggaggttgttgtcgatctctcgggttcgaggcgatttagttgtggtacgttaattaatcacgtgatgtggagggcaagagttggattaatctcaagtgaagatgatgaatgaacctgaagcttggatgatctgatcaagtaccaggatcggatgagagatgctccccaagcggacgtcatctaacaacactgacttagtgttatcccaggatatccctaccacgactccaaggaagacgaggactacgcgcgtgacggagagcgaggacgactgcaaagcctctcaacgtgctgccaggtccagtggagttcagggagtttgaagttctatttggtgccaagctcctaaactgagaaggcataacaggcacacac

SEQ ID NO: 73434 - DNA, 219 bp, Zea Mays
caggttataagtttgttctgttgtggatggtgctaagtgccggtgggctcggccttcttatataataagcgctatctttgtcaggatatccctaccacgactccaaggaagacgaggactacgcgcgtgacggagagcgaggacgactgcaaagcctctcaacgtgctgccaggtccagtggagttcagattcaaatatgaatcatatgctaaccctgt

SEQ ID NO: 73435 - DNA, 622 bp, Zea Mays
caggttataagtttgttctgttgtggatggtgctaagtgccggtgggctcggccttcttatataagatatccctaccacgactccaaggaagacgaggactacgcgcgtgacggagagcgaggacgactgcaaagcctctcaacgtgctgccaggtccagtggagttcaggtcaagttcagtcatctacctctgttaaactatctggatttcacaagagagttatagccaattcaagctacgcagagattcctgtactgctggacacataggatgcttggaaacctcggaccacaacaccgttcatttcaacccagatcatcacactacataccacttgaagactattcgacgttcgttgattcaaattccaaggcgtcgtttcatcgacagatttcttgagaacagacgggcacatttcgcaactgtgatatcggattgagacatgtgttctagcttgttatagtagatactttgttagttatgtattagatgaaacttaggaataatgatttgtgctctatttgtattagtcgtgtgtctggtcttaatggtgactgctttgtataaaactatgtgacatctctgtgagctaataaataagttcaccatcattagttttc

SEQ ID NO: 73436 - DNA, 1242 bp, Zea Mays
caggttataagtttgttctgttgtggatggtgctaagtgccggtgggctcggccttcttatataagtatatcccatctttagcttctttattgaggattgtcacttaagctagcatgtatcttcatatttacaaatattttataacatttcaaatttgtaattcttttgaataattttctcttgtaatcactctgataattgaataatgtaaaattattgtaacatgtaatcattttgtaataaagaatttatttccgctgcaagtgtttgtatgtgagttgtgtttacttaatcctgcgatcttggcggtaagtcgtttatccggggtcctcggggcactcggacagatcctgctaagttgtttggtgcacatgcatagccgtcttaggtcgttgaaacaaggacaggtgcatgtgggcccgataacttgggaggttctgcgacatccgatgtctctccctaacatctatgttcgtgagtcttgctcagtaagcgctatctttgtcaggatatccctaccacgactccaaggaagacgaggactacgcgcgtgacggagagcgaggacgactgcaaagcctctcaacgtgctgccaggtccagtggagttcagagtcaagttcagtcatctacctctgttaaactatctggatttcacaagagagttatagccaattcaagctacgcagagattcctgtactgctggacacataggtttggtgtctaactgaaagacgtatatggatccattcagaaataacgatgttcgtcctccattaagagaactatctaacaatacccttgaaggaggacgtgctaatgcaatgcaacgtaagagggaaagagaaagagcacgatatgcaacaatgagtgatgaaaaaaaaacgaactaaagaagcgtcgtgagtcacgcacaaaagaaaaccttgagcaccataaacactcaaacgatgaatgtccagatatgtctataagcgacggaagcatcattgattgtactataccgtgtgataccactccaggaggatgtgatgatgcaagacaacgtaagagggaaagagaaagagtacgatatgctacgatgagtgctgaaaagaaaaatgaattgaagaagcgttgtgagtcacgaaaaaagggaaatgttatgcaccatgagtattcagaagatgaatgtccacaggtgtttgtaagcgacagaagcatcaaaaatccgactatacattgtgataacactttaggt

SEQ ID NO: 73437 - DNA, 2096 bp, Zea Mays
caggttataagtttgttctgttgtggatggtgctaagtgccggtgggctcggccttcttatataagtatatcccatctttagcttctttattgaggattgtcacttaagctagcatgtatcttcatatttacaaatattttataacatttcaaatttgtaattcttttgaataattttctcttgtaatcactctgataattgaataatgtaaaattattgtaacatgtaatcattttgtaataaagaatttatttccgctgcaagtgtttgtatgtgagttgtgtttacttaatcctgcgatcttggcggtaagtcgtttatccggggtcctcggggcactcggacagatcctgctaagttgtttggtgcacatgcatagccgtcttaggtcgttgaaacaaggacaggtgcatgtgggcccgataacttgggaggttctgcgacatccgatgtctctccctaacatctatgttcgtgagtcttgctcagtaagcgctatctttgtcaggatatccctaccacgactccaaggaagacgaggactacgcgcgtgacggagagcgaggacgactgcaaagcctctcaacgtgctgccaggtccagtggagttcagagtcaagttcagtcatctacctctgttaaactatctggatttcacaagagagttatagccaattcaagctacgcagagattcctgtactgctggacacataggtttggtgtctaactgaaagacgtatatggatccattcagaaataacgatgttcgtcctccattaagagaactatctaacaatacccttgaaggaggacgtgctaatgcaatgcaacgtaagagggaaagagaaagagcacgatatgcaacaatgagtgatgaaaaaaaaacgaactaaagaagcgtcgtgagtcacgcacaaaagaaaaccttgagcaccataaacactcaaacgatgaatgtccagatatgtctataagcgacggaagcatcattgattgtactataccgtgtgataccactccaggaggatgtgatgatgcaagacaacgtaagagggaaagagaaagagtacgatatgctacgatgagtgctgaaaagaaaaatgaattgaagaagcgttgtgagtcacgaaaaaagggaaatgttatgcaccatgagtattcagaagtttgcaacatccctgcaaacaaggacaacaataatcatcaaaacaatgaaattgaggatgttgatgatgattcttatcagttgcataagaataactcatttgaggtgcatagaagacttggcagtgaaaaactttccacacatttgtcaggtgctagttgagatgatgttttatttagaagtagttagatttattatgtttcataatcattgttgatataaatatctactaaaaatctgttataatgactgttattgcaactatctactaaatcaatgtttacattgtgtagatgaatgtccacaggtgtttgtaagcgacagaagcatcaaaaatccgactatacattgtgataacactttagcaagggttgatggacgctttgttactgttactgttccgcgcgcagaaaaaaattcaatcgtggcttcctgaaaaggttatgtaccgaccagcattccagcaatttatgaactattcgtcaccacatggtggtgatcctaatgcaaacatgaactcaactgcaacacgaatagcagctgatcttgatacacatcaagattttgagccaaagagcagaagttcagacatgcctttgcatgccgctattactcaggatatcaaggagaacccagtcttgatctacatgaagggttttcctgagtctccaatgtgtggcttcagtgcactggctgttaaggtctttcagcaatatggcgtccctacctgtggtagagacattcttggggatctcaagctcaaagagagtgttaaagcccacacacagtaagtggcaacacacttgtgtctcaaaattgaaaatggtccatggtaaggtagattatcgaaattttgcatgatgttacgaggaaggggaatgatattcaagtttgccttcaagagagaagaaccagatttaacaaacaag

SEQ ID NO: 73438 - DNA, 386 bp, Zea Mays
tgcaacaccaggcagccccgactgtcactatcaatgaggatgatgatgaagctgtactttttgaagatgacgaagacgaaggatacctattcgctgggcaagaaacaaggccttgacgaaactcctggcagcactggagacagagacactggagacagagaaacaaggcctccaccatcaacatgtcattagtaattctttatgaggataaaaacaattggtccataccctcttaatgaaacgtgtgtcaacagacacgttcttgaaaaaaaaggtccattattatctatggcaaaatgaaaaggccgtcgttatattttcctttagatagagctgttgatcaattcctgctggagctgtacagtgaacttcaacatgaatagtac

SEQ ID NO: 73439 - DNA, 475 bp, Zea Mays
cttgggtctttggacccaaattaactagatatagaaaactgcatttcacttaaatagaagaacaatgttcagtatgcaaatctcgtttataaggaggtccttacccccgcacgttctgaagatatggagggacatcacgactccagttcaaggagagctcccacaaccaccaaatgcatttggtgggcaagaaacaaggccttgacgaaactcctggcagcactggagacagagacactggagacagagaaacaaggcctccaccatcaacatgtcattagtaattctttatgaggataaaaacaattggtccataccctcttaatgaaacgtgtgtcaacagacacgttcttgaaaaaaaaggtccattattatctatggcaaaatgaaaaggccgtcgttatattttcctttagatagagctgttgatcaattcctgctggagctgtacagtgaacttcaacatgaatagtac

SEQ ID NO: 73440 - DNA, 693 bp, Zea Mays
atgttcagtatgcaaatctcgtttataaggaggtccttacccccgcacgttctgaagatatggagggacatcacgactccagttcaaggagagctcccacaaccaccaaatgcatttggtgggcaaggtatggttccatctttattcacactccactgtctcaagctagaaaaaaaaattcaatcgtggcttcctgaaaagcaggttatgtaccgaccagcattccagcaatttatgaactattcgtcaccacatggtggtgatcctaatgcaaacatgaactcaactgcaacacgaatagcagctgatcttgatacacatcaagattttgagccaaagagcagaagttcagacatgcctttgcatgccgctattactcaggatatcaaggagaacccagtcttgatctacatgaagggttttcctgagtctccaatgtgtggcttcagtgcactggctgttaaggtctttcagcaatatggcgtccctacctgtggtagagacattcttggggatctcaagctcaaagagagtgttaaagcccacacacagtaagtggcaacacacttgtgtctcaaaattgaaaatggtccatggtaaggtagattatcgaaattttgcatgatgttacgaggaaggggaatgatattcaagtttgccttcaagagagaagaaccagatttaacaaacaag

SEQ ID NO: 73441 - DNA, 1893 bp, Zea Mays
ggggtttgggtgcttctctacggccgccgccagcaccgagttccggacctccgccgcctcgtctccgctccctcgcactcgcactcgcagctccggctgctattctgcagaagtcggtagattggttttcctcatgggtcgcaccatcaagaaggccaagaaggctcaatccaagaagtccaagaagaaaactgaatcgtcctcgtcgtccaaccctgcgattgcctctggtccggctaaggtctggcaaccgggtgtagatacactggaagatggggaggagctgcagtttgatcctcaggcttacaattatctccgaggttttggcattggctggtcttgcttgagttgatgttgtgcgtgatcaacttggactcgtccgttcagagttccctcatacattctatggtgttgctggaacgcaggctgagaaagcttcatggaactatattggcgttttcaagctttctaacataagtggcaagaagcgggaacctataccagcttcagcagttgaagctgacactgatgtggatagtgacagcagcagcgatgaagaagatgaagagattaatgaggatacaaaacccatcctacatctaaaaaaggtggctcatgcggggtgtgtaaatcggatacgctcaatgactcaaaaaccacatataagtgctacgtggggagatactggtcatgttcaggtgtgggacttgagctcattccttaattctttagctgagtcagggacagctgcacccaaagaagacgacataatccacaaacacttacccctgaaagtatttagtggtcataaagatgagggatatgccattgattggagtccacttgttactggaagacttgtttctggcgactgcaataagtgcattcacctatgggagccgacttcaaacaactggaacgtagatgcaaacccatttgttggacactctgcaagtgttgaagatctacagtggagtcccacggaagccgacatatttgcctcatgttctgtggatggtacgatatcaatatgggatatacgtacagggaagaaaccttgtatttctgtcaaagctcatgaagccgatgtgaatgttatctcatggaacaagcttgctagctgcatgatagcttctgggtgcgatgatggcagtttctcagttcgtgatcttagatcaattgaggaggactcgttggtggcacattttgagtaccacaagaaagcaattacatctatcgagtggagtccacatgaagcatcatcattagctgtaacatctgaagatcatcaactaacaatctgggacctttcactggaaagagatgcggaggaggaggctgagttcagagcaaagatgaaggagcaggcaaacgcacctgaagatttgcccccacaacttctctttgctcatcagggccagagagacttgaaagaactgcactggcacccacagataccgtcgatgatcatatcaacggcaattgatggcttcaacgtgttgatgcctagcaacattgatacaaccattcctggcagcactgatgcagcaatgccatctgctgagccacagcactagccaacattgatacaagcattcctggcagccctgatgcaatgccatctgctgagccatagcactgatgtaggcgtttcttgtagcatggctcccagcttagaattccaggtctacgcagtggtgtatccgagtgcggttggcatttgtgttgagagtgctatgatgctatgtttgtgtttgagcatgatgggaaaggtttggttggctggcattccatgatatatgataagatttattaatatgtgcattctatgatatatgataagatttattaatatgttggcattctattaaaattcggcagccgctggtttgt

SEQ ID NO: 73442 - DNA, 1890 bp, Zea Mays
ggggtttgggtgcttctctacggccgccgccagcaccgagttccggacctccgccgcctcgtctccgctccctcgcactcgcactcgcagctccggctgctattctgcagaagtcggtagattggttttcctcatgggtcgcaccatcaagaaggccaagaaggctcaatccaagaagtccaagaagaaaactgaatcgtcctcgtcgtccaaccctgcgattgcctctggtccggctaaggtctggcaaccgggtgtagatacactggaagatggggaggagctgcagtttgatcctcaggcttacaattatctccgaggttttggcattggctggtcttgcttgagttttgatgttgtgcgtgatcaacttggactcgtccgttcagagttccctcatacattctatggtgttgctggaacgcaggctgagaaagcttcatggaactatattggcgttttcaagctttctaacataagtggcaagaagcgggaacctataccagcttcagcagttgaagctgacactgatgtggatagtgacagcagcagcgatgaagaagatgaagagattaatgaggatacaaaacccatcctacatctaaaaaaggtggctcatgcggggtgtgtaaatcggatacgctcaatgactcaaaaaccacatataagtgctacgtggggagatactggtcatgttcaggtgtgggacttgagctcattccttaattctttagctgagtcagggacagctgcacccaaagaagacgacataatccacaaacacttacccctgaaagtatttagtggtcataaagatgagggatatgccattgattggagtccacttgttactggaagacttgtttctggcgactgcaataagtgcattcacctatgggagccgacttcaaacaactggaacgtagatgcaaacccatttgttggacactctgcaagtgttgaagatctacagtcccacggaagccgacatatttgcctcatgttctgtggatggtacgatatcaatatgggatatacgtacagggaagaaaccttgtatttctgtcaaagctcatgaagccgatgtgaatgttatctcatggaacaagcttgctagctgcatgatagcttctgggtgcgatgatggcagtttctcagttcgtgatcttagatcaattgaggaggactcgttggtggcacattttgagtaccacaagaaagcaattacatctatcgagtggagtccacatgaagcatcatcattagctgtaacatctgaagatcatcaactaacaatctgggacctttcactggaaagagatgcggaggaggaggctgagttcagagcaaagatgaaggagcaggcaaacgcacctgaagatttgcccccacaacttctctttgctcatcagggccagagagacttgaaagaactgcactggcacccacagataccgtcgatgatcatatcaacggcaattgatggcttcaacgtgttgatgcctagcaacattgatacaaccattcctggcagcactgatgcagcaatgccatctgctgagccacagcactagccaacattgatacaagcattcctggcagccctgatgcaatgccatctgctgagccatagcactgatgtaggcgtttcttgtagcatggctcccagcttagaattccaggtctacgcagtggtgtatccgagtgcggttggcatttgtgttgagagtgctatgatgctatgtttgtgtttgagcatgatgggaaaggtttggttggctggcattccatgatatatgataagatttattaatatgtgcattctatgatatatgataagatttattaatatgttggcattctattaaaattcggcagccgctggtttgt

SEQ ID NO: 73443 - DNA, 1822 bp, Zea Mays
ggggtttgggtgcttctctacggccgccgccagcaccgagttccggacctccgccgcctcgtctccgctccctcgcactcgcactcgcagctccggctgctattctgcagaagtcggtagattggttttcctcatgggtcgcaccatcaagaaggccaagaaggctcaatccaagaagtccaagaagaaaactgaatcgtcctcgtcgtccaaccctgcgattgcctctggtccggctaaggtctggcaaccgggtgtagatacactggaagatggggaggagctgcagtttgatcctcaggcttacaattatctccgaggttttggcattggctggtcttgcttgagttttgatgttgtgcgtgatcaacttggactcgtccgttcagagttccctcatacattctatggtgttgctggaacgcaggctgagaaagcttcatggaactatattggcgttttcaagctttctaacataagtggcaagaagcgggaacctataccagcttcagcagttgaagctgacactgatgtggatagtgacagcagcagcgatgaagaagatgaagagattaatgaggatacaaaacccatcctacatctaaaaaaggtggctcatgcggggtgtgtaaatcggatacgctcaatgactcaaaaaccacatataagtgctacgtggggagatactggtcatgttcaggtgtgggacttgagctcattccttaattctttagctgagtcagggacagctgcacccaaagaagacgacataatccacaaacacttacccctgaaagtatttagtggtcataaagatgagggatatgccattgattggagtccacttgttactggaagacttgtttctggcgactgcaataagtgcattcacctatgggagccgacttcaaacaactggaacgtagatgcaaacccatttgttggacactctgcaagtgttgaagatctacagtggagtcccacggaagccgacatatttgcctcatgttctgtggatggtacgatatcaatatgggatatacgtacagggaagaaaccttgtatttctgtcaaagctcatgaagccgatgtgaatgttatctcatggaacaagaggactcgttggtggcacattttgagtaccacaagaaagcaattacatctatcgagtggagtccacatgaagcatcatcattagctgtaacatctgaagatcatcaactaacaatctgggacctttcactggaaagagatgcggaggaggaggctgagttcagagcaaagatgaaggagcaggcaaacgcacctgaagatttgcccccacaacttctctttgctcatcagggccagagagacttgaaagaactgcactggcacccacagataccgtcgatgatcatatcaacggcaattgatggcttcaacgtgttgatgcctagcaacattgatacaaccattcctggcagcactgatgcagcaatgccatctgctgagccacagcactagccaacattgatacaagcattcctggcagccctgatgcaatgccatctgctgagccatagcactgatgtaggcgtttcttgtagcatggctcccagcttagaattccaggtctacgcagtggtgtatccgagtgcggttggcatttgtgttgagagtgctatgatgctatgtttgtgtttgagcatgatgggaaaggtttggttggctggcattccatgatatatgataagatttattaatatgtgcattctatgatatatgataagatttattaatatgttggcattctattaaaattcggcagccgctggtttgt

SEQ ID NO: 73444 - DNA, 4179 bp, Zea Mays
ccacacataaatatcccggagataattttatcttcccagactgacctaaaaccctcctcaccttatcttctcgtcgcctccccttcccccaccctgcttcctcgaatcctactgctggtgccgctgttttcttgcttcgttgcgtgctggcggagcaagaggcggacatggccaccaccaccgacgccgccccagtcgcgcccgtggaggaagggaacgccgccccggcggccgccgaggaggagccgcccaagaaagtcgaggcagccgtggccaccaccgacgccgccccagtcgctcccgcgtccgtggaggacgaaaatccggccctggcggcggcggccgaggaggagctaaccgagaaattcgagtcggcagcggcggcggcggcggaggaggaggtggatgatagggaggcgccgaagcaggtcgtggcggatgtgggagagagggaggaggaggaggaggaggtgagattggaggcgaagagtgagggcgttgcgggtccagaggccgagaacggaaaggcggagggtgttgtcgtcgggggacatgatggcagggatgtaaatgaggcggaagaggatcgtagagttgggaagttgggcgccgcgacggccgtgaaggatggcggcggcgaagaaccggcgtcggaggatggagaggcggccgcttctgtgtcagcgccagtgtcagaggtggagtccaagtcggagaacggtgaatcgggggagggggatccttctctggcttcccctgatgcgccggaaagtgatgagaagggcgaattgcaggaggaggagcagcatgatgaggaaagaggtgctgcagtagaggtaaatgttgtggataagatagcagaggatgtcgagtcgcctgtggctgaagaggagaaactggtaccggaagttgagaagggcgaggaggtaggttctgggagtgcagttggtggcgagttgagtgatgaggaggaggttgaggtctctccctctcctctgggcgaggaggtggcagaggtggcagaaccacaggataaggtagcccatgtttctgaagctaatggtgaattgggtgatgggaaagaagcgagtgatgatgtggttgctctgggaggtggagaagcttcagaagaatcggctaacaaggatgctgatggtgatgatgtggtggctcagggaggtgaagaagccctagaagaatcgaccaagaaggatgctgatgttgaagatgaggccatcaggcctgagccaccgagtgaggcaactgcagtggttatgaatgatggaagcatagaggagcttgcccctgcaagtgctgaggagatcatagacagtgtgcgtgaggatagtcctcagaaggagcagagcgctgaagaccaggccgttgccggtgaagtggtggaagatgttggtgttgacaagcccacagaggttgaaaatgttgatgctactagtgctgatggtatcctctctcgagaattggctccagaatcaatcaaagaaactaatggtactggtgagattgaaggtgccactgaggttgttgatcatgaagaggaggctgctgataatgacataattgaggctgtgccagatgatgcggatggggatggtaatgaggctgaggacgatgacgacgggacaaactctgacacgagtcctgcacgggttgcaattttagagagctctgaagccgcgaagcagatcatgaaggagcttgcagaaggctcctctagtggtggggatatcacagttacttcacaagatggttctagaatatttaccatggaccgacctgctggtcttggttcatcagccccttctctgaggccgactgcgcctcgccaatctgcccggtcaaacctattcagcccctcagagctagcagttacagctgaccctacagaagagatgacagaggaagagaagaagctgcatgacaaggttgagttgattagagtaaagtttctgcgtctggtttacagattgggagctactcctgaagaaacggttgcagcacaagtgctgtaccgtctgagccttgctgagggtatccgacatggcaggcagacgaaccgagcattcagccttgataatgcacggaggaaggccttacttcttgaagcagagggaaaagaggatctgaacttctcatgcaacatacttgttctaggaaaaactggagtcggcaaaagtgcaactatcaattctatatttggtgaagagaagtccagaactgacgcctttagctcagcaaccacaaatgtgcgggaaattgttggtgatgtggatggtgtcaagattagaatcattgatacacctggccttcgacctaacgtgatggaccagggatcaaacagaaagattcttgctgctgtcaagaactataccaagaaatgtccgccagatattgttctatatgtggatcgtctggatagtctgagccgtgatctcaatgatttgcctcttctgaagactattactgctgttcttggctcatccatatggttcaatgccattgttgcactgacacatgctgcctcagctcctcctgaaggcctcaatggtgctcccatgacatatgaggtcttgatggctcagagatcccacatcatccagcagtccatcaggcaggctgctggagatatgcggttgatgaacccagtagcacttgttgagaaccatccttcgtgcaggaaaaaccgggagggccagaaagtgcttccgaatggccaaagctggaggcatcagatgttacttttgtgctactcctcaaagatattatcagaagccaactcactcctgaagcttcaggatcctaatcctggaaagctttttgaacaagatgatgacgaagaagaatatgatcagcttccacccttcaagcccttgaccaaagctcagcttgcaaggctcacaaaggagcagaagaatgcttattttgacgagtatgactacagggtcaagcttctccagaagaaacaatggaaggatgagatccgcaggttgaaggagatgaagaagagggggaaaactgatctggatgattatgggtatgctaatatcgctggtgagaacgatcaggatcctcctccagagaatgtatcggttcccttgcctgacatggtgcttcccccttcatttgattgtgacaatcccacataccggtaccgctttttggagtcaacctcgactgtcctagcaaggcctgttttggatgcgcatggatgggatcatgactgtggttatgatggagtgagcgttgaagagacactggctatccttagcaggttcccggcaaatgtagcagttcaggtcaccaaggacaagaaggaattcagcatccatttggactcttccatcgcagcaaagcatggagagaatgcatcatcacttgctggttttgatatccagactgttgggcgccagcttgcctatattctccgcggcgaggcaaaaatcaagaacatcaagaagaacaagaccacaggaggcttctcggtaactttcctgggtgacattgtggcaactggactgaaggtcgaggaccagctctcccttgggaagaggctgtcgctagttgccagcactggcgcgatgcgagcccaaggggaaactgcatatggagctaacttggaggcacgcctgaaggacaaagactatccgattggccagtccctctcaacgctgggtctctctctgatgaagtggcgccgggaccttgctctgggcgcgaacttgcagtcccagttctccatcggaagggggtcgaagatggcagtgcgacttggtctgaacaacaagctgagcgggcagatcacggtcaggacaagcacctcggagcaggtccagatcgcacttctgggtctcgtaccggttgcagcctccatctacaggagcttccggcccagtgaaccgtccttcgcttattagcctgtcaggagtctcagtccaattacttcataaccatgtggtttctcttggcaattttcttcttcacatgaaccatgtttcttgctgtttcagtttactcccttgtaattggcagatcgtttcctaccataattttggctgaagagggttgtgcgatttatctggaactgtagctgaataaataatgtcgagaaatgtaccatccttgtgtttatcaatatctattgcagcgtctattctgattatt

SEQ ID NO: 73445 - DNA, 3357 bp, Zea Mays
ccttcccccaccctgcttcctcgaatcctactgctggtgccgctgttttcttgcttcgttgcgtgctggcggagcaagaggcggacatggccaccaccaccgacgccgccccagtcgcgcccgtggaggaagggaacgccgccccggcggccgccgaggaggagccgcccaagaaagtcgaggcagccgtggccaccaccgacgccgccccagtcgctcccgcgtccgtggaggacgaaaatccggccctggcggcggcggccgaggaggagctaaccgagaaattcgagtcggcagcggcggcggcggcggaggaggaggtggatgatagggaggcgccgaagcaggtcgtggcggatgtgggagagagggaggaggaggaggaggaggtgagattggaggcgaagagtgagggcgttgcgggtccagaggccgagaacggaaaggcggagggtgttgtcgtcgggggacatgatggcagggatgtaaatgaggcggaagaggatcgtagagttgggaagttgggcgccgcgacggccgtgaaggatggcggcggcgaagaaccggcgtcggaggatggagaggcggccgcttctgtgtcagcgccagtgtcagaggtggagtccaagtcggagaacggtgaatcgggggagggggatccttctctggcttcccctgatgcgccggaaagtgatgagaagggcgaattgcaggaggaggagcagcatgatgaggaaagaggtgctgcagtagaggtaaatgttgtggataagatagcagaggatgtcgagtcgcctgtggctgaagaggagaaactggtaccggaagttgagaagggcgaggaggtaggttctgggagtgcagttggtggcgagttgagtgatgaggaggaggttgaggtctctccctctcctctgggcgaggaggtggcagaggtggcagaaccacaggataaggtagcccatgtttctgaagctaatggtgaattgggtgatgggaaagaagcgagtgatgatgtggttgctctgggagctactcctgaagaaacggttgcagcacaagtgctgtaccgtctgagccttgctgagggtatccgacatggcaggcagacgaaccgagcattcagccttgataatgcacggaggaaggccttacttcttgaagcagagggaaaagaggatctgaacttctcatgcaacatacttgttctaggaaaaactggagtcggcaaaagtgcaactatcaattctatatttggtgaagagaagtccagaactgacgcctttagctcagcaaccacaaatgtgcgggaaattgttggtgatgtggatggtgtcaagattagaatcattgatacacctggccttcgacctaacgtgatggaccagggatcaaacagaaagattcttgctgctgtcaagaactataccaagaaatgtccgccagatattgttctatatgtggatcgtctggatagtctgagccgtgatctcaatgatttgcctcttctgaagactattactgctgttcttggctcatccatatggttcaatgccattgttgcactgacacatgctgcctcagctcctcctgaaggcctcaatggtgctcccatgacatatgaggtcttgatggctcagagatcccacatcatccagcagtccatcaggcaggctgctggagatatgcggttgatgaacccagtagcacttgttgagaaccatccttcgtgcaggaaaaaccgggagggccagaaagtgcttccgaatggccaaagctggaggcatcagatgttacttttgtgctactcctcaaagatattatcagaagccaactcactcctgaagcttcaggatcctaatcctggaaagctttttggtttccgtttccgctccccgtctcttcctttcttgttgtcctcactcttgcagtctagagcccaccccaaactttctgctgagcagggtggcaatgaaggtgattctgatgttgaattggatgactattctgatgtagaacaagatgatgacgaagaagaatatgatcagcttccacccttcaagcccttgaccaaagctcagcttgcaaggctcacaaaggagcagaagaatgcttattttgacgagtatgactacagggtcaagcttctccagaagaaacaatggaaggatgagatccgcaggttgaaggagatgaagaagagggggaaaactgatctggatgattatgggtatgctaatatcgctggtgagaacgatcaggatcctcctccagagaatgtatcggttcccttgcctgacatggtgcttcccccttcatttgattgtgacaatcccacataccggtaccgctttttggagtcaacctcgactgtcctagcaaggcctgttttggatgcgcatggatgggatcatgactgtggttatgatggagtgagcgttgaagagacactggctatccttagcaggttcccggcaaatgtagcagttcaggtcaccaaggacaagaaggaattcagcatccatttggactcttccatcgcagcaaagcatggagagaatgcatcatcacttgctggttttgatatccagactgttgggcgccagcttgcctatattctccgcggcgaggcaaaaatcaagaacatcaagaagaacaagaccacaggaggcttctcggtaactttcctgggtgacattgtggcaactggactgaaggtcgaggaccagctctcccttgggaagaggctgtcgctagttgccagcactggcgcgatgcgagcccaaggggaaactgcatatggagctaacttggaggcacgcctgaaggacaaagactatccgattggccagtccctctcaacgctgggtctctctctgatgaagtggcgccgggaccttgctctgggcgcgaacttgcagtcccagttctccatcggaagggggtcgaagatggcagtgcgacttggtctgaacaacaagctgagcgggcagatcacggtcaggacaagcacctcggagcaggtccagatcgcacttctgggtctcgtaccggttgcagcctccatctacaggagcttccggcccagtgaaccgtccttcgcttattagcctgtcaggagtctcagtccaattacttcataaccatgtggtttctcttggcaattttcttcttcacatgaaccatgtttcttgctgtttcagtttactcccttgtaattggcagatcgtttcctaccataattttggctgaagagggttgtgcgatttatctggaactgtagctgaataaataatgtcgagaaatgtaccatccttgtgtttatcaatatctattgcagcgtctattctgattatt

SEQ ID NO: 73446 - DNA, 2748 bp, Zea Mays
cgactcccgcccaagatgaccaaaattcctctcctaccttatcctctcggctgctcaccaccgcagacaagtctagtcctctccctcccctcaacctagcgccgccactcgcgcccaccacgccgtcgcaccgccgctggtgaacggatccgtccatcccgtacaccggccttggcctcctcctccctcccctcaacctagctccaccactcgcgcccaccatgccgccgcaccgccgctggtgaacggatccgtccatcctgtacaccagccatgtcctcctcctcactcccctcaacctagctccgccactcgcacccaccacgctggcacaccccgccgccggagaacaatccagccactagagtcgaagatccacgggccggacatcaacgagctgacatcctggacctccacggatacgcctccacacagggagtcctgcttagctccgcagatccgtgcaggccgcaacgaaggctgcctcaccggccaccaccaaggctgcctcaccgatagacgcaggcccgcagcccccgacctcttctactggcatcaggaatctggcgacacagatggttccaggaactcgccctcaccaaaagaagcaaaaggcaggaacaatgccggctgccaaccaccagccaccatgcacaccagtcagattgacaaggcaaagtgcagccatgcctttgcctggaggccgcccgccacctaagccaagacatcccttgcctcctaagaccacttcgaaagccacccctaaaagaaatgccatttccagtagtacccaacaacaggtccgggccagtacaaccactactgagaccactgaaactacaaacccagtgtcttttcctccaaaaatgaccaggtccactcaagcaatgtcttcaccagttccaaacacaatgcctagacctactagatacacaaggactagtggaaccatgtctacgcctggtggacacaccatgcatagtcctcctagattcactagggctagtgcagccatgtcttctcctggtgcaaaccctcaccatagtcctcctagattcactagggctagtgcagccatgtcttctcctagtgcaaaccctcaccatagtactcctgcagccactgctattgtatctcagcaacctactcccacaactagtgttaacaaaacagttcctacggacaactcaccaggtgggcacagctctaggcaaagcaatgccatcaatgagtcagctgagcaatttgatgctgctacttcagagggtaatccgaatgaaggagaaccagttggtgacttagttccagggcccaaaaagaatgtccgcaagaaaaccatgggttatggcttagagaagatgcttaataggggaaaccggttggctatccacgtggctgaagggaagaaaagaccggaggtcccacttcaagtagcgaagctggcatcagaaactggtgttgcccttagagacaacctacctatctacaaatcttggaagctttatgacaattccgtggggcaggcagaagtaggaaaagtgcttgacaaagtcacttcaaggttggatgtcgatgttaagaatgagggaccaagcaaagatgcatgcatatatatcataaagaggggagtgaggcagacgaggtataacctgaaaaggaagtacttcgacgagtcactgacaaaagaacagttgttggccatgcaacctccacctaaaatgaagaaagaggattggactgggctggtagagtattggtgtgacccaaagaatcaggaaaaatctgctaagaacaaagcaaatcgaggcaacgtgcagcttcaccaaaggactggagctaggtcctatatagcccatcgttacagcctgaggactaagtacaacaacatggagccggatgctgttgatttctttggggaatgtatgaatagtccccgaaatggtcgtactccgcttgcaaatgagatatatgagcaaatggttgcagagaaggaaagagagctagaagaaggagaagaacaaaagtcaccctccaagattgttgctgatagtctcagccagattagccgctcatccaacttccttccaaacattggtgtccctacaatgtccaagactggtcggtccacatcgctagctgcacaagcacgcatgcaagctcagtttgaggaaaaactccaagctgaaagagaggaagctgctaggaagcaggaagagttgcaagcacaactacaagctcaacatgccgcacttgaagaaaaccaaagtttgctgcaccagacccaagaggaagtgaaggggatgcataccaagtttgaagagaccaatgcactgctacgagctgtcctgaaacttcagaaagattgaggtagggatgcataccaagtctgaggatgatgcctttgcttaaggttttctaccttgctagaacatatctatggttagaactttgtcagaactacgtgcaatctgtttgaatgcttcaaacctttgtggtggaacctttgtatgtttgaacctctgttgtggaagaactagtgtgctagaattgtgtatgacttgtgatgagaatgttgtgtatgatggcttttctgtgtattatgattctgtgagctatcatgagagctcagtgtgtcgtcactatatggtcactgtatgtgggtgccatattaaactaaacaaaaccaagctgtcacattatccacaaactaatatatgacggtcctgcatcgtaaaaaaatacacaaaa

SEQ ID NO: 73447 - DNA, 2581 bp, Zea Mays
cccgacctcttctactggcatcaggaatctgaaactggattcagtttctgctctttctacgtttctctgtaataagtaatagaagaaatggaaaaaaccaagtatgaggtggcaagggatgagactgtaaagcatgttcagcaagtttttaattctttgggcattcatgtcttagcacagactgttagagatgttatttcaccaaaaaagaaagagggaagagggaaggctatagattctgacaatgattacgatccatgctctgacattgaaaaccaatctgacactaatgatgactatgatgatgacctcaataatgaggtcaatactgaggcgacacagatggttccaggaactcgccctcaccaaaagaagcaaaaggcaggaacaatgccggctgccaaccaccagccaccatgcacaccagtcagattgacaaggcaaagtgcagccatgcctttgcctggaggccgcccgccacctaagccaagacatcccttgcctcctaagaccacttcgaaagccacccctaaaagaaatgccatttccagtagtacccaacaacaggtccgggccagtacaaccactactgagaccactgaaactacaaacccagtgtcttttcctccaaaaatgaccaggtccactcaagcaatgtcttcaccagttccaaacacaatgcctagacctactagatacacaaggactagtggaaccatgtctacgcctggtggacacaccatgcatagtcctcctagattcactagggctagtgcagccatgtcttctcctggtgcaaaccctcaccatagtcctcctagattcactagggctagtgcagccatgtcttctcctagtgcaaaccctcaccatagtactcctgcagccactgctattgtatctcagcaacctactcccacaactagtgttaacaaaacagttcctacggacaactcaccaggtgggcacagctctaggcaaagcaatgccatcaatgagtcagctgagcaatttgatgctgctacttcagagggtaatccgaatgaaggagaaccagttggtgacttagttccagggcccaaaaagaatgtccgcaagaaaaccatgggttatggcttagagaagatgcttaataggggaaaccggttggctatccacgtggctgaagggaagaaaagaccggaggtcccacttcaagtagcgaagctggcatcagaaactggtgttgcccttagagacaacctacctatctacaaatcttggaagctttatgacaattccgtggggcaggcagaagtaggaaaagtgcttgacaaagtcactgtgagacaactatttaactcctcataataatttttagcattaatctactcccatgtgtggctttagtcaaggttggatgtcgatgttaagaatgagggaccaagcaaagatgcatgcatatatatcataaagaggggagtgaggcagacgaggtataacctgaaaaggaagtacttcgacgagtcactgacaaaagaacagttgttggccatgcaacctccacctaaaatgaagaaagaggattggactgggctggtagagtattggtgtgacccaaagaatcaggaaaaatctgctaagaacaaagcaaatcgaggcaacgtgcagcttcaccaaaggactggagctaggtcctatatagcccatcgttacagcctgaggactaagtacaacaacatggagccggatgctgttgatttctttggggaatgtatgaatagtccccgaaatggtcgtactccgcttgcaaatgagatatatgagcaaatggttgcagagaaggaaagagagctagaagaaggagaagaacaaaagtcaccctccaagattgttgctgatagtctcagccagattagccgctcatccaacttccttccaaacattggtgtccctacaatgtccaagactggtcggtccacatcgctagctgcacaagcacgcatgcaagctcagtttgaggaaaaactccaagctgaaagagaggaagctgctaggaagcaggaagagttgcaagcacaactacaagctcaacatgccgcacttgaagaaaaccaaagtttgctgcaccagacccaagaggaagtgaaggggatgcataccaagtttgaagagaccaatgcactgctacgagctgtcctgaaacttcagaaagattgaggtagggatgcataccaagtctgaggatgatgcctttgcttaaggttttctaccttgctagaacatatctatggttagaactttgtcagaactacgtgcaatctgtttgaatgcttcaaacctttgtggtggaacctttgtatgtttgaacctctgttgtggaagaactagtgtgctagaattgtgtatgacttgtgatgagaatgttgtgtatgatggcttttctgtgtattatgattctgtgagctatcatgagagctcagtgtgtcgtcactatatggtcactgtatgtgggtgccatattaaactaaacaaaaccaagctgtcacattatccacaaactaatatatgacggtcctgcatcgtaaaaaaatacacaaaa

SEQ ID NO: 73448 - DNA, 2653 bp, Zea Mays
atttatatttgctataaaaaacgaatacatatagaaatcattcgaactgtcaacgaattgaattggccgcgagtttcctacctataaaacgacccggatcccccacccccacatttcctcatcgtcacaacgcgtcctcgaataaaaatccagacgaaacccaaaatccccaccgaacgcaacctaaaatctccccatccctcctcgatccagccccgcggagaagagccatggccgattccgcaaccaacgacgcccccctggtcgccagcaaccagcccacggaggaggaggtgacggtggagagggccgcggcgacggaggagcaggaggaggagaggctgcggtacctcgagttcgtgcagcaggcggcggcgcaggcgctggtgctggcggccgcggcgtacgcgtacgccaagcagggcgccggcccgctccgccccggggtcgatcaggtcgagggcaccgtgaaggccgtcgtcggccccgtctacgaccgtttccacgccgtcccgctcgacctcctcaagttcatcgaccgcaaggtgaggaggcggttctccgtatgttgaaattgtgctgcaaattaggcgttctatgaaatgaaatttacaggtgcaggtttccacggtggaattttgccaaaaaatatatattttggattgaaatcttgtcaacttaactatttctagcagttaaccatctctatattcaatctccactctgtaaatattgtcatctattttgagtgaccgtatgattgaactgccggacacagtttaagggtctggattggataatgttaattgacctgttgctagaaatatgttcttgttgtcacgtgtactggcagtctgaaagggtttagttgcaatgcgttggtatcatggtattattagtttgacaactgaagtagcaaattaggttttttttggaaggcagaagcatcaagcaccactgaaccaaccaaacaaaatgtgtatgaccaagatttgaggtttattgcttaaggattacaagcaccaacttctggcgagttctattaggaactatactatgtttgtttatgtatttgactaatcatcatggtacaattttaactgatgtttcagatacgttcatcagctccttgaatctgcctacccatgtagagctggtcacttactcgtgcccagtatattgttcatttttcacacgcttcttgcaagtcaggccgttatacgttattgtatacgcactacaaactctgaagtcgttgtgttgccattgtcttgcattgttccatcatctgatttgtgccactgagcgaagaaatgatcgacgatttgcacgttctgccccccacttgcaggttggtgagtccgttgaggagatagaccgccgcgtccctccagtggtgaaggaagccccaaccttggcccgctcggctgcgaaggaggttcgccaggccggcctggtgggcacggccactggccttgccaagtcagccatcgcccgcgccgagccaaaggcccgggagctctacacccgctacgagcctgtggcagagcggcgtgccgccgaggcctgggtggccctgaaccgtctccctctggtgccctcggtcaccagggccgtcctccccactgccgcacagctctctgccaggtacaattcggcggtgcgtgatggtgccaagcgcgggaacgccgtggccacctatctcccgctggtgcccactgagcggctcgcccgcgtgttcaggtaccccgtggctgacgttgctgcagcaccagagatgcagcccattccttcccagtagaagatgaaatggaatgtgaactgcataaaccaatatcaagaagtattactgtgttttgtctttgcgtaccttatggtgaactcatgcgtggttcagtatcgtttcattcctttttgttgcagtgagcctacacaagttcgtctttgttttatggataatatgtataacattatctattggaatagcaatgttgatgcttgtgctttgtcatcattttgagtacccaacgcgtatgtgcctattggcatttcggctgttgtgttccaagtaaatttaacagaatttaggatgcaaaaaagaagataataaagagatcacaattagtgctctagcgactcctctataagaggaaaatgttgtttcttcgctctatggataaccaaagcaaatatttttttaaagaaaacccagcaatttaagtatggtcggcagaatcccatcaaagatgtgatcatttctaccgacccaaatgagttcattagtatgataattttcatgtagagagaggcttccaattatcttccttcttaaaacttcaacccttccaggctccatagtgcgtaatcaattcctctcctatagccacgtccgtcctcacctcacgccgcccaacgcgtaggtcgtagcacatgacaccatccatctcttcggcagctgactattattttcggcagctgacgtatgacagcacatgacagccaccatccatctctccccaatcccatacgtcgtcatagtagtagaacatacacggtatacacatacattgttacatcgcaatcgaaatttaagaacatcttgtagttgacgaggggcctggctgcattctcagatgaatatgcaggacacaac

SEQ ID NO: 73449 - DNA, 2889 bp, Zea Mays
ggtgcggaggaaccagtctaagccaccacccaggcccagctcacctctttcctctcttctcatgcccacgcgctcgcctatctcatagtccttccccattccgcctctctagctggcctgtcgaggaccctcgccatcctccccaggcgcaccaccaaacggtccaaacccccagcggcggcgctaggatttgagtctcagcgcgccggcaccgccaccgccaccggcggtgatggcagggcaggagcgtaggacaatcgatctggaggagggatgggcgtttatgcagaagggtatcaccaagctgaagaacatcctcgagggcaagcccgagcctcagttcagctccgaggactacatgatgctctacacgacgatatacaacatgtgcacgcagaagccgccgcacgactactcgcagcagctctacgacaagtatcgggagtcgttcgaggagtatatcacctccatggtactaccttcgctaagggagaaacatgatgagtttatgctgagggagctagtgcaaaggtggtcaaaccataaagtcatgatatatcaagagattaaagggcaagttaaagatgcggtgatagctctgatagacaaagaacgcgagggtgaacagattgaccggggtctgttgaagaatgtattggatatttttgttgaaattgggctgggtcaaatggagtgttatgagaatgactttgaagatttcttgctcaaggatactacagagtactactctgtcaaggctcaaagctggattcttgaggactcatgcccagattacatgattaaggtacctagaactcatgcccagattacatgattaaggctgaggagtgtttgaagcgggagaaggagcgggttggtcactatttgcatattagcagtgaacaaaagttgttggagaaagtgcaaaatgaattgcttgctcagtatgcaaccccgctgttggagaaggagcattctggatgttctgctttgcttcgtgatgataaggttgaggacctttctaggatgtacaggctcttctccaaaatcagccgcggtctggagcctatttctaacatgtttaaaacgcatgttacaaatgagggcacagccttggtcaagcaagcagaagattctgctagcaataagaagccagaaaagaaggatatagttggcatgcaggagcaggtctttgtgtggaaaatcatcgagctgcatgacaaatatgtagcttatgtgacagaatgtttccagggacatacactcttccataaggcacttaaagaagcctttgaggtcttctgtaacaaaggtgtctctggcagttcgagtgccgagttgttggctaccttctgcgacaatattctgaagaaaggttgcagtgaaaagctcagtgatgaagccatcgaagatgcccttgagaaggtggtgagaatgcttgcatacatcagtgataaagacctgtttgccgagttctataggaagaagcttgcaagaagattactttttgacaaaagtgctaatgatgagcatgagagaagtattctgacaaagctcaaacaacagtgtgggggacagtttacttcaaaaatggagggcatggttactgaccttactgtcgctagagatcatcaaactaagtttgaggagtttgtagctggacatccagagttgaatcctgggatagacttagctgttactgttttgacaacgggattctggccaagctacaaaacttttgacataaaccttcctgccgagatggtgaaatgtgtagaggttttcaaggagttctatcaaacaagaacaaagcacaggaagctgacatggatttattccttgggaacctgcaacatcaatgctaagtttgatgctaaacctattgaacttattgttacaacatatcaggctgcattgctactactgtttaatggatctgacaggcttagttattctgagattgtaacacaattaaacctgtcagatgatgatgtagtgcgtttgctccattctctttcttgtgcgaagtacaagatccttaacaaggaaccggctagtagatccatctctcccaatgatgtttttgagttcaattcaaagtttactgacagaatgagaagaatcaaggttccactccctcctgttgatgagaagaaaaaggttgttgaagatgttgacaaagacaggaggtatgcaattgatgcatcaattgtgcgcattatgaagagccgcaaagttatgggtcatcaacagctggttgctgaatgtgttgagcagctgagccgcatgttcaagcctgacttcaaagccataaagaagaggattgaggatctcattacaagggactacttggagcgcgacaaggacaacgctaatacgtacaaataccttgcctgattggtggtcagtggcaaaagtccaaaacagctcccagactagtgcaataccacgggggtggcgatctcctgcaaggtggtggtgcgtcaacttttaccatgatttgaggtgcgttatggtgatttgcgtgcttatgggtcctgccacagcaagggctgctcgcatttgtaaattggccgttaaaatagacaatcttgacctgcattagatgatatgatgatgatatgaggaataggagaggcactcaagtacttgtttgccatctatgccaatgttttacctatatgtctgtatcaatgtttcagttaactgagatgagattatgcttgggggttgctttgctatatgaaatgagtggatactatgcgaatttgcagtatcggtttgtatctgaatgtaccttccatatcatgccttgcatgccatggacacagtcaatcttcttcagacatcattaattactaaaaagaagcatatataaatataaaagaa

SEQ ID NO: 73450 - DNA, 1033 bp, Zea Mays
aggcccgtcagagaatcagagctctgaggctgctcacatcaggccaccaccaacccctcacgtcggcggtggcgtcgtcggcgaaggcagagatggcgtccgtggccgcggcggaggtcgcggcggcggcgctccggtcggtgctgtcgcgcgcgcagcaggcggcggcgcgggcggggcgcgcgccggggtccgtgcgcgtggtggcggtgagcaagaccaagccggtgcctgtcatccggggcgtctacgacgcgggccaccgctgcttcggcgagaactacgtccaggagctcatcgacaaggcgcctcagctggcgtgccaaaccttgatatggttgagagtgtcgatgatgagaagattgctaaccgtcttgatcgagtggtagctgacttggggagaaaacctcttaaggttttggtccaagtcaacactagtggagaagaatcgaaatttggagtagatccctcaggatgcatggaactagcaaagcatgtcaaactgaactgcccgaaccttgtgttctctggtctgatgacaattgggatgcttgattactcctcaacccctgagaatttcaaggcgctggctaactgccgggaagaggtgtgcaaggagcttggaatacccgaagagcagtgcgaattgtctatgggcatgtcggctgattttgaacaagcgattgaaatgggaagcacaaatgtaagagttgggtcaaccatatttggtgcaagagaatacccaaagaagaactagggtgtttaactatatttggtgcccaaagaactagggtgcttatgcattcctgtcatgatggtagtggcacagaatctgcaacagatccaaatctgatgatgcatcatatatgtgcagttgtgtgcccattctactcagcttaaaacattttgacacccttttttggcccaaagtatcaataaggaaagttaataaaaagcattagaccacatgagtatcgattgtattttgatgtcgacagattttgtttacagttcaaacatccctgttacatta

SEQ ID NO: 73451 - DNA, 489 bp, Zea Mays
atgagctgcaactatggactttggcaggtgccaataacatttgaactctatttgaccctggctaaaggaggagaatttcttaggttgtgtgcgctggaaagcgaggaagaggtaactgatgtcgagcaggcagaaaattggttttccttaacttcagctcagcgcatatgtgacatgtttcttgcactagataaggatacaaacagtacactgagcaaacaagaactcaaggaatatgcagatggcacattgactgagattttcattgaaagagtttttgatgagcatgtccgccggagcaaagttggaggtggaaacagtcgcgagatggacttcgaaagctttcttgattttgttttggctctagaaaacaaagatacccctgaaggcttgacatatttatttagatgccttgatcttaatggaagggggttccttacaactgcagacatccacactctatttagttgcaatcttgttgaaggacag

SEQ ID NO: 73452 - DNA, 1239 bp, Zea Mays
atgagctgcaactatggactttggcaggtgccaataacatttgaactctatttgaccctggctaaaggaggagaatttcttaggttgtgtgcgctggaaagcgaggaagaggtaactgatgtcgagcaggcagaaaattggttttccttaacttcagctcagcgcatatgtgacatgtttcttgcactagataaggatacaaacagtacactgagcaaacaagaactcaaggaatatgcagatggcacattgactgagattttcattgaaagagtttttgatgagcatgtccgccggagcaaagttggaggtggaaacagtcgcgagatggacttcgaaagctttcttgattttgttttggctctagaaaacaaagatacccctgaaggcttgacatatttatttagatgccttgatcttaatggaagggggttccttacaactgcagacatccacactctatttagggggggaggcttacctcggtttatcctttctggtatcccactcgtgggaatctccggcattgggtcttcccgaccagttgcaatcttgttaggcagtggcggagcacctgttatggccaactatggcttgagccatacctaaaagtcatgtttggtgtagtgagatgtacaccagaaatggattgagggcgggaactacgagctttgcatcgaagatgtgagggatgaaatctgggacatggtgaagcccgcagatcctctcaggatctcgctatcagatcttctttcttgcaagcaaggcgggactatcgccagcatgcttgtagatgtgcgtggcttctgggcccatgacaacagggagaaccttctccaggaagaggaagagcaagtggaagagacatgagttctgttctccagctgccaagtaactgtatccagatccagtgcatcaaaaccgcaacatcctcgggaactgcatgcaccgcggtatcattcactgtaacttagctagtgtattagattcgtcgccacctgtttcccctgaagcttattgtaaagtgtgccatattggtcttttgaggctagcgtggcttggccatgttgacatctgaacactatcccgagggcctgattgaatgctcacagcctctgctgcctgtatgtacatgtaaattgtgccaagcgcgcaatcctgactactctatatgtaaatacattgtgttcagctcgtacatgattgttacgtggtcttgaaagtccgcctcaatttcca

SEQ ID NO: 73453 - DNA, 1298 bp, Zea Mays
atgagctgcaactatggactttggcaggtgccaataacatttgaactctatttgaccctggctaaaggaggagaatttcttaggttgtgtgcgctggaaagcgaggaagaggtaactgatgtcgagcaggcagaaaattggttttccttaacttcagctcagcgcatatgtgacatgtttcttgcactagataaggatacaaacagtacactgagcaaacaagaactcaaggaatatgcagatggcacattgactgagattttcattgaaagagtttttgatgagcatgtccgccggagcaaagttggaggtggaaacagtcgcgagatggacttcgaaagctttcttgattttgttttggctctagaaaacaaagatacccctgaaggcttgacatatttatttagatgccttgatcttaatggaagggggttccttacaactgcagacatccacactctatttaggcctggtgcactggtgagagctatctcacgtgttcgaagtagcctctctgcttttgcagggggggaggcttacctcggtttatcctttctggtatcccactcgtgggaatctccggcattgggtcttcccgaccagttgcaatcttgttaggcagtggcggagcacctgttatggccaactatggcttgagccatacctaaaagtcatgtttggtgtagtgagatgtacaccagaaatggattgagggcgggaactacgagctttgcatcgaagatgtgagggatgaaatctgggacatggtgaagcccgcagatcctctcaggatctcgctatcagatcttctttcttgcaagcaaggcgggactatcgccagcatgcttgtagatgtgcgtggcttctgggcccatgacaacagggagaaccttctccaggaagaggaagagcaagtggaagagacatgagttctgttctccagctgccaagtaactgtatccagatccagtgcatcaaaaccgcaacatcctcgggaactgcatgcaccgcggtatcattcactgtaacttagctagtgtattagattcgtcgccacctgtttcccctgaagcttattgtaaagtgtgccatattggtcttttgaggctagcgtggcttggccatgttgacatctgaacactatcccgagggcctgattgaatgctcacagcctctgctgcctgtatgtacatgtaaattgtgccaagcgcgcaatcctgactactctatatgtaaatacattgtgttcagctcgtacatgattgttacgtggtcttgaaagtccgcctcaatttcca

SEQ ID NO: 73454 - DNA, 1259 bp, Zea Mays
atgagctgcaactatggactttggcaggtgccaataacatttgaactctatttgaccctggctaaaggaggagaatttcttaggttgtgtgcgctggaaagcgaggaagaggtaactgatgtcgagcaggcagaaaattggttttccttaacttcagctcagcgcatatgtgacatgtttcttgcactagataaggatacaaacagtacactgagcaaacaagaactcaaggaatatgcagatggcacattgactgagattttcattgaaagagtttttgatgagcatgtccgccggagcaaagttggaggtggaaacagtcgcgagatggacttcgaaagctttcttgattttgttttggctctagaaaacaaagatacccctgaaggcttgacatatttatttagatgccttgatcttaatggaagggggttccttacaactgcagacatccacactctatttagtagcctctctgcttttgcagggggggaggcttacctcggtttatcctttctggtatcccactcgtgggaatctccggcattgggtcttcccgaccagttgcaatcttgttaggcagtggcggagcacctgttatggccaactatggcttgagccatacctaaaagtcatgtttggtgtagtgagatgtacaccagaaatggattgagggcgggaactacgagctttgcatcgaagatgtgagggatgaaatctgggacatggtgaagcccgcagatcctctcaggatctcgctatcagatcttctttcttgcaagcaaggcgggactatcgccagcatgcttgtagatgtgcgtggcttctgggcccatgacaacagggagaaccttctccaggaagaggaagagcaagtggaagagacatgagttctgttctccagctgccaagtaactgtatccagatccagtgcatcaaaaccgcaacatcctcgggaactgcatgcaccgcggtatcattcactgtaacttagctagtgtattagattcgtcgccacctgtttcccctgaagcttattgtaaagtgtgccatattggtcttttgaggctagcgtggcttggccatgttgacatctgaacactatcccgagggcctgattgaatgctcacagcctctgctgcctgtatgtacatgtaaattgtgccaagcgcgcaatcctgactactctatatgtaaatacattgtgttcagctcgtacatgattgttacgtggtcttgaaagtccgcctcaatttcca

SEQ ID NO: 73455 - DNA, 1059 bp, Zea Mays
atgagctgcaactatggactttggcaggtgccaataacatttgaactctatttgaccctggctaaaggaggagaatttcttaggttgtgtgcgctggaaagcgaggaagaggtaactgatgtcgagcaggcagaaaattggttttccttaacttcagctcagcgcatatgtgataaggatacaaacagtacactgagcaaacaagaactcaaggaatatgcagatggcacattgactgagattttcattgaaagagtttttgatgagcatgtccgccggagcaaagttggaggtggaaacagtcgcgagatggacttcgaaagctttcttgattttgttttggctctagaaaacaaagatacccctgaaggcttgacatatttatttagatgccttgatcttaatggaagggggttccttacaactgcagacatccacactctatttagagatgtacaccagaaatggattgagggcgggaactacgagctttgcatcgaagatgtgagggatgaaatctgggacatggtgaagcccgcagatcctctcaggatctcgctatcagatcttctttcttgcaagcaaggcgggactatcgccagcatgcttgtagatgtgcgtggcttctgggcccatgacaacagggagaaccttctccaggaagaggaagagcaagtggaagagacatgagttctgttctccagctgccaagtaactgtatccagatccagtgcatcaaaaccgcaacatcctcgggaactgcatgcaccgcggtatcattcactgtaacttagctagtgtattagattcgtcgccacctgtttcccctgaagcttattgtaaagtgtgccatattggtcttttgaggctagcgtggcttggccatgttgacatctgaacactatcccgagggcctgattgaatgctcacagcctctgctgcctgtatgtacatgtaaattgtgccaagcgcgcaatcctgactactctatatgtaaatacattgtgttcagctcgtacatgattgttacgtggtcttgaaagtccgcctcaatttcca

SEQ ID NO: 73456 - DNA, 946 bp, Zea Mays
aaagttctcaacactccaaaaccggagagcgtcgggcccatttcactcagtgctcccccacgcgcccgccctgagcacccgatccaccaccgcgacggcgatgagcaccgcctccggcgatggcacggacgccggcggcgacgaggcctcgtctgcggccgccgggaggcggatcccacctgcctcttccatgtcgtgggtacgcaacctccgccgcttcgtcggcatgggcgccggcctcggatccgaggccctcatggaactggagactaaaaggatattgcttgagattttcaaggagcggcagcggaagagtgctgaagctggttccatcccaagtttctacaagaagaatcttgcaccttagttgtggatactaatctccatcatgtgtccagaaacctgaagaaggatctattagctctagagttcaaaggttggccaagtataggtttttaaagaaacaatcagagatgctgctgaatgctgatgatcttgatgccatgtgggtttgtctcagagaaaattgtgtaatcgatgatgctactggtgctgaaaagatgaattatgaagatttctgccatatcgctacagtctgcacggagcagattggtcagaaatgcaaacgcttcttcagcccttcaaacttcatgaagtttgagaaggatgactctgggaggattgctatcctaccattttatctttatgtcatgcgaacagtgagttattttctgcgagaaagagcagttaaacttgccagctagttttgtcccagatgcttcattttgtttctaatagattgtgggttggttaaaatccacattattagcgattctgttctctattcttatctgaagtaatttttactccattagttataccgtttcgttatttataccaagtttgtctaaataacggttaggctacaccttagaatctaattgtg

SEQ ID NO: 73457 - DNA, 989 bp, Zea Mays
aaagttctcaacactccaaaaccggagagcgtcgggcccatttcactcagtgctcccccacgcgcccgccctgagcacccgatccaccaccgcgacggcgatgagcaccgcctccggcgatggcacggacgccggcggcgacgaggcctcgtctgcggccgccgggaggcggatcccacctgcctcttccatgtcgtgggtacgcaacctccgccgcttcgtcggcatgggcgccggcctcggatccgaggccctcatggctgttgattttggtggtgattcattcgggaagaacaatggtgctttctgaagagggggatgcctggcctcggaaactcttccgatacagaactggagactaaaaggatattgcttgagattttcaaggagcggcagcggaagagtgctgaagctggttccatcccaagtttctacaagaagaaacctgaagaaggatctattagctctagagttcaaaggttggccaagtataggtttttaaagaaacaatcagagatgctgctgaatgctgatgatcttgatgccatgtgggtttgtctcagagaaaattgtgtaatcgatgatgctactggtgctgaaaagatgaattatgaagatttctgccatatcgctacagtctgcacggagcagattggtcagaaatgcaaacgcttcttcagcccttcaaacttcatgaagtttgagaaggatgactctgggaggattgctatcctaccattttatctttatgtcatgcgaacagtgagttattttctgcgagaaagagcagttaaacttgccagctagttttgtcccagatgcttcattttgtttctaatagattgtgggttggttaaaatccacattattagcgattctgttctctattcttatctgaagtaatttttactccattagttataccgtttcgttatttataccaagtttgtctaaataacggttaggctacaccttagaatctaattgtg

SEQ ID NO: 73458 - DNA, 692 bp, Zea Mays
gttgattttggtggtgattcattcgggaagaacaatggtgctttctgaagagaactggagactaaaaggatattgcttgagattttcaaggagcggcagcggaagagtgctgaagctggttccatcccaagtttctacaagaagaaacctgaagaaggatctattagctctagagttcaaaggttggccaagtataggtttttaaagaaacaatcagagatgctgctgaatgctgatgatcttgatgccatgtgggtttgtctcagagaaaattgtgtaatcgatgatgctactggtgctgaaaagatgaattatgaagatttctgccatatcgctacagtctgcacggagcagattggtcagaaatgcaaacgcttcttcagcccttcaaacttcatgaagtttgagaaggatgactctgggaggattgctatcctaccattttatctttatgtcatgcgaacagtgagttattttctgcgagaaagagcagttaaacttgccagctagttttgtcccagatgcttcattttgtttctaatagattgtgggttggttaaaatccacattattagcgattctgttctctattcttatctgaagtaatttttactccattagttataccgtttcgttatttataccaagtttgtctaaataacggttaggctacaccttagaatctaattgtg

SEQ ID NO: 73459 - DNA, 2895 bp, Zea Mays
aaaaagacgggcttcctcccgcgattcgaatcggaagccctcgcattccgaaacccaccctccgcctcaagaagccaccgctccgacgagccgtgggtggcagaggacgcgcagagcaagcctcaccgctgcaggcgggcgcgcggacagcgtcccgccctccccatggagcccgacgccgccgggtgcgacgtgtccgcggacggcctcatcgccgagctgcttgacatgggcttcgagttcgacgccatcagcgcggcggtcggcgcggtcggcccgcgccgcgcagaggtgcttgaggtcctgctgggcgggtcggacgcccgagcggggcaggcgaggcggggagggggagtgccaggccgtcccgccttgtctacggcgcagccacggccggctggcaggggcatgaaattgagtaaccctagggggaggcttaggcagtccagcatcacggaccacgttgcctcagctactggtggcggaaaggaatctggtcgggaagcgaacatttcgtttccttgttcatcggctcctggtggtcccagggtaatgccagtggctgttgatttttgttccgaaccgggtccccaatctcagtctttggttgagaactcgacagtggagtccgaccaaatggacagaattagtgctgttctgcaaaagcattttgggttttcctgcctcaaagcattccaaaaggaagtcttggatgcttggtctgctcacagggattgtattgtcctagcagccacaggatcaggaaagtccctctgttttcagatcccagctctattaacaacaaaggttgtggtggtcatatcacccttgataagtctaatgcatgatcagtgcctgaagcttgcaaatcacggggtatccgcatgcttccttgggtcagggcaacctgatagccgtgttgaaggtaaagcgatggctggcatgtataagattgtttatgtttgccctgagacaatattaagattaatggaaccgttgaagaaacttgcagaaaagccagggattgcactttttgccattgatgaggtccattgtgtttctaaatggggccacgattttcgacctgactataggagattatctgcgttgagagaaaatttcagttccagcaaattgaagttcttgaagcatgacattccgttgatggcattgacagctactgcaactattcccgtacgagaagacattactaagtccttgaaaatgtcaaaagatacagcgattgtgctaacctctttttttcggccaaatctccggttcagcgtaaagcacagcaaaacttctgcctcatcatatggaaaggacttccaagaactgataggggcatataaggcttcaagggaaggacagcaaattcttcatggaattgacactgactccgaaagcagttcatatgaatctctgaatgatagtgcatcagacgatgaagatgcaaatgttatttctgcaaaccacggggataagaatgttggaaaaacaaaaactagcatgactttggtagaagaaaacattgaaaatgagttggatttgtatcaaggagttgataattttgatgtttcatgtggagagttccttgaatgttcacagcctgagagctccaagtctcctgctcaatccaatcaaactagctcctcagattgtggtgttcaaggttctacaattgtttatgtacccacaaggaaacaaaccgttgaactagctaacttcctttgcaaatctggtctcagagctgcagcatataatgcaaagatgcctaaatcccatttgaggcaagttcatcagcagtttcactgcaacgacttagaggttgtggtggctaccatagcatttggcatgggaattgacaaatcaaatgtcaggcgaattattcactatggtttaccgcagagtttagaagcatattatcaagaagctggccgtgctggtagagatggaaagctgtcagattgcactctatattataattttttgagaacaccgacactccttcctaataaaagaagtgaggagcaggcaaaggctgcatatagaatgctacgtgattgttttcactattctctgaatacttcaacatgtagagccaaaatattagtgaagtactttggcgaagactttggtcctgatggatgtcgcatgtgtgacatctgtactaatggccctcctcaaatgcatgatttcaaggaagaagcgattgtgttcatgaatgtgctccagggtcgaagtggcggtgaaactgatgagatgatttacagcagagtaccccattacagctctggcaggagagggtttggcgaggcacctaattttagaatggttgtcagtcatataagggaaaagcttcctaggtttgctgcgactgacaagatatggtggcaaggtctttcccgtatattagagggcctgagatacgtagaggaagcagctgaaactcctcgtgtctccatgcagtaccctgaactgacggaggacggattaaagtttcttagtagctcacagtcggaggcacctctgtatgcatacccggacgcggcaatgctcttggcaatgaaggagccaaggcccttctctggtttctccgattggggcaggggctgggccgatcccgagactcgccggcagcgtctggcgggcaagaaggccgggagaagaaagcggaagtggcgctcccgggggcggcagcagcagccgggcggcttcaccacggcgagggagagactgactgcgatactggcaaagaagaaaaaaagttgccacctgctgctcctgtggctccaagaagccctgatgattgctggccaaaccaagcggatggcgcctgtggctgcaagtgtgcgcgttcgatgtgtcacgccccggcaccgctcggtcggctga

SEQ ID NO: 73460 - DNA, 2909 bp, Zea Mays
ctcgcattccgaaacccaccctccgcctcaagaagccaccgctccgacgagccgtgggtggcagaggacgcgcagagcaagcctcaccgctgcaggcgggcgcgcggacagcgtcccgccctccccatggagcccgacgccgccgggtgcgacgtgtccgcggacggcctcatcgccgagctgcttgacatgggcttcgagttcgacgccatcagcgcggcggtcggcgcggtcggcccgcgccgcgcagaggtgcttgaggtcctgctgggcgggtcggacgcccgagcggggcaggcgaggcggggagggggagtgccaggccgtcccgccttgtctacggcgcagccacggccggctggcaggggcatgaaattgagtaaccctagggggaggcttaggcagtccagcatcacggaccacgttgcctcagctactggtggcggaaaggaatctggtcgggaagcgaacatttcgtttccttgttcatcggctcctggtggtcccagggtaatgccagtggctgttgatttttgttccgaaccgggtccccaatctcagtctttggttgagaactcgacagtggagtccgaccaaatggacagaattagtgctgttctgcaaaagcattttgggttttcctgcctcaaagcattccaaaaggaagtcttggatgcttggtctgctcacagggattgtattgtcctagcagccacaggatcaggaaagtccctctgttttcagatcccagctctattaacaacaaaggttgtggtggtcatatcacccttgataagtctaatgcatgatcagtgcctgaagcttgcaaatcacggggtatccgcatgcttccttgggtcagggcaacctgatagccgtgttgaagaaaagccagggattgcactttttgccattgatgaggtccattgtgtttctaaatggggccacgattttcgacctgactataggtctgctcttgtgtttgatatcctctgttaaaggagattatctgcgttgagagaaaatttcagttccagcaaattgaagttcttgaagcatgacattccgttgatggcattgacagctactgcaactattcccgtacgagaagacattactaagtccttgaaaatgtcaaaagatacagcgattgtgctaacctctttttttcggccaaatctccggttcagcgtaaagcacagcaaaacttctgcctcatcatatggaaaggacttccaagaactgataggggcatataaggcttcaagggaaggacagcaaattcttcatggaattgacactgactccgaaagcagttcatatgaatctctgaatgatagtgcatcagacgatgaagatgcaaatgttatttctgcaaaccacggggataagaatgttggaaaaacaaaaactagcatgactttggtagaagaaaacattgaaaatgagttggatttgtatcaaggagttgataattttgatgtttcatgtggagagttccttgaatgttcacagcctgagagctccaagtctcctgctcaatccaatcaaactagctcctcagattgtggtgttcaaggttctacaattgtttatgtacccacaaggaaacaaaccgttgaactagctaacttcctttgcaaatctggtctcagagctgcagcatataatgcaaagatgcctaaatcccatttgaggcaagttcatcagcagtttcactgcaacgacttagaggttgtggtggctaccatagcatttggcatgggaattgacaaatcaaatgtcaggcgaattattcactatggtttaccgcagagtttagaagcatattatcaagaagctggccgtgctggtagagatggaaagctgtcagattgcactctatattataattttttgagaacaccgacactccttcctaataaaagaagtgaggagcaggcaaaggctgcatatagaatgctacgtgattgttttcactattctctgaatacttcaacatgtagagccaaaatattagtgaagtactttggcgaagactttggtcctgatggatgtcgcatgtgtgacatctgtactaatggccctcctcaaatgcatgatttcaaggaagaagcgattgtgttcatgaatgtgctccagggtcgaagtggcggtgaaactgatgagatgatttacagcagagtaccccattacagctctggcaggagagggtttggcgaggcacctaattttagaatggttgtcagtcatataagggaaaaggtttggatctggtagcagtaaacagagaattctttctgtttaaacaatgccataaattcttagtaggaattatcaaaactgttgttgtgattaaaggttatttgtagcttcctaggtttgctgcgactgacaagatatggtggcaaggtctttcccgtatattagagggcctgagatacgtagaggaagcagctgaaactcctcgtgtctccatgcagtaccctgaactgacggaggacggattaaagtttcttagtagctcacagtcggaggcacctctgtatgcatacccggacgcggcaatgctcttggcaatgaaggagccaaggcccttctctggtttctccgattggggcaggggctgggccgatcccgagactcgccggcagcgtctggcgggcaagaaggccgggagaagaaagcggaagtggcgctcccgggggcggcagcagcagccgggcggcttcaccacggcgagggagagactgactgcgatactggcaaagaagaaaaaaagttgccacctgctgctcctgtggctccaagaagccctgatgattgctggccaaaccaagcggatggcgcctgtggctgcaagtgtgcgcgttcgatgtgtcacgccccggcaccgctcggtcggctga

SEQ ID NO: 73461 - DNA, 2853 bp, Zea Mays
ctcgcattccgaaacccaccctccgcctcaagaagccaccgctccgacgagccgtgggtggcagaggacgcgcagagcaagcctcaccgctgcaggcgggcgcgcggacagcgtcccgccctccccatggagcccgacgccgccgggtgcgacgtgtccgcggacggcctcatcgccgagctgcttgacatgggcttcgagttcgacgccatcagcgcggcggtcggcgcggtcggcccgcgccgcgcagaggtgcttgaggtcctgctgggcgggtcggacgcccgagcggggcaggcgaggcggggagggggagtgccaggccgtcccgccttgtctacggcgcagccacggccggctggcaggggcatgaaattgagtaaccctagggggaggcttaggcagtccagcatcacggaccacgttgcctcagctactggtggcggaaaggaatctggtcgggaagcgaacatttcgtttccttgttcatcggctcctggtggtcccagggtaatgccagtggctgttgatttttgttccgaaccgggtccccaatctcagtctttggttgagaactcgacagtggagtccgaccaaatggacagaattagtgctgttctgcaaaagcattttgggttttcctgcctcaaagcattccaaaaggaagtcttggatgcttggtctgctcacagggattgtattgtcctagcagccacaggatcaggaaagtccctctgttttcagatcccagctctattaacaacaaaggttgtggtggtcatatcacccttgataagtctaatgcatgatcagtgcctgaagcttgcaaatcacggggtatccgcatgcttccttgggtcagggcaacctgatagccgtgttgaaggtaaagcgatggctggcatgtataagattgtttatgtttgccctgagacaatattaagattaatggaaccgttgaagaaacttgcagaaaagccagggattgcactttttgccattgatgaggtccattgtgtttctaaatggggccacgattttcgacctgactataggtctgctcttgtgtttgatatcctctgttaaaggagattatctgcgttgagagaaaatttcagttccagcaaattgaagttcttgaagcatgacattccgttgatggcattgacagctactgcaactattcccgtacgagaagacattactaagtccttgaaaatgtcaaaagatacagcgattgtgctaacctctttttttcggccaaatctccggttcagcgtaaagcacagcaaaacttctgcctcatcatatggaaaggacttccaagaactgataggggcatataaggcttcaagggaaggacagcaaattcttcatggaattgacactgactccgaaagcagttcatatgaatctctgaatgatagtgcatcagacgatgaagatgcaaatgttatttctgcaaaccacggggataagaatgttggaaaaacaaaaactagcatgactttggtagaagaaaacattgaaaatgagttggatttgtatcaaggagttgataattttgatgtttcatgtggagagttccttgaatgttcacagcctgagagctccaagtctcctgctcaatccaatcaaactagctcctcagattgtggtgttcaaggttctacaattgtttatgtacccacaaggaaacaaaccgttgaactagctaacttcctttgcaaatctggtctcagagctgcagcatataatgcaaagatgcctaaatcccatttgaggcaagttcatcagcagtttcactgcaacgacttagaggttgtggtggctaccatagcatttggcatgggaattgacaaatcaaatgtcaggcgaattattcactatggtttaccagtttagaagcatattatcaagaagctggccgtgctggtagagatggaaagctgtcagattgcactctatattataattttttgagaacaccgacactccttcctaataaaagaagtgaggagcaggcaaaggctgcatatagaatgctacgtgattgttttcactattctctgaatacttcaacatgtagagccaaaatattagtgaagtactttggcgaagactttggtcctgatggatgtcgcatgtgtgacatctgtactaatggccctcctcaaatgcatgatttcaaggaagaagcgattgtgttcatgaatgtgctccagggtcgaagtagtaccccattacagctctggcaggagagggtttggcgaggcacctaattttagaatggttgtcagtcatataagggaaaagcttcctaggtttgctgcgactgacaagatatggtggcaaggtctttcccgtatattagagggcctgagatacgtagaggaagcagctgaaactcctcgtgtctccatgcagtaccctgaactgacggaggacggattaaagtttcttagtagctcacagtcggaggcacctctgtatgcatacccggacgcggcaatgctcttggcaatgaaggagccaaggcccttctctggtttctccgattggggcaggggctgggccgatcccgagactcgccggcagcgtctggcgggcaagaaggccgggagaagaaagcggaagtggcgctcccgggggcggcagcagcagccgggcggcttcaccacggcgagggagagactgactgcgatactggcaaagaagaaaaaaagttgccacctgctgctcctgtggctccaagaagccctgatgattgctggccaaaccaagcggatggcgcctgtggctgcaagtgtgcgcgttcgatgtgtcacgccccggcaccgctcggtcggctga

SEQ ID NO: 73462 - DNA, 2792 bp, Zea Mays
ctcgcattccgaaacccaccctccgcctcaagaagccaccgctccgacgagccgtgggtggcagaggacgcgcagagcaagcctcaccgctgcaggcgggcgcgcggacagcgtcccgccctccccatggagcccgacgccgccgggtgcgacgtgtccgcggacggcctcatcgccgagctgcttgacatgggcttcgagttcgacgccatcagcgcggcggtcggcgcggtcggcccgcgccgcgcagaggtgcttgaggtcctgctgggcgggtcggacgcccgagcggggcaggcgaggcggggagggggagtgccaggccgtcccgccttgtctacggcgcagccacggccggctggcaggggcatgaaattgagtaaccctagggggaggcttaggcagtccagcatcacggaccacgttgcctcagctactggtggcggaaaggaatctggtcgggaagcgaacatttcgtttccttgttcatcggctcctggtggtcccagggtaatgccagtggctgttgatttttgttccgaaccgggtccccaatctcagtctttggttgagaactcgacagtggagtccgaccaaatggacagaattagtgctgttctgcaaaagcattttgggttttcctgcctcaaagcattccaaaaggaagtcttggatgcttggtctgctcacagggattgtattgtcctagcagccacaggatcaggaaagtccctctgttttcagatcccagctctattaacaacaaaggttgtggtggtcatatcacccttgataagtctaatgcatgatcagtgcctgaagcttgcaaatcacggggtatccgcatgcttccttgggtcagggcaacctgatagccgtgttgaagattaatggaaccgttgaagaaacttgcagaaaagccagggattgcactttttgccattgatgaggtccattgtgtttctaaatggggccacgattttcgacctgactataggagattatctgcgttgagagaaaatttcagttccagcaaattgaagttcttgaagcatgacattccgttgatggcattgacagctactgcaactattcccgtacgagaagacattactaagtccttgaaaatgtcaaaagatacagcgattgtgctaacctctttttttcggccaaatctccggttcagccacagcaaaacttctgcctcatcatatggaaaggacttccaagaactgataggggcatataaggcttcaagggaaggacagcaaattcttcatggaattgacactgactccgaaagcagttcatatgaatctctgaatgatagtgcatcagacgatgaagatgcaaatgttatttctgcaaaccacggggataagaatgttggaaaaacaaaaactagcatgactttggtagaagaaaacattgaaaatgagttggatttgtatcaaggagttgataattttgatgtttcatgtggagagttccttgaatgttcacagcctgagagctccaagtctcctgctcaatccaatcaaactagctcctcagattgtggtgttcaaggttctacaattgtttatgtacccacaaggaaacaaaccgttgaactagctaacttcctttgcaaatctggtctcagagctgcagcatataatgcaaagatgcctaaatcccatttgaggcaagttcatcagcagtttcactgcaacgacttagaggttgtggtggctaccatagcatttggcatgggaattgacaaatcaaatgtcaggcgaattattcactatggtttaccgcagagtttagaagcatattatcaagaagctggccgtgctggtagagatggaaagctgtcagattgcactctatattataattttttgagaacaccgacactccttcctaataaaagaagtgaggagcaggcaaaggctgcatatagaatgctacgtgattgttttcactattctctgaatacttcaacatgtagagccaaaatattagtgaagtactttggcgaagactttggtcctgatggatgtcgcatgtgtgacatctgtactaatggccctcctcaaatgcatgatttcaaggaagaagcgattgtgttcatgaatgtgctccagggtcgaagtggcggtgaaactgatgagatgatttacagcagagtaccccattacagctctggcaggagagggtttggcgaggcacctaattttagaatggttgtcagtcatataagggaaaagcttcctaggtttgctgcgactgacaagatatggtggcaaggtctttcccgtatattagagggcctgagatacgtagaggaagcagctgaaactcctcgtgtctccatgcagtaccctgaactgacggaggacggattaaagtttcttagtagctcacagtcggaggcacctctgtatgcatacccggacgcggcaatgctcttggcaatgaaggagccaaggcccttctctggtttctccgattggggcaggggctgggccgatcccgagactcgccggcagcgtctggcgggcaagaaggccgggagaagaaagcggaagtggcgctcccgggggcggcagcagcagccgggcggcttcaccacggcgagggagagactgactgcgatactggcaaagaagaaaaaaagttgccacctgctgctcctgtggctccaagaagccctgatgattgctggccaaaccaagcggatggcgcctgtggctgcaagtgtgcgcgttcgatgtgtcacgccccggcaccgctcggtcggctga

SEQ ID NO: 73463 - DNA, 393 bp, Zea Mays
ctccccattccctgactcgtttggcaactgcccccacgacggagtgccatttgaatcccctcgcctcgctaccctctctcattcttggacagccaccaagcgccctcgtcgtgttcacctccccacgcaactgtcgcgtgtttgctgctcgcaaagtcgcgccctcgcctcaccggagcggtccctgaagcctcgccgcgtccgtgttccgccctcgctattcgagactgcgaaccattttcgagcttcgaggaatcgatagtcaagcttcggcgaccaagtgatcgaattcttcgagttctacgagatcgaagaccctgagcatctgtttggcgaaggttgcctttggtgcaatctctgctcaggtaaagaagaagtcgtcgaggcggatct

SEQ ID NO: 73464 - DNA, 270 bp, Zea Mays
ctgactcgtttggcaactgcccccacgacggagtgccatttgaatcccctcgcctcgctaccctctctcattcttggacagccaccaagcgccctcgtcgtgttcacctccccacgcaactgtcgcgtgtttgctgctcgcaaagtcgcgccctcgcctcaccggagcggtccctgaagcctcgccgcgtccgtgttccgccctcgctattcgaggttgcctttggtgcaatctctgctcaggtaaagaagaagtcgtcgaggcggatct

SEQ ID NO: 73465 - DNA, 1188 bp, Zea Mays
ctcacctaacccactcagcctaagatccccacaggtgtcaggtctcatccggagtcgtcgccaagaaccacagccaccgcgatggcgcagatcatcgatggcaaggccatcgccgccgacgtccgccgcgaggtcgccgccgatgtggccgcgctctcgtcggcccacggactcgtgccggggctggccgtggtcatcgtggggagcaggaaggactcgcagacgtacgtgaacatgaagcgcaaggcgtgcgccgaggtcggcatctgctccatcgacgtcgacctcccggaggacatctccgagaccgcgctcgtcgccgaggttcatcgcctcaacgctgaccccgccgtgcacgtatctgcaggcctccaggcttgcggtccagtggatttgcttccacttcctaagcatatcaacgaagagaagatactgagcgagatttccatcgagaaagatgtggatggcttccatcctctcaacattggcaagcttgcaatgaaaggcagagagccactgttcgtaccatgtacgccaaaggggtgcatggagctcttgtcaaggagcggagtcactgttaaaggtaagcgggcagttgtggttggtcgcagcaacatcgtcgggctacctgtatccctgctccttctgaaggcagatgcgaccgtatctgttgtgcactcgcggacccctgatcctgaaagcattgtacgcgaagccgacatagtcatcgcggcagctgggcaggctatgatgatcaaaggtgactggatcaagccaggtgctgcggtcatcgatgtcgggacgaactccgtcgacgaccctacccggaagtccgggtaccggctcgtcggcgatgtggatttcgcagcggcgagcaaggttgctgggtacctgactccggttcccggaggcgttggcccaatgacggtggcaatgctgctgaagaacacggtggatggggcaaagcgggggatagtcgagtagctacgttcatctcacttctcgttgctgtacgactgtgttgcaaggatgtgagctgactcgaaaagcgtgtgttggttggtgtaacaatctgtttcccaagaataagaatgatagtcacagctgctttcctgtttaataaatgcagtgaagaaagaattttggctttgctgctgcaattacagttgaaacaaagcttatggtttt

SEQ ID NO: 73466 - DNA, 1150 bp, Zea Mays
ctcacctaacccactcagcctaagatccccacaggtgtcaggtctcatccggagtcgtcgccaagaaccacagccaccgcgatggcgcagatcatcgatggcaaggccatcgccgccgacgtccgccgcgaggtcgccgccgatgtggccgcgctctcgtcggcccacggactcgtgccggggctggccgtggtcatcgtggggagcaggaaggactcgcagacgtacgtgaacatgaagcgcaaggcgtgcgccgaggtcggcatctgctccatcgacgtcgacctcccggaggacatctccgagaccgcgctcgtcgccgaggttcatcgcctcaacgctgaccccgccgtgcacgcttccacttcctaagcatatcaacgaagagaagatactgagcgagatttccatcgagaaagatgtggatggcttccatcctctcaacattggcaagcttgcaatgaaaggcagagagccactgttcgtaccatgtacgccaaaggggtgcatggagctcttgtcaaggagcggagtcactgttaaaggtaagcgggcagttgtggttggtcgcagcaacatcgtcgggctacctgtatccctgctccttctgaaggcagatgcgaccgtatctgttgtgcactcgcggacccctgatcctgaaagcattgtacgcgaagccgacatagtcatcgcggcagctgggcaggctatgatgatcaaaggtgactggatcaagccaggtgctgcggtcatcgatgtcgggacgaactccgtcgacgaccctacccggaagtccgggtaccggctcgtcggcgatgtggatttcgcagcggcgagcaaggttgctgggtacctgactccggttcccggaggcgttggcccaatgacggtggcaatgctgctgaagaacacggtggatggggcaaagcgggggatagtcgagtagctacgttcatctcacttctcgttgctgtacgactgtgttgcaaggatgtgagctgactcgaaaagcgtgtgttggttggtgtaacaatctgtttcccaagaataagaatgatagtcacagctgctttcctgtttaataaatgcagtgaagaaagaattttggctttgctgctgcaattacagttgaaacaaagcttatggtttt

SEQ ID NO: 73467 - DNA, 1352 bp, Zea Mays
gataacatcagagttggtgtctttagtgtctagggtatggttgccagttatgccatagttagtgatatgagtgctgctggacttggattaaacaagttttgttatgctggattgataactgcattcaagaacaagacaccaaccgctgaggaaactatggcgaagattcttgacttcgtcgggcagtcgaaaggttggcaatatgttgaaagagtatcaaaggacattgctgagaatataatgatgaatgtgtcagaggaagaactgtacaacctcccaacagcagaatatgtaaataggcgaggaggatttgtctttaaacaacatacagtttatcatgttgctctccaagcttgtgcagaattgcgaagcaaagagacacttgaagcacttctggaaatgttcaataaggataatagagatggatctacttatgatgcctacatggtgatgcaagctatgaggtgttacctacgatgtggagatattgattctgctgttaagatgtttgaagagtattcaagctcgaggtccccacccgctgagttgtatgcgacacttgctgagggagctatgattgggtacactccaagaggaatgcaacttgctcaagaaactatagagaagatgacttcaagaaattttttcttgaatgccaagatgggaactgatctcctacttgcagctgccggtgaaacggctggtggatatacgactgcaaattatgtctgggatctcctgcaaagccgtaaaatcactccaacacttcctgctgttgaggcataccacaagggtctgacggcgcgagagattccttctgacgatccacgacttctcaatgttacccgtgttttggacaacctgaagctccgatttggaccaagaagaaacactcagtaacttagaaacaatattgtccctgatacgatgcaatcagtaatttgtctttgttaggtttctggatgcgaaggcatgtttacagtccgaaaaaccaaggaagttcatcaggatgacgtaaagcagaaccaccaggcatttgaggggcatggcaggtgtgggaatcaaggtccggaaacggaagccagttgtttccagggttttctcgagaaatcttcacctgccaagcctgaagacctgaactcggatgcactgggttttgatttgaaatttaatgtatcctatgttgcctaccattgtttgacaaccatttatccgaacttttgatctagaagacagcgggaatatagttgtgcgcgagtcaagctgtaggtcgttcgttttgacgcttcctctatgtactatctattagtactagtctaatacccgtgtaatgatattgattagatgactaa

SEQ ID NO: 73468 - DNA, 77 bp, Zea Mays
gtctctacgtgttcattgaacatgctgccgcaccagatgatacgttgctccgcttggttcaaggtgtgcttgatccc

SEQ ID NO: 73469 - DNA, 2166 bp, Zea Mays
gttgtcacaggctcaccgagtcctggactcctggttgccggttcaccgtcggagcctgacgtcacgccacacgccacgcgcgggtaacacggccggcgcctgcacggcgcccgcggctccgcgcgctcgtcctacttgccatccgtcactggacgggccacgcgactgcgatccctgccacacgagcgcaacgcgccatgggtccggcgtgccagtgagagcgggagaagctcggacatctccgtggagggacatcttctccagcgattcagcgcgggatcctgctggactggcctgatccctccgtgctggtgtcggcgagcatgcaaggaaggatgcgaggcgcgcggcggagcgcgcgcggggaatcgtcccggaaggcggcgggccgcgaggtggagccattcacgctgtgcggcgagatgtcccatctcaccagggccacgtcagagccgtgccgcagggctcgcggcgccgccttcgcccgccgggcgaggcccttctcggcgtacgagctggtgtcggcgcgggaggccggccgcgcgggcggcgccgggttctccgcggccgatcgagcctacctcggcaggcagcacatccccaccaaggggccgtggggcgtcgacgacgtggaaagcgaggcctacgtctcgcagttctccgccgatggctcgttgctcatcgcggggtttcggggaagccgcatcagagtctacgacgccgagaaagggtggaagatccacaaggatataagctgcagaagtgtgcactggacggtttcagatattgctctctcacctgaccaacgattccttgcctatgcaagtctgacacctattgttcacattgtgaatgttcagaatgctggaaaggaatcacatgctaatattactgaaattcatgagggattggatttaaccggtggtgatgaggatgaggactttggaatattttctgttaaattctccaaagatggtaaagaagttgttgttgggaacaatgaaaagtcaatatatgtttatgacctttcagcaaataaagtgtcagcccgcatccgtgctcataaagctgatgtcaatgctgttaccttcgctgatgaaactggaaacgtgttgtactctggaagtgatgatagtctctgtaaggtgtgggacaggcgttgcctttcaggggaaaagtcagcagagaatcaaactttgggacatcaggaaaatgtcttccgtcgtgagatctcgcccagtgagtctagtggactgggactataggtggatgccatttccatcagaagctcataatcttaagcatccaggtgatcagtctgtggccacatacagaggccattcagttctgcgaacacttatccgttgctatttctcccctgtgcacagcacgggtcagaggtacatatacacgggatccagtgacaagtctgtacatatttatgacgtggtaaccggggaggctgtcaagaggctttcgtggcatggctccatcatcagagactgcacctggcatccatactacccaacgctcgtcagctcctcctgggacggcttcgttgcccggtgggaggcctcgggcgacgacgacgaccattcggtgctcgtcgccgacgagatgagaggaagcccttactaccggagatacggcgatcccttggtgatgtagagatgtctgcaaagtggttaacaccaaatggtagtgagcatgtactttgctttgttgtttgggaattacaactgagcagcatgtacagtgccgtttggctcatgtggttgtatagccttacgataaataatatgtagggatacagaaagaacacatgagatcgaagcgactttataaatcctatggaatttatagaaacagacaagatcctctttccttgtttttaaaaactttataaatactttttcgaattttgattggattggaatacaccgttgttggattcagaaattatccattcatctcactcactatgggacaatgtaccgcatccacggctgttcatctattaatggcggtatttatctgtcacgaccacaggtgactaagtgttcctagtagctgtcagtagctgtcaagccagtactttgggccaagattagtgtatctgtgatttgttcttgagctatatgattaggggatcttagtcccggtcca

SEQ ID NO: 73470 - DNA, 2577 bp, Zea Mays
gttgtcacaggctcaccgagtcctggactcctggttgccggttcaccgtcggagcctgacgtcacgccacacgccacgcgcgggtaacacggccggcgcctgcacggcgcccgcggctccgcgcgctcgtcctacttgccatccgtcactggacgggccacgcgactgcgatccctgccacacgagcgcaacgcgccatgggtccggcgtgccagtgagagcgggagaagctcggacatctccgcgattcagcgcgggatcctgctggactggcctgatccctccgtgctggtgtcggcgagcatgcaaggaaggatgcgaggcgcgcggcggagcgcgcgcggggaatcgtcccggaaggcggcgggccgcgaggtggagccattcacgctgtgcggcgagatgtcccatctcaccagggccacgtcagagccgtgccgcagggctcgcggcgccgccttcgcccgccgggcgaggcccttctcggcgtacgagctggtgtcggcgcgggaggccggccgcgcgggcggcgccgggttctccgcggccgatcgagcctacctcggcaggcagcacatccccaccaaggggccgtggggcgtcgacgacgtggaaagcgaggcctacgtctcgcagttctccgccgatggctcgttgctcatcgcggggtttcggggaagccgcatcagagtctacgacgccgagaaagggtggaagatccacaaggatataagctgcagaagtgtgcactggacggtttcagatattgctctctcacctgaccaacgattccttgcctatgcaagtctgacacctattgttcacattgtgaatgttcagaatgctggaaaggaatcacatgctaatattactgaaattcatgagggattggatttaaccggtggtgatgaggatgaggactttggaatattttctgttaaattctccaaagatggtaaagaagttgttgttgggaacaatgaaaagtcaatatatgtttatgacctttcagcaaataaagtgtcagcccgcatccgtgctcataaagctgatgtcaatgctgttaccttcgctgatgaaactggaaacgtgttgtactctggaagtgatgatagtctctgtaaggtgtgggacaggcgttgcctttcaggggaaaagtcagcaggtattttgacaggtcatttagatggagttacatttatcgatagccgtggtgatgggcgttatttcatctccaattgcaaggatcagagaatcaaactttgggacatcaggaaaatgtcttccgtcgtgagatctcgcccagtgagtctagtggactgggactataggtggatgccatttccatcagaagctcataatcttaagcatccaggtgatcagtctgtggccacatacagaggccattcagttctgcgaacacttatccgttgctatttctcccctgtgcacaggtcaggaacagcagatatttttatttatgtcaccagcatactgaaattttcctttgaaatactttcaaaaggttacatttgttagtggaaagttgaccgttaacttgagtaggaggccttgcagttgtgctacctgcttctaagcttgtaattagtgatatataatgaatatttggtctaatttttgtatttatctatgtaattaaggcattgcttcgccttacgctttagcgcttaaaaggtaaaaaggaggtcgataattaagatcatacatctaaaacaattatcagtgatgacatgaataatttccatgttcagttcatatcgttgtgctttctgtttcagcacgggtcagaggtacatatacacgggatccagtgacaagtctgtacatatttatgacgtggtaaccggggaggctgtcaagaggctttcgtggcatggctccatcatcagagactgcacctggcatccatactacccaacgctcgtcagctcctcctgggacggcttcgttgcccggtgggaggcctcgggcgacgacgacgaccattcggtgctcgtcgccgacgagatgagaggaagcccttactaccggagatacggcgatcccttggtgatgtagagatgtctgcaaagtggttaacaccaaatggtagtgagcatgtactttgctttgttgtttgggaattacaactgagcagcatgtacagtgccgtttggctcatgtggttgtatagccttacgataaataatatgtagggatacagaaagaacacatgagatcgaagcgactttataaatcctatggaatttatagaaacagacaagatcctctttccttgtttttaaaaactttataaatactttttcgaattttgattggattggaatacaccgttgttggattcagaaattatccattcatctcactcactatgggacaatgtaccgcatccacggctgttcatctattaatggcggtatttatctgtcacgaccacaggtgactaagtgttcctagtagctgtcagtagctgtcaagccagtactttgggccaagattagtgtatctgtgatttgttcttgagctatatgattaggggatcttagtcccggtcca

SEQ ID NO: 73471 - DNA, 2755 bp, Zea Mays
cctggactcctggttgccggttcaccgtcggagcctgacgtcacgccacacgccacgcgcgggtaacacggccggcgcctgcacggcgcccgcggctccgcgcgctcgtcctacttgccatccgtcactggacgggccacgcgactgcgatccctgccacacgagcgcaacgcgccatgggtccggcgtgccagtgagagcgggagaagctcggacatctccgtggagggacatcttctccagcgattcagcgcgggatcctgctggactggcctgatccctccgtgctggtgtcggcgagcatgcaaggaaggatgcgaggcgcgcggcggagcgcgcgcggggaatcgtcccggaaggcggcgggccgcgaggtggagccattcacgctgtgcggcgagatgtcccatctcaccagggccacgtcagagccgtgccgcagggctcgcggcgccgccttcgcccgccgggcgaggcccttctcggcgtacgagctggtgtcggcgcgggaggccggccgcgcgggcggcgccgggttctccgcggccgatcgagcctacctcggcaggcagcacatccccaccaaggggccgtggggcgtcgacgacgtggaaagcgaggcctacgtctcgcagttctccgccgatggctcgttgctcatcgcggggtttcggggaagccgcatcagagtctacgacgccgagaaagggtggaagatccacaaggatataagctgcagaagtgtgcactggacggtttcagatattgctctctcacctgaccaacgattccttgcctatgcaagtctgacacctattgttcacattgtgaatgttcagaatgctggaaaggaatcacatgctaatattactgaaattcatgagggattggatttaaccggtggtgatgaggatgaggactttggaatattttctgttaaattctccaaagatggtaaagaagttgttgttgggaacaatgaaaagtcaatatatgtttatgacctttcagcaaataaagtgtcagcccgcatccgtgctcataaagctgatgtcaatgctgttaccttcgctgatgaaactggaaacgtgttgtactctggaagtgatgatagtctctgtaaggtgtgggacaggcgttgcctttcaggggaaaagtcagcagagaatcaaactttgggacatcaggaaaatgtcttccgtcgtgagatcgtagggtcttgcattatagcaatttattatgtaggatattttttttactggaccctaagcttctctgaaatttgctataggacattaaaaattattaggacactacctagtgtcttctagattttttttgacagtgtcaggcagcaataaaaaaattggacaatgccttgagcaaaattatcctgctatgtacttttaagttccatttcctttttttgcgggtctagtttctattgttttgaatttgattctgttgttttcacagtcgcccagtgagtctagtggactgggactataggtggatgccatttccatcagaagctcataatcttaagcatccaggtgatcagtctgtggccacatacagaggccattcagttctgcgaacacttatccgttgctatttctcccctgtgcacaggtcaggaacagcagatatttttatttatgtcaccagcatactgaaattttcctttgaaatactttcaaaaggttacatttgttagtggaaagttgaccgttaacttgagtaggaggccttgcagttgtgctacctgcttctaagcttgtaattagtgatatataatgaatatttggtctaatttttgtatttatctatgtaattaaggcattgcttcgccttacgctttagcgcttaaaaggtaaaaaggaggtcgataattaagatcatacatctaaaacaattatcagtgatgacatgaataatttccatgttcagttcatatcgttgtgctttctgtttcagcacgggtcagaggtacatatacacgggatccagtgacaagtctgtacatatttatgacgtggtaaccggggaggctgtcaagaggctttcgtggcatggctccatcatcagagactgcacctggcatccatactacccaacgctcgtcagctcctcctgggacggcttcgttgcccggtgggaggcctcgggcgacgacgacgaccattcggtgctcgtcgccgacgagatgagaggaagcccttactaccggagatacggcgatcccttggtgatgtagagatgtctgcaaagtggttaacaccaaatggtagtgagcatgtactttgctttgttgtttgggaattacaactgagcagcatgtacagtgccgtttggctcatgtggttgtatagccttacgataaataatatgtagggatacagaaagaacacatgagatcgaagcgactttataaatcctatggaatttatagaaacagacaagatcctctttccttgtttttaaaaactttataaatactttttcgaattttgattggattggaatacaccgttgttggattcagaaattatccattcatctcactcactatgggacaatgtaccgcatccacggctgttcatctattaatggcggtatttatctgtcacgaccacaggtgactaagtgttcctagtagctgtcagtagctgtcaagccagtactttgggccaagattagtgtatctgtgatttgttcttgagctatatgattaggggatcttagtcccggtcca

SEQ ID NO: 73472 - DNA, 2441 bp, Zea Mays
cgcgcgggtaacacggccggcgcctgcacggcgcccgcggctccgcgcgctcgtcctacttgccatccgtcactggacgggccacgcgactgcgatccctgccacacgagcgcaacgcgccatgggtccggcgtgccagtgagagcgggagaagctcggacatctccgtggagggacatcttctccagcgattcagcgcgggatcctgctggactggcctgatccctccgtgctggtgtcggcgagcatgcaaggaaggatgcgaggcgcgcggcggagcgcgcgcggggaatcgtcccggaaggcggcgggccgcgaggtggagccattcacgctgtgcggcgagatgtcccatctcaccagggccacgtcagagccgtgccgcagggctcgcggcgccgccttcgcccgccgggcgaggcccttctcggcgtacgagctggtgtcggcgcgggaggccggccgcgcgggcggcgccgggttctccgcggccgatcgagcctacctcggcaggcagcacatccccaccaaggggccgtggggcgtcgacgacgtggaaagcgaggcctacgtctcgcagttctccgccgatggctcgttgctcatcgcggggtttcggggaagccgcatcagagtctacgacgccgagaaagggtggaagatccacaaggatataagctgcagaagtgtgcactggacggtttcagatattgctctctcacctgaccaacgattccttgcctatgcaagtctgacacctattgttcacattgtgaatgttcagaatgctggaaaggaatcacatgctaatattactgaaattcatgagggattggatttaaccggtggtgatgaggatgaggactttggaatattttctgttaaattctccaaagatggtaaagaagttgttgttgggaacaatgaaaagtcaatatatgtttatgacctttcagcaaataaagtgtcagcccgcatccgtgctcataaagctgatgtcaatgctgttaccttcgctgatgaaactggaaacgtgttgtactctggaagtgatgatagtctctgtaaggtgtgggacaggcgttgcctttcaggggaaaagtcagcaggtattttgacaggtcatttagatggagttacatttatcgatagccgtggtgatgggcgttatttcatctccaattgcaaggatcagagaatcaaactttgggacatcaggaaaatgtcttccgtcgtgagatcgtagggtcttgcattatagcaatttattatgtaggatattttttttactggaccctaagcttctctgaaatttgctataggacattaaaaattattaggacactacctagtgtcttctagattttttttgacagtgtcaggcagcaataaaaaaattggacaatgccttgagcaaaattatcctgctatgtacttttaagttccatttcctttttttgcgggtctagtttctattgttttgaatttgattctgttgttttcacagtcgcccagtgagtctagtggactgggactataggtggatgccatttccatcagaagctcataatcttaagcatccaggtgatcagtctgtggccacatacagaggccattcagttctgcgaacacttatccgttgctatttctcccctgtgcacagcacgggtcagaggtacatatacacgggatccagtgacaagtctgtacatatttatgacgtggtaaccggggaggctgtcaagaggctttcgtggcatggctccatcatcagagactgcacctggcatccatactacccaacgctcgtcagctcctcctgggacggcttcgttgcccggtgggaggcctcgggcgacgacgacgaccattcggtgctcgtcgccgacgagatgagaggaagcccttactaccggagatacggcgatcccttggtgatgtagagatgtctgcaaagtggttaacaccaaatggtagtgagcatgtactttgctttgttgtttgggaattacaactgagcagcatgtacagtgccgtttggctcatgtggttgtatagccttacgataaataatatgtagggatacagaaagaacacatgagatcgaagcgactttataaatcctatggaatttatagaaacagacaagatcctctttccttgtttttaaaaactttataaatactttttcgaattttgattggattggaatacaccgttgttggattcagaaattatccattcatctcactcactatgggacaatgtaccgcatccacggctgttcatctattaatggcggtatttatctgtcacgaccacaggtgactaagtgttcctagtagctgtcagtagctgtcaagccagtactttgggccaagattagtgtatctgtgatttgttcttgagctatatgattaggggatcttagtcccggtcca

SEQ ID NO: 73473 - DNA, 2043 bp, Zea Mays
cgcgcgggtaacacggccggcgcctgcacggcgcccgcggctccgcgcgctcgtcctacttgccatccgtcactggacgggccacgcgactgcgatccctgccacacgagcgcaacgcgccatgggtccggcgtgccagtgagagcgggagaagctcggacatctccgtggagggacatcttctccagcgattcagcgcgggatcctgctggactggcctgatccctccgtgctggtgtcggcgagcatgcaaggaaggatgcgaggcgcgcggcggagcgcgcgcggggaatcgtcccggaaggcggcgggccgcgaggtggagccattcacgctgtgcggcgagatgtcccatctcaccagggccacgtcagagccgtgccgcagggctcgcggcgccgccttcgcccgccgggcgaggcccttctcggcgtacgagctggtgtcggcgcgggaggccggccgcgcgggcggcgccgggttctccgcggccgatcgagcctacctcggcaggcagcacatccccaccaaggggccgtggggcgtcgacgacgtggaaagcgaggcctacgtctcgcagttctccgccgatggctcgttgctcatcgcggggtttcggggaagccgcatcagagtctacgacgccgagaaagggtggaagatccacaaggatataagctgcagaagtgtgcactggacggtttcagatattgctctctcacctgaccaacgattccttgcctatgcaagtctgacacctattgttcacattgtgaatgttcagaatgctggaaaggaatcacatgctaatattactgaaattcatgagggattggatttaaccggtggtgatgaggatgaggactttggaatattttctgttaaattctccaaagatggtaaagaagttgttgttgggaacaatgaaaagtcaatatatgtttatgacctttcagcaaataaagtgtcagcccgcatccgtgctcataaagctgatgtcaatgctgttaccttcgctgatgaaactggaaacgtgttgtactctggaagtgatgatagtctctgtaaggtgtgggacaggcgttgcctttcaggggaaaagtcagcagtcgcccagtgagtctagtggactgggactataggtggatgccatttccatcagaagctcataatcttaagcatccaggtgatcagtctgtggccacatacagaggccattcagttctgcgaacacttatccgttgctatttctcccctgtgcacagcacgggtcagaggtacatatacacgggatccagtgacaagtctgtacatatttatgacgtggtaaccggggaggctgtcaagaggctttcgtggcatggctccatcatcagagactgcacctggcatccatactacccaacgctcgtcagctcctcctgggacggcttcgttgcccggtgggaggcctcgggcgacgacgacgaccattcggtgctcgtcgccgacgagatgagaggaagcccttactaccggagatacggcgatcccttggtgatgtagagatgtctgcaaagtggttaacaccaaatggtagtgagcatgtactttgctttgttgtttgggaattacaactgagcagcatgtacagtgccgtttggctcatgtggttgtatagccttacgataaataatatgtagggatacagaaagaacacatgagatcgaagcgactttataaatcctatggaatttatagaaacagacaagatcctctttccttgtttttaaaaactttataaatactttttcgaattttgattggattggaatacaccgttgttggattcagaaattatccattcatctcactcactatgggacaatgtaccgcatccacggctgttcatctattaatggcggtatttatctgtcacgaccacaggtgactaagtgttcctagtagctgtcagtagctgtcaagccagtactttgggccaagattagtgtatctgtgatttgttcttgagctatatgattaggggatcttagtcccggtcca

SEQ ID NO: 73474 - DNA, 2809 bp, Zea Mays
cggccggcgcctgcacggcgcccgcggctccgcgcgctcgtcctacttgccatccgtcactggacgggccacgcgactgcgatccctgccacacgagcgcaacgcgccatgggtccggcgtgccagtgagagcgggagaagctcggacatctccggtatggttccactggtccaggggacaaaatctgctgccagtttctgcaattgcttgttttttttcgctgtgttttcagtggagggacatcttctccagcgattcagcgcgggatcctgctggactggcctgatccctccgtgctggtgtcggcgagcatgcaaggaaggatgcgaggcgcgcggcggagcgcgcgcggggaatcgtcccggaaggcggcgggccgcgaggtggagccattcacgctgtgcggcgagatgtcccatctcaccagggccacgtcagagccgtgccgcagggctcgcggcgccgccttcgcccgccgggcgaggcccttctcggcgtacgagctggtgtcggcgcgggaggccggccgcgcgggcggcgccgggttctccgcggccgatcgagcctacctcggcaggcagcacatccccaccaaggggccgtggggcgtcgacgacgtggaaagcgaggcctacgtctcgcagttctccgccgatggctcgttgctcatcgcggggtttcggggaagccgcatcagagtctacgacgccgagaaagggtggaagatccacaaggatataagctgcagaagtgtgcactggacggtttcagatattgctctctcacctgaccaacgattccttgggaacatgcctgttttcatcgagtgcatctgatcactttgcaggcctatgcaagtctgacacctattgttcacattgtgaatgttcagaatgctggaaaggaatcacatgctaatattactgaaattcatgagggattggatttaaccggtggtgatgaggatgaggactttggaatattttctgttaaattctccaaagatggtaaagaagttgttgttgggaacaatgaaaagtcaatatatgtttatgacctttcagcaaataaagtgtcagcccgcatccgtgctcataaagctgatgtcaatgctgttaccttcgctgatgaaactggaaacgtgttgtactctggaagtgatgatagtctctgtaaggtgtgggacaggcgttgcctttcaggggaaaagtcagcagagaatcaaactttgggacatcaggaaaatgtcttccgtcgtgagatcgtagggtcttgcattatagcaatttattatgtaggatattttttttactggaccctaagcttctctgaaatttgctataggacattaaaaattattaggacactacctagtgtcttctagattttttttgacagtgtcaggcagcaataaaaaaattggacaatgccttgagcaaaattatcctgctatgtacttttaagttccatttcctttttttgcgggtctagtttctattgttttgaatttgattctgttgttttcacagtcgcccagtgagtctagtggactgggactataggtggatgccatttccatcagaagctcataatcttaagcatccaggtgatcagtctgtggccacatacagaggccattcagttctgcgaacacttatccgttgctatttctcccctgtgcacaggtcaggaacagcagatatttttatttatgtcaccagcatactgaaattttcctttgaaatactttcaaaaggttacatttgttagtggaaagttgaccgttaacttgagtaggaggccttgcagttgtgctacctgcttctaagcttgtaattagtgatatataatgaatatttggtctaatttttgtatttatctatgtaattaaggcattgcttcgccttacgctttagcgcttaaaaggtaaaaaggaggtcgataattaagatcatacatctaaaacaattatcagtgatgacatgaataatttccatgttcagttcatatcgttgtgctttctgtttcagcacgggtcagaggtacatatacacgggatccagtgacaagtctgtacatatttatgacgtggtaaccggggaggctgtcaagaggctttcgtggcatggctccatcatcagagactgcacctggcatccatactacccaacgctcgtcagctcctcctgggacggcttcgttgcccggtgggaggcctcgggcgacgacgacgaccattcggtgctcgtcgccgacgagatgagaggaagcccttactaccggagatacggcgatcccttggtgatgtagagatgtctgcaaagtggttaacaccaaatggtagtgagcatgtactttgctttgttgtttgggaattacaactgagcagcatgtacagtgccgtttggctcatgtggttgtatagccttacgataaataatatgtagggatacagaaagaacacatgagatcgaagcgactttataaatcctatggaatttatagaaacagacaagatcctctttccttgtttttaaaaactttataaatactttttcgaattttgattggattggaatacaccgttgttggattcagaaattatccattcatctcactcactatgggacaatgtaccgcatccacggctgttcatctattaatggcggtatttatctgtcacgaccacaggtgactaagtgttcctagtagctgtcagtagctgtcaagccagtactttgggccaagattagtgtatctgtgatttgttcttgagctatatgattaggggatcttagtcccggtcca

SEQ ID NO: 73475 - DNA, 2318 bp, Zea Mays
cggccggcgcctgcacggcgcccgcggctccgcgcgctcgtcctacttgccatccgtcactggacgggccacgcgactgcgatccctgccacacgagcgcaacgcgccatgggtccggcgtgccagtgagagcgggagaagctcggacatctccgtggagggacatcttctccagcgattcagcgcgggatcctgctggactggcctgatccctccgtgctggtgtcggcgagcatgcaaggaaggatgcgaggcgcgcggcggagcgcgcgcggggaatcgtcccggaaggcggcgggccgcgaggtggagccattcacgctgtgcggcgagatgtcccatctcaccagggccacgtcagagccgtgccgcagggctcgcggcgccgccttcgcccgccgggcgaggcccttctcggcgtacgagctggtgtcggcgcgggaggccggccgcgcgggcggcgccgggttctccgcggccgatcgagcctacctcggcaggcagcacatccccaccaaggggccgtggggcgtcgacgacgtggaaagcgaggcctacgtctcgcagttctccgccgatggctcgttgctcatcgcggggtttcggggaagccgcatcagagtctacgacgccgagaaagggtggaagatccacaaggatataagctgcagaagtgtgcactggacggtttcagatattgctctctcacctgaccaacgattccttgcctatgcaagtctgacacctattgttcacattgtgaatgttcagaatgctggaaaggaatcacatgctaatattactgaaattcatgagggattggatttaaccggtggtgatgaggatgaggactttggaatattttctgttaaattctccaaagatggtaaagaagttgttgttgggaacaatgaaaagtcaatatatgtttatgacctttcagcaaataaagtgtcagcccgcatccgtgctcataaagctgatgtcaatgctgttaccttcgctgatgaaactggaaacgtgttgtactctggaagtgatgatagtctctgtaaggtgtgggacaggcgttgcctttcaggggaaaagtcagcagagaatcaaactttgggacatcaggaaaatgtcttccgtcgtgagatctcgcccagtgagtctagtggactgggactataggtggatgccatttccatcagaagctcataatcttaagcatccaggtgatcagtctgtggccacatacagaggccattcagttctgcgaacacttatccgttgctatttctcccctgtgcacaggtcaggaacagcagatatttttatttatgtcaccagcatactgaaattttcctttgaaatactttcaaaaggttacatttgttagtggaaagttgaccgttaacttgagtaggaggccttgcagttgtgctacctgcttctaagcttgtaattagtgatatataatgaatatttggtctaatttttgtatttatctatgtaattaaggcattgcttcgccttacgctttagcgcttaaaagcacgggtcagaggtacatatacacgggatccagtgacaagtctgtacatatttatgacgtggtaaccggggaggctgtcaagaggctttcgtggcatggctccatcatcagagactgcacctggcatccatactacccaacgctcgtcagctcctcctgggacggcttcgttgcccggtgggaggcctcgggcgacgacgacgaccattcggtgctcgtcgccgacgagatgagaggaagcccttactaccggagatacggcgatcccttggtgatgtagagatgtctgcaaagtggttaacaccaaatggtagtgagcatgtactttgctttgttgtttgggaattacaactgagcagcatgtacagtgccgtttggctcatgtggttgtatagccttacgataaataatatgtagggatacagaaagaacacatgagatcgaagcgactttataaatcctatggaatttatagaaacagacaagatcctctttccttgtttttaaaaactttataaatactttttcgaattttgattggattggaatacaccgttgttggattcagaaattatccattcatctcactcactatgggacaatgtaccgcatccacggctgttcatctattaatggcggtatttatctgtcacgaccacaggtgactaagtgttcctagtagctgtcagtagctgtcaagccagtactttgggccaagattagtgtatctgtgatttgttcttgagctatatgattaggggatcttagtcccggtcca

SEQ ID NO: 73476 - DNA, 2552 bp, Zea Mays
cggccggcgcctgcacggcgcccgcggctccgcgcgctcgtcctacttgccatccgtcactggacgggccacgcgactgcgatccctgccacacgagcgcaacgcgccatgggtccggcgtgccagtgagagcgggagaagctcggacatctccgtggagggacatcttctccagcgattcagcgcgggatcctgctggactggcctgatccctccgtgctggtgtcggcgagcatgcaaggaaggatgcgaggcgcgcggcggagcgcgcgcggggaatcgtcccggaaggcggcgggccgcgaggtggagccattcacgctgtgcggcgagatgtcccatctcaccagggccacgtcagagccgtgccgcagggctcgcggcgccgccttcgcccgccgggcgaggcccttctcggcgtacgagctggtgtcggcgcgggaggccggccgcgcgggcggcgccgggttctccgcggccgatcgagcctacctcggcaggcagcacatccccaccaaggggccgtggggcgtcgacgacgtggaaagcgaggcctacgtctcgcagttctccgccgatggctcgttgctcatcgcggggtttcggggaagccgcatcagagtctacgacgccgagaaagggtggaagatccacaaggatataagctgcagaagtgtgcactggacggtttcagatattgctctctcacctgaccaacgattccttgggaacatgcctgttttcatcgagtgcatctgatcactttgcaggcctatgcaagtctgacacctattgttcacattgtgaatgttcagaatgctggaaaggaatcacatgctaatattactgaaattcatgagggattggatttaaccggtggtgatgaggatgaggactttggaatattttctgttaaattctccaaagatggtaaagaagttgttgttgggaacaatgaaaagtcaatatatgtttatgacctttcagcaaataaagtgtcagcccgcatccgtgctcataaagctgatgtcaatgctgttaccttcgctgatgaaactggaaacgtgttgtactctggaagtgatgatagtctctgtaaggtgtgggacaggcgttgcctttcaggggaaaagtcagcaggtattttgacaggtcatttagatggagttacatttatcgatagccgtggtgatgggcgttatttcatctccaattgcaaggatcagagaatcaaactttgggacatcaggaaaatgtcttccgtcgtgagatctcgcccagtgagtctagtggactgggactataggtggatgccatttccatcagaagctcataatcttaagcatccaggtgatcagtctgtggccacatacagaggccattcagttctgcgaacacttatccgttgctatttctcccctgtgcacaggtcaggaacagcagatatttttatttatgtcaccagcatactgaaattttcctttgaaatactttcaaaaggttacatttgttagtggaaagttgaccgttaacttgagtaggaggccttgcagttgtgctacctgcttctaagcttgtaattagtgatatataatgaatatttggtctaatttttgtatttatctatgtaattaaggcattgcttcgccttacgctttagcgcttaaaaggtaaaaaggaggtcgataattaagatcatacatctaaaacaattatcagtgatgacatgaataatttccatgttcagttcatatcgttgtgctttctgtttcagcacgggtcagaggtacatatacacgggatccagtgacaagtctgtacatatttatgacgtggtaaccggggaggctgtcaagaggctttcgtggcatggctccatcatcagagactgcacctggcatccatactacccaacgctcgtcagctcctcctgggacggcttcgttgcccggtgggaggcctcgggcgacgacgacgaccattcggtgctcgtcgccgacgagatgagaggaagcccttactaccggagatacggcgatcccttggtgatgtagagatgtctgcaaagtggttaacaccaaatggtagtgagcatgtactttgctttgttgtttgggaattacaactgagcagcatgtacagtgccgtttggctcatgtggttgtatagccttacgataaataatatgtagggatacagaaagaacacatgagatcgaagcgactttataaatcctatggaatttatagaaacagacaagatcctctttccttgtttttaaaaactttataaatactttttcgaattttgattggattggaatacaccgttgttggattcagaaattatccattcatctcactcactatgggacaatgtaccgcatccacggctgttcatctattaatggcggtatttatctgtcacgaccacaggtgactaagtgttcctagtagctgtcagtagctgtcaagccagtactttgggccaagattagtgtatctgtgatttgttcttgagctatatgattaggggatcttagtcccggtcca

SEQ ID NO: 73477 - DNA, 2375 bp, Zea Mays
cggccggcgcctgcacggcgcccgcggctccgcgcgctcgtcctacttgccatccgtcactggacgggccacgcgactgcgatccctgccacacgagcgcaacgcgccatgggtccggcgtgccagtgagagcgggagaagctcggacatctccgtggagggacatcttctccagcgattcagcgcgggatcctgctggactggcctgatccctccgtgctggtgtcggcgagcatgcaaggaaggatgcgaggcgcgcggcggagcgcgcgcggggaatcgtcccggaaggcggcgggccgcgaggtggagccattcacgctgtgcggcgagatgtcccatctcaccagggccacgtcagagccgtgccgcagggctcgcggcgccgccttcgcccgccgggcgaggcccttctcggcgtacgagctggtgtcggcgcgggaggccggccgcgcgggcggcgccgggttctccgcggccgatcgagcctacctcggcaggcagcacatccccaccaaggggccgtggggcgtcgacgacgtggaaagcgaggcctacgtctcgcagttctccgccgatggctcgttgctcatcgcggggtttcggggaagccgcatcagagtctacgacgccgagaaagggtggaagatccacaaggatataagctgcagaagtgtgcactggacggtttcagatattgctctctcacctgaccaacgattccttgcctatgcaagtctgacacctattgttcacattgtgaatgttcagaatgctggaaaggaatcacatgctaatattactgaaattcatgagggattggatttaaccggtggtgatgaggatgaggactttggaatattttctgttaaattctccaaagatggtaaagaagttgttgttgggaacaatgaaaagtcaatatatgtttatgacctttcagcaaataaagtgtcagcccgcatccgtgctcataaagctgatgtcaatgctgttaccttcgctgatgaaactggaaacgtgttgtactctggaagtgatgatagtctctgtaaggtgtgggacaggcgttgcctttcaggggaaaagtcagcagtcgcccagtgagtctagtggactgggactataggtggatgccatttccatcagaagctcataatcttaagcatccaggtgatcagtctgtggccacatacagaggccattcagttctgcgaacacttatccgttgctatttctcccctgtgcacaggtcaggaacagcagatatttttatttatgtcaccagcatactgaaattttcctttgaaatactttcaaaaggttacatttgttagtggaaagttgaccgttaacttgagtaggaggccttgcagttgtgctacctgcttctaagcttgtaattagtgatatataatgaatatttggtctaatttttgtatttatctatgtaattaaggcattgcttcgccttacgctttagcgcttaaaaggtaaaaaggaggtcgataattaagatcatacatctaaaacaattatcagtgatgacatgaataatttccatgttcagttcatatcgttgtgctttctgtttcagcacgggtcagaggtacatatacacgggatccagtgacaagtctgtacatatttatgacgtggtaaccggggaggctgtcaagaggctttcgtggcatggctccatcatcagagactgcacctggcatccatactacccaacgctcgtcagctcctcctgggacggcttcgttgcccggtgggaggcctcgggcgacgacgacgaccattcggtgctcgtcgccgacgagatgagaggaagcccttactaccggagatacggcgatcccttggtgatgtagagatgtctgcaaagtggttaacaccaaatggtagtgagcatgtactttgctttgttgtttgggaattacaactgagcagcatgtacagtgccgtttggctcatgtggttgtatagccttacgataaataatatgtagggatacagaaagaacacatgagatcgaagcgactttataaatcctatggaatttatagaaacagacaagatcctctttccttgtttttaaaaactttataaatactttttcgaattttgattggattggaatacaccgttgttggattcagaaattatccattcatctcactcactatgggacaatgtaccgcatccacggctgttcatctattaatggcggtatttatctgtcacgaccacaggtgactaagtgttcctagtagctgtcagtagctgtcaagccagtactttgggccaagattagtgtatctgtgatttgttcttgagctatatgattaggggatcttagtcccggtcca

SEQ ID NO: 73478 - DNA, 4215 bp, Zea Mays
cggccggcgcctgcacggcgcccgcggctccgcgcgctcgtcctacttgccatccgtcactggacgggccacgcgactgcgatccctgccacacgagcgcaacgcgccatgggtccggcgtgccagtgagagcgggagaagctcggacatctccggtatggttccactggtccaggggacaaaatctgctgccagtttctgcaattgcttgttttttttcgctgtgttttcagtggagggacatcttctccagcgattcagcgcgggatcctgctggactggcctgatccctccgtgctggtgtcggcgagcatgcaaggaaggatgcgaggcgcgcggcggagcgcgcgcggggaatcgtcccggaaggcggcgggccgcgaggtggagccattcacgctgtgcggcgagatgtcccatctcaccagggccacgtcagagccgtgccgcagggctcgcggcgccgccttcgcccgccgggcgaggcccttctcggcgtacgagctggtgtcggcgcgggaggccggccgcgcgggcggcgccgggttctccgcggccgatcgagcctacctcggcaggcagcacatccccaccaaggggccgtggggcgtcgacgacgtggaaagcgaggcctacgtctcgcagttctccgccgatggctcgttgctcatcgcggggtttcggggaagccgcatcagagtctacgacgccgagaaagggtggaagatccacaaggatataagctgcagaagtgtgcactggacggtttcagatattgctctctcacctgaccaacgattccttgcctatgcaagtctgacacctattgttcacattgtgaatgttcagaatgctggaaaggaatcacatgctaatattactgaaattcatgagggattggatttaaccggtggtgatgaggatgaggactttggaatattttctgttaaattctccaaagatggtaaagaagttgttgttgggaacaatgaaaagtcaatatatgtttatgacctttcagcaaataaagtgtcagcccgcatccgtgctcataaagcggctcccgcctgtacaaatatacaatcccaccgaccctagaggtcaaggcaagcaattaaagattgttgtgtttcttcaatggtattagagcaagtcgacattgacctcatcaacgacaagattccgtagcatcatccagctcagtagtactgacgactctcttaggtcaaagcattgttgtaaagctcaacaagaccaacttcgctctttgaattcatgagctctgaggtgcgcaactacaaggctccctagatggcatgattgtagcgtccgacaagatctccgtcaagcaagatggcaagatgattgacgatgtcaacccagagtacatccaatgggtcgcgcttcagcagcaagtccttagcttattcatgacattcataactcaagaaagtcatgggtcgggttgccatctacgagacaccccatgaggtgtggtcagaactgcaaaagacctacgcgtcgtagtcatgagcccggaccgcgaacacacggattgccctgaccacaagaaaatgtaatatgataatggctgaatacattaccaagatgaagtcttttgcatatgagctgacatttgcaaagacgaatgttgatgatgaagaacttgtacaaaccactcaacacctcaaagttctacaaatcatgtctctaatgcgcctgatcaccatgctgctgcagcatcgagcttttggtccctcaagcagcgagaaagcagtgcagtggaaccttcacatgacttgcatcatcagagtgctcggtttcatcaagacctgcaactccatcacctcaatgacgtcatgttcccattgtttacatagatcagcgtcctcagacaagattacaagatgaaaaaattactcatactgaatatggctattttatcatcactggtgaacctcaagaatgctatgaatgctaaatttgatacgcgatgagaaataacacttgacatctagttgttgctgatgagaccaagaatgttattaactgcaagtagagatgacaatggggccctgatttacgactccccgttgggaattcttccattaggggatgaggatggggatggggaagtttctccccccacggggatgtaaacgggaaaatttttccactcgacgggtaaatagagatggggacggggaagtattccccatccccgttccccgcggggaccgctaaacttgcacgtgaagatgttttcatataatagttaatgataaaaataaatatttaccttgccaagagattactcattgtacaaatgtgttcattttgatgtacacataattatttttttacatctgacaatatatatgtgacaatgttttgtgttaataataaaggacgtacatcctaattataatttaaggggggcacgaggatccccgtcagggatttattcccacggggacggggatgataagctattccccaacggggaattccctgttgccatcactaactgcaagtggctatatagaatcaaatggaagacagatataacactgaacaaatataaagcaggctggtggtaaatggttttaaggtagattatgtggagacattcagtcttctggtcaaatcatctactatcaggatcattatgggatagagccagtgtgggaggctctcgcatgagtgtgttctagggaaggataaaccgaggaaaccctttcatcagcaaatgttgtacaaccacagcttaatcatttaatagatttcctgtgagacaatttttttttctaattccatggtgtggttcgaacttgtgaaaagtacaaagctcatattgcttaatgatggaaaaaacacaaccatgcttgagttgggtgctataaattcatgatatggtttaatgtcataggactggactggcagatagaagtaaatcgatatttatctcttgtacgagttgtgctaggaaaatcatttttgtgatcatttactttccactgtttctctaaggctgatgtcaatgctgttaccttcgctgatgaaactggaaacgtgttgtactctggaagtgatgatagtctctgtaaggtgtgggacaggcgttgcctttcaggggaaaagtcagcaggtattttgacaggtcatttagatggagttacatttatcgatagccgtggtgatgggcgttatttcatctccaattgcaaggatcagagaatcaaactttgggacatcaggaaaatgtcttccgtcgtgagatctcgcccagtgagtctagtggactgggactataggtggatgccatttccatcagaagctcataatcttaagcatccaggtgatcagtctgtggccacatacagaggccattcagttctgcgaacacttatccgttgctatttctcccctgtgcacagcacgggtcagaggtacatatacacgggatccagtgacaagtctgtacatatttatgacgtggtaaccggggaggctgtcaagaggctttcgtggcatggctccatcatcagagactgcacctggcatccatactacccaacgctcgtcagctcctcctgggacggcttcgttgcccggtgggaggcctcgggcgacgacgacgaccattcggtgctcgtcgccgacgagatgagaggaagcccttactaccggagatacggcgatcccttggtgatgtagagatgtctgcaaagtggttaacaccaaatggtagtgagcatgtactttgctttgttgtttgggaattacaactgagcagcatgtacagtgccgtttggctcatgtggttgtatagccttacgataaataatatgtagggatacagaaagaacacatgagatcgaagcgactttataaatcctatggaatttatagaaacagacaagatcctctttccttgtttttaaaaactttataaatactttttcgaattttgattggattggaatacaccgttgttggattcagaaattatccattcatctcactcactatgggacaatgtaccgcatccacggctgttcatctattaatggcggtatttatctgtcacgaccacaggtgactaagtgttcctagtagctgtcagtagctgtcaagccagtactttgggccaagattagtgtatctgtgatttgttcttgagctatatgattaggggatcttagtcccggtcca

SEQ ID NO: 73479 - DNA, 2815 bp, Zea Mays
cggccggcgcctgcacggcgcccgcggctccgcgcgctcgtcctacttgccatccgtcactggacgggccacgcgactgcgatccctgccacacgagcgcaacgcgccatgggtccggcgtgccagtgagagcgggagaagctcggacatctccggtatggttccactggtccaggggacaaaatctgctgccagtttctgcaattgcttgttttttttcgctgtgttttcagtggagggacatcttctccagcgattcagcgcgggatcctgctggactggcctgatccctccgtgctggtgtcggcgagcatgcaaggaaggatgcgaggcgcgcggcggagcgcgcgcggggaatcgtcccggaaggcggcgggccgcgaggtggagccattcacgctgtgcggcgagatgtcccatctcaccagggccacgtcagagccgtgccgcagggctcgcggcgccgccttcgcccgccgggcgaggcccttctcggcgtacgagctggtgtcggcgcgggaggccggccgcgcgggcggcgccgggttctccgcggccgatcgagcctacctcggcaggcagcacatccccaccaaggggccgtggggcgtcgacgacgtggaaagcgaggcctacgtctcgcagttctccgccgatggctcgttgctcatcgcggggtttcggggaagccgcatcagagtctacgacgccgagaaagggtggaagatccacaaggatataagctgcagaagtgtgcactggacggtttcagatattgctctctcacctgaccaacgattccttgggaacatgcctgttttcatcgagtgcatctgatcactttgcaggcctatgcaagtctgacacctattgttcacattgtgaatgttcagaatgctggaaaggaatcacatgctaatattactgaaattcatgagggattggatttaaccggtggtgatgaggatgaggactttggaatattttctgttaaattctccaaagatggtaaagaagttgttgttgggaacaatgaaaagtcaatatatgtttatgacctttcagcaaataaagtgtcagcccgcatccgtgctcataaagctgatgtcaatgctgttaccttcgctgatgaaactggaaacgtgttgtactctggaagtgatgatagtctctgtaaggtgtgggacaggcgttgcctttcaggggaaaagtcagcaggatcagagaatcaaactttgggacatcaggaaaatgtcttccgtcgtgagatcgtagggtcttgcattatagcaatttattatgtaggatattttttttactggaccctaagcttctctgaaatttgctataggacattaaaaattattaggacactacctagtgtcttctagattttttttgacagtgtcaggcagcaataaaaaaattggacaatgccttgagcaaaattatcctgctatgtacttttaagttccatttcctttttttgcgggtctagtttctattgttttgaatttgattctgttgttttcacagtcgcccagtgagtctagtggactgggactataggtggatgccatttccatcagaagctcataatcttaagcatccaggtgatcagtctgtggccacatacagaggccattcagttctgcgaacacttatccgttgctatttctcccctgtgcacaggtcaggaacagcagatatttttatttatgtcaccagcatactgaaattttcctttgaaatactttcaaaaggttacatttgttagtggaaagttgaccgttaacttgagtaggaggccttgcagttgtgctacctgcttctaagcttgtaattagtgatatataatgaatatttggtctaatttttgtatttatctatgtaattaaggcattgcttcgccttacgctttagcgcttaaaaggtaaaaaggaggtcgataattaagatcatacatctaaaacaattatcagtgatgacatgaataatttccatgttcagttcatatcgttgtgctttctgtttcagcacgggtcagaggtacatatacacgggatccagtgacaagtctgtacatatttatgacgtggtaaccggggaggctgtcaagaggctttcgtggcatggctccatcatcagagactgcacctggcatccatactacccaacgctcgtcagctcctcctgggacggcttcgttgcccggtgggaggcctcgggcgacgacgacgaccattcggtgctcgtcgccgacgagatgagaggaagcccttactaccggagatacggcgatcccttggtgatgtagagatgtctgcaaagtggttaacaccaaatggtagtgagcatgtactttgctttgttgtttgggaattacaactgagcagcatgtacagtgccgtttggctcatgtggttgtatagccttacgataaataatatgtagggatacagaaagaacacatgagatcgaagcgactttataaatcctatggaatttatagaaacagacaagatcctctttccttgtttttaaaaactttataaatactttttcgaattttgattggattggaatacaccgttgttggattcagaaattatccattcatctcactcactatgggacaatgtaccgcatccacggctgttcatctattaatggcggtatttatctgtcacgaccacaggtgactaagtgttcctagtagctgtcagtagctgtcaagccagtactttgggccaagattagtgtatctgtgatttgttcttgagctatatgattaggggatcttagtcccggtcca

SEQ ID NO: 73480 - DNA, 1953 bp, Zea Mays
cggccggcgcctgcacggcgcccgcggctccgcgcgctcgtcctacttgccatccgtcactggacgggccacgcgactgcgatccctgccacacgagcgcaacgcgccatgggtccggcgtgccagtgagagcgggagaagctcggacatctccgtggagggacatcttctccagcgattcagcgcgggatcctgctggactggcctgatccctccgtgctggtgtcggcgagcatgcaaggaaggatgcgaggcgcgcggcggagcgcgcgcggggaatcgtcccggaaggcggcgggccgcgaggtggagccattcacgctgtgcggcgagatgtcccatctcaccagggccacgtcagagccgtgccgcagggctcgcggcgccgccttcgcccgccgggcgaggcccttctcggcgtacgagctggtgtcggcgcgggaggccggccgcgcgggcggcgccgggttctccgcggccgatcgagcctacctcggcaggcagcacatccccaccaaggggccgtggggcgtcgacgacgtggaaagcgaggcctacgtctcgcagttctccgccgatggctcgttgctcatcgcggggtttcggggaagccgcatcagagtctacgacgccgagaaagggtggaagatccacaaggatataagctgcagaagtgtgcactggacggtttcagatattgctctctcacctgaccaacgattccttgcctatgcaagtctgacacctattgttcacattgtgaatgttcagaatgctggaaaggaatcacatgctaatattactgaaattcatgagggattggatttaaccggtggtgatgaggatgaggactttggaatattttctgttaaattctccaaagatggtaaagaagttgttgttgggaacaatgaaaagtcaatatatgtttatgacctttcagcaaataaagtgtcagcccgcatccgtgctcataaagctgatgtcaatgctgttaccttcgctgatgaaactggaaacgtgttgtactctggaagtgatgatagtctctgtaaggtgtgggacaggcgttgcctttcaggggaaaagtcagcaggtgatcagtctgtggccacatacagaggccattcagttctgcgaacacttatccgttgctatttctcccctgtgcacagcacgggtcagaggtacatatacacgggatccagtgacaagtctgtacatatttatgacgtggtaaccggggaggctgtcaagaggctttcgtggcatggctccatcatcagagactgcacctggcatccatactacccaacgctcgtcagctcctcctgggacggcttcgttgcccggtgggaggcctcgggcgacgacgacgaccattcggtgctcgtcgccgacgagatgagaggaagcccttactaccggagatacggcgatcccttggtgatgtagagatgtctgcaaagtggttaacaccaaatggtagtgagcatgtactttgctttgttgtttgggaattacaactgagcagcatgtacagtgccgtttggctcatgtggttgtatagccttacgataaataatatgtagggatacagaaagaacacatgagatcgaagcgactttataaatcctatggaatttatagaaacagacaagatcctctttccttgtttttaaaaactttataaatactttttcgaattttgattggattggaatacaccgttgttggattcagaaattatccattcatctcactcactatgggacaatgtaccgcatccacggctgttcatctattaatggcggtatttatctgtcacgaccacaggtgactaagtgttcctagtagctgtcagtagctgtcaagccagtactttgggccaagattagtgtatctgtgatttgttcttgagctatatgattaggggatcttagtcccggtcca

SEQ ID NO: 73481 - DNA, 2538 bp, Zea Mays
cggccggcgcctgcacggcgcccgcggctccgcgcgctcgtcctacttgccatccgtcactggacgggccacgcgactgcgatccctgccacacgagcgcaacgcgccatgggtccggcgtgccagtgagagcgggagaagctcggacatctccgtggagggacatcttctccagcgattcagcgcgggatcctgctggactggcctgatccctccgtgctggtgtcggcgagcatgcaaggaaggatgcgaggcgcgcggcggagcgcgcgcggggaatcgtcccggaaggcggcgggccgcgaggtggagccattcacgctgtgcggcgagatgtcccatctcaccagggccacgtcagagccgtgccgcagggctcgcggcgccgccttcgcccgccgggcgaggcccttctcggcgtacgagctggtgtcggcgcgggaggccggccgcgcgggcggcgccgggttctccgcggccgatcgagcctacctcggcaggcagcacatccccaccaaggggccgtggggcgtcgacgacgtggaaagcgaggcctacgtctcgcagttctccgccgatggctcgttgctcatcgcggggtttcggggaagccgcatcagagtctacgacgccgagaaagggtggaagatccacaaggatataagctgcagaagtgtgcactggacggtttcagatattgctctctcacctgaccaacgattccttgcctatgcaagtctgacacctattgttcacattgtgaatgttcagaatgctggaaaggaatcacatgctaatattactgaaattcatgagggattggatttaaccggtggtgatgaggatgaggactttggaatattttctgttaaattctccaaagatggtaaagaagttgttgttgggaacaatgaaaagtcaatatatgtttatgacctttcagcaaataaagtgtcagcccgcatccgtgctcataaagctgatgtcaatgctgttaccttcgctgatgaaactggaaacgtgttgtactctggaagtgatgatagtctctgtaaggtgtgggacaggcgttgcctttcaggggaaaagtcagcaggtattttgacaggtcatttagatggagttacatttatcgatagccgtggtgatgggcgttatttcatctccaattgcaaggatcagagaatcaaactttgggacatcaggaaaatgtcttccgtcgtgagatcgtagggtcttgcattatagcaatttattattcgcccagtgagtctagtggactgggactataggtggatgccatttccatcagaagctcataatcttaagcatccaggtgatcagtctgtggccacatacagaggccattcagttctgcgaacacttatccgttgctatttctcccctgtgcacaggtcaggaacagcagatatttttatttatgtcaccagcatactgaaattttcctttgaaatactttcaaaaggttacatttgttagtggaaagttgaccgttaacttgagtaggaggccttgcagttgtgctacctgcttctaagcttgtaattagtgatatataatgaatatttggtctaatttttgtatttatctatgtaattaaggcattgcttcgccttacgctttagcgcttaaaaggtaaaaaggaggtcgataattaagatcatacatctaaaacaattatcagtgatgacatgaataatttccatgttcagttcatatcgttgtgctttctgtttcagcacgggtcagaggtacatatacacgggatccagtgacaagtctgtacatatttatgacgtggtaaccggggaggctgtcaagaggctttcgtggcatggctccatcatcagagactgcacctggcatccatactacccaacgctcgtcagctcctcctgggacggcttcgttgcccggtgggaggcctcgggcgacgacgacgaccattcggtgctcgtcgccgacgagatgagaggaagcccttactaccggagatacggcgatcccttggtgatgtagagatgtctgcaaagtggttaacaccaaatggtagtgagcatgtactttgctttgttgtttgggaattacaactgagcagcatgtacagtgccgtttggctcatgtggttgtatagccttacgataaataatatgtagggatacagaaagaacacatgagatcgaagcgactttataaatcctatggaatttatagaaacagacaagatcctctttccttgtttttaaaaactttataaatactttttcgaattttgattggattggaatacaccgttgttggattcagaaattatccattcatctcactcactatgggacaatgtaccgcatccacggctgttcatctattaatggcggtatttatctgtcacgaccacaggtgactaagtgttcctagtagctgtcagtagctgtcaagccagtactttgggccaagattagtgtatctgtgatttgttcttgagctatatgattaggggatcttagtcccggtcca

SEQ ID NO: 73482 - DNA, 2621 bp, Zea Mays
gtgtttcttcaatggtattagagcaagtcgacattgacctcatcaacgacaagattccgtagcatcatccagctcagtagtactgacgactctcttaggtcaaagcattgttgtaaagctcaacaagaccaacttcgctctttgaattcatgagctctgaggtgcgcaactacaaggctccctagatggcatgattgtagcgtccgacaagatctccgtcaagcaagatggcaagatgattgacgatgtcaacccagagtacatccaatgggtcgcgcttcagcagcaagtccttagcttattcatgacattcataactcaagaaagtcatgggtcgggttgccatctacgagacaccccatgaggtgtggtcagaactgcaaaagacctacgcgtcgtagtcatgagcccggaccgcgaacacacggattgccctgaccacaagaaaatgtaatatgataatggctgaatacattaccaagatgaagtcttttgcatatgagctgacatttgcaaagacgaatgttgatgatgaagaacttgtacaaaccactcaacacctcaaagttctacaaatcatgtctctaatgcgcctgatcaccatgctgctgcagcatcgagcttttggtccctcaagcagcgagaaagcagtgcagtggaaccttcacatgacttgcatcatcagagtgctcggtttcatcaagacctgcaactccatcacctcaatgacgtcatgttcccattgtttacatagatcagcgtcctcagacaagattacaagatgaaaaaattactcatactgaatatggctattttatcatcactggctgatgtcaatgctgttaccttcgctgatgaaactggaaacgtgttgtactctggaagtgatgatagtctctgtaaggtgtgggacaggcgttgcctttcaggggaaaagtcagcaggtattttgacaggtcatttagatggagttacatttatcgatagccgtggtgatgggcgttatttcatctccaattgcaaggatcagagaatcaaactttgggacatcaggaaaatgtcttccgtcgtgagatcgtagggtcttgcattatagcaatttattatgtaggatattttttttactggaccctaagcttctctgaaatttgctataggacattaaaaattattaggacactacctagtgtcttctagattttttttgacagtgtcaggcagcaataaaaaaattggacaatgccttgagcaaaattatcctgctatgtacttttaagttccatttcctttttttgcgggtctagtttctattgttttgaatttgattctgttgttttcacagtcgcccagtgagtctagtggactgggactataggtggatgccatttccatcagaagctcataatcttaagcatccaggtgatcagtctgtggccacatacagaggccattcagttctgcgaacacttatccgttgctatttctcccctgtgcacaggtcaggaacagcagatatttttatttatgtcaccagcatactgaaattttcctttgaaatactttcaaaaggttacatttgttagtggaaagttgaccgttaacttgagtaggaggccttgcagttgtgctacctgcttctaagcttgtaattagtgatatataatgaatatttggtctaatttttgtatttatctatgtaattaaggcattgcttcgccttacgctttagcgcttaaaaggtaaaaaggaggtcgataattaagatcatacatctaaaacaattatcagtgatgacatgaataatttccatgttcagttcatatcgttgtgctttctgtttcagcacgggtcagaggtacatatacacgggatccagtgacaagtctgtacatatttatgacgtggtaaccggggaggctgtcaagaggctttcgtggcatggctccatcatcagagactgcacctggcatccatactacccaacgctcgtcagctcctcctgggacggcttcgttgcccggtgggaggcctcgggcgacgacgacgaccattcggtgctcgtcgccgacgagatgagaggaagcccttactaccggagatacggcgatcccttggtgatgtagagatgtctgcaaagtggttaacaccaaatggtagtgagcatgtactttgctttgttgtttgggaattacaactgagcagcatgtacagtgccgtttggctcatgtggttgtatagccttacgataaataatatgtagggatacagaaagaacacatgagatcgaagcgactttataaatcctatggaatttatagaaacagacaagatcctctttccttgtttttaaaaactttataaatactttttcgaattttgattggattggaatacaccgttgttggattcagaaattatccattcatctcactcactatgggacaatgtaccgcatccacggctgttcatctattaatggcggtatttatctgtcacgaccacaggtgactaagtgttcctagtagctgtcagtagctgtcaagccagtactttgggccaagattagtgtatctgtgatttgttcttgagctatatgattaggggatcttagtcccggtcca

SEQ ID NO: 73483 - DNA, 4053 bp, Zea Mays
ggacgacgtccgtcggcgcagctcagccacgcccgaccccttaagcgcgacggcaacagcaagggcggcactggcggctatgcacaaggtattcggttcggctccaagatcacaagactggagtaacaaagttgtgcttcgcgctgcgctgcgctgcttctagcgaatggaagcggctgctcttgctcgtagaactagagcatggaggaactacggtgtctatctacagtcgctgaatctgatgacgctccagcagaacaggagtgcgaccacttctccctgaggggttatgttgctatgcttcagaagaaggatccaaaactttgctctcatattttccataaccagccacaatatgatgagcaccatgattcgtccccagttttggtgtcaaagtatcatcgatgggattgctcaagatgtcttgatagtgtggaagtttcaggccataggccaacatcggaaaatgtttctatgcagcagaatggaatgaatgatggctgctctatttcaattgttcggattttgcctaatagtgttgattccagaagactgttttcttgcacacagcaatcatctcaagggaatgatcgattgaccctttcaaagactgcccaagaatgcaattcaaaatgcagttctcctggcaacaaagcaattactgcgatgaatgttccagtagctgaagaaaatgttccagaggcactcgttgatacgagggttccatctatagaaggcctctcccaatagtattgatttgtcagcaaacatcttgaatgctgtctcgaagaatgtccgcgatttacctgatgatgttgaagaaaatggcacacagaatccacacagtctaaaaccttgtgtggcgccaaatgaagatgagaataacatagctaatgatgacctcaatgagcctaatgtttgtaaaccagtatctgggcacaaaagcaaacaagtctgcaacatgggtccacgccgagcatcgtcaaaaagaaatgttgaatctgatgatgccgttcaagtggaccatactaacagtgttgatctctgtgagggtggtaaaagaaaaatgcaccttgaggttggaaaaggtaatgacactactaatcagcaagtggacgaaatccagtcaagagctgtcaagaacaaggcaaaatacacaggagtagacaagttagaagatggatcctctctaatgaactggctgaaaagcactaataagaaagttagaacaaagaaaaaagactcagaacacaagaatcttgattcctcttctatttcaaggtcttacccagatatagttgcttctaatgatatgcatcatgattttctaccctcagttggggatgtgggccaggcaaatgtaccatctactaccagtgccaagcatgggaatggaaatgcacagaatgacaaactggagcaaaatatgcagaagatggatggcctgtgtgaaaatgaatctagaaacttgaaacagaggttcttctcaaatgaaaaatcaacgattttgctaaagagaaagctactgtccacttcggttgtccatgatgagaacattgagaacagtaatataaagagagatatgctcaggtcagatgatttgcctcaaatggaacctgaaggctctgtacagagatgtttggcaaaggtttctcttggtaaacaaaagatccagaatgtgtctggcctccacaagaagaatataccaaagaataagaaaggaaagcagaaggtgcacaagaaacagaatgtgatagacgacttccccatggacattgttgaacttctcgccagaaatcagcatgagagacagttgatgactgacaccaattctttggaaaactgtcatactcaacccaaggtagctcaagttgattgtgctgcatttgcagccaagggttgtcccaccaatgcatcaaatgagttcaacactaatttccaaaaatctttggcatcggaaagtaagcagaagtccttacaggatcaagcatcacccagtacagaggctgccaatgtgaatccgcaggatttacatactcagaagtcatcacagtgtcatgcagcatccagcaccagcaccgaggttccaaatggtcagcctccagaatcacaaatgcaaaattcgcttcaggttcatgtgttacccatcaaacggtctttcattgtgtacccttcaaaattacctgtccttgatgacattttggagtgtacccaagaacaacagacacaattccacagggatggaggggtcaccattgcatgtacctcacctatgttttcacatcatcaacatattgctgaagtgcctgctcggagctggaggaataacggggaaaagaagttaatgtgggattctttcaagacagcttcaagaaattcaccaacatcgtcatatggttttcaattcggaaacaggcttcaagaagttcattcatctcccagtcatgcttatggagcttctagtaactatgcagctcaccagccagtaattgtggctgtagatcagccgagaagtgttccaagcacaacatcgactatggaggctggtaggttgtatgatcgaaggattcctggacagtcaggcctctacccaaaagagcctatgcctgcaacacatcttctgagattgatggactcatcaacagctccagacttcacaaactatcaaagagctaacaggcgccagatggaacatcaaacacaaactctggattcacaatatacacagcatgatcagtataatgggtcactgagcacatcatatggaagacacataactggaaaggttccaccgacactgcaagacttatctcggcgtcaggtccagcaaaacctgcacaggcctttacgccctcatcctcgggtgggcgtgcttggttcgttgctgcagcaggatatcgcaaactggtatgaaaactgcgggccgccacagtctggatacaggctgggcgtttctaaagggacggcatcgcttgatatgaacagacatggaaactacgagaccttgaactcaggagtgttcacagcaggatggaatgcccttcaattgggttctgttagctctcttgccgatccagagtaccggttgccaaggtatggtacaggtcagccttgtacaggtggcaatgggagaacggttcacccgttggataagcttgtgcgaaaggatatctgtgtgactaacagaaacccagctgattttactgtaattagtgacatgaatgagtatatgagaagcctttgagtgtgaggcagggaggagcgttgtagttgaatacgtttagatcgataaatttcaccttatcagtgccaagcaatcatcattgatatagaggaaggctttgtcgaatcttctgcaaggctctttgtaagacattgatggatgttctgtttcctggaggcagagcaacagctaccatagagccagataagcaaatgtacaagggaagcatgtgagttttttttttgggtactcctgtcccagaataaactgcattctgcagttcaaaatttgccccaaaggaatggcccatataggtttgagatctaatgcactctagtctagcaggtgtaccagcttactgtaccaacaaaaacaattctgacttgtcagaaaaaaaatccctccgtccggagtatgtaccaaagggggtaagctatgtcatgtggttgagcaatgttggtcaactcgttctggctccgagtgttgtatagcatcagactgccctgatgaacagcctattaaaagactgcactgatgattcttctttgttgtatcgtgatctaagtctgaaaacgcagctggatttcagaagtcatggagtccgaactgtcaggagccgctcacgcggtccagtaggacatcatggatgtagtgttaatgtgatcccacaacacaagctccagatccaggttcagtcagtctgtctctaacaggagactatacacttctctattctaagtatagagaaaatttcattttatcgactccaatgatgttcattaaagtcttctatatggatgatatttctttatcatttatacagagagtat

SEQ ID NO: 73484 - DNA, 4061 bp, Zea Mays
ggacgacgtccgtcggcgcagctcagccacgcccgaccccttaagcgcgacggcaacagcaagggcggcactggcggctatgcacaaggtattcggttcggctccaagatcacaagactggagtaacaaagttgtgcttcgcgctgcgctgcgctgcttctagcgaatggaagcggctgctcttgctcgtagaactagagcatggaggaactacggtgtctatctacagtcgctgaatctgatgacgctccagcagaacaggagtgcgaccacttctccctgaggggttatgttgctatgcttcagaagaaggatccaaaactttgctctcatattttccataaccagccacaatatgatgagcaccatgattcgtccccagttttggtgtcaaagtatcatcgatgggattgctcaagatgtcttgatagtgtggaagtttcaggccataggccaacatcggaaaatgtttctatgcagcagaatggaatgaatgatggctgctctatttcaattgttcggattttgcctaatagtgttgattccagaagactgttttcttgcacacagcaatcatctcaagggaatgatcgattgaccctttcaaagactgcccaagaatgcaattcaaaatgcagttctcctggcaacaaagcaattactgcgatgaatgttccagtagctgaagaaaatgttccagaggcactcgttgatacgagggttccatctatagaagttttacaggcctctcccaatagtattgatttgtcagcaaacatcttgaatgctgtctcgaagaatgtccgcgatttacctgatgatgttgaagaaaatggcacacagaatccacacagtctaaaaccttgtgtggcgccaaatgaagatgagaataacatagctaatgatgacctcaatgagcctaatgtttgtaaaccagtatctgggcacaaaagcaaacaagtctgcaacatgggtccacgccgagcatcgtcaaaaagaaatgttgaatctgatgatgccgttcaagtggaccatactaacagtgttgatctctgtgagggtggtaaaagaaaaatgcaccttgaggttggaaaaggtaatgacactactaatcagcaagtggacgaaatccagtcaagagctgtcaagaacaaggcaaaatacacaggagtagacaagttagaagatggatcctctctaatgaactggctgaaaagcactaataagaaagttagaacaaagaaaaaagactcagaacacaagaatcttgattcctcttctatttcaaggtcttacccagatatagttgcttctaatgatatgcatcatgattttctaccctcagttggggatgtgggccaggcaaatgtaccatctactaccagtgccaagcatgggaatggaaatgcacagaatgacaaactggagcaaaatatgcagaagatggatggcctgtgtgaaaatgaatctagaaacttgaaacagaggttcttctcaaatgaaaaatcaacgattttgctaaagagaaagctactgtccacttcggttgtccatgatgagaacattgagaacagtaatataaagagagatatgctcaggtcagatgatttgcctcaaatggaacctgaaggctctgtacagagatgtttggcaaaggtttctcttggtaaacaaaagatccagaatgtgtctggcctccacaagaagaatataccaaagaataagaaaggaaagcagaaggtgcacaagaaacagaatgtgatagacgacttccccatggacattgttgaacttctcgccagaaatcagcatgagagacagttgatgactgacaccaattctttggaaaactgtcatactcaacccaaggtagctcaagttgattgtgctgcatttgcagccaagggttgtcccaccaatgcatcaaatgagttcaacactaatttccaaaaatctttggcatcggaaagtaagcagaagtccttacaggatcaagcatcacccagtacagaggctgccaatgtgaatccgcaggatttacatactcagaagtcatcacagtgtcatgcagcatccagcaccagcaccgaggttccaaatggtcagcctccagaatcacaaatgcaaaattcgcttcaggttcatgtgttacccatcaaacggtctttcattgtgtacccttcaaaattacctgtccttgatgacattttggagtgtacccaagaacaacagacacaattccacagggatggaggggtcaccattgcatgtacctcacctatgttttcacatcatcaacatattgctgaagtgcctgctcggagctggaggaataacggggaaaagaagttaatgtgggattctttcaagacagcttcaagaaattcaccaacatcgtcatatggttttcaattcggaaacaggcttcaagaagttcattcatctcccagtcatgcttatggagcttctagtaactatgcagctcaccagccagtaattgtggctgtagatcagccgagaagtgttccaagcacaacatcgactatggaggctggtaggttgtatgatcgaaggattcctggacagtcaggcctctacccaaaagagcctatgcctgcaacacatcttctgagattgatggactcatcaacagctccagacttcacaaactatcaaagagctaacaggcgccagatggaacatcaaacacaaactctggattcacaatatacacagcatgatcagtataatgggtcactgagcacatcatatggaagacacataactggaaaggttccaccgacactgcaagacttatctcggcgtcaggtccagcaaaacctgcacaggcctttacgccctcatcctcgggtgggcgtgcttggttcgttgctgcagcaggatatcgcaaactggtatgaaaactgcgggccgccacagtctggatacaggctgggcgtttctaaagggacggcatcgcttgatatgaacagacatggaaactacgagaccttgaactcaggagtgttcacagcaggatggaatgcccttcaattgggttctgttagctctcttgccgatccagagtaccggttgccaaggtatggtacaggtcagccttgtacaggtggcaatgggagaacggttcacccgttggataagcttgtgcgaaaggatatctgtgtgactaacagaaacccagctgattttactgtaattagtgacatgaatgagtatatgagaagcctttgagtgtgaggcagggaggagcgttgtagttgaatacgtttagatcgataaatttcaccttatcagtgccaagcaatcatcattgatatagaggaaggctttgtcgaatcttctgcaaggctctttgtaagacattgatggatgttctgtttcctggaggcagagcaacagctaccatagagccagataagcaaatgtacaagggaagcatgtgagttttttttttgggtactcctgtcccagaataaactgcattctgcagttcaaaatttgccccaaaggaatggcccatataggtttgagatctaatgcactctagtctagcaggtgtaccagcttactgtaccaacaaaaacaattctgacttgtcagaaaaaaaatccctccgtccggagtatgtaccaaagggggtaagctatgtcatgtggttgagcaatgttggtcaactcgttctggctccgagtgttgtatagcatcagactgccctgatgaacagcctattaaaagactgcactgatgattcttctttgttgtatcgtgatctaagtctgaaaacgcagctggatttcagaagtcatggagtccgaactgtcaggagccgctcacgcggtccagtaggacatcatggatgtagtgttaatgtgatcccacaacacaagctccagatccaggttcagtcagtctgtctctaacaggagactatacacttctctattctaagtatagagaaaatttcattttatcgactccaatgatgttcattaaagtcttctatatggatgatatttctttatcatttatacagagagtat

SEQ ID NO: 73485 - DNA, 3785 bp, Zea Mays
gcacaaggtattcggttcggctccaagatcacaagactggagtaacaaagttgtgcttcgcgctgcgctgcgctgcttctagcgaatggaagcggctgctcttgctcgtagaactagagcatggaggaactacggtgtctatctacagtcgctgaatctgatgacgctccagcagaacaggagtgcgaccacttctccctgaggggttatgttgctatgcttcagaagaaggatccaaaactttgctctcatattttccataaccagccacaatatgatgagcaccatgattcgtccccagttttggtgtcaaagtatcatcgatgggattgctcaagatgtcttgatagtgtggaagtttcaggccataggccaacatcggaaaatgtttctatgcagcagaatggaatgaatgatggctgctctatttcaattgttcggattttgcctaatagtgttgattccagaagactgttttcttgcacacagcaatcatctcaagggaatgatcgattgaccctttcaaagactgcccaagaatgcaattcaaaatgcagttctcctggcaacaaagcaattactgcgatgaatgttccagtagctgaagaaaatgttccagaggcactcgttgatacgagggttccatctatagaagttttacaggcctctcccaatagtattgatttgtcagcaaacatcttgaatgctgtctcgaagaatgtccgcgatttacctgatgatgttgaagaaaatggcacacagaatccacacagtctaaaaccttgtgtggcgccaaatgaagatgagaataacatagctaatgatgacctcaatgagcctaatgtttgtaaaccagtatctgggcacaaaagcaaacaagtctgcaacatgggtccacgccgagcatcgtcaaaaagaaatgttgaatctgatgatgccgttcaagtggaccatactaacagtgttgatctctgtgagggtggtaaaagaaaaatgcaccttgaggttggaaaaggtaatgacactactaatcagcaagtggacgaaatccagtcaagagctgtcaagaacaaggcaaaatacacaggagtagacaagttagaagatggatcctctctaatgaactggctgaaaagcactaataagaaagttagaacaaagaaaaaagactcagaacacaagaatcttgattcctcttctatttcaaggtcttacccagatatagttgcttctaatgatatgcatcatgattttctaccctcagttggggatgtgggccaggcaaatgtaccatctactaccagtgccaagcatgggaatggaaatgcacagaatgacaaactggagcaaaatatgcagaagatggatggcctgtgtgaaaatgaatctagaaacttgaaacagaggttcttctcaaatgaaaaatcaacgattttgctaaagagaaagctactgtccacttcggttgtccatgatgagaacattgagaacagtaatataaagagagatatgctcaggtcagatgatttgcctcaaatggaacctgaaggctctgtacagagatgtttggcaaaggtatgattaaacataaagaattctactgaaaatttataattagattattacattcatttacgtgttttacctacttttgctgacttgaattggggacctttgtccagcataggatttttaatccctttaatgttaatgcatttgtgtctatgccactttgctcccataccatccatgctttccgttgtgtacaccactaggattttttgacactttttatgacatttgagttcacaagtttgcacgcatgccaactgaactagttatttgtgtgtgactagtttgggatgtcatgagcaaattagcgaatcccaaatgacatttacttctttataaactatatatatagacacacacacacacacaatggtgcaagcaataggaaatccgtactgaatttactctgcttgtatacaaatattgtactctcttctcgttaccacaggtttctcttggtaaacaaaagatccagaatgtgtctggcctccacaagaagaatataccaaagaataagaaaggaaagcagaaggtgcacaagaaacagaatgtgatagacgacttccccatggacattgttgaacttctcgccagaaatcagcatgagagacagttgatgactgacaccaattctttggaaaactgtcatactcaacccaaggtagctcaagttgattgtgctgcatttgcagccaagggttgtcccaccaatgcatcaaatgagttcaacactaatttccaaaaatctttggcatcggaaagtaagcagaagtccttacaggatcaagcatcacccagtacagaggctgccaatgtgaatccgcaggatttacatactcagaagtcatcacagtgtcatgcagcatccagcaccagcaccgaggttccaaatggtcagcctccagaatcacaaatgcaaaattcgcttcaggttcatgtgttacccatcaaacggtctttcattgtgtacccttcaaaattacctgtccttgatgacattttggagtgtacccaagaacaacagacacaattccacagggatggaggggtcaccattgcatgtacctcacctatgttttcacatcatcaacatattgctgaagtgcctgctcggagctggaggaataacggggaaaagaagttaatgtgggattctttcaagacagcttcaagaaattcaccaacatcgtcatatggttttcaattcggaaacaggcttcaagaagttcattcatctcccagtcatgcttatggagcttctagtaactatgcagctcaccagccagtaattgtggctgtagatcagccgagaagtgttccaagcacaacatcgactatggaggctggtaggttgtatgatcgaaggattcctggacagtcaggcctctacccaaaagagcctatgcctgcaacacatcttctgagattgatggactcatcaacagctccagacttcacaaactatcaaagagctaacaggcgccagatggaacatcaaacacaaactctggattcacaatatacacagcatgatcagtataatgggtcactgagcacatcatatggaagacacataactggaaaggttccaccgacactgcaagacttatctcggcgtcaggtccagcaaaacctgcacaggcctttacgccctcatcctcgggtgggcgtgcttggttcgttgctgcagcaggatatcgcaaactggtatgaaaactgcgggccgccacagtctggatacaggctgggcgtttctaaagggacggcatcgcttgatatgaacagacatggaaactacgagaccttgaactcaggagtgttcacagcaggatggaatgcccttcaattgggttctgttagctctcttgccgatccagagtaccggttgccaaggtatggtacaggtcagccttgtacaggtggcaatgggagaacggttcacccgttggataagcttgtgcgaaaggatatctgtgtgactaacagaaacccagctgattttactgtaattagtgacatgaatgagtatatgagaagcctttgagtgtgaggcagggaggagcgttgtagttgaatacgtttagatcgataaatttcaccttatcagtgccaagcaatcatcattgatatagaggaaggctttgtcgaatcttctgcaaggctctttgtaagacattgatggatgttctgtttcctggaggcagagcaacagc

SEQ ID NO: 73486 - DNA, 626 bp, Zea Mays
gtcatctttaaaatgactaaacgaatgccttcatatctggggtacgctttgattgaatacgagaagtttgaagaagctcaggctgcaataaaagaactggatggagctgagctttataaacaaagaatgagtgttgattgggcatttagcagtggccctgctaaacgcagaaatactcggaaaaggtcaccaccaagagctcgttcaaggaccccacccaggagaaggcactgatgtttccccagcatgtcttgaactacttgctatgtgtgacagagagcaagaagtctggggattccaaatattaccttggtgtatgtggatcacctgatttcgatggtggttattaaattgcctgttgtttccttattgggattccaaatattagctttgaactctggtgtaagttgatgagacatggatgtgcacttagacgcttaccattatgtttggcatgccagttggagacgattgttggaggcgattgtatgggatcatgcttttggatttttgacgagtgatgagttgatgttggatttttatgtttctgtgtacctgtactatggtgtgttacctttcctcattctgtagtcgctcaagaaatgtttttgttgtcgctcaagaaa

SEQ ID NO: 73487 - DNA, 654 bp, Zea Mays
agacacttcgtttgacatagctgctcgactagggtcacaagtcgaggctgctcccatcctagacagagtgataccaagttgttaactcaattaagttttgttaattccatgttgtattttttgttgtgtgtatccccatgttttaccttgtgcctagggaaattctatgctggtatctgtgggtgaccttgagcgtatctcacggaggactttagacaacacgattctttccttactctcagtcccttgcaggagttgacgtgcagcttcatgtgcttcctttgcatgctctcgtggagcctactccacaacgccatgatattcccgcgcccgcagttggaccttctgcagctgcatagagctcctcgcgttcgatgtgggacgtttgcagacatggacgatgacgacgacgacgatgacgatgacactaaggacgagggggacgaggacgtcgtggccgcacgtcacgacatcattggatcgtcccagttgcaggacgcttccacgacttagccatcatagctcacccacgtgacacctaaactctaggcatcgacgctcttggggccaagggcaagggtaagactaggaggaggtgagtctggctatgtgggcgatcagctatgtgatgtggaatatgtgaactgcgttatg

SEQ ID NO: 73488 - DNA, 2040 bp, Zea Mays
ttagagctcacgtctcgatgatccttatcgttggccaaggtcagttaatttttcatcggcgaagccagatttgcttttttccgtcgcgttagcacaagaacggctccagcttccgagtgctgaagccagagcagaacaagctctttgagaagctatgggcgcctatgctaatcgggcctaataatagttctcggcgcgtttcctaccgtctcgcacttgctcctcctgtgacagcgaaggcgacgagtgtaaaaggcttggctgccagcgaggccggatcccgcggcttgtgtgcacagcagcctccatgccttcagctggtgatccgagcgccgttgcccggaagaggaaccccacaaaataaaactgccccacccatcagcccatcacccaacccaaccacctcaccagctttttatatacccgcgcaccccggcgccagctacccatgtcagacgacgcgccatcgcgcctccaccaccccgaccctgaccccgaactcgccgtcgcaacaggccaagacgcagcagtagaagcaccaccaccaccaccaccggcacacgaccccggcggcagcgagtgccggttctgcgagatgacgcggcagcaccagccgcagtgcgcgcggcggctgccgaagcgcatcatcctggtgcggcacggcgagagccagggcaacctggacatgtcggcctacaccaccacgcccgactaccgcatcccgctgacggcgctgggcgcggagcaggcgcgcgccgcggggcagcgcatccgcgacgtggtggcgggcagcggcaactggaaggtctacttctacgtgtccccctacgcgcgcacccgcgccacgctgcgcgagatcggccgcgccttcccgcgggaccgcgtcatcggcgcccgcgaggagtgccgcgtccgggagcaggacttcggcaacttccaggtggaggagcgcatgcgcgccgtcaaggagacgcgccagcgcttcggccgcttcttcttccgcttcccagagggcgagtccgccgccgacgtcttcgaccgcgtcgccagcttccttgagtcgctgtggcgggacatcgacatggggcggctggaccaggaccccagctgcgagacgaacctggtgatcgtctcccacggcctcacctcgcgggtgttcctgatgaagtggttcaagtggacggtggcccagttcgagcgcctcaacaacttcgacaactgcgagttcagggtcatgcagctgggccccggcggggagtactccctcctcgtccaccacacccaggaggagctccagcagtggggcatgtcgccggagatgatcgccgaccagcagtggcgcgcctccgccaaccgccgctgctgggccgaggagtgctcctccttcatcgacaccttcttcgaggagccctacggctcgtcggagacctcctcctcggacgaagacgaagcagaggacaaggaggaggagaccaagctgctggagcaactataactggtttcatccacatccaatccacccattcgcctcgtcctttgaaattctctccattggattggatcttataccatgtgggaagagcggagcagtgatgctgcattcagtcatcgctgatccctctcttattcgaaaacagtctgtagcatgttcataatagctattagctagaactagaaatgattcgagggcaatttcagaaaatgctaaagaaacatatgctgtatctcaaggttttagctctgacatgattctgtatgttcctagatataagaacgcatacattctctattcaaaataaaatgctcagaggagataaatttgtctcgatcgctactttcctaaactctaatcctgtgggcgtcgctaccactcggtctgtcgtttattggttattggcactgttgatggacagtacaagtaccatttctcacatgctgggcatcagcagacacttgtccatatgtaaaagcagagaatctttccaattccatacagctggcatggtgacagccatattcctcactaggggagtaggagcc

SEQ ID NO: 73489 - DNA, 2143 bp, Zea Mays
ctcacgtctcgatgatccttatcgttggccaaggtcagttaatttttcatcggcgaagccagatttgcttttttccgtcgcgttagcacaagaacggctccagcttccgagtgctgaagccagagcagaacaagctctttgagaagctatgggcgcctatgctaatcgggcctaataatagttctcggcgcgtttcctaccgtctcgcacttgctcctcctgtgacagcgaaggcgacgagatacttcggtcatttcaactcaaagctttaagcaagtaaagcattcttatgctttgaaccttaggaaagaatatattaatcatcttggaataaagaaagcaccttcttgtgtaaaaggcttggctgccagcgaggccggatcccgcggcttgtgtgcacagcagcctccatgccttcagctggtgatccgagcgccgttgcccggaagaggaaccccacaaaataaaactgccccacccatcagcccatcacccaacccaaccacctcaccagctttttatatacccgcgcaccccggcgccagctacccatgtcagacgacgcgccatcgcgcctccaccaccccgaccctgaccccgaactcgccgtcgcaacaggccaagacgcagcagtagaagcaccaccaccaccaccaccggcacacgaccccggcggcagcgagtgccggttctgcgagatgacgcggcagcaccagccgcagtgcgcgcggcggctgccgaagcgcatcatcctggtgcggcacggcgagagccagggcaacctggacatgtcggcctacaccaccacgcccgactaccgcatcccgctgacggcgctgggcgcggagcaggcgcgcgccgcggggcagcgcatccgcgacgtggtggcgggcagcggcaactggaaggtctacttctacgtgtccccctacgcgcgcacccgcgccacgctgcgcgagatcggccgcgccttcccgcgggaccgcgtcatcggcgcccgcgaggagtgccgcgtccgggagcaggacttcggcaacttccaggtggaggagcgcatgcgcgccgtcaaggagacgcgccagcgcttcggccgcttcttcttccgcttcccagagggcgagtccgccgccgacgtcttcgaccgcgtcgccagcttccttgagtcgctgtggcgggacatcgacatggggcggctggaccaggaccccagctgcgagacgaacctggtgatcgtctcccacggcctcacctcgcgggtgttcctgatgaagtggttcaagtggacggtggcccagttcgagcgcctcaacaacttcgacaactgcgagttcagggtcatgcagctgggccccggcggggagtactccctcctcgtccaccacacccaggaggagctccagcagtggggcatgtcgccggagatgatcgccgaccagcagtggcgcgcctccgccaaccgccgctgctgggccgaggagtgctcctccttcatcgacaccttcttcgaggagccctacggctcgtcggagacctcctcctcggacgaagacgaagcagaggacaaggaggaggagaccaagctgctggagcaactataactggtttcatccacatccaatccacccattcgcctcgtcctttgaaattctctccattggattggatcttataccatgtgggaagagcggagcagtgatgctgcattcagtcatcgctgatccctctcttattcgaaaacagtctgtagcatgttcataatagctattagctagaactagaaatgattcgagggcaatttcagaaaatgctaaagaaacatatgctgtatctcaaggttttagctctgacatgattctgtatgttcctagatataagaacgcatacattctctattcaaaataaaatgctcagaggagataaatttgtctcgatcgctactttcctaaactctaatcctgtgggcgtcgctaccactcggtctgtcgtttattggttattggcactgttgatggacagtacaagtaccatttctcacatgctgggcatcagcagacacttgtccatatgtaaaagcagagaatctttccaattccatacagctggcatggtgacagccatattcctcactaggggagtaggagcc

SEQ ID NO: 73490 - DNA, 2912 bp, Zea Mays
ctcgatgatccttatcgttggccaaggtcagttaatttttcatcggcgaagccagatttgcttttttccgtcgcgttagcacaagaacggctccagcttccgagtgctgaagccagagcagaacaagctctttgagaagctatgggcgcctatgctaatcgggcctaataatagttctcggcgcgtttcctaccgtctcgcacttgctcctcctgtgacagcgaaggcgacgagatacttcggtcatttcaactcaaagctttaagcaagtaaagcattcttatgctttgaaccttaggaaagaatatattaatcatcttggaataaagaaagcaccttcttggtttatatgccctgactgttgaacggaagcttgctaaagaatgttaggcaacaaagaaatgagaacattggatgttccttcgctgttgatagtttgtcaaagtattccttttctttttccaaagattaaaccatgcacttattatgattcatgcatgggaatatctctcttttgaatatatccatggaaagagtagttctttagtatcgtttgttgcgttgatattcagcttatttgttgatggttaggtaagatgttcatcagtgcgctacaactcttgtgtatttgttggaaaagcataattaagcgatgcaaactttccccctgtgcagaattgtgaatttggatcgtcattgtctcaaatcagcaccacattttgatgagtttgcttgagagggcagggcggcgtctcaatgtctcatgcaagtgaaactgggcaccttggcccccatcaccggaaagatattccaatgcctaaacaaacatgcttgcctcattgcttagcacaaaagttggcaaatctcatccatctcatctcccagctcccccatcccatcatcttctactgaaaaaaccaggagaagtggccatcgcatggcatgacacacaactttgtccatcccttttactctggcatccagcctctgtgacctggacgagctaccggcgcgtggagcccagaaagaacggagtgtcattctcttacgccactgtgaccgccctcaaccccccccaaagccaatgaaaggcggtttagtcgcttcctacctcacttgtgtaaaaggcttggctgccagcgaggccggatcccgcggcttgtgtgcacagcagcctccatgccttcagctggtgatccgagcgccgttgcccggaagaggaaccccacaaaataaaactgccccacccatcagcccatcacccaacccaaccacctcaccagctttttatatacccgcgcaccccggcgccagctacccatgtcagacgacgcgccatcgcgcctccaccaccccgaccctgaccccgaactcgccgtcgcaacaggccaagacgcagcagtagaagcaccaccaccaccaccaccggcacacgaccccggcggcagcgagtgccggttctgcgagatgacgcggcagcaccagccgcagtgcgcgcggcggctgccgaagcgcatcatcctggtgcggcacggcgagagccagggcaacctggacatgtcggcctacaccaccacgcccgactaccgcatcccgctgacggcgctgggcgcggagcaggcgcgcgccgcggggcagcgcatccgcgacgtggtggcgggcagcggcaactggaaggtctacttctacgtgtccccctacgcgcgcacccgcgccacgctgcgcgagatcggccgcgccttcccgcgggaccgcgtcatcggcgcccgcgaggagtgccgcgtccgggagcaggacttcggcaacttccaggtggaggagcgcatgcgcgccgtcaaggagacgcgccagcgcttcggccgcttcttcttccgcttcccagagggcgagtccgccgccgacgtcttcgaccgcgtcgccagcttccttgagtcgctgtggcgggacatcgacatggggcggctggaccaggaccccagctgcgagacgaacctggtgatcgtctcccacggcctcacctcgcgggtgttcctgatgaagtggttcaagtggacggtggcccagttcgagcgcctcaacaacttcgacaactgcgagttcagggtcatgcagctgggccccggcggggagtactccctcctcgtccaccacacccaggaggagctccagcagtggggcatgtcgccggagatgatcgccgaccagcagtggcgcgcctccgccaaccgccgctgctgggccgaggagtgctcctccttcatcgacaccttcttcgaggagccctacggctcgtcggagacctcctcctcggacgaagacgaagcagaggacaaggaggaggagaccaagctgctggagcaactataactggtttcatccacatccaatccacccattcgcctcgtcctttgaaattctctccattggattggatcttataccatgtgggaagagcggagcagtgatgctgcattcagtcatcgctgatccctctcttattcgaaaacagtctgtagcatgttcataatagctattagctagaactagaaatgattcgagggcaatttcagaaaatgctaaagaaacatatgctgtatctcaaggttttagctctgacatgattctgtatgttcctagatataagaacgcatacattctctattcaaaataaaatgctcagaggagataaatttgtctcgatcgctactttcctaaactctaatcctgtgggcgtcgctaccactcggtctgtcgtttattggttattggcactgttgatggacagtacaagtaccatttctcacatgctgggcatcagcagacacttgtccatatgtaaaagcagagaatctttccaattccatacagctggcatggtgacagccatattcctcactaggggagtaggagcc

SEQ ID NO: 73491 - DNA, 2237 bp, Zea Mays
ctcgatgatccttatcgttggccaaggtcagttaatttttcatcggcgaagccagatttgcttttttccgtcgcgttagcacaagaacggctccagcttccgagtgctgaagccagagcagaacaagctctttgagaagctatgggcgcctatgctaatcgggcctaataatagttctcggcgcgtttcctaccgtctcgcacttgctcctcctgtgacagcgaaggcgacgagatacttcggtcatttcaactcaaagctttaagcaagtaaagcattcttatgctttgaaccttaggaaagaatatattaatcatcttggaataaagaaagcaccttcttggtttatatgccctgactgttgaacggaagcttgctaaagaatgttaggcaacaaagaaatgagaacattggatgttccttcgctgttgatagtttgtcaaatgtaaaaggcttggctgccagcgaggccggatcccgcggcttgtgtgcacagcagcctccatgccttcagctggtgatccgagcgccgttgcccggaagaggaaccccacaaaataaaactgccccacccatcagcccatcacccaacccaaccacctcaccagctttttatatacccgcgcaccccggcgccagctacccatgtcagacgacgcgccatcgcgcctccaccaccccgaccctgaccccgaactcgccgtcgcaacaggccaagacgcagcagtagaagcaccaccaccaccaccaccggcacacgaccccggcggcagcgagtgccggttctgcgagatgacgcggcagcaccagccgcagtgcgcgcggcggctgccgaagcgcatcatcctggtgcggcacggcgagagccagggcaacctggacatgtcggcctacaccaccacgcccgactaccgcatcccgctgacggcgctgggcgcggagcaggcgcgcgccgcggggcagcgcatccgcgacgtggtggcgggcagcggcaactggaaggtctacttctacgtgtccccctacgcgcgcacccgcgccacgctgcgcgagatcggccgcgccttcccgcgggaccgcgtcatcggcgcccgcgaggagtgccgcgtccgggagcaggacttcggcaacttccaggtggaggagcgcatgcgcgccgtcaaggagacgcgccagcgcttcggccgcttcttcttccgcttcccagagggcgagtccgccgccgacgtcttcgaccgcgtcgccagcttccttgagtcgctgtggcgggacatcgacatggggcggctggaccaggaccccagctgcgagacgaacctggtgatcgtctcccacggcctcacctcgcgggtgttcctgatgaagtggttcaagtggacggtggcccagttcgagcgcctcaacaacttcgacaactgcgagttcagggtcatgcagctgggccccggcggggagtactccctcctcgtccaccacacccaggaggagctccagcagtggggcatgtcgccggagatgatcgccgaccagcagtggcgcgcctccgccaaccgccgctgctgggccgaggagtgctcctccttcatcgacaccttcttcgaggagccctacggctcgtcggagacctcctcctcggacgaagacgaagcagaggacaaggaggaggagaccaagctgctggagcaactataactggtttcatccacatccaatccacccattcgcctcgtcctttgaaattctctccattggattggatcttataccatgtgggaagagcggagcagtgatgctgcattcagtcatcgctgatccctctcttattcgaaaacagtctgtagcatgttcataatagctattagctagaactagaaatgattcgagggcaatttcagaaaatgctaaagaaacatatgctgtatctcaaggttttagctctgacatgattctgtatgttcctagatataagaacgcatacattctctattcaaaataaaatgctcagaggagataaatttgtctcgatcgctactttcctaaactctaatcctgtgggcgtcgctaccactcggtctgtcgtttattggttattggcactgttgatggacagtacaagtaccatttctcacatgctgggcatcagcagacacttgtccatatgtaaaagcagagaatctttccaattccatacagctggcatggtgacagccatattcctcactaggggagtaggagcc

SEQ ID NO: 73492 - DNA, 2889 bp, Zea Mays
gtcagttaatttttcatcggcgaagccagatttgcttttttccgtcgcgttagcacaagaacggctccagcttccgagtgctgaagccagagcagaacaagctctttgagaagctatgggcgcctatgctaatcgggcctaataatagttctcggcgcgtttcctaccgtctcgcacttgctcctcctgtgacagcgaaggcgacgagatacttcggtcatttcaactcaaagctttaagcaagtaaagcattcttatgctttgaaccttaggaaagaatatattaatcatcttggaataaagaaagcaccttcttggtaagcactaacttctgccctgcctttagtctcagataaatgacttgataccccctcaccacccaaattccccaggttcccattttgttcgaatttttcttccatgagtccttccttttttgtgtcgtcaaatattacagcattgcacaacaagcaaactaaatgaattagagcaattgtatttctatgcatgacactccaagcacctttctgttagatttatcatacagaagctaatatgaaactcctaagtttgactactataaaaatacattaatgtgtcttgaatagaattttggctttccctttttattttatatataggttgggcgtttggaaacaaaaactctgagaaccagtttaaattatcagccactcaaaaagttctgtatgtacactaaatctgcaaactgtgaccaactagtcttatttaaattaatctctgacttgaagctgaatattaatatcttgtggttatagagcaatacttgagtgatataactaaaatcatagtgcaattttcttagctcaacttactacatacctaaaagatcaacattttaaatttattatcttgttcaaccagcagtcatctctttataatgaaagatagctgtcatagtaatatcaatatggatctactatttatgttggaaaacacccaagttatgttgttagcagagtcactgagatactaatgacaactattaacatcgtgactctaaaaacagcgctcttgggcctgtattctcttttttccttttcttgggtgctttttgagcaccttgtttttggtcttttctagacctttttcctgatttcttaatataatgatacgtggttctcccacgtgttcgagaaaaaaaacaacgctcttgttagtagaaacaggtccaagcattggattcaatgaaactacactatagctctgctacatttaataacccctgatgaattcacatagaaatacgaattattagcacaaagaggaatacagcattctgaactgatacctcaccatgacaccttgggagaactttaatttatttctttgacatgtatcatagggtacatcagcagtagcctaaagctggtgttaataccgtttaccttattaattctgggctacaagagacaagaaaatggtgtactttagaccattttcccgttcatattatgcatattttttccccattaccttccatcagtgatacttcgtaatatgcagtatttgagcacagaaccagtcagactgtctttccccattacccatcaccagttctaattaataagatgtcagacaaagcgcttgcatgatccagagatctgttttgccttaattttttgctatgattgccttcagtttggtcaagcactcacagttgcccttatttttttaaatgtatggtgatctgcaacattaaaattcgaccatgttctggacattggttggtggttctacttgatttgtgcctctgcagtagaattgcatttgttcagaaccagatcctgtcattctgtaccattaaacatgattgttccgtgttaggtttatatgccctgactgttgaacggaagcttgctaaagaatgttaggcaacaaagaaatgagaacattggatgttccttcgctgttgatagtttgtcaaagtattccttttctttttccaaagattaaaccatgcacttattatgattcatgcatgggaatatctctcttttgaatatatccatggaaagagtagttctttagtatcgtttgttgcgttgatattcagcttatttgttgatggttaggtaagatgttcatcagtgcgctacaactcttgtgtatttgttggaaaagcataattaagcgatgcaaactttccccctgtgcagaattgtgaatttggatcgtcattgtctcaaatcagcaccacattttgatgagtttgcttgagagggcagggcggcgtctcaatgtctcatgcaagtgaaactgggcaccttggcccccatcaccggaaagatattccaatgcctaaacaaacatgcttgcctcattgcttagcacaaaagttggcaaatctcatccatctcatctcccagctcccccatcccatcatcttctactgaaaaaaccaggagaagtggccatcgcatggcatgacacacaactttgtccatcccttttactctggcatccagcctctgtgacctggacgagctaccggcgcgtggagcccagaaagaacggagtgtcattctcttacgccactgtgaccgccctcaaccccccccaaagccaatgaaaggcggtttagtcgcttcctacctcacttggtgatcgttctctctttccggttgatggttggcgctgtttatttttagcattaaaaaacatggataaatcggttggactaccagactaggctaaaccttgccttagtttaatggattgctggggatgttagttaatgtgaccgaatttatgggacggaattgaacctagactgcacactgcagtgcagtccaagctgtacccatttatcttatcccggtcggtgcattggtggatcaccacattgcc

SEQ ID NO: 73493 - DNA, 1008 bp, Zea Mays
gtcagttaatttttcatcggcgaagccagatttgcttttttccgtcgcgttagcacaagaacggctccagcttccgagtgctgaagccagagcagaacaagctctttgagaagctatgggcgcctatgctaatcgggcctaataatagttctcggcgcgtttcctaccgtctcgcacttgctcctcctgtgacagcgaaggcgacgagatacttcggtcatttcaactcaaagctttaagcaagtaaagcattcttatgctttgaaccttaggaaagaatatattaatcatcttggaataaagaaagcaccttcttgaattgtgaatttggatcgtcattgtctcaaatcagcaccacattttgatgagtttgcttgagagggcagggcggcgtctcaatgtctcatgcaagtgaaactgggcaccttggcccccatcaccggaaagatattccaatgcctaaacaaacatgcttgcctcattgcttagcacaaaagttggcaaatctcatccatctcatctcccagctcccccatcccatcatcttctactgaaaaaaccaggagaagtggccatcgcatggcatgacacacaactttgtccatcccttttactctggcatccagcctctgtgacctggacgagctaccggcgcgtggagcccagaaagaacggagtgtcattctcttacgccactgtgaccgccctcaaccccccccaaagccaatgaaaggcggtttagtcgcttcctacctcacttggtgatcgttctctctttccggttgatggttggcgctgtttatttttagcattaaaaaacatggataaatcggttggactaccagactaggctaaaccttgccttagtttaatggattgctggggatgttagttaatgtgaccgaatttatgggacggaattgaacctagactgcacactgcagtgcagtccaagctgtacccatttatcttatcccggtcggtgcattggtggatcaccacattgcc

SEQ ID NO: 73494 - DNA, 2954 bp, Zea Mays
gtcagttaatttttcatcggcgaagccagatttgcttttttccgtcgcgttagcacaagaacggctccagcttccgagtgctgaagccagagcagaacaagctctttgagaagctatgggcgcctatgctaatcgggcctaataatagttctcggcgcgtttcctaccgtctcgcacttgctcctcctgtgacagcgaaggcgacgagatacttcggtcatttcaactcaaagctttaagcaagtaaagcattcttatgctttgaaccttaggaaagaatatattaatcatcttggaataaagaaagcaccttcttgtagaattgcatttgttcagaaccagatcctgtcattctgtaccattaaacatgattgttccgtgttaggtttatatgccctgactgttgaacggaagcttgctaaagaatgttaggcaacaaagaaatgagaacattggatgttccttcgctgttgatagtttgtcaaagtattccttttctttttccaaagattaaaccatgcacttattatgattcatgcatgggaatatctctcttttgaatatatccatggaaagagtagttctttagtatcgtttgttgcgttgatattcagcttatttgttgatggttaggtaagatgttcatcagtgcgctacaactcttgtgtatttgttggaaaagcataattaagcgatgcaaactttccccctgtgcagaattgtgaatttggatcgtcattgtctcaaatcagcaccacattttgatgagtttgcttgagagggcagggcggcgtctcaatgtctcatgcaagtgaaactgggcaccttggcccccatcaccggaaagatattccaatgcctaaacaaacatgcttgcctcattgcttagcacaaaagttggcaaatctcatccatctcatctcccagctcccccatcccatcatcttctactgaaaaaaccaggagaagtggccatcgcatggcatgacacacaactttgtccatcccttttactctggcatccagcctctgtgacctggacgagctaccggcgcgtggagcccagaaagaacggagtgtcattctcttacgccactgtgaccgccctcaaccccccccaaagccaatgaaaggcggtttagtcgcttcctacctcacttgtgtaaaaggcttggctgccagcgaggccggatcccgcggcttgtgtgcacagcagcctccatgccttcagctggtgatccgagcgccgttgcccggaagaggaaccccacaaaataaaactgccccacccatcagcccatcacccaacccaaccacctcaccagctttttatatacccgcgcaccccggcgccagctacccatgtcagacgacgcgccatcgcgcctccaccaccccgaccctgaccccgaactcgccgtcgcaacaggccaagacgcagcagtagaagcaccaccaccaccaccaccggcacacgaccccggcggcagcgagtgccggttctgcgagatgacgcggcagcaccagccgcagtgcgcgcggcggctgccgaagcgcatcatcctggtgcggcacggcgagagccagggcaacctggacatgtcggcctacaccaccacgcccgactaccgcatcccgctgacggcgctgggcgcggagcaggcgcgcgccgcggggcagcgcatccgcgacgtggtggcgggcagcggcaactggaaggtctacttctacgtgtccccctacgcgcgcacccgcgccacgctgcgcgagatcggccgcgccttcccgcgggaccgcgtcatcggcgcccgcgaggagtgccgcgtccgggagcaggacttcggcaacttccaggtggaggagcgcatgcgcgccgtcaaggagacgcgccagcgcttcggccgcttcttcttccgcttcccagagggcgagtccgccgccgacgtcttcgaccgcgtcgccagcttccttgagtcgctgtggcgggacatcgacatggggcggctggaccaggaccccagctgcgagacgaacctggtgatcgtctcccacggcctcacctcgcgggtgttcctgatgaagtggttcaagtggacggtggcccagttcgagcgcctcaacaacttcgacaactgcgagttcagggtcatgcagctgggccccggcggggagtactccctcctcgtccaccacacccaggaggagctccagcagtggggcatgtcgccggagatgatcgccgaccagcagtggcgcgcctccgccaaccgccgctgctgggccgaggagtgctcctccttcatcgacaccttcttcgaggagccctacggctcgtcggagacctcctcctcggacgaagacgaagcagaggacaaggaggaggagaccaagctgctggagcaactataactggtttcatccacatccaatccacccattcgcctcgtcctttgaaattctctccattggattggatcttataccatgtgggaagagcggagcagtgatgctgcattcagtcatcgctgatccctctcttattcgaaaacagtctgtagcatgttcataatagctattagctagaactagaaatgattcgagggcaatttcagaaaatgctaaagaaacatatgctgtatctcaaggttttagctctgacatgattctgtatgttcctagatataagaacgcatacattctctattcaaaataaaatgctcagaggagataaatttgtctcgatcgctactttcctaaactctaatcctgtgggcgtcgctaccactcggtctgtcgtttattggttattggcactgttgatggacagtacaagtaccatttctcacatgctgggcatcagcagacacttgtccatatgtaaaagcagagaatctttccaattccatacagctggcatggtgacagccatattcctcactaggggagtaggagcc

SEQ ID NO: 73495 - DNA, 1336 bp, Zea Mays
gttaatttttcatcggcgaagccagatttgcttttttccgtcgcgttagcacaagaacggctccagcttccgagtgctgaagccagagcagaacaagctctttgagaagctatgggcgcctatgctaatcgggcctaataatagttctcggcgcgtttcctaccgtctcgcacttgctcctcctgtgacagcgaaggcgacgagatacttcggtcatttcaactcaaagctttaagcaagtaaagcattcttatgctttgaaccttaggaaagaatatattaatcatcttggaataaagaaagcaccttcttggtttatatgccctgactgttgaacggaagcttgctaaagaatgttaggcaacaaagaaatgagaacattggatgttccttcgctgttgatagtttgtcaaagtattccttttctttttccaaagattaaaccatgcacttattatgattcatgcatgggaatatctctcttttgaatatatccatggaaagagtagttctttagtatcgtttgttgcgttgatattcagcttatttgttgatggttaggtaagatgttcatcagtgcgctacaactcttgtgtatttgttggaaaagcataattaagcgatgcaaactttccccctgtgcagaattgtgaatttggatcgtcattgtctcaaatcagcaccacattttgatgagtttgcttgagagggcagggcggcgtctcaatgtctcatgcaagtgaaactgggcaccttggcccccatcaccggaaagatattccaatgcctaaacaaacatgcttgcctcattgcttagcacaaaagttggcaaatctcatccatctcatctcccagctcccccatcccatcatcttctactgaaaaaaccaggagaagtggccatcgcatggcatgacacacaactttgtccatcccttttactctggcatccagcctctgtgacctggacgagctaccggcgcgtggagcccagaaagaacggagtgtcattctcttacgccactgtgaccgccctcaaccccccccaaagccaatgaaaggcggtttagtcgcttcctacctcacttggtgatcgttctctctttccggttgatggttggcgctgtttatttttagcattaaaaaacatggataaatcggttggactaccagactaggctaaaccttgccttagtttaatggattgctggggatgttagttaatgtgaccgaatttatgggacggaattgaacctagactgcacactgcagtgcagtccaagctgtacccatttatcttatcccggtcggtgcattggtggatcaccacattgcc

SEQ ID NO: 73496 - DNA, 4107 bp, Zea Mays
gttaatttttcatcggcgaagccagatttgcttttttccgtcgcgttagcacaagaacggctccagcttccgagtgctgaagccagagcagaacaagctctttgagaagctatgggcgcctatgctaatcgggcctaataatagttctcggcgcgtttcctaccgtctcgcacttgctcctcctgtgacagcgaaggcgacgagatacttcggtcatttcaactcaaagctttaagcaagtaaagcattcttatgctttgaaccttaggaaagaatatattaatcatcttggaataaagaaagcaccttcttggttgggcgtttggaaacaaaaactctgagaaccagtttaaattatcagccactcaaaaagttctgtatgtacactaaatctgcaaactgtgaccaactagtcttatttaaattaatctctgacttgaagctgaatattaatatcttgtggttatagagcaatacttgagtgatataactaaaatcatagtgcaattttcttagctcaacttactacatacctaaaagatcaacattttaaatttattatcttgttcaaccagcagtcatctctttataatgaaagatagctgtcatagtaatatcaatatggatctactatttatgttggaaaacacccaagttatgttgttagcagagtcactgagatactaatgacaactattaacatcgtgactctaaaaacagcgctcttgggcctgtattctcttttttccttttcttgggtgctttttgagcaccttgtttttggtcttttctagacctttttcctgatttcttaatataatgatacgtggttctcccacgtgttcgagaaaaaaaacaacgctcttgttagtagaaacaggtccaagcattggattcaatgaaactacactatagctctgctacatttaataacccctgatgaattcacatagaaatacgaattattagcacaaagaggaatacagcattctgaactgatacctcaccatgacaccttgggagaactttaatttatttctttgacatgtatcatagggtacatcagcagtagcctaaagctggtgttaataccgtttaccttattaattctgggctacaagagacaagaaaatggtgtactttagaccattttcccgttcatattatgcatattttttccccattaccttccatcagtgatacttcgtaatatgcagtatttgagcacagaaccagtcagactgtctttccccattacccatcaccagttctaattaataagatgtcagacaaagcgcttgcatgatccagagatctgttttgccttaattttttgctatgattgccttcagtttggtcaagcactcacagttgcccttatttttttaaatgtatggtgatctgcaacattaaaattcgaccatgttctggacattggttggtggttctacttgatttgtgcctctgcagtagaattgcatttgttcagaaccagatcctgtcattctgtaccattaaacatgattgttccgtgttaggtttatatgccctgactgttgaacggaagcttgctaaagaatgttaggcaacaaagaaatgagaacattggatgttccttcgctgttgatagtttgtcaaagtattccttttctttttccaaagattaaaccatgcacttattatgattcatgcatgggaatatctctcttttgaatatatccatggaaagagtagttctttagtatcgtttgttgcgttgatattcagcttatttgttgatggttaggtaagatgttcatcagtgcgctacaactcttgtgtatttgttggaaaagcataattaagcgatgcaaactttccccctgtgcagaattgtgaatttggatcgtcattgtctcaaatcagcaccacattttgatgagtttgcttgagagggcagggcggcgtctcaatgtctcatgcaagtgaaactgggcaccttggcccccatcaccggaaagatattccaatgcctaaacaaacatgcttgcctcattgcttagcacaaaagttggcaaatctcatccatctcatctcccagctcccccatcccatcatcttctactgaaaaaaccaggagaagtggccatcgcatggcatgacacacaactttgtccatcccttttactctggcatccagcctctgtgacctggacgagctaccggcgcgtggagcccagaaagaacggagtgtcattctcttacgccactgtgaccgccctcaaccccccccaaagccaatgaaaggcggtttagtcgcttcctacctcacttgtgtaaaaggcttggctgccagcgaggccggatcccgcggcttgtgtgcacagcagcctccatgccttcagctggtgatccgagcgccgttgcccggaagaggaaccccacaaaataaaactgccccacccatcagcccatcacccaacccaaccacctcaccagctttttatatacccgcgcaccccggcgccagctacccatgtcagacgacgcgccatcgcgcctccaccaccccgaccctgaccccgaactcgccgtcgcaacaggccaagacgcagcagtagaagcaccaccaccaccaccaccggcacacgaccccggcggcagcgagtgccggttctgcgagatgacgcggcagcaccagccgcagtgcgcgcggcggctgccgaagcgcatcatcctggtgcggcacggcgagagccagggcaacctggacatgtcggcctacaccaccacgcccgactaccgcatcccgctgacggcgctgggcgcggagcaggcgcgcgccgcggggcagcgcatccgcgacgtggtggcgggcagcggcaactggaaggtctacttctacgtgtccccctacgcgcgcacccgcgccacgctgcgcgagatcggccgcgccttcccgcgggaccgcgtcatcggcgcccgcgaggagtgccgcgtccgggagcaggacttcggcaacttccaggtggaggagcgcatgcgcgccgtcaaggagacgcgccagcgcttcggccgcttcttcttccgcttcccagagggcgagtccgccgccgacgtcttcgaccgcgtcgccagcttccttgagtcgctgtggcgggacatcgacatggggcggctggaccaggaccccagctgcgagacgaacctggtgatcgtctcccacggcctcacctcgcgggtgttcctgatgaagtggttcaagtggacggtggcccagttcgagcgcctcaacaacttcgacaactgcgagttcagggtcatgcagctgggccccggcggggagtactccctcctcgtccaccacacccaggaggagctccagcagtggggcatgtcgccggagatgatcgccgaccagcagtggcgcgcctccgccaaccgccgctgctgggccgaggagtgctcctccttcatcgacaccttcttcgaggagccctacggctcgtcggagacctcctcctcggacgaagacgaagcagaggacaaggaggaggagaccaagctgctggagcaactataactggtttcatccacatccaatccacccattcgcctcgtcctttgaaattctctccattggattggatcttataccatgtgggaagagcggagcagtgatgctgcattcagtcatcgctgatccctctcttattcgaaaacagtctgtagcatgttcataatagctattagctagaactagaaatgattcgagggcaatttcagaaaatgctaaagaaacatatgctgtatctcaaggttttagctctgacatgattctgtatgttcctagatataagaacgcatacattctctattcaaaataaaatgctcagaggagataaatttgtctcgatcgctactttcctaaactctaatcctgtgggcgtcgctaccactcggtctgtcgtttattggttattggcactgttgatggacagtacaagtaccatttctcacatgctgggcatcagcagacacttgtccatatgtaaaagcagagaatctttccaattccatacagctggcatggtgacagccatattcctcactaggggagtaggagcc

SEQ ID NO: 73497 - DNA, 1729 bp, Zea Mays
gttaatttttcatcggcgaagccagatttgcttttttccgtcgcgttagcacaagaacggctccagcttccgagtgctgaagccagagcagaacaagctctttgagaagctatgggcgcctatgctaatcgggcctaataatagttctcggcgcgtttcctaccgtctcgcacttgctcctcctgtgacagcgaaggcgacgaggccaagacgcagcagtagaagcaccaccaccaccaccaccggcacacgaccccggcggcagcgagtgccggttctgcgagatgacgcggcagcaccagccgcagtgcgcgcggcggctgccgaagcgcatcatcctggtgcggcacggcgagagccagggcaacctggacatgtcggcctacaccaccacgcccgactaccgcatcccgctgacggcgctgggcgcggagcaggcgcgcgccgcggggcagcgcatccgcgacgtggtggcgggcagcggcaactggaaggtctacttctacgtgtccccctacgcgcgcacccgcgccacgctgcgcgagatcggccgcgccttcccgcgggaccgcgtcatcggcgcccgcgaggagtgccgcgtccgggagcaggacttcggcaacttccaggtggaggagcgcatgcgcgccgtcaaggagacgcgccagcgcttcggccgcttcttcttccgcttcccagagggcgagtccgccgccgacgtcttcgaccgcgtcgccagcttccttgagtcgctgtggcgggacatcgacatggggcggctggaccaggaccccagctgcgagacgaacctggtgatcgtctcccacggcctcacctcgcgggtgttcctgatgaagtggttcaagtggacggtggcccagttcgagcgcctcaacaacttcgacaactgcgagttcagggtcatgcagctgggccccggcggggagtactccctcctcgtccaccacacccaggaggagctccagcagtggggcatgtcgccggagatgatcgccgaccagcagtggcgcgcctccgccaaccgccgctgctgggccgaggagtgctcctccttcatcgacaccttcttcgaggagccctacggctcgtcggagacctcctcctcggacgaagacgaagcagaggacaaggaggaggagaccaagctgctggagcaactataactggtttcatccacatccaatccacccattcgcctcgtcctttgaaattctctccattggattggatcttataccatgtgggaagagcggagcagtgatgctgcattcagtcatcgctgatccctctcttattcgaaaacagtctgtagcatgttcataatagctattagctagaactagaaatgattcgagggcaatttcagaaaatgctaaagaaacatatgctgtatctcaaggttttagctctgacatgattctgtatgttcctagatataagaacgcatacattctctattcaaaataaaatgctcagaggagataaatttgtctcgatcgctactttcctaaactctaatcctgtgggcgtcgctaccactcggtctgtcgtttattggttattggcactgttgatggacagtacaagtaccatttctcacatgctgggcatcagcagacacttgtccatatgtaaaagcagagaatctttccaattccatacagctggcatggtgacagccatattcctcactaggggagtaggagcc

SEQ ID NO: 73498 - DNA, 1304 bp, Zea Mays
gttaatttttcatcggcgaagccagatttgcttttttccgtcgcgttagcacaagaacggctccagcttccgagtgctgaagccagagcagaacaagctctttgagaagctatgggcgcctatgctaatcgggcctaataatagttctcggcgcgtttcctaccgtctcgcacttgctcctcctgtgacagcgaaggcgacgagatacttcggtcatttcaactcaaagctttaagcaagtaaagcattcttatgctttgaaccttaggaaagaatatattaatcatcttggaataaagaaagcaccttcttggcttccttgagtcgctgtggcgggacatcgacatggggcggctggaccaggaccccagctgcgagacgaacctggtgatcgtctcccacggcctcacctcgcgggtgttcctgatgaagtggttcaagtggacggtggcccagttcgagcgcctcaacaacttcgacaactgcgagttcagggtcatgcagctgggccccggcggggagtactccctcctcgtccaccacacccaggaggagctccagcagtggggcatgtcgccggagatgatcgccgaccagcagtggcgcgcctccgccaaccgccgctgctgggccgaggagtgctcctccttcatcgacaccttcttcgaggagccctacggctcgtcggagacctcctcctcggacgaagacgaagcagaggacaaggaggaggagaccaagctgctggagcaactataactggtttcatccacatccaatccacccattcgcctcgtcctttgaaattctctccattggattggatcttataccatgtgggaagagcggagcagtgatgctgcattcagtcatcgctgatccctctcttattcgaaaacagtctgtagcatgttcataatagctattagctagaactagaaatgattcgagggcaatttcagaaaatgctaaagaaacatatgctgtatctcaaggttttagctctgacatgattctgtatgttcctagatataagaacgcatacattctctattcaaaataaaatgctcagaggagataaatttgtctcgatcgctactttcctaaactctaatcctgtgggcgtcgctaccactcggtctgtcgtttattggttattggcactgttgatggacagtacaagtaccatttctcacatgctgggcatcagcagacacttgtccatatgtaaaagcagagaatctttccaattccatacagctggcatggtgacagccatattcctcactaggggagtaggagcc

SEQ ID NO: 73499 - DNA, 4431 bp, Zea Mays
gttaatttttcatcggcgaagccagatttgcttttttccgtcgcgttagcacaagaacggctccagcttccgagtgctgaagccagagcagaacaagctctttgagaagctatgggcgcctatgctaatcgggcctaataatagttctcggcgcgtttcctaccgtctcgcacttgctcctcctgtgacagcgaaggcgacgagatacttcggtcatttcaactcaaagctttaagcaagtaaagcattcttatgctttgaaccttaggaaagaatatattaatcatcttggaataaagaaagcaccttcttggtaagcactaacttctgccctgcctttagtctcagataaatgacttgataccccctcaccacccaaattccccaggttcccattttgttcgaatttttcttccatgagtccttccttttttgtgtcgtcaaatattacagcattgcacaacaagcaaactaaatgaattagagcaattgtatttctatgcatgacactccaagcacctttctgttagatttatcatacagaagctaatatgaaactcctaagtttgactactataaaaatacattaatgtgtcttgaatagaattttggctttccctttttattttatatataggttgggcgtttggaaacaaaaactctgagaaccagtttaaattatcagccactcaaaaagttctgtatgtacactaaatctgcaaactgtgaccaactagtcttatttaaattaatctctgacttgaagctgaatattaatatcttgtggttatagagcaatacttgagtgatataactaaaatcatagtgcaattttcttagctcaacttactacatacctaaaagatcaacattttaaatttattatcttgttcaaccagcagtcatctctttataatgaaagatagctgtcatagtaatatcaatatggatctactatttatgttggaaaacacccaagttatgttgttagcagagtcactgagatactaatgacaactattaacatcgtgactctaaaaacagcgctcttgggcctgtattctcttttttccttttcttgggtgctttttgagcaccttgtttttggtcttttctagacctttttcctgatttcttaatataatgatacgtggttctcccacgtgttcgagaaaaaaaacaacgctcttgttagtagaaacaggtccaagcattggattcaatgaaactacactatagctctgctacatttaataacccctgatgaattcacatagaaatacgaattattagcacaaagaggaatacagcattctgaactgatacctcaccatgacaccttgggagaactttaatttatttctttgacatgtatcatagggtacatcagcagtagcctaaagctggtgttaataccgtttaccttattaattctgggctacaagagacaagaaaatggtgtactttagaccattttcccgttcatattatgcatattttttccccattaccttccatcagtgatacttcgtaatatgcagtatttgagcacagaaccagtcagactgtctttccccattacccatcaccagttctaattaataagatgtcagacaaagcgcttgcatgatccagagatctgttttgccttaattttttgctatgattgccttcagtttggtcaagcactcacagttgcccttatttttttaaatgtatggtgatctgcaacattaaaattcgaccatgttctggacattggttggtggttctacttgatttgtgcctctgcagtagaattgcatttgttcagaaccagatcctgtcattctgtaccattaaacatgattgttccgtgttaggtttatatgccctgactgttgaacggaagcttgctaaagaatgttaggcaacaaagaaatgagaacattggatgttccttcgctgttgatagtttgtcaaagtattccttttctttttccaaagattaaaccatgcacttattatgattcatgcatgggaatatctctcttttgaatatatccatggaaagagtagttctttagtatcgtttgttgcgttgatattcagcttatttgttgatggttaggtaagatgttcatcagtgcgctacaactcttgtgtatttgttggaaaagcataattaagcgatgcaaactttccccctgtgcagaattgtgaatttggatcgtcattgtctcaaatcagcaccacattttgatgagtttgcttgagagggcagggcggcgtctcaatgtctcatgcaagtgaaactgggcaccttggcccccatcaccggaaagatattccaatgcctaaacaaacatgcttgcctcattgcttagcacaaaagttggcaaatctcatccatctcatctcccagctcccccatcccatcatcttctactgaaaaaaccaggagaagtggccatcgcatggcatgacacacaactttgtccatcccttttactctggcatccagcctctgtgacctggacgagctaccggcgcgtggagcccagaaagaacggagtgtcattctcttacgccactgtgaccgccctcaaccccccccaaagccaatgaaaggcggtttagtcgcttcctacctcacttgtgtaaaaggcttggctgccagcgaggccggatcccgcggcttgtgtgcacagcagcctccatgccttcagctggtgatccgagcgccgttgcccggaagaggaaccccacaaaataaaactgccccacccatcagcccatcacccaacccaaccacctcaccagctttttatatacccgcgcaccccggcgccagctacccatgtcagacgacgcgccatcgcgcctccaccaccccgaccctgaccccgaactcgccgtcgcaacaggccaagacgcagcagtagaagcaccaccaccaccaccaccggcacacgaccccggcggcagcgagtgccggttctgcgagatgacgcggcagcaccagccgcagtgcgcgcggcggctgccgaagcgcatcatcctggtgcggcacggcgagagccagggcaacctggacatgtcggcctacaccaccacgcccgactaccgcatcccgctgacggcgctgggcgcggagcaggcgcgcgccgcggggcagcgcatccgcgacgtggtggcgggcagcggcaactggaaggtctacttctacgtgtccccctacgcgcgcacccgcgccacgctgcgcgagatcggccgcgccttcccgcgggaccgcgtcatcggcgcccgcgaggagtgccgcgtccgggagcaggacttcggcaacttccaggtggaggagcgcatgcgcgccgtcaaggagacgcgccagcgcttcggccgcttcttcttccgcttcccagagggcgagtccgccgccgacgtcttcgaccgcgtcgccagcttccttgagtcgctgtggcgggacatcgacatggggcggctggaccaggaccccagctgcgagacgaacctggtgatcgtctcccacggcctcacctcgcgggtgttcctgatgaagtggttcaagtggacggtggcccagttcgagcgcctcaacaacttcgacaactgcgagttcagggtcatgcagctgggccccggcggggagtactccctcctcgtccaccacacccaggaggagctccagcagtggggcatgtcgccggagatgatcgccgaccagcagtggcgcgcctccgccaaccgccgctgctgggccgaggagtgctcctccttcatcgacaccttcttcgaggagccctacggctcgtcggagacctcctcctcggacgaagacgaagcagaggacaaggaggaggagaccaagctgctggagcaactataactggtttcatccacatccaatccacccattcgcctcgtcctttgaaattctctccattggattggatcttataccatgtgggaagagcggagcagtgatgctgcattcagtcatcgctgatccctctcttattcgaaaacagtctgtagcatgttcataatagctattagctagaactagaaatgattcgagggcaatttcagaaaatgctaaagaaacatatgctgtatctcaaggttttagctctgacatgattctgtatgttcctagatataagaacgcatacattctctattcaaaataaaatgctcagaggagataaatttgtctcgatcgctactttcctaaactctaatcctgtgggcgtcgctaccactcggtctgtcgtttattggttattggcactgttgatggacagtacaagtaccatttctcacatgctgggcatcagcagacacttgtccatatgtaaaagcagagaatctttccaattccatacagctggcatggtgacagccatattcctcactaggggagtaggagcc

SEQ ID NO: 73500 - DNA, 1366 bp, Zea Mays
acgacacgtaacaagtcgaaacttaggtttgaaaggagagcccatacaaagacgacttgttgttcggcccgacttaattagttaggcccataagcgtgcccgttctttttcgcgtttcacggcggcgcggacagagagccatcggcggcgcaccgaccgccggcgaagggtacagagatgaagacggttagcctcggcgcctctaggccttccactgtcaacttccgcatgccgacgagggacaacctcgtgcctatacgcgtcgacgtcgaggtggacggccagcgctacagggacgccttcacctggaacccgcgagatcccgactcggagataatcagcttcgctaagcggacggccaaggacctcaagctgccggccaatttcgtcccccagatgctccagtccatccaggggcaacttgcggagttccgttcctacgaggggcaggagatgcaaatcaaagagaagattgtgcctctgaagattgacctccgagtgaacaacactgtaattagggaccaattcttatgggatatcggcaaccttgatagtgaccctgaagaatttgcgaggacactgtgtgatgatttgaatattacagaccctgaagttgggcctgcaatagctgtttccatccgtgagcagctttatgagagcgtctctgttatgagagagaagcaaatgtcaaagaagggaaggcgagcaccagaattttcttcaaatagtaaagccgtgaacaatgcagtggatttgttcaagtattttggcagcaaagggagcgtcatccggaaaaggaaggaatggtacctgtatgagcctgttgttgatgtggtagctaatgacgaagacgggaaagaggaggctaataattctagcaggccgaagaaaagagccgacgaagagaaagctgcaagccttcagtccctttgaacacaagctgctgatagttctaaccaaggagggtttctcttgccaatcccagcagatgcctgcctttgacattcgtcgtaggatggcttcatcatagctacatatttgtatgtaagcggtgtgagagcgtgttattctctagagttgagttccacaagagtcttctctagagttgagttacaagcggctcttaatttctctacacaagacaaggaagaaacactagctgtagaattccaaaaggctcttaatttctcttaatttgtctacttgcataccttttggagaacctctatgttttcttggatcaccagctttaggagaaggcttctttgttgcactttttgataagagcatgttgattcttggagaaccccttccaaacatgttaactgatattatataacacaatattaaaccaaatttctatgct

SEQ ID NO: 73501 - DNA, 1892 bp, Zea Mays
aaccctctccctctagcgccggtggcggcgacgggcgcacgacgtctgagaccatggcgccgacgccggagccccgccgcccgtacaagcggccggccatctccgaccagcagcgccgccgggagctcgcactccaggcgcagtcggctcggcgggccgacgcccaggctcgcgcgcgcgccctcgccacttctctcctcaccacccgggcgcctaccgcggccaccagtcgcgacgaggaggaggaggagtacgagcatgaggaggaggaggaggagcgcgagctcactgcctccggcgtcgcggcggcggccgccgcctccaggctccgcggctccgaagcgcgccggtggttcgcgcgccaggttatgctccccgagtggatggtcgatgccccaccccacctcgccaccgactggcatgtttttgcccgaccttctggcaaacgatgtttggttgtgtcatccaatggcatgacgatcagcagggttcgtaatggatccatccttcatcgcttcccttccgctctgcccaatggttcaaagagagacatttctggaccagcaagctcgtactccatcctcgattgcatttttcacgagcctgatgaaacatactatatcattgatatgatctgttggcgaggctattcactatatgactgcaccgccgagttcaggtttttctgggtcaactctaagatcgcagaaacttctgctggtgatcctccatcaacgtaccacagatatagattcagtgcactccctgtatatgagtgcactcttgagggtctccaagcagcatactcaggcagcatgccttatgtcaaagatggtttggtgttctacaacaagcatgcacattatcaagctggaatcacacctcttgccctagtatggaaagatgagacctgtagccagtatgttatcgatacgaacaacaagggtgaaataccaagcgaacaacatcttgtgttggagctgctagaagatggaaaggtggttacttcagatgatcctcatgttgtgtttggtagcttggacagcgcattcatacagacgtcaaatctgcgaccagggaaccttctccgctttgctgttagagatgaaagtgtgaaactcatggatggaaagatgcatataggtcagctgcaatttgttggaaagccaaaccgagctcgtgcttttgctgacagccattcgaaatatgcggcaaggcatgttcctctgagaattgaggatctggttgcctccattcaatcaaacaatatggaggttgaatccaccgatgttgaaatgcaagattaaggttgaagaggtaggctttcatgtcagcattttaacaaacgacatggtcgtctgaaaccatggttttcagggagtgcctcacggcctataaaaggtttaaacagcgcacgagttttttgtaagatgaacattctgaacattgccatccacgtgaatgtgactggtataggagtagcgcaactcaatgtgtgaagtgcccgtttgctctgagtttggcgatttcaatcgctgaaatttggccccaaggaaaaagtggtgtgtctacgtatcggatttctccgtgtttgatgatgaccctgactcccaatggggacatataaatctaagtgccctttaaaaaaaatatatttagcacatcaatgtggtagctgtgagtttctctcttggtttattgcagatgcaaaaacggttgcgtcagtcagttgtacatatagtttactagtcatgtgcaggttgttaagattcccatttatacttgaatagagtataaaatacaaagacatgtgttttggtgatgtgtgaatgtgagtttagagtcaataaccatagttcgaatcctcatttccgtataatcttagtttattt

SEQ ID NO: 73502 - DNA, 1466 bp, Zea Mays
aatatgggctgggctgcggggttatgcagttgacagagcgtgcctgcccagcgtgctggcggctggcccgcgcgacttgcaagtctagacgtgggccagctcggtgctaaagagaagattaccgttgcgacaatgccaccccttccctgcctactctactcccggtaccggagctatccaattcccttcccacccagaccgcgatccctaaccctacccaatgtcctcgccgccgccggcttcgcccatggccgccgagaacgaggcctgcgactgggcggagatgccgtcggacgcgctcgcggccgtgttcgcgaagctggacgtggccgagatcctgtccggcgccgggctggtctgccgctcgtggcgccgtctcgcggcctcggaccctacgctgtggcgccgcgtcgacatgtgctaccagggggaccagctgcagaccgaggaggtcgaggccatggcgcgcgccgcggtcgaccgctccgcgggcaccatggaggcgttctgtgccgagaccttcgtcaacgacgacctgctccgctacatctctcagagggccccctcattgaagagcctccatctctgcctgtgccattacgtcactaatcaaggttttgcagaggcagttaattgcttccctcagctcgaggagctagacattacattctgctcattgtatggcatcgtgtgtgagactgctgggagagcctgcccgcagcttaaatgcttcaggttgaatgagcgctggtctattcttcaaagcgagtttgcaccctacgagggcatggatgatgacacggaagcattagggatcgctagcaccatgcctgggctccaagaacttcagttgatcgatggacgacgcgctgagatcgaaatgcgctaggatacgatatctgaagcttcctcacgactccatctccgacttcaagtatcgggcttacatcgtcagcagcatagccaactcgggctctgattttgaggttgatatgtatgatgatctgctggatgtggtcactgaagatgatgatgctgatttcgatgacatggatgatttcgatgatacagtctcagatggaggcatgtacgatgatgacttggatatctgaaattaggaatcggttcaaacagcttttccgtggaccatgtaagtgctgttagctggaatggtttcccatcccttttctttgagattcgggtagctatgatggaatctccctgatgttcatacttctgcgcctctccatttgttaagaagctggagtagctgaactggttttaatcgatgtacaactgttgtttttttattctgaacctttgttaattggtattttaataataacctagggcaaaaaatgtgtatatatacctcctggccatgttagggatgtgtctagatgtttctatgcattatgcatgtgacaaatttcaatttttttgacttcctaaaatatgcatttgtg

SEQ ID NO: 73503 - DNA, 2052 bp, Zea Mays
agaatatttcttttagagtagaaatttagagtagaatgagtgcggatagcctaaaactttagcgtacgatagagtgcggatagccgtggcaggccacgcaggacatgcgctgcggcgccgtgccacagaggatccatgtcagcacgtggcggcgcacgggcccccgacggaaaaatttggaccttgccgcgcgccacacgcggggcccacatgccagcactccgatttcaaacccaaacccaagccagcgtttctatcccgggatcctcgttttgtttcccttcccccacccttcctcttcctccctatctatcagcactgctcgccggcgccgcctctgcaaaaggctcacttttgcctccggaacccagcggaatccgccggcggaccggaaacactcgctcgcccccctcaccccctgtctgcccggccgtcggagcgcgtcgcctccgggcgtgcagcagcagatccgtggagccaaagctactgattgccttgtcctgaccagcgaaagagggatctttgggaggcaatcagaggtgttcggtttggtcaaacaaagctcagctctcttgggatgcttgctgcgagctgcttgtgttcatacttgagagaataaaacagtgcatcatcttgctgtcttgtccttcgtgattggaagagaaaacgtgctgctgttcttgctatgtctgtctcggagaaggtggcgccatcgaagtcatcagtttcttcgtcgtcagatttggatccgctgctgaaggatctcacggagaagaagttgacctttaggaggaacgtggtgtcattggcagctgagctcaaggatgcgaggaacaagcttgcctcccaggagcagctgtttgtaaaggaatctcaaactagaaaggttgttgagacaaaggcaaggagcatggaagaggaagtaagcaagctgcagaaatgcttgcaggacaaggatgagcaactgcgttcatccgcaagtagcacggaacagtacctccatgagttggatgatcttagaacacaactgtcaattactcaagctacagcagaagcgagtgctgcatcagccaagtcagctcaggtgcagtgcttgtcattgctgaaagagctgaatgagaaggacatctcgctcaaagagcatgagcttcgagtgaacaagctaggtgagcagctcgatcttctccagaaggatctacaagcaagggagctctcacaaatgcaacttaaggatgaagttctaagaattgagaccgacatcatggatgcaattgccaaagctgggtctaggtctgacaaagacaatgagcttttaaagatcttatctgacgtttcaccaaggaatgtccagaacctcaacagccttttgaatgctaagaatacagaaattgcgaggttgagagaggaaatcagaatattatctgctcactggacgaacaaaaccaaggaacttgaatcacagttagaaaagcagcgaagaactgatcaggagctgaagaagagggtcctgaagcttgaattttgccttcaagaatctcagtcccagatgcgaaaattaaagaggatgggggagaaaagagacaaggctctcaaggagctcatggaccaggtggccatgaagcagcccaacagcatgtgccatggaaacaaggataatttctgggagagccagggcttcaggttcattgcctctatgtcgatgctggcgctagtgatcctcgcaaagcgttgaagcggcatagtttaagcagatgtgaatgtagcgtttacattagcttgtaggcttgggcagttgtgcatactgcatgccaaaatttgccgacatccaatcctagtctgtaaactgtaaaaatagttgtggcctgtaatccgtagcgcagtttctgctagttcatgtaaacccatataagctgtcttgtagtcacagctagtgaatgtcagctcatgtagtcaagaatctacaaccttataatttcagttccagaactgcttgagcagttgtcacatgtaactctaattagctatagagcgcatgagtactgcactgactag

SEQ ID NO: 73504 - DNA, 1622 bp, Zea Mays
ctttgtcctcgtctccttgcaatgcaagcactcacgaagatgccttgccaaagctactgattgccttgtcctgaccagcgaaagagggatctttgggaggcaatcagaggtgttcggtttggtcaaacaaagctcagctctcttgggatgcttgctgcgagctgcttgtgttcatacttgagagaataaaacagtgcatcatcttgctgtcttgtccttcgtgattggaagagaaaacgtgctgctgttcttgctatgtctgtctcggagaaggtggcgccatcgaagtcatcagtttcttcgtcgtcagatttggatccgctgctgaaggatctcacggagaagaagttgacctttaggaggaacgtggtgtcattggcagctgagctcaaggatgcgaggaacaagcttgcctcccaggagcagctgtttgtaaaggaatctcaaactagaaaggttgttgagacaaaggcaaggagcatggaagaggaagtaagcaagctgcagaaatgcttgcaggacaaggatgagcaactgcgttcatccgcaagtagcacggaacagtacctccatgagttggatgatcttagaacacaactgtcaattactcaagctacagcagaagcgagtgctgcatcagccaagtcagctcaggtgcagtgcttgtcattgctgaaagagctgaatgagaaggacatctcgctcaaagagcatgagcttcgagtgaacaagctaggtgagcagctcgatcttctccagaaggatctacaagcaagggagctctcacaaatgcaacttaaggatgaagttctaagaattgagaccgacatcatggatgcaattgccaaagctgggtctaggtctgacaaagacaatgagcttttaaagatcttatctgacgtttcaccaaggaatgtccagaacctcaacagccttttgaatgctaagaatacagaaattgcgaggttgagagaggaaatcagaatattatctgctcactggacgaacaaaaccaaggaacttgaatcacagttagaaaagcagcgaagaactgatcaggagctgaagaagagggtcctgaagcttgaattttgccttcaagaatctcagtcccagatgcgaaaattaaagaggatgggggagaaaagagacaaggctctcaaggagctcatggaccaggtggccatgaagcagcccaacagcatgtgccatggaaacaaggataatttctgggagagccagggcttcaggttcattgcctctatgtcgatgctggcgctagtgatcctcgcaaagcgttgaagcggcatagtttaagcagatgtgaatgtagcgtttacattagcttgtaggcttgggcagttgtgcatactgcatgccaaaatttgccgacatccaatcctagtctgtaaactgtaaaaatagttgtggcctgtaatccgtagcgcagtttctgctagttcatgtaaacccatataagctgtcttgtagtcacagctagtgaatgtcagctcatgtagtcaagaatctacaaccttataatttcagttccagaactgcttgagcagttgtcacatgtaactctaattagctatagagcgcatgagtactgcactgactag

SEQ ID NO: 73505 - DNA, 1627 bp, Zea Mays
ctttgctctggcttccgctagatgtgaatacagtattttcggagtattgaaaccaaagctactgattgccttgtcctgaccagcgaaagagggatctttgggaggcaatcagaggtgttcggtttggtcaaacaaagctcagctctcttgggatgcttgctgcgagctgcttgtgttcatacttgagagaataaaacagtgcatcatcttgctgtcttgtccttcgtgattggaagagaaaacgtgctgctgttcttgctatgtctgtctcggagaaggtggcgccatcgaagtcatcagtttcttcgtcgtcagatttggatccgctgctgaaggatctcacggagaagaagttgacctttaggaggaacgtggtgtcattggcagctgagctcaaggatgcgaggaacaagcttgcctcccaggagcagctgtttgtaaaggaatctcaaactagaaaggttgttgagacaaaggcaaggagcatggaagaggaagtaagcaagctgcagaaatgcttgcaggacaaggatgagcaactgcgttcatccgcaagtagcacggaacagtacctccatgagttggatgatcttagaacacaactgtcaattactcaagctacagcagaagcgagtgctgcatcagccaagtcagctcaggtgcagtgcttgtcattgctgaaagagctgaatgagaaggacatctcgctcaaagagcatgagcttcgagtgaacaagctaggtgagcagctcgatcttctccagaaggatctacaagcaagggagctctcacaaatgcaacttaaggatgaagttctaagaattgagaccgacatcatggatgcaattgccaaagctgggtctaggtctgacaaagacaatgagcttttaaagatcttatctgacgtttcaccaaggaatgtccagaacctcaacagccttttgaatgctaagaatacagaaattgcgaggttgagagaggaaatcagaatattatctgctcactggacgaacaaaaccaaggaacttgaatcacagttagaaaagcagcgaagaactgatcaggagctgaagaagagggtcctgaagcttgaattttgccttcaagaatctcagtcccagatgcgaaaattaaagaggatgggggagaaaagagacaaggctctcaaggagctcatggaccaggtggccatgaagcagcccaacagcatgtgccatggaaacaaggataatttctgggagagccagggcttcaggttcattgcctctatgtcgatgctggcgctagtgatcctcgcaaagcgttgaagcggcatagtttaagcagatgtgaatgtagcgtttacattagcttgtaggcttgggcagttgtgcatactgcatgccaaaatttgccgacatccaatcctagtctgtaaactgtaaaaatagttgtggcctgtaatccgtagcgcagtttctgctagttcatgtaaacccatataagctgtcttgtagtcacagctagtgaatgtcagctcatgtagtcaagaatctacaaccttataatttcagttccagaactgcttgagcagttgtcacatgtaactctaattagctatagagcgcatgagtactgcactgactag

SEQ ID NO: 73506 - DNA, 765 bp, Zea Mays
atggcggaggagggagggagacgacgccggagtggaggctgcgcgggtgctgcacggcggcggaaggcagctgaggaggacggggactcggggagggaagcgagtaggaaggcagatagtatagcgggggtaggccttccggcgtacagctgcttcgacgactctactgtcctccgtcttctccgtgtggtgttggtcgtctcgtcagaaactcagaatgcgtgtgtgagaaacgggcaaaaggcaaaccgcccgcccaaccatgtgcctgttgccatttttccttttccccctttcaaaaaactcagacgctttcatctcaagcacggagaactttcagttgaccacgtccctctttcaacttgtcaaatcaaattcgaaaacctcggcgatcagcttccaaggctcagcaggtatgaaaaagctgaactcaagtccccgagaattgaaaaatgctcggtctcaaatttgagttttttttttgataaagcaaatttgagaactgaaaagctggaccaagagacccgtagagcgctcccaattcggagcagaaagaaaaaaaacggaaaaagggagatgggtgaggtcaggggtggaaacggatcgaatacatacggatgtgaattcgaatctcatagtttaccatattttagtacgaattcaaatacaaatttgaatatcttcagatacgaatacaaaatgaatagtcgaatccgaattcttattcagatatttactcaatttaactcaaacagtataccctaa

SEQ ID NO: 73507 - DNA, 1512 bp, Zea Mays
ctgagtaacgtttacttggaatgatcaaagaagatggcagctgtcgacacattcctcttcacctcggagtctgtgaacgagggacaccctgacaagctctgtgaccaggtctcagatgccgttcttgacgcttgccttgctgaggaccctgacagcaaggttgcttgtgagacctgcaccaagaccaacatggtcatggtctttggtgagatcaccaccaaggccaatgttgactacgagaagattgtcagggagacctgccgcaacattggttttgtgtcaaacgatgttgggcttgacgccgaccactgcaaggtgctcgtgaacattgagcagcagtcccctgatattgctcagggtgtgcatggccacttcaccaagcgccccgaggagattggagctggtgaccagggacacatgttcgggtatgcgaccgatgagacccctgagttgatgcccctcagccatgtccttgccaccaagctaggtgctcgtctcaccgaggtccgcaagaacggaacctgcccctggctcaggcctgatgggaagacccaggtgacagtcgagtaccgcaatgagggtggtgccatggtccccatccgtgtccacaccgtcctcatctccacccagcacgacgagacagtgaccaatgatgagatcgctgctgacctgaaggagcatgtcatcaagcctgtcatccctgagcagtaccttgacgagaagaccatcttccaccttaacccatctggccgctttgtcattggtggacctcacggcgatgctggcctcactggccgcaagatcatcattgacacctacggtggctggggagcccatggtggtggcgctttctccggcaaggacccaaccaaggttgaccgcagcggagcctatgtcgcaaggcaggctgccaagagcatcgtcgccagcggccttgctcgccgcgccatcgtccaggtgtcttacgccatcggcgtgcccgagcctctctccgtgttcgtcgacacgtacggcaccggcgcgatccccgacaaggagatcctcaagattgtcaaggagaacttcgatttcaggcctggcatgatcatcatcaaccttgacctcaagaaaggcggcaacgggcgctacctcaagacggcggcctacggccactttggaagggacgaccctgacttcacctgggaggtggtgaagccactcaagtcggagaaaccttctgcctaaggcggcctttttttcagtaagaagcttttggtggtctgctgtgcttaatcatgcttttatatggcttctacatgttgtggttctttcttgatctgcaccgcgcttatcgtttgtgttgtactgccctaataagtggtgcttatgaggactgtttctggttttgctgcttatgttgtaatgctttgaaacaatgaaagaagctacaggccacagctattttgagaagtaatggaacctcgtgccgttttgattatatcgcaatgctgtgcttgtcttctggtaagaccg

SEQ ID NO: 73508 - DNA, 966 bp, Zea Mays
aaagaacataactcatattagattggcacgctgcacaattaatatattactccagattgtttcggcaggttctagacagctctgcacaattaatatattactccagattgtctagacaggttctaggcacaattaatataactcatattagattggcacgctgcacaattaatatattacctttttttccttgaaaaattctatcatgttgccagttccatgatttcataacaaaactgttaaagaaaaccagctctgttgattacagtgtacactaacatgaatatccaaaacacttactcgtggaccaaagattgacaaggcactggacttccatataaaacaatggcaatggtaatatctactcagaaccatgagcacacatttgttcaagaataatagtcatggtacttatagaaagtcgttgttgatttagaccaccatttacttctatcatgagataggcatttgagggtggcaactatgcatatgaccaaagtgtcatttaacctatgagtattggcataaacccatgccttggctatttatgttcggccagttattgagaaatgaaattgtacacaggtttcaaaatggtacctgatctggtcagtctactgttgacacaaggtagcgatgggtccccagaatcttggtaatgtgatgtcattagttgcatatgaccaaacgataatttgttaatgttaagagcaaaatcatttgataaatgataaaagattggtttacacaacggacaaaagtaggcaatgcaataaggtaatctacatgtgaacacattgcgaggaaagtcgtaaggcctaaattttttatttaaaaaactgaatagcaaaagtttactgattgatttccaggtgattgtatccgaagcctgtcttgtttggaacaaaatgaggcttatactacaagcatcaggttcctcgtttgataaagtatacaactatgata

SEQ ID NO: 73509 - DNA, 468 bp, Zea Mays
atggcagatggatcaagaggagaggaggaagcagggcggcatatcgagaggggcgctgcgcggcggcgagttctccttcttattggcgaaaaggaagttctccggcttgaggtcacggtggatgacgtcgtgccgatggcagaaatggacgacctcgacgatggtgcgagtgacattggtggcggcgcgctcggtgtagtgcccccgcgcgacgatgcggtcgaagaactcgccgccctcgcagagctccatgacgaggtggatgcggggaagtgcgaggagctgacgtcctcccgcgcgacggcgaccggcgagcggcatcagtttcccatggccgcccgagatcgaaaggcatggcgagaggctagggttggagcggcatttggggcgctggggtggccgcgggtgggcggcgcggtgctgcgcgcggcggtgggcgcgcgggtggataagagtgagagctggtga

SEQ ID NO: 73510 - DNA, 2588 bp, Zea Mays
gcttgaactcatttgcaattgcgaacgcttcttctcccagtcccagcacgcccaaccccgtcgccgccttctcgaaccttccgaagatgagccccccggccccggccgccgcggcggcggcggcgccgcgaacggtcgcctcggcggtgctccgcgtccagatggcgctcctcgacggcgccgcggtgtccagcgaggccctcatccacgcggccgcctccgcgctcctctcccgcgccgactacgacgacgtcgtcaccgagcgcaccatctcggacgtctgcggcaaccccgcgtgccccaaccctctctcctcctcctccgccgccgccacggggccccgcttccacatcgccctcagcgagcaccgcgtctacgacctcgaggaggcgcgcaagttctgctccgagcgctgcctcgtcgcctccaaggccttggccgcctcgctcccgcacgaccggccctacggggtcccgctcgaccgcctcgccgcggtcgtcgcgctcgttgagggcgccgccgcaggggacgggagcgggttagggttccagggactggatgggaatgggaaggtggaggacgggggaaggaaggtggagatcaaggagaagcaggtcgccggggctggcgaggtcttgctgcaggactgggttgggccctccgatgccattgagggttatgtgccgcgccatgaccgcagtgctcatggacaaaagccacaggttcagcagaacgaaggtgctggacctgaactgtccagaactgagaatgtggattatggtgctgctgctcctggtgaagatggcatgacaagttcaccttcattggttaaaacacacgtgagctccgaagtaatagttgagagaatgggcagcctggttcttggtgagaatacaaggacgcctagaaagaagaaaactaaaactccatcaaagatgttagagcaagaggaagataacagtatgctgtcatcttgcatatctgattccattgccaagcagcttgaggatgtagttttggaagagagaaaaggcagtcagaaaaataaaatgagtaaagcatcatcaagagcacagaagggtaagtctacaaaaaggcctgcttcgacaaacatggaggaaaatgctatgaatcagtataactacttgtcaagttctgtattggtagacaatcacccctcatcatctcaatcttcagaaaaagattcaacacaggcttactctgaacaactgtgtgaagaattcagtgaagcagtgaacattggaaatgatgagacaagtgatgaaaagatgagacctgcatggaagtcttcgttgaaagttgccgggtctaagagcagtaggcagtctgttacatgggcagatgagaatggaagtgtcctagaaacaagcaaagcatatgaaagcccttcaagtagtataaaacgacctgaggaaggcatagacaattcactaaggcgtgcatctgctgaagcgtgtgctgcagcacttgttgaggcagcagaagctatttcttcaggcacagcagaagcagaagatgcagtttcaaatgctggaatcatcattctgcctgacatgcttaaccagcaagaacatgacaatggcaaaaacagtggcggagatgatgaccctgagatagatagggatgttatcaagtggcctaagaaacctgtacttctggatacagacttgtttgaagttgatgattcttggcatgacatgcctccagaaggttttagtctaactctgtctgctttcgggacgatgtgggccgcgctattcggatggatatccagttcgtctttggcctatgtgtatgggcttgaaaggggttcagtggaggagttgttgattgccaatgggagggaatgtcctgagaagacagttctgaaggatgggctctcattggagattagaagagctctagattcttgcgtttgtaacgccgtgccagtactcatatcaaacttgaggttgcagataccggtttcaaaactggagattactctgttatatcggcggtaacacatgatgaaactacaccgtgtctgtaccagggctacttgattgacacaatgtcgtttgttgacgccctgccttctctgcgatcgaggcagtggcaggctgtggttctggtaatgcttgacgcgctctctgtgcaccagcttcccgcccttgctccagtcttttcgaattcgaagcttgtgcaaaagatgttgaacgctgctcaggttagcagagaggagtatgactccatggtggacctgtttctaccgtttggaagatccgtccaggcgatcacgcccatgtaaacgagaagccgtgtgaatctgcattccggaagctgcgtgaatcgtagggtctgatctgatatttagttttacacaagtcgctgtctagaacgagccatgtatgtatgattgattggttatctattgagcaagatgcgctctggcaatttgtggaagctgaaatacttgcgaccatgacgcctgcctgtcagtttgcgatattctttcaggttgtgagaaattgatttgctgtcgttctcagctaaaacaacaccagtctattaaaaaacatataaaa

SEQ ID NO: 73511 - DNA, 2533 bp, Zea Mays
gcttgaactcatttgcaattgcgaacgcttcttctcccagtcccagcacgcccaaccccgtcgccgccttctcgaaccttccgaagatgagccccccggccccggccgccgcggcggcggcggcgccgcgaacggtcgcctcggcggtgctccgcgtccagatggcgctcctcgacggcgccgcggtgtccagcgaggccctcatccacgcggccgcctccgcgctcctctcccgcgccgactacgacgacgtcgtcaccgagcgcaccatctcggacgtctgcggcaaccccgcgtgccccaaccctctctcctcctcctccgccgccgccacggggccccgcttccacatcgccctcagcgagcaccgcgtctacgacctcgaggaggcgcgcaagttctgctccgagcgctgcctcgtcgcctccaaggccttggccgcctcgctcccgcacgaccggccctacggggtcccgctcgaccgcctcgccgcggtcgtcgcgctcgttgagggcgccgccgcaggggacgggagcgggttagggttccagggactggatgggaatgggaaggtggaggacgggggaaggaaggtggagatcaaggagaagcaggtcgccggggctggcgaggtcttgctgcaggactgggttgggccctccgatgccattgagggttatgtgccgcgccatgaccgcagtgctcatgccacaggttcagcagaacgaaggtgctggacctgaactgtccagaactgagaatgtggattatggtgctgctgctcctggtgaagatggcatgacaagttcaccttcattggttaaaacacacgtgagctccgaagtaatagttgagagaatgggcagcctggttcttggtgagaatacaaggacgcctagaaagaagaaaactaaaactccatcaaagatgttagagcaagaggaagataacagtatgctgtcatcttgcatatctgattccattgccaagcagcttgaggatgtagttttggaagagagaaaaggcagtcagaaaaataaaatgagtaaagcatcatcaagagcacagaagggtaagtctacaaaaaggcctgcttcgacaaacatggaggaaaatgctatgaatcagtataactacttgtcaagttctgtattggtagacaatcacccctcatcatctcaatcttcagaaaaagattcaacacaggcttactctgaacaactgtgtgaagaattcagtgaagcagtgaacattggaaatgatgagacaagtgatgaaaagatgagacctgcatggaagtcttcgttgaaagttgccgggtctaagagcagtaggcagtctgttacatgggcagatgagaatggaagtgtcctagaaacaagcaaagcatatgaaagcccttcaagtagtataaaacgacctgaggaaggcatagacaattcactaaggcgtgcatctgctgaagcgtgtgctgcagcacttgttgaggcagcagaagctatttcttcaggcacagcagaagcagaagatgcagtttcaaatgctggaatcatcattctgcctgacatgcttaaccagcaagaacatgacaatggcaaaaacagtggcggagatgatgaccctgagatagatagggatgttatcaagtggcctaagaaacctgtacttctggatacagacttgtttgaagttgatgattcttggcatgacatgcctccagaaggttttagtctaactctgtctgctttcgggacgatgtgggccgcgctattcggatggatatccagttcgtctttggcctatgtgtatgggcttgaaaggggttcagtggaggagttgttgattgccaatgggagggaatgtcctgagaagacagttctgaaggatgggctctcattggagattagaagagctctagattcttgcgtttgtaacgccgtgccagtactcatatcaaacttgaggttgcagataccggtttcaaaactggagattactctgggctacttgattgacacaatgtcgtttgttgacgccctgccttctctgcgatcgaggcagtggcaggctgtggttctggtaatgcttgacgcgctctctgtgcaccagcttcccgcccttgctccagtcttttcgaattcgaagcttgtgcaaaagatgttgaacgctgctcaggttagcagagaggagtatgactccatggtggacctgtttctaccgtttggaagatccgtccaggcgatcacgcccatgtaaacgagaagccgtgtgaatctgcattccggaagctgcgtgaatcgtagggtctgatctgatatttagttttacacaagtcgctgtctagaacgagccatgtatgtatgattgattggttatctattgagcaagatgcgctctggcaatttgtggaagctgaaatacttgcgaccatgacgcctgcctgtcagtttgcgatattctttcaggttgtgagaaattgatttgctgtcgttctcagctaaaacaacaccagtctattaaaaaacatataaaa

SEQ ID NO: 73512 - DNA, 1565 bp, Zea Mays
ctggatgcttccttccacccgacccatcccatcccatacagccccgggacgtacggtgatcggtgaccccaccccaccccacggccacgccacacctcctctccacctcctcgtcctcgatccccaagcagtcagtcttcctcttccctcccctcctcccgttaggtaggctggcgagccgccggccgccgtcccttcctccctggatttgattggtgctcgcggctgcggcccagcgagttccttgattcggcggggagcaccgccatcgccatgggagggcgccgctggctgtcgtgacctcaccttgccgctgcagctctgtaagtacctagtattccagaggtgatttctcctcattgacagagagcaaatctggttcgtgatccctagtaccagagagggacacggttttcctatcgatgtgttagagtcaagtactcaagcttttgtggttccaatggagtctaagcgtgtgagtgatcaggatgctttgatcgacctggagagtggcaatggcactacagtaagcaactacaccaattgtggggatgctagtttcacagtggggcaagcaagaacagcgcctaatggtgcgtggaatggttgtgtgtgtgccaacgggtgtccgagggacgacaggaatcagcacatggattgctcccctcctgcttcggatgctgttgctagaagtggagatgacaggaagtctgagggggaggagaagcttatggacagctcaggaggggagaagacgaagaagaagcggtccaagaagccaccgcggccgccaaggccgctgacacctacgccgttggatgtttctgaccagaagctcctcaacgaactgagtgagcttgcggtgttgaaacgggcaaggattgagcggatgaaggctttgaagaagatgaagaatgccaagcaagggtcctcgggtggcaatttgtgccccctgatcattaccattatcttctgcatcgtcatactgtggcaaggtttcttctcgggacacgagtcggcggtgagtttccatggatcgcccgagtcctcagtcagggcacacagcagtctgatctccatcaggttctacaagaagaaccattccaatgtgagaccacccagcgagaccaccgcagcccctgataacgtagagacagtttcaaggctcctggaaccgtaaccaagcgagaagaaggctagctcggtgaccgaacgctgcgggccgcggccaccaccacaggtacctgaacggaaaagctcgccacattctgaagcctctcaccttgacgaccggggctgtgtaaatcttccgagaccgccactggcgcttcctcctcgagcccctgctgtaaaaatgaacggactcctagcgttttgtgcgcctgggtcgcacgctgactagtgaatctgttggcagttgtgcgccgcagcccgcaggccatggctctagtgacgagagcgacgcgagcaagctgtttgtatgtgtctgattacaataataaaaggtttcgcgctgtttactgtattggcttctactgtttctactgtgtttttgcaactgtgta

SEQ ID NO: 73513 - DNA, 1292 bp, Zea Mays
ctggatgcttccttccacccgacccatcccatcccatacagccccgggacgtacggtgatcggtgaccccaccccaccccacggccacgccacacctcctctccacctcctcgtcctcgatccccaagcagtcagtcttcctcttccctcccctcctcccgttaggtaggctggcgagccgccggccgccgtcccttcctccctggatttgattggtgctcgcggctgcggcccagcgagttccttgattcggcggggagcaccgccatcgccatgggagggcgccgctggctgtcgtgacctcaccttgccgctgcagctctgtacctagtattccagaggtgatttctcctcattgacagagagcaaatctggttcgtgatccctagtaccagagagggacacggttttcctatcgatgtgttagagtcaagtactcaagcttttgtggttccaatggagtctaagcgtgtgagtgatcaggatgctttgatcgacctggagagtggcaatggcactacagtaagcaactacaccaattgtggggatgctagtttcacagtggggcaagcaagaacagcgcctaatggtgcgtggaatggttgtgtgtgtgccaacgggtgtccgagggacgacaggaatcagcacatggattgctcccctcctgcttcggatgctgttgctagaagtggagatgacaggaagtctgagggggaggagaagcttatggacagctcaggaggggagaagacgaagaagaagcggtccaagaagccaccgcggccgccaaggccgctgacacctacgccgttggatgtttctgaccagaagctcctcaacgaactgagtgagcttgcggtgttgaaacgggcaaggattgagcggatgaaggctttgaagaagatgaagaatgccaagcaagggtcctcgggtggcaatttgtgccccctgatcattaccattatcttctgcatcgtcatactgtggcaaggtttcttctcgggacacgagtcggcggtgagtttccatggatcgcccgagtcctcagtcagggcacacagcagtctgatctccatcaggttctacaagaagaaccattccaatgtgagaccacccagcgagaccaccgcagcccctgataacgtagagacagtttcaaggctcctggaaccgtaaccaagcgagaagaaggctagctcggtgaccgaacgctgcgggccgcggccaccaccacagagtctctcgtttcagactttggggtagattcgcaggcgcatctgcatgcatctgaa

SEQ ID NO: 73514 - DNA, 2894 bp, Zea Mays
cgcttcacctgagcgccatgtgttcgataaaatgctgcttcctcctccggcgccttcgccgcccccgcatccactgtttctccacggcgggggcgagcactacactcccgcggaagaattatgcgggggatcctctttgcggagcggggccgcctcccgcgccgggcaccggggacgcggcgagagcccacgaggcggccgtcaggcggctggcggcggcgggcgacgtggatggcgtgcagctggcgctgcaggagatgcggctgaggggagtcccgtgcaccgagggtgccctcgtcgccgccgtcggcgccttcgctcgcgcgggggcgcccgaccgcgcgctcaagacgttctaccgcgccgtgcacgaccttggctgcgcgcgcccccaccgagccgcggctctacaaccacctcatcgacgcgctgctgcggggagaacatgggcgctgtgccagaacaaccgggtcggggccgcgcgcaaaatgctcgacgaaatggccaggaaggggtgtcccccggacgacgtgacgtatgccaccattgtctcagtgctgtgcaagcttgacaggctggacgaggccacagaggtgttggctgccatgccgcctgtggctgcctcctacaatgccatcgttctagctctctgcagagagttcaggatgcaggaggtgttctcagttgtcagcgacatggtggggaggggattgcagcctaatgtcatcacgtacacaactatagtcgatgcgttctgcaaggctggggagctgaggatggcgtgtgccattctggcaaggatggtgatcaccgggtgcactccaaatgttgtgacattcactgcattagtcagaggactattcgatgatggaagggtgcatgacgcactagacatgtggaggtggatggtggctgaaggatgggcaccgtcgacggtttcgtacaacattctgattcgtggactttgcagcgttggtgatctcaagggagcatcatcgatactcaacagcatggagcaacacggctgctttcctaatgtgaggacctactccactctaattgatggtttctccaaagccggggacctaggtggtgccatatcaatatggaatgacatgtcaagatctggttgcaagccaaacgttgttgtttacacaaacatggtggatgtgttttgcaagaagctgatgtttaatcaggcaaaaagtcttattgataagatgctattggaaaactgtcctcccaacacagtgacattcaacacgttgattagaagcctatgcgactgcagaagagttgggagggctcttggtgtgttccacgagatgagaaggcatggatgcgtgccaaatggtaggacctataacgagttgatccatggtctgtttagggagggaaactgtggagacgctcttcacatggtgaccgagatgcaaagtcatggtattgagttgagcttagtaacatacaacactgtagtaagtggtctatgtcaaacgagaatgagcagagaagctatggtttttgttgggaagatgatagttcaaggaattcaaccaaatgcattcactttcagtgcaataattcatgcttactgcaaggaaggggaagtcaggatggccgcttggatgttaggtgcgatgaatgtagtgaactgccaccgtaacatactagtgtacactattctaatggcagagctttgcaatcaagataagctggtagatgccatgacgtacctactaaagatgctatatgaaggtatatatccaaatacagtgacatggaacgttttggtccgtggagtttttaggaaccttggctgcattgaaccaagtgatttcatacaacatattaccatgaacttatcagaagggacctgaggttcaatgttgtgattatttggcatcccaatgaaggcaaagttgataagcagcagattctctcagatcgctgtttctgcattaagtaatttatctgtatggtatgatatattctgtaacgttaacattcttttgtcatcaatgatcagatgagttgaggttatccagctgaccttggggtctcattagaagtcaaaattgtaaattctgattcatcatttccattgcttgtgagatttggcaccgttcttctgtgcctccagttttttgtatactgtgtcaatctcagactgcatgcaaaaagactctggattagaaatactcaaaagcaacaagaaaggccaagaaatcagtgactgaagcggatcaagagtcttaaatgccttcctcacctggtaatagttcagcatattctttcttcttttcttcgtttttgcagtcaccaaatccctttcaatgtcaaaaggtacagggtccaacactatgcctttgatgtattcaaaacctcatagctgatttgtggcatgcaacgagggttaccatatatagaattatagatccaaaatacagtgaaagtttgaaacacaaggagtctacaaaactaagcttattccctctttgtgtttcttatacaaaacaaaaaacacattcaataatacattatgatactttaagttgaagatcgtttgtctgttagaatgaatagatgaacgtaccttgttcttatgtgcaatggtcgtcagctctttcgggatgtactctttaagtcccccttcaagtttgcagatttaatcaaaagaacccttatagccattggactctgcccacttcattgtgttttcttcgtgtggattcactactgcaactaaacttgatttgaagctgtccccatatacccagatctaaaaaaggacagaaatgacaatattaaatgtataccaatattctctcttaatcagccatatgctatagctgctgaattgtttacttacatcttcaacaagtggagggaag

SEQ ID NO: 73515 - DNA, 2628 bp, Zea Mays
cgcttcacctgagcgccatgtgttcgataaaatgctgcttcctcctccggcgccttcgccgcccccgcatccactgtttctccacggcgggggcgagcactacactcccgcggaagaattatgcgggggatcctctttgcggagcggggccgcctcccgcgccgggcaccggggacgcggcgagagcccacgaggcggccgtcaggcggctggcggcggcgggcgacgtggatggcgtgcagctggcgctgcaggagatgcggctgaggggagtcccgtgcaccgagggtgccctcgtcgccgccgtcggcgccttcgctcgcgcgggggcgcccgaccgcgcgctcaagacgttctaccgcgccgtgcacgaccttggctgcgcgcgcccccaccgagccgcggctctacaaccacctcatcgacgcgctgctgcggggagaacatggtgggtgccgtcgtgctggtgtacgacaacatgaggaaagacggtgtgcatcctaacgtgttcacctacaacctgcttgtcagggcgctgtgccagaacaaccgggtcggggccgcgcgcaaaatgctcgacgaaatggccaggaaggggtgtcccccggacgacgtgacgtatgccaccattgtctcagtgctgtgcaagcttgacaggctggacgaggccacagaggtgttggctgccatgccgcctgtggctgcctcctacaatgccatcgttctagctctctgcagagagttcaggatgcaggaggtgttctcagttgtcagcgacatggtggggaggggattgcagcctaatgtcatcacgtacacaactatagtcgatgcgttctgcaaggctggggagctgaggatggcgtgtgccattctggcaaggatggtgatcaccgggtgcactccaaatgttgtgacattcactgcattagtcagaggactattcgatgatggaagggtgcatgacgcactagacatgtggaggtggatggtggctgaaggatgggcaccgtcgacggtttcgtacaacattctgattcgtggactttgcagcgttggtgatctcaagggagcatcatcgatactcaacagcatggagcaacacggctgctttcctaatgtgaggacctactccactctaattgatggtttctccaaagccggggacctaggtggtgccatatcaatatggaatgacatgtcaagatctggttgcaagccaaacgttgttgtttacacaaacatggtggatgtgttttgcaagaagctgatgtttaatcaggcaaaaagtcttattgataagatgctattggaaaactgtcctcccaacacagtgacattcaacacgttgattagaagcctatgcgactgcagaagagttgggagggctcttggtgtgttccacgagatgagaaggcatggatgcgtgccaaatggtaggacctataacgagttgatccatggtctgtttagggagggaaactgtggagacgctcttcacatggtgaccgagatgcaaagtcatggtattgagttgagcttagtaacatacaacactgtagtaagtggtctatgtcaaacgagaatgagcagagaagctatggtttttgttgggaagatgatagttcaaggaattcaaccaaatgcattcactttcagtgcaataattcatgcttactgcaaggaaggggaagtcaggatggccgcttggatgttaggtgcgatgaatgtagtgaactgccaccgtaacatactagtgtacactattctaatggcagagctttgcaatcaagataagctggtagatgccatgacgtacctactaaagatgctatatgaagcttgtgagatttggcaccgttcttctgtgcctccagttttttgtatactgtgtcaatctcagactgcatgcaaaaagactctggattagaaatactcaaaagcaacaagaaaggccaagaaatcagtgactgaagcggatcaagagtcttaaatgccttcctcacctggtaatagttcagcatattctttcttcttttcttcgtttttgcagtcaccaaatccctttcaatgtcaaaaggtacagggtccaacactatgcctttgatgtattcaaaacctcatagctgatttgtggcatgcaacgagggttaccatatatagaattatagatccaaaatacagtgaaagtttgaaacacaaggagtctacaaaactaagcttattccctctttgtgtttcttatacaaaacaaaaaacacattcaataatacattatgatactttaagttgaagatcgtttgtctgttagaatgaatagatgaacgtaccttgttcttatgtgcaatggtcgtcagctctttcgggatgtactctttaagtcccccttcaagtttgcagatttaatcaaaagaacccttatagccattggactctgcccacttcattgtgttttcttcgtgtggattcactactgcaactaaacttgatttgaagctgtccccatatacccagatctaaaaaaggacagaaatgacaatattaaatgtataccaatattctctcttaatcagccatatgctatagctgctgaattgtttacttacatcttcaacaagtggagggaag

SEQ ID NO: 73516 - DNA, 1778 bp, Zea Mays
gcccaaaactgaacccacaacccgaaaccagcaggcaacaaagcaaccagaggcagagcgttcttcttccccgacggcccgggccgacggctcgactccactagtcgctggaaccctctgcaacaaagccgcctccacctgaccacctcccttgagctcttccccttcctcgtgggttgtgcgagccctctaccggcgcgcagtacaggggctgattgggtgatcaaacccgcaagatttgggtttgtgatttaggagcaggaggcggtggcaatatggaacttcgtctaaaagtttccgtgatctgtacaatatgaagtactcgagctacttaaacgacgaaccaatgccggatgctacatcggaaaaggagcagggaaatgagtatttcaaacagaagaagttcactgatgctattgaatgctactccagaagtattgggctgtctcctacagcagtcacatttgcaaatagagctatggcatatcttaaactaagaagattcaaggaggcagaggacgattgcactgaagctctgaatctggatgatcgctatattaaagcatactcacgccgaattactgcacgaaaagaacttgggaagcttaaggaggcaatggatgatgctgaatttgctatcagtcttgatccaaacaattcagagctaaggaagcagtattctgagataaaagctttgcacatggagaaaatggctaaaaaggttccagtgccagctaaacgtgcagtttctggaattgataaaactgcagatgtcacttctcacccaccgactatctcccagaaggacactattatggaagttgatctgcctgttagagatgcaatgaagatcaaagagagtgcaagcgtcaagtctaacggaggacctggagtaatcatcaatggcaataacgtgcagctccaaggtcgagatgccaaccagaagactgggccagaagtttcagtccaagatcttgcagctcgtgctgcttcacggtatatggccggcactgtgaaaagcattaagacacccaaaacagcttatgactttgaggtttcttggagagctctttctgatgacactgcccagcaaatacagttactaaagtcgattccaccagcaagcctaccagagattttcaagaacgcactttctgcaccttttcttattgacatcgtgaagtgtgcagcctcaattttccgggatgcggaggcattagctgtcagtattttggataatttggctcgagttccacgcttcgacttgataatcatgtgcctttcatccatgcacaaatttgaactgaggaagatatgggatcaagtattccttgctgaaaaagcgctggctgatgatcagatggaagctctgaggcagctgcgaggcagatacattccgggaggatggcaggatagcatgctcacttcgagttaaatcaatcaatcaaatgacgacgatgtaaagcaggattgttacaaaaaccttttgctggcttcgcaactgatgtctctgcatccatctgttctagaatcaggagtgcctgtcgattgttaagcccactggtctggatgtagcgaacggttgaagcatccagtgtaggaacatgtgtcgactgcaaatggttgagatttgttctgttgtgcttgccgctactgtaacctcgctttgttgtgcgccggattcctgacgctggcacatcgtacgcttgtcggcgacaactttatggaacacacacattttgatgatttaaagaattctctataaaatgtcttctaat

SEQ ID NO: 73517 - DNA, 1750 bp, Zea Mays
gcccaaaactgaacccacaacccgaaaccagcaggcaacaaagcaaccagaggcagagcgttcttcttccccgacggcccgggccgacggctcgactccactagtcgctggaaccctctgcaacaaagccgcctccacctgaccacctcccttgagctcttccccttcctcgtgggttgtgcgagccctctaccggcgcgcagtacaggggctgattgggtgatcaaacccgcaagatttgggtttgtgatttaggagcaggaggcggtggcaatatggaatataaggcgagatctactggaacttcaggaacttcgtctaaaagtttccgtgatctgtacaatatgaagtactcgagctacttaaacgacgaaccaatgccggatgctacatcggaaaaggagcagggaaatgagtatttcaaacagaagaagttcactgatgctattgaatgctactccagaagtattgggctgtctcctacagcagtcacatttgcaaatagagctatggcatatcttaaactaagaagattcaaggaggcagaggacgattgcactgaagctctgaatctggatgatcgctatattaaagcatactcacgccgaattactgcacgaaaagaacttgggaagcttaaggaggcaatggatgatgctgaatttgctatcagtcttgatccaaacaattcagagctaaggaagcagtattctgagataaaagctttgcacatggagaaaatggctaaaaaggttccagtgccagctaaacgtgcagtttctggaattgataaaactgcagatgtcacttctcacccaccgactatctcccagaaggacactattatggaagttgatctgcctgttagagatgcaatgaagatcaaagagagtgcaagcgtcaagtctaacggaggacctggagtaatcatcaatggcaataacgtgcagctccaaggtcgagatgccaaccagaagactgggccagaagtttcagtccaagatcttgcagctcgtgctgcttcacggtatatggccggcactgtgaaaagcattaagacacccaaaacagcttatgactttgaggtttcttggagagctctttctgatgacactgcccagcaaatacagttactaaagtcgattccaccagcaagcctaccagagattttcaagaacgcactttctgcaccttttcttattgacatcgtgaagtgtgcagcctcaattttccgggatgcggaggcattagctgtcagtattttggataatttggctcgagttccacgcttcgacttgataatcatgtgcctttcatccatgcacaaatttgatggaagctctgaggcagctgcgaggcagatacattccgggaggatggcaggatagcatgctcacttcgagttaaatcaatcaatcaaatgacgacgatgtaaagcaggattgttacaaaaaccttttgctggcttcgcaactgatgtctctgcatccatctgttctagaatcaggagtgcctgtcgattgttaagcccactggtctggatgtagcgaacggttgaagcatccagtgtaggaacatgtgtcgactgcaaatggttgagatttgttctgttgtgcttgccgctactgtaacctcgctttgttgtgcgccggattcctgacgctggcacatcgtacgcttgtcggcgacaactttatggaacacacacattttgatgatttaaagaattctctataaaatgtcttctaat

SEQ ID NO: 73518 - DNA, 1925 bp, Zea Mays
gcccaaaactgaacccacaacccgaaaccagcaggcaacaaagcaaccagaggcagagcgttcttcttccccgacggcccgggccgacggctcgactccactagtcgctggaaccctctgcaacaaagccgcctccacctgaccacctcccttgagctcttccccttcctcgtgggttgtgcgagccctctaccggcgcgcagtacaggtaccaacactcggaattattctccgtcttcttccttgagccgcgccgcccaccgctccacctcgccttctcctaatttgaatcggagtcgtacccgccgccgccctccacacgggctgattgggtgatcaaacccgcaagatttgggtttgtgatttaggagcaggaggcggtggcaatatggaatataaggcgagatctactggaacttcaggaacttcgtctaaaagtttccgtgatctgtacaatatgaagtactcgagctacttaaacgacgaaccaatgccggatgctacatcggaaaaggagcagggaaatgagtatttcaaacagaagaagttcactgatgctattgaatgctactccagaagtattgggctgtctcctacagcagtcacatttgcaaatagagctatggcatatcttaaactaagaagattcaaggaggcagaggacgattgcactgaagctctgaatctggatgatcgctatattaaagcatactcacgccgaattactgcacgaaaagaacttgggaagcttaaggaggcaatggatgatgctgaatttgctatcagtcttgatccaaacaattcagagctaaggaagcagtattctgagataaaagctttgcacatggagaaaatggctaaaaaggttccagtgccagctaaacgtgcagtttctggaattgataaaactgcagatgtcacttctcacccaccgactatctcccagaaggacactattatggaagttgatctgcctgttagagatgcaatgaagatcaaagagagtgcaagcgtcaagtctaacggaggacctggagtaatcatcaatggcaataacgtgcagcagctccaaggtcgagatgccaaccagaagactgggccagaagtttcagtccaagatcttgcagctcgtgctgcttcacggtatatggccggcactgtgaaaagcattaagacacccaaaacagcttatgactttgaggtttcttggagagctctttctgatgacactgcccagcaaatacagttactaaagtcgattccaccagcaagcctaccagagattttcaagaacgcactttctgcaccttttcttattgacatcgtgaagtgtgcagcctcaattttccgggatgcggaggcattagctgtcagtattttggataatttggctcgagttccacgcttcgacttgataatcatgtgcctttcatccatgcacaaatttgaactgaggaagatatgggatcaagtattccttgctgaaaaagcgctggctgatgatcagatggaagctctgaggcagctgcgaggcagatacattccgggaggatggcaggatagcatgctcacttcgagttaaatcaatcaatcaaatgacgacgatgtaaagcaggattgttacaaaaaccttttgctggcttcgcaactgatgtctctgcatccatctgttctagaatcaggagtgcctgtcgattgttaagcccactggtctggatgtagcgaacggttgaagcatccagtgtaggaacatgtgtcgactgcaaatggttgagatttgttctgttgtgcttgccgctactgtaacctcgctttgttgtgcgccggattcctgacgctggcacatcgtacgcttgtcggcgacaactttatggaacacacacattttgatgatttaaagaattctctataaaatgtcttctaat

SEQ ID NO: 73519 - DNA, 1742 bp, Zea Mays
gcccaaaactgaacccacaacccgaaaccagcaggcaacaaagcaaccagaggcagagcgttcttcttccccgacggcccgggccgacggctcgactccactagtcgctggaaccctctgcaacaaagccgcctccacctgaccacctcccttgagctcttccccttcctcgtgggttgtgcgagccctctaccggcgcgcagtacaggaatataaggcgagatctactggaacttcaggaacttcgtctaaaagtttccgtgatctgtacaatatgaagtactcgagctacttaaacgacgaaccaatgccggatgctacatcggaaaaggagcagggaaatgagtatttcaaacagaagaagttcactgatgctattgaatgctactccagaagtattgggctgtctcctacagcagtcacatttgcaaatagagctatggcatatcttaaactaagaagattcaaggaggcagaggacgattgcactgaagctctgaatctggatgatcgctatattaaagcatactcacgccgaattactgcacgaaaagaacttgggaagcttaaggaggcaatggatgatgctgaatttgctatcagtcttgatccaaacaattcagagctaaggaagcagtattctgagataaaagctttgcacatggagaaaatggctaaaaaggttccagtgccagctaaacgtgcagtttctggaattgataaaactgcagatgtcacttctcacccaccgactatctcccagaaggacactattatggaagttgatctgcctgttagagatgcaatgaagatcaaagagagtgcaagcgtcaagtctaacggaggacctggagtaatcatcaatggcaataacgtgcagcagctccaaggtcgagatgccaaccagaagactgggccagaagtttcagtccaagatcttgcagctcgtgctgcttcacggtatatggccggcactgtgaaaagcattaagacacccaaaacagcttatgactttgaggtttcttggagagctctttctgatgacactgcccagcaaatacagttactaaagtcgattccaccagcaagcctaccagagattttcaagaacgcactttctgcaccttttcttattgacatcgtgaagtgtgcagcctcaattttccgggatgcggaggcattagctgtcagtattttggataatttggctcgagttccacgcttcgacttgataatcatgtgcctttcatccatgcacaaatttgaactgaggaagatatgggatcaagtattccttgctgaaaaagcgctggctgatgatcagatggaagctctgaggcagctgcgaggcagatacattccgggaggatggcaggatagcatgctcacttcgagttaaatcaatcaatcaaatgacgacgatgtaaagcaggattgttacaaaaaccttttgctggcttcgcaactgatgtctctgcatccatctgttctagaatcaggagtgcctgtcgattgttaagcccactggtctggatgtagcgaacggttgaagcatccagtgtaggaacatgtgtcgactgcaaatggttgagatttgttctgttgtgcttgccgctactgtaacctcgctttgttgtgcgccggattcctgacgctggcacatcgtacgcttgtcggcgacaactttatggaacacacacattttgatgatttaaagaattctctataaaatgtcttctaat

SEQ ID NO: 73520 - DNA, 1739 bp, Zea Mays
gcccaaaactgaacccacaacccgaaaccagcaggcaacaaagcaaccagaggcagagcgttcttcttccccgacggcccgggccgacggctcgactccactagtcgctggaaccctctgcaacaaagccgcctccacctgaccacctcccttgagctcttccccttcctcgtgggttgtgcgagccctctaccggcgcgcagtacaggaatataaggcgagatctactggaacttcaggaacttcgtctaaaagtttccgtgatctgtacaatatgaagtactcgagctacttaaacgacgaaccaatgccggatgctacatcggaaaaggagcagggaaatgagtatttcaaacagaagaagttcactgatgctattgaatgctactccagaagtattgggctgtctcctacagcagtcacatttgcaaatagagctatggcatatcttaaactaagaagattcaaggaggcagaggacgattgcactgaagctctgaatctggatgatcgctatattaaagcatactcacgccgaattactgcacgaaaagaacttgggaagcttaaggaggcaatggatgatgctgaatttgctatcagtcttgatccaaacaattcagagctaaggaagcagtattctgagataaaagctttgcacatggagaaaatggctaaaaaggttccagtgccagctaaacgtgcagtttctggaattgataaaactgcagatgtcacttctcacccaccgactatctcccagaaggacactattatggaagttgatctgcctgttagagatgcaatgaagatcaaagagagtgcaagcgtcaagtctaacggaggacctggagtaatcatcaatggcaataacgtgcagctccaaggtcgagatgccaaccagaagactgggccagaagtttcagtccaagatcttgcagctcgtgctgcttcacggtatatggccggcactgtgaaaagcattaagacacccaaaacagcttatgactttgaggtttcttggagagctctttctgatgacactgcccagcaaatacagttactaaagtcgattccaccagcaagcctaccagagattttcaagaacgcactttctgcaccttttcttattgacatcgtgaagtgtgcagcctcaattttccgggatgcggaggcattagctgtcagtattttggataatttggctcgagttccacgcttcgacttgataatcatgtgcctttcatccatgcacaaatttgaactgaggaagatatgggatcaagtattccttgctgaaaaagcgctggctgatgatcagatggaagctctgaggcagctgcgaggcagatacattccgggaggatggcaggatagcatgctcacttcgagttaaatcaatcaatcaaatgacgacgatgtaaagcaggattgttacaaaaaccttttgctggcttcgcaactgatgtctctgcatccatctgttctagaatcaggagtgcctgtcgattgttaagcccactggtctggatgtagcgaacggttgaagcatccagtgtaggaacatgtgtcgactgcaaatggttgagatttgttctgttgtgcttgccgctactgtaacctcgctttgttgtgcgccggattcctgacgctggcacatcgtacgcttgtcggcgacaactttatggaacacacacattttgatgatttaaagaattctctataaaatgtcttctaat

SEQ ID NO: 73521 - DNA, 2208 bp, Zea Mays
gcccaaaactgaacccacaacccgaaaccagcaggcaacaaagcaaccagaggcagagcgttcttcttccccgacggcccgggccgacggctcgactccactagtcgctggaaccctctgcaacaaagccgcctccacctgaccacctcccttgagctcttccccttcctcgtgggttgtgcgagccctctaccggcgcgcagtacaggggctgattgggtgatcaaacccgcaagatttgggtttgtgatttaggagcaggaggcggtggcaatatggaatataaggcgagatctactggaacttcaggaacttcgtctaaaagtttccgtgatctgtacaatatgaagtactcgagctacttaaacgacgaaccaatgccggatgctacatcggaaaaggagcagggaaatgagtatttcaaacagaagaagttcactgatgctattgaatgctactccagaagtattgggctgtctcctacagcagtcacatttgcaaatagagctatggcatatcttaaactaagaagattcaaggaggcagaggacgattgcactgaagctctgaatctggatgatcgctatattaaagcatactcacgccgaattactgcacgaaaagaacttgggaagcttaaggaggcaatggatgatgctgaatttgctatcagtcttgatccaaacaattcagagctaaggaagcagtattctgagataaaagctttgcacatggagaaaatggctaaaaaggttccagtgccagctaaacgtgcagtttctggaattgataaaactgcagatgtcacttctcacccaccgactatctcccagaaggacactattatggaagttgatctgcctgttagagatgcaatgaagatcaaagagagtgcaagcgtcaagtctaacggaggacctggagtaatcatcaatggcaataacgtgcaggttttttttttatttctgtagcctttctgaccattataataaccacaatctgtggactgtggtatctgtgttggtactagttgtcatattatggcaagtaaaagcacctatatgtacaataggaggtactcaggatgtcgtttgggaagtttttcttgcaatatttatgagatacaatgtgtcttatttaatttgcttgaaaaaactgaatcctttggataagggaataacttaacatgtattattatcacacaccaatctggaaccaaaataagtttgaaattgcgtacttgttaaaacaggctttaactagcttttaatagatgcaattgtcatgttttctgtttaacattttaagacatcactgcaattgcaatgacacatatatgtctatttttcacaatttgttggaagtatttctgtttctgtgtcacatgtttcaacacttgatgcagcagctccaaggtcgagatgccaaccagaagactgggccagaagtttcagtccaagatcttgcagctcgtgctgcttcacggtatatggccggcactgtgaaaagcattaagacacccaaaacagcttatgactttgaggtttcttggagagctctttctgatgacactgcccagcaaatacagttactaaagtcgattccaccagcaagcctaccagagattttcaagaacgcactttctgcaccttttcttattgacatcgtgaagtgtgcagcctcaattttccgggatgcggaggcattagctgtcagtattttggataatttggctcgagttccacgcttcgacttgataatcatgtgcctttcatccatgcacaaatttgatggaagctctgaggcagctgcgaggcagatacattccgggaggatggcaggatagcatgctcacttcgagttaaatcaatcaatcaaatgacgacgatgtaaagcaggattgttacaaaaaccttttgctggcttcgcaactgatgtctctgcatccatctgttctagaatcaggagtgcctgtcgattgttaagcccactggtctggatgtagcgaacggttgaagcatccagtgtaggaacatgtgtcgactgcaaatggttgagatttgttctgttgtgcttgccgctactgtaacctcgctttgttgtgcgccggattcctgacgctggcacatcgtacgcttgtcggcgacaactttatggaacacacacattttgatgatttaaagaattctctataaaatgtcttctaat

SEQ ID NO: 73522 - DNA, 1753 bp, Zea Mays
gcccaaaactgaacccacaacccgaaaccagcaggcaacaaagcaaccagaggcagagcgttcttcttccccgacggcccgggccgacggctcgactccactagtcgctggaaccctctgcaacaaagccgcctccacctgaccacctcccttgagctcttccccttcctcgtgggttgtgcgagccctctaccggcgcgcagtacaggggctgattgggtgatcaaacccgcaagatttgggtttgtgatttaggagcaggaggcggtggcaatatggaatataaggcgagatctactggaacttcaggaacttcgtctaaaagtttccgtgatctgtacaatatgaagtactcgagctacttaaacgacgaaccaatgccggatgctacatcggaaaaggagcagggaaatgagtatttcaaacagaagaagttcactgatgctattgaatgctactccagaagtattgggctgtctcctacagcagtcacatttgcaaatagagctatggcatatcttaaactaagaagattcaaggaggcagaggacgattgcactgaagctctgaatctggatgatcgctatattaaagcatactcacgccgaattactgcacgaaaagaacttgggaagcttaaggaggcaatggatgatgctgaatttgctatcagtcttgatccaaacaattcagagctaaggaagcagtattctgagataaaagctttgcacatggagaaaatggctaaaaaggttccagtgccagctaaacgtgcagtttctggaattgataaaactgcagatgtcacttctcacccaccgactatctcccagaaggacactattatggaagttgatctgcctgttagagatgcaatgaagatcaaagagagtgcaagcgtcaagtctaacggaggacctggagtaatcatcaatggcaataacgtgcagcagctccaaggtcgagatgccaaccagaagactgggccagaagtttcagtccaagatcttgcagctcgtgctgcttcacggtatatggccggcactgtgaaaagcattaagacacccaaaacagcttatgactttgaggtttcttggagagctctttctgatgacactgcccagcaaatacagttactaaagtcgattccaccagcaagcctaccagagattttcaagaacgcactttctgcaccttttcttattgacatcgtgaagtgtgcagcctcaattttccgggatgcggaggcattagctgtcagtattttggataatttggctcgagttccacgcttcgacttgataatcatgtgcctttcatccatgcacaaatttgatggaagctctgaggcagctgcgaggcagatacattccgggaggatggcaggatagcatgctcacttcgagttaaatcaatcaatcaaatgacgacgatgtaaagcaggattgttacaaaaaccttttgctggcttcgcaactgatgtctctgcatccatctgttctagaatcaggagtgcctgtcgattgttaagcccactggtctggatgtagcgaacggttgaagcatccagtgtaggaacatgtgtcgactgcaaatggttgagatttgttctgttgtgcttgccgctactgtaacctcgctttgttgtgcgccggattcctgacgctggcacatcgtacgcttgtcggcgacaactttatggaacacacacattttgatgatttaaagaattctctataaaatgtcttctaat

SEQ ID NO: 73523 - DNA, 1922 bp, Zea Mays
gcccaaaactgaacccacaacccgaaaccagcaggcaacaaagcaaccagaggcagagcgttcttcttccccgacggcccgggccgacggctcgactccactagtcgctggaaccctctgcaacaaagccgcctccacctgaccacctcccttgagctcttccccttcctcgtgggttgtgcgagccctctaccggcgcgcagtacaggtaccaacactcggaattattctccgtcttcttccttgagccgcgccgcccaccgctccacctcgccttctcctaatttgaatcggagtcgtacccgccgccgccctccacacgggctgattgggtgatcaaacccgcaagatttgggtttgtgatttaggagcaggaggcggtggcaatatggaatataaggcgagatctactggaacttcaggaacttcgtctaaaagtttccgtgatctgtacaatatgaagtactcgagctacttaaacgacgaaccaatgccggatgctacatcggaaaaggagcagggaaatgagtatttcaaacagaagaagttcactgatgctattgaatgctactccagaagtattgggctgtctcctacagcagtcacatttgcaaatagagctatggcatatcttaaactaagaagattcaaggaggcagaggacgattgcactgaagctctgaatctggatgatcgctatattaaagcatactcacgccgaattactgcacgaaaagaacttgggaagcttaaggaggcaatggatgatgctgaatttgctatcagtcttgatccaaacaattcagagctaaggaagcagtattctgagataaaagctttgcacatggagaaaatggctaaaaaggttccagtgccagctaaacgtgcagtttctggaattgataaaactgcagatgtcacttctcacccaccgactatctcccagaaggacactattatggaagttgatctgcctgttagagatgcaatgaagatcaaagagagtgcaagcgtcaagtctaacggaggacctggagtaatcatcaatggcaataacgtgcagctccaaggtcgagatgccaaccagaagactgggccagaagtttcagtccaagatcttgcagctcgtgctgcttcacggtatatggccggcactgtgaaaagcattaagacacccaaaacagcttatgactttgaggtttcttggagagctctttctgatgacactgcccagcaaatacagttactaaagtcgattccaccagcaagcctaccagagattttcaagaacgcactttctgcaccttttcttattgacatcgtgaagtgtgcagcctcaattttccgggatgcggaggcattagctgtcagtattttggataatttggctcgagttccacgcttcgacttgataatcatgtgcctttcatccatgcacaaatttgaactgaggaagatatgggatcaagtattccttgctgaaaaagcgctggctgatgatcagatggaagctctgaggcagctgcgaggcagatacattccgggaggatggcaggatagcatgctcacttcgagttaaatcaatcaatcaaatgacgacgatgtaaagcaggattgttacaaaaaccttttgctggcttcgcaactgatgtctctgcatccatctgttctagaatcaggagtgcctgtcgattgttaagcccactggtctggatgtagcgaacggttgaagcatccagtgtaggaacatgtgtcgactgcaaatggttgagatttgttctgttgtgcttgccgctactgtaacctcgctttgttgtgcgccggattcctgacgctggcacatcgtacgcttgtcggcgacaactttatggaacacacacattttgatgatttaaagaattctctataaaatgtcttctaat

SEQ ID NO: 73524 - DNA, 1352 bp, Zea Mays
gcccaaaactgaacccacaacccgaaaccagcaggcaacaaagcaaccagaggcagagcgttcttcttccccgacggcccgggccgacggctcgactccactagtcgctggaaccctctgcaacaaagccgcctccacctgaccacctcccttgagctcttccccttcctcgtgggttgtgcgagccctctaccggcgcgcagtacaggggctgattgggtgatcaaacccgcaagatttgggtttgtgatttaggagcaggaggcggtggcaatatggaatataaggcgagatctactggaacttcaggaacttcgtctaaaagtttccgtgatctgtacaatatgaagtactcgagctacttaaacgacgaaccaatgccggatgctacatcggaaaaggagcagggaaatgagtatttcaaacagaagaagttcactgatgctattgaatgctactccagaagtattgggctgtctcctacagcagtcacatttgcaaatagagctatggcatatcttaaactaagaagattcaaggaggcagaggacgattgcactgaagctctgaatctggatgatcgctatattaaagcatactcacgccgaattactgcacgaaaagaacttgggaagcttaaggaggcaatggatgatgctgaatttgctatcagtcttgatccaaacaattcagagctaaggaagcagtattctgagataaaagctttgcacatggagaaaatggctaaaaaggttccagtgccagctaaacgtgcagtttctggaattgataaaactgcagatgtcacttctcacccaccgactatctcccagaaggacactattatggaagttgatctgcctgttagagatgcaatgaagatcaaagagagtgcaagcgtcaagtctaacggaggacctggagtaatcatcaatggcaataacgtgcagcagctccaaggtcgagatgccaaccagaagactgggccagaagtttcagtccaagatcttgcagctcgtgctgcttcacggtatatggccggcactgtgaaaagcattaagacacccaaaacagcttatgactttgaggtttcttggagagctctttctgatgacactgcccagcaaatacagttactaaagtcgattccaccagcaagcctaccagagattttcaagaacgcactttctgcaccttttcttattgacatcgtgaagtgtgcagcctcaattttccgctgtcagtattttggataatttggctcgagttccacgcttcgacttgataatcatgtgcctttcatccatgcacaaatttgaagtgaggcaacgagaaatctgaataccaacttg

SEQ ID NO: 73525 - DNA, 869 bp, Zea Mays
ctcgatctgacgactgatggaacttgagatgaaatggtagggtcgtcggaggaggacgaagcatgctcgggaggagacacggaggcgacggagccggggcagcaggagcacagctcccgcctggcggaccgtgagctgaaggagatgctgctgaagaagtacagcgggtgcctgagccggctgcggtccgagttcctgaagaagaggaagaaagggaagctgcccaaggacgcgcggtcggcgctcatggactggtggaacacgcactaccgctggccgtaccctacggtaaccatgcatgcatcctggcaaacacgcagcagcagcatcgctcgctggaatggcagatctgtgaccagcattagccggcggtgcaggaggaggacaaggtgaggctggcggcggcgactgggctggacccgaagcagatcaacaactggttcatcaaccagcggaagcggcactggaagccgtccgaggacatgcggttcgcgctcatggagggcgtcaccggcggcgggccctcgtccgggacaacgctctacttcgacacgggcaccatcgggccgtgaccaccacactaccagcttgggcaacgcaaagtgcatacgtttttctttgtgtatatgggcgacaacgtgtcggtaggtacactcagcatactggagctgctgtccagttcagttcagtgcatatggcctcgtaaaggactctgtaccatgatgatgtaatgctaactccaacccttctcacaaatttctatttttcttattttctattttatatttaaatatcttttgtcccagtttgccttctcttcattcttcaacaattctccccgttcagctcttcctttttactcttttaac

SEQ ID NO: 73526 - DNA, 776 bp, Zea Mays
gttcattcaacatcgcattagtttatgaaatggtagggtcgtcggaggaggacgaagcatgctcgggaggagacacggaggcgacggagccggggcagcaggagcacagctcccgcctggcggaccgtgagctgaaggagatgctgctgaagaagtacagcgggtgcctgagccggctgcggtccgagttcctgaagaagaggaagaaagggaagctgcccaaggacgcgcggtcggcgctcatggactggtggaacacgcactaccgctggccgtaccctacggaggaggacaaggtgaggctggcggcggcgactgggctggacccgaagcagatcaacaactggttcatcaaccagcggaagcggcactggaagccgtccgaggacatgcggttcgcgctcatggagggcgtcaccggcggcgggccctcgtccgggacaacgctctacttcgacacgggcaccatcgggccgtgaccaccacactaccagcttgggcaacgcaaagtgcatacgtttttctttgtgtatatgggcgacaacgtgtcggtaggtacactcagcatactggagctgctgtccagttcagttcagtgcatatggcctcgtaaaggactctgtaccatgatgatgtaatgctaactccaacccttctcacaaatttctatttttcttattttctattttatatttaaatatcttttgtcccagtttgccttctcttcattcttcaacaattctccccgttcagctcttcctttttactcttttaac

SEQ ID NO: 73527 - DNA, 2715 bp, Zea Mays
cttcgtcatcagtgatgattcggcagggtcagtgctgcatctggagtagaatcgtcccgcatttgcgaattgattagttggaaatagcaggcaggatcattaggggcctccgagtcccaccactaaaaaagtgcaccccactttttttttggatccactaaaaaagtgcccacaatccgcagggcagccgcgcccacacgtcagagacgaagacgccggcggccgcacctccctcctcgccgccgccccggcggcttctagcttctgctgccgatgccgatggcgctattgtctcgcggattgatgggtgccacgcgcacttcaacgcgccgtgctcacacggcgctggcgcccgggccccacagcaccgctttataagtaaccagcacgcgctgccccctcccctcctcccccggtctcactcacactccttcatcgggctcggcccgcgcggtcgtgagttcgtgactgcggaggaagtagcgcaggcgaaaaggctgcagcagtggacggcggcgaaccctagcctagctccgcgaggtgagtggttcagttcgacggctggcgcccgcgtatggggctgcgcgattcccgctgacttcctttctggtggattttggcaagtgcgttggcggtttgattcgatggccgtggcgtcgcggctcgcggtcacgcgtgtgtcgccggcggacggcgcgcgccccgcggcggcggcggggaggaggagtgggctcgcggtggttcggctcccgccgaccgacagcagggggagaaggaggaggcgcggcggggccgtcgcggccagccccccgacggaggaggtcgtgcagatgacggagccgctcaccaaggaggacctcgtcgcctacctcgtctccgggtgcaagcccaaggagaactggagaattggcacggagcatgaaaagtttggttttgaagtcgacacattacgccctataaaatatgatcagattcgtgacatactgaacgggctcgctgagagatttgattgggagaagataatggaaggaaacattgttatcggcctcaagcagggaaagcaaagcatctcactagaacctggaggccaatttgaacttagtggcgctcctctcgaaacgttacatcaaacttgtgctgaggtcaactcacatctatatcaggtcaaagcagttggagaagaaatgggaataggatttcttgggcttggctttcagccaaaatgggcactgagtgatataccaataatgccaaagggaagatacaaaataatgaggaattacatgcctaaagttggtacccttggccttgatatgatgttccggacatgtactgtgcaggttaatcttgacttcagttcagaacaggatatgataaggaaatttcgtgctggcctcgcattgcagcctaaggaaaaccaaatggatttctcagcctaaggagccatatctggacagataccgataacaaccgtgcagggatgctcccttttgtctttgacaactcatttgggtttgagcaatatgtggattatgcattagatgtccccatgtattttgtgtaccgaaataataagtatattgactgcaccggaatgtcatttcgggattttatgcaaggaaagctccgacaagctcctggggagttgcctactcttaatgattgggagaaccatctaacaacaatttttcctgaggttaggttaaagagataccttgagatgagaggtgctgatggtggcccatggaggagattgtgtgcgctgcctgcattttgggttgggctgctgtacgatgaggaatcattacaaagcattttagacatgacttttgactggacacaggaggaaagagagatgctaagacataaggtaccgttgactggtctgaagacaccatttcgcgatggatatgttagagatttagccgaggaagttctaaaactggccaagaatggattggaaagaagaggatacaaggaggtcggtttccttagagaggttgacgaagtggtgaggacaggagtgacacctgccgagagacttctgcatctgtacgagacgaagtggcaacgcaacgtagaccatgttttcgagcacttgctatactgatgttgtagatgtaccctagtacaaaaatctcatctttgattcattcaacgccttgagtgggagggcacaggaacacagcttttggttaagttgctgaccgggggaacagctacccggtgctgcgtgcggtgcctacaaataacttcgctcgggacggatcactactctctagggagatggaacaaatcactgtttgtaccggccctttttgtttctgttttccttcagagatggagatgccgtattgaaaataagtccatcttctgtacgatgggaactgtctgttttccccccttctttcctttcagcattgttgggatgtttgtcccgtgttaacatgcaaaatcaattacgtgtacgataaataagctgatggtttgatccggaatctgcaattgcgcgtgccttttcccaccttgtttttagccaaaaatcactatggatgagactacagtaatcgagtcctctggctgcctcaatttaattaggaagggggacggggaccgggggcattggttttcgtcgaagatgagtgttgctctgtggttctagctagcactgtcagaacatgaaatccaaccatagtatgaaccggcagaacatgt

SEQ ID NO: 73528 - DNA, 2622 bp, Zea Mays
tagaatcgtcccgcatttgcgaattgattagttggaaatagcaggcaggatcattaggggcctccgagtcccaccactaaaaaagtgcaccccactttttttttggatccactaaaaaagtgcccacaatccgcagggcagccgcgcccacacgtcagagacgaagacgccggcggccgcacctccctcctcgccgccgccccggcggcttctagcttctgctgccgatgccgatggcgctattgtctcgcggattgatgggtgccacgcgcacttcaacgcgccgtgctcacacggcgctggcgcccgggccccacagcaccgctttataagtaaccagcacgcgctgccccctcccctcctcccccggtctcactcacactccttcatcgggctcggcccgcgcggtcgtgagttcgtgactgcggaggaagtagcgcaggcgaaaaggctgcagcagtggacggcggcgaaccctagcctagctccgcgagtgcgttggcggtttgattcgatggccgtggcgtcgcggctcgcggtcacgcgtgtgtcgccggcggacggcgcgcgccccgcggcggcggcggggaggaggagtgggctcgcggtggttcggctcccgccgaccgacagcagggggagaaggaggaggcgcggcggggccgtcgcggccagccccccgacggaggaggtcgtgcagatgacggagccgctcaccaaggaggacctcgtcgcctacctcgtctccgggtgcaagcccaaggagaactggagaattggcacggagcatgaaaagtttggttttgaagtcgacacattacgccctataaaatatgatcagattcgtgacatactgaacgggctcgctgagagatttgattgggagaagataatggaaggaaacattgttatcggcctcaagcagggaaagcaaagcatctcactagaacctggaggccaatttgaacttagtggcgctcctctcgaaacgttacatcaaacttgtgctgaggtcaactcacatctatatcaggtcaaagcagttggagaagaaatgggaataggatttcttgggcttggctttcagccaaaatgggcactgagtgatataccaataatgccaaagggaagatacaaaataatgaggaattacatgcctaaagttggtacccttggccttgatatgatgttccggacatgtactgtgcaggttaatcttgacttcagttcagaacaggatatgataaggaaatttcgtgctggcctcgcattgcagcctattgcaactgcaatatttgccaattctccctttaaagaaggaaaaccaaatggatttctcagcctaaggagccatatctggacagataccgataacaaccgtgcagggatgctcccttttgtctttgacaactcatttgggtttgagcaatatgtggattatgcattagatgtccccatgtattttgtgtaccgaaataataagtatattgactgcaccggaatgtcatttcgggattttatgcaaggaaagctccgacaagctcctggggagttgcctactcttaatgattgggagaaccatctaacaacaatttttcctgaggttaggttaaagagataccttgagatgagaggtgctgatggtggcccatggaggagattgtgtgcgctgcctgcattttgggttgggctgctgtacgatgaggaatcattacaaagcattttagacatgacttttgactggacacaggaggaaagagagatgctaagacataaggtaccgttgactggtctgaagacaccatttcgcgatggatatgttagagatttagccgaggaagttctaaaactggccaagaatggattggaaagaagaggatacaaggaggtcggtttccttagagaggttgacgaagtggtgaggacaggagtgacacctgccgagagacttctgcatctgtacgagacgaagtggcaacgcaacgtagaccatgttttcgagcacttgctatactgatgttgtagatgtaccctagtacaaaaatctcatctttgattcattcaacgccttgagtgggagggcacaggaacacagcttttggttaagttgctgaccgggggaacagctacccggtgctgcgtgcggtgcctacaaataacttcgctcgggacggatcactactctctagggagatggaacaaatcactgtttgtaccggccctttttgtttctgttttccttcagagatggagatgccgtattgaaaataagtccatcttctgtacgatgggaactgtctgttttccccccttctttcctttcagcattgttgggatgtttgtcccgtgttaacatgcaaaatcaattacgtgtacgataaataagctgatggtttgatccggaatctgcaattgcgcgtgccttttcccaccttgtttttagccaaaaatcactatggatgagactacagtaatcgagtcctctggctgcctcaatttaattaggaagggggacggggaccgggggcattggttttcgtcgaagatgagtgttgctctgtggttctagctagcactgtcagaacatgaaatccaaccatagtatgaaccggcagaacatgt

SEQ ID NO: 73529 - DNA, 2549 bp, Zea Mays
ccgagtcccaccactaaaaaagtgcaccccactttttttttggatccactaaaaaagtgcccacaatccgcagggcagccgcgcccacacgtcagagacgaagacgccggcggccgcacctccctcctcgccgccgccccggcggcttctagcttctgctgccgatgccgatggcgctattgtctcgcggattgatgggtgccacgcgcacttcaacgcgccgtgctcacacggcgctggcgcccgggccccacagcaccgctttataagtaaccagcacgcgctgccccctcccctcctcccccggtctcactcacactccttcatcgggctcggcccgcgcggtcgtgagttcgtgactgcggaggaagtagcgcaggcgaaaaggctgcagcagtggacggcggcgaaccctagcctagctccgcgaggtgagtggttcagttcgacggctggcgcccgcgtatggggctgcgcgattcccgctgacttcctttctggtggattttggcaagtgcgttggcggtttgattcgatggccgtggcgtcgcggctcgcggtcacgcgtgtgtcgccggcggacggcgcgcgccccgcggcggcggcggggaggaggagtgggctcgcggtggttcggctcccgccgaccgacagcagggggagaaggaggaggcgcggcggggccgtcgcggccagccccccgacggaggaggtcgtgcagatgacggagccgctcaccaaggaggacctcgtcgcctacctcgtctccgggtgcaagcccaaggagaactggagaattggcacggagcatgaaaagtttggttttgaagtcgacacattacgccctataaaatatgatcagattcgtgacatactgaacgggctcgctgagagatttgattgggagaagataatggaaggaaacattgttatcggcctcaagcagggaaagcaaagcatctcactagaacctggaggccaatttgaacttagtggcgctcctctcgaaacgttacatcaaacttgtgctgaggtcaactcacatctatatcaggtcaaagcagttggagaagaaatgggaataggatttcttgggcttggctttcagccaaaatgggcactgagtgatataccaataatgccaaagggaagatacaaaataatgaggaattacatgcctaaagttggtacccttggccttgatatgatgttccggacatgtactgtgcaggttaatcttgacttcagttcagaacaggatatgataaggaaatttcgtgctggcctcgcattgcagcctattgcaactgcaatatttgccaattctccctttaaagaaggaaaaccaaatggatttctcagcctaaggagccatatctggacagataccgataacaaccgtgcagggatgctcccttttgtctttgacaactcatttgggattttatgcaaggaaagctccgacaagctcctggggagttgcctactcttaatgattgggagaaccatctaacaacaatttttcctgaggttaggttaaagagataccttgagatgagaggtgctgatggtggcccatggaggagattgtgtgcgctgcctgcattttgggttgggctgctgtacgatgaggaatcattacaaagcattttagacatgacttttgactggacacaggaggaaagagagatgctaagacataaggtaccgttgactggtctgaagacaccatttcgcgatggatatgttagagatttagccgaggaagttctaaaactggccaagaatggattggaaagaagaggatacaaggaggtcggtttccttagagaggttgacgaagtggtgaggacaggagtgacacctgccgagagacttctgcatctgtacgagacgaagtggcaacgcaacgtagaccatgttttcgagcacttgctatactgatgttgtagatgtaccctagtacaaaaatctcatctttgattcattcaacgccttgagtgggagggcacaggaacacagcttttggttaagttgctgaccgggggaacagctacccggtgctgcgtgcggtgcctacaaataacttcgctcgggacggatcactactctctagggagatggaacaaatcactgtttgtaccggccctttttgtttctgttttccttcagagatggagatgccgtattgaaaataagtccatcttctgtacgatgggaactgtctgttttccccccttctttcctttcagcattgttgggatgtttgtcccgtgttaacatgcaaaatcaattacgtgtacgataaataagctgatggtttgatccggaatctgcaattgcgcgtgccttttcccaccttgtttttagccaaaaatcactatggatgagactacagtaatcgagtcctctggctgcctcaatttaattaggaagggggacggggaccgggggcattggttttcgtcgaagatgagtgttgctctgtggttctagctagcactgtcagaacatgaaatccaaccatagtatgaaccggcagaacatgt

SEQ ID NO: 73530 - DNA, 2758 bp, Zea Mays
caccactaaaaaagtgcaccccactttttttttggatccactaaaaaagtgcccacaatccgcagggcagccgcgcccacacgtcagagacgaagacgccggcggccgcacctccctcctcgccgccgccccggcggcttctagcttctgctgccgatgccgatggcgctattgtctcgcggattgatgggtgccacgcgcacttcaacgcgccgtgctcacacggcgctggcgcccgggccccacagcaccgctttataagtaaccagcacgcgctgccccctcccctcctcccccggtctcactcacactccttcatcgggctcggcccgcgcggtcgtgagttcgtgactgcggaggaagtagcgcaggcgaaaaggctgcagcagtggacggcggcgaaccctagcctagctccgcgaggtgagtggttcagttcgacggctggcgcccgcgtatggggctgcgcgattcccgctgacttcctttctggtggattttggcaagtgcgttggcggtttgattcgatggccgtggcgtcgcggctcgcggtcacgcgtgtgtcgccggcggacggcgcgcgccccgcggcggcggcggggaggaggagtgggctcgcggtggttcggctcccgccgaccgacagcagggggagaaggaggaggcgcggcggggccgtcgcggccagccccccgacggaggaggtcgtgcagatgacggagccgctcaccaaggaggacctcgtcgcctacctcgtctccgggtgcaagcccaaggagaactggagaattggcacggagcatgaaaagtttggttttgaagtcgacacattacgccctataaaatatgatcagattcgtgacatactgaacgggctcgctgagagatttgattgggagaagataatggaaggaaacattgttatcggcctcaagcagggaaagcaaagcatctcactagaacctggaggccaatttgaacttagtggcgctcctctcgaaacgttacatcaaacttgtgctgaggtcaactcacatctatatcaggtcaaagcagttggagaagaaatgggaataggatttcttgggcttggctttcagccaaaatgggcactgagtgatataccaataatgccaaagatacaaaataatgaggaattacatgcctaaagttggtacccttggccttgatatgatgttccggacatgtactgtgcaggttaatcttgacttcagttcagaacaggatatgataaggaaatttcgtgctggcctcgcattgcagcctattgcaactgcaatatttgccaattctccctttaaagaaggaaaaccaaatggatttctcagcctaaggagccatatctggacagataccgataacaaccgtgcagggatgctcccttttgtctttgacaactcatttgggttagcatttcttttgaactccccactcccccaccttgagtgccagtaatttgattgattgcttcattctctttaaagatgttttcaatgtgaaagcatcctaattatagtttcttttgggggtgcaggtttgagcaatatgtggattatgcattagatgtccccatgtattttgtgtaccgaaataataagtatattgactgcaccggaatgtcatttcgggattttatgcaaggaaagctccgacaagctcctggggagttgcctactcttaatgattgggagaaccatctaacaacaatttttcctgaggttaggttaaagagataccttgagatgagaggtgctgatggtggcccatggaggagattgtgtgcgctgcctgcattttgggttgggctgctgtacgatgaggaatcattacaaagcattttagacatgacttttgactggacacaggaggaaagagagatgctaagacataaggtaccgttgactggtctgaagacaccatttcgcgatggatatgttagagatttagccgaggaagttctaaaactggccaagaatggattggaaagaagaggatacaaggaggtcggtttccttagagaggttgacgaagtggtgaggacaggagtgacacctgccgagagacttctgcatctgtacgagacgaagtggcaacgcaacgtagaccatgttttcgagcacttgctatactgatgttgtagatgtaccctagtacaaaaatctcatctttgattcattcaacgccttgagtgggagggcacaggaacacagcttttggttaagttgctgaccgggggaacagctacccggtgctgcgtgcggtgcctacaaataacttcgctcgggacggatcactactctctagggagatggaacaaatcactgtttgtaccggccctttttgtttctgttttccttcagagatggagatgccgtattgaaaataagtccatcttctgtacgatgggaactgtctgttttccccccttctttcctttcagcattgttgggatgtttgtcccgtgttaacatgcaaaatcaattacgtgtacgataaataagctgatggtttgatccggaatctgcaattgcgcgtgccttttcccaccttgtttttagccaaaaatcactatggatgagactacagtaatcgagtcctctggctgcctcaatttaattaggaagggggacggggaccgggggcattggttttcgtcgaagatgagtgttgctctgtggttctagctagcactgtcagaacatgaaatccaaccatagtatgaaccggcagaacatgt

SEQ ID NO: 73531 - DNA, 2521 bp, Zea Mays
tttggatccactaaaaaagtgcccacaatccgcagggcagccgcgcccacacgtcagagacgaagacgccggcggccgcacctccctcctcgccgccgccccggcggcttctagcttctgctgccgatgccgatggcgctattgtctcgcggattgatgggtgccacgcgcacttcaacgcgccgtgctcacacggcgctggcgcccgggccccacagcaccgctttataagtaaccagcacgcgctgccccctcccctcctcccccggtctcactcacactccttcatcgggctcggcccgcgcggtcgtgagttcgtgactgcggaggaagtagcgcaggcgaaaaggctgcagcagtggacggcggcgaaccctagcctagctccgcgaggtgagtggttcagttcgacggctggcgcccgcgtatggggctgcgcgattcccgctgacttcctttctggtggattttggcaagtgcgttggcggtttgattcgatggccgtggcgtcgcggctcgcggtcacgcgtgtgtcgccggcggacggcgcgcgccccgcggcggcggcggggaggaggagtgggctcgcggtggttcggctcccgccgaccgacagcagggggagaaggaggaggcgcggcggggccgtcgcggccagccccccgacggaggaggtcgtgcagatgacggagccgctcaccaaggaggacctcgtcgcctacctcgtctccgggtgcaagcccaaggagaactggagaattggcacggagcatgaaaagtttggttttgaagtcgacacattacgccctataaaatatgatcagattcgtgacatactgaacgggctcgctgagagatttgattgggagaagataatggaaggaaacattgttatcggcctcaagcagggaaagcaaagcatctcactagaacctggaggccaatttgaacttagtggcgctcctctcgaaacgttacatcaaacttgtgctgaggtcaactcacatctatatcaggtcaaagcagttggagaagaaatgggaataggatttcttgggcttggctttcagccaaaatgggcactgagtgatataccaataatgccaaaggttaatcttgacttcagttcagaacaggatatgataaggaaatttcgtgctggcctcgcattgcagcctattgcaactgcaatatttgccaattctccctttaaagaaggaaaaccaaatggatttctcagcctaaggagccatatctggacagataccgataacaaccgtgcagggatgctcccttttgtctttgacaactcatttgggtttgagcaatatgtggattatgcattagatgtccccatgtattttgtgtaccgaaataataagtatattgactgcaccggaatgtcatttcgggattttatgcaaggaaagctccgacaagctcctggggagttgcctactcttaatgattgggagaaccatctaacaacaatttttcctgaggttaggttaaagagataccttgagatgagaggtgctgatggtggcccatggaggagattgtgtgcgctgcctgcattttgggttgggctgctgtacgatgaggaatcattacaaagcattttagacatgacttttgactggacacaggaggaaagagagatgctaagacataaggtaccgttgactggtctgaagacaccatttcgcgatggatatgttagagatttagccgaggaagttctaaaactggccaagaatggattggaaagaagaggatacaaggaggtcggtttccttagagaggttgacgaagtggtgaggacaggagtgacacctgccgagagacttctgcatctgtacgagacgaagtggcaacgcaacgtagaccatgttttcgagcacttgctatactgatgttgtagatgtaccctagtacaaaaatctcatctttgattcattcaacgccttgagtgggagggcacaggaacacagcttttggttaagttgctgaccgggggaacagctacccggtgctgcgtgcggtgcctacaaataacttcgctcgggacggatcactactctctagggagatggaacaaatcactgtttgtaccggccctttttgtttctgttttccttcagagatggagatgccgtattgaaaataagtccatcttctgtacgatgggaactgtctgttttccccccttctttcctttcagcattgttgggatgtttgtcccgtgttaacatgcaaaatcaattacgtgtacgataaataagctgatggtttgatccggaatctgcaattgcgcgtgccttttcccaccttgtttttagccaaaaatcactatggatgagactacagtaatcgagtcctctggctgcctcaatttaattaggaagggggacggggaccgggggcattggttttcgtcgaagatgagtgttgctctgtggttctagctagcactgtcagaacatgaaatccaaccatagtatgaaccggcagaacatgt

SEQ ID NO: 73532 - DNA, 2358 bp, Zea Mays
aaaaaagtgcccacaatccgcagggcagccgcgcccacacgtcagagacgaagacgccggcggccgcacctccctcctcgccgccgccccggcggcttctagcttctgctgccgatgccgatggcgctattgtctcgcggattgatgggtgccacgcgcacttcaacgcgccgtgctcacacggcgctggcgcccgggccccacagcaccgctttataagtaaccagcacgcgctgccccctcccctcctcccccggtctcactcacactccttcatcgggctcggcccgcgcggtcgtgagttcgtgactgcggaggaagtagcgcaggcgaaaaggctgcagcagtggacggcggcgaaccctagcctagctccgcgagtgcgttggcggtttgattcgatggccgtggcgtcgcggctcgcggtcacgcgtgtgtcgccggcggacggcgcgcgccccgcggcggcggcggggaggaggagtgggctcgcggtggttcggctcccgccgaccgacagcagggggagaaggaggaggcgcggcggggccgtcgcggccagccccccgacggaggaggtcgtgcagatgacggagccgctcaccaaggaggacctcgtcgcctacctcgtctccgggtgcaagcccaaggagaactggagggaaagcaaagcatctcactagaacctggaggccaatttgaacttagtggcgctcctctcgaaacgttacatcaaacttgtgctgaggtcaactcacatctatatcaggtcaaagcagttggagaagaaatgggaataggatttcttgggcttggctttcagccaaaatgggcactgagtgatataccaataatgccaaagggaagatacaaaataatgaggaattacatgcctaaagttggtacccttggccttgatatgatgttccggacatgtactgtgcaggttaatcttgacttcagttcagaacaggatatgataaggaaatttcgtgctggcctcgcattgcagcctattgcaactgcaatatttgccaattctccctttaaagaaggaaaaccaaatggatttctcagcctaaggagccatatctggacagataccgataacaaccgtgcagggatgctcccttttgtctttgacaactcatttgggtttgagcaatatgtggattatgcattagatgtccccatgtattttgtgtaccgaaataataagtatattgactgcaccggaatgtcatttcgggattttatgcaaggaaagctccgacaagctcctggggagttgcctactcttaatgattgggagaaccatctaacaacaatttttcctgaggttaggttaaagagataccttgagatgagaggtgctgatggtggcccatggaggagattgtgtgcgctgcctgcattttgggttgggctgctgtacgatgaggaatcattacaaagcattttagacatgacttttgactggacacaggaggaaagagagatgctaagacataaggtaccgttgactggtctgaagacaccatttcgcgatggatatgttagagatttagccgaggaagttctaaaactggccaagaatggattggaaagaagaggatacaaggaggtcggtttccttagagaggttgacgaagtggtgaggacaggagtgacacctgccgagagacttctgcatctgtacgagacgaagtggcaacgcaacgtagaccatgttttcgagcacttgctatactgatgttgtagatgtaccctagtacaaaaatctcatctttgattcattcaacgccttgagtgggagggcacaggaacacagcttttggttaagttgctgaccgggggaacagctacccggtgctgcgtgcggtgcctacaaataacttcgctcgggacggatcactactctctagggagatggaacaaatcactgtttgtaccggccctttttgtttctgttttccttcagagatggagatgccgtattgaaaataagtccatcttctgtacgatgggaactgtctgttttccccccttctttcctttcagcattgttgggatgtttgtcccgtgttaacatgcaaaatcaattacgtgtacgataaataagctgatggtttgatccggaatctgcaattgcgcgtgccttttcccaccttgtttttagccaaaaatcactatggatgagactacagtaatcgagtcctctggctgcctcaatttaattaggaagggggacggggaccgggggcattggttttcgtcgaagatgagtgttgctctgtggttctagctagcactgtcagaacatgaaatccaaccatagtatgaaccggcagaacatgt

SEQ ID NO: 73533 - DNA, 2499 bp, Zea Mays
aaaaaagtgcccacaatccgcagggcagccgcgcccacacgtcagagacgaagacgccggcggccgcacctccctcctcgccgccgccccggcggcttctagcttctgctgccgatgccgatggcgctattgtctcgcggattgatgggtgccacgcgcacttcaacgcgccgtgctcacacggcgctggcgcccgggccccacagcaccgctttataagtaaccagcacgcgctgccccctcccctcctcccccggtctcactcacactccttcatcgggctcggcccgcgcggtcgtgagttcgtgactgcggaggaagtagcgcaggcgaaaaggctgcagcagtggacggcggcgaaccctagcctagctccgcgagtgcgttggcggtttgattcgatggccgtggcgtcgcggctcgcggtcacgcgtgtgtcgccggcggacggcgcgcgccccgcggcggcggcggggaggaggagtgggctcgcggtggttcggctcccgccgaccgacagcagggggagaaggaggaggcgcggcggggccgtcgcggccagccccccgacggaggaggtcgtgcagatgacggagccgctcaccaaggaggacctcgtcgcctacctcgtctccgggtgcaagcccaaggagaactggagaattggcacggagcatgaaaagtttggttttgaagtcgacacattacgccctataaaatatgatcagattcgtgacatactgaacgggctcgctgagagatttgattgggagaagataatggaaggaaacattgttatcggcctcaagcagggaaagcaaagcatctcactagaacctggaggccaatttgaacttagtggcgctcctctcgaaacgttacatcaaacttgtgctgaggtcaactcacatctatatcaggtcaaagcagttggagaagaaatgggaataggatttcttgggcttggctttcagccaaaatgggcactgagtgatataccaataatgccaaagggaagatacaaaataatgaggaattacatgcctaaagttggtacccttggccttgatatgatgttccggacatgtactgtgcaggttaatcttgacttcagttcagaacaggatatgataaggaaatttcgtgctggcctcgcattgcagcctattgcaactgcaatatttgccaattctccctttaaagaaggaaaaccaaatggatttctcagcctaaggagccatatctggacagataccgataacaaccgtgcagggatgctcccttttgtctttgacaactcatttgggtttgagcaatatgtggattatgcattagatgtccccatgtattttgtgtaccgaaataataagtatattgactgcaccggaatgtcatttcgggattttatgcaaggaaagctccgacaagctcctggggagttgcctactcttaatgattgggagaaccatctaacaacaatttttcctgaggttaggttaaagagataccttgagatgagaggtgctgatggtggcccatggaggagattgtgtgcgctgcctgcattttgggttgggctgctgtacgatgaggaatcattacaaagcattttagacatgacttttgactggacacaggaggaaagagagatgctaagacataaggtaccgttgactggtctgaagacaccatttcgcgatggatatgttagagatttagccgaggaagttctaaaactggccaagaatggattggaaagaagaggatacaaggaggtcggtttccttagagaggttgacgaagtggagtgacacctgccgagagacttctgcatctgtacgagacgaagtggcaacgcaacgtagaccatgttttcgagcacttgctatactgatgttgtagatgtaccctagtacaaaaatctcatctttgattcattcaacgccttgagtgggagggcacaggaacacagcttttggttaagttgctgaccgggggaacagctacccggtgctgcgtgcggtgcctacaaataacttcgctcgggacggatcactactctctagggagatggaacaaatcactgtttgtaccggccctttttgtttctgttttccttcagagatggagatgccgtattgaaaataagtccatcttctgtacgatgggaactgtctgttttccccccttctttcctttcagcattgttgggatgtttgtcccgtgttaacatgcaaaatcaattacgtgtacgataaataagctgatggtttgatccggaatctgcaattgcgcgtgccttttcccaccttgtttttagccaaaaatcactatggatgagactacagtaatcgagtcctctggctgcctcaatttaattaggaagggggacggggaccgggggcattggttttcgtcgaagatgagtgttgctctgtggttctagctagcactgtcagaacatgaaatccaaccatagtatgaaccggcagaacatgt

SEQ ID NO: 73534 - DNA, 2428 bp, Zea Mays
aaaaaagtgcccacaatccgcagggcagccgcgcccacacgtcagagacgaagacgccggcggccgcacctccctcctcgccgccgccccggcggcttctagcttctgctgccgatgccgatggcgctattgtctcgcggattgatgggtgccacgcgcacttcaacgcgccgtgctcacacggcgctggcgcccgggccccacagcaccgctttataagtaaccagcacgcgctgccccctcccctcctcccccggtctcactcacactccttcatcgggctcggcccgcgcggtcgtgagttcgtgactgcggaggaagtagcgcaggcgaaaaggctgcagcagtggacggcggcgaaccctagcctagctccgcgagtgcgttggcggtttgattcgatggccgtggcgtcgcggctcgcggtcacgcgtgtgtcgccggcggacggcgcgcgccccgcggcggcggcggggaggaggagtgggctcgcggtggttcggctcccgccgaccgacagcagggggagaaggaggaggcgcggcggggccgtcgcggccagccccccgacggaggaggtcgtgcagatgacggagccgctcaccaaggaggacctcgtcgcctacctcgtctccgggtgcaagcccaaggagaactggagaattggcacggagcatgaaaagtttggttttgaagtcgacacattacgccctataaaatatgatcagattcgtgacatactgaacgggctcgctgagagatttgattgggagaagataatggaaggaaacattgttatcggcctcaagcagggaaagcaaagcatctcactagaacctggaggccaatttgaacttagtggcgctcctctcgaaacgttacatcaaacttgtgctgaggtcaactcacatctatatcaggtcaaagcagttggagaagaaatgggaataggatttcttgggcttggctttcagccaaaatgggcactgagtgatataccaataatgccaaagggaagatacaaaataatgaggaattacatgcctaaagttggtacccttggccttgatatgatgttccggacatgtactgtgcaggttaatcttgacttcagttcagaacaggatatgataaggaaatttcgtgctggcctcgcattgcagcctattgcaactgcaatatttgccaattctccctttaaagaaggaaaaccaaatggatttctcagcctaaggagccatatctggacagataccgataacaaccgtgcagggatgctcccttttgtctttgacaactcatttgggtttgagcaatatgtggattatgcattagatgtccccatgtattttgtgtaccgaaataataagtatattgactgcaccggaatgtcatttcgggattttatgcaaggaaagctccgacaagctcctggggagttgcctactcttaatgattgggagaaccatctaacaacaatttttcctgaggttaggttaaagagataccttgagatgagaggtgctgatggtggcccatggaggagattgtgtgcgctgcctgcattttgggttgggctgctgtacgatgaggaatcattacaaagcattttagacatgacttttgactggacacaggaggaaagagagatgctaagacataagaatggattggaaagaagaggatacaaggaggtcggtttccttagagaggttgacgaagtggtgaggacaggagtgacacctgccgagagacttctgcatctgtacgagacgaagtggcaacgcaacgtagaccatgttttcgagcacttgctatactgatgttgtagatgtaccctagtacaaaaatctcatctttgattcattcaacgccttgagtgggagggcacaggaacacagcttttggttaagttgctgaccgggggaacagctacccggtgctgcgtgcggtgcctacaaataacttcgctcgggacggatcactactctctagggagatggaacaaatcactgtttgtaccggccctttttgtttctgttttccttcagagatggagatgccgtattgaaaataagtccatcttctgtacgatgggaactgtctgttttccccccttctttcctttcagcattgttgggatgtttgtcccgtgttaacatgcaaaatcaattacgtgtacgataaataagctgatggtttgatccggaatctgcaattgcgcgtgccttttcccaccttgtttttagccaaaaatcactatggatgagactacagtaatcgagtcctctggctgcctcaatttaattaggaagggggacggggaccgggggcattggttttcgtcgaagatgagtgttgctctgtggttctagctagcactgtcagaacatgaaatccaaccatagtatgaaccggcagaacatgt

SEQ ID NO: 73535 - DNA, 2264 bp, Zea Mays
aaaaaagtgcccacaatccgcagggcagccgcgcccacacgtcagagacgaagacgccggcggccgcacctccctcctcgccgccgccccggcggcttctagcttctgctgccgatgccgatggcgctattgtctcgcggattgatgggtgccacgcgcacttcaacgcgccgtgctcacacggcgctggcgcccgggccccacagcaccgctttataagtaaccagcacgcgctgccccctcccctcctcccccggtctcactcacactccttcatcgggctcggcccgcgcggtcgtgagttcgtgactgcggaggaagtagcgcaggcgaaaaggctgcagcagtggacggcggcgaaccctagcctagctccgcgagtgcgttggcggtttgattcgatggccgtggcgtcgcggctcgcggtcacgcgtgtgtcgccggcggacggcgcgcgccccgcggcggcggcggggaggaggagtgggctcgcggtggttcggctcccgccgaccgacagcagggggagaaggaggaggcgcggcggggccgtcgcggccagccccccgacggaggaggtcgtgcagatgacggagccgctcaccaaggaggacctcgtcgcctacctcgtctccgggtgcaagcccaaggagaactggagggaaagcaaagcatctcactagaacctggaggccaatttgaacttagtggcgctcctctcgaaacgttacatcaaacttgtgctgaggtcaactcacatctatatcaggtcaaagcagttggagaagaaatgggaataggatttcttgggcttggctttcagccaaaatgggcactgagtgatataccaataatgccaaagggaagatacaaaataatgaggaattacatgcctaaagttggtacccttggccttgatatgatgttccggacatgtactgtgcaggttaatcttgacttcagttcagaacaggatatgataaggaaatttcgtgctggcctcgcattgcagcctattgcaactgcaatatttgccaattctccctttaaagaaggaaaaccaaatggatttctcagcctaaggagccatatctggacagataccgataacaaccgtgcagggatgctcccttttgtctttgacaactcatttgggattttatgcaaggaaagctccgacaagctcctggggagttgcctactcttaatgattgggagaaccatctaacaacaatttttcctgaggttaggttaaagagataccttgagatgagaggtgctgatggtggcccatggaggagattgtgtgcgctgcctgcattttgggttgggctgctgtacgatgaggaatcattacaaagcattttagacatgacttttgactggacacaggaggaaagagagatgctaagacataaggtaccgttgactggtctgaagacaccatttcgcgatggatatgttagagatttagccgaggaagttctaaaactggccaagaatggattggaaagaagaggatacaaggaggtcggtttccttagagaggttgacgaagtggtgaggacaggagtgacacctgccgagagacttctgcatctgtacgagacgaagtggcaacgcaacgtagaccatgttttcgagcacttgctatactgatgttgtagatgtaccctagtacaaaaatctcatctttgattcattcaacgccttgagtgggagggcacaggaacacagcttttggttaagttgctgaccgggggaacagctacccggtgctgcgtgcggtgcctacaaataacttcgctcgggacggatcactactctctagggagatggaacaaatcactgtttgtaccggccctttttgtttctgttttccttcagagatggagatgccgtattgaaaataagtccatcttctgtacgatgggaactgtctgttttccccccttctttcctttcagcattgttgggatgtttgtcccgtgttaacatgcaaaatcaattacgtgtacgataaataagctgatggtttgatccggaatctgcaattgcgcgtgccttttcccaccttgtttttagccaaaaatcactatggatgagactacagtaatcgagtcctctggctgcctcaatttaattaggaagggggacggggaccgggggcattggttttcgtcgaagatgagtgttgctctgtggttctagctagcactgtcagaacatgaaatccaaccatagtatgaaccggcagaacatgt

SEQ ID NO: 73536 - DNA, 1675 bp, Zea Mays
tggagttttctgcaagaaaaatgcagtgaagttcaaaactacattgtgaggcatcatgttcatgtaattctgctagacaaataatgggatcatacatggaaaaaagggttgtttacttgtttctctcccaaatgattgtcacaatgacggaacagatctataagaagatttcccccttgcctgtgcagtgtcgagaaaacgaatttataactgtgtgcacaacaaatatgctatggacagtaatatgaataaaccaaatcacataatatcagagtagaagggaaatggaaagcaaacaacgttggaccttgtttattttctagaagtatagtaattgaaatttatcagcattgtgcagtaattggcaaataagatgataggtggttaatgcacattgtataagttattatcagcatggtaaaactgcagccaaataagttgatttcatttgtatagttcattatgatttgctcaaacacgctagtatagatatatgacactcataagtcctaatgtttaaatatcagaaatctatatcacacatgtgcacgaaaacagtggggaatgtactgtacaaaggaaaaaactcaaatagaaatataagatgaggatcagagtactgatgttgccatttttttatttcctactgtttgtcaaattcatgttgcttattactttgtacagaaacaattcagattactaagtgcacgtctgtaatgttataaaaacataaaatagtttgttagggacgccaaagcaattcagaaataaatgttcttaagtaattatcttgtgcaggtataagaaaaagagctatagtagattgtttcaggaagtaaacagaggaatggagagataattgggaattctatatgtaaacatattgtttaatatatgtatatgtgcatctactatgaatatgtatgcaaacatatattaatatttatatcatcaatagtacgatagagggcctgtttgtttccttgcagttctattagagatgtttgtttatataaattattagcgggggaaagcgaaacaaatattccaaaataagcacctaatgacatgtttatggactataataaactaggtatctacattatataatccactccaataagttgtgctgtttgtttacctcttagcttatttaagtccaattatataatctagagggtgaataaacagggccatatatattatgttgtgttaatgtgtgtgtgtatatgtaacgttgtacacaataaaaaagtataaaacctagactattgtcatggaaaatgtgataaagaaggctacctttttcgggtgatcgtatccgatttcctagaagctgtaggctttggaaagaactttgcgatggttccaagcgacaagcaaagaaggtggtcagctctctgatagatcgatcacatgcatggttgaatccgaataaactgacctcccacgagtaggaattcgaatcagcgtcactctcgaatcaaacaaagcaacgacgtctcacctgaaccattcacgcggccatgctggtgggggaaagaagtcgccgatgcagcgacaactactgattgctggacggcatcgagcgcctccacgcccgcctccgcatcagttcgccgatgtgctacctttgcaatttcagtccccttgtttccaagaacattttgagcct

SEQ ID NO: 73537 - DNA, 927 bp, Zea Mays
ggaaaacaaagctccaatggctctctgtcagctcccaatcgggtcgcatatgagaacccaactcgttgctgcgaatatttgcgccgacgccgttgctcccaatcgccacgatttttctttttcccgcgccctcctcctgccttcgcacctctatcggtcgatttggtgcgcgtgttgcggcggagagccggcgacctctgctgcttgccgctacgctatcctccactgcgacatgaatcccagaaacagcgcgtctctaacggatggaacaaggtcgccgacgacaggaaatcactccgcggcggacggagatgtagagccagacaatatggagatatgttagaggatagtccaccagaagttgaagatcgtaagaggccaagtggaattttttttttaaaaaaaaagctaaagcattgcgaagaggtggaaaagattcttatttggaggcttcaaaacatttatgggaaagagaagaaggaggttgttgcagagaaagaaaagaaaaatgaggaaaaaggttcaatctttcatatgaactagagaaagagaggcttcaggttttgatcatattagggctgcaaatgaggcaaaaaaaaaatagaggtaaaggaaagcgagatacagatgaaaagaatgttagaggaagagaggattatgacaatggacatcagttcaatctttcatatgaactagagaaatatatatagggctgcaaatgttgggtgtggagtcgaactttcatgtttttttttccagactcgctctctgttgtgtgtgcatgtctgtgcgaggtggagtcagatgtgcgtgtgtttataaattacagtatgaatcagagcttgtgctgttgtctcgtatgctgaactgcaaatataatttccacttgttgttgccagcaaatagaaagaagaaatatagcaggta

SEQ ID NO: 73538 - DNA, 952 bp, Zea Mays
ctccaatggctctctgtcagctcccaatcgggtcgcatatgagaacccaactcgttgctgcgaatatttgcgccgacgccgttgctcccaatcgccacgatttttctttttcccgcgccctcctcctgccttcgcacctctatcggtcgatttggtgcgcgtgttgcggcggagagccggcgacctctgctgcttgccgctacgctatcctccactgcgacatgaatcccagaaacagcgcgtctctaacggatggaacaaggtcgccgacgacaggaaatcactccgcggcggacggagatgtagaggttcaggaatttcttgagttttgtgactcccagcagccagacaatatggagatatgttagaggatagtccaccagaagttgaagatcgtaagaggccaagtggaattttttttttaaaaaaaaagctaaagcattgcgaagaggtggaaaagattcttatttggaggcttcaaaacatttatgggaaagagaagaaggaggttgttgcagagaaagaaaagaaaaatgaggaaaaaggttcaatctttcatatgaactagagaaagagaggcttcaggttttgatcatattagggctgcaaatgaggcaaaaaaaaaatagaggtaaaggaaagcgagatacagatgaaaagaatgttagaggaagagaggattatgacaatggacatcagttcaatctttcatatgaactagagaaatatatatagggctgcaaatgttgggtgtggagtcgaactttcatgtttttttttccagactcgctctctgttgtgtgtgcatgtctgtgcgaggtggagtcagatgtgcgtgtgtttataaattacagtatgaatcagagcttgtgctgttgtctcgtatgctgaactgcaaatataatttccacttgttgttgccagcaaatagaaagaagaaatatagcaggta

SEQ ID NO: 73539 - DNA, 975 bp, Zea Mays
atcattcctccctcgcatacatacatagcaacccttgcctcctccttaaggcctagtttggaagcccactttcccggagggattcagccttttccctggtgagaaaaccccgcgtgagaatgggccacagttaatttcgccggcctgtttggagcctgtttccgcgggtcggcgtctccctcgaatcggcaaaacaccaggggaacgctcccccgagtcgcgaccccgggcaagtttccccacgggcggggcgacgaaatcaccgctctgctccgacgtccagctctactcgcgagcaggacatcaccgcgcgtccaccatctctggcttgctgtcctccgcgcgtcatctccatccctggcttgagaagataaggctcctccttaccgaaataggaaagggtcactttcacaaaacgtgatgttggcatgtgaggtgaatgtggcgatgaagagatgggcttacagtgtgttaagtggaagcaacacatgaagcggacatggagaaggaagctggcatgacactaaaacgcataaagttgacttgtgacgttcatgttttagatgtcttattctactgccaaacttcctagtactccatttttatactatattgtctatctgtacgtgtgaatggagatgatgatattatgtgatgtgatgatggatggattagcttcgttgaatattagatgatattatgtgatgatgatattaaacgggcattgtagtattgatacatgcttcatatttctggatttttagtgatgttttattgtttatgagttttctaaatattccttatttttgtttgattttttctaaatttttgatgtatttttttgctcaagaggggtatttagcacctttctttccaaacaatgccaggaaaatatacctgggaggggagattctctccgggaaataaggtggcatataaaatcccctcctgggttagtttccaagggattttttt

SEQ ID NO: 73540 - DNA, 1311 bp, Zea Mays
gtcgaacgcacttggacgtcagccgagtgcaaggtgcagggtcagctctaagggcaaggtttgaaaagttctgtaaacattccacagtgagcttttctggcaaacaaaaagataagtagtaaaccattgcaaaccaaatttccgaatggaagtaatccatgtttttaatataaagctcattttgtttaagttgctaaacttacgtttcattgttttgtttggcagccgacattatcattgacgagaaaaaatgaccccttttctgccactcatccatcatgacatcaagcaaaaagataagcactgaaccattgcaaaccaaatttctgaatggtagtaatccatgtttttaatataaagctcattttgtttaagttgctaaacttactttacattattttgtttggcagccggcattatcattgacgagaaaaatggtcccttttctgccactcatcgatcatgacatcaccaatgagataccgagtcaccttcaaagaaagcaataggttgcatttgcgtcgtttcgtgattcatcatctatttgaacatagacataaaaatcaagagctgaaagccggcgacggtggcatgccaagtagaggggaggaactgttgtgaagagcggcggtggtgagtggtgatgctgtgaactgagctatgcgtatcactcatgatgagaaaaggatccatgcaaagtcttcgtgataatggcttctggccttctagaatatttaccacctgcggccaagcgtgtgaaaattcctcggaaagattggcaagctgaatgaccgaaggggataagatcattgaccgtgtgcgcaactttcggctccaggacttgggtttggtaagctgtttctctgttaagtctgctattagtggattgcctgctatggggggtgcagatccaatgcaccgaatgatcaacagaaccacatcggcctggtttggtaacaccgaaagtcgcgtcctctatttacgatgttggaaagtcgttgccattgtttaagttcatcgttatcactaactgttgcgtgctcgagccatgtgcgcctgatgtccgaagctgcgccgagtgtcgctttatcttcgtacgttgctccgtatcgagttcgcccgcgtagtgatcttctccctgtcgtgcttgtcgtcgctacgtcgtggtaaaaagattagattagtgtatggttgtcgacatatttgtgtgtcattacaaaattctaaattgaatctttagaaataatttgtgtaatattgataatgtttaccatacgaattttacatatcatagtgatatttgtcgttcca

SEQ ID NO: 73541 - DNA, 4897 bp, Zea Mays
aagccgtccgtttcgtcaccaagcgacccggatccttcctcgccggcaactcaagaccaccaagcggctccaccgccaccgaaatcccccccgatccacaacccatgcagcgcaaacataagctcctcgcacatcgatcgcactgctgccggaagcagatcggagcagcctcacggcgacgggtgctgctcgcctcgctactcccatcagattcccgacggctgctgctcgcctcgctgctaccccaccagatcccggcgcctccccctcgccctctcaattccgatccgtcgcttcgcgatcgacccatccgctctcacacgacgggcgcgcggcgtggatcagcagccgccgggtctgctcaggcgtcgcgaatggccgcgctcacggcctcacgggggcaaccagcggcacgaatcgtggggctcgccggcggtatcgtcgtcggtggggacgggtggcggcctcccggatccagactgcccctggtagtccgcgtgaattacggcatctgccatctcgacctgatgggcctcgattggcggctggcgttcccgtgaatcctgcggtgggccaagggtagaagcggtaactcgctgggccagcacctgaagataaatcttgtgaaatgatgccaaatgcggtcactaactctactaaagatgtcttggaggctgatgacacaactttcaataatgaatttctgatcaagttagatcagctcggtgatgatcctgttatttcccttggaaacatgcttgttgaacttatccagcacgaggattcttgttctggggattcaaatggcccgaccagtacatataagctgctcctactgaaggaaagcatttccaaggagattgaaaagactgaactcgagattgattcattggaaggcgaacttaaatctgtgaatactgaggctgcaactactcttgaaggttctcccacaggggtgacacatacagaaaatctttcaccctctagtgggacatccaaggttcctggaagtgtggagatctgtgatacatctgatatgataaaagaaccaggggagctcattggttctcctaaggtacctgtggtgcagtatgatgatgtcaaaagtgctgatatgatggaaattgaaacagctccagttcataatgcaaaaacagttccttcagaagctggtgctatatctcctgtagtcgctgagggtaaggcctgtgcagctgctgatcttagctcattgaaagcttctgaagaagctgggtctcaaaatgatattgacaatggcaggctggaaacttcttcacgccaagctaatgctgattccatgaaaatagaaattagtgatgacctaccagtgaagaaatggacataccatgatcataagtctgatttgctcagttctgtcacatctgcaaatagtgctatagccaaagaaattaatgaagtgctatttaaatcattgcctgctgatacacctcgccttgatttgtttgcatcaagtcatcttctgagccaaaggaagagcgatttgattgtcaaagaaaggcttggagtatgtaaaaccaggctgaggttgaaagagcagatgcttacaatgaagttcaaggcatattgtcacttgtggaaagatgtccaactattttctgcaaataaacagcgttcaaagtctaataagcgcactgatcagagcaaccgaacatcacaaattggatctcagaggcaacgctcctctaaccgctcgcgattaaccatgcctgctggtaatttaagtacattctcaactccagaaatgtcagatgttgcaatgaggttgttttcagagttcaaaattaagcggtgcagaaattacttgaaaatgcctgcactgattattgatgagaaagagaaggagtggttgaagcttatgaacaagaatggtctagttgaggatcctgttttagttgagaaggaacgggtgatgataaatccgtggactcaagaagaaaagaaaatttttatggagttgcttgctaaatttggcaaggatttctccaaaatcgccagtttcattacacataaatctactgcagactgtgtggagttctactataagcatcataaatcagatagcttccgagaagtgaagaaactattggaccttcgtcaacagcaacccaccagcaattttcttggagcgaaatctggacataaatggaatcctgagtcaaatgctgcttctcttgatatgcttggggtagcatcagtagtagcagcccatggccttgaatatgcaaaacaagtggagaaaatttctgcgaaatccctcatccggactgcatatgggcccaatgtgacttccgtggctaataaatcttctgataaggagtgcattgaccatgtgcctttgcacgagagagaatctgtagcagctgatgtactagcaggcatatgtggcactctctctcctgatggaatgggctcatgcattactagttctgctgatcctggacagaagattagcatgaaaagagtggagcatgtcttgtcccaagaaaatgacaaaaccgttgaggaggaagacacactctctgatcaagagtgtgaagttgacccagttgattggaatgacgacgagaagtcaattttcattgaggctatgaataactacggaaaggattttgctcggatctcgtcatgtgtgaagagcaagtcatatgaacaatgcaaagtgttctttagtaaggctcggaaatcactcggtttggatttgatccatcaaggggcagccgatgttagtatgccagctagtgataccaatggagggaagagtgatactgatgaggcctgcgctgtggaaatggattcagctatctgtagcacacagtcatgttcaaagattgcgatggatgtttgtcctactgaaggagccattggagggcctaactctgttataatctctaagcaggcagaagcatatatatcaaatgggtgcaatgctgatgttaaaattgaggaagatgagaaggtagctgataaaaattgcagcattgttgatgctaagaggtccagtgatgctactcacgaagctggtcctattgacatcaattgcccaggaagcacagataagctgcaaggaactgatgatgtcgttgacctagtaaacatgcatagtaatagtggcatcagctcttcagctaagcatgcagtggccattcactcggaaatgagatccactttacattctgtagaggtccttcaaacagacaaaggtgaaggtactggtactgatttgtcctgggtggaagaatgttcacaccatgctctggataacacaccaatgaaaaatggaaattctggtgccccggctttcttggcttcagatagtggtatcaaggacaatgttcgcatctcaaacataactgctgcttccaccgttagtcctgcattcacttcaagttatcagcattctgtacctggagatatgcccctgccaaaaccaaagccacttgttaccccgcttaccccaaaggatttaatgcctgtgcagttcagttcagtgcttcctgaccccactgcaattcgtttcgagggcatagcctcaataactacgcccaacttcgaggacactggcaacagagtcagtggtgctctaggggctaaagagatgagcaagtacccagcttttagagacccatctgaactgcgagtggcactgtgaatacttcacaggcggatcggttgacccaaacaaaattgcagaatggcaggtccagcagcttgtgccttcaaaacaattccgatggcattcaatggcccagagaccacgaaggaggactggaaggctctttgaggccttgctctcgcaatacaagctccgagggtgatgagcaacaaaagcggcctggtgatgtcaagttgtttggacagattctcagccatcagtcaaccctgcagagttctggcttgtcttgcaatggtaacaagagcaagcctccctcaccaaagatcgacacatctgtgagatccatgaacaatccaatggaccgtgtggtttgttcttccaggcctggcaccactccacatctgggtctggaggaaagattggcaaggtgctatggtcatctggatggtagcacggcacagcccgagccactgctcgtgatggcaaagcgccagcggtccttggccggcgtacagttttactcggctaagaacggcacgcttggtgtgttaccagattaccaacaaccttcgacgcagccacagcaatcagatcccaagcgtgtggaaaggttgtctgatccgcagaagaggaacgtgctggaactcatctcgggtttccagcagcccggcagagtcgcccgtttcgggggtgctggcatcctcgtaagcggcaacgtctcggaccctgtggctgctgctctcaaggctcagtatggtcccggttctaagattatgggcagcgacgtggatccttggacggacataggaagcaggtagcgccgtagcagctctactgcttctgttgctccttgtaccatatatttagttttggtgtaacttgaatgaaatcatcagaatatgagatgtggggggtggggagtgaatggctttcctgcccatactatctgtaggcttttggccagtagcagtcgggtttcgctgtttactggcattaacatttttactctttcttctgcagctccatacccttttggtatagcttgacatgccagcagtggcacagtgccgtaggttccctagaggtgaactagatgtttgtcagcatggtttgattttgccagcctatgcagaaaacctcacttggtctttgtaatgtggtaatgccatgtatcagtatcctagtctgatggagttttggttgagacagttctcattgcccgctggttcatcttctgtttct

SEQ ID NO: 73542 - DNA, 1256 bp, Zea Mays
cacaacccatgcagcgcaaacataagctcctcgcacatcgatcgcactgctgccggaagcagatcggagcagcctcacggcgacgggtgctgctcgcctcgctactcccatcagattcccgacggctgctgctcgcctcgctgctaccccaccagatcccggcgcctccccctcgccctctcaattccgatccgtcgcttcgcgatcgacccatccgctctcacacgacgggcgcgcggcgtggatcagcagccgccgggtctgctcaggcgtcgcgaatggccgcgctcacggcctcacgggggcaaccagcggcacgaatcgtggggctcgccggcggtatcgtcgtcggtggggacgggtggcggcctcccggatccagactgcccctggtagtccgcgtgaattacggcatctgccatctcgacctgatgggcctcgattggcggctggcgttcccgtgaatcctgcggtgggccaagggtagaagcggtaactcgctgggccaggtaggaagttttcctttccgtgttccgccttttccccccgccgaataaacaaattataaaataaaaacaacttgttttaaatgggagcgggaatccctggaatttactttttttttctccttcgggctgtttctcactctgtacgcctctctggggccgcggacgtgagaggctcgcatcaaatcgggctcagggccggccgggcgcgtccgctttatcggctcacgttggcgcggcctccgtttcctctcccctttccttgtcctctctccctctccctccctcccggcctcacctctccagcctctctcccccacctcttccacccctccacgcccccagagagccccaggcgcaccgccgacgaccccggttcaggcgcagatcagcgtgcgcagtgtcccgcccaccctgcctccgcgacctccgaccctgggagcgcctgcccgcgccgcagggggcgcttcgcatatctccccttctcttccctcgccggtgggtagcggccggcttgctgctgccctgtccacgccgcgtctacgtgtcctcaagggctgggcgctcttgtcctgccaaacccggtgcggcctctgcttggaaccactccgttcgtgtgcctctctgtaggttttctacgctctaggaggaggtcagagacgcctcagagttggcttcgccgcgcgcatgcgatttgcggcggcggccggaggctggcacagccgccgctggggcgacgacgacaacggc

SEQ ID NO: 73543 - DNA, 5248 bp, Zea Mays
ccaccacctctgcgggaccatgcgcggccctcgccgcgccgggcgccgacgtcggcctcctcagaaggctactaccgacagggcggcggcgcgtacgaccgctcctaccctgacgacccgccgcctgtctacacgccgtcgcgctcggaccgatactggccggaggacgacggcgggcaatacaagggtttcggtcggtatggcggcggtggccgcagggacggccgtgacatgaggggttcgtaccggaggtccccatacaggggtggctacggaagcgacttctcccgaaaccatccagagcagccccctcccccaccacccagaaggtctccgttgaggtcagtcgctgttccgatctgctatgactcaccgggcaatagagttgacaggggggatagggacaacctcccacgggtgacaccatggcggagaagggaaagcagatctgagccagcagacgctgttggacttctctctgttggccaaaccacccggctctctgcctcagggaaggaggcttcagctcagcctctgtccgtgtctggtcctcatgggaccgaggacgaggcaccaaggaagaaggcacgccttggatgggggcaaggtttggccaagtatgagaagcagaaggtccaagggcctgtggatcctgctgaagctgttgctgatggaagtccagctgatggcgaactgaagaccacctctcctgtgcctgtgcctgtgcaccctgtgcctgtgcctgtgccttatgttgcacctgcacctcctgctgcaccagtgcttgcgcctgcgccagcaccttctgctgctcctgcacttttgtctgcccctatgcaatgctcatctccagttaccgggccaccatattgttcctcagataaatcttgtgaaatgatgccaaatgcggtcactaactctactaaagatgtcttggaggctgatgacacaactttcaataatgaatttctgatcaagttagatcagctcggtgatgatcctgttatttcccttggaaacatgcttgttgaacttatccagcacgaggattcttgttctggggattcaaatggcccgaccagtacatataagctgctcctactgaaggaaagcatttccaaggagattgaaaagactgaactcgagattgattcattggaaggcgaacttaaatctgtgaatactgaggctgcaactactcttgaaggttctcccacaggggtgacacatacagaaaatctttcaccctctagtgggacatccaaggttcctggaagtgtggagatctgtgatacatctgatatgataaaagaaccaggggagctcattggttctcctaaggtacctgtggtgcagtatgatgatgtcaaaagtgctgatatgatggaaattgaaacagctccagttcataatgcaaaaacagttccttcagaagctggtgctatatctcctgtagtcgctgagggtaaggcctgtgcagctgctgatcttagctcattgaaagcttctgaagaagctgggtctcaaaatgatattgacaatggcaggctggaaacttcttcacgccaagctaatgctgattccatgaaaatagaaattagtgatgacctaccagtgaagaaatggacataccatgatcataagtctgatttgctcagttctgtcacatctgcaaatagtgctatagccaaagaaattaatgaagtgctatttaaatcattgcctgctgatacacctcgccttgatttgtttgcatcaagtcatcttctgagccaaaggaagagcgatttgattgtcaaagaaaggcttggagtatgtaaaaccaggctgaggttgaaagagcagatgcttacaatgaagttcaaggcatattgtcacttgtggaaagatgtccaactattttctgcaaataaacagcgttcaaagtctaataagcgcactgatcagagcaaccgaacatcacaaattggatctcagaggcaacgctcctctaaccgctcgcgattaaccatgcctgctggtaatttaagtacattctcaactccagaaatgtcagatgttgcaatgaggttgttttcagagttcaaaattaagcggtgcagaaattacttgaaaatgcctgcactgattattgatgagaaagagaaggagtggttgaagcttatgaacaagaatggtctagttgaggatcctgttttagttgagaaggaacgggtgatgataaatccgtggactcaagaagaaaagaaaatttttatggagttgcttgctaaatttggcaaggatttctccaaaatcgccagtttcattacacataaatctactgcagactgtgtggagttctactataagcatcataaatcagatagcttccgagaagtgaagaaactattggaccttcgtcaacagcaacccaccagcaattttcttggagcgaaatctggacataaatggaatcctgagtcaaatgctgcttctcttgatatgcttggggtagcatcagtagtagcagcccatggccttgaatatgcaaaacaagtggagaaaatttctgcgaaatccctcatccggactgcatatgggcccaatgtgacttccgtggctaataaatcttctgataaggagtgcattgaccatgtgcctttgcacgagagagaatctgtagcagctgatgtactagcaggcatatgtggcactctctctcctgatggaatgggctcatgcattactagttctgctgatcctggacagaagattagcatgaaaagagtggagcatgtcttgtcccaagaaaatgacaaaaccgttgaggaggaagacacactctctgatcaagagtgtgaagttgacccagttgattggaatgacgacgagaagtcaattttcattgaggctatgaataactacggaaaggattttgctcggatctcgtcatgtgtgaagagcaagtcatatgaacaatgcaaagtgttctttagtaaggctcggaaatcactcggtttggatttgatccatcaaggggcagccgatgttagtatgccagctagtgataccaatggagggaagagtgatactgatgaggcctgcgctgtggaaatggattcagctatctgtagcacacagtcatgttcaaagattgcgatggatgtttgtcctactgaaggagccattggagggcctaactctgttataatctctaagcaggcagaagcatatatatcaaatgggtgcaatgctgatgttaaaattgaggaagatgagaaggtagctgataaaaattgcagcattgttgatgctaagaggtccagtgatgctactcacgaagctggtcctattgacatcaattgcccaggaagcacagataagctgcaaggaactgatgatgtcgttgacctagtaaacatgcatagtaatagtggcatcagctcttcagctaagcatgcagtggccattcactcggaaatgagatccactttacattctgtagaggtccttcaaacagacaaaggtgaaggtactggtactgatttgtcctgggtggaagaatgttcacaccatgctctggataacacaccaatgaaaaatggaaattctggtgccccggctttcttggcttcagatagtggtatcaaggacaatgttcgcatctcaaacataactgctgcttccaccgttagtcctgcattcacttcaagttatcagcattctgtacctggagatatgcccctgccaaaaccaaagccacttgttaccccgcttaccccaaaggatttaatgcctgtgcagttcagttcagtgcttcctgaccccactgcaattcgtttcgagggcatagcctcaataactacgcccaacttcgaggacactggcaacagagtcagtggtgctctaggggctaaagagatgagcaagtacccagcttttagagacccatctggtaatcagcaaagcaccttgttttgtaatattgatggttatatgaatcatcgtctgacaactgaattaccatttttttctgaaagaactgcgagtggcactgtgaatacttcacaggcggatcggttgacccaaacaaaattgcagaatggcaggtccagcagcttgtgccttcaaaacaattccgatggcattcaatggcccagagaccacgaaggaggactggaaggctctttgaggccttgctctcgcaatacaagctccgagggtgatgagcaacaaaagcggcctggtgatgtcaagttgtttggacagattctcagccatcagtcaaccctgcagagttctggcttgtcttgcaatggtaacaagagcaagcctccctcaccaaagatcgacacatctgtgagatccatgaacaatccaatggaccgtgtggtttgttcttccaggcctggcaccactccacatctgggtctggaggaaagattggcaaggtgctatggtcatctggatggtagcacggcacagcccgagccactgctcgtgatggcaaagcgccagcggtccttggccggcgtacagttttactcggctaagaacggcacgcttggtgtgttaccagattaccaacaaccttcgacgcagccacagcaatcagatcccaagcgtgtggaaaggttgtctgatccgcagaagaggaacgtgctggaactcatctcgggtttccagcagcccggcagagtcgcccgtttcgggggtgctggcatcctcgtaagcggcaacgtctcggaccctgtggctgctgctctcaaggctcagtatggtcccggttctaagattatgggcagcgacgtggatccttggacggacataggaagcaggtagcgccgtagcagctctactgcttctgttgctccttgtaccatatatttagttttggtgtaacttgaatgaaatcatcagaatatgagatgtggggggtggggagtgaatggctttcctgcccatactatctgtaggcttttggccagtagcagtcgggtttcgctgtttactggcattaacatttttactctttcttctgcagctccatacccttttggtatagcttgacatgccagcagtggcacagtgccgtaggttccctagaggtgaactagatgtttgtcagcatggtttgattttgccagcctatgcagaaaacctcacttggtctttgtaatgtggtaatgccatgtatcagtatcctagtctgatggagttttggttgagacagttctcattgcccgctggttcatcttctgtttct

SEQ ID NO: 73544 - DNA, 5157 bp, Zea Mays
cgggaccatgcgcggccctcgccgcgccgggcgccgacgtcggcctcctcaggctactaccgacagggcggcggcgcgtacgaccgctcctaccctgacgacccgccgcctgtctacacgccgtcgcgctcggaccgatactggccggaggacgacggcgggcaatacaagggtttcggtcggtatggcggcggtggccgcagggacggccgtgacatgaggggttcgtaccggaggtccccatacaggggtggctacggaagcgacttctcccgaaaccatccagagcagccccctcccccaccacccagaaggtctccgttgaggtcagtcgctgttccgatctgctatgactcaccgggcaatagagttgacaggggggatagggacaacctcccacgggtgacaccatggcggagaagggaaagcagatctgagccagcagacgctgttggacttctctctgttggccaaaccacccggctctctgcctcagggaaggaggcttcagctcagcctctgtccgtgtctggtcctcatgggaccgaggacgaggcaccaaggaagaaggcacgccttggatgggggcaaggtttggccaagtatgagaagcagaaggtccaagggcctgtggatcctgctgaagctgttgctgatggaagtccagctgatggcgaactgaagaccacctctcctgtgcctgtgcctgtgcaccctgtgcctgtgcctgtgccttatgttgcacctgcacctcctgctgcaccagtgcttgcgcctgcgccagcaccttctgctgctcctgcacttttgtctgcccctatgcaatgctcatctccagttaccgggccaccatattgttcctcagcacctgaagataaatcttgtgaaatgatgccaaatgcggtcactaactctactaaagatgtcttggaggctgatgacacaactttcaataatgaatttctgatcaagttagatcagctcggtgatgatcctgttatttcccttggaaacatgcttgttgaacttatccagcacgaggattcttgttctggggattcaaatggcccgaccagtacatataagctgctcctactgaaggaaagcatttccaaggagattgaaaagactgaactcgagattgattcattggaaggcgaacttaaatctgtgaatactgaggctgcaactactcttgaaggttctcccacaggggtgacacatacagaaaatctttcaccctctagtgggacatccaaggttcctggaagtgtggagatctgtgatacatctgatatgataaaagaaccaggggagctcattggttctcctaaggtacctgtggtgcagtatgatgatgtcaaaagtgctgatatgatggaaattgaaacagctccagttcataatgcaaaaacagttccttcagaagctggtgctatatctcctgtagtcgctgagggtaaggcctgtgcagctgctgatcttagctcattgaaagcttctgaagaagctgggtctcaaaatgatattgacaatggcaggctggaaacttcttcacgccaagctaatgctgattccatgaaaatagaaattagtgatgacctaccagtgaagaaatggacataccatgatcataagtctgatttgctcagttctgtcacatctgcaaatagtgctatagccaaagaaattaatgaagtgctatttaaatcattgcctgctgatacacctcgccttgatttgtttgcatcaagtcatcttctgagccaaaggaagagcgatttgattgtcaaagaaaggcttggagtatgtaaaaccaggctgaggttgaaagagcagatgcttacaatgaagttcaaggcatattgtcacttgtggaaagatgtccaactattttctgcaaataaacagcgttcaaagtctaataagcgcactgatcagagcaaccgaacatcacaaattggatctcagaggcaacgctcctctaaccgctcgcgattaaccatgcctgctggtaatttaagtacattctcaactccagaaatgtcagatgttgcaatgaggttgttttcagagttcaaaattaagcggtgcagaaattacttgaaaatgcctgcactgattattgatgagaaagagaaggagtggttgaagcttatgaacaagaatggtctagttgaggatcctgttttagttgagaaggaacgggtgatgataaatccgtggactcaagaagaaaagaaaatttttatggagttgcttgctaaatttggcaaggatttctccaaaatcgccagtttcattacacataaatctactgcagactgtgtggagttctactataagcatcataaatcagatagcttccgagaagtgaagaaactattggaccttcgtcaacagcaacccaccagcaattttcttggagcgaaatctggacataaatggaatcctgagtcaaatgctgcttctcttgatatgcttggggtagcatcagtagtagcagcccatggccttgaatatgcaaaacaagtggagaaaatttctgcgaaatccctcatccggactgcatatgggcccaatgtgacttccgtggctaataaatcttctgataaggagtgcattgaccatgtgcctttgcacgagagagaatctgtagcagctgatgtactagcaggcatatgtggcactctctctcctgatggaatgggctcatgcattactagttctgctgatcctggacagaagattagcatgaaaagagtggagcatgtcttgtcccaagaaaatgacaaaaccgttgaggaggaagacacactctctgatcaagagtgtgaagttgacccagttgattggaatgacgacgagaagtcaattttcattgaggctatgaataactacggaaaggattttgctcggatctcgtcatgtgtgaagagcaagtcatatgaacaatgcaaagtgttctttagtaaggctcggaaatcactcggtttggatttgatccatcaaggggcagccgatgttagtatgccagctagtgataccaatggagggaagagtgatactgatgaggcctgcgctgtggaaatggattcagctatctgtagcacacagtcatgttcaaagattgcgatggatgtttgtcctactgaaggagccattggagggcctaactctgttataatctctaagcaggcagaagcatatatatcaaatgggtgcaatgctgatgttaaaattgaggaagatgagaaggtagctgataaaaattgcagcattgttgatgctaagaggtccagtgatgctactcacgaagctggtcctattgacatcaattgcccaggaagcacagataagctgcaaggaactgatgatgtcgttgacctagtaaacatgcatagtaatagtggcatcagctcttcagctaagcatgcagtggccattcactcggaaatgagatccactttacattctgtagaggtccttcaaacagacaaaggtgaaggtactggtactgatttgtcctgggtggaagaatgttcacaccatgctctggataacacaccaatgaaaaatggaaattctggtgccccggctttcttggcttcagatagtggtatcaaggacaatgttcgcatctcaaacataactgctgcttccaccgttagtcctgcattcacttcaagttatcagcattctgtacctggagatatgcccctgccaaaaccaaagccacttgttaccccgcttaccccaaaggatttaatgcctgtgcagttcagttcagtgcttcctgaccccactgcaattcgtttcgagggcatagcctcaataactacgcccaacttcgaggacactggcaacagagtcagtggtgctctaggggctaaagagatgagcaagtacccagcttttagagacccatctgaactgcgagtggcactgtgaatacttcacaggcggatcggttgacccaaacaaaattgcagaatggcaggtccagcagcttgtgccttcaaaacaattccgatggcattcaatggcccagagaccacgaaggaggactggaaggctctttgaggccttgctctcgcaatacaagctccgagggtgatgagcaacaaaagcggcctggtgatgtcaagttgtttggacagattctcagccatcagtcaaccctgcagagttctggcttgtcttgcaatggtaacaagagcaagcctccctcaccaaagatcgacacatctgtgagatccatgaacaatccaatggaccgtgtggtttgttcttccaggcctggcaccactccacatctgggtctggaggaaagattggcaaggtgctatggtcatctggatggtagcacggcacagcccgagccactgctcgtgatggcaaagcgccagcggtccttggccggcgtacagttttactcggctaagaacggcacgcttggtgtgttaccagattaccaacaaccttcgacgcagccacagcaatcagatcccaagcgtgtggaaaggttgtctgatccgcagaagaggaacgtgctggaactcatctcgggtttccagcagcccggcagagtcgcccgtttcgggggtgctggcatcctcgtaagcggcaacgtctcggaccctgtggctgctgctctcaaggctcagtatggtcccggttctaagattatgggcagcgacgtggatccttggacggacataggaagcaggtagcgccgtagcagctctactgcttctgttgctccttgtaccatatatttagttttggtgtaacttgaatgaaatcatcagaatatgagatgtggggggtggggagtgaatggctttcctgcccatactatctgtaggcttttggccagtagcagtcgggtttcgctgtttactggcattaacatttttactctttcttctgcagctccatacccttttggtatagcttgacatgccagcagtggcacagtgccgtaggttccctagaggtgaactagatgtttgtcagcatggtttgattttgccagcctatgcagaaaacctcacttggtctttgtaatgtggtaatgccatgtatcagtatcctagtctgatggagttttggttgagacagttctcattgcccgctggttcatcttctgtttct

SEQ ID NO: 73545 - DNA, 5036 bp, Zea Mays
gaccatgcgcggccctcgccgcgccgggcgccgacgtcggcctcctcagaaggctactaccgacagggcggcggcgcgtacgaccgctcctaccctgacgacccgccgcctgtctacacgccgtcgcgctcggaccgatactggccggaggacgacggcgggcaatacaagggtttcggtcggtatggcggcggtggccgcagggacggccgtgacatgaggggttcgtaccggaggtccccatacaggggtggctacggaagcgacttctcccgaaaccatccagagcagccccctcccccaccacccagaaggtctccgttgaggtcagtcgctgttccgatctgctatgactcaccgggcaatagagttgacaggggggatagggacaacctcccacgggtgacaccatggcggagaagggaaagcagatctgagccagcagacgctgttggacttctctctgttggccaaaccacccggctctctgcctcagggaaggaggcttcagctcagcctctgtccgtgtctggtcctcatgggaccgaggacgaggcaccaaggaagaaggcacgccttggatgggggcaaggtttggccaagtatgagaagcagaaggtccaagggcctgtggatcctgctgaagctgttgctgatggaagtccagctgatggcgaactgaagaccacctctcctgtgcctgtgcctgtgcaccctgtgcctgtgcctgtgccttatgttgcacctgcacctcctgctgcaccagtgcttgcgcctgcgccagcaccttctgctgctcctgcacttttgtctgcccctatgcaatgctcatctccagttaccgggccaccatattgttcctcagcacctgaagataaatcttgtgaaatgatgccaaatgcggtcactaactctactaaagatgtcttggaggctgatgacacaactttcaataatgaatttctgatcaagttagatcagctcggtgatgatcctgttatttcccttggaaacatgcttgttgaacttatccagcacgaggattcttgttctggggattcaaatggcccgaccagtacatataagctgctcctactgaaggaaagcatttccaaggagattgaaaagactgaactcgagattgattcattggaaggcgaacttaaatctgtgaatactgaggctgcaactactcttgaaggttctcccacaggggtgacacatacagaaaatctttcaccctctagtgggacatccaaggttcctggaagtgtggagatctgtgatacatctgatatgataaaagaaccaggggagctcattggttctcctaaggtacctgtggtgcagtatgatgatgtcaaaagtgctgatatgatggaaattgaaacagctccagttcataatgcaaaaacagttccttcagaagctggtgctatatctcctgtagtcgctgagggtaaggcctgtgcagctgctgatcttagctcattgaaagcttctgaagaagctgggtctcaaaatgatattgacaatggcaggctggaaacttcttcacgccaagctaatgctgattccatgaaaatagaaattagtgatgacctaccagtgaagaaatggacataccatgatcataagtctgatttgctcagttctgtcacatctgcaaatagtgctatagccaaagaaattaatgaagtgctatttaaatcattgcctgctgatacacctcgccttgatttgtttgcatcaagtcatcttctgagccaaaggaagagcgatttgattgtcaaagaaaggcttggagtatgtaaaaccaggctgaggttgaaagagcagatgcttacaatgaagttcaaggcatattgtcacttgtggaaagatgtccaactattttctgcaaataaacagcgttcaaagtctaataagcgcactgatcagagcaaccgaacatcacaaattggatctcagaggcaacgctcctctaaccgctcgcgattaaccatgcctgctggtaatttaagtacattctcaactccagaaatgtcagatgttgcaatgaggttgttttcagagttcaaaattaagcggtgcagaaattacttgaaaatgcctgcactgattattgatgagaaagagaaggagtggttgaagcttatgaacaagaatggtctagttgaggatcctgttttagttgagaaggaacgggtgatgataaatccgtggactcaagaagaaaagaaaatttttatggagttgcttgctaaatttggcaaggatttctccaaaatcgccagtttcattacacataaatctactgcagactgtgtggagttctactataagcatcataaatcagatagcttccgagaagtgaagaaactattggaccttcgtcaacagcaacccaccagcaattttcttggagcgaaatctggacataaatggaatcctgagtcaaatgctgcttctcttgatatgcttggggtagcatcagtagtagcagcccatggccttgaatatgcaaaacaagtggagaaaatttctgcgaaatccctcatccggactgcatatgggcccaatgtgacttccgtggctaataaatcttctgataaggagtgcattgaccatgtgcctttgcacgagagagaatctgtagcagctgatgtactagcaggcatatgtggcactctctctcctgatggaatgggctcatgcattactagttctgctgatcctggacagaagattagcatgaaaagagtggagcatgtcttgtcccaagaaaatgacaaaaccgttgaggaggaagacacactctctgatcaagagtgtgaagttgacccagttgattggaatgacgacgagaagtcaattttcattgaggctatgaataactacggaaaggattttgctcggatctcgtcatgtgtgaagagcaagtcatatgaacaatgcaaagtgttctttagtaaggctcggaaatcactcggtttggatttgatccatcaaggggcagccgatgttagtatgccagctagtgataccaatggagggaagagtgatactgatgaggcctgcgctgtggaaatggattcagctatctgtagcacacagtcatgttcaaagattgcgatggatgtttgtcctactgaaggagccattggagggcctaactctgttataatctctaagcaggcagaagcatatatatcaaatgggtgcaatgctgatgttaaaattgaggaagatgagaaggtagctgataaaaattgcagcattgttgatgctaagaggtccagtgatgctactcacgaagctggtcctattgacatcaattgcccaggaagcacagataagctgcaaggaactgatgatgtcgttgacctagtaaacatgcatagtaatagtggcatcagctcttcagctaagcatgcagtggccattcactcggaaatgagatccactttacattctgtagaggtccttcaaacagacaaaggtgaaggtactggtactgatttgtcctgggtggaagaatgttcacaccatgctctggataacacaccaatgaaaaatggaaattctggtgccccggctttcttggcttcagatagtggtatcaaggacaatgttcgcatctcaaacataactgctgcttccaccgttagtcctgcattcacttcaagttatcagcattctgtacctggagatatgcccctgccaaaaccaaagccacttgttaccccgcttaccccaaaggatttaatgcctgtgcagttcagttcagtgcttcctgaccccactgcaattcgtttcgagggcatagcctcaataactacgcccaacttcgaggacactggcaacagagtcagtggtgctctaggggctaaagagatgagcaagtacccagcttttagagacccatctggtaatcagcaaagcaccttgttttgtaatattgatggttatatgaatcatcgtctgacaactgaattaccatttttttctgaaagaactgcgagtggcactgtgaatacttcacaggcggatcggttgacccaaacaaaattgcagaatggcaggtccagcagcttgtgccttcaaaacaattccgatggcattcaatggcccagagaccacgaaggaggactggaaggctctttgaggccttgctctcgcaatacaagctccgagggtgatgagcaacaaaagcggcctggtgatgtcaagttgtttggacagattctcagccatcagtcaaccctgcagagttctggcttgtcttgcaatggtaacaagagcaagcctccctcaccaaagatcgacacatctgtgagatccatgaacaatccaatggaccgtgtggtttgttcttccaggcctggcaccactccacatctgggtctggaggaaagattggcaaggtgctatggtcatctggatggtagcacggcacagcccgagccactgctcgtgatggcaaagcgccagcggtccttggccggcgtacagttttactcggctaagaacggcacgcttggtgtgttaccagattaccaacaaccttcgacgcagccacagcaatcagatcccaagcgtgtggaaaggttgtctgatccgcagaagaggaacgtgctggaactcatctcgggtttccagcagcccggcagagtcgcccgtttcgggggtgctggcatcctcgtaagcggcaacgtctcggaccctgtggctgctgctctcaaggctcagtatggtcccggttctaagattatgggcagcgacgtggatccttggacggacataggaagcagctccatacccttttggtatagcttgacatgccagcagtggcacagtgccgtaggttccctagaggtgaactagatgtttgtcagcatggtttgattttgccagcctatgcagaaaacctcacttggtctttgtaatgtggtaatgccatgtatcagtatcctagtctgatggagttttggttgagacagttctcattgcccgctggttcatcttctgtttct

SEQ ID NO: 73546 - DNA, 5069 bp, Zea Mays
gaccatgcgcggccctcgccgcgccgggcgccgacgtcggcctcctcagaaggctactaccgacagggcggcggcgcgtacgaccgctcctaccctgacgacccgccgcctgtctacacgccgtcgcgctcggaccgatactggccggaggacgacggcgggcaatacaagggtttcggtcggtatggcggcggtggccgcagggacggccgtgacatgaggggttcgtaccggaggtccccatacaggggtggctacggaagcgacttctcccgaaaccatccagagcagccccctcccccaccacccagaaggtctccgttgaggtcagtcgctgttccgatctgctatgactcaccgggcaatagagttgacaggggggatagggacaacctcccacgggtgacaccatggcggagaagggaaagcagatctgagccagcagacgctgttggacttctctctgttggccaaaccacccggctctctgcctcagggaaggaggcttcagctcagcctctgtccgtgtctggtcctcatgggaccgaggacgaggcaccaaggaagaaggcacgccttggatgggggcaaggtttggccaagtatgagaagcagaaggtccaagggcctgtggatcctgctgaagctgttgctgatggaagtccagctgatggcgaactgaagaccacctctcctgtgcctgtgcctgtgcaccctgtgcctgtgcctgtgccttatgttgcacctgcacctcctgctgcaccagtgcttgcgcctgcgccagcaccttctgctgctcctgcacttttgtctgcccctatgcaatgctcatctccagttaccgggccaccatattgttcctcagcacctgaagataaatcttgtgaaatgatgccaaatgcggtcactaactctactaaagatgtcttggaggctgatgacacaactttcaataatgaatttctgatcaagttagatcagctcggtgatgatcctgttatttcccttggaaacatgcttgttgaacttatccagcacgaggattcttgttctggggattcaaatggcccgaccagtacatataagctgctcctactgaaggaaagcatttccaaggagattgaaaagactgaactcgagattgattcattggaaggcgaacttaaatctgtgaatactgaggctgcaactactcttgaaggttctcccacaggggtgacacatacagaaaatctttcaccctctagtgggacatccaaggttcctggaagtgtggagatctgtgatacatctgatatgataaaagaaccaggggagctcattggttctcctaaggtacctgtggtgcagtatgatgatgtcaaaagtgctgatatgatggaaattgaaacagctccagttcataatgcaaaaacagttccttcagaagctggtgctatatctcctgtagtcgctgagggtaaggcctgtgcagctgctgatcttagctcattgaaagcttctgaagaagctgggtctcaaaatgatattgacaatggcaggctggaaacttcttcacgccaagctaatgctgattccatgaaaatagaaattagtgatgacctaccagtgaagaaatggacataccatgatcataagtctgatttgctcagttctgtcacatctgcaaatagtgctatagccaaagaaattaatgaagtgctatttaaatcattgcctgctgatacacctcgccttgatttgtttgcatcaagtcatcttctgagccaaaggaagagcgatttgattgtcaaagaaaggcttggagtatgtaaaaccaggctgaggttgaaagagcagatgcttacaatgaagttcaaggcatattgtcacttgtggaaagatgtccaactattttctgcaaataaacagcgttcaaagtctaataagcgcactgatcagagcaaccgaacatcacaaattggatctcagaggcaacgctcctctaaccgctcgcgattaaccatgcctgctggtaatttaagtacattctcaactccagaaatgtcagatgttgcaatgaggttgttttcagagttcaaaattaagcggtgcagaaattacttgaaaatgcctgcactgattattgatgagaaagagaaggagtggttgaagcttatgaacaagaatggtctagttgaggatcctgttttagttgagaaggaacgggtgatgataaatccgtggactcaagaagaaaagaaaatttttatggagttgcttgctaaatttggcaaggatttctccaaaatcgccagtttcattacacataaatctactgcagactgtgtggagttctactataagcatcataaatcagatagcttccgagaagtgaagaaactattggaccttcgtcaacagcaacccaccagcaattttcttggagcgaaatctggacataaatggaatcctgagtcaaatgctgcttctcttgatatgcttggggtagcatcagtagtagcagcccatggccttgaatatgcaaaacaagtggagaaaatttctgcgaaatccctcatccggactgcatatgggcccaatgtgacttccgtggctaataaatcttctgataaggagtgcattgaccatgtgcctttgcacgagagagaatctgtagcagctgatgtactagcaggcatatgtggcactctctctcctgatggaatgggctcatgcattactagttctgctgatcctggacagaagattagcatgaaaagagtggagcatgtcttgtcccaagaaaatgacaaaaccgttgaggaggaagacacactctctgatcaagagtgtgaagttgacccagttgattggaatgacgacgagaagtcaattttcattgaggctatgaataactacggaaaggattttgctcggatctcgtcatgtgtgaagagcaagtcatatgaacaatgcaaagtgttctttagtaaggctcggaaatcactcggtttggatttgatccatcaaggggcagccgatgttagtatgccagctagtgataccaatggagggaagagtgatactgatgaggcctgcgctgtggaaatggattcagctatctgtagcacacagtcatgttcaaagattgcgatggatgtttgtcctactgaaggagccattggagggcctaactctgttataatctctaagcaggcagaagcatatatatcaaatgggtgcaatgctgatgttaaaattgaggaagatgagaaggtagctgataaaaattgcagcattgttgatgctaagaggtccagtgatgctactcacgaagctggtcctattgacatcaattgcccaggaagcacagataagctgcaaggaactgatgatgtcgttgacctagtaaacatgcatagtaatagtggcatcagctcttcagctaagcatgcagtggccattcactcggaaatgagatccactttacattctgtagaggtccttcaaacagacaaaggtgaaggtactggtactgatttgtcctgggtggaagaatgttcacaccatgctctggataacacaccaatgaaaaatggaaattctggtgccccggctttcttggcttcagatagtggtatcaaggacaatgttcgcatctcaaacataactgctgcttccaccgttagtcctgcattcacttcaagttatcagcattctgtacctggagatatgcccctgccaaaaccaaagccacttgttaccccgcttaccccaaaggatttaatgcctgtgcagttcagttcagtgcttcctgaccccactgcaattcgtttcgagggcatagcctcaataactacgcccaacttcgaggacactggcaacagagtcagtggtgctctaggggctaaagagatgagcaagtacccagcttttagagacccatctgaactgcgagtggcactgtgaatacttcacaggcggatcggttgacccaaacaaaattgcagaatggcaggtccagcagcttgtgccttcaaaacaattccgatggcattcaatggcccagagaccacgaaggaggactggaaggctctttgaggccttgctctcgcaatacaagctccgagggtgatgagcaacaaaagcggcctggtgatgtcaagttgtttggacagattctcagccatcagtcaaccctgcagagttctggcttgtcttgcaatggcctggcaccactccacatctgggtctggaggaaagattggcaaggtgctatggtcatctggatggtagcacggcacagcccgagccactgctcgtgatggcaaagcgccagcggtccttggccggcgtacagttttactcggctaagaacggcacgcttggtgtgttaccagattaccaacaaccttcgacgcagccacagcaatcagatcccaagcgtgtggaaaggttgtctgatccgcagaagaggaacgtgctggaactcatctcgggtttccagcagcccggcagagtcgcccgtttcgggggtgctggcatcctcgtaagcggcaacgtctcggaccctgtggctgctgctctcaaggctcagtatggtcccggttctaagattatgggcagcgacgtggatccttggacggacataggaagcaggtagcgccgtagcagctctactgcttctgttgctccttgtaccatatatttagttttggtgtaacttgaatgaaatcatcagaatatgagatgtggggggtggggagtgaatggctttcctgcccatactatctgtaggcttttggccagtagcagtcgggtttcgctgtttactggcattaacatttttactctttcttctgcagctccatacccttttggtatagcttgacatgccagcagtggcacagtgccgtaggttccctagaggtgaactagatgtttgtcagcatggtttgattttgccagcctatgcagaaaacctcacttggtctttgtaatgtggtaatgccatgtatcagtatcctagtctgatggagttttggttgagacagttctcattgcccgctggttcatcttctgtttct

SEQ ID NO: 73547 - DNA, 1192 bp, Zea Mays
agatttttttggtggatagtttacgtgggtattgttgttagccgtcgcaacgcacgggcattcgactagtgttctcttatcttggagtgcgcctacgatcaaccgtttgcgcatagttggaaaatacgcaactcctacgtgcacaaacgcacgcagcgccgcccctgcattgccccggccgtgcgcacacggcacagccatccctagttccctgctggcaaaaccctagtccgccagggcagagggcagcgaccttctagaaccttctccaatggcgctactccgagcgcttccggcggcggttctcccccgtcgcgccccgcacccacttcctcaccccccccggctcaccttcggttcctggacccgatcgggctccgccccttcttctcctcctccgccgccgccaccgactcgcaggcaccgtccatgggggccaccctcttcggcgggctcacggagtcccggttcgcgaagcgccggccgggcttcgccgaccgccggaagagggccagcttgcgcgccgaaggcccaccctaccgggtgaagtgcgagcctgacgagcccgtaccagctagccagccaaaccaagggagcgtgcgagtgcgagggaggaaggacaggaagcggatcaagcagcgggacgacttcatcacgtgaataacccaagtctggcatagaaatacaaaagtaaactgaagtacggatctaaacaagtcagtcgatgcgcctgagttgtgttacctgggctgagaaggagaagcgcagagcacagtattctgccgctgttaagagaaaggaggcagaacggacagaaagggagatggctgctgtggcaagagatcgggcatgggcagaaaggttggtagagctaaaacagcttgaggaagaaaagaacactgcaatggcataaaagggcatgctctggaaaatgtcaaggcatctaacttgtttttgcttctctattctttccccattttttccacatagtatagaatgtcacagttgtaatggaagactagttgtaccacttctttcaaccgtatatcaaatgctggacgtggtgttaatacgatttttcattagtccatgtatggagtttgtttattttgatgtatttagaataagtgatgtgatggtttttgtgtgctggagacctgagatgactgtcgtttgcaacatatagttttgg

SEQ ID NO: 73548 - DNA, 978 bp, Zea Mays
gccagggcagagggcagcgaccttctagaaccttctccaatggcgctactccgagcgcttccggcggcggttctcccccgtcgcgccccgcacccacttcctcaccccccccggctcaccttcggttcctggacccgatcgggctccgccccttcttctcctcctccgccgccgccaccgactcgcaggcaccgtccatgggggccaccctcttcggcgggctcacggagtcccggttcgcgaagcgccggccgggcttcgccgaccgccggaagagggccagcttgcgcgccgaaggtgcggagggggagggtttctccagcctctcgtttctagccatcccttggccccaggcgcggcgtcgccgggcgtgagctcgcgagaaggacgccgagaagcaactccggcccaccctaccgggtgaagtgcgagcctgacgagcccgtaccagctagccagccaaaccaagggagcgtgcgagtgcgagggaggaaggacaggaagcggatcaagcagcgggacgacttcatcacggctgagaaggagaagcgcagagcacagtattctgccgctgttaagagaaaggaggcagaacggacagaaagggagatggctgctgtggcaagagatcgggcatgggcagaaaggttggtagagctaaaacagcttgaggaagaaaagaacactgcaatggcataaaagggcatgctctggaaaatgtcaaggcatctaacttgtttttgcttctctattctttccccattttttccacatagtatagaatgtcacagttgtaatggaagactagttgtaccacttctttcaaccgtatatcaaatgctggacgtggtgttaatacgatttttcattagtccatgtatggagtttgtttattttgatgtatttagaataagtgatgtgatggtttttgtgtgctggagacctgagatgactgtcgtttgcaacatatagttttgg

SEQ ID NO: 73549 - DNA, 840 bp, Zea Mays
atgggggccaccctcttcggcgggctcacggagtcccggttcgcgaagcgccggccgggcttcgccgaccgccggaagagggccagcttgcgcgccgaaggtgcggagggggagggtttctccagcctctcgtttctagccatcccttggccccaggcgcggcgtcgccgggcgtgagctcgcgagaaggacgccgagaagcaactccggcccaccctaccgggtgaagtgcgagcctgacgagcccgtaccagctagccagccaaaccaagggagcgtgcgagtgcgagggaggaaggacaggaagcggatcaagcagcgggacgacttcatcacgtgaataacccaagtctggcatagaaatacaaaagtaaactgaagtacggatctaaacaagctgagaaggagaagcgcagagcacagtattctgccgctgttaagagaaaggaggcagaacggacagaaagggagatggctgctgtggcaagagatcgggcatgggcagaaaggttggtagagctaaaacagcttgaggaagaaaagaacactgcaatggcataaaagggcatgctctggaaaatgtcaaggcatctaacttgtttttgcttctctattctttccccattttttccacatagtatagaatgtcacagttgtaatggaagactagttgtaccacttctttcaaccgtatatcaaatgctggacgtggtgttaatacgatttttcattagtccatgtatggagtttgtttattttgatgtatttagaataagtgatgtgatggtttttgtgtgctggagacctgagatgactgtcgtttgcaacatatagttttgg

SEQ ID NO: 73550 - DNA, 2634 bp, Zea Mays
atggggacacagaaaaaagcggcagaatgggcagcacgtgatgcgatcagccatcatcaatccgccgccgcgccgcctacagctcctcccgagacgggaggcgaaggaagacgagaactagacgccactcctacagttttacgtttacccatcaccaccagtccagcaccgagcaccgaccagatcaaccaggcccgccccgacccgaagatgcagcggtggctcccggcgctcctccgccgcgccgcgcccggcggcggggcggcgcggctcttcgcctcgtcctccctcctcttcgacgacacgcaggagcagttcaaggagagcgtgcgcaagttcgcgcaggagaacatcgcgccgcgcgccgcggccatcgacgcctccaaccacttcccgcgggacgtggacctgtggaggctcatgggggacttcaacctccacggcctcaccgcgccggaggagtacggcggcatgggcctcggctacatgtaccactgcatctccatggaggagatcaccagggcctccggcgccgtcggcctctcctacggcgcgcactccaacctctgcatcaaccagcttgtccggcacggcagtcccgagcagaggctcaagtatctgcccaagctcatcagtggggagcatatcggggcactggcaatgagtgaacccaactctggctctgatgttgtcagtatgaagtgcaaagctgagaaagtggacggcggctatgtccttaatgggaataagatgtggtgcaccaatgggccgtctgctcagacgctggttgtttatgcaaaaacagatctagctgcgggatcaaaaggaataactgcattcataatcgagaaagggatgcccgggttcagtactgctcagaaattggacaaacttggcatgagaggaagcgacacatgtgagcttgtttttgagaactgctttgtgccacgcgagaatgtcctcggtgaagaaggcaaaggtgtttatgtcatgatgtcagggcttgatctggaaaggcttgtattagctgcgggccctattggccttatgcaggcatgccttgatgttgtacttccatatgttcgacagagggagcaattcgggcgtccaattggtgaatttcagttcatacaggggaaaatggctgatatgtacacctcattgcagtcatcaagatcatttgtatactcggttgctagggactgcgataatggcaaagttgatcgcaaggattgtgcaggggtaattctctttgctgctgaaaatgcaacccaagtggcacttcaggcgatccagtgtcttggtggaaatgggtacataaatgagtacccaactggtcgtctcctgagagatgcaaaattgtttgagattggtgctggtactagcgagataagaagaatgataattggccgtgagctcttcaaagaggactgaaacttctattttgcaagccagataccagtgcatattgttaactgggggagacaaaaggttaccacttaccaagcaggtgatctgcaagtgagccaagtgccatgtactcgtacaccagaagcctttgatctccatctgcgcagtagccgaccaaattgactaggtttggatggtgcaatagactgagcataaggacctcaactaggaactctctgttgccttgatacccattcaggtctagttgcttgacagcaacaagctgttcatggaaatcgaaaacaagtcagccactgactactgtagatgaattagcaagtgtatgtacctacaattttggaatgcctttctgtgtggtgtgtacctgtccattttcaagcttgcccttgtataccctgccaaagcccccttctccaagaaggcagtcggaacggaagttctttgtggccgtggctagctcacggaatgtgaacgcttttgcggttttggcaacggaacagcttcctttaggaggctcaatgcttgctgccgtttcagatgatggcttgtgcttgtgctttgaagtgaccagtgatggcctgatggaccctgcaaagggaaacagatagcgcacaatataattgctacatagatttggttcagaggaatatatgcttagtccagagggaatacagtggcacagggggtctggtttcgtcctcaaacaaagatacactggatggcctaaaagcatcttcaggaaaccacgtaccctggtgcagtatatatgtagattgtttaatcacaggtatcctgctgtaaaactgatgtgcagaaagaacaggacgcattggggggattgcagattttggatctctatacttctgcactgtatttaatctgttgcttaattgtttggtctgttcgccgacatggctcctggggtataatcttttttttttttgtgctaccagtttgaacagtgcaaaacatgctaattcctgggaggaacgtcttaccagattccctgggaggcgcttcattctggctcggggccgtcttcacaaccgcaacctccctggattcaatcctcctgggcggcatcttgttctctttcttgaagcatccaaagcaactcatcttctcccaacggctctctctagaacgcacagaccaatctgcagacctcgtcgtgttgacgatgggagcaccggtggtgggtag

SEQ ID NO: 73551 - DNA, 1112 bp, Zea Mays
gtcggcttgtagccagccgaacacgcccggacgatggaggagccgagcgtccgatgagacgcgatgacttgtcgcgctcgcgccaggtacgacaagtgttcctaccgttcgcattgcaggcttgcggcagctcgtacacacgcactaactattttgaagccgaaattttgaaagtagggtgaaaaaagagagaaaaaaatgtttggctttaagttgagtacacgacacatggcacatatgttcaggacaaataaaacaagagatcaatactgttatattacatgaaaacatgggacgacatcacagatccatccagccgccggcaggcccacgggacagcgacgtgctgggatcggtcgagctcacctaatgatttgtgccttcggacgtggacaactcgcacgccaatgttgccatgcgttgcgtgctcgatcacagtggcatcagtagcacaagaggcgtgtgctcgtgctcgtggacgtggagtaagagtaacggcggcgccggcctctgcccgtgactcccggacccggttggtgacatgcacgcatcatcgacggccgccatggatgtcaaagcagtgcaggcgctgcccactagcaagagacgggaagaggatgctttccttggcgtgcgccacagccaccaagctcatcttgttaagctatcctttcccctctgcacaggtggacagataggtacagatgatatacaatggagtactcctagtatatatgccaaaggggcataggttgatccttgtgacgtcaccacagttggaacagaaaagagaaaagacatccttttttgttctctcaaagtcagagagagagagagagagagagagtaaaatcttcaatcccaatccgtgagaaagaccgtggcctggaattatttccatgctcagagctccgatcaacaaaagatagtgggtgggggagggggaaggcgccgttctgatccagcttcagttgattggcagctcgaggaggaggattggctgatctgagatggtcgaatgaatcatgtgagatccgaattattatctagagaaatgtacgtaaaatgtaacaaatgggaggctcgatttgatgaggactgaggagtccatt

SEQ ID NO: 73552 - DNA, 366 bp, Zea Mays
atgaatctgaataaatactatcgcaattcttttgctcccacggacagttcatcattcatggcccccctcccaaacctgaaaactaaaactgaggggaaagaaaaagggaacacaaaaaggagagagagagaaaaagaacccttagtaatcagccttcttgctttccttgccgttaccatcgcccaccacatttacagcgactccgatccaaccccctgcagttcttcccctgcctgcgaggttgcgacgcctcttgtgcgtcctctcggctgccctctatcgcgagctgggcacgctgtactgccacaccatgatctgggagcagtcggaggggatccccttcagcttagctcggtcttcaagtag

SEQ ID NO: 73553 - DNA, 1990 bp, Zea Mays
ccaactcccaaggacactccactactccctcgcactgatcggctccttccgtttcgctctcccttcctttctttccaggcgtgtcccgctacatggcgtcgccgccgcttcccggaaaggacgctgctttcgggtccgggaccacggtgcggcgcccggggaggctgcgcgtcatgcacccgcacgtggcggagcttctccgaagcccgcgccggcacgcgcgtccggcagcggcgccgcaggcgaaggcgcaggcgccggtccccgagcgcgcgaggtacgcgtgcgcgttcgaggacggcggcggcgtcgcggcccccggccgcctcgtgtgggccaaggtcaggaaccacccgtggtggccagggcaggtgttcgacgcggcggatgcgtcggcggttgcgcgggcgcggcgcaggctgcgccgcgccgtcctcgtcgcgtacttctgggacaggaccttcgcgtggaccgacgccgcggcgctgctcccgctccgcgccggcttcccgcgcctcgccgccgtggcccccgtcgccgccgccgtcgacgccgcgctggccgaggtcgcgcgccgcgtgctcgccggcctctcgtgctgctgcggaggcggcggggacaacgaggccaccgccagcacgcaggcgatcgacaacgccggcgtccgtgccggcgcgcccggggcggcggtggacgcggccttcgccaggcgcgcgctccaggccgaggccctcctcgggtacctctccgcgctggccaccagcccgcgggccgggggcgacagagtggacctcgccgtcgccgcggcgcagctcggggcgctcggccggtggaagggctcggcgaggggccttcccgagtacacggtcgtccacggcatcgatgatgccgtcgtcgccgcccctgggagagccaaagccaagcggaggaggccgccgtcgaccggagttgatggtcctgctcctgccaaaaggagggtgagcaggaacactcacatcgctgcgacaaaagggaatgcagcctgtgacaccggcgactacgaagcgctggagctggaggatctcccgctgggcacaccggcccagcagacgcccacgcccacgaggatcgggaagctcatgagccgtgccgcgcagaacatgtcgctctcgccggtggtcctcagggtcagggccacggcggccaacggcagcaactgcgctcctccacctccgacggctgtactgccagcgccacacatggtaaggtgcgcggtagtggcagcacacgagcagcttcctccgacgcgcaaggacgacagtggtgaccacgaagcctgggctggggccgggctcgtgctcaacttcagcagcgcacacgccgtgccttccgcacgtcacctggccacggcctttagccggttcgggcctgtcaaggaggtccgggtagacaacactacagtggtcttcgacagtgatgcgcatgctgatgaggcgttctcgggcgccgccgagatcggctccatcagcgcgtccctcgtcagcttccgtgtcacttcttcgcttcctgccgcaccagatgatcctgctgcacaacctcagactcagagcatgccgtcggacacctcgcctgttgaagcgcttagatgatggtgaccaggaggcagggaagaggtcgctcgttcgttcatcctattcgtccatgcatctcgaacttttgggttgggttgccacttgccagggagatggtagttcgtgagaggagttttttttttatcaaagctgaacttgggttggctttataatatgcactagcagtatatcctttttggctgtcgtctacacggtgacatttgaatttatatatgcagcagacggtgcaaaaacatcccaagtggtgatgttttatgcttttttacttgaatgttttggtttcttagtggtttttgatgccagcagatcattctgttagctagaaggaatatctgttcaaaatgcaacctttatttcag

SEQ ID NO: 73554 - DNA, 1835 bp, Zea Mays
ccgtcacgccatccgcgcaggccgcggcccctctcacgcctagcagccgctgtagctgcagcaggcccgcccgcccagtgacacgctatttattctactatattagtattaccaggccatccgcgccccattagcaactgcgcgcacctcctgacctccactccagccgtctcctccctccgcgtccggctcccggttccgttccgcttccgcgatggggcagcaagagggccacagcaacccccaccccgacgaggcggcgctcccgacgaccaccgccgcaccgtcgccgtcgccgtcgccgtcgccgtcgccgtcctcgtccaggctctacacggcgtggctggtggcgtcgtggtacgcgtccaacatcggcgtgctgctgctcaacaagtacctgctctccgtgtacggcttccgcttcccgctgctgctgaccgcgtgccacatgtccgcctgcgccgtcctctccacgctcgcccagcacgcctcgccccgcccccgcagcagctcctccccgcgctcccaccgccagctcgctcgcgtcgcgctcctcggcgccgtcttctgcgcgtccgtcgtcgccgggaacgtctcgctccgccacctccccgtctccttcaaccaggccgtcggcgccaccacgcctttcttcaccgcgctcctcgcctacgccgtcgccgcccgccgcgaggcctgcgccacctacgccgcgctcgtccccgtcgtcgccggcgtcgccatcgccaccgggggcgagccgagcttccacctcttcggattcgtcatgtgcgtggccgccacggtggggcgcgcgctcaagaccgtgctgcagggcatcctgctatcgtccgaggaggagaagatggactccatggacctcctccgctacatggcgccggtggccgtgctgctgctggtaccggcgacgctggccatggagcgggacgcgttcggcgtggtggcgggcctcgcgcgggaggaccccagcttcctctggctcctgctctgcaactcctgcctcgcctacttcgtcaacctcaccaacttcctcgtcacaaagcacaccagcccgctcactctccaggtcctcgggaacgccaaaggcgccgtcgccgtcgtcgtctccatcctcatcttcaggaaccccgtcacggtcgtgggcatgctgggctacggggtcacggtcgctggcgtcgtcttgtacggcgaggccaagaagaggagcaagtgaagcgacggacaggctcctgtacctgtacatttgctgtccggccttggaatgcaacgccggcggtgatagctagggagaagacaagcaagcaaagcgacagctggggtggtttgttcgtcgcatcgtttcagaaggaggtgaaccatacaatacaagaactcgtgtcgtagcacagagagagagagtgtgtgtcgtttagcatttgaacgagcttgccgtccaaagcctacgattttaatccggcctggagaagaagaaaaaaaacgaagctagctaattatcaaaccaacacctagcatctgaacatatgtgcagcaatccaactgggtttccatattttaatgttgtcgatgaattggtccttcctaaacaacatttccgtttgaacatttacgaagagccaaagccaacggactgcattgttcactgaaatgttttttatagtgtacactttcatccacctttttccttaattactaaattaacggcgtcaccacaagttaagagtgagatgctaaaagagatgccatgaattatcacattgttttatgtataaatgtagtgccaattgtgattatacccttctggagcataacaattg

SEQ ID NO: 73555 - DNA, 1860 bp, Zea Mays
aacatttcgaatcctagcccccctcaactgcaaaagcccctcgtcgagtcgtcgcggccctcctccatcaatccatcgtcgatcgatggcgaacatgctggtctcggagatgcggcttcctctctacctcgcccacctactcgccgcgcgccgccttgacaccgccaaggacgtgctgtcgctgccagaggtggagctcatggccattctcgacgccggccttcccaccgcacgcgctgccatcgcccacgtcagcgaggccgcctgcccgccctgccagacggcgctctcacttctggaggagcgcgtgaggttaggaggcggcggccggctggccaccatgctctgcgggttggacgaggcattgggcggaggaatccccacggggaagctcactgaggtcgttgggccctcggggatcggcaaaacgcagttctgcctgaagcttgcgttgttagcagcattgccggaatattatggaggtttagacggtcgagttgtgtatattgacacggaattcaagttctctccaaggaggatgattgagattggtcagaaaagctttcctcaaatatttcgacaagaaggcttggcgcagaagatggcagggaggatcctagtaatgcgaccaacatctttagctgatttcaccaagagtttggaagagatgaaggtgactcttctccagcatgatgtgaagttactcattgttgatagtgtggctgctcttatgtcgatggaaaatgagaaggctacagcaggtttcaggcaacaccctttaagatggagcctttcttttcttaagtctatagcagagttctcaagaattccagttgtggttacaaaccaagtacgcagccagagtaatgatgatggttaccatttttcctttgaagtggacagaaaggatggtagtaactgtgctgaaaggtttgattctcatcttgttgctgcactagggattcagtgggctcatgctgtaactgtccgtctagtctttgaatcccattcaggccacaggttcattaaggtggcaaaatcacctatgtctccggcagtagcatttccattcgctgttgagtcatcaggtattacattactaagtgacgagagcattgatgtgacaggtcctgatatcacctcaattcgttgtcaagggcaaaacgttctggcctgataacaatttgaatgctactgtggctactgaaaaagtgtaatcttgctctttgttgtctactggacaatatgaatatatttaatttaatttcagcgcactctcctcaaagttcagtagtagtcttgcttctgtatcctgttttctccacacagtgtagcatgtaaaagatacaagatcattttagcattgctgtgactataaaagggattaagtgctttgcaattgtttggttggggctattaaggggatgaaaatgcttttgactggaaactgtggggtcagttacccacatgacatattttttttcatcaaataaaaggaaatatacaagggagtttcatgggctggaggcccattaaaagcgaaaaaggaaagaagcatcatgagaaactactaagccaattactaagaaaatgcacatctgaaggttttactctaagtaaaccttaacaaattcaactttgaattgtctgtttcatcttgaaggtaatattggatcattaccactctgtacgtgcctagccttaagtgataacatagaagttgccagtcctaaatatcttgaccctaggtgctcttttgtgttgcaattgtgacctgtaggtatagttccatcctgtatagttctggtaccaatatgactaactacagtgatgatctggttcgttattttgcactatgag

SEQ ID NO: 73556 - DNA, 1358 bp, Zea Mays
aacatttcgaatcctagcccccctcaactgcaaaagcccctcgtcgagtcgtcgcggccctcctccatcaatccatcgtcgatcgatggcgaacatgctggtctcggagatgcggcttcctctctacctcgcccacctactcgccgcgcgccgccttgacaccgccaaggacgtgctgtcgctgccagaggtggagctcatggccattctcgacgccggccttcccaccgcacgcgctgccatcgcccacgtcagcgaggccgcctgcccgccctgccagacggcgctctcacttctggaggagcgcgtgaggttaggaggcggcggccggctggccaccatgctctgcgggttggacgaggcattgggcggaggaatccccacggggaagctcactgaggtcgttgggccctcggggatcggcaaaacgcagttctgcctgaagcttgcgttgttagcagcattgccggaatattatggaggtttagacggtcgagttgtgtatattgacacggaattcaagttctctccaaggaggatgattgagattggtcagaaaagctttcctcaaatatttcgacaagaaggcttggcgcagaagatggcagggaggatcctagtaatgcgaccaacatctttagctgatttcaccaagagtttggaagagatgaaggtgactcttctccagcatgatgtgaagttactcattgttgatagtgtggctgctcttatgtcgatggaaaatgagaaggctacagcaggtttcaggcaacaccctttaagatggagcctttcttttcttaagtctatagcagagttctcaagaattccagttgtggttacaaaccaagtacgcagccagagtaatgatgatggttaccatttttcctttgaagtggacagaaaggatggtagtaactgtgctgaaaggtttgattctcatcttgttgctgcactagggattcagtgggctcatgctgtaactgtccgtctagtctttgaatcccattcaggccacaggttcattaaggtggcaaaatcacctatgtctccggcagtagcatttccattcgctgttgagtcatcaggtattacattactaagtgacgagagcattgatgtgacaggtcctgatatcacctcaattcgttgtcaaggtttcttcgccctatctgtacttgatgatgacacctgccgtttccgtctgcctcaacaaaacacgcgagtagcagctccacaggagtccgtgctttttaaccaatcatttggtgaaacggtgtgggcatctaacctctcagtagtgccttggtaattaatgacaaatatgtgtggactgacgatttctctgataaagtaag

SEQ ID NO: 73557 - DNA, 1815 bp, Zea Mays
cctcgtcgagtcgtcgcggccctcctccatcaatccatcgtcgatcgatggcgaacatgctggtctcggagatgcggcttcctctctacctcgcccacctactcgccgcgcgccgccttgacaccgccaaggacgtgctgtcgctgccagaggtggagctcatggccattctcgacgccggccttcccaccgcacgcgctgccatcgcccacgtcagcgaggccgcctgcccgccctgccagacggcgctctcacttctggaggagcgcgtgaggttaggaggcggcggccggctggccaccatgctctgcgggttggacgaggcattgggcggaggaatccccacggggaagctcactgaggtcgttgggccctcggggatcggcaaaacgcagttctgcctgaagcttgcgttgttagcagcattgccggaatattatggaggtttagacggtcgagttgtgtatattgacacggaattcaagttctctccaaggaggatgattgagattggtcagaaaagctttcctcaaatatttcgacaagaaggcttggcgcagaagatggcagggaggatcctagtaatgcgaccaacatctttagctgatttcaccaagagtttggaagagatgaaggtgactcttctccagcatgatgtgaagttactcattgttgatagtgtggctgctcttatgtcgatggaaaatgagaaggctacagcaggtttcaggcaacaccctttaagatggagcctttcttttcttaagtctatagcagagttctcaagaattccagttgtggttacaaaccaagtacgcagccagagtaatgatgatggttaccatttttcctttgaagtggacagaaaggatggtagtaactgtgctgaaaggtttgattctcatcttgttgctgcactagggattcagtgggctcatgctgtaactgtccgtctagtctttgaatcccattcaggttcattaaggtggcaaaatcacctatgtctccggcagtagcatttccattcgctgttgagtcatcaggtattacattactaagtgacgagagcattgatgtgacaggtcctgatatcacctcaattcgttgtcaagggcaaaacgttctggcctgataacaatttgaatgctactgtggctactgaaaaagtgtaatcttgctctttgttgtctactggacaatatgaatatatttaatttaatttcagcgcactctcctcaaagttcagtagtagtcttgcttctgtatcctgttttctccacacagtgtagcatgtaaaagatacaagatcattttagcattgctgtgactataaaagggattaagtgctttgcaattgtttggttggggctattaaggggatgaaaatgcttttgactggaaactgtggggtcagttacccacatgacatattttttttcatcaaataaaaggaaatatacaagggagtttcatgggctggaggcccattaaaagcgaaaaaggaaagaagcatcatgagaaactactaagccaattactaagaaaatgcacatctgaaggttttactctaagtaaaccttaacaaattcaactttgaattgtctgtttcatcttgaaggtaatattggatcattaccactctgtacgtgcctagccttaagtgataacatagaagttgccagtcctaaatatcttgaccctaggtgctcttttgtgttgcaattgtgacctgtaggtatagttccatcctgtatagttctggtaccaatatgactaactacagtgatgatctggttcgttattttgcactatgag

SEQ ID NO: 73558 - DNA, 1645 bp, Zea Mays
gtcgtcgcggccctcctccatcaatccatcgtcgatcgatggcgaacatgctggtctcggagatgcggcttcctctctacctcgcccacctactcgccgcgcgccgccttgacaccgccaaggacgtgctgtcgctgccagaggtggagctcatggccattctcgacgccggccttcccaccgcacgcgctgccatcgcccacgtcagcgaggccgcctgcccgccctgccagacggcgctctcacttctggaggagcgcgtgaggttaggaggcggcggccggctggccaccatgctctgcgggttggacgaggcattgggcggaggaatccccacggggaagctcactgaggtcgttgggccctcggggatcggcaaaacgcagatggcagggaggatcctagtaatgcgaccaacatctttagctgatttcaccaagagtttggaagagatgaaggtgactcttctccagcatgatgtgaagttactcattgttgatagtgtggctgctcttatgtcgatggaaaatgagaaggctacagcaggtttcaggcaacaccctttaagatggagcctttcttttcttaagtctatagcagagttctcaagaattccagttgtggttacaaaccaagtacgcagccagagtaatgatgatggttaccatttttcctttgaagtggacagaaaggatggtagtaactgtgctgaaaggtttgattctcatcttgttgctgcactagggattcagtgggctcatgctgtaactgtccgtctagtctttgaatcccattcaggccacaggttcattaaggtggcaaaatcacctatgtctccggcagtagcatttccattcgctgttgagtcatcaggtattacattactaagtgacgagagcattgatgtgacaggtcctgatatcacctcaattcgttgtcaagggcaaaacgttctggcctgataacaatttgaatgctactgtggctactgaaaaagtgtaatcttgctctttgttgtctactggacaatatgaatatatttaatttaatttcagcgcactctcctcaaagttcagtagtagtcttgcttctgtatcctgttttctccacacagtgtagcatgtaaaagatacaagatcattttagcattgctgtgactataaaagggattaagtgctttgcaattgtttggttggggctattaaggggatgaaaatgcttttgactggaaactgtggggtcagttacccacatgacatattttttttcatcaaataaaaggaaatatacaagggagtttcatgggctggaggcccattaaaagcgaaaaaggaaagaagcatcatgagaaactactaagccaattactaagaaaatgcacatctgaaggttttactctaagtaaaccttaacaaattcaactttgaattgtctgtttcatcttgaaggtaatattggatcattaccactctgtacgtgcctagccttaagtgataacatagaagttgccagtcctaaatatcttgaccctaggtgctcttttgtgttgcaattgtgacctgtaggtatagttccatcctgtatagttctggtaccaatatgactaactacagtgatgatctggttcgttattttgcactatgag

SEQ ID NO: 73559 - DNA, 2579 bp, Zea Mays
atcatcgtcatccgagacccattgctttctctctctctcctcgtgctttcattactggggtgggggtggagtggaccagtggagtggagaaatgacaaatccaggcccgcaggcagccccacccaccaaatcggccgagcagggtgcccaaatcaggaaggattttaaggttaaccggctgccaccgcccaccgccggtgaccccagtctctcttctatctatatattacccgcctccttttctcctctctctccgccccaccctccttcctcagctccgttgcgcaccgccaccgccggccggccagccgccggagcaccgaaagacccccgttctttcctgtaaaaaaaaacccgccgcctttagctagctaaccggtcgtcctcttcaccccctagctttgctagctctagctaggaacgaaagaaattaaaggataactgagattgctgattggtggtccgggtacggtgttcttgagtcgtgaagcgacagtacagtggctagggtcgtgccgcccctgcagtctccggggttgcgtgcaggatggtcgtcagggatcgggagtgaggaggcatcagctctcgcggtcgtggagcctaaatgtaccgcaacaacgactcggcactctcctgcttctacctcttcctcctctggttcttcttcttgaagtagacaccaccagttcgccaggtagttagcagcccagttgcgactggggatcggtggcgggctgccgcttgcgagttgtaagcttggaggggaggggagcaggagcaggagatgcagttggatctgaacgtggccgaggcgccgccgccggtggagatggaggcgagcgactcggggtcgtcggtgctgaacgcgtcggaagcggcgtcggcgggcggcgcgcccgcgccggcggaggagggatctagctcaacgccggccgtgctggagttcagcatcctcatccggagcgatagcgacgcggccggcgcggacgaggacgaggacgccacgccatcgcctcctcctcgccaccgccaccagcaccagcagcagctcgtgacccgcgagctgttcccggccggcgccggtccgccggccccgacgccgcggcattgggccgagctcggcttcttccgcgccgacctgcagcagcaacaggcgccgggccccaggatcgtgccgcacccacacgccgcgccgccgccggccaagaagagccgccgcggcccgcgctcccgcagctcgcagtaccgcggcgtcaccttctaccgccgcacaggccgctgggagtcccacatctgggattgcggcaagcaggtgtacctagtggtggtccggctgctggccgatatacgcaggtggattcgacaccgctcacgccgctgcaagggcgtacgaccgggcggcgatcaagttccgcggcgtcgacgccgacatcaacttcaacctcagcgactacgaggacgacatgaagcagatggggagcctgtccaaggaggagttcgtgcacgtcctgcgccgtcagagcaccggcttctcgagaggcagctccaggtacagaggcgtcaccctgcacaagtgcggccgctgggaggcgcgcatggggcagttcctcggcaagaaagcctacgacaaggccgccatcaaatgcaatggcagagaggccgtgacgaacttcgagccgagcacgtatcacggggagctgccgactgaagttgctgatgtcgatctgaacctgagcatatctcagccgagcccccaaagagacaagaacagctgcctaggtctgcagctccaccacggaccattcgagggctccgaactgaagaaaaccaagatcgacgatgctccctctgagctaccgggccgccctcgtcagctgtctcctctcgtggctgagcatccgccggcctggcctgcgcagccgcctcaccccttcttcgtcttcacaaaccatgagatgagtgcatcaggagatctccacaggaggcctgcaggggctgttcccagctgggcatggcaggtggcagcagcagctcctcctcctgccgccctgccgtcgtccgctgcagcatcatcaggattctccaacaccgccacgacagctgccaccaccgccccatcggcctcctccctccggtactgcccgccgccgccgccgccgtcgagccatcaccatccccgctgagagaatcaagaagccgcactgtaaatctgccgggaagctagcattttccccccggcccctccccctctccgggcgttgcgactttttcagttttgcgccgccggccggggtggtggtttcttgtagccgatcgattggattcctcgtattactgctgcttacactcccaattaagtgaaaaaaaaacgctcctctactctttacactacacacactgttagctgatcgattggacgtacttgctagctgctgttgctgctgctagcttgagattgactaacttcagcacttggattgatctatatctatatgactatatagacgacacattgtgtacgtgtagataatatttcttcttttcctgaccgccataaaactgtttactctggccatttt

SEQ ID NO: 73560 - DNA, 2784 bp, Zea Mays
cttttctcctctctctccgccccaccctccttcctcagctccgttgcgcaccgccaccgccggccggccagccgccggagcaccgaaagacccccgttctttcctgtaaaaaaaaacccgccgcctttagctagctaaccggtcgtcctcttcaccccctagctttgctagctctagctaggaacgaaagaaattaaaggataactgagattgctgattggtggtccgggtacggtgttcttgagtcgtgaagcgacagtacagtggctagggtcgtgccgcccctgcagtctccggggttgcgtgcaggatggtcgtcagggatcgggagtgaggaggcatcagctctcgcggtcgtggagcctaaatgtaccgcaacaacgactcggcactctcctgcttctacctcttcctcctctggttcttcttcttgaagtagacaccaccagttcgccaggtagttagcagcccagttgcgactggggatcggtggcgggctgccgcttgcgagttgtaagcttggaggggaggggagcaggagcaggagatgcagttggatctgaacgtggccgaggcgccgccgccggtggagatggaggcgagcgactcggggtcgtcggtgctgaacgcgtcggaagcggcgtcggcgggcggcgcgcccgcgccggcggaggagggatctagctcaacgccggccgtgctggagttcagcatcctcatccggagcgatagcgacgcggccggcgcggacgaggacgaggacgccacgccatcgcctcctcctcgccaccgccaccagcaccagcagcagctcgtgacccgcgagctgttcccggccggcgccggtccgccggccccgacgccgcggcattgggccgagctcggcttcttccgcgccgacctgcagcagcaacaggcgccgggccccaggatcgtgccgcacccacacgccgcgccgccgccggccaagaagagccgccgcggcccgcgctcccgcagctcgcagtaccgcggcgtcaccttctaccgccgcacaggccgctgggagtcccacatctgggattgcggcaagcaggtgtacctagtggtggtccggctgctggccgatatacgcaggtggattcgacaccgctcacgccgctgcaagggcgtacgaccgggcggcgatcaagttccgcggcgtcgacgccgacatcaacttcaacctcagcgactacgaggacgacatgaagcagatggggagcctgtccaaggaggagttcgtgcacgtcctgcgccgtcagagcaccggcttctcgagaggcagctccaggtacagaggcgtcaccctgcacaagtgcggccgctgggaggcgcgcatggggcagttcctcggcaagaagtaagaaccaaccaacgcttcttttctttttcttttttttatagcatgcagtgatgattcaaccttagttgtgcctttcctcctaatcctatatatgtaggatttagtactggttgactatataagtatatatgtattgttcagtaaaagtatacataggttagctgcatgtttatgtatgtagctggttgtttcaatcagaagataaaaaaaaagggaagtagtggctagggaattcctccaatcctcaccggtgggaacgccgtgcttgggtgcaggtacatataccttgggctattcgacagcgaagtagaggctgcaaggttcttcatcttggattctgccgttcatatatgcataatcatgtcttttaatttccaaagggttgagtaccgactcgattcctcttcgtgtcttttttctttctttcttcgaaatccagagcctacgacaaggccgccatcaaatgcaatggcagagaggccgtgacgaacttcgagccgagcacgtatcacggggagctgccgactgaagttgctgatgtcgatctgaacctgagcatatctcagccgagcccccaaagagacaagaacagctgcctaggtctgcagctccaccacggaccattcgagggctccgaactgaagaaaaccaagatcgacgatgctccctctgagctaccgggccgccctcgtcagctgtctcctctcgtggctgagcatccgccggcctggcctgcgcagccgcctcaccccttcttcgtcttcacaaaccatgagatgagtgcatcaggagatctccacaggaggcctgcaggggctgttcccagctgggcatggcaggtggcagcagcagctcctcctcctgccgccctgccgtcgtccgctgcagcatcatcaggattctccaacaccgccacgacagctgccaccaccgccccatcggcctcctccctccggtactgcccgccgccgccgccgccgtcgagccatcaccatccccgctgagagaatcaagaagccgcactgtaaatctgccgggaagctagcattttccccccggcccctccccctctccgggcgttgcgactttttcagttttgcgccgccggccggggtggtggtttcttgtagccgatcgattggattcctcgtattactgctgcttacactcccaattaagtgaaaaaaaaacgctcctctactctttacactacacacactgttagctgatcgattggacgtacttgctagctgctgttgctgctgctagcttgagattgactaacttcagcacttggattgatctatatctatatgactatatagacgacacattgtgtacgtgtagataatatttcttcttttcctgaccgccataaaactgtttactctggccatttt

SEQ ID NO: 73561 - DNA, 2612 bp, Zea Mays
caccctccttcctcagctccgttgcgcaccgccaccgccggccggccagccgccggagcaccgaaagacccccgttctttcctgtaaaaaaaaacccgccgcctttagctagctaaccggtcgtcctcttcaccccctagctttgctagctctagctaggaacgaaagaaattaaaggataactgagattgctgattggtggtccgggtacggtgttcttgagtcgtgaagcgacagtacagtggctagggtcgtgccgcccctgcagtctccggggttgcgtgcaggatggtcgtcagggatcgggagtgaggaggcatcagctctcgcggtcgtggagcctaaatgtaccgcaacaacgactcggcactctcctgcttctacctcttcctcctctggttcttcttcttgaagtagacaccaccagttcgccaggtagttagcagcccagttgcgactggggatcggtggcgggctgccgcttgcgagttgtaagcttggaggggaggggagcaggagcaggagatgcagttggatctgaacgtggccgaggcgccgccgccggtggagatggaggcgagcgactcggggtcgtcggtgctgaacgcgtcggaagcggcgtcggcgggcggcgcgcccgcgccggcggaggagggatctagctcaacgccggccgtgctggagttcagcatcctcatccggagcgatagcgacgcggccggcgcggacgaggacgaggacgccacgccatcgcctcctcctcgccaccgccaccagcaccagcagcagctcgtgacccgcgagctgttcccggccggcgccggtccgccggccccgacgccgcggcattgggccgagctcggcttcttccgcgccgacctgcagcagcaacaggcgccgggccccaggatcgtgccgcacccacacgccgcgccgccgccggccaagaagagccgccgcggcccgcgctcccgcagctcgcagtaccgcggcgtcaccttctaccgccgcacaggccgctgggagtcccacatctgggattgcggcaagcaggtgtacctaggtggattcgacaccgctcacgccgctgcaagggcgtacgaccgggcggcgatcaagttccgcggcgtcgacgccgacatcaacttcaacctcagcgactacgaggacgacatgaagcagatggggagcctgtccaaggaggagttcgtgcacgtcctgcgccgtcagagcaccggcttctcgagaggcagctccaggtacagaggcgtcaccctgcacaagtgcggccgctgggaggcgcgcatggggcagttcctcggcaagaagtaagaaccaaccaacgcttcttttctttttcttttttttatagcatgcagtgatgattcaaccttagttgtgcctttcctcctaatcctatatatgtaggatttagtactggttgactatataagtatatatgtattgttcagtaaaagtatacataggttagctgcatgtttatgtatgtagctggttgtttcaatcagaagataaaaaaaaagggaagtagtggctagggaattcctccaatcctcaccggtgggaacgccgtgcttgggtgcaggtacatataccttgggctattcgacagcgaagtagaggctgcaagagcctacgacaaggccgccatcaaatgcaatggcagagaggccgtgacgaacttcgagccgagcacgtatcacggggagctgccgactgaagttgctgatgtcgatctgaacctgagcatatctcagccgagcccccaaagagacaagaacagctgcctaggtctgcagctccaccacggaccattcgagggctccgaactgaagaaaaccaagatcgacgatgctccctctgagctaccgggccgccctcgtcagctgtctcctctcgtggctgagcatccgccggcctggcctgcgcagccgcctcaccccttcttcgtcttcacaaaccatgagatgagtgcatcaggagatctccacaggaggcctgcaggggctgttcccagctgggcatggcaggtggcagcagcagctcctcctcctgccgccctgccgtcgtccgctgcagcatcatcaggattctccaacaccgccacgacagctgccaccaccgccccatcggcctcctccctccggtactgcccgccgccgccgccgccgtcgagccatcaccatccccgctgagagaatcaagaagccgcactgtaaatctgccgggaagctagcattttccccccggcccctccccctctccgggcgttgcgactttttcagttttgcgccgccggccggggtggtggtttcttgtagccgatcgattggattcctcgtattactgctgcttacactcccaattaagtgaaaaaaaaacgctcctctactctttacactacacacactgttagctgatcgattggacgtacttgctagctgctgttgctgctgctagcttgagattgactaacttcagcacttggattgatctatatctatatgactatatagacgacacattgtgtacgtgtagataatatttcttcttttcctgaccgccataaaactgtttactctggccatttt

SEQ ID NO: 73562 - DNA, 1049 bp, Zea Mays
atcgtgggaggcaagagatcacacgcacacagcacactcgcatcccaggcagaaccctcgccgcctccgccgccgatgacgtccgtgcgcagctgtgccgcgtcgttaaccccgtcgatccgcgggatgtcggggctggtccggcaggaggcactgcggcgcgagctggacgggtgccagctgctggcgggcatctggtgccacgggttcacggtggcgcagctgcggagcatccgcgcgtcgctgcccgacgcggcgcggctggtggtggcgaagaactcggacatggcggcggcggtggcgggcacccggtgggaggcgctgaggccgtgcgcgcggggcatgaacgcgtggctgttcgtgcgctccgacgagatcccgccggcgctcaagccctaccgcgacttccagaaggagtggaagctgcagctcaacgacttcaccggcgccgtctacgagggacggctctacgggcccgacgacttcgcgcagctcgagaacatgcccaccagggcgcagtcctaccagtacctcctcggatgcctgcagatgcccgccgtcaacgtcctcgccgtcctacgggcgcgtcaggaggcactgtccgcggaggccgacaagccgcccgccgagggggagggggaggcggccgcgccggctgagaagtgacccgtcgacaaggggacaggtttggtacaacgacaagagctgtctcaggttcaaaggctttgccttggtttatatcttcttcagcaccgggtctgcccttcctgtatatgccaaataaattgttctttagcgggatattattttatttccacctcaatccccttcgatctctaaaatagtttgccatgtccagttagccgctggtgctctcagtgagacaggatcacaggaaccttcatgcatccgacgatggcgttgcaaattcttctctagctgtttcatgccacatatgtcacactggacatgttgatggtaggattgattatgcatcttgaggcattcatgtttgaaaagaacttaatgcagcctggttcacagcagat

SEQ ID NO: 73563 - DNA, 3722 bp, Zea Mays
atttcttttcttcgcgtgcatagatcctccaaggacaatcaccacccttacaatagccaacatatttggttgtcaaagtaacatcaattccaagctccaactcatactttattgcatattgacgcatatcaatcctgaattatttcatgttaggaaacaaacaacctagctacatagaaggattcatcctatcgtacaccaccctcttctgatctggaagaaagtcttcacatggctgatcaacatggtggtcatccttgtcaatatccctaatttcttgcacattacaagttgaaccatatctataaaattcatctcttctactgttctcagcctcgacctctttattgagtccaatattacaatatatctcattttcacatggtacttctactcttccttctttctctagaacatcagaaactaccatagaatcccaatcaaattgtgttgttgcctccgtcctctgaataccctatattataacagtgaggtttggtccaatggcactggtgttgtagtgcaactcggtgatgcaagtgggggaaatctacgagctgagaggggctaccacgtccgacgagctgccaaccggatccccatccaaatccatgccatgccagcgaactcacctgcctgcaagtaactacaccacatgagatctcacaccatacagtctaggagagaaggaacatacgggagagatggatggggaagaagagatgcccgaggggaactcacggccgcccacggccaccagccgatgtaggctcgatctcaacgatgggagacgacgtctgggctccacggtggtaatggtgatggagtgctgctaaccggatggccgactcgccccggtggggctgactgagctccggtccgcctcgacccgcggccgtacgccccggagctccacccgtcgcgccgcgtcggagctcgtcgccggcgatggcttccgcggtgggcgcttcgaccgccacgcggttcctcccgcggctcccggacccgtggcggccgcgtcgtgcgcgcgcggcgctcccgccgctcacgtggcggcctcccgcggtcacggtggccgcggcgtcgccccgacctggggaagcggaaggtaggcggcgggagaggacgcggaggcggcgcgccagggggccggggcaagaggaaggcgtctcgctaagctctgaaaaggagacgctaaattctactccacgtgctcaaaccaacaaggatgcagagcccgaaccggtgtccagcacgactgggaaaggttctgccattagaagggtgacactggtggttctcgctgcagtgctttttggagttagcattgccttgagggacggggctgagaaggcatcggagtattttgctgggtatttattggaacagagtttgtcggtggacaatctctttgtttttgttctggtcttcaagtatttcaaagtgccaaaagaataccagaatcgaatactttcttatggtattgctggagctgtggtctttcgggctgtgatgatcatcttaggaacagctagcatccagaaatttgaggcggtgaacttgctgttggctgtgatcctgttattcacttcttacaagctatttgctgaagaagaacaagaatctgatctatccgataacttcattgtgaaaacatgccaaaagttcattccagtcactgaatattatgacgacgatcggtttttcacaaatcaagacggtttatggaaagctacaccattgctcttgactttggcagtgattgagctaagtgatattgcttttgctattgactcaataccagcagttttcggcgtcacaagggatccacttataatactatcatcaaatatttttgctatttctggtttgcggccactctatgtgctcatttctgaaagcatgagtgaattggagtatctacagcctgccattggtattgtgttgggcttcatagggacaaagatgatctttgacttctttggttatcatataccaacagaagcttcgcttgctgtagtaactacctgtcttagtggaggcgtcatattaagtcttaggaaagcatcaaaagttgagggggacaagtagactgatgcaacaacacatgcaggtaacgcttttgacccgagatgtgaaatgaatttatcctctacgcatgctgtgtaggaccatgtgtgtaacgttctgagaattagtcacagaaaagaagcttgtagaaaagggaagaggaggaagaaagggcattgtgtttagattaccttgctccgtattggtgttgttagggtggtggtctgcttgtatagtggtctactttgtatcgcatcgttgaatctgatctagtacatgctgctggtgtcccttgtaaacggaaggaatcattcattatcgacagcgccatttcgtcccatccaggcacgaacccacatcacacataagaacaatcggtaatcaacatctggaagaaagttgcctgtttacaaacaatataaccacaggccaccctaagataatcgcatgtaaaaaaaaagaactataagatggtgataatataatcccgctgaaagtataacatggcaacttcactataaaacagaacgaggtatgctgaaaaacccccatcttagcatttctagtttacattactgtcagcttcgaggggaagagaagcaacactaaaaatgaatcaaactctcctaatactagccaactgtagcgataagaacaacgcagatgagatacggtttctgcacaagttacctacgctgacccttcagcaaatctctagctgattgaaccatgatacgttctttattcatggtggggtggtagcgtccatgccggtgttcccagggagtgccgtgttgtcgtcagctgtgctgcccggtttcgcatctactgaatttgggccaccgtcatctggtcttgcatcaatgtaggcatctccacatggttcttcaaaaaattttgaagacggaacagcattgagatcagaatcaccttccaggccaccagaagccggattctgagtcggatgatttccctcatcgttggcagcttctcctgacaatgttgtcttctgttttttcacattgtttgatggaggggtgccagcgccatcgtcgtcgatatcatcattcgctgcacctggctctgcagcatcggagacatccctccttggcctcttccatttctttgtagacgacgtgccgtcgtcctcgaaatcctcctcctccctgcccctgtgcagataggtccacagctttttgtcgttgtcatacagaacgcaagggtcgcgctcgtaatgcagacggtcgagagctccactgacgacttgattaattgcggcctctttgttggcttcttcatggtttaggtactgtgaatctctgagcagtgtgcagacgtcggctctggttccagtccttgcaggcaacctagacgcggcatcccttacgagacacaggatggtgacgtgcggcggcctgtccggtaagagcatggggtggcccctcgctttcgctgttggctttccacctcctcttctcaagggtgcaactatagacttctccccgtcagcagcggtgtagcagaatgctctatcaggtattgagtacctcagaaattcctcacgctggaaatatgtcctcgcttcatctgagctcgggcttattgtgttcagactcttctgcgctttaagctccttgaacctttccttcaga

SEQ ID NO: 73564 - DNA, 4596 bp, Zea Mays
caggcctccccgttccagcccatgggccaaaaggcggtgcaggcccatcggcgttccagctcggcccagccccgcacaacgagtgaattccacctccgccgccggcggcatcatcagtttctctctagtagaattgagatccctcctaccacatccgttccccttcccttccctcctctcgcgcgccggctccacgcagatccaggagatatgcctcgctatgatgaccgctatggaggcacgcgcttgtatgttggcagattggccactcgtactcgttcccgcgatttagaacatctgtttggcagatatggaagaatacgagaagtggagttgaagcgtgactatgcatttattgagttcagtgatcatcgcgatgctgatgaggctcgataccagctagatggcagggatgttgatgggagtcgtattgttgttgagtttgctaaaggggtcccacgtggttcaggtggctcacgtgaatatatggggagaggccctccaccaggtacaggtcgttgtttcaactgtggagttgatggtcactgggcaagagactgtaaagctggtgactggaaaaacaaatgctaccgttgtggagaaaggggccatatagaaagaaattgccagaacagtcctaggagtctcaggcgagagagaagttactcacggtccccatctccccgccgtggacggggccgcagtcgaagctatagcaggagcaggagccggagtcggagctatagtcgatcaagatccctgtctagatctcctaggggaggtcgtcgtgaccgtgacgataggagatcaaggagtcctagctatagcaggagccccatgcgatctgcctcgccaccagtaaaggaaaaggagcgcagccccgcacctgatggaagcaggagcccaaggagtcgcagcccccaggatcaggtgatgagcccaccaccaaaggataatggcgaaggcaatggctcagaccgtggcggcagccccagagggagggagaacagcaggagctgcagccgcagccgcagtccatctggtagtaaccgcagccctgcggccaatggacgtagccggagtcctggaggtgagcggagcccgagtcctggaggtgagcggagcccgagtcctagaggtgagcggagcccgagtcctagggctgaccgtagcccaagccccaatggcaatggtaacaatgatgctgctgctgatgtcgatgctgatgctgctgcccgcagtggctcccccactggaagcaagtcaccctgagcgctggcggtcccagattgtggtggtgcttctcaatgcaatgggcaatcgtattgctattttttgctaccatatcgaagacacaatagctacatcattttcttctctgaaacaaggactttattttgcttgctttgagatatgactcttaccctctcatggataatatatatatgatatgatgccactggtgcttgcttgcatctgaataagtgaatgctcgcatgttgaggtttgcctgatgagtgctgagggctgaggccgtgagtcaaaacaacccgatactgcatttagaaattgcggttgatgcgcgacttgtgctgccgctgttgctggttcttgctgccaaccgcacggtaacagagcgctggtgagaccgtgatcgtcctggaagacttcttgctgctcacatggactgggtggagtaacggtgaccggtacaacgacccttgtttgatcctctcttttttttcctttttacgatatgttcggtgacatggtttccgacaccttcaccatctttgtagcgtgtctttgtgaagagaaagagcaagggctcctatagtgcacctacaaagctgttgcgatgactcactgcacagttgattgacaatttttttttgttcatatatggctcaaatacgatttttgtaactgcattctatttccgatctgtcttgtacaagtttggctaccaaactcgataagaaacagccgcgaaggggaacggaaaacgcccactcgcccagcagcggccaactccgactcgcgtgctccagctccaggcagctccactcctatgcttcttctacatatataagtaaacgcgccaagccacgccacgctctgccatcccaacccgaccacctgccgaccgaggtctccgcagcgacacgccaccaccagagcgcgccgagctcgtgcacccagcaaggagcaaaggaccaacaaccgactgacgcggatggccaccccgggccacgccgtcgcggtcgacatcgacgagccagcctcctgcggcaacggcgaggcggcggcggccacgccgctgccccagccgacggtgccgtacgtgctccgcttcaccgacctgtcctacagcataaggaagcgcggcagcgggctaggctgcctgccttcgcgctggcccagcaaccgcctggcgtccttggacgcgccggcgtcgtccgcgaccgccgccagcgccacccggaacaccaagacgctgctggacggcatctccggggaggcccgggagcgggagctgttcgcggtgatgggcgcgagcgggtcgggcaagtcgacgctgctggacgcgctggcggggcgcatcgcgcgggacagcctccgcggcggcggggccacgctgaacggggagccgctgcagggccggcggctgcgcgccatctccgcgtacgtgatgcaggacgacttgctgtacccgatgctgacggtgcgcgagacgctgctgttcgccgccgagttccgcctgccccgcgcgctgcccgcggaccgcaagcgcgcgcgcgtcgacgcgctcgtcgaccagctcggcctcgcccgcgccgccgacaccatcatcggcgacgaggcccaccgcggggtgtcgggcggcgagcgccgccgcgtgtccatcggcaccgacatcatccacgaccccatcctgctgttcctcgacgagcccacctcgggcctcgactccgccagcgccttcatggtcgtgcaggtgctccgccgcatcgcgcgcagcggcagcgtcgtcatcatgaccgtccaccagcccagcgcgcgcatcctcgccatcctcgacaggctgctcctgctctcgcgggggcgcaccgtgtacgccggcacgcccgcggggctcaagcccttcttcgccgacttcggcgcgcccatcccggacaacgagaacccggccgagttcgcgctcgacaccatccgcgagtacgagcgctgccccgacggcgccgccccgctcgccgacttcaacgtcaagtggcagaacggcagcagttccacttccacctttgacaacaacaacgacgacgacaacgatagcagcagcaagctcatgccgctggagctcgccatcgccgagagcgtgtcccgcgggaagctggtggccgggagcgcggtcaccgcgtcgtcggtgccaacgttcgccaacccgccgtggaccgaggtgtgggtgctcatcaagcgctccttcaccaacacgggccgcatgccggagctcttcgtcatgcgcctcggcaccatcatggtcaccggcttcatcctggccaccatcttctggcgcctcgacgacacgcccaagggcgtgcaggagcgcctgggcttcttcgccatggccatgtccaccatgttctacgtgtgcgccgacgcgctgccggtgttcgtgcaggagcgccacatctacctccgcgagaccgcgcacaacgcctaccgccgcatctcctacgtgctggccaacgccgtggtcgcgttcccgccgctggtgttcctgtcgctggcgttcgcggtcaccacgttctgggcggtggggctcgcgggcggcgccccctcgttcctcttcttcgtgctcatcatcctcgcctccttctgggcgggcagcggcttcgtcaccttcctctccgctgtggtgccgcacgtcatgctgggctacacggtggtcgtcgccatcctcgcctacttcctcctcttctcgggcttcttcatcaaccgcgacaggatcccggactactggatctggttccactacctgtcgctggtcaagtacccgtaccaggcggtgctgcagaacgagttcagggacgcctcgcgctgcttctcgcgcggcgtcgagatgttcgagggcacgcccatagggcacatgacggagcccgtcaagctcaaggtgctgcaggccatcagcaggacgctggggtccaacatgacggccacaacctgcgtcaccaccggcgccgacgtgctggcgcagcaggccgtcacggacattggcaaatggaaatgcctgctggttactgtggcctgggggttcttcttcagggcactcttctacgtcgtcttgctcgttggcagcaagaataagaggaagtaaaattagtatacacaatgtatacggcgtatacataacatatacatatgtgtcaatgtgtgacggtgaaacaaatgtataggtcgacatgtgaaattattgttttgtttttaagaattgccgtattttttttcaaacatgcgtttacctagagtactgaattatatttgaattctttgcagttattcaacggcgtcatgctttcaatagatatacatatatgt

SEQ ID NO: 73565 - DNA, 4533 bp, Zea Mays
gtgcaggcccatcggcgttccagctcggcccagccccgcacaacgagtgaattccacctccgccgccggcggcatcatcagtttctctctagtagaattgagatccctcctaccacatccgttccccttcccttccctcctctcgcgcgccggctccacgcagatccaggagatatgcctcgctatgatgaccgctatggaggcacgcgcttgtatgttggcagattggccactcgtactcgttcccgcgatttagaacatctgtttggcagatatggaaggtttttcggtttttaccggaggtctttggtggaagggtgcccttggtggacttggtgaccatttggtgaagggtgcccttggtgtaatgttattgactgttttagtggaagttccaagttggtgatgcatttgagtacttgacacatgacgtgacggcttactgtttgtggcaaccctttgcgcagaatacgagaagtggagttgaagcgtgactatgcatttattgagttcagtgatcatcgcgatgctgatgaggctcgataccagctagatggcagggatgttgatgggagtcgtattgttgttgagtttgctaaaggggtcccacgtggttcaggtggctcacgtgaatatatggggagaggccctccaccaggtacaggtcgttgtttcaactgtggagttgatggtcactgggcaagagactgtaaagctggtgactggaaaaacaaatgctaccgttgtggagaaaggggccatatagaaagaaattgccagaacagtcctaggagtctcaggcgagagagaagttactcacggtccccatctccccgccgtggacggggccgcagtcgaagctatagcaggagcaggagccggagtcggagctatagtcgatcaagatccctgtctagatctcctaggggaggtcgtcgtgaccgtgacgataggagatcaaggagtcctagctatagcaggagccccatgcgatctgcctcgccaccagtaaaggaaaaggagcgcagccccgcacctgatggaagcaggagcccaaggagtcgcagcccccaggatcaggtgatgagcccaccaccaaaggataatggcgaaggcaatggctcagaccgtggcggcagccccagagggagggagaacagcaggagctgcagccgcagccgcagtccatctggtagtaaccgcagccctgcggccaatggacgtagccggagtcctggaggtgagcggagcccgagtcctggaggtgagcggagcccgagtcctagaggtgagcggagcccgagtcctagggctgaccgtagcccaagccccaatggcaatggtaacaatgatgctgctgctgatgtcgatgctgatgctgctgcccgcagtggctcccccactggaagcaagtcaccctgagcgctggcggtcccagattgtggtggtgcttctcaatgcaatgggcaatcgtattgctattttttgctaccatatcgaagacacaatagctacatcattttcttctctgaaacaaggactttattttgcttgctttgagatatgactcttaccctctcatggataatatatatatgatatgatgccactggtgcttgcttgcatctgaataagtgaatgctcgcatgttgaggtttgcctgatgagtgctgagggctgaggccgtgagtcaaaacaacccgatactgcatttagaaattgcggttgatgcgcgacttgtgctgccgctgttgctggttcttgctgccaaccgcacggtaacagagcgctggtgagaccgtgatcgtcctggaagacttcttgctgctcacatggactgggtggagtaacggtgaccggtacaacgacccttgtttgatcctctcttttttttcctttttacgatatgttcggtgacatggtttccgacaccttcaccatctttgtagcgtgtctttcagcggccaactccgactcgcgtgctccagctccaggcagctccactcctatgcttcttctacatatataagtaaacgcgccaagccacgccacgctctgccatcccaacccgaccacctgccgaccgaggtctccgcagcgacacgccaccaccagagcgcgccgagctcgtgcacccagcaaggagcaaaggaccaacaaccgactgacgcggatggccaccccgggccacgccgtcgcggtcgacatcgacgagccagcctcctgcggcaacggcgaggcggcggcggccacgccgctgccccagccgacggtgccgtacgtgctccgcttcaccgacctgtcctacagcataaggaagcgcggcagcgggctaggctgcctgccttcgcgctggcccagcaaccgcctggcgtccttggacgcgccggcgtcgtccgcgaccgccgccagcgccacccggaacaccaagacgctgctggacggcatctccggggaggcccgggagcgggagctgttcgcggtgatgggcgcgagcgggtcgggcaagtcgacgctgctggacgcgctggcggggcgcatcgcgcgggacagcctccgcggcggcggggccacgctgaacggggagccgctgcagggccggcggctgcgcgccatctccgcgtacgtgatgcaggacgacttgctgtacccgatgctgacggtgcgcgagacgctgctgttcgccgccgagttccgcctgccccgcgcgctgcccgcggaccgcaagcgcgcgcgcgtcgacgcgctcgtcgaccagctcggcctcgcccgcgccgccgacaccatcatcggcgacgaggcccaccgcggggtgtcgggcggcgagcgccgccgcgtgtccatcggcaccgacatcatccacgaccccatcctgctgttcctcgacgagcccacctcgggcctcgactccgccagcgccttcatggtcgtgcaggtgctccgccgcatcgcgcgcagcggcagcgtcgtcatcatgaccgtccaccagcccagcgcgcgcatcctcgccatcctcgacaggctgctcctgctctcgcgggggcgcaccgtgtacgccggcacgcccgcggggctcaagcccttcttcgccgacttcggcgcgcccatcccggacaacgagaacccggccgagttcgcgctcgacaccatccgcgagtacgagcgctgccccgacggcgccgccccgctcgccgacttcaacgtcaagtggcagaacggcagcagttccacttccacctttgacaacaacaacgacgacgacaacgatagcagcagcaagctcatgccgctggagctcgccatcgccgagagcgtgtcccgcgggaagctggtggccgggagcgcggtcaccgcgtcgtcggtgccaacgttcgccaacccgccgtggaccgaggtgtgggtgctcatcaagcgctccttcaccaacacgggccgcatgccggagctcttcgtcatgcgcctcggcaccatcatggtcaccggcttcatcctggccaccatcttctggcgcctcgacgacacgcccaagggcgtgcaggagcgcctgggcttcttcgccatggccatgtccaccatgttctacgtgtgcgccgacgcgctgccggtgttcgtgcaggagcgccacatctacctccgcgagaccgcgcacaacgcctaccgccgcatctcctacgtgctggccaacgccgtggtcgcgttcccgccgctggtgttcctgtcgctggcgttcgcggtcaccacgttctgggcggtggggctcgcgggcggcgccccctcgttcctcttcttcgtgctcatcatcctcgcctccttctgggcgggcagcggcttcgtcaccttcctctccgctgtggtgccgcacgtcatgctgggctacacggtggtcgtcgccatcctcgcctacttcctcctcttctcgggcttcttcatcaaccgcgacaggatcccggactactggatctggttccactacctgtcgctggtcaagtacccgtaccaggcggtgctgcagaacgagttcagggacgcctcgcgctgcttctcgcgcggcgtcgagatgttcgagggcacgcccatagggcacatgacggagcccgtcaagctcaaggtgctgcaggccatcagcaggacgctggggtccaacatgacggccacaacctgcgtcaccaccggcgccgacgtgctggcgcagcaggccgtcacggacattggcaaatggaaatgcctgctggttactgtggcctgggggttcttcttcagggcactcttctacgtcgtcttgctcgttggcagcaagaataagaggaagtaaaattagtatacacaatgtatacggcgtatacataacatatacatatgtgtcaatgtgtgacggtgaaacaaatgtataggtcgacatgtgaaattattgttttgtttttaagaattgccgtattttttttcaaacatgcgtttacctagagtactgaattatatttgaattctttgcagttattcaacggcgtcatgctttcaatagatatacatatatgt

SEQ ID NO: 73566 - DNA, 4570 bp, Zea Mays
atcatcagtttctctctagtagaattgagatccctcctaccacatccgttccccttcccttccctcctctcgcgcgccggctccacgcagatccaggagatatgcctcgctatgatgaccgctatggaggcacgcgcttgtatgttggcagattggccactcgtactcgttcccgcgatttagaacatctgtttggcagatatggaagatggtaaacaatgattgttctgaactggtggaggtgcaaaccatctgatatataggagagcctagtaagctaaggggcccttgctacccttcttatagccattttagcaggtttttcggtttttaccggaggtctttggtggaagggtgcccttggtggacttggtgaccatttggtgaagggtgcccttggtgtaatgttattgactgttttagtggaagttccaagttggtgatgcatttgagtacttgacacatgacgtgacggcttactgtttgtggcaaccctttgcgcagaatacgagaagtggagttgaagcgtgactatgcatttattgagttcagtgatcatcgcgatgctgatgaggctcgataccagctagatggcagggatgttgatgggagtcgtattgttgttgagtttgctaaaggggtcccacgtggttcaggtggctcacgtgaatatatggggagaggccctccaccaggtacaggtcgttgtttcaactgtggagttgatggtcactgggcaagagactgtaaagctggtgactggaaaaacaaatgctaccgttgtggagaaaggggccatatagaaagaaattgccagaacagtcctaggagtctcaggcgagagagaagttactcacggtccccatctccccgccgtggacggggccgcagtcgaagctatagcaggagcaggagccggagtcggagctatagtcgatcaagatccctgtctagatctcctaggggaggtcgtcgtgaccgtgacgataggagatcaaggagtcctagctatagcaggagccccatgcgatctgcctcgccaccagtaaaggaaaaggagcgcagccccgcacctgatggaagcaggagcccaaggagtcgcagcccccaggatcaggtgatgagcccaccaccaaaggataatggcgaaggcaatggctcagaccgtggcggcagccccagagggagggagaacagcaggagctgcagccgcagccgcagtccatctggtagtaaccgcagccctgcggccaatggacgtagccggagtcctggaggtgagcggagcccgagtcctggaggtgagcggagcccgagtcctagaggtgagcggagcccgagtcctagggctgaccgtagcccaagccccaatggcaatggtaacaatgatgctgctgctgatgtcgatgctgatgctgctgcccgcagtggctcccccactggaagcaagtcaccctgagcgctggcggtcccagattgtggtggtgcttctcaatgcaatgggcaatcgtattgctattttttgctaccatatcgaagacacaatagctacatcattttcttctctgaaacaaggactttattttgcttgctttgagatatgactcttaccctctcatggataatatatatatgatatgatgccactggtgcttgcttgcatctgaataagtgaatgctcgcatgttgaggtttgcctgatgagtgctgagggctgaggccgtgagtcaaaacaacccgatactgcatttagaaattgcggttgatgcgcgacttgtgctgccgctgttgctggttcttgctgccaaccgcacggtaacagagcgctggtgagaccgtgatcgtcctggaagacttcttgctgctcacatggactgggtggagtaacggtgaccggtacaacgacccttgtttgatcctctcttttttttcctttttacgatatgttcggtgacatggtttccgacaccttcaccatctttgtagcgtgtctttcagcggccaactccgactcgcgtgctccagctccaggcagctccactcctatgcttcttctacatatataagtaaacgcgccaagccacgccacgctctgccatcccaacccgaccacctgccgaccgaggtctccgcagcgacacgccaccaccagagcgcgccgagctcgtgcacccagcaaggagcaaaggaccaacaaccgactgacgcggatggccaccccgggccacgccgtcgcggtcgacatcgacgagccagcctcctgcggcaacggcgaggcggcggcggccacgccgctgccccagccgacggtgccgtacgtgctccgcttcaccgacctgtcctacagcataaggaagcgcggcagcgggctaggctgcctgccttcgcgctggcccagcaaccgcctggcgtccttggacgcgccggcgtcgtccgcgaccgccgccagcgccacccggaacaccaagacgctgctggacggcatctccggggaggcccgggagcgggagctgttcgcggtgatgggcgcgagcgggtcgggcaagtcgacgctgctggacgcgctggcggggcgcatcgcgcgggacagcctccgcggcggcggggccacgctgaacggggagccgctgcagggccggcggctgcgcgccatctccgcgtacgtgatgcaggacgacttgctgtacccgatgctgacggtgcgcgagacgctgctgttcgccgccgagttccgcctgccccgcgcgctgcccgcggaccgcaagcgcgcgcgcgtcgacgcgctcgtcgaccagctcggcctcgcccgcgccgccgacaccatcatcggcgacgaggcccaccgcggggtgtcgggcggcgagcgccgccgcgtgtccatcggcaccgacatcatccacgaccccatcctgctgttcctcgacgagcccacctcgggcctcgactccgccagcgccttcatggtcgtgcaggtgctccgccgcatcgcgcgcagcggcagcgtcgtcatcatgaccgtccaccagcccagcgcgcgcatcctcgccatcctcgacaggctgctcctgctctcgcgggggcgcaccgtgtacgccggcacgcccgcggggctcaagcccttcttcgccgacttcggcgcgcccatcccggacaacgagaacccggccgagttcgcgctcgacaccatccgcgagtacgagcgctgccccgacggcgccgccccgctcgccgacttcaacgtcaagtggcagaacggcagcagttccacttccacctttgacaacaacaacgacgacgacaacgatagcagcagcaagctcatgccgctggagctcgccatcgccgagagcgtgtcccgcgggaagctggtggccgggagcgcggtcaccgcgtcgtcggtgccaacgttcgccaacccgccgtggaccgaggtgtgggtgctcatcaagcgctccttcaccaacacgggccgcatgccggagctcttcgtcatgcgcctcggcaccatcatggtcaccggcttcatcctggccaccatcttctggcgcctcgacgacacgcccaagggcgtgcaggagcgcctgggcttcttcgccatggccatgtccaccatgttctacgtgtgcgccgacgcgctgccggtgttcgtgcaggagcgccacatctacctccgcgagaccgcgcacaacgcctaccgccgcatctcctacgtgctggccaacgccgtggtcgcgttcccgccgctggtgttcctgtcgctggcgttcgcggtcaccacgttctgggcggtggggctcgcgggcggcgccccctcgttcctcttcttcgtgctcatcatcctcgcctccttctgggcgggcagcggcttcgtcaccttcctctccgctgtggtgccgcacgtcatgctgggctacacggtggtcgtcgccatcctcgcctacttcctcctcttctcgggcttcttcatcaaccgcgacaggatcccggactactggatctggttccactacctgtcgctggtcaagtacccgtaccaggcggtgctgcagaacgagttcagggacgcctcgcgctgcttctcgcgcggcgtcgagatgttcgagggcacgcccatagggcacatgacggagcccgtcaagctcaaggtgctgcaggccatcagcaggacgctggggtccaacatgacggccacaacctgcgtcaccaccggcgccgacgtgctggcgcagcaggccgtcacggacattggcaaatggaaatgcctgctggttactgtggcctgggggttcttcttcagggcactcttctacgtcgtcttgctcgttggcagcaagaataagaggaagtaaaattagtatacacaatgtatacggcgtatacataacatatacatatgtgtcaatgtgtgacggtgaaacaaatgtataggtcgacatgtgaaattattgttttgtttttaagaattgccgtattttttttcaaacatgcgtttacctagagtactgaattatatttgaattctttgcagttattcaacggcgtcatgctttcaatagatatacatatatgt

SEQ ID NO: 73567 - DNA, 389 bp, Zea Mays
gaggacgatgaaggagtgcaacattcagatatttttagatattttacggccggttcagatcagacaagaaagggtcatctagcaaaggttgtcgggatgtcgatctttttgtcaaacaagtagatgggaaaaatgttactgattcagagaaattgagattttgacttggagaaagcccagcttgacctagggcatggctacaacagggctgagatgaagttcaatgtgaatcgtgttgataacatggtgattcaggcaatctttctattggatatgcttaacaaggacatcaattccttctccatgagagtcagcccctcaaatcaactttggaacccaaatggtcaagcctttggatggaaagttcagcaaaggtggctgagggaccc

SEQ ID NO: 73568 - DNA, 475 bp, Zea Mays
gtgagatctagcgagaggaagaggaggaagggttgtggggaccaggggtgcgagatggcggattcacctgcaactacaagaaaagaaagagcgagagatttacagaaacctccagagccgcggaggaggaggagatttgaaggatctctacgacactggcggattagttaaggaacgaaagatcacattgtgtccggtaaccagattcagatgtgggcgtcgtgcgtgggtgcaaggccaagccgaggtgaaagagattcgacgattgagaatacatcaaagaataaaaatgtggaactcgaattttcagatgaagagcgtgaccaagaacttcctgatttttcatcatttattccattcttacctcctctgagtgcagctaatctaaaggtctactatgccacatgtttcaccatcatagttgggataatggtgttcggtggttttcttgcaccaatcattgctttgaatgctt

SEQ ID NO: 73569 - DNA, 470 bp, Zea Mays
gtgagatctagcgagaggaagaggaggaagggttgtggggaccaggggtgcgagatggcggattcacctgcaactacaagaaaagaaagagcgagagatttacagaaacctccagagccgcggaggaggaggagatttgaaggatctctacgacactggcggattagttaaggaacgaaagatcacattgtgtccggtaaccagattcagatgtgggcgtcgtgcgtgggtgcaaggccaagccgaggtgaaagagattcgacgattgagaatacatcaaagaataaaaatgtggaactcgaattttcagatgaagagcgtgaccaagaacttcctgatttttcatcatttattccattcttacctcctctgagtgcagctaatctaaaggtctactatgccacatgtttcaccatcatagttgggataatggtgttcggtggttttcttgcaccaatcttgatgtgctc

SEQ ID NO: 73570 - DNA, 1773 bp, Zea Mays
tgacaggaccgtcctctcgccccacacgtcagtgacgcccgtcctgtccctgtccggcgcgatgccggtctccctcaccggcccaccgcaagcgcagaagcacaaccacaacacctcgcctcgtcagatcgaccgggaagaagggagcagaagccaaccggctcgtccgcccgttgcctgtcgtcgctatggccgccgtggaggtgtgcgtgaaggccgccgcggggaaccccgacacgctcggcgattgcccgttctcgcagagggtgctgctcacgctggaggagaagaaggtcccgtacgaggtgaagctcgtcgacctcggcaacaagcccgaatggtttctgaacatcagcccagagggtaaggtgcctttgttcaacggtggagatggcaaatgcattgctgattctgatgtaatcacccaagtcattgaggagaagttcccgactccttctctggtcacccctccagaatatgcatcagtgggatcaaagattttcccagcctttgtcaagttcttgaagagcaaggatgctagtgatgggtcagagaaggcgcttctggatgagctgcaggcactggatgatcatctcaaagctcatggcccctacataaatggggagaacgtgtcagcgactgatcttagcctggggccaaagcttttccacctacagatcgcactggagcatttcaaaggctggaagatcccagaaaacctaaccaatgtccatgcctacaccaaggctcttttcagccgtgaatcttttgtcaagactaagccatccgaggagcacgtgattgcgggatgggcgcccaagacctttttcaggtttctgaagatcagcccagagggcaaggtgcccgtgtacaacagcggcgatggcaaatggattgctaattctgatgtgatcacccaagtcatcgaggagaagtacccagccccgtctctggcgacgcctccagaatacgcatcagtgggatcgaagattttcccatccttcgtcaagttcttgatgagcaaggatgccagcgacgacggttcggaagaggcacttgtgcgtgagctgcaggcgctggaggagcatctcaaagcccacgggcgtccctacatcagcggggagagagtaacagccgccgacctcagcctggcgccgaagctcttccacctggtggtggcgctggagcatttcaagggctggaaggtgccagaaagcatgtccagcgtccacgcctacacccagccgcgaatctttcatcaagactaagcccaccaaggagcacttgatcgcgggatgggcggcgaaggtgcccaagccgcccaacctcgtcgtgccttgctggctcatctgatcagtcgcagtcggtggtgcgttgctggttcattatgattgggttgggatacaacaataatgcagcgtgccatgttccgatcacttcccagttgtggtggccatgtttctatatcacctaacgctgccggttaggttcgggaccgtgggcatctgcatcgatctttttcttttcttttcttttaagattacacaccataacatggccttgtgcatctgcactcgtgatgggcatatttgtgacgtggaaatatcttctttcttaagcgcgcgctagtgagaatgttgggcgcaaagtaggcgcgcattacatggtgtggtcgtttgtgcgcacgatgtgttccgattccgatctctcgtggtggtaatgcgatgcagatattattctgtctgtcagtttatatatttgctgtttttttct

SEQ ID NO: 73571 - DNA, 4258 bp, Zea Mays
attattaagtggtagatatatagagatatagaagaatacatttttatattatatattgttaagtagtagctagtagatatagagatatataagaatatagttatagatacatatagggatacagaagaacagatagaggtaagaaggatagatacagatgcgaacatagaaatatagatagatatagaagagagtgactggccagcaacctatcgggttcactttgtttatatagctgggcccatgcacgaagcatgcgccgcaacacatcattcaaaaagcactgacgggagaagcttgagctagctacgccaatggctatagggcacaagaacaccaccaaagtggcgctcctagttctgctgctgtcattgatgctctctttgacagcgtcagtggcgcgcaatctccaatggcgactgtccgtcgctacggctgtggaggtgtgcgtgaaggctgctgtcggggctcctgacaagcttggcgactgtcccttctcacaaagggtgctgctcactctggaggagaagaaggtcccttaccggatgaggctcattgacctcagtaacaagcctggatggtccgtctcgtttacttttcctgtttattttccagagcagtatcctgtagggtctgacgactaagttgacaaagtactactgggggtcgtgtcttattttctacactcaagttgttctgggcagagatttctctggtgtagttttcatagtttcattgatggactggtagtagagaccaggaaggcaggagcaatatgagacagaatattttgctttctgcttgttttgctttggaggttttagatatatttagtggattcgttggatgtggcagatttccttggtttaactgaactgtattcctggaactggcatttgaaataaacactgcttagtgttggattctatactaatcaattcatatatcgttcagaattcttctctagctttgaggaacaagctgtagcccactagacttgtgttgaaatatttgtgcatatttcttttggggcttaaagaggggctgtcaaagaagataaacctcataccgttagagttcaacgtcgaacattcagtgtcttccctggtagagttgcatatgtcttcttgaatggattgggttctgatgtacttggatcacagccagttgagaggcattggacaaggcctttgtgtgagtgaagcccacttggagtctgggccaggttttgtctgtatgtgatgatcctcacatctaaatctaacccactgaaaaaagacctttttcaggtttctgaagatcagcccagagggcaaggtgcccgtgtacaacagcggcgatggcaaatggattgctaattctgatgtgatcacccaagtcatcgaggagaagtacccagccccgtctctggcgacgcctccagaatacgcatcagtgggatcgaagattttcccatccttcgtcaagttcttgatgagcaaggatgccagcgacgacggttcggaagaggcacttgtgcgtgagctgcaggcgctggaggagcatctcaaagcccacgtaataagcctgacctcttctgactgactatgtttgtttcacggacggaccctgcttcgtcctacactctcaatgatgctgtgtgcaggggcgtccctacatcagcggggagagagtaacagccgccgacctcagcctggcgccgaagctcttccacctggtggtggcgctggagcatttcaagggctggaaggtgccagaaagcatgtccagcgtccacgcctacacccaggtagtagcatttccagagcgcttgctcatcgagatacatcccgtatgagtatgacctgccctgccccacgatcgtcttttgtgccgcaggctatgttcagccgcgaatctttcatcaagactaagcccaccaaggagcacttgatcgcgggatgggcggcgaaggtgcccaagccgcccaacctcgtcgtgccttgctggctcatctgatcagtcgcagtcggtggtgcgttgctggttcattatgattgggttgggatacaacaataatgcagcgtgccatgttccgatcacttcccagttgtggtggccatgtttctatatcacctaacgctgccggttaggttcgggaccgtgggcatctgcatcgatctttttcttttcttttcttttaagattacacaccataacatggccttgtgcatctgcactcgtgatgggcatatttgtgacgtggaaatatcttctttcttaagcgcgcgctagtgagaatgttgggcgcaaagtaggcgcgcattacatggtgtggtcgtttgtgcgcacgatgtgttccgattccgatctctcgtggtggtaatgcgatgcagatattattctgtctgtcagtttatatatttgctgtttttttctaataaaagaaagtttaattggttcaccgtggagccttagcgcgtgttcatgagaacggaagggtcgatcgtgttgggtgtgctaaattgccaaccgtcatccccctcgtcagaagaagaaagccattagacgatggttgatggaatggacgaacaaatattgttactcgtagtcgtagacgatggaagagctgccttgtgctgcggcttcccagttcgggcgggattccgcgcgcacaaaacgcctgatccaaactaaattatctcatctcatctcagaaaccacccacccagtccaagctctatcttacggtaacagaatactcctaaataactgcgcgcagattcagattagccacggttactcgccgtcatccatcccattccatcccgttatataaataggcgccgcccgtcgcctgatcacaaacacccacttcacctccgaccacttcacctccgatcccgccaccactacccaccctttcctttgacgtcccgatggcacctgtagatctaacccccaagcagcccaggaaggcctacggcggcgacggcggcgcctactacgagtggagccccgccgacctgcccatgctcggcgtcgcctccatcggcgcagccaagctctcgctcgccgccggcgggctcgcgctccccagctactccgactcagccaaggtcgcctacgtcctccaaggcacgggcacctgcggcatcgtcctcccagaggcgacgaaggagaaggtggtggccgtgaaggagggcgacgcgctggcgctgcccttcggcgtggtgacgtggtggcacaacggccccgccgcgccgaccccgctcacggtgctcttcctcggcgacacctccaagggccacaggccggggcaattcaccaacttccagctgacgggcgcgaccggcatcttcacgggcttctccaccgagttcgtgtcgcgcgcgtgggaccttccggaggcggacgcggcggcgctggtgtcgagccagccggcctcgggcatcgtccgggcgtcctcgtccccgctgccggcgccgtcgccgcgggaccgcgagggggtggcgctcaactgcctggaggcgccgctggacgtggacatcccgggcgggggccgcgtcgtggtgctcaacacggccaacctgccgctggtcaaggaggtcgggctgggcgccgacctggtccgcatcgacgcccactccatgtgctccccgggcttctcgtgcgactcggcgtaccaggtcacctacatcgtccgcggcagcggccgcgtccaggtggtcgggcccgacggggtgcgcgtcctggagacgcgcgtcgagggcggcttcctcttcatcgtgccccgcttccacgtcgtctccaagatcgccgacgcgtccggcatggagtggttctccatcatcaccacccccaacccgatcttcagccacctggccgggaagacgtcggtgtggaaggccatctcggcggaggtgctgcaggcgtcgttcaacaccacgccggagatggagaagctgttccggtccaagaggctcgactcggagatcttcttcgctcccccatccaactgagaaaataggccggaagccccacggtggagtcctctcgttaggtcgtcgtgcttagattaggttagctagcttgcctttaataaaaagagagtggtggtcgtcggcgtcggcttcggcggtctgcttcttcttcattcagtgcgtcggtcggtttagagtctgtcacgtgtcccgtcattgaactgcagtttttgttaataaagtattgttattattaggtattattattctcgccctctgaattgttgttattatcc

SEQ ID NO: 73572 - DNA, 1680 bp, Zea Mays
ccggagcagagcagaggagctagcgggcccgcccgctggcgcggggaggcgaggcgaggatctccattcaactgattgtccgtcacatgttgccatgttggcttggcacactggaagtcctccctatgtctggaaaatgggatgtgactttagtagtaggcgataagcacaccaagtatgaagtatgcccatgcactgctcttcaactggctcagacatatttcaacaatatttacaaactccatggtctgccacaagcaattgtttcagaccgagagacagggtcttcacaaagcaatctgtggccgtcagataccaaattccttatgagttggtcgtacgatccacaaaccgatggtcagacagaacatgttgatcagtgtttgaagacgagagaatggtctatgtggttaccgtcccttagcagaattttggtataacaatgcttactagtctccttttgaagtattgtgctgtatggtcactctccacggcagttgggggtattactgatccacaaacagctacggcctggttcgtttgtgctggattgcatccggaatctttccagttaatcaaagtttatataaattagataagcaatccggttagaaatcgttccgagccaaccgaacggcgcctacaatgtgtgtgatctgtcagctcattcgtgcaggcacagcacagcagcggacgaagcaccatgcgctgacaagaatcgatctgagatatggtgtatctcaatttgtgcctagtagaggctcggcccaattggtggactagctgactcagctagagttgcgatgaaggcacgaaatgaataaaccagaacattcccaactgaataaaccagaaccttcctctgaaactcccaaagcttggctggttagctgttcgcaaactccatattcagggactgcttcagcagttcaatcagctgtacagtatttgcttcctgcctacatggcctcctcctcgagcacacatcaagtatgcaggaagctatattccgtgcatcgctcatgcagatggcaccggagtcgatgataaccactgcaggcaaaaggcttatctgcactccactcatcagcccgtactagctggtgctgcacgctctcgtcgttattgttcttcttcagttgctgcaggcatgcggatcattacgttggagactctgtaaaaaggggagaaggaaaatgctggacgcagttgcagtacaactccagcttccaggctaaatctaccgagattaagtagtctaaaaaagaatcggcgtggtcaaggattgcgggttccgtggatggggaggagttcttggtgttgaaaagggtgtcgtcctgaatccggcgccggttcgtcacccatgttctgcccagttatcacatggataatttaaaagaggcgagaacaagcttcgtgtctcgaggacaaaggctttagcatcaacacgcttgtctcttctgctcctactagaatatcctttctctgtcaaccaaactttggcactgtattgctagtgtaatagaggggtattttgctgctagacaaatgccgacgacccacggcgaaggctgttgacacctactctgtttgtgctgttagggagctctccttctgtcagagaacatttcaagaacaagctctccactgaatgacagacttatatagatacatagattt

SEQ ID NO: 73573 - DNA, 907 bp, Zea Mays
atttaaaattttctaatgtaaacaatgttatctataatgttgcacgctctattttacacgatcatcgaagttacctaatgatcgaaatgagttgttatggaatgaaaagaatcgcgtctgttgccggcccacaggccataggattgaggctgccactcagcacggcccattcaagtcgtaaccctagcaggccgccacgaccacgaggtgcatccacgagaggagatcgaaggagactccaattccagtcgcccccatccgttcctcatctcaccagaagcgaagccggaggagggaggaaggagatcgcgagcagccggagccggaggccgagaggatgaagacgttcgacccgtggccggtcttcttccgccgggagtggaagcgcaactggccctttctcacggggttcgccatcaccggcttcatcatcaccaagatgacggccaacttcaccgaggaagacctcaagaactccaagttcgtccaggaacacaagaagcgctgaccaaccgggtggagtcgtccgaatcgcctgcggatgaaaaattagccccctatttttcttgtcttttttttatctagatgcgtgcactctattgtaataatgtaataagaggcaattggattgatccaacagcaaccggcttctgattttgatccgcttcgctgacatatgcatgcagcaaacgaatatgtgccttttttttttcttgatgttggattgcatctaatcctgttgaattggtgagctgggtcctctgtgatttcatctttccctgataaagtcctgaagatagattggtcttgtttgttttggcttttggccgtcagcttagtcaaatgtttcgcttctcagccctctttttatgtgagaatcgtttctataaaaatcgtctaaattaac

SEQ ID NO: 73574 - DNA, 2594 bp, Zea Mays
caaggcttgttgggcagttgtgcagtgccatgctggccaatctgatcggttgttgccgtgagagagactttcaagaggaagggatctgatctagatcctcgaagttatatatctggaaaacaggctcttcagatatcgaacctcctttatataaatgttgttaatcagcttccagcatttgtttcatttgagttgtgtttactgcctagctctccatccaacaattgatatcttactgactggtggtcgagattcaatttgcagggtatgatctctcttgcaatcacaccttatgaaaaaaatcattgcatttaatggtcacttggttttgcttgggttatatatacatgtgtgggacatcagaacaaaagtatgtgtttctgctttaacaggacatgacaacattgtatgttcagtgtttgctcggcctatggtaagaatgcattttaacctgtcaagttcacgattcaccacaatattttcggccaaatggtacacaatatttcatgatgtagttttatttggagtcactccctcagttaaccaatggattatttgaagcagtgtctctgttctgtagatactttgcttctttgaaaatacctgccatcaattgttttactaaagtttagagtgtaataataaggcaaatgagcaaccttgatagaattcatatgccatcagtagttttaccatttaagctacactattttaaaatatatttttgctatggtaagtactcttatgtgtcctgctttactgttcatccattctcaagtatactctttgatcttttgatatgtgtgcaggcccaaaacatctgcaatttattttttgataagtcctccaagatttggttagttgcttcatgctttctctttttctctcttaatacttagctcaattttgttcatactggtatgtttgatctgtgatatactgctatgagcaaccttaattttgtattgccttacaaatgatttttagctgtcgcttgccaagtataggtcgtattgtgggtagtcacaccaaaactaaaactaatggcaattggtttgcaataggcagtgctctttctgttagctctggatgtcacggcaatgaacaaacacgttgagtatgatagtgatgctaaaattattgcaatcgattgaagccctaccatgtggcaaccattgatccatgcccaaaatgtgcctgccactggtgttcttatcccaacactcgatcaacatgcaagtagaaatgaagcctagagccaaatgatgcgagaggagtatggtctagacacgagccagttcacataaacccttcagacccaagcaggtaccagcagaatggcacgccagctaaagaaaggtgtcatggtgttgttcaaacttcgagtggtgtgtggaatagaagaatcccaattcccaaccatattatttgtcacgcttggtacaggggaaatacgacaacatcatcgcggcggtgaagagctactacatgtcgatgagcggtacactaccaatagtgtcggtgaagagctaccaatctgaatgaatggtttcaagtgtgagagtgagcaatgagcttggtgcaagacacccaaaatatgcttatttctcagtgtgggcagtgactgcaatctctatagtaatatttatcattcttgccattgtgatcctctacctgtgcaactacaccagctacatgttgcatgttcacatatgcacttttgtattagtaatatctcttgtatagtgcttttctcctctttatatccatgaagtaaaactcatttctctctcaaatagaaatgaaaaaatgattttgtttccctttccaagtggttcagttcctgagcaagtggcgttgtttatgttcatggccatgtgaatgggtctccaacataatacttgtctaatactcaagatctgatgccctattttgttagcagaaagattgatagattcacttttgtttctaatccggtcccctattttggtattgggtctcccaagggagtcatattataaggagaacatggaacaggaaaaactcttcttgccaaggttagtgttctgtcttacaagcatataatatgccaatatattgcttagtattgctgggcaagcttcgatcctcattgatatgtgttttgtctatgtttatctgaattacacattcatttttctactttcagttttcaaatgtacttgggtagtgtttaactgaaactgtctgcagactgtggctaactcaacattgcaactttcttgcatgttgttggtagtgagctcattcaaaagtaccttggggtgccgtcctccaccttggcatcacacccacctcccccgatgaagactcggtacacgacctggcgcgcactcgccatatcccctccgtgcaaacaacatttgtctatgtttatccaaagaatgattagttttagcaaaaatgattagattagtgtatggttgtcgccaactcgccatgtttgcttgtcattaataattatttattgactctttagaaataatttgtgtgacattgataatatttgttccacataagttcaatcaatttgggtcaccgtatttataataata

SEQ ID NO: 73575 - DNA, 1800 bp, Zea Mays
atctgatcggttgttgccgtgagagaggacttagggatgcttgatatccttgaatgggcaccggaaatctctcttgcaatggggttgtgactgttgctttctcattttcttcaactgtacagactttcaagaggaagggatctgatctagatcctcgaagttatatatctggaaaacaggctcttcagatatcgaacctcctttatataaatgttgttaatcagcttccagcatttgtttcatttgagttgtgtttactgcctagctctccatccaacaattgatatcttactgactggtggtcgagattcaatttgcagggcccaaaacatctgcaatttattttttgataagtcctccaagatttgccctaccatgtggcaaccattgatccatgcccaaaatgtgcctgccactggtgttcttatcccaacactcgatcaacatgcaagtagaaatgaagcctagagccaaatgatgcgagaggagtatggtctagacacgagccagttcacataaacccttcagacccaagcaggtaccagcagaatggcacgccagctaaagaaaggtgtcatggtgttgttcaaacttcgagtggtgtgtggaatagaagaatcccaattcccaaccatattatttgtcacgcttggggaaatacgacaacatcatcgcggcggtgaagagctactacatgtcgatgagcggtacactaccaatagtgtcggtgaagagctaccaatctgaatgaatggtttcaagtgtgagagtgagcaatgagcttggtgcaagacacccaaaatatgcttatttctcagtgtgggcagtgactgcaatctctatagtaatatttatcattcttgccattgtgatcctctacctgtgcaactacaccagctacatgttgcatgttcacatatgcacttttgtattagtaatatctcttgtatagtgcttttctcctctttatatccatgaagtaaaactcatttctctctcaaatagaaatgaaaaaatgattttgtttccctttccaagtggttcagttcctgagcaagtggcgttgtttatgttcatggccatgtgaatgggtctccaacataatacttgtctaatactcaagatctgatgccctattttgttagcagaaagattgatagattcacttttgtttctaatccggtcccctattttggtattgggtctcccaagggagtcatattataaggagaacatggaacaggaaaaactcttcttgccaaggttagtgttctgtcttacaagcatataatatgccaatatattgcttagtattgctgggcaagcttcgatcctcattgatatgtgttttgtctatgtttatctgaattacacattcatttttctactttcagttttcaaatgtacttgggtagtgtttaactgaaactgtctgcagactgtggctaactcaacattgcaactttcttgcatgttgttggtagtgagctcattcaaaagtaccttggggtgccgtcctccaccttggcatcacacccacctcccccgatgaagactcggtacacgacctggcgcgcactcgccatatcccctccgtgcaaacaacatttgtctatgtttatccaaagaatgattagttttagcaaaaatgattagattagtgtatggttgtcgccaactcgccatgtttgcttgtcattaataattatttattgactctttagaaataatttgtgtgacattgataatatttgttccacataagttcaatcaatttgggtcaccgtatttataataata

SEQ ID NO: 73576 - DNA, 2417 bp, Zea Mays
ctaatctagaattccagattatgtcactgtcgaagctcgagatcttcgtgtcatgtctggacttagggatgcttgatatccttgaatgggcaccggaaatctctcttgcaatggggttgtgactgttgctttctcattttcttcaactgtacagactttcaagaggaagggatctgatctagatcctcgaagttatatatctggaaaacaggctcttcagatatcgaacctcctttatataaatgttgttaatcagcttccagcatttgtttcatttgagttgtgtttactgcctagctctccatccaacaattgatatcttactgactggtggtcgagattcaatttgcagggcccaaaacatctgcaatttattttttgataagtcctccaagatttgccctaccatgtggcaaccattgatccatgcccaaaatgtgcctgccactggtgttcttatcccaacactcgatcaacatgcaagtagaaatgaagcctagagccaaatgatgcgagaggagtatggtctagacacgagccagttcacataaacccttcagacccaagcaggtaccagcagaatggcacgccagctaaagaaaggtgtcatggtgttgttcaaacttcgagtggtgtgtggaatagaagaatcccaattcccaaccatattatttgtcacgcttggtatgtcttctatataaatgttctatgcacctgtaattttattgtgaatgaggaactgttagccattgacatcattttttgtgtttttagggagtttgtttattgttgccaatctcgaccttttttcatgtagctctatttaaccttgatgatttactcaaatatatgtaagatttggttgtgccatgaagtgagatgatattgatagatctcttttgctttgtgtacatcagaaatgagttagattctagatttcttgagatggcaaaacttcccattgggttttcagccaatgtgaaaagaataagctggtgttccattggtgttaaatggcagtgactctatgattcaattttatgtgccatatctttctgctatccaactatttgcagatatattgagacatgcctcaagaaatagtttatttagagcaactaaaccagccaaattagtgtctgctaccaatatgttgcattttccccatgacagatatgataccagttttgattgaatcaccttcatattttcatctaaatcattttttgttgtatctctctacctgtttgagtttgccggtaggtacaggggaaatacgacaacatcatcgcggcggtgaagagctactacatgtcgatgagcggtacactaccaatagtgtcggtgaagagctaccaatctgaatgaatggtttcaagtgtgagagtgagcaatgagcttggtgcaagacacccaaaatatgcttatttctcagtgtgggcagtgactgcaatctctatagtaatatttatcattcttgccattgtgatcctctacctgtgcaactacaccagctacatgttgcatgttcacatatgcacttttgtattagtaatatctcttgtatagtgcttttctcctctttatatccatgaagtaaaactcatttctctctcaaatagaaatgaaaaaatgattttgtttccctttccaagtggttcagttcctgagcaagtggcgttgtttatgttcatggccatgtgaatgggtctccaacataatacttgtctaatactcaagatctgatgccctattttgttagcagaaagattgatagattcacttttgtttctaatccggtcccctattttggtattgggtctcccaagggagtcatattataaggagaacatggaacaggaaaaactcttcttgccaaggttagtgttctgtcttacaagcatataatatgccaatatattgcttagtattgctgggcaagcttcgatcctcattgatatgtgttttgtctatgtttatctgaattacacattcatttttctactttcagttttcaaatgtacttgggtagtgtttaactgaaactgtctgcagactgtggctaactcaacattgcaactttcttgcatgttgttggtagtgagctcattcaaaagtaccttggggtgccgtcctccaccttggcatcacacccacctcccccgatgaagactcggtacacgacctggcgcgcactcgccatatcccctccgtgcaaacaacatttgtctatgtttatccaaagaatgattagttttagcaaaaatgattagattagtgtatggttgtcgccaactcgccatgtttgcttgtcattaataattatttattgactctttagaaataatttgtgtgacattgataatatttgttccacataagttcaatcaatttgggtcaccgtatttataataata

SEQ ID NO: 73577 - DNA, 2799 bp, Zea Mays
atttatagaaaaaaagtggaaatgttgagtttaatttttccataatgttctaaaaaagggcatccatatttgatgcactattctaagttgtttttaaaattagtcacgctttcattcttatagcccccactctgtgttcaggacttagggatgcttgatatccttgaatgggcaccggaaatctctcttgcaatggggttgtgactgttgctttctcattttcttcaactgtacagactttcaagaggaagggatctgatctagatcctcgaagttatatatctggaaaacaggctcttcagatatcgaacctcctttatataaatgttgttaatcagcttccagcatttgtttcatttgagttgtgtttactgcctagctctccatccaacaattgatatcttactgactggtggtcgagattcaatttgcagggcccaaaacatctgcaatttattttttgataagtcctccaagatttggttagttgcttcatgctttctctttttctctcttaatacttagctcaattttgttcatactggtatgtttgatctgtgatatactgctatgagcaaccttaattttgtattgccttacaaatgatttttagctgtcgcttgccaagtataggtcgtattgtgggtagtcacaccaaaactaaaactaatggcaattggtttgcaataggcagtgctctttctgttagctctggatgtcacggcaatgaacaaacacgttgagtatgatagtgatgctaaaattattgcaatcgattgaagccctaccatgtggcaaccattgatccatgcccaaaatgtgcctgccactggtgttcttatcccaacactcgatcaacatgcaagtagaaatgaagcctagagccaaatgatgcgagaggagtatggtctagacacgagccagttcacataaacccttcagacccaagcaggtaccagcagaatggcacgccagctaaagaaaggtgtcatggtgttgttcaaacttcgagtggtgtgtggaatagaagaatcccaattcccaaccatattatttgtcacgcttggtatgtcttctatataaatgttctatgcacctgtaattttattgtgaatgaggaactgttagccattgacatcattttttgtgtttttagggagtttgtttattgttgccaatctcgaccttttttcatgtagctctatttaaccttgatgatttactcaaatatatgtaagatttggttgtgccatgaagtgagatgatattgatagatctcttttgctttgtgtacatcagaaatgagttagattctagatttcttgagatggcaaaacttcccattgggttttcagccaatgtgaaaagaataagctggtgttccattggtgttaaatggcagtgactctatgattcaattttatgtgccatatctttctgctatccaactatttgcagatatattgagacatgcctcaagaaatagtttatttagagcaactaaaccagccaaattagtgtctgctaccaatatgttgcattttccccatgacagatatgataccagttttgattgaatcaccttcatattttcatctaaatcattttttgttgtatctctctacctgtttgagtttgccggtaggtacaggggaaatacgacaacatcatcgcggcggtgaagagctactacatgtcgatgagcggtacactaccaatagtgtcggtgaagagctaccaatctgaatgaatggtttcaagtgtgagagtgagcaatgagcttggtgcaagacacccaaaatatgcttatttctcagtgtgggcagtgactgcaatctctatagtaatatttatcattcttgccattgtgatcctctacctgtgcaactacaccagctacatgttgcatgttcacatatgcacttttgtattagtaatatctcttgtatagtgcttttctcctctttatatccatgaagtaaaactcatttctctctcaaatagaaatgaaaaaatgattttgtttccctttccaagtggttcagttcctgagcaagtggcgttgtttatgttcatggccatgtgaatgggtctccaacataatacttgtctaatactcaagatctgatgccctattttgttagcagaaagattgatagattcacttttgtttctaatccggtcccctattttggtattgggtctcccaagggagtcatattataaggagaacatggaacaggaaaaactcttcttgccaaggttagtgttctgtcttacaagcatataatatgccaatatattgcttagtattgctgggcaagcttcgatcctcattgatatgtgttttgtctatgtttatctgaattacacattcatttttctactttcagttttcaaatgtacttgggtagtgtttaactgaaactgtctgcagactgtggctaactcaacattgcaactttcttgcatgttgttggtagtgagctcattcaaaagtaccttggggtgccgtcctccaccttggcatcacacccacctcccccgatgaagactcggtacacgacctggcgcgcactcgccatatcccctccgtgcaaacaacatttgtctatgtttatccaaagaatgattagttttagcaaaaatgattagattagtgtatggttgtcgccaactcgccatgtttgcttgtcattaataattatttattgactctttagaaataatttgtgtgacattgataatatttgttccacataagttcaatcaatttgggtcaccgtatttataataata

SEQ ID NO: 73578 - DNA, 2220 bp, Zea Mays
atttatagaaaaaaagtggaaatgttgagtttaatttttccataatgttctaaaaaagggcatccatatttgatgcactattctaagttgtttttaaaattagtcacgctttcattcttatagcccccactctgtgttcaggacttagggatgcttgatatccttgaatgggcaccggaaatctctcttgcaatggggttgtgactgttgctttctcattttcttcaactgtacagactttcaagaggaagggatctgatctagatcctcgaagttatatatctggaaaacaggctcttcagatatcgaacctcctttatataaatgttgttaatcagcttccagcatttgtttcatttgagttgtgtttactgcctagctctccatccaacaattgatatcttactgactggtggtcgagattcaatttgcagggcccaaaacatctgcaatttattttttgataagtcctccaagatttggttagttgcttcatgctttctctttttctctcttaatacttagctcaattttgttcatactggtatgtttgatctgtgatatactgctatgagcaaccttaattttgtattgccttacaaatgatttttagctgtcgcttgccaagtataggtcgtattgtgggtagtcacaccaaaactaaaactaatggcaattggtttgcaataggcagtgctctttctgttagctctggatgtcacggcaatgaacaaacacgttgagtatgatagtgatgctaaaattattgcaatcgattgaagccctaccatgtggcaaccattgatccatgcccaaaatgtgcctgccactggtgttcttatcccaacactcgatcaacatgcaagtagaaatgaagcctagagccaaatgatgcgagaggagtatggtctagacacgagccagttcacataaacccttcagacccaagcaggtaccagcagaatggcacgccagctaaagaaaggtgtcatggtgttgttcaaacttcgagtggtgtgtggaatagaagaatcccaattcccaaccatattatttgtcacgcttggtacaggggaaatacgacaacatcatcgcggcggtgaagagctactacatgtcgatgagcggtacactaccaatagtgtcggtgaagagctaccaatctgaatgaatggtttcaagtgtgagagtgagcaatgagcttggtgcaagacacccaaaatatgcttatttctcagtgtgggcagtgactgcaatctctatagtaatatttatcattcttgccattgtgatcctctacctgtgcaactacaccagctacatgttgcatgttcacatatgcacttttgtattagtaatatctcttgtatagtgcttttctcctctttatatccatgaagtaaaactcatttctctctcaaatagaaatgaaaaaatgattttgtttccctttccaagtggttcagttcctgagcaagtggcgttgtttatgttcatggccatgtgaatgggtctccaacataatacttgtctaatactcaagatctgatgccctattttgttagcagaaagattgatagattcacttttgtttctaatccggtcccctattttggtattgggtctcccaagggagtcatattataaggagaacatggaacaggaaaaactcttcttgccaaggttagtgttctgtcttacaagcatataatatgccaatatattgcttagtattgctgggcaagcttcgatcctcattgatatgtgttttgtctatgtttatctgaattacacattcatttttctactttcagttttcaaatgtacttgggtagtgtttaactgaaactgtctgcagactgtggctaactcaacattgcaactttcttgcatgttgttggtagtgagctcattcaaaagtaccttggggtgccgtcctccaccttggcatcacacccacctcccccgatgaagactcggtacacgacctggcgcgcactcgccatatcccctccgtgcaaacaacatttgtctatgtttatccaaagaatgattagttttagcaaaaatgattagattagtgtatggttgtcgccaactcgccatgtttgcttgtcattaataattatttattgactctttagaaataatttgtgtgacattgataatatttgttccacataagttcaatcaatttgggtcaccgtatttataataata

SEQ ID NO: 73579 - DNA, 3366 bp, Zea Mays
ggaccatgatcacgagcatgcatggtgttgaaattaagacaaaaaaaaacctccctccgtccaaaaggaaacacaattataaattcaaacaaagatgatatttcttcagttgaactgagttcatttaaaatggtacataaatatatctcataattaacctgatagtgtaaagagattgacggagctgctataaggtattttgccttgagtgtaaacagtgtacaatgcatttaaaaaaataaacattaaaattgtttgtttgtttgtttgactggttggaaaccggaattactcggtagttaggttttgaaggcacgggacgaggcgtgcattagatcattactgcggtcgattcatcaccagcaacataatattaataaaaaaaaccccagagatatttcttgattttttttgagagagaagaaagacaggacagacagagagaggcggagaggagtgcgtgcgcgtcgataaaaagccgtaaagccgtcgccactctttccccattccacgctgcctcggccggcacctacctcccccacttcgccgccggcgggtggagtcgggccggagcagccgctagctcgcctctgttaccccaaaaaagacaaaaaaaaataaagagagagtaccaagcaagccgccggcagctcgggcagccatggggcacggcgtcagctgcgctcgcacgggcgacgagcacaactacttccgcgcggcgcaggtcggggacctcgacgccctggacgcgctcctcgccgccgacccctccctcgcccgccgcgccacgctctacgaccgcctctccgcgctgcacatcaccgccgcgaatggccacctcgaggtgatgtccatgatcttggatcacggggtgccgccggacgccgtgaaccggcacaagcagacgccgctgatgctcgcggcgatgcacggcaagatcgactgcgcgcggaagctcctggaggccggcgccaatatcctgatgttcgactccctgcacgggcggacctgcctgcaccacgcgtcctacttcggccacgtcgactgcctgcgggccatcctcgcggcggcgcggaccacgccggtggccgactcatggggtttcgcccggttcgtcaacgtcagggacgaccgcggcgccacgccgctgcacctcgccgccaggcagggccgctccgcctgcgtgcaggtgctgctggagaacggcgccattgtctccgccctcaccggctcctacgggttccccggcagcacgtcgctgcatctggccgctcgaagcgggaacctggactgcatccggaaactgctcgcctggggcgcggatcgtctccagagggactcagcagggaggattccttacgccgtggcgctgaagcgcaaccacgcggcgtgcgcggcgctgctgaacccgtcggcggcggagcccatggtgtggccttccccgctcaagttcatcagcgagctggacccggaggcgaaggctctcctggaagcggcactgatggacgccaatagggagagggaggagaagatcctcaagggcatcaccaagtattcgcagccatcgcctacttcgccttgcgagcacgatgccattgacgaagcgtccttggaggccagcgacggggagctgtgctgcatctgcttcgagcaggcgtgcagcatcgaggtgcaggactgcgggcaccagatgtgcgcggcgtgcacactggcgctgtgctgccacagcaagccgaacccggcgacgccgccgccgcctcgtccccgcagctcgtccggcggcggtcgcacaacctcagatgggcggcggcgacggcgtggacaagcccgagcacgacctgtgatcggcatttgatgctgtgcgtggctgagcagacagcagagcacgaccattttaaaagctgaagcaggcattgccactggctttccaagatgagagacatcacatccaagcgtgattatctactggagtacttgtaatgcatcctcttcttctcccccatgtctggtctatttttgggcgtgctaggatggacctggccggcgcgatatggttgagctgagcttgagccaccgacatgtgtgtaaaactgtcggtcgagagaacacgcagagtggaaccggcgatgtgcactggacttgtgatctggactctgaaggaggcattgcatgttgtaggacagcacagcagcaacagtggtaccggtcggcaggcaggcaggcaggctccgtgagcggtgctccggccatggccgtccggcggtggcagccagccaatggtccgtgaccgtgatgcacgcaggagcggtgcatggagcaaggctcagagcagccgcagttattgtgtgccagtgtcgtacaagcgctgctcacaccacaggcagcagatgcatgccgtcactgaccagctgctttcctgcaagatcttctcgggagctatggtcggtcaggcatgctgcaaaaagcttgaccccttgccaggaaggaagcagagataacccatccctacctccctcgacgtcgacgagatggctatccgtttggacatgaccaagagtaatgctcccagtttcgagcccaacgccgccattactccgacatcatccaagccttacctcagctccaagcgtgtagcccggctacaggctcaaaccctccaccaaactggtgctcgcttcctgacctttttttaaggggtatatgaatgcactagagctagtagttagttagctaaaaatatacaagtagaattagctatttaacaaatagttagctaactattagctaatttaataaaaaaatagttaatagatgaactattagctagggtgtttgtatatctgtagctaattttagccattaacaatctatagtgcatttaaacaccatctaaattagccaaatatttaccagcaaaataaacataaacaatcaagattaaaaaaatcataccatcttgtgcatgtgctagtcacctatgcagagggatggcaattttacccgcgggtcggatatacccgttgggtacgggtttgggcacgaaatttgacccgcgagtcttacccgtacccgacccgattttattataggtcgggtacggatttgatttcttacccgcgggtacccgatggatatccgaaaatagtgattttagattttcaaccaacctatacgctagctagccgtccatcctcaacagctcatcctactgccatccctccctgtctactgatgcttttgatatggttctattactagtgtcaatatgtttgataaagtgccagtacatttgataaagtgccagtatgtagtaccagtgctagctagtacaagtacttgagctaagagagtgttaatacaccagac

SEQ ID NO: 73580 - DNA, 2376 bp, Zea Mays
aggggtggggagccaaccaccacctctccccctgctagtgctcagtcctcgccctctcgctttccgagggagcctttgcctttcccctccgcccgccagccattaatggcggcggcatctccatccactcccccctcgcccccctcccactgctgctacttctagaagcgctggtggcagggcaggcggtatcccggccgctggcgctggcgcgagagttggttggtggtggtcttcagcccccctcgctcttcaggtttagggtggagcgatccgtgcaggcaccatcaccaaaaaggtccccgccttcttcttcttcttcttcttctcctctgcccctgcttgtcgtttgctcgtgctcccccaccccctttctgattcagcaagggttccttccgcggcgcggcgcgtcgccatgggcaactgctggggcgccaagatcagctccgacagcccgtcccgcggcgcctcatccccgtcagggacggcgtccaagttggcgagcaggaacggggcggcggcagccctgagcgggtgcagcagccacgcgtcgtccgcgtccatgctgccgacgccccgcagcgaggacgagatcctggagtcggccaacgtcagggccttcagcttcaacgagctgaggaccgccaccaggaacttcaggccggacagcgtgctgggcgagggcgggttcggatccgtcttcaagggctgggtcgacgagaagacgctcgccccggctaggcccggcacggggatggtcattgccgtcaagaagctcaaccaggatggataccagggccacaaggagtggctgactgaagtgaactaccttggaacgctgtcgcacccctaccttgtgaagctcgttggctactgcctcgaggacgaacagcgcctcctcgtctacgagttcatgccacgcgggagtctggagaaccatctgttcaggaggagctcctatttccagccgctgtcctggaacctacggatgaagattgcgctcggagcagctaaaggcctcgcgtatctccacagcgacgaggctaaagtcatctaccgtgacttcaagacatctaatgtccttctagatgcgaacttcaatgcaaagctctctgatttcgggctggcgaaggatggtccgaccggcgacaagagccatgtctccactagggtgatggggactcacgggtatgcagctccagaataccttgcgacaggtcatctgaccaccaagagcgacgtgtacagctttggggtggtgctcctagagatgctgtcagggcggcgggcgctggacaagaaccgcccgaacggggagcacaacctggtggagtgggctaggccatacctgagaagcaagcggcgcatatttcgcatcctggacccacggctgggcgggcagtactcccttgccagggcgcagaaggctgcggcgctcgccctgcaatgcctctcggtggagtccaggcacaggcccagcatggacgaggtggtcacagcgttagagcagctccaggacaccaaagaaggaggtaaccatcacctacagaagaggccaggcagccggagcttggataacaatggcggcaaagcggcagggaaggggaagcctgctcctcatgtaaaaccagtttgagtgattggattttatatgccagagtatctctctttttttttcccatccatttgtaggtgtaggtaatatagtagggttcttagagggatttgtaaagaggcaggcagagttctggatgttttctgtctattatgtagttttttttacatcttcaagtctctgtaaagtacgctatgtaaatacataatgacatccagttcggagtgcgatgaattttagtccaggccaacagctcaaccgctgttaaaacttagcaagctgctgagcatagaacggatgcaattgatcaagtgttaacaggcatcaagacgggttccagattcaggcaaattaatctgaaaacatacatacaataaagctgaaaacttcatatatacacacacacacacttgtataacacatcacatttgagcaagtctgtatacatgctgagtgtgggcatctttgatcaaatgattaaacatgtttggtgcagagtgtgagcctttcagtgaccctccctcctgtgagcctttcagtgaccctccctcctgatagcaatggcaccttcgtagcctcttcagtagttcttcatccaaactgtatcatggattcatctaaagagaaaacagaaaagaatacaatgcagcatggggttcatctgcagcgtctggacatctcagaaatgtatctgtattacaaagcacttggctggatcaaatctttcaaatgattcgtacacagtaagcccttctgatcaa

SEQ ID NO: 73581 - DNA, 2385 bp, Zea Mays
ctacttgctctgggtatggccgtatggcgcggagagggaacaggctacagagggagaggacaaccaaatcgggcaatcagctgggcatcctcgtgttgcgcctgcgagcaggtcatcgagggagtggcggttgcgtggagaacacataccaaccagccgcgaccgagaagggcggggcgaaggaaggacaacgtgtggctccgctccacgggacgacggcggcgtctcagggtccggacagatcttttttgcgcagcggcagggagaggagacggatggacatggatggctacgagtcagacggaaccaggagtagagttccatacaggctgtcgagatctcctcgtcacagcctactcccatgctatggtgatggagaaggatgtcgccgcaacactgatctcaccacggtcaggatggagaacgaccgttgtgctcagcgaagccaccactcctagagagacgagcagcgtatgtcgtcgtcgtccgacctcgagcagcaggtggccaccgccctccgccgtgtgacccccgtcgccgccgcgcctgctgtagaccgtggaggcgcgccggatctggcggcggcgattcagcgccgaatggcctcgcaacgcgccaggggtgccgacgcgttctacgcgaagttcgcgtcggcccggtcgctcgccgaccagaccttctcacgccgacgagtacagctgaagggactcaaggatcagctccgggacctccagtcgcagctcagggagtctcttacacttcagtcgtgcaaggaatggaaatacaggattgccacggagccgatgtcggaggccacagctacgaatgagcggctccgtagctgggttgcggatttcagggacaagaggaacaagggtgctgcaatcgtatttgagcaacttcaagctgtcgaatcacttgaggcaaacagtaatgaagatgcagagatggcggagaaggtaccaaaagctgttctctggtacaataagttccttggcttccgggtgatcggaggagaaagaggtgtgaagttcgtgttcgacaagattgacccacagcgtccggagaaggaatactcgtttcgcgtaagtccgagatcacaattcatcgatagtgatcctcatgtcaaggacattgatgaattggcgaaggatttggatttgaacgaacatctattcgagtttgtaagaatggccagagagaaattccagtctcccttcatgaacggtaaccagcaatttttgtattctttttacgataatgtgaccaagtatcatacttaattacttattataaacatcttctgcaaatataaacaatccgaatcttctttccctaaaatactggcaaggggcaataggtttaagcagagcagacttgcaagtaaacatgtgactttgcctcaaatacatcctttatatgtagatgcaggacaataggacatacaatgtatacactgtcaagtttcagttgaagacatacaatctatacactgtcaagtttcagttaaagaggctctatggtcttgttattatgtagttttggctgcgtggaagttccaaagcatatttttaatgttgtcgcaaaatgcaaataatatggtgcatgctttccaatctagaaaccagttctcattttttccttccttccggatatggagcgggcccttttatgaccaaagatttgtgtatggaagatgagattgtgttcttcttgttctcctctggaagctgtcggctaactcttgtcactgcgttcctcagagacacttcctgtaagcccagatgcctctgccgcaccactcccgtctcccatggtggtgtcagttaacagcagaagcggggaagctcacagtcaaacccaatctctaagcaagaacagtgcacggttacttcctgctaagagaggcgccacagccctgccaggagcttctcctggtgttttgcgtcgttccccacgtctcgagggaatgcggtgagctagttagtagccgtagcaggttccgacccctggatcttgaaccaagcgatcatcatcagctcatataaaccgtggtgattcagctgcccttgcttatgggtggtgcttttttctcccttctaatctaactggaacttatagaagtgtatggttggcaattggccgggtacagtgattaaccctaacctggcctgtaatatattgttatactctggtcattagatgatgagttcgtgagtcgtgtcctggtctgttgtatggtgtcaaatatatagcaggtgttgtttttgtgtgacacccggatttaagggtaaatccggacgtgaattaaatgtgtgctatgatcaagttttacacatatgatgatttatgatatagaaatcaatgtcacatctttattatata

SEQ ID NO: 73582 - DNA, 2505 bp, Zea Mays
atggatggctacgagtcagacggaaccaggagtagagttccatacaggctgtcgagatctcctcgtcacagcctactcccatgctatggtgatggagaaggatgtcgccgcaacactgatctcaccacggtcaggatggagaacgaccgttgtgctgtacgaaccttgtatatttctatggatgtcgaaatatgtgtttggcatatttgcttatcaactgagtcgaaatatatgttatgttgattcagttttgggttgattcacttttattcagttgatttagagattgattctgtttgattcagtttgggcacatattcagtttcagtttcagttgtgaaatttagtttcaggttcatagtttggacacacagttcatgttcacactttaggttcagtttcaggttcataggtttagttaggggtgaaaatgagttctaaattttacactataaaatttaaagatcggatcgaattagaatcgagctatatttctattcatttatgaactaaaattaatttagggccctgagaaattgtgaagaaacatttggattgcgatctattaccctccctagttctagcacaacaatttcagttgtgaaatttcaggtttatagatcgagccatcaagttcacacatcaggttcacaagttcagtttaggttcacacatcaggttcagttacccatcacagatcgatcacagcagctcaacgcagcagtttgagctctgaatagcagctcagcacagcaaattagtctatgattggtccattctccgttcagtttactagtgttgtatcctgaacggttcaccaaatcagcacagcccagcacagtttgagatcagcaaaacagcagcccagaacagcccggaccagtaaacaatcactgaaacatgttcacaaacaaaagagcacaattccaatagttgttcgacggagaacgtaccttagctatggagaagtagtggcgggagaattcaccggcgagggagctccaagcagcggcggggagaactcgccggcgaaggagctccaacctgtgcgcagccggcgggggagatcagagactgacgacgtcttccaagacagcgaagccaccactcctagagagacgagcagcgtatgtcgtcgtcgtccgacctcgagcagcaggtggccaccgccctccgccgtgtgacccccgtcgccgccgcgcctgctgtagaccgtggaggcgcgccggatctggcggcggcgattcagcgccgaatggcctcgcaacgcgccaggggtgccgacgcgttctacgcgaagttcgcgtcggcccggtcgctcgccgaccagaccttctcacgccgacgagtacagctgaagggactcaaggatcagctccgggacctccagtcgcagctcagggagtctcttacacttcagtcgtgcaaggaatggaaatacaggattgccacggagccgatgtcggaggccacagctacgaatgagcggctccgtagctgggttgcggatttcagggacaagaggaacaagggtgctgcaatcgtatttgagcaacttcaagctgtcgaatcacttgaggcaaacagtaatgaagatgcagagatggcggagaaggtaccaaaagctgttctctggtacaataagttccttggcttccgggtgatcggaggagaaagaggtgtgaagttcgtgttcgacaagattgacccacagcgtccggagaaggaatactcgtttcgcgtaagtccgagatcacaattcatcgatagtgatcctcatgtcaaggacattgatgaattggcgaaggatttggatttgaacgaacatctattcgagtttgtaagaatggccagagagaaattccagtctcccttcatgaacgagacacttcctgtaagcccagatgcctctgccgcaccactcccgtctcccatggtggtgtcagttaacagcagaagcggggaagctcacagtcaaacccaatctctaagcaagaacagtgcacggttacttcctgctaagagaggcgccacagccctgccaggagcttctcctggtgttttgcgtcgttccccacgtctcgagggaatgcggtgagctagttagtagccgtagcaggttccgacccctggatcttgaaccaagcgatcatcatcagctcatataaaccgtggtgattcagctgcccttgcttatgggtggtgcttttttctcccttctaatctaactggaacttatagaagtgtatggttggcaattggccgggtacagtgattaaccctaacctggcctgtaatatattgttatactctggtcattagatgatgagttcgtgagtcgtgtcctggtctgttgtatggtgtcaaatatatagcaggtgttgtttttgtgtgacacccggatttaagggtaaatccggacgtgaattaaatgtgtgctatgatcaagttttacacatatgatgatttatgatatagaaatcaatgtcacatctttattatata

SEQ ID NO: 73583 - DNA, 716 bp, Zea Mays
gagggacgatccttctcacgcgcgccatgcatgctcagctagctgttgaaggttcagcagttactggtgtctacaagccacgccctcgcgcaagtgaccatatatactgcccggtgggtccctccgtccccgtgcccctgctgctatcctcgcttaattcgacgatggaggaaagctgcgacaagcggagcgagaagcaggtggtggcggcggcgaagaagaagaagctggcgaagagcgggcatggcaggaggtggtcttcgtcgacggacctgcaggacatcgagacggcgaccaggacggccgcagtcgacggcggcatgaagcagcagcggcagcaggcagcgcgggagggccagggagaggcggtggagcagcgtcggcgctgtggcggcgccggcgcgcgtctgtcccggaagatcaaggagcaccgggcgcggttctacatcgtgcgccgctgcgtcgccatgctcgtctgctggcgcgacgccgacgactagcttgaattgttgttgcttaattgctccgccgccggacggcgcatcgatcgagcaccgggctttagctttattctttctggattcatcaaatgctcatctcagttcattaatttattaatctctcgcgcgctggcgttgatccatgcatgaaatcaaacatctgcagctagcatggccgcttgttactgttttcactcatcagaatttcaatcattg

SEQ ID NO: 73584 - DNA, 2708 bp, Zea Mays
cagaaggccaccaagttgatgatcacaagctttgtccacggttcagacggcctgggaaaccaggatttccctccatcagctaccaagcctgtagatcaatcggctgctgccttcctggttgagcaaccaaatctataccctggacaagttaccattgtcgccctcagtccactaaccaaccttgctctgacagtcgagcttgaccctttgttctcgaagaatatatggcagattatttttcttggcggtgtgtattcaattaatggtaatgtgaactatgcagctgaggcaaatgtagatattgtgttcacccgcggtgctgatattttggctatggtactaattgtaacacatcaagtagttttaacccgtaattctgccatatttaagggtcacattatttctgctcaggatgtatgcttcatatactgagataatgcttcttttataacctacttctcattagtcaatggcaatctctactactctataagggtccagtgtgggcgtccacactggtaccgtgcccccgcccccaaaattctcgccccgcctcgctctccgtcgcgccattccagggaccctccatcgccgcccccgccatcatcgcgtcagcgcccgcgctccgtcgatggaaggcgccattccagggacccaccccaaccctgcgatcctcacccttccaaggatgccccgcacccatctcgtccaatccctcctcccgcctcacccgctcacaaggtcgacgacgacgaatctaaggacgccaacgccacccctctctgagctccctatggccactgcgggtgagtgcctctgggtagccggtcacccctctcttgcagcctccgagcttcggcgaacgcagaactggcagggcgcgacggccgacgcaatgtacgtgggtagccggcgtccaatgtcggccgccgctggcgagcgcccccggcgcggctgcccaaccaagctctgtccagatctgaccgtctagggcgaggtgaccccctcctggcggcgagcgagacagcccccactccaccccacctcgcaacagccaccggtacagccccctcccctactggtataagcggtttgcatcacctttgactggatctctacttcctccacaaacttgtctagcgtaccttgagtgacctcgtttgaggccttgacagccacctcggtcttgtcagatcagtggagcgcactcaaaactgttggatttattttggaacttaggtgaaggaggaatgggtggagggacgagcaagatggcaacgttctattgaaacaaactgcctcgattattaggctatcattactaaacaaactacctttatcgtcaacctactaacttccatattcttcacattcagctttgcaaaatttacttgactggattttttagcttaacatataactcagggagacatgcgattttgggacgatcaaactgttggtaagtaaatacttgttggcctgttgctcttcttttagctatagctgaccataatttttcttggttgaggaaactgtagttagtgatagctcaatattttgtgtgtagaaacctgtataaagtattggacatgtatttcatagtttttgtaacttataaggctatgtaagtcacagattaactcttcaaagaattatacaacaaagaaattagcgctcagaaatgggatctttgcatttttagtcttgctcattttttattattcatgtatgactcatggttttctagagaaaaatattggaccgttacaataatgctaatatggtgttaatctaggattgctcattttgagtattcttgtacgactcatggttttctagagaaaagatcttggactgtagcactacctccacttgtgagatctggacttctgtagttatatgccatagcaacactgaaagtgacaatgtttgaatggtatagttcttttccttggtcggtgatatatattcacttgatggtatagctctgccaaaagcacaacagctcgtgcttgatccacaaaaaataggatgctcatgtgattgtattttgattttttagttttatttttgttgcatgtataatccaatcgccgagatcgacctctaccgtctcgagccataggacctcccctccctcttcaacatccgcagtcacaacgccaaggggtagttcttcgcccgtgcggtcgaggcggtcccagcaacaggaccaaccacgcacacgccgatggggtactggagatccggacggagtagcattcttgctggcccagggtcagcccacttcttgcgcaagtttgttgttgggaaccaatggaatccgactattcatttttcttgcggatggtcgtgtcggtggggtcaagaaaattctctggaatttggcactgataagatagaaatgcatgttggggctgtacaggccaacgatcgagctcttgtagtcgatgatcttattgccacccgtgtgcagctgtcaaacttatcggagatggacgatgaagcgttggatcaaggagatggaggttggatcaaggagatggaggaggtggccgccacggccaccacttccaggtcgattatgccctttagggccatccagaagggcaagccgttgtcggtgtccttggcatcgagaagaagtccacccctaagctctagaactccagttcatcgactcatgatcatcagaacacggttgcaag

SEQ ID NO: 73585 - DNA, 3558 bp, Zea Mays
cagaaggccaccaagttgatgatcacaagctttgtccacggttcagacggcctgggaaaccaggatttccctccatcagctaccaagcctgtagatcaatcggctgctgccttcctggttgagcaaccaaatctataccctggacaagttaccattgtcgccctcagtccactaaccaaccttgctctgacagtcgagcttgaccctttgttctcgaagaatatatggcagattatttttcttggcggtgtgtattcaattaatggtaatgtgaactatgcagctgaggcaaatgtagatattgtgttcacccgcggtgctgatattttggctatggtactaattgtaacacatcaagtagttttaacccgtaattctgccatatttaagggtcacattatttctgctcaggatgtatgcttcatatactgagataatgcttcttttataacctacttctcattagtcaatggcaatctctactactctataagggtccagtgtgggcgtccacactggtaccgtgcccccgcccccaaaattctcgccccgcctcgctctccgtcgcgccattccagggaccctccatcgccgcccccgccatcatcgcgtcagcgcccgcgctccgtcgatggaaggcgccattccagggacccaccccaaccctgcgatcctcacccttccaaggatgccccgcacccatctcgtccaatccctcctcccgcctcacccgctcacaaggtcgacgacgacgaatctaaggacgccaacgccacccctctctgagctccctatggccactgcgggtgagtgcctctgggtagccggtcacccctctcttgcagcctccgagcttcggcgaacgcagaactggcagggcgcgacggccgacgcaatgtacgtgggtagccggcgtccaatgtcggccgccgctggcgagcgcccccggcgcggctgcccaaccaagctctgtccagatctgaccgtctagggcgaggtgaccccctcctggcggcgagcgagacagcccccactccaccccacctcgcaacagccaccgatcagtggagcgcactcaaaactgttggatttattttggaacttaggtgaaggaggaatgggtggagggacgagcaagatggcaacgttctattgaaacaaactgcctcgattattaggctatcattactaaacaaactacctttatcgtcaacctactaacttccatattcttcacattcagctttgcaaaatttacttgactggattttttagcttaacatataactcagggagacatgcgattttgggacgatcaaactgttggtaagtaaatacttgttggcctgttgctcttcttttagctatagctgaccataatttttcttggttgaggaaactgtagttagtgatagctcaatattttgtgtgtagaaacctgtataaagtattggacatgtatttcatagtttttgtaacttataaggctatgtaagtcacagattaactcttcaaagaattatacaacaaagaaattagcgctcagaaatgggatctttgcatttttagtcttgctcattttttattattcatgtatgactcatggttttctagagaaaaatattggaccgttacaataatgctaatatggtgttaatctaggattgctcattttgagtattcttgtacgactcatggttttctagagaaaagatcttggactgtagcactacctccacttgtgagatctggacttctgtagttatatgccatagcaacactgaaagtgacaatgtttgaatgttttatttttgttgcatgtataatccaatcgccgagatcgacctctaccgtctcgagccataggacctcccctccctcttcaacatccgcagtcacaacgccaaggggtagttcttcgcccgtgcggtcgaggcggtcccagcaacaggaccaaccacgcacacgccgatggggtactggagatccggacggagtagcattcttgctggcccagggtcagcccacttcttgcgcaagtttgttgttgggaaccaatggaatccgactattcatttttcttgcggatggtcgtgtcggtggggtcaagaaaattctctggaatttggcactgataagatagaaatgcatgttggggctgtacaggccaacgatcgagctcttgtagtcgatgatcttattgccacccgtgtgcagctgtcaaacttatcggagatggacgatgaagcgttggatcaaggagatggaggttggatcaaggagatggaggaggtggccgccacggccaccacttccaggtcgattatgccctttagggccatccagaagggcaagccgttgtcggtgtccttggcatcgagaagaagtccacccctaagctctagaactccaggtgctcgccgtggccacaagcgtgtagtcccccgacgcagagaagaggaagggcatgtggcgtagttagagggatctgaaccctagcggtcgtccgcccgtccagatctgtgacccgcccttctcgacgcttcggtgacatgagtgcctggaaatctagggaggcgaaaagagttcagtcatgtcatgcttgatttgagttctgtgccagatcaaagcaagtagtagtacgtgagaagttaaccatgaacagacaccctttttctctttgtgtatcacagattttgaaacttgctgagagggaaaaacaaatttatggggaaaaaatgtgacactgaaagccatttgcttccagcagcttaagaattgttgcggtagatgcaactgaagagggtcttcaagtaagtaaatcaactactacaatggctcactaaaaatggtcgacaggacagtttcggaaccttattgttgttcttcagagagaacatcgacaaaggaacttgaagctccgtaggcgaaaggatctctagaaacgactaactaaattctcctaggtactactctagggaggatgctgaagatgctgtcaaatacattagtggaacaatgcttgacgatcgtccaatccgtgttgatttcgatcggggctttgaagaaggcagacagtggggccgtggacgaagtggtgtacaagctttacaaaccatgatatgtccgtgcgttgtagtagtaagaaagaactaatgttcacagttaaaaagtgtggaatgagaaccgacattaaaataggagaatatatataatgtgggtttcatacatatgttctatgtttcacatctaccaccgaaggccaagtacattttgatatactagcctaaaatgttctgctgatctgatatactagcctaaaatgttccgttgatctgattttttgctacaccctgctgccctctacatttggattgtctgtattttgattttttagttttatttttgttgcatgtataatccaatatgtgattgtatcttttgattcctggaaggatagagtttgcactagaagaggatgctcatgttgttggtgactgtgtaaaagtacctttctgtaattatcattgtctattgtttataaggattaatgttaaa

SEQ ID NO: 73586 - DNA, 3279 bp, Zea Mays
cagaaggccaccaagttgatgatcacaagctttgtccacggttcagacggcctgggaaaccaggatttccctccatcagctaccaagcctgtagatcaatcggctgctgccttcctggttgagcaaccaaatctataccctggacaagttaccattgtcgccctcagtccactaaccaaccttgctctgacagtcgagcttgaccctttgttctcgaagaatatatggcagattatttttcttggcggtgtgtattcaattaatggtaatgtgaactatgcagctgaggcaaatgtagatattgtgttcacccgcggtgctgatattttggctatggtactaattgtaacacatcaagtagttttaacccgtaattctgccatatttaagggtcacattatttctgctcaggatgtatgcttcatatactgagataatgcttcttttataacctacttctcattagtcaatggcaatctctactactctataagggtccagtgtgggcgtccacactggtaccgtgcccccgcccccaaaattctcgccccgcctcgctctccgtcgcgccattccagggaccctccatcgccgcccccgccatcatcgcgtcagcgcccgcgctccgtcgatggaaggcgccattccagggacccaccccaaccctgcgatcctcacccttccaaggatgccccgcacccatctcgtccaatccctcctcccgcctcacccgctcacaaggtcgacgacgacgaatctaaggacgccaacgccacccctctctgagctccctatggccactgcgggtgagtgcctctgggtagccggtcacccctctcttgcagcctccgagcttcggcgaacgcagaactggcagggcgcgacggccgacgcaatgtacgtgggtagccggcgtccaatgtcggccgccgctggcgagcgcccccggcgcggctgcccaaccaagctctgtccagatctgaccgtctagggcgaggtgaccccctcctggcggcgagcgagacagcccccactccaccccacctcgcaacagccaccgatcagtggagcgcactcaaaactgttggatttattttggaacttaggtgaaggaggaatgggtggagggacgagcaagatggcaacgttctattgaaacaaactgcctcgattattaggctatcattactaaacaaactacctttatcgtcaacctactaacttccatattcttcacattcagctttgcaaaatttacttgactggattttttagcttaacatataactcagggagacatgcgattttgggacgatcaaactgttggtaagtaaatacttgttggcctgttgctcttcttttagctatagctgaccataatttttcttggttgaggaaactgtagttagtgatagctcaatattttgtgtgtagaaacctgtataaagtattggacatgtatttcatagtttttgtaacttataaggctatgtaagtcacagattaactcttcaaagaattatacaacaaagaaattagcgctcagaaatgggatctttgcatttttagtcttgctcattttttattattcatgtatgactcatggttttctagagaaaaatattggaccgttacaataatgctaatatggtgttaatctaggattgctcattttgagtattcttgtacgactcatggttttctagagaaaagatcttggactgtagcactacctccacttgtgagatctggacttctgtagttatatgccatagcaacactgaaagtgacaatgtttgaatggtatagttcttttccttggtcggtgatatatattcacttgatggtatagctctgccaaaagcacaacagctcgtgcttgatccacaaaaaataggatgctcatgtgattgtattttgattttttagttttatttttgttgcatgtataatccaatcgccgagatcgacctctaccgtctcgagccataggacctcccctccctcttcaacatccgcagtcacaacgccaaggggtagttcttcgcccgtgcggtcgaggcggtcccagcaacaggaccaaccacgcacacgccgatggggtactggagatccggacggagtagcattcttgctggagatggacgatgaagcgttggatcaaggagatggaggttggatcaaggagatggaggaggtggccgccacggccaccacttccaggtcgattatgccctttagggccatccagaagggcaagccgttgtcggtgtccttggcatcgagaagaagtccacccctaagctctagaactccaggtgctcgccgtggccacaagcgtgtagtcccccgacgcagagaagaggaagggcatgtggcgtagttagagggatctgaaccctagcggtcgtccgcccgtccagatctgtgacccgcccttctcgacgcttcggtgacatgagtgcctggaaatctagggaggcgaaaagattttgaaacttgctgagagggaaaaacaaatttatggggaaaaaatgtgacactgaaagccatttgcttccagcagcttaagaattgttgcggtagatgcaactgaagagggtcttcaagtaagtaaatcaactactacaatggctcactaaaaatggtcgacaggacagtttcggaaccttattgttgttcttcaggtactactctagggaggatgctgaagatgctgtcaaatacattagtggaacaatgcttgacgatcgtccaatccgtgttgatttcgatcggggctttgaagaaggcagacagtggggccgtggacgaagtggtgtacaagctttacaaaccatgatatgtccgtgcgttgtagtagtaagaaagaactaatgttcacagttaaaaagtgtggaatgagaaccgacattaaaataggagaatatatataatgtgggtttcatacatatgttctatgtttcacatctaccaccgaaggccaagtacattttgatatactagcctaaaatgttctgctgatctgatatactagcctaaaatgttccgttgatctgattttttgctacaccctgctgccctctacatttggattgtctgtattttgattttttagttttatttttgttgcatgtataatccaatatgtgattgtatcttttgattcctggaaggatagagtttgcactagaagaggatgctcatgttgttggtgactgtgtaaaagtacctttctgtaattatcattgtctattgtttataaggattaatgttaaa

SEQ ID NO: 73587 - DNA, 3081 bp, Zea Mays
cagaaggccaccaagttgatgatcacaagctttgtccacggttcagacggcctgggaaaccaggatttccctccatcagctaccaagcctgtagatcaatcggctgctgccttcctggttgagcaaccaaatctataccctggacaagttaccattgtcgccctcagtccactaaccaaccttgctctgacagtcgagcttgaccctttgttctcgaagaatatatggcagattatttttcttggcggtgtgtattcaattaatggtaatgtgaactatgcagctgaggcaaatgtagatattgtgttcacccgcggtgctgatattttggctatggtactaattgtaacacatcaagtagttttaacccgtaattctgccatatttaagggtcacattatttctgctcaggatgtatgcttcatatactgagataatgcttcttttataacctacttctcattagtcaatggcaatctctactactctataagggtccagtgtgggcgtccacactggtaccgtgcccccgcccccaaaattctcgccccgcctcgctctccgtcgcgccattccagggaccctccatcgccgcccccgccatcatcgcgtcagcgcccgcgctccgtcgatggaaggcgccattccagggacccaccccaaccctgcgatcctcacccttccaaggatgccccgcacccatctcgtccaatccctcctcccgcctcacccgctcacaaggtcgacgacgacgaatctaaggacgccaacgccacccctctctgagctccctatggccactgcgggtgagtgcctctgggtagccggtcacccctctcttgcagcctccgagcttcggcgaacgcagaactggcagggcgcgacggccgacgcaatgtacgtgggtagccggcgtccaatgtcggccgccgctggcgagcgcccccggcgcggctgcccaaccaagctctgtccagatctgaccgtctagggcgaggtgaccccctcctggcggcgagcgagacagcccccactccaccccacctcgcaacagccaccgatcagtggagcgcactcaaaactgttggatttattttggaacttaggtgaaggaggaatgggtggagggacgagcaagatggcaacgttctattgaaacaaactgcctcgattattaggctatcattactaaacaaactacctttatcgtcaacctactaacttccatattcttcacattcagctttgcaaaatttacttgactggattttttagcttaacatataactcagggagacatgcgattttgggacgatcaaactgttgttttatttttgttgcatgtataatccaatcgccgagatcgacctctaccgtctcgagccataggacctcccctccctcttcaacatccgcagtcacaacgccaaggggtagttcttcgcccgtgcggtcgaggcggtcccagcaacaggaccaaccacgcacacgccgatggggtactggagatccggacggagtagcattcttgctggcccagggtcagcccacttcttgcgcaagtttgttgttgggaaccaatggaatccgactattcatttttcttgcggatggtcgtgtcggtggggtcaagaaaattctctggaatttggcactgataagatagaaatgcatgttggggctgtacaggccaacgatcgagctcttgtagtcgatgatcttattgccacccgtgtgcagctgtcaaacttatcggagatggacgatgaagcgttggatcaaggagatggaggttggatcaaggagatggaggaggtggccgccacggccaccacttccaggtcgattatgccctttagggccatccagaagggcaagccgttgtcggtgtccttggcatcgagaagaagtccacccctaagctctagaactccaggtgctcgccgtggccacaagcgtgtagtcccccgacgcagagaagaggaagggcatgtggcgtagttagagggatctgaaccctagcggtcgtccgcccgtccagatctgtgacccgcccttctcgacgcttcggtgacatgagtgcctggaaatctagggaggcgaaaagagttcagtcatgtcatgcttgatttgagttctgtgccagatcaaagcaagtagtagtacgtgagaagttaaccatgaacagacaccctttttctctttgtgtatcacagattttgaaacttgctgagagggaaaaacaaatttatggggaaaaaatgtgacactgaaagccatttgcttccagcagcttaagaattgttgcggtagatgcaactgaagagggtcttcaagtaagtaaatcaactactacaatggctcactaaaaatggtcgacaggacagtttcggaaccttattgttgttcttcagagagaacatcgacaaaggaacttgaagctccgtaggcgaaaggatctctagaaacgactaactaaattctcctaggtactactctagggaggatgctgaagatgctgtcaaatacattagtggaacaatgcttgacgatcgtccaatccgtgttgatttcgatcggggctttgaagaaggcagacagtggggccgtggacgaagtggtgtacaagctttacaaaccatgatatgtccgtgcgttgtagtagtaagaaagaactaatgttcacagttaaaaagtgtggaatgagaaccgacattaaaataggagaatatatataatgtgggtttcatacatatgttctatgtttcacatctaccaccgaaggccaagtacattttgatatactagcctaaaatgttctgctgatctgatatactagcctaaaatgttccgttgatctgattttttgctacaccctgctgccctctacatttggattgtctgtattttgattttttagttttatttttgttgcatgtataatccaatatgtgattgtatcttttgattcctggaaggatagagtttgcactagaagaggatgctcatgttgttggtgactgtgtaaaagtacctttctgtaattatcattgtctattgtttataaggattaatgttaaa

SEQ ID NO: 73588 - DNA, 3275 bp, Zea Mays
cagaaggccaccaagttgatgatcacaagctttgtccacggttcagacggcctgggaaaccaggatttccctccatcagctaccaagcctgtagatcaatcggctgctgccttcctggttgagcaaccaaatctataccctggacaagttaccattgtcgccctcagtccactaaccaaccttgctctgacagtcgagcttgaccctttgttctcgaagaatatatggcagattatttttcttggcggtgtgtattcaattaatggtaatgtgaactatgcagctgaggcaaatgtagatattgtgttcacccgcggtgctgatattttggctatggtactaattgtaacacatcaagtagttttaacccgtaattctgccatatttaagggtcacattatttctgctcaggatgtatgcttcatatactgagataatgcttcttttataacctacttctcattagtcaatggcaatctctactactctataagggtccagtgtgggcgtccacactggtaccgtgcccccgcccccaaaattctcgccccgcctcgctctccgtcgcgccattccagggaccctccatcgccgcccccgccatcatcgcgtcagcgcccgcgctccgtcgatggaaggcgccattccagggacccaccccaaccctgcgatcctcacccttccaaggatgccccgcacccatctcgtccaatccctcctcccgcctcacccgctcacaaggtcgacgacgacgaatctaaggacgccaacgccacccctctctgagctccctatggccactgcggatcagtggagcgcactcaaaactgttggatttattttggaacttaggtgaaggaggaatgggtggagggacgagcaagatggcaacgttctattgaaacaaactgcctcgattattaggctatcattactaaacaaactacctttatcgtcaacctactaacttccatattcttcacattcagctttgcaaaatttacttgactggattttttagcttaacatataactcagggagacatgcgattttgggacgatcaaactgttggtaagtaaatacttgttggcctgttgctcttcttttagctatagctgaccataatttttcttggttgaggaaactgtagttagtgatagctcaatattttgtgtgtagaaacctgtataaagtattggacatgtatttcatagtttttgtaacttataaggctatgtaagtcacagattaactcttcaaagaattatacaacaaagaaattagcgctcagaaatgggatctttgcatttttagtcttgctcattttttattattcatgtatgactcatggttttctagagaaaaatattggaccgttacaataatgctaatatggtgttaatctaggattgctcattttgagtattcttgtacgactcatggttttctagagaaaagatcttggactgtagcactacctccacttgtgagatctggacttctgtagttatatgccatagcaacactgaaagtgacaatgtttgaatggtatagttcttttccttggtcggtgatatatattcacttgatggtatagctctgccaaaagcacaacagctcgtgcttgatccacaaaaaataggatgctcatgtgattgtattttgattttttagttttatttttgttgcatgtataatccaatcgccgagatcgacctctaccgtctcgagccataggacctcccctccctcttcaacatccgcagtcacaacgccaaggggtagttcttcgcccgtgcggtcgaggcggtcccagcaacaggaccaaccacgcacacgccgatggggtactggagatccggacggagtagcattcttgctggccaacgatcgagctcttgtagtcgatgatcttattgccacccgtgtgcagctgtcaaacttatcggagatggacgatgaagcgttggatcaaggagatggaggttggatcaaggagatggaggaggtggccgccacggccaccacttccaggtcgattatgccctttagggccatccagaagggcaagccgttgtcggtgtccttggcatcgagaagaagtccacccctaagctctagaactccaggtgctcgccgtggccacaagcgtgtagtcccccgacgcagagaagaggaagggcatgtggcgtagttagagggatctgaaccctagcggtcgtccgcccgtccagatctgtgacccgcccttctcgacgcttcggtgacatgagtgcctggaaatctagggaggcgaaaagagttcagtcatgtcatgcttgatttgagttctgtgccagatcaaagcaagtagtagtacgtgagaagttaaccatgaacagacaccctttttctctttgtgtatcacagattttgaaacttgctgagagggaaaaacaaatttatggggaaaaaatgtgacactgaaagccatttgcttccagcagcttaagaattgttgcggtagatgcaactgaagagggtcttcaagtaagtaaatcaactactacaatggctcactaaaaatggtcgacaggacagtttcggaaccttattgttgttcttcagagagaacatcgacaaaggaacttgaagctccgtaggcgaaaggatctctagaaacgactaactaaattctcctaggtactactctagggaggatgctgaagatgctgtcaaatacattagtggaacaatgcttgacgatcgtccaatccgtgttgatttcgatcggggctttgaagaaggcagacagtggggccgtggacgaagtggtgtacaagctttacaaaccatgatatgtccgtgcgttgtagtagtaagaaagaactaatgttcacagttaaaaagtgtggaatgagaaccgacattaaaataggagaatatatataatgtgggtttcatacatatgttctatgtttcacatctaccaccgaaggccaagtacattttgatatactagcctaaaatgttctgctgatctgatatactagcctaaaatgttccgttgatctgattttttgctacaccctgctgccctctacatttggattgtctgtattttgattttttagttttatttttgttgcatgtataatccaatatgtgattgtatcttttgattcctggaaggatagagtttgcactagaagaggatgctcatgttgttggtgactgtgtaaaagtacctttctgtaattatcattgtctattgtttataaggattaatgttaaa

SEQ ID NO: 73589 - DNA, 3534 bp, Zea Mays
cagaaggccaccaagttgatgatcacaagctttgtccacggttcagacggcctgggaaaccaggatttccctccatcagctaccaagcctgtagatcaatcggctgctgccttcctggttgagcaaccaaatctataccctggacaagttaccattgtcgccctcagtccactaaccaaccttgctctgacagtcgagcttgaccctttgttctcgaagaatatatggcagattatttttcttggcggtgtgtattcaattaatggtaatgtgaactatgcagctgaggcaaatgtagatattgtgttcacccgcggtgctgatattttggctatggtactaattgtaacacatcaagtagttttaacccgtaattctgccatatttaagggtcacattatttctgctcaggatgtatgcttcatatactgagataatgcttcttttataacctacttctcattagtcaatggcaatctctactactctataagggtccagtgtgggcgtccacactggtaccgtgcccccgcccccaaaattctcgccccgcctcgctctccgtcgcgccattccagggaccctccatcgccgcccccgccatcatcgcgtcagcgcccgcgctccgtcgatggaaggcgccattccagggacccaccccaaccctgcgatcctcacccttccaaggatgccccgcacccatctcgtccaatccctcctcccgcctcacccgctcacaaggtcgacgacgacgaatctaaggacgccaacgccacccctctctgagctccctatggccactgcgggtgagtgcctctgggtagccggtcacccctctcttgcagcctccgagcttcggcgaacgcagaactggcagggcgcgacggccgacgcaatgtacgtgggtagccggcgtccaatgtcggccgccgctggcgagcgcccccggcgcggctgcccaaccaagctctgtccagatctgaccgtctagggcgaggtgaccccctcctggcggcgagcgagacagcccccactccaccccacctcgcaacagccaccgatcagtggagcgcactcaaaactgttggatttattttggaacttaggtgaaggaggaatgggtggagggacgagcaagatggcaacgttctattgaaacaaactgcctcgattattaggctatcattactaaacaaactacctttatcgtcaacctactaacttccatattcttcacattcagctttgcaaaatttacttgactggattttttagcttaacatataactcagggagacatgcgattttgggacgatcaaactgttggtaagtaaatacttgttggcctgttgctcttcttttagctatagctgaccataatttttcttggttgaggaaactgtagttagtgatagctcaatattttgtgtgtagaaacctgtataaagtattggacatgtatttcatagtttttgtaacttataaggctatgtaagtcacagattaactcttcaaagaattatacaacaaagaaattagcgctcagaaatgggatctttgcatttttagtcttgctcattttttattattcatgtatgactcatggttttctagagaaaaatattggaccgttacaataatgctaatatggtgttaatctaggattgctcattttgagtattcttgtacgactcatggttttctagagaaaagatcttggactgtagcactacctccacttgtgagatctggacttctgtagttatatgccatagcaacactgaaagtgacaatgtttgaatggtatagttcttttccttggtcggtgatatatattcacttgatggtatagctctgccaaaagcacaacagctcgtgcttgatccacaaaaaataggatgctcatgtgattgtattttgattttttagttttatttttgttgcatgtataatccaatcgccgagatcgacctctaccgtctcgagccataggacctcccctccctcttcaacatccgcagtcacaacgccaaggggtagttcttcgcccgtgcggtcgaggcggtcccagcaacaggaccaaccacgcacacgccgatggggtactggagatccggacggagtagcattcttgctggccaacgatcgagctcttgtagtcgatgatcttattgccacccgtgtgcagctgtcaaacttatcggagatggacgatgaagcgttggatcaaggagatggaggttggatcaaggagatggaggaggtggccgccacggccaccacttccaggtcgattatgccctttagggccatccagaagggcaagccgttgtcggtgtccttggcatcgagaagaagtccacccctaagctctagaactccaggtgctcgccgtggccacaagcgtgtagtcccccgacgcagagaagaggaagggcatgtggcgtagttagagggatctgaaccctagcggtcgtccgcccgtccagatctgtgacccgcccttctcgacgcttcggtgacatgagtgcctggaaatctagggaggcgaaaaggtcagagttcagtcatgtcatgcttgatttgagttctgtgccagatcaaagcaagtagtagtacgtgagaagttaaccatgaacagacaccctttttctctttgtgtatcacagattttgaaacttgctgagagggaaaaacaaatttatggggaaaaaatgtgacactgaaagccatttgcttccagcagcttaagaattgttgcggtagatgcaactgaagagggtcttcaagtaagtaaatcaactactacaatggctcactaaaaatggtcgacaggacagtttcggaaccttattgttgttcttcagagagaacatcgacaaaggaacttgaagctccgtaggcgaaaggatctctagaaacgactaactaaattctcctaggtactactctagggaggatgctgaagatgctgtcaaatacattagtggaacaatgcttgacgatcgtccaatccgtgttgatttcgatcggggctttgaagaaggcagacagtggggccgtggacgaagtggtgtacaagctttacaaaccatgatatgtccgtgcgttgtagtagtaagaaagaactaatgttcacagttaaaaagtgtggaatgagaaccgacattaaaataggagaatatatataatgtgggtttcatacatatgttctatgtttcacatctaccaccgaaggccaagtacattttgatatactagcctaaaatgttctgctgatctgatatactagcctaaaatgttccgttgatctgattttttgctacaccctgctgccctctacatttggattgtctgtattttgattttttagttttatttttgttgcatgtataatccaatatgtgattgtatcttttgattcctggaaggatagagtttgcactagaagaggatgctcatgttgttggtgactgtgtaaaagtacctttctgtaattatcattgtctattgtttataaggattaatgttaaa

SEQ ID NO: 73590 - DNA, 3086 bp, Zea Mays
cagaaggccaccaagttgatgatcacaagctttgtccacggttcagacggcctgggaaaccaggatttccctccatcagctaccaagcctgtagatcaatcggctgctgccttcctggttgagcaaccaaatctataccctggacaagttaccattgtcgccctcagtccactaaccaaccttgctctgacagtcgagcttgaccctttgttctcgaagaatatatggcagattatttttcttggcggtgtgtattcaattaatggtaatgtgaactatgcagctgaggcaaatgtagatattgtgttcacccgcggtgctgatattttggctatggtactaattgtaacacatcaagtagttttaacccgtaattctgccatatttaagggtcacattatttctgctcaggatgtatgcttcatatactgagataatgcttcttttataacctacttctcattagtcaatggcaatctctactactctataagggtccagtgtgggcgtccacactggtaccgtgcccccgcccccaaaattctcgccccgcctcgctctccgtcgcgccattccagggaccctccatcgccgcccccgccatcatcgcgtcagcgcccgcgctccgtcgatggaaggcgccattccagggacccaccccaaccctgcgatcctcacccttccaaggatgccccgcacccatctcgtccaatccctcctcccgcctcacccgctcacaaggtcgacgacgacgaatctaaggacgccaacgccacccctctctgagctccctatggccactgcgggtgagtgcctctgggtagccggtcacccctctcttgcagcctccgagcttcggcgaacgcagaactggcagggcgcgacggccgacgcaatgtacgtgggtagccggcgtccaatgtcggccgccgctggcgagcgcccccggcgcggctgcccaaccaagctctgtccagatctgaccgtctagggcgaggtgaccccctcctggcggcgagcgagacagcccccactccaccccacctcgcaacagccaccgatcagtggagcgcactcaaaactgttggatttattttggaacttaggtgaaggaggaatgggtggagggacgagcaagatggcaacgttctattgaaacaaactgcctcgattattaggctatcattactaaacaaactacctttatcgtcaacctactaacttccatattcttcacattcagctttgcaaaatttacttgactggattttttagcttaacatataactcagggagacatgcgattttgggacgatcaaactgttgttttatttttgttgcatgtataatccaatcgccgagatcgacctctaccgtctcgagccataggacctcccctccctcttcaacatccgcagtcacaacgccaaggggtagttcttcgcccgtgcggtcgaggcggtcccagcaacaggaccaaccacgcacacgccgatggggtactggagatccggacggagtagcattcttgctggcccagggtcagcccacttcttgcgcaagtttgttgttgggaaccaatggaatccgactattcatttttcttgcggatggtcgtgtcggtggggtcaagaaaattctctggaatttggcactgataagatagaaatgcatgttggggctgtacaggccaacgatcgagctcttgtagtcgatgatcttattgccacccgtgtgcagctgtcaaacttatcggagatggacgatgaagcgttggatcaaggagatggaggttggatcaaggagatggaggaggtggccgccacggccaccacttccaggtcgattatgccctttagggccatccagaagggcaagccgttgtcggtgtccttggcatcgagaagaagtccacccctaagctctagaactccaggtgctcgccgtggccacaagcgtgtagtcccccgacgcagagaagaggaagggcatgtggcgtagttagagggatctgaaccctagcggtcgtccgcccgtccagatctgtgacccgcccttctcgacgcttcggtgacatgagtgcctggaaatctagggaggcgaaaaggtcagagttcagtcatgtcatgcttgatttgagttctgtgccagatcaaagcaagtagtagtacgtgagaagttaaccatgaacagacaccctttttctctttgtgtatcacagattttgaaacttgctgagagggaaaaacaaatttatggggaaaaaatgtgacactgaaagccatttgcttccagcagcttaagaattgttgcggtagatgcaactgaagagggtcttcaagtaagtaaatcaactactacaatggctcactaaaaatggtcgacaggacagtttcggaaccttattgttgttcttcagagagaacatcgacaaaggaacttgaagctccgtaggcgaaaggatctctagaaacgactaactaaattctcctaggtactactctagggaggatgctgaagatgctgtcaaatacattagtggaacaatgcttgacgatcgtccaatccgtgttgatttcgatcggggctttgaagaaggcagacagtggggccgtggacgaagtggtgtacaagctttacaaaccatgatatgtccgtgcgttgtagtagtaagaaagaactaatgttcacagttaaaaagtgtggaatgagaaccgacattaaaataggagaatatatataatgtgggtttcatacatatgttctatgtttcacatctaccaccgaaggccaagtacattttgatatactagcctaaaatgttctgctgatctgatatactagcctaaaatgttccgttgatctgattttttgctacaccctgctgccctctacatttggattgtctgtattttgattttttagttttatttttgttgcatgtataatccaatatgtgattgtatcttttgattcctggaaggatagagtttgcactagaagaggatgctcatgttgttggtgactgtgtaaaagtacctttctgtaattatcattgtctattgtttataaggattaatgttaaa

SEQ ID NO: 73591 - DNA, 2658 bp, Zea Mays
cagaaggccaccaagttgatgatcacaagctttgtccacggttcagacggcctgggaaaccaggatttccctccatcagctaccaagcctgtagatcaatcggctgctgccttcctggttgagcaaccaaatctataccctggacaagttaccattgtcgccctcagtccactaaccaaccttgctctgacagtcgagcttgaccctttgttctcgaagaatatatggcagattatttttcttggcggtgtgtattcaattaatggtaatgtgaactatgcagctgaggcaaatgtagatattgtgttcacccgcggtgctgatattttggctatggtactaattgtaacacatcaagtagttttaacccgtaattctgccatatttaagggtcacattatttctgctcaggatgtatgcttcatatactgagataatgcttcttttataacctacttctcattagtcaatggcaatctctactactctataagggtccagtgtgggcgtccacactggtaccgtgcccccgcccccaaaattctcgccccgcctcgctctccgtcgcgccattccagggaccctccatcgccgcccccgccatcatcgcgtcagcgcccgcgctccgtcgatggaaggcgccattccagggacccaccccaaccctgcgatcctcacccttccaaggatgccccgcacccatctcgtccaatccctcctcccgcctcacccgctcacaaggtcgacgacgacgaatctaaggacgccaacgccacccctctctgagctccctatggccactgcgggtgagtgcctctgggtagccggtcacccctctcttgcagcctccgagcttcggcgaacgcagaactggcagggcgcgacggccgacgcaatgtacgtgggtagccggcgtccaatgtcggccgccgctggcgagcgcccccggcgcggctgcccaaccaagctctgtccagatctgaccgtctagggcgaggtgaccccctcctggcggcgagcgagacagcccccactccaccccacctcgcaacagccaccgatcagtggagcgcactcaaaactgttggatttattttggaacttaggtgaaggaggaatgggtggagggacgagcaagatggcaacgttctattgaaacaaactgcctcgattattaggctatcattactaaacaaactacctttatcgtcaacctactaacttccatattcttcacattcagctttgcaaaatttacttgactggattttttagcttaacatataactcagggagacatgcgattttgggacgatcaaactgttgatcgacctctaccgtctcgagccataggacctcccctccctcttcaacatccgcagtcacaacgccaaggggtagttcttcgcccgtgcggtcgaggcggtcccagcaacaggaccaaccacgcacacgccgatggggtactggagatccggacggagtagcattcttgctggccaacgatcgagctcttgtagtcgatgatcttattgccacccgtgtgcagctgtcaaacttatcggagatggacgatgaagcgttggatcaaggagatggaggttggatcaaggagatggaggaggtggccgccacggccaccacttccaggtcgattatgccctttagggccatccagaagggcaagccgttgtcggtgtccttggcatcgagaagaagtccacccctaagctctagaactccaggtgctcgccgtggccacaagcgtgtagtcccccgacgcagagaagaggaagggcatgtggcgtagttagagggatctgaaccctagcggtcgtccgcccgtccagatctgtgacccgcccttctcgacgcttcggtgacatgagtgcctggaaatctagggaggcgaaaaggtcagagttcagtcatgtcatgcttgatttgagttctgtgccagatcaaagcaagtagtagtacgtgagaagttaaccatgaacagacaccctttttctctttgtgtatcacagattttgaaacttgctgagagggaaaaacaaatttatggggaaaaaatgtgacactgaaagccatttgcttccagcagcttaagaattgttgcggtagatgcaactgaagagggtcttcaagtaagtaaatcaactactacaatggctcactaaaaatggtcgacaggacagtttcggaaccttattgttgttcttcagagagaacatcgacaaaggaacttgaagctccgtaggcgaaaggatctctagaaacgactaactaaattctcctaggtactactctagggaggatgctgaagatgctgtcaaatacattagtggaacaatgcttgacgatcgtccaatccgtgttgatttcgatcggggctttgaagaaggcagacagtggggccgtggacgaagtggtgtacaagctttacaaaccatgatatatgcagacaagactgaattagttcctacttctccccatcaattagaaatggggactatagaagatgtccgaacagagcctgatgtctcacaggaacaaacaactaaagaaaatggaagccagacaacctttagctatgaacgattgatatcaaagtccactgaccctgttagtgggatagacaacaagcacagagag

SEQ ID NO: 73592 - DNA, 3309 bp, Zea Mays
cagaaggccaccaagttgatgatcacaagctttgtccacggttcagacggcctgggaaaccaggatttccctccatcagctaccaagcctgtagatcaatcggctgctgccttcctggttgagcaaccaaatctataccctggacaagttaccattgtcgccctcagtccactaaccaaccttgctctgacagtcgagcttgaccctttgttctcgaagaatatatggcagattatttttcttggcggtgtgtattcaattaatggtaatgtgaactatgcagctgaggcaaatgtagatattgtgttcacccgcggtgctgatattttggctatggtactaattgtaacacatcaagtagttttaacccgtaattctgccatatttaagggtcacattatttctgctcaggatgtatgcttcatatactgagataatgcttcttttataacctacttctcattagtcaatggcaatctctactactctataagggtccagtgtgggcgtccacactggtaccgtgcccccgcccccaaaattctcgccccgcctcgctctccgtcgcgccattccagggaccctccatcgccgcccccgccatcatcgcgtcagcgcccgcgctccgtcgatggaaggcgccattccagggacccaccccaaccctgcgatcctcacccttccaaggatgccccgcacccatctcgtccaatccctcctcccgcctcacccgctcacaaggtcgacgacgacgaatctaaggacgccaacgccacccctctctgagctccctatggccactgcgggtgagtgcctctgggtagccggtcacccctctcttgcagcctccgagcttcggcgaacgcagaactggcagggcgcgacggccgacgcaatgtacgtgggtagccggcgtccaatgtcggccgccgctggcgagcgcccccggcgcggctgcccaaccaagctctgtccagatctgaccgtctagggcgaggtgaccccctcctggcggcgagcgagacagcccccactccaccccacctcgcaacagccaccgatcagtggagcgcactcaaaactgttggatttattttggaacttaggtgaaggaggaatgggtggagggacgagcaagatggcaacgttctattgaaacaaactgcctcgattattaggctatcattactaaacaaactacctttatcgtcaacctactaacttccatattcttcacattcagctttgcaaaatttacttgactggattttttagcttaacatataactcagggagacatgcgattttgggacgatcaaactgttggtaagtaaatacttgttggcctgttgctcttcttttagctatagctgaccataatttttcttggttgaggaaactgtagttagtgatagctcaatattttgtgtgtagaaacctgtataaagtattggacatgtatttcatagtttttgtaacttataaggctatgtaagtcacagattaactcttcaaagaattatacaacaaagaaattagcgctcagaaatgggatctttgcatttttagtcttgctcattttttattattcatgtatgactcatggttttctagagaaaaatattggaccgttacaataatgctaatatggtgttaatctaggattgctcattttgagtattcttgtacgactcatggttttctagagaaaagatcttggactgtagcactacctccacttgtgagatctggacttctgtagttatatgccatagcaacactgaaagtgacaatgtttgaatggtatagttcttttccttggtcggtgatatatattcacttgatggtatagctctgccaaaagcacaacagctcgtgcttgatccacaaaaaataggatgctcatgtgattgtattttgattttttagttttatttttgttgcatgtataatccaatcgccgagatcgacctctaccgtctcgagccataggacctcccctccctcttcaacatccgcagtcacaacgccaaggggtagttcttcgcccgtgcggtcgaggcggtcccagcaacaggaccaaccacgcacacgccgatggggtactggagatccggacggagtagcattcttgctggccaacgatcgagctcttgtagtcgatgatcttattgccacccgtgtgcagctgtcaaacttatcggagatggacgatgaagcgttggatcaaggagatggaggttggatcaaggagatggaggaggtggccgccacggccaccacttccaggtcgattatgccctttagggccatccagaagggcaagccgttgtcggtgtccttggcatcgagaagaagtccacccctaagctctagaactccaggtgctcgccgtggccacaagcgtgtagtcccccgacgcagagaagaggaagggcatgtggcgtagttagagggatctgaaccctagcggtcgtccgcccgtccagatctgtgacccgcccttctcgacgcttcggtgacatgagtgcctggaaatctagggaggcgaaaagagttcagtcatgtcatgcttgatttgagttctgtgccagatcaaagcaagtagtagtacgtgagaagttaaccatgaacagacaccctttttctctttgtgtatcacagattttgaaacttgctgagagggaaaaacaaatttatggggaaaaaatgtgacactgaaagccatttgcttccagcagcttaagaattgttgcggtagatgcaactgaagagggtcttcaagtaagtaaatcaactactacaatggctcactaaaaatggtcgacaggacagtttcggaaccttattgttgttcttcagagagaacatcgacaaaggaacttgaagctccgtaggcgaaaggatctctagaaacgactaactaaattctcctaggtactactctagggaggatgctgaagatgctgtcaaatacattagtggaacaatgcttgacgatcgtccaatccgtgttgatttcgatcggggctttgaagaaggcagacagtggggccgtggacgaagtggtgtacaagctttacaaaccatgatatgtccgtgcgttgtagtaatgcagacaagactgaattagttcctacttctccccatcaattagaaatggggactatagaagatgtccgaacagagcctgatgtctcacaggaacaaacaactaaagaaaatggaagccagacaacctttagctatgaacgattgatatcaaagtccactgaccctgttagtgggatagacaacaagcacagagag

SEQ ID NO: 73593 - DNA, 3452 bp, Zea Mays
cagaaggccaccaagttgatgatcacaagctttgtccacggttcagacggcctgggaaaccaggatttccctccatcagctaccaagcctgtagatcaatcggctgctgccttcctggttgagcaaccaaatctataccctggacaagttaccattgtcgccctcagtccactaaccaaccttgctctgacagtcgagcttgaccctttgttctcgaagaatatatggcagattatttttcttggcggtgtgtattcaattaatggtaatgtgaactatgcagctgaggcaaatgtagatattgtgttcacccgcggtgctgatattttggctatggtactaattgtaacacatcaagtagttttaacccgtaattctgccatatttaagggtcacattatttctgctcaggatgtatgcttcatatactgagataatgcttcttttataacctacttctcattagtcaatggcaatctctactactctataagggtccagtgtgggcgtccacactggtaccgtgcccccgcccccaaaattctcgccccgcctcgctctccgtcgcgccattccagggaccctccatcgccgcccccgccatcatcgcgtcagcgcccgcgctccgtcgatggaaggcgccattccagggacccaccccaaccctgcgatcctcacccttccaaggatgccccgcacccatctcgtccaatccctcctcccgcctcacccgctcacaaggtcgacgacgacgaatctaaggacgccaacgccacccctctctgagctccctatggccactgcgggtgagtgcctctgggtagccggtcacccctctcttgcagcctccgagcttcggcgaacgcagaactggcagggcgcgacggccgacgcaatgtacgtgggtagccggcgtccaatgtcggccgccgctggcgagcgcccccggcgcggctgcccaaccaagctctgtccagatctgaccgtctagggcgaggtgaccccctcctggcggcgagcgagacagcccccactccaccccacctcgcaacagccaccgatcagtggagcgcactcaaaactgttggatttattttggaacttaggtgaaggaggaatgggtggagggacgagcaagatggcaacgttctattgaaacaaactgcctcgattattaggctatcattactaaacaaactacctttatcgtcaacctactaacttccatattcttcacattcagctttgcaaaatttacttgactggattttttagcttaacatataactcagggagacatgcgattttgggacgatcaaactgttggtaagtaaatacttgttggcctgttgctcttcttttagctatagctgaccataatttttcttggttgaggaaactgtagttagtgatagctcaatattttgtgtgtagaaacctgtataaagtattggacatgtatttcatagtttttgtaacttataaggctatgtaagtcacagattaactcttcaaagaattatacaacaaagaaattagcgctcagaaatgggatctttgcatttttagtcttgctcattttttattattcatgtatgactcatggttttctagagaaaaatattggaccgttacaataatgctaatatggtgttaatctaggattgctcattttgagtattcttgtacgactcatggttttctagagaaaagatcttggactgtagcactacctccacttgtgagatctggacttctgtagttatatgccatagcaacactgaaagtgacaatgtttgaatggtatagttcttttccttggtcggtgatatatattcacttgatggtatagctctgccaaaagcacaacagctcgtgcttgatccacaaaaaataggatgctcatgtgattgtattttgattttttagttttatttttgttgcatgtataatccaatcgccgagatcgacctctaccgtctcgagccataggacctcccctccctcttcaacatccgcagtcacaacgccaaggggtagttcttcgcccgtgcggtcgaggcggtcccagcaacaggaccaaccacgcacacgccgatggggtactggagatccggacggagtagcattcttgctggcccagggtcagcccacttcttgcgcaagtttgttgttgggaaccaatggaatccgactattcatttttcttgcggatggtcgtgtcggtggggtcaagaaaattctctggaatttggcactgataagatagaaatgcatgttggggctgtacaggccaacgatcgagctcttgtagtcgatgatcttattgccacccgtgtgcagctgtcaaacttatcggagatggacgatgaagcgttggatcaaggagatggaggttggatcaaggagatggaggaggtggccgccacggccaccacttccaggtcgattatgccctttagggccatccagaagggcaagccgttgtcggtgtccttggcatcgagaagaagtccacccctaagctctagaactccaggtgctcgccgtggccacaagcgtgtagtcccccgacgcagagaagaggaagggcatgtggcgtagttagagggatctgaaccctagcggtcgtccgcccgtccagatctgtgacccgcccttctcgacgcttcggtgacatgagtgcctggaaatctagggaggcgaaaaggtcagagttcagtcatgtcatgcttgatttgagttctgtgccagatcaaagcaagtagtagtacgtgagaagttaaccatgaacagacaccctttttctctttgtgtatcacagattttgaaacttgctgagagggaaaaacaaatttatggggaaaaaatgtgacactgaaagccatttgcttccagcagcttaagaattgttgcggtagatgcaactgaagagggtcttcaagtaagtaaatcaactactacaatggctcactaaaaatggtcgacaggacagtttcggaaccttattgttgttcttcagagagaacatcgacaaaggaacttgaagctccgtaggcgaaaggatctctagaaacgactaactaaattctcctaggtactactctagggaggatgctgaagatgctgtcaaatacattagtggaacaatgcttgacgatcgtccaatccgtgttgatttcgatcggggctttgaagaaggcagacagtggggccgtggacgaagtggtgtacaagctttacaaaccatgatatatgcagacaagactgaattagttcctacttctccccatcaattagaaatggggactatagaagatgtccgaacagagcctgatgtctcacaggaacaaacaactaaagaaaatggaagccagacaacctttagctatgaacgattgatatcaaagtccactgaccctgttagtgggatagacaacaagcacagagag

SEQ ID NO: 73594 - DNA, 3294 bp, Zea Mays
cagaaggccaccaagttgatgatcacaagctttgtccacggttcagacggcctgggaaaccaggatttccctccatcagctaccaagcctgtagatcaatcggctgctgccttcctggttgagcaaccaaatctataccctggacaagttaccattgtcgccctcagtccactaaccaaccttgctctgacagtcgagcttgaccctttgttctcgaagaatatatggcagattatttttcttggcggtgtgtattcaattaatggtaatgtgaactatgcagctgaggcaaatgtagatattgtgttcacccgcggtgctgatattttggctatggtactaattgtaacacatcaagtagttttaacccgtaattctgccatatttaagggtcacattatttctgctcaggatgtatgcttcatatactgagataatgcttcttttataacctacttctcattagtcaatggcaatctctactactctataagggtccagtgtgggcgtccacactggtaccgtgcccccgcccccaaaattctcgccccgcctcgctctccgtcgcgccattccagggaccctccatcgccgcccccgccatcatcgcgtcagcgcccgcgctccgtcgatggaaggcgccattccagggacccaccccaaccctgcgatcctcacccttccaaggatgccccgcacccatctcgtccaatccctcctcccgcctcacccgctcacaaggtcgacgacgacgaatctaaggacgccaacgccacccctctctgagctccctatggccactgcgggtgagtgcctctgggtagccggtcacccctctcttgcagcctccgagcttcggcgaacgcagaactggcagggcgcgacggccgacgcaatgtacgtgggtagccggcgtccaatgtcggccgccgctggcgagcgcccccggcgcggctgcccaaccaagctctgtccagatctgaccgtctagggcgaggtgaccccctcctggcggcgagcgagacagcccccactccaccccacctcgcaacagccaccgatcagtggagcgcactcaaaactgttggatttattttggaacttaggtgaaggaggaatgggtggagggacgagcaagatggcaacgttctattgaaacaaactgcctcgattattaggctatcattactaaacaaactacctttatcgtcaacctactaacttccatattcttcacattcagctttgcaaaatttacttgactggattttttagcttaacatataactcagggagacatgcgattttgggacgatcaaactgttggtaagtaaatacttgttggcctgttgctcttcttttagctatagctgaccataatttttcttggttgaggaaactgtagttagtgatagctcaatattttgtgtgtagaaacctgtataaagtattggacatgtatttcatagtttttgtaacttataaggctatgtaagtcacagattaactcttcaaagaattatacaacaaagaaattagcgctcagaaatgggatctttgcatttttagtcttgctcattttttattattcatgtatgactcatggttttctagagaaaaatattggaccgttacaataatgctaatatggtgttaatctaggattgctcattttgagtattcttgtacgactcatggttttctagagaaaagatcttggactgtagcactacctccacttgtgagatctggacttctgtagttatatgccatagcaacactgaaagtgacaatgtttgaatggtatagttcttttccttggtcggtgatatatattcacttgatggtatagctctgccaaaagcacaacagctcgtgcttgatccacaaaaaataggatgctcatgtgattgtattttgattttttagttttatttttgttgcatgtataatccaatcgccgagatcgacctctaccgtctcgagccataggacctcccctccctcttcaacatccgcagtcacaacgccaaggggtagttcttcgcccgtgcggtcgaggcggtcccagcaacaggaccaaccacgcacacgccgatggggtactggagatccggacggagtagcattcttgctggcccagggtcagcccacttcttgcgcaagtttgttgttgggaaccaatggaatccgactattcatttttcttgcggatggtcgtgtcggtggggtcaagaaaattctctggaatttggcactgataagatagaaatgcatgttggggctgtacaggccaacgatcgagctcttgtagtcgatgatcttattgccacccgtgtgcagctgtcaaacttatcggagatggacgatgaagcgttggatcaaggagatggaggttggatcaaggagatggaggaggtggccgccacggccaccacttccaggtcgattatgccctttagggccatccagaagggcaagccgttgtcggtgtccttggcatcgagaagaagtccacccctaagctctagaactccaggtgctcgccgtggccacaagcgtgtagtcccccgacgcagagaagaggaagggcatgtggcgtagttagagggatctgaaccctagcggtcgtccgcccgtccagatctgtgacccgcccttctcgacgcttcggtgacatgagtgcctggaaatctagggaggcgaaaaggtcagagttcagtcatgtcatgcttgatttgagttctgtgccagatcaaagcaagtagtagtacgtgagaagttaaccatgaacagacaccctttttctctttgtgtatcacagattttgaaacttgctgagagggaaaaacaaatttatggggaaaaaatgtgacactgaaagccatttgcttccagcagcttaagaattgttgcggtagatgcaactgaagagggtcttcaagtaagtaaatcaactactacaatggctcactaaaaatggtcgacaggacagtttcggaaccttattgttgttcttcagagagaacatcgacaaaggaacttgaagctccgtaggcgaaaggatctctagaaacgactaactaaattctcctagatgcagacaagactgaattagttcctacttctccccatcaattagaaatggggactatagaagatgtccgaacagagcctgatgtctcacaggaacaaacaactaaagaaaatggaagccagacaacctttagctatgaacgattgatatcaaagtccactgaccctgttagtgggatagacaacaagcacagagag

SEQ ID NO: 73595 - DNA, 3451 bp, Zea Mays
cagaaggccaccaagttgatgatcacaagctttgtccacggttcagacggcctgggaaaccaggatttccctccatcagctaccaagcctgtagatcaatcggctgctgccttcctggttgagcaaccaaatctataccctggacaagttaccattgtcgccctcagtccactaaccaaccttgctctgacagtcgagcttgaccctttgttctcgaagaatatatggcagattatttttcttggcggtgtgtattcaattaatggtaatgtgaactatgcagctgaggcaaatgtagatattgtgttcacccgcggtgctgatattttggctatggtactaattgtaacacatcaagtagttttaacccgtaattctgccatatttaagggtcacattatttctgctcaggatgtatgcttcatatactgagataatgcttcttttataacctacttctcattagtcaatggcaatctctactactctataagggtccagtgtgggcgtccacactggtaccgtgcccccgcccccaaaattctcgccccgcctcgctctccgtcgcgccattccagggaccctccatcgccgcccccgccatcatcgcgtcagcgcccgcgctccgtcgatggaaggcgccattccagggacccaccccaaccctgcgatcctcacccttccaaggatgccccgcacccatctcgtccaatccctcctcccgcctcacccgctcacaaggtcgacgacgacgaatctaaggacgccaacgccacccctctctgagctccctatggccactgcgggtgagtgcctctgggtagccggtcacccctctcttgcagcctccgagcttcggcgaacgcagaactggcagggcgcgacggccgacgcaatgtacgtgggtagccggcgtccaatgtcggccgccgctggcgagcgcccccggcgcggctgcccaaccaagctctgtccagatctgaccgtctagggcgaggtgaccccctcctggcggcgagcgagacagcccccactccaccccacctcgcaacagccaccgatcagtggagcgcactcaaaactgttggatttattttggaacttaggtgaaggaggaatgggtggagggacgagcaagatggcaacgttctattgaaacaaactgcctcgattattaggctatcattactaaacaaactacctttatcgtcaacctactaacttccatattcttcacattcagctttgcaaaatttacttgactggattttttagcttaacatataactcagggagacatgcgattttgggacgatcaaactgttggtaagtaaatacttgttggcctgttgctcttcttttagctatagctgaccataatttttcttggttgaggaaactgtagttagtgatagctcaatattttgtgtgtagaaacctgtataaagtattggacatgtatttcatagtttttgtaacttataaggctatgtaagtcacagattaactcttcaaagaattatacaacaaagaaattagcgctcagaaatgggatctttgcatttttagtcttgctcattttttattattcatgtatgactcatggttttctagagaaaaatattggaccgttacaataatgctaatatggtgttaatctaggattgctcattttgagtattcttgtacgactcatggttttctagagaaaagatcttggactgtagcactacctccacttgtgagatctggacttctgtagttatatgccatagcaacactgaaagtgacaatgtttgaatggtatagttcttttccttggtcggtgatatatattcacttgatggtatagctctgccaaaagcacaacagctcgtgcttgatccacaaaaaataggatgctcatgtgattgtattttgattttttagttttatttttgttgcatgtataatccaatcgccgagatcgacctctaccgtctcgagccataggacctcccctccctcttcaacatccgcagtcacaacgccaaggggtagttcttcgcccgtgcggtcgaggcggtcccagcaacaggaccaaccacgcacacgccgatggggtactggagatccggacggagtagcattcttgctggcccagggtcagcccacttcttgcgcaagtttgttgttgggaaccaatggaatccgactattcatttttcttgcggatggtcgtgtcggtggggtcaagaaaattctctggaatttggcactgataagatagaaatgcatgttggggctgtacaggccaacgatcgagctcttgtagtcgatgatcttattgccacccgtgtgcagctgtcaaacttatcggagatggacgatgaagcgttggatcaaggagatggaggttggatcaaggagatggaggaggtggccgccacggccaccacttccaggtcgattatgccctttagggccatccagaagggcaagccgttgtcggtgtccttggcatcgagaagaagtccacccctaagctctagaactccaggtgctcgccgtggccacaagcgtgtagtcccccgacgcagagaagaggaagggcatgtggcgtagttagagggatctgaaccctagcggtcgtccgcccgtccagatctgtgacccgcccttctcgacgcttcggtgacatgagtgcctggaaatctagggaggcgaaaagagttcagtcatgtcatgcttgatttgagttctgtgccagatcaaagcaagtagtagtacgtgagaagttaaccatgaacagacaccctttttctctttgtgtatcacagattttgaaacttgctgagagggaaaaacaaatttatggggaaaaaatgtgacactgaaagccatttgcttccagcagcttaagaattgttgcggtagatgcaactgaagagggtcttcaagtaagtaaatcaactactacaatggctcactaaaaatggtcgacaggacagtttcggaaccttattgttgttcttcagagagaacatcgacaaaggaacttgaagctccgtaggcgaaaggatctctagaaacgactaactaaattctcctaggtactactctagggaggatgctgaagatgctgtcaaatacattagtggaacaatgcttgacgatcgtccaatccgtgttgatttcgatcggggctttgaagaaggcagacagtggggccgtggacgaagtggtgtacaagctttacaaaccatgatatgtccatgcagacaagactgaattagttcctacttctccccatcaattagaaatggggactatagaagatgtccgaacagagcctgatgtctcacaggaacaaacaactaaagaaaatggaagccagacaacctttagctatgaacgattgatatcaaagtccactgaccctgttagtgggatagacaacaagcacagagag

SEQ ID NO: 73596 - DNA, 3474 bp, Zea Mays
cagaaggccaccaagttgatgatcacaagctttgtccacggttcagacggcctgggaaaccaggatttccctccatcagctaccaagcctgtagatcaatcggctgctgccttcctggttgagcaaccaaatctataccctggacaagttaccattgtcgccctcagtccactaaccaaccttgctctgacagtcgagcttgaccctttgttctcgaagaatatatggcagattatttttcttggcggtgtgtattcaattaatggtaatgtgaactatgcagctgaggcaaatgtagatattgtgttcacccgcggtgctgatattttggctatggtactaattgtaacacatcaagtagttttaacccgtaattctgccatatttaagggtcacattatttctgctcaggatgtatgcttcatatactgagataatgcttcttttataacctacttctcattagtcaatggcaatctctactactctataagggtccagtgtgggcgtccacactggtaccgtgcccccgcccccaaaattctcgccccgcctcgctctccgtcgcgccattccagggaccctccatcgccgcccccgccatcatcgcgtcagcgcccgcgctccgtcgatggaaggcgccattccagggacccaccccaaccctgcgatcctcacccttccaaggatgccccgcacccatctcgtccaatccctcctcccgcctcacccgctcacaaggtcgacgacgacgaatctaaggacgccaacgccacccctctctgagctccctatggccactgcgggtgagtgcctctgggtagccggtcacccctctcttgcagcctccgagcttcggcgaacgcagaactggcagggcgcgacggccgacgcaatgtacgtgggtagccggcgtccaatgtcggccgccgctggcgagcgcccccggcgcggctgcccaaccaagctctgtccagatctgaccgtctagggcgaggtgaccccctcctggcggcgagcgagacagcccccactccaccccacctcgcaacagccaccgatcagtggagcgcactcaaaactgttggatttattttggaacttaggtgaaggaggaatgggtggagggacgagcaagatggcaacgttctattgaaacaaactgcctcgattattaggctatcattactaaacaaactacctttatcgtcaacctactaacttccatattcttcacattcagctttgcaaaatttacttgactggattttttagcttaacatataactcagggagacatgcgattttgggacgatcaaactgttggtaagtaaatacttgttggcctgttgctcttcttttagctatagctgaccataatttttcttggttgaggaaactgtagttagtgatagctcaatattttgtgtgtagaaacctgtataaagtattggacatgtatttcatagtttttgtaacttataaggctatgtaagtcacagattaactcttcaaagaattatacaacaaagaaattagcgctcagaaatgggatctttgcatttttagtcttgctcattttttattattcatgtatgactcatggttttctagagaaaaatattggaccgttacaataatgctaatatggtgttaatctaggattgctcattttgagtattcttgtacgactcatggttttctagagaaaagatcttggactgtagcactacctccacttgtgagatctggacttctgtagttatatgccatagcaacactgaaagtgacaatgtttgaatggtatagttcttttccttggtcggtgatatatattcacttgatggtatagctctgccaaaagcacaacagctcgtgcttgatccacaaaaaataggatgctcatgtgattgtattttgattttttagttttatttttgttgcatgtataatccaatcgccgagatcgacctctaccgtctcgagccataggacctcccctccctcttcaacatccgcagtcacaacgccaaggggtagttcttcgcccgtgcggtcgaggcggtcccagcaacaggaccaaccacgcacacgccgatggggtactggagatccggacggagtagcattcttgctggcccagggtcagcccacttcttgcgcaagtttgttgttgggaaccaatggaatccgactattcatttttcttgcggatggtcgtgtcggtggggtcaagaaaattctctggaatttggcactgataagatagaaatgcatgttggggctgtacaggccaacgatcgagctcttgtagtcgatgatcttattgccacccgtgtgcagctgtcaaacttatcggagatggacgatgaagcgttggatcaaggagatggaggttggatcaaggagatggaggaggtggccgccacggccaccacttccaggtcgattatgccctttagggccatccagaagggcaagccgttgtcggtgtccttggcatcgagaagaagtccacccctaagctctagaactccaggtgctcgccgtggccacaagcgtgtagtcccccgacgcagagaagaggaagggcatgtggcgtagttagagggatctgaaccctagcggtcgtccgcccgtccagatctgtgacccgcccttctcgacgcttcggtgacatgagtgcctggaaatctagggaggcgaaaaggtcagagttcagtcatgtcatgcttgatttgagttctgtgccagatcaaagcaagtagtagtacgtgagaagttaaccatgaacagacaccctttttctctttgtgtatcacagattttgaaacttgctgagagggaaaaacaaatttatggggaaaaaatgtgacactgaaagccatttgcttccagcagcttaagaattgttgcggtagatgcaactgaagagggtcttcaagtaagtaaatcaactactacaatggctcactaaaaatggtcgacaggacagtttcggaaccttattgttgttcttcagagagaacatcgacaaaggaacttgaagctccgtaggcgaaaggatctctagaaacgactaactaaattctcctaggtactactctagggaggatgctgaagatgctgtcaaatacattagtggaacaatgcttgacgatcgtccaatccgtgttgatttcgatcggggctttgaagaaggcagacagtggggccgtggacgaagtgatgcagacaagactgaattagttcctacttctccccatcaattagaaatggggactatagaagatgtccgaacagagcctgatgtctcacaggaacaaacaactaaagaaaatggaagccagacaacctttagctatgaacgattgatatcaaagtccactgaccctgttagtgggatagacaacaagcacagagaggagacatactttgctacagattctcaaggagacaacaacacaaaatcat

SEQ ID NO: 73597 - DNA, 3346 bp, Zea Mays
cagaaggccaccaagttgatgatcacaagctttgtccacggttcagacggcctgggaaaccaggatttccctccatcagctaccaagcctgtagatcaatcggctgctgccttcctggttgagcaaccaaatctataccctggacaagttaccattgtcgccctcagtccactaaccaaccttgctctgacagtcgagcttgaccctttgttctcgaagaatatatggcagattatttttcttggcggtgtgtattcaattaatggtaatgtgaactatgcagctgaggcaaatgtagatattgtgttcacccgcggtgctgatattttggctatggtactaattgtaacacatcaagtagttttaacccgtaattctgccatatttaagggtcacattatttctgctcaggatgtatgcttcatatactgagataatgcttcttttataacctacttctcattagtcaatggcaatctctactactctataagggtccagtgtgggcgtccacactggtaccgtgcccccgcccccaaaattctcgccccgcctcgctctccgtcgcgccattccagggaccctccatcgccgcccccgccatcatcgcgtcagcgcccgcgctccgtcgatggaaggcgccattccagggacccaccccaaccctgcgatcctcacccttccaaggatgccccgcacccatctcgtccaatccctcctcccgcctcacccgctcacaaggtcgacgacgacgaatctaaggacgccaacgccacccctctctgagctccctatggccactgcgggtgagtgcctctgggtagccggtcacccctctcttgcagcctccgagcttcggcgaacgcagaactggcagggcgcgacggccgacgcaatgtacgtgggtagccggcgtccaatgtcggccgccgctggcgagcgcccccggcgcggctgcccaaccaagctctgtccagatctgaccgtctagggcgaggtgaccccctcctggcggcgagcgagacagcccccactccaccccacctcgcaacagccaccgatcagtggagcgcactcaaaactgttggatttattttggaacttaggtgaaggaggaatgggtggagggacgagcaagatggcaacgttctattgaaacaaactgcctcgattattaggctatcattactaaacaaactacctttatcgtcaacctactaacttccatattcttcacattcagctttgcaaaatttacttgactggattttttagcttaacatataactcagggagacatgcgattttgggacgatcaaactgttggtaagtaaatacttgttggcctgttgctcttcttttagctatagctgaccataatttttcttggttgaggaaactgtagttagtgatagctcaatattttgtgtgtagaaacctgtataaagtattggacatgtatttcatagtttttgtaacttataaggctatgtaagtcacagattaactcttcaaagaattatacaacaaagaaattagcgctcagaaatgggatctttgcatttttagtcttgctcattttttattattcatgtatgactcatggttttctagagaaaaatattggaccgttacaataatgctaatatggtgttaatctaggattgctcattttgagtattcttgtacgactcatggttttctagagaaaagatcttggactgtagcactacctccacttgtgagatctggacttctgtagttatatgccatagcaacactgaaagtgacaatgtttgaatggtatagttcttttccttggtcggtgatatatattcacttgatggtatagctctgccaaaagcacaacagctcgtgcttgatccacaaaaaataggatgctcatgtgattgtattttgattttttagttttatttttgttgcatgtataatccaatcgccgagatcgacctctaccgtctcgagccataggacctcccctccctcttcaacatccgcagtcacaacgccaaggggtagttcttcgcccgtgcggtcgaggcggtcccagcaacaggaccaaccacgcacacgccgatggggtactggagatccggacggagtagcattcttgctggccaacgatcgagctcttgtagtcgatgatcttattgccacccgtgtgcagctgtcaaacttatcggagatggacgatgaagcgttggatcaaggagatggaggttggatcaaggagatggaggaggtggccgccacggccaccacttccaggtcgattatgccctttagggccatccagaagggcaagccgttgtcggtgtccttggcatcgagaagaagtccacccctaagctctagaactccaggtgctcgccgtggccacaagcgtgtagtcccccgacgcagagaagaggaagggcatgtggcgtagttagagggatctgaaccctagcggtcgtccgcccgtccagatctgtgacccgcccttctcgacgcttcggtgacatgagtgcctggaaatctagggaggcgaaaaggtcagagttcagtcatgtcatgcttgatttgagttctgtgccagatcaaagcaagtagtagtacgtgagaagttaaccatgaacagacaccctttttctctttgtgtatcacagattttgaaacttgctgagagggaaaaacaaatttatggggaaaaaatgtgacactgaaagccatttgcttccagcagcttaagaattgttgcggtagatgcaactgaagagggtcttcaagtaagtaaatcaactactacaatggctcactaaaaatggtcgacaggacagtttcggaaccttattgttgttcttcagagagaacatcgacaaaggaacttgaagctccgtaggcgaaaggatctctagaaacgactaactaaattctcctaggtactactctagggaggatgctgaagatgctgtcaaatacattagtggaacaatgcttgacgatcgtccaatccgtgttgatttcgatcggggctttgaagaaggcagacagtggggccgtggacgaagtggtgtacaagctttacaaaccatgatatatgcagacaagactgaattagttcctacttctccccatcaattagaaatggggactatagaagatgtccgaacagagcctgatgtctcacaggaacaaacaactaaagaaaatggaagccagacaacctttagctatgaacgattgatatcaaagtccactgaccctgttagtgggatagacaacaagcacagagaggagacatactttgctacagattctcaaggagacaacaacacaaaatcat

SEQ ID NO: 73598 - DNA, 7911 bp, Zea Mays
cagaaggccaccaagttgatgatcacaagctttgtccacggttcagacggcctgggaaaccaggatttccctccatcagctaccaagcctgtagatcaatcggctgctgccttcctggttgagcaaccaaatctataccctggacaagttaccattgtcgccctcagtccactaaccaaccttgctctgacagtcgagcttgaccctttgttctcgaagaatatatggcagattatttttcttggcggtgtgtattcaattaatggtaatgtgaactatgcagctgaggcaaatgtagatattgtgttcacccgcggtgctgatattttggctatggtactaattgtaacacatcaagtagttttaacccgtaattctgccatatttaagggtcacattatttctgctcaggatgtatgcttcatatactgagataatgcttcttttataacctacttctcattagtcaatggcaatctctactactctataagggtccagtgtgggcgtccacactggtaccgtgcccccgcccccaaaattctcgccccgcctcgctctccgtcgcgccattccagggaccctccatcgccgcccccgccatcatcgcgtcagcgcccgcgctccgtcgatggaaggcgccattccagggacccaccccaaccctgcgatcctcacccttccaaggatgccccgcacccatctcgtccaatccctcctcccgcctcacccgctcacaaggtcgacgacgacgaatctaaggacgccaacgccacccctctctgagctccctatggccactgcgggtgagtgcctctgggtagccggtcacccctctcttgcagcctccgagcttcggcgaacgcagaactggcagggcgcgacggccgacgcaatgtacgtgggtagccggcgtccaatgtcggccgccgctggcgagcgcccccggcgcggctgcccaaccaagctctgtccagatctgaccgtctagggcgaggtgaccccctcctggcggcgagcgagacagcccccactccaccccacctcgcaacagccaccgatcagtggagcgcactcaaaactgttggatttattttggaacttaggtgaaggaggaatgggtggagggacgagcaagatggcaacgttctattgaaacaaactgcctcgattattaggctatcattactaaacaaactacctttatcgtcaacctactaacttccatattcttcacattcagctttgcaaaatttacttgactggattttttagcttaacatataactcagggagacatgcgattttgggacgatcaaactgttggtaagtaaatacttgttggcctgttgctcttcttttagctatagctgaccataatttttcttggttgaggaaactgtagttagtgatagctcaatattttgtgtgtagaaacctgtataaagtattggacatgtatttcatagtttttgtaacttataaggctatgtaagtcacagattaactcttcaaagaattatacaacaaagaaattagcgctcagaaatgggatctttgcatttttagtcttgctcattttttattattcatgtatgactcatggttttctagagaaaaatattggaccgttacaataatgctaatatggtgttaatctaggattgctcattttgagtattcttgtacgactcatggttttctagagaaaagatcttggactgtagcactacctccacttgtgagatctggacttctgtagttatatgccatagcaacactgaaagtgacaatgtttgaatgttttatttttgttgcatgtataatccaatcgccgagatcgacctctaccgtctcgagccataggacctcccctccctcttcaacatccgcagtcacaacgccaaggggtagttcttcgcccgtgcggtcgaggcggtcccagcaacaggaccaaccacgcacacgccgatggggtactggagatccggacggagtagcattcttgctggcccagggtcagcccacttcttgcgcaagtttgttgttgggaaccaatggaatccgactattcatttttcttgcggatggtcgtgtcggtggggtcaagaaaattctctggaatttggcactgataagatagaaatgcatgttggggctgtacaggccaacgatcgagctcttgtagtcgatgatcttattgccacccgtgtgcagctgtcaaacttatcggagatggacgatgaagcgttggatcaaggagatggaggttggatcaaggagatggaggaggtggccgccacggccaccacttccaggtcgattatgccctttagggccatccagaagggcaagccgttgtcggtgtccttggcatcgagaagaagtccacccctaagctctagaactccaggtgctcgccgtggccacaagcgtgtagtcccccgacgcagagaagaggaagggcatgtggcgtagttagagggatctgaaccctagcggtcgtccgcccgtccagatctgtgacccgcccttctcgacgcttcggtgacatgagtgcctggaaatctagggaggcgaaaaggtcagagttcagtcatgtcatgcttgatttgagttctgtgccagatcaaagcaagtagtagtacgtgagaagttaaccatgaacagacaccctttttctctttgtgtatcacagattttgaaacttgctgagagggaaaaacaaatttatggggaaaaaatgtgacactgaaagccatttgcttccagcagcttaagaattgttgcggtagatgcaactgaagagggtcttcaagtaagtaaatcaactactacaatggctcactaaaaatggtcgacaggacagtttcggaaccttattgttgttcttcagagagaacatcgacaaaggaacttgaagctccgtaggcgaaaggatctctagaaacgactaactaaattctcctaggtactactctagggaggatgctgaagatgctgtcaaatacattagtggaacaatgcttgacgatcgtccaatccgtgttgatttcgatcggggctttgaagaaggcagacagtggggccgtggacgaagtggtgtacaagctttacaaaccatgatatgtccgtgcgttgtagtaatgcagacaagactgaattagttcctacttctccccatcaattagaaatggggactatagaagatgtccgaacagagcctgatgtctcacaggaacaaacaactaaagaaaatggaagccagacaacctttagctatgaacgattgatatcaaagtccactgaccctgttagtgggatagacaacaagcacagagaggtttgtgactccaatgcacattgataaaagctctctctctcctgttacctcatttccttgtgaaagggctgagtatttgtagaaattaaaaaaggggacttttttgagcaattttcttgaatctagaccaatttagaactggcgaatttatttgcatttaaaagcaaacaaacacctagattcgcctcatctgaggctcaggcgttcagcatttacttcagaatttcgataaaacctttttttgtttgtaaacatttgtaggcaaaattattcacaataaagagtaaataggtaagctttggaaacttattatagactttgcttcaaggtcttatttcggaggtaacctctggttactaatatcccagacttacaatttgaaaaataccagccagtcaggattgctgcaattactgttagtcatgaagaagatgaggtgtaaaaggttattttggagaagaaacaaactggcatggaaaaaggagccaagatttgatcagaatcacaaccaaatccttctcttatttgcattatgctaatttgattcaccataatgcttaccattcatactattatgcttgtttttttctctttcgtaatcatcgaaatggtccacttttcaaagttcaagcccaacttaattttttaaagcaaaaatgtagcagtacttaaggttttatctataatttatcaatggataagtgagttctattgctccagtttagagagagtctaaacaattttgagtattttgaaattctagatgagctataaatttcctacaggattattgggttagaagttcacgtgtaggcatcacatctgtgtgcttttgggttacccacttaggtggattgtctgagtcactcatgaaatattattgtgtaccatcacaacacatgatttctaagtgtgcaagcaagctaacgacgacttcgactagcttagcgccatggtcactgtgctgctcaacctcgtcaacctacccctccggtgaggtgtggggctgccagacgcctcctgtgaggctgacatagctggatacttagtagtggatcaataatgtactttgcaactgattaccttggttttgttgcatcgcgtacacctaactatcaattattatgctagcacaaaaattgaggaatgcagcaaataaggtatcttttctcacctatcttgttaatgcagtctgacaagtacttgagaaatggaatggtagtatgtttttgtttcttaggtaattagttcaccttatccttagatctctaagtttagatttgaatttgcttgaagtggatgctccctcatcataattttgtcccgtgtaaccagtgtcgttgccattagaattctcctatacagacatctatgcataaggttagcccttccattcttctattcagtgttgtttcctttgttttgtttttggcctctttgaatgaacaatagaaattttgcccattgtgtcccatcggtaaaagaatataaggcaacatggcgctcttagttgttagatcccataaagggaaagtgatgggatacacttctccatttttccttttggcttttactacccagttccaactaacaaggaaaatcgagggtcaactgatctttatattatcaggtggatgcaatcaaaaccaagatgcaagttgcaagtctggaacgaccgactaccattcaatgttgcaagtgatttctattgttaagaagctatgagcgaaaattttgtgtctcaagatttgaagcatgagaagcgttgcgggggagaagcttcagtgcaacattgttgttctatagggatcaacatcctcaagatcacttggaaaactttcacgaaaaacttgtaatgcaagcatatgttttattggaaaagttttccaagctgaatttctaaaagcctcctcactgctttagttatgctgaattggaatttgcaactaggggtttcttacaagtaaatttcttagctaaaggtggattttggtctgttcatcgacatgtcctttctaatggtggtagtgtttgttagctacaaatcatcaatcaaagatagtaattatattgcatcactgttttgtatcaattttaagctgtcgtagcaacgcacgggcaccctactagtgcattcataagacaggaatttgcaatgttactaaattgaaagaccaattgtgtaggcatggtgcactgcacattgatctttcttcttctatcgtatgatgtgacttgtgattgctttgccaatgcgacctacatggagctggattgttattacagacaacagaactgtatttatcttgaataatgattgatggttaagtgcatgcgtcactgggttcgagatcgactacagccactgggtggacgagcagaaaaggcacatggcagagctgacgtcgacgctccaggggcagcagacgtcggagctggagctccgcctgctggtggagacgtggctcagcaactacgagcgcctgtttaggatcaaggcgacggcggccaacgcggacgtgttctacgtcatgtcgggcttgtggaagacccccgccaagaggttcttcctctggatcggtgggttccggccgtcggatgtcctcaaggatgtaagcaatctcatgcacctgttgttgctcgcaaggttcatccctcacaagtacaagatcaaagactcgaaagcttaggttgctttgagccgtggtggatctcccggtgtgatgacatggggctgggtctgggagctcttctcaaatctgggggttctcggtctgctcttctcaatttagtgttatctttttcttttagaacaatgccaaagatacatgacagactgctttgcttgtttttgacatgatgcaaaagcaatggagtctttacttttaaacctttgttatttttgttttgattcaattatgatactgctgaaatgtacggatatctattattttgatgcaatagtggtgttttgcgatgtttaacagcttgtgtgatccaattattaaccctgcattgtatagaagagtttctttagaatatatcaattcatgtatcctcgttatggatattatgttgatattttctatctatgaatggcccctacactttgaatcgcttatgtcattgttagcaatcacataatattttttcttttctcttagatttaatttgtataatcatataatcattcatatattgttacaataggatttggttcagcttctcactttgtttttaatgagaagaagcagacaacaaattatagtgaaggctcctctcgtcccccgttgcttggtggatcacccccacggaaccagcctagccaaagacagggtgactattcttacctgaatagagtatttcgtgatctctttatccaggaaggtgaaagaaccagtggagctgctgggccctcaatgaataagatggagaaggccccaggagaagcgttcggtagaaggaaccctagcggtcctatgaaccagaccgacagttatgcgcaacagccacacgagaccgtatccatgtcgctaaagaaaattacatgtgtaaagtggtgctcggagtcagagagggatgctatctttgatgttctacagccacatttgcttactctttcttgcaagaaatatgccatttttcttgtaaagaagcttatagaacttgcctctaaaaaacagtttgccagattcatatcttcccttcatggtcgtgttgccaaccttcttcatcatactattggagctgcattcgttgattatgcatttcagcgaggaacacaacgtcagaaaaggcaattgttagttgaactgtactcccctgaacttcagctattcaaggatctgactgtgcaaagttcctcctgatacaatttccaagcttgggttgcagatatcatctgtcctgcttcatatgactattgtgattgataaaatcttggagaaaggtaccgttgagtacttaatagtgcacacggccatattggactactttacaattgcagataagacctcagcctcggatgctatttgtcaacttatcccccttcttactcaaggggcattaatcatagatggagatgaacctacaaacgctccagaactaccaaagaaagcaaaagctaagaagaaaaggtcgaaagagccacttattgttcggatcatgcagacaagggaaggattaaaactaggaattagttgcctcaagtatggcagtgcaaagattagctttggaagatacacgattggccaagcttgagcatggatgaaaattcctagatgatcgcaaagattgttgtggtttgtaatgatgcaatcattggccactctgagcatcaatatgttgctacagggatgcccacaaaagctgctctgaaggacaatgcttccaccagcgcggccgtagaggcggaagcaaggggttgggcttctgtcggtgctggacagcgtgatgccaaacgtgccagccactcttgctgtcgtccgcctccctcttccacgataggttgcgaggcttgggctgagaagttaatttagctgctcttttgacgtgatggtacggttcag

SEQ ID NO: 73599 - DNA, 7446 bp, Zea Mays
cagaaggccaccaagttgatgatcacaagctttgtccacggttcagacggcctgggaaaccaggatttccctccatcagctaccaagcctgtagatcaatcggctgctgccttcctggttgagcaaccaaatctataccctggacaagttaccattgtcgccctcagtccactaaccaaccttgctctgacagtcgagcttgaccctttgttctcgaagaatatatggcagattatttttcttggcggtgtgtattcaattaatggtaatgtgaactatgcagctgaggcaaatgtagatattgtgttcacccgcggtgctgatattttggctatggtactaattgtaacacatcaagtagttttaacccgtaattctgccatatttaagggtcacattatttctgctcaggatgtatgcttcatatactgagataatgcttcttttataacctacttctcattagtcaatggcaatctctactactctataagggtccagtgtgggcgtccacactggtaccgtgcccccgcccccaaaattctcgccccgcctcgctctccgtcgcgccattccagggaccctccatcgccgcccccgccatcatcgcgtcagcgcccgcgctccgtcgatggaaggcgccattccagggacccaccccaaccctgcgatcctcacccttccaaggatgccccgcacccatctcgtccaatccctcctcccgcctcacccgctcacaaggtcgacgacgacgaatctaaggacgccaacgccacccctctctgagctccctatggccactgcgggtgagtgcctctgggtagccggtcacccctctcttgcagcctccgagcttcggcgaacgcagaactggcagggcgcgacggccgacgcaatgtacgtgggtagccggcgtccaatgtcggccgccgctggcgagcgcccccggcgcggctgcccaaccaagctctgtccagatctgaccgtctagggcgaggtgaccccctcctggcggcgagcgagacagcccccactccaccccacctcgcaacagccaccgatcagtggagcgcactcaaaactgttggatttattttggaacttaggtgaaggaggaatgggtggagggacgagcaagatggcaacgttctattgaaacaaactgcctcgattattaggctatcattactaaacaaactacctttatcgtcaacctactaacttccatattcttcacattcagctttgcaaaatttacttgactggattttttagcttaacatataactcagggagacatgcgattttgggacgatcaaactgttggtaagtaaatacttgttggcctgttgctcttcttttagctatagctgaccataatttttcttggttgaggaaactgtagttagtgatagctcaatattttgtgtgtagaaacctgtataaagtattggacatgtatttcatagtttttgtaacttataaggctatgtaagtcacagattaactcttcaaagaattatacaacaaagaaattagcgctcagaaatgggatctttgcatttttagtcttgctcattttttattattcatgtatgactcatggttttctagagaaaaatattggaccgttacaataatgctaatatggtgttaatctaggattgctcattttgagtattcttgtacgactcatggttttctagagaaaagatcttggactgtagcactacctccacttgtgagatctggacttctgtagttatatgccatagcaacactgaaagtgacaatgtttgaatgttttatttttgttgcatgtataatccaatcgccgagatcgacctctaccgtctcgagccataggacctcccctccctcttcaacatccgcagtcacaacgccaaggggtagttcttcgcccgtgcggtcgaggcggtcccagcaacaggaccaaccacgcacacgccgatggggtactggagatccggacggagtagcattcttgctggcccagggtcagcccacttcttgcgcaagtttgttgttgggaaccaatggaatccgactattcatttttcttgcggatggtcgtgtcggtggggtcaagaaaattctctggaatttggcactgataagatagaaatgcatgttggggctgtacaggccaacgatcgagctcttgtagtcgatgatcttattgccacccgtgtgcagctgtcaaacttatcggagatggacgatgaagcgttggatcaaggagatggaggttggatcaaggagatggaggaggtggccgccacggccaccacttccaggtcgattatgccctttagggccatccagaagggcaagccgttgtcggtgtccttggcatcgagaagaagtccacccctaagctctagaactccaggtgctcgccgtggccacaagcgtgtagtcccccgacgcagagaagaggaagggcatgtggcgtagttagagggatctgaaccctagcggtcgtccgcccgtccagatctgtgacccgcccttctcgacgcttcggtgacatgagtgcctggaaatctagggaggcgaaaaggtcagagttcagtcatgtcatgcttgatttgagttctgtgccagatcaaagcaagtagtagtacgtgagaagttaaccatgaacagacaccctttttctctttgtgtatcacagattttgaaacttgctgagagggaaaaacaaatttatggggaaaaaatgtgacactgaaagccatttgcttccagcagcttaagaattgttgcggtagatgcaactgaagagggtcttcaagtaagtaaatcaactactacaatggctcactaaaaatggtcgacaggacagtttcggaaccttattgttgttcttcagagagaacatcgacaaaggaacttgaagctccgtaggcgaaaggatctctagaaacgactaactaaattctcctaggtactactctagggaggatgctgaagatgctgtcaaatacattagtggaacaatgcttgacgatcgtccaatccgtgttgatttcgatcggggctttgaagaaggcagacagtggggccgtggacgaagtggtgtacaagctttacaaaccatgatatgtccgtgcgttgtagtaatgcagacaagactgaattagttcctacttctccccatcaattagaaatggggactatagaagatgtccgaacagagcctgatgtctcacaggaacaaacaactaaagaaaatggaagccagacaacctttagctatgaacgattgatatcaaagtccactgaccctgttagtgggatagacaacaagcacagagaggagacatactttgctacagattctcaaggagacaacaacacaaaatcatataaaacatagtaccaaacatgaatggcttcaaggctagcaaatgttcgaggacacttgatctgcaccaatgaggacacttcaagttgttgtctcaatctttccagttgacctttggcgagcaaaacacagagaagcaagcacatgccattctcgcttattctttggatcaaggtgccagtatcttagacacagtagaaattttccaactaacaaggaaaatcgagggtcaactgatctttatattatcaggtggatgcaatcaaaaccaagatgcaagttgcaagtctggaacgaccgactaccattcaatgttgcaagtgatttctattgttaagaagctatgagcgaaaattttgtgtctcaagatttgaagcatgagaagcgttgcgggggagaagcttcagtgcaacattgttgttctatagggatcaacatcctcaagatcacttggaaaactttcacgaaaaacttgtaatgcaagcatatgttttattggaaaagttttccaagctgaatttctaaaagcctcctcactgctttagttatgctgaattggaatttgcaactaggggtttcttacaagtaaatttcttagctaaaggcatggtgcactgcacattgatctttcttcttctatcgtatgatgtgacttgtgattgctttgccaatgcgacctacatggagctggattgttattacagacaacagaactgtatttatcttgaataatgattgatggttaagtgcatgcgtcactgggttcgagatcgactacagccactgggtggacgagcagaaaaggcacatggcagagctgacgtcgacgctccaggggcagcagacgtcggagctggagctccgcctgctggtggagacgtggctcagcaactacgagcgcctgtttaggatcaaggcgacggcggccaacgcggacgtgttctacgtcatgtcgggcttgtggaagacccccgccaagaggttcttcctctggatcggtgggttccggccgtcggatgtcctcaaggatgttgctttgagccgtggtggatctcccggtgtgatgacatggggctgggtctgggagctcttctcaaatctgggggttctcggatttggttcagcttctcactttgtttttaatgagaagaagcagacaacaaattatagtgaaggctcctctcgtcccccgttgcttggtggatcacccccacggaaccagcctagccaaagacagggtgactattcttacctgaatagagtatttcgtgatctctttatccaggaaggtgaaagaaccagtggagctgctgggccctcaatgaataagatggagaaggccccaggagaagcgttcggtagaaggaaccctagcggtcctatgaaccagaccgacagttatgcgcaacagccacacgagaccgtatccatgtcgctaaagaaaattatgcatagcattgattgatctgggaaaggactatggagagatcactccaaatatctataaatagatccgtgccttttggacctccacttgctgatgacatgatcaaggacataaatagatcactaaaatattgtcaaagacccaaccaaagagagggtacaaatataaactcttgggaactttcttttaatttttacaattattatctataaagtatggtaaacttttctgtccaccttttctcttggcatttttacaattattatctataaagtatggtaactcagcacttctgtgtggctttgaaatgaagagcgccttttgggttttttgctaagagtaatggtttgtgatctcgaccctccttgtgttttgtatttggagaccagtggtgtgtttctaatatatagcaatactctttcaaggcctcacttgtgagtttgagggtgcatttacttgtactagacaagtttgcacttaaacatttgtttactgtaggtatcgtatttattttaatttgcaaatccattctttaagaatgtgagtccagttccactgtatttcatcatggaaatgaatgtgctagaaaagctcttattttgtgtttttcttatttgtgccatgatgcatttttagtttattgaagttctttacttctgttattgcttgggaagcattataatttacattcaatttgcttgtatggttcatgttttcttaactttgtttgagtggctacaagttctgtactaatgatattgctagggaagccttataattttcattccatttgcttggatgattcattttttcttaagagtttttttgctatcagtatgattcgccaaatcaagttttggattaaatttgtggttaaatgaggacttatgcttatttggcttgatttgttgaggtttcatgtgagtctccatgttatgtttgatgagctttgataatttgtagtgttttttggtgcatgtattaatattttttacatggcgttcgaatatatgtatatgtttgcgtttaatcttcattcatgtttagcattgttatcacagtcacaagcagcgcctctttgagatcttaagcatcatttgcaaattccccttggttgtcaatcgctctgctaattcagtcaactcctatcttgtcaggtcaaatagttttgtactcaacttctatccacgcaacagttctgaggcccccgatgaagtatatctcactataattagtgtgatagttcgtcgcagcttctaattcacacaaccctaatgacaaacaaaacattgcttctgattagcagggaagcacaaaatttaaaccatatagctgaattcaaatgataaacagatagaaaaaacacggtatgatagagggacataactaatcagaagtctagactttatgttgtgcatcctgtaatagtaaaaatttccccattgttgtgatgtccattgctgatgttttgctacatattgcttatgcgtcaattccttgctgctgctgagggctgcaaactttcaaaactaggctgcaaggtggtgtctatattgttaagctgaggaggctgaaatgatttcaatcgttgattatgcatttcagcgaggaacacaacgtcagaaaaggcaattgttagttgaactgtactcccctgaacttcagctattcaaggatctgactgtgcaaagttcctcctgatacaatttccaagcttgggttgcagatatcatctgtcctgcttcatatgactattgtgattgataaaatcttggagaaaggtaccgttgagtacttaatagtgcacacggccatattggactactttacaattgcagataagacctcagcctcggatgctatttgtcaacttatcccccttcttactcaaggggcattaatcatagatggagatgaacctacaaacgctccagaactaccaaagaaagcaaaagctaagaagaaaaggtcgaaagagccacttattgttcggatcatgcagacaagggaaggattaaaactaggaattagttgcctcaagtatggcagtgcaaagattagctttggaagatacacgattggccaagcttgagcatggatgaaaattcctagatgatcgcaaagattgttgtggtttgtaatgatgcaatcattggccactctgagcatcaatatgttgctacagggatgcccacaaaagctgctctgaaggacaatgcttccaccagcgcggccgtagaggcggaagcaaggggttgggcttctgtcggtgctggacagcgtgatgccaaacgtgccagccactcttgctgtcgtccgcctccctcttccacgataggttcgcccgcaccgagcctagacgcagatagctctcgaccgtccgctacagtgctgtcgaagagacggtaatggaggaggcctcgcccgagacggtggaggagccactgctggtgagcgcaatcagagggaaaaaggttgagagggcaccaatctggctcatgaggcaagccgagaggtacatgaacacaagtccacttccattttgtgacagtcttctatgttggtctgctaagcatttctgtaattaacattccagtgcgtatctcga

SEQ ID NO: 73600 - DNA, 11330 bp, Zea Mays
cagaaggccaccaagttgatgatcacaagctttgtccacggttcagacggcctgggaaaccaggatttccctccatcagctaccaagcctgtagatcaatcggctgctgccttcctggttgagcaaccaaatctataccctggacaagttaccattgtcgccctcagtccactaaccaaccttgctctgacagtcgagcttgaccctttgttctcgaagaatatatggcagattatttttcttggcggtgtgtattcaattaatggtaatgtgaactatgcagctgaggcaaatgtagatattgtgttcacccgcggtgctgatattttggctatggtactaattgtaacacatcaagtagttttaacccgtaattctgccatatttaagggtcacattatttctgctcaggatgtatgcttcatatactgagataatgcttcttttataacctacttctcattagtcaatggcaatctctactactctataagggtccagtgtgggcgtccacactggtaccgtgcccccgcccccaaaattctcgccccgcctcgctctccgtcgcgccattccagggaccctccatcgccgcccccgccatcatcgcgtcagcgcccgcgctccgtcgatggaaggcgccattccagggacccaccccaaccctgcgatcctcacccttccaaggatgccccgcacccatctcgtccaatccctcctcccgcctcacccgctcacaaggtcgacgacgacgaatctaaggacgccaacgccacccctctctgagctccctatggccactgcgggtgagtgcctctgggtagccggtcacccctctcttgcagcctccgagcttcggcgaacgcagaactggcagggcgcgacggccgacgcaatgtacgtgggtagccggcgtccaatgtcggccgccgctggcgagcgcccccggcgcggctgcccaaccaagctctgtccagatctgaccgtctagggcgaggtgaccccctcctggcggcgagcgagacagcccccactccaccccacctcgcaacagccaccgatcagtggagcgcactcaaaactgttggatttattttggaacttaggtgaaggaggaatgggtggagggacgagcaagatggcaacgttctattgaaacaaactgcctcgattattaggctatcattactaaacaaactacctttatcgtcaacctactaacttccatattcttcacattcagctttgcaaaatttacttgactggattttttagcttaacatataactcagggagacatgcgattttgggacgatcaaactgttggtaagtaaatacttgttggcctgttgctcttcttttagctatagctgaccataatttttcttggttgaggaaactgtagttagtgatagctcaatattttgtgtgtagaaacctgtataaagtattggacatgtatttcatagtttttgtaacttataaggctatgtaagtcacagattaactcttcaaagaattatacaacaaagaaattagcgctcagaaatgggatctttgcatttttagtcttgctcattttttattattcatgtatgactcatggttttctagagaaaaatattggaccgttacaataatgctaatatggtgttaatctaggattgctcattttgagtattcttgtacgactcatggttttctagagaaaagatcttggactgtagcactacctccacttgtgagatctggacttctgtagttatatgccatagcaacactgaaagtgacaatgtttgaatgttttatttttgttgcatgtataatccaatcgccgagatcgacctctaccgtctcgagccataggacctcccctccctcttcaacatccgcagtcacaacgccaaggggtagttcttcgcccgtgcggtcgaggcggtcccagcaacaggaccaaccacgcacacgccgatggggtactggagatccggacggagtagcattcttgctggcccagggtcagcccacttcttgcgcaagtttgttgttgggaaccaatggaatccgactattcatttttcttgcggatggtcgtgtcggtggggtcaagaaaattctctggaatttggcactgataagatagaaatgcatgttggggctgtacaggccaacgatcgagctcttgtagtcgatgatcttattgccacccgtgtgcagctgtcaaacttatcggagatggacgatgaagcgttggatcaaggagatggaggttggatcaaggagatggaggaggtggccgccacggccaccacttccaggtcgattatgccctttagggccatccagaagggcaagccgttgtcggtgtccttggcatcgagaagaagtccacccctaagctctagaactccaggtgctcgccgtggccacaagcgtgtagtcccccgacgcagagaagaggaagggcatgtggcgtagttagagggatctgaaccctagcggtcgtccgcccgtccagatctgtgacccgcccttctcgacgcttcggtgacatgagtgcctggaaatctagggaggcgaaaaggtcagagttcagtcatgtcatgcttgatttgagttctgtgccagatcaaagcaagtagtagtacgtgagaagttaaccatgaacagacaccctttttctctttgtgtatcacagattttgaaacttgctgagagggaaaaacaaatttatggggaaaaaatgtgacactgaaagccatttgcttccagcagcttaagaattgttgcggtagatgcaactgaagagggtcttcaagtaagtaaatcaactactacaatggctcactaaaaatggtcgacaggacagtttcggaaccttattgttgttcttcagagagaacatcgacaaaggaacttgaagctccgtaggcgaaaggatctctagaaacgactaactaaattctcctaggtactactctagggaggatgctgaagatgctgtcaaatacattagtggaacaatgcttgacgatcgtccaatccgtgttgatttcgatcggggctttgaagaaggcagacagtggggccgtggacgaagtggtgtacaagctttacaaaccatgatatgtccgtgcgttgtagtagtaagaaagaactaatgttcacagttaaaaagtgtggaatgagaaccgacattaaaataggagaatatatataatgtgggtttcatacatatgttctatgtttcacatctaccaccgaaggccaagtacattttgatatactagcctaaaatgttctgctgatctgatatactagcctaaaatgttccgttgatctgattttttgctacaccctgctgccctctacatttggattgtctgtattttgattttttagttttatttttgttgcatgtataatccaatatgtgattgtatcttttgattcctggaaggatagagtttgcactagaagaggatgctcatgttgttggtgactgtgtaaaagtacctttctgtaattatcattgtctattgtttataaggattaatgttaaagagttttaatagttttttccttcctacttccactgtctgaatgtatacacatgttacatgtatgatgcatgcatcatgttcagagcttccatctctcgttccaacttctgatatacaacattattggaagctttccttaagtattttattcgtattaatctgaatatgttccttggttatgaactaaaaacaacaatttaaattctatattggttgcaaagaatatgccgtgggatatcaagtttagtgatagttgttctttttatgcaatcgtcgtgtactaactttttatctaataaatcgtgttcttagtcactaaagtttaggaggtgggacccaaacacccccatagttacttgaatgttacttatcaatagtgaataggattcgcttagtaactgcaagaaagtaagtgaacctaggagaattctgtgattatttcttttttaccccttagcttgatatcaaaggttgatgacaccttcacttgatgcagatgcagacaagactgaattagttcctacttctccccatcaattagaaatggggactatagaagatgtccgaacagagcctgatgtctcacaggaacaaacaactaaagaaaatggaagccagacaacctttagctatgaacgattgatatcaaagtccactgaccctgttagtgggatagacaacaagcacagagaggtttgtgactccaatgcacattgataaaagctctctctctcctgttacctcatttccttgtgaaagggctgagtatttgtagaaattaaaaaaggggacttttttgagcaattttcttgaatctagaccaatttagaactggcgaatttatttgcatttaaaagcaaacaaacacctagattcgcctcatctgaggctcaggcgttcagcatttacttcagaatttcgataaaacctttttttgtttgtaaacatttgtaggcaaaattattcacaataaagagtaaataggtaagctttggaaacttattatagactttgcttcaaggtcttatttcggaggtaacctctggttactaatatcccagacttacaatttgaaaaataccagccagtcaggattgctgcaattactgttagtcatgaagaagatgaggtgtaaaaggttattttggagaagaaacaaactggcatggaaaaaggagccaagatttgatcagaatcacaaccaaatccttctcttatttgcattatgctaatttgattcaccataatgcttaccattcatactattatgcttgtttttttctctttcgtaatcatcgaaatggtccacttttcaaagttcaagcccaacttaattttttaaagcaaaaatgtagcagtacttaaggttttatctataatttatcaatggataagtgagttctattgctccagtttagagagagtctaaacaattttgagtattttgaaattctagatgagctataaatttcctacaggattattgggttagaagttcacgtgtaggcatcacatctgtgtgcttttgggttacccacttaggtggattgtctgagtcactcatgaaatattattgtgtaccatcacaacacatgatttctaagtgtgcaagcaagctaacgacgacttcgactagcttagcgccatggtcactgtgctgctcaacctcgtcaacctacccctccggtgaggtgtggggctgccagacgcctcctgtgaggctgacatagctggatacttagtagtggatcaataatgtactttgcaactgattaccttggttttgttgcatcgcgtacacctaactatcaattattatgctagcacaaaaattgaggaatgcagcaaataaggtatcttttctcacctatcttgttaatgcagtctgacaagtacttgagaaatggaatggtagtatgtttttgtttcttaggtaattagttcaccttatccttagatctctaagtttagatttgaatttgcttgaagtggatgctccctcatcataattttgtcccgtgtaaccagtgtcgttgccattagaattctcctatacagacatctatgcataaggttagcccttccattcttctattcagtgttgtttcctttgttttgtttttggcctctttgaatgaacaatagaaattttgcccattgtgtcccatcggtaaaagaatataaggcaacatggcgctcttagttgttagatcccataaagggaaaggtaagtcaagttagaatttattcagactgtcatgtaattgttgtaggacctttgtttcatttttatgccacacgatgatttatcacacatgctactactgggttgtgaaaaataatttcattttgtcaatgtgcctcaagtcaatcttttgaattttattatcagtctaaaatacttatttgttgtttgtttataatggctggaaatattcattattactgacctgacccataagacctagctgattgctcaagatagttatgcaattaagggtttcattctaaatattcataaacctgggatcctatgttgcatggcaaagcacccaaaatcattctgactttatgcttgataaattgataactggcatattagttgttacagtcaagcatcatgattatgaatctagattttattaatgagtcaagcatcaagtacttatgttaaatactcttgcttgcatggacttcttgagcgaaaacactatgtgacgctgtttgcaggagacatactttgctacagattctcaaggagacaacaacacaaaatcatataaaacatagtaccaaacatgaatggcttcaaggctagcaaatgttcgaggacacttgatctgcaccaatgaggacacttcaagttgttgtctcaatctttccagttgacctttggcgagcaaaacacagagaagcaagcacatgccattctcgcttattctttggatcaaggtgccagtatcttagacacagtagaaattttccaactaacaaggaaaatcgagggtcaactgatctttatattatcaggtggatgcaatcaaaaccaagatgcaagttgcaagtctggaacgaccgactaccattcaatgttgcaagtgatttctattgttaagaagctatgagcgaaaattttgtgtctcaagatttgaagcatgagaagcgttgcgggggagaagcttcagtgcaacattgttgttctatagggatcaacatcctcaagatcacttggaaaactttcacgaaaaacttgtaatgcaagcatatgttttattggaaaagttttccaagctgaatttctaaaagcctcctcactgctttagttatgctgaattggaatttgcaactaggggtttcttacaagtaaatttcttagctaaaggcatggtgcactgcacattgatctttcttcttctatcgtatgatgtgacttgtgattgctttgccaatgcgacctacatggagctggattgttattacagacaacagaactgtatttatcttgaataatgattgatggttaagtgcatgcgtcactgggttcgagatcgactacagccactgggtggacgagcagaaaaggcacatggcagagctgacgtcgacgctccaggggcagcagacgtcggagctggagctccgcctgctggtggagacgtggctcagcaactacgagcgcctgtttaggatcaaggcgacggcggccaacgcggacgtgttctacgtcatgtcgggcttgtggaagacccccgccaagaggttcttcctctggatcggtgggttccggccgtcggatgtcctcaaggatgtaagcaatctcatgcacctgttgttgctcgcaaggttcatccctcacaagtacaagatcaaagactcgaaagcttaggttgctttgagccgtggtggatctcccggtgtgatgacatggggctgggtctgggagctcttctcaaatctgggggttctcggtctgctcttctcaatttagtgttatctttttcttttagaacaatgccaaagatacatgacagactgctttgcttgtttttgacatgatgcaaaagcaatggagtctttacttttaaacctttgttatttttgttttgattcaattatgatactgctgaaatgtacggatatctattattttgatgcaatagtggtgttttgcgatgtttaacagcttgtgtgatccaattattaaccctgcattgtatagaagagtttctttagaatatatcaattcatgtatcctcgttatggatattatgttgatattttctatctatgaatggcccctacactttgaatcgcttatgtcattgttagcaatcacataatattttttcttttctcttagatttaatttgtataatcatataatcattcatatattgttacaataggatttggttcagcttctcactttgtttttaatgagaagaagcagacaacaaattatagtgaaggctcctctcgtcccccgttgcttggtggatcacccccacggaaccagcctagccaaagacagggtgactattcttacctgaatagagtatttcgtgatctctttatccaggaagataccagttcaactatgtgtttgactggaccattctgaagtatcctcagataggctctaacctgtgaaccagggcaggtgaaagaaccagtggagctgctgggccctcaatgaataagatggagaaggccccaggagaagcgttcggtagaaggaaccctagcggtcctatgaaccagaccgacagttatgcgcaacagccacacgagaccgtatccatgtcgctaaagaaaattatgcatagcattgattgatctgggaaaggactatggagagatcactccaaatatctataaatagatccgtgccttttggacctccacttgctgatgacatgatcaaggacataaatagatcactaaaatattgtcaaagacccaaccaaagagagggtacaaatataaactcttgggaactttcttttaatttttacaattattatctataaagtatggtaaacttttctgtccaccttttctcttggcatttttacaattattatctataaagtatggtaactcagcacttctgtgtggctttgaaatgaagagcgccttttgggttttttgctaagagtaatggtttgtgatctcgaccctccttgtgttttgtatttggagaccagtggtgtgtttctaatatatagcaatactctttcaaggcctcacttgtgagtttgagggtgcatttacttgtactagacaagtttgcacttaaacatttgtttactgtaggtatcgtatttattttaatttgcaaatccattctttaagaatgtgagtccagttccactgtatttcatcatggaaatgaatgtgctagaaaagctcttattttgtgtttttcttatttgtgccatgatgcatttttagtttattgaagttctttacttctgttattgcttgggaagcattataatttacattcaatttgcttgtatggttcatgttttcttaactttgtttgagtggctacaagttctgtactaatgatattgctagggaagccttataattttcattccatttgcttggatgattcattttttcttaagagtttttttgctatcagtatgattcgccaaatcaagttttggattaaatttgtggttaaatgaggacttatgcttatttggcttgatttgttgaggtttcatgtgagtctccatgttatgtttgatgagctttgataatttgtagtgttttttggtgcatgtattaatattttttacatggcgttcgaatatatgtatatgtttgcgtttaatcttcattcatgtttagcattgttatcacagtcacaagcagcgcctctttgagatcttaagcatcatttgcaaattccccttggttgtcaatcgctctgctaattcagtcaactcctatcttgtcaggtcaaatagttttgtactcaacttctatccacgcaacagttctgaggcccccgatgaagtatatctcactataattagtgtgatagttcgtcgcagcttctaattcacacaaccctaatgacaaacaaaacattgcttctgattagcagggaagcacaaaatttaaaccatatagctgaattcaaatgataaacagatagaaaaaacacggtatgatagagggacataactaatcagaagtctagactttatgttgtgcatcctgtaatagtaaaaatttccccattgttgtgatgtccattgctgatgttttgctacatattgcttatgcgtcaattccttgctgctgctgagggctgcaaactttcaaaactaggctgcaaggtggtgtctatattgttaagctgaggaggctgaaatgatttcaaacatgtgtaaagtggtgctcggagtcagagagggatgctatctttgatgttctacagccacatttgcttactctttcttgcaagaaatatgccatttttcttgtaaagaagcttatagaacttgtcgttgattatgcatttcagcgaggaacacaacgtcagaaaaggcaattgttagttgaactgtactcccctgaacttcagctattcaaggatctgactgtgcaaagttcctcctgatatcatctgtcctgcttcatatgactattgtgattgataaaatcttggagaaaggtaccgttgagtacttaatagtgcacacggccatattggactactttacaattgcagataagacctcagcctcggatgctatttgtcaacttatcccccttcttactcaaggggcattaatcatagatggagatgaacctacaaacgctccagaactaccaaagaaagcaaaagctaagaagaaaaggtcgaaagagccacttattgttcggatcatgcagacaagggaaggattaaaactaggaattagttgcctcaagtatggcagtgcaaaggtatatctgcacaagttattatattttaacttcaggtcaaacacttccttcgctactatccactggtgttttattcagtgttgctttagttttgtaaatttttgtggtgcttgtatatctttgcaaattgaattatgcactacaccgtaccaagtccatctttactgctcaagaggttactgtcggtggccatgggatgttttcctccctccatgatctctgaaatgtctcccgtatttatagattagctttggaagatacacgattggccaagcttgagcatggatgaaaattcctagatgatcgcaaagattgttgtggtttgtaatgatgcaatcattggccactctgagcatcaatatgttgctacagggatgcccacaaaagctgctctgaaggacaatgcttccaccagcgcggccgtagaggcggaagcaaggggttgggcttctgtcggtgctggacagcgtgatgccaaacgtgccagccactcttgctgtcgtccgcctccctcttccacgataggttcgcccgcaccgagcctagacgcagatagctctcgaccgtccgctacagtgctgtcgaagagacggtaatggaggaggcctcgcccgagacggtggaggagccactgctggtgagcgcaatcagagggaaaaaggttgagagggcaccaatctggctcatgaggcaagccgagaggtacatgaacacaagtccacttccattttgtgacagtcttctatgttggtctgctaagcatttctgtaattaacattccagtgcgtatctcga

SEQ ID NO: 73601 - DNA, 8809 bp, Zea Mays
cagaaggccaccaagttgatgatcacaagctttgtccacggttcagacggcctgggaaaccaggatttccctccatcagctaccaagcctgtagatcaatcggctgctgccttcctggttgagcaaccaaatctataccctggacaagttaccattgtcgccctcagtccactaaccaaccttgctctgacagtcgagcttgaccctttgttctcgaagaatatatggcagattatttttcttggcggtgtgtattcaattaatggtaatgtgaactatgcagctgaggcaaatgtagatattgtgttcacccgcggtgctgatattttggctatggtactaattgtaacacatcaagtagttttaacccgtaattctgccatatttaagggtcacattatttctgctcaggatgtatgcttcatatactgagataatgcttcttttataacctacttctcattagtcaatggcaatctctactactctataagggtccagtgtgggcgtccacactggtaccgtgcccccgcccccaaaattctcgccccgcctcgctctccgtcgcgccattccagggaccctccatcgccgcccccgccatcatcgcgtcagcgcccgcgctccgtcgatggaaggcgccattccagggacccaccccaaccctgcgatcctcacccttccaaggatgccccgcacccatctcgtccaatccctcctcccgcctcacccgctcacaaggtcgacgacgacgaatctaaggacgccaacgccacccctctctgagctccctatggccactgcgggtgagtgcctctgggtagccggtcacccctctcttgcagcctccgagcttcggcgaacgcagaactggcagggcgcgacggccgacgcaatgtacgtgggtagccggcgtccaatgtcggccgccgctggcgagcgcccccggcgcggctgcccaaccaagctctgtccagatctgaccgtctagggcgaggtgaccccctcctggcggcgagcgagacagcccccactccaccccacctcgcaacagccaccgcgtaccttgagtgacctcgtttgaggccttgacagccacctcggtcttgtcagatcagtggagcgcactcaaaactgttggatttattttggaacttaggtgaaggaggaatgggtggagggacgagcaagatggcaacgttctattgaaacaaactgcctcgattattaggctatcattactaaacaaactacctttatcgtcaacctactaacttccatattcttcacattcagctttgcaaaatttacttgactggattttttagcttaacatataactcagggagacatgcgattttgggacgatcaaactgttggtaagtaaatacttgttggcctgttgctcttcttttagctatagctgaccataatttttcttggttgaggaaactgtagttagtgatagctcaatattttgtgtgtagaaacctgtataaagtattggacatgtatttcatagtttttgtaacttataaggctatgtaagtcacagattaactcttcaaagaattatacaacaaagaaattagcgctcagaaatgggatctttgcatttttagtcttgctcattttttattattcatgtatgactcatggttttctagagaaaaatattggaccgttacaataatgctaatatggtgttaatctaggattgctcattttgagtattcttgtacgactcatggttttctagagaaaagatcttggactgtagcactacctccacttgtgagatctggacttctgtagttatatgccatagcaacactgaaagtgacaatgtttgaatggtatagttcttttccttggtcggtgatatatattcacttgatggtatagctctgccaaaagcacaacagctcgtgcttgatccacaaaaaataggatgctcatgtgattgtattttgattttttagttttatttttgttgcatgtataatccaatcgccgagatcgacctctaccgtctcgagccataggacctcccctccctcttcaacatccgcagtcacaacgccaaggggtagttcttcgcccgtgcggtcgaggcggtcccagcaacaggaccaaccacgcacacgccgatggggtactggagatccggacggagtagcattcttgctggcccagggtcagcccacttcttgcgcaagtttgttgttgggaaccaatggaatccgactattcatttttcttgcggatggtcgtgtcggtggggtcaagaaaattctctggaatttggcactgataagatagaaatgcatgttggggctgtacaggccaacgatcgagctcttgtagtcgatgatcttattgccacccgtgtgcagctgtcaaacttatcggagatggacgatgaagcgttggatcaaggagatggaggttggatcaaggagatggaggaggtggccgccacggccaccacttccaggtcgattatgccctttagggccatccagaagggcaagccgttgtcggtgtccttggcatcgagaagaagtccacccctaagctctagaactccaggtgctcgccgtggccacaagcgtgtagtcccccgacgcagagaagaggaagggcatgtggcgtagttagagggatctgaaccctagcggtcgtccgcccgtccagatctgtgacccgcccttctcgacgcttcggtgacatgagtgcctggaaatctagggaggcgaaaaggtcagagttcagtcatgtcatgcttgatttgagttctgtgccagatcaaagcaagtagtagtacgtgagaagttaaccatgaacagacaccctttttctctttgtgtatcacagattttgaaacttgctgagagggaaaaacaaatttatggggaaaaaatgtgacactgaaagccatttgcttccagcagcttaagaattgttgcggtagatgcaactgaagagggtcttcaagtaagtaaatcaactactacaatggctcactaaaaatggtcgacaggacagtttcggaaccttattgttgttcttcagagagaacatcgacaaaggaacttgaagctccgtaggcgaaaggatctctagaaacgactaactaaattctcctaggtactactctagggaggatgctgaagatgctgtcaaatacattagtggaacaatgcttgacgatcgtccaatccgtgttgatttcgatcggggctttgaagaaggcagacagtggggccgtggacgaagtggtgtacaagctttacaaaccatgatatgtccgtgcgttgtagtaatgcagacaagactgaattagttcctacttctccccatcaattagaaatggggactatagaagatgtccgaacagagcctgatgtctcacaggaacaaacaactaaagaaaatggaagccagacaacctttagctatgaacgattgatatcaaagtccactgaccctgttagtgggatagacaacaagcacagagaggtttgtgactccaatgcacattgataaaagctctctctctcctgttacctcatttccttgtgaaagggctgagtatttgtagaaattaaaaaaggggacttttttgagcaattttcttgaatctagaccaatttagaactggcgaatttatttgcatttaaaagcaaacaaacacctagattcgcctcatctgaggctcaggcgttcagcatttacttcagaatttcgataaaacctttttttgtttgtaaacatttgtaggcaaaattattcacaataaagagtaaataggtaagctttggaaacttattatagactttgcttcaaggtcttatttcggaggtaacctctggttactaatatcccagacttacaatttgaaaaataccagccagtcaggattgctgcaattactgttagtcatgaagaagatgaggtgtaaaaggttattttggagaagaaacaaactggcatggaaaaaggagccaagatttgatcagaatcacaaccaaatccttctcttatttgcattatgctaatttgattcaccataatgcttaccattcatactattatgcttgtttttttctctttcgtaatcatcgaaatggtccacttttcaaagttcaagcccaacttaattttttaaagcaaaaatgtagcagtacttaaggttttatctataatttatcaatggataagtgagttctattgctccagtttagagagagtctaaacaattttgagtattttgaaattctagatgagctataaatttcctacaggattattgggttagaagttcacgtgtaggcatcacatctgtgtgcttttgggttacccacttaggtggattgtctgagtcactcatgaaatattattgtgtaccatcacaacacatgatttctaagtgtgcaagcaagctaacgacgacttcgactagcttagcgccatggtcactgtgctgctcaacctcgtcaacctacccctccggtgaggtgtggggctgccagacgcctcctgtgaggctgacatagctggatacttagtagtggatcaataatgtactttgcaactgattaccttggttttgttgcatcgcgtacacctaactatcaattattatgctagcacaaaaattgaggaatgcagcaaataaggtatcttttctcacctatcttgttaatgcagtctgacaagtacttgagaaatggaatggtagtatgtttttgtttcttaggtaattagttcaccttatccttagatctctaagtttagatttgaatttgcttgaagtggatgctccctcatcataattttgtcccgtgtaaccagtgtcgttgccattagaattctcctatacagacatctatgcataaggttagcccttccattcttctattcagtgttgtttcctttgttttgtttttggcctctttgaatgaacaatagaaattttgcccattgtgtcccatcggtaaaagaatataaggcaacatggcgctcttagttgttagatcccataaagggaaaggtaagtcaagttagaatttattcagactgtcatgtaattgttgtaggacctttgtttcatttttatgccacacgatgatttatcacacatgctactactgggttgtgaaaaataatttcattttgtcaatgtgcctcaagtcaatcttttgaattttattatcagtctaaaatacttatttgttgtttgtttataatggctggaaatattcattattactgacctgacccataagacctagctgattgctcaagatagttatgcaattaagggtttcattctaaatattcataaacctgggatcctatgttgcatggcaaagcacccaaaatcattctgactttatgcttgataaattgataactggcatattagttgttacagtcaagcatcatgattatgaatctagattttattaatgagtcaagcatcaagtacttatgttaaatactcttgcttgcatggacttcttgagcgaaaacactatgtgacgctgtttgcaggagacatactttgctacagattctcaaggagacaacaacacaaaatcatataaaacatagtaccaaacatgaatggcttcaaggctagcaaatgttcgaggacacttgatctgcaccaatgaggacacttcaagttgttgtctcaatctttccagttgacctttggcgagcaaaacacagagaagcaagcacatgccattctcgcttattctttggatcaaggtgccagtatcttagacacagtagaaattttccaactaacaaggaaaatcgagggtcaactgatctttatattatcaggtggatgcaatcaaaaccaagatgcaagttgcaagtctggaacgaccgactaccattcaatgttgcaagtgatttctattgttaagaagctatgagcgaaaattttgtgtctcaagatttgaagcatgagaagcgttgcgggggagaagcttcagtgcaacattgttgttctatagggatcaacatcctcaagatcacttggaaaactttcacgaaaaacttgtaatgcaagcatatgttttattggaaaagttttccaagctgaatttctaaaagcctcctcactgctttagttatgctgaattggaatttgcaactaggggtttcttacaagtaaatttcttagctaaaggcatggtgcactgcacattgatctttcttcttctatcgtatgatgtgacttgtgattgctttgccaatgcgacctacatggagctggattgttattacagacaacagaactgtatttatcttgaataatgattgatggttaagtgcatgcgtcactgggttcgagatcgactacagccactgggtggacgagcagaaaaggcacatggcagagctgacgtcgacgctccaggggcagcagacgtcggagctggagctccgcctgctggtggagacgtggctcagcaactacgagcgcctgtttaggatcaaggcgacggcggccaacgcggacgtgttctacgtcatgtcgggcttgtggaagacccccgccaagaggttcttcctctggatcggtgggttccggccgtcggatgtcctcaaggatgtaagcaatctcatgcacctgttgttgctcgcaaggttcatccctcacaagtacaagatcaaagactcgaaagcttaggttgctttgagccgtggtggatctcccggtgtgatgacatggggctgggtctgggagctcttctcaaatctgggggttctcggtctgctcttctcaatttagtgttatctttttcttttagaacaatgccaaagatacatgacagactgctttgcttgtttttgacatgatgcaaaagcaatggagtctttacttttaaacctttgttatttttgttttgattcaattatgatactgctgaaatgtacggatatctattattttgatgcaatagtggtgttttgcgatgtttaacagcttgtgtgatccaattattaaccctgcattgtatagaagagtttctttagaatatatcaattcatgtatcctcgttatggatattatgttgatattttctatctatgaatggcccctacactttgaatcgcttatgtcattgttagcaatcacataatattttttcttttctcttagatttaatttgtataatcatataatcattcatatattgttacaataggatttggttcagcttctcactttgtttttaatgagaagaagcagacaacaaattatagtgaaggctcctctcgtcccccgttgcttggtggatcacccccacggaaccagcctagccaaagacagggtgactattcttacctgaatagagtatttcgtgatctctttatccaggaaggtgaaagaaccagtggagctgctgggccctcaatgaataagatggagaaggccccaggagaagcgttcggtagaaggaaccctagcggtcctatgaaccagaccgacagttatgcgcaacagccacacgagaccgtatccatgtcgctaaagaaaattacatgtgtaaagtggtgctcggagtcagagagggatgctatctttgatgttctacagccacatttgcttactctttcttgcaagaaatatgccatttttcttgtaaagaagcttatagaacttgcctctaaaaaacagtttgccagattcatatcttcccttcatggtcgtgttgccaaccttcttcatcatactattggagctgcattcgttgattatgcatttcagcgaggaacacaacgtcagaaaaggcaattgttagttgaactgtactcccctgaacttcagctattcaaggatctgactgtgcaaagttcctcctgtttgatagatacaatttccaagcttgggttgcagatatcatctgtcctgcttcatatgactattgtgattgataaaatcttggagaaaggtaccgttgagtacttaatagtgcacacggccatattggactactttacaattgcagataagacctcagcctcggatgctatttgtcaacttatcccccttcttactcaaggggcattaatcatagatggagatgaacctacaaacgctccagaactaccaaagaaagcaaaagctaagaagaaaaggtcgaaagagccacttattgttcggatcatgcagacaagggaaggattaaaactaggaattagttgcctcaagtatggcagtgcaaagattagctttggaagatacacgattggccaagcttgagcatggatgaaaattcctagatgatcgcaaagattgttgtggtttgtaatgatgcaatcattggccactctgagcatcaatatgttgctacagggatgcccacaaaagctgctctgaaggacaatgcttccaccagcgcggccgtagaggcggaagcaaggggttgggcttctgtcggtgctggacagcgtgatgccaaacgtgccagccactcttgctgtcgtccgcctccctcttccacgataggttcgcccgcaccgagcctagacgcagatagctctcgaccgtccgctacagtgctgtcgaagagacggtaatggaggaggcctcgcccgagacggtggaggagccactgctggtgagcgcaatcagagggaaaaaggttgagagggcaccaatctggctcatgaggcaagccgagaggtacatgaacacaagtccacttccattttgtgacagtcttctatgttggtctgctaagcatttctgtaattaacattccagtgcgtatctcga

SEQ ID NO: 73602 - DNA, 7576 bp, Zea Mays
cagaaggccaccaagttgatgatcacaagctttgtccacggttcagacggcctgggaaaccaggatttccctccatcagctaccaagcctgtagatcaatcggctgctgccttcctggttgagcaaccaaatctataccctggacaagttaccattgtcgccctcagtccactaaccaaccttgctctgacagtcgagcttgaccctttgttctcgaagaatatatggcagattatttttcttggcggtgtgtattcaattaatggtaatgtgaactatgcagctgaggcaaatgtagatattgtgttcacccgcggtgctgatattttggctatggtactaattgtaacacatcaagtagttttaacccgtaattctgccatatttaagggtcacattatttctgctcaggatgtatgcttcatatactgagataatgcttcttttataacctacttctcattagtcaatggcaatctctactactctataagggtccagtgtgggcgtccacactggtaccgtgcccccgcccccaaaattctcgccccgcctcgctctccgtcgcgccattccagggaccctccatcgccgcccccgccatcatcgcgtcagcgcccgcgctccgtcgatggaaggcgccattccagggacccaccccaaccctgcgatcctcacccttccaaggatgccccgcacccatctcgtccaatccctcctcccgcctcacccgctcacaaggtcgacgacgacgaatctaaggacgccaacgccacccctctctgagctccctatggccactgcgggtgagtgcctctgggtagccggtcacccctctcttgcagcctccgagcttcggcgaacgcagaactggcagggcgcgacggccgacgcaatgtacgtgggtagccggcgtccaatgtcggccgccgctggcgagcgcccccggcgcggctgcccaaccaagctctgtccagatctgaccgtctagggcgaggtgaccccctcctggcggcgagcgagacagcccccactccaccccacctcgcaacagccaccgatcagtggagcgcactcaaaactgttggatttattttggaacttaggtgaaggaggaatgggtggagggacgagcaagatggcaacgttctattgaaacaaactgcctcgattattaggctatcattactaaacaaactacctttatcgtcaacctactaacttccatattcttcacattcagctttgcaaaatttacttgactggattttttagcttaacatataactcagggagacatgcgattttgggacgatcaaactgttggtaagtaaatacttgttggcctgttgctcttcttttagctatagctgaccataatttttcttggttgaggaaactgtagttagtgatagctcaatattttgtgtgtagaaacctgtataaagtattggacatgtatttcatagtttttgtaacttataaggctatgtaagtcacagattaactcttcaaagaattatacaacaaagaaattagcgctcagaaatgggatctttgcatttttagtcttgctcattttttattattcatgtatgactcatggttttctagagaaaaatattggaccgttacaataatgctaatatggtgttaatctaggattgctcattttgagtattcttgtacgactcatggttttctagagaaaagatcttggactgtagcactacctccacttgtgagatctggacttctgtagttatatgccatagcaacactgaaagtgacaatgtttgaatggtatagttcttttccttggtcggtgatatatattcacttgatggtatagctctgccaaaagcacaacagctcgtgcttgatccacaaaaaataggatgctcatgtgattgtattttgattttttagttttatttttgttgcatgtataatccaatcgccgagatcgacctctaccgtctcgagccataggacctcccctccctcttcaacatccgcagtcacaacgccaaggggtagttcttcgcccgtgcggtcgaggcggtcccagcaacaggaccaaccacgcacacgccgatggggtactggagatccggacggagtagcattcttgctggcccagggtcagcccacttcttgcgcaagtttgttgttgggaaccaatggaatccgactattcatttttcttgcggatggtcgtgtcggtggggtcaagaaaattctctggaatttggcactgataagatagaaatgcatgttggggctgtacaggccaacgatcgagctcttgtagtcgatgatcttattgccacccgtgtgcagctgtcaaacttatcggagatggacgatgaagcgttggatcaaggagatggaggttggatcaaggagatggaggaggtggccgccacggccaccacttccaggtcgattatgccctttagggccatccagaagggcaagccgttgtcggtgtccttggcatcgagaagaagtccacccctaagctctagaactccaggtgctcgccgtggccacaagcgtgtagtcccccgacgcagagaagaggaagggcatgtggcgtagttagagggatctgaaccctagcggtcgtccgcccgtccagatctgtgacccgcccttctcgacgcttcggtgacatgagtgcctggaaatctagggaggcgaaaagagttcagtcatgtcatgcttgatttgagttctgtgccagatcaaagcaagtagtagtacgtgagaagttaaccatgaacagacaccctttttctctttgtgtatcacagattttgaaacttgctgagagggaaaaacaaatttatggggaaaaaatgtgacactgaaagccatttgcttccagcagcttaagaattgttgcggtagatgcaactgaagagggtcttcaagtaagtaaatcaactactacaatggctcactaaaaatggtcgacaggacagtttcggaaccttattgttgttcttcagagagaacatcgacaaaggaacttgaagctccgtaggcgaaaggatctctagaaacgactaactaaattctcctaggtactactctagggaggatgctgaagatgctgtcaaatacattagtggaacaatgcttgacgatcgtccaatccgtgttgatttcgatcggggctttgaagaaggcagacagtggggccgtggacgaagtggtgtacaagctttacaaaccatgatatgtccgtgcgttgtagtaatgcagacaagactgaattagttcctacttctccccatcaattagaaatggggactatagaagatgtccgaacagagcctgatgtctcacaggaacaaacaactaaagaaaatggaagccagacaacctttagctatgaacgattgatatcaaagtccactgaccctgttagtgggatagacaacaagcacagagaggagacatactttgctacagattctcaaggagacaacaacacaaaatcatataaaacatagtaccaaacatgaatggcttcaaggctagcaaatgttcgaggacacttgatctgcaccaatgaggacacttcaagttgttgtctcaatctttccagttgacctttggcgagcaaaacacagagaagcaagcacatgccattctcgcttattctttggatcaaggtgccagtatcttagacacagtagaaattttccaactaacaaggaaaatcgagggtcaactgatctttatattatcaggtggatgcaatcaaaaccaagatgcaagttgcaagtctggaacgaccgactaccattcaatgttgcaagtgatttctattgttaagaagctatgagcgaaaattttgtgtctcaagatttgaagcatgagaagcgttgcgggggagaagcttcagtgcaacattgttgttctatagggatcaacatcctcaagatcacttggaaaactttcacgaaaaacttgtaatgcaagcatatgttttattggaaaagttttccaagctgaatttctaaaagcctcctcactgctttagttatgctgaattggaatttgcaactaggggtttcttacaagtaaatttcttagctaaaggcatggtgcactgcacattgatctttcttcttctatcgtatgatgtgacttgtgattgctttgccaatgcgacctacatggagctggattgttattacagacaacagaactgtatttatcttgaataatgattgatggttaagtgcatgcgtcactgggttcgagatcgactacagccactgggtggacgagcagaaaaggcacatggcagagctgacgtcgacgctccaggggcagcagacgtcggagctggagctccgcctgctggtggagacgtggctcagcaactacgagcgcctgtttaggatcaaggcgacggcggccaacgcggacgtgttctacgtcatgtcgggcttgtggaagacccccgccaagaggttcttcctctggatcggtgggttccggccgtcggatgtcctcaaggatgttgctttgagccgtggtggatctcccggtgtgatgacatggggctgggtctgggagctcttctcaaatctgggggttctcggatttggttcagcttctcactttgtttttaatgagaagaagcagacaacaaattatagtgaaggctcctctcgtcccccgttgcttggtggatcacccccacggaaccagcctagccaaagacagggtgactattcttacctgaatagagtatttcgtgatctctttatccaggaagataccagttcaactatgtgtttgactggaccattctgaagtatcctcagataggctctaacctgtgaaccagggcaggtgaaagaaccagtggagctgctgggccctcaatgaataagatggagaaggccccaggagaagcgttcggtagaaggaaccctagcggtcctatgaaccagaccgacagttatgcgcaacagccacacgagaccgtatccatgtcgctaaagaaaattatgcatagcattgattgatctgggaaaggactatggagagatcactccaaatatctataaatagatccgtgccttttggacctccacttgctgatgacatgatcaaggacataaatagatcactaaaatattgtcaaagacccaaccaaagagagggtacaaatataaactcttgggaactttcttttaatttttacaattattatctataaagtatggtaaacttttctgtccaccttttctcttggcatttttacaattattatctataaagtatggtaactcagcacttctgtgtggctttgaaatgaagagcgccttttgggttttttgctaagagtaatggtttgtgatctcgaccctccttgtgttttgtatttggagaccagtggtgtgtttctaatatatagcaatactctttcaaggcctcacttgtgagtttgagggtgcatttacttgtactagacaagtttgcacttaaacatttgtttactgtaggtatcgtatttattttaatttgcaaatccattctttaagaatgtgagtccagttccactgtatttcatcatggaaatgaatgtgctagaaaagctcttattttgtgtttttcttatttgtgccatgatgcatttttagtttattgaagttctttacttctgttattgcttgggaagcattataatttacattcaatttgcttgtatggttcatgttttcttaactttgtttgagtggctacaagttctgtactaatgatattgctagggaagccttataattttcattccatttgcttggatgattcattttttcttaagagtttttttgctatcagtatgattcgccaaatcaagttttggattaaatttgtggttaaatgaggacttatgcttatttggcttgatttgttgaggtttcatgtgagtctccatgttatgtttgatgagctttgataatttgtagtgttttttggtgcatgtattaatattttttacatggcgttcgaatatatgtatatgtttgcgtttaatcttcattcatgtttagcattgttatcacagtcacaagcagcgcctctttgagatcttaagcatcatttgcaaattccccttggttgtcaatcgctctgctaattcagtcaactcctatcttgtcaggtcaaatagttttgtactcaacttctatccacgcaacagttctgaggcccccgatgaagtatatctcactataattagtgtgatagttcgtcgcagcttctaattcacacaaccctaatgacaaacaaaacattgcttctgattagcagggaagcacaaaatttaaaccatatagctgaattcaaatgataaacagatagaaaaaacacggtatgatagagggacataactaatcagaagtctagactttatgttgtgcatcctgtaatagtaaaaatttccccattgttgtgatgtccattgctgatgttttgctacatattgcttatgcgtcaattccttgctgctgctgagggctgcaaactttcaaaactaggctgcaaggtggtgtctatattgttaagctgaggaggctgaaatgatttcaatcgttgattatgcatttcagcgaggaacacaacgtcagaaaaggcaattgttagttgaactgtactcccctgaacttcagctattcaaggatctgactgtgcaaagttcctcctgatacaatttccaagcttgggttgcagatatcatctgtcctgcttcatatgactattgtgattgataaaatcttggagaaaggtaccgttgagtacttaatagtgcacacggccatattggactactttacaattgcagataagacctcagcctcggatgctatttgtcaacttatcccccttcttactcaaggggcattaatcatagatggagatgaacctacaaacgctccagaactaccaaagaaagcaaaagctaagaagaaaaggtcgaaagagccacttattgttcggatcatgcagacaagggaaggattaaaactaggaattagttgcctcaagtatggcagtgcaaagattagctttggaagatacacgattggccaagcttgagcatggatgaaaattcctagatgatcgcaaagattgttgtggtttgtaatgatgcaatcattggccactctgagcatcaatatgttgctacagggatgcccacaaaagctgctctgaaggacaatgcttccaccagcgcggccgtagaggcggaagcaaggggttgggcttctgtcggtgctggacagcgtgatgccaaacgtgccagccactcttgctgtcgtccgcctccctcttccacgataggttcgcccgcaccgagcctagacgcagatagctctcgaccgtccgctacagtgctgtcgaagagacggtaatggaggaggcctcgcccgagacggtggaggagccactgctggtgagcgcaatcagagggaaaaaggttgagagggcaccaatctggctcatgaggcaagccgagagtgcctcaagattctgaaggtttccg

SEQ ID NO: 73603 - DNA, 1610 bp, Zea Mays
gtttgaatggtatagttcttttccttggtcggtgatatatattcacttgatggtatagctctgccaaaagcacaacagctcgtgcttgatccacaaaaaataggatgctcatgtgattgtattttgattttttagttttatttttgttgcatgtataatccaatcgccgagatcgacctctaccgtctcgagccataggacctcccctccctcttcaacatccgcagtcacaacgccaaggggtagttcttcgcccgtgcggtcgaggcggtcccagcaacaggaccaaccacgcacacgccgatggggtactggagatccggacggagtagcattcttgctggcccagggtcagcccacttcttgcgcaagtttgttgttgggaaccaatggaatccgactattcatttttcttgcggatggtcgtgtcggtggggtcaagaaaattctctggaatttggcactgataagatagaaatgcatgttggggctgtacaggccaacgatcgagctcttgtagtcgatgatcttattgccacccgtgtgcagctgtcaaacttatcggagatggacgatgaagcgttggatcaaggagatggaggttggatcaaggagatggaggaggtggccgccacggccaccacttccaggtcgattatgccctttagggccatccagaagggcaagccgttgtcggtgtccttggcatcgagaagaagtccacccctaagctctagaactccagattttgaaacttgctgagagggaaaaacaaatttatggggaaaaaatgtgacactgaaagccatttgcttccagcagcttaagaattgttgcggtagatgcaactgaagagggtcttcaagtaagtaaatcaactactacaatggctcactaaaaatggtcgacaggacagtttcggaaccttattgttgttcttcagagagaacatcgacaaaggaacttgaagctccgtaggcgaaaggatctctagaaacgactaactaaattctcctaggtactactctagggaggatgctgaagatgctgtcaaatacattagtggaacaatgcttgacgatcgtccaatccgtgttgatttcgatcggggctttgaagaaggcagacagtggggccgtggacgaagtggtgtacaagctttacaaaccatgatatgtccgtgcgttgtagtagtaagaaagaactaatgttcacagttaaaaagtgtggaatgagaaccgacattaaaataggagaatatatataatgtgggtttcatacatatgttctatgtttcacatctaccaccgaaggccaagtacattttgatatactagcctaaaatgttctgctgatctgatatactagcctaaaatgttccgttgatctgattttttgctacaccctgctgccctctacatttggattgtctgtattttgattttttagttttatttttgttgcatgtataatccaatatgtgattgtatcttttgattcctggaaggatagagtttgcactagaagaggatgctcatgttgttggtgactgtgtaaaagtacctttctgtaattatcattgtctattgtttataaggattaatgttaaa

SEQ ID NO: 73604 - DNA, 1235 bp, Zea Mays
gttgcatgtataatccaatcgccgagatcgacctctaccgtctcgagccataggacctcccctccctcttcaacatccgcagtcacaacgccaaggggtagttcttcgcccgtgcggtcgaggcggtcccagcaacaggaccaaccacgcacacgccgatggggtactggagatccggacggagtagcattcttgctggccaacgatcgagctcttgtagtcgatgatcttattgccacccgtgtgcagctgtcaaacttatcggagatggacgatgaagcgttggatcaaggagatggaggttggatcaaggagatggaggaggtggccgccacggccaccacttccaggtcgattatgccctttagggccatccagaagggcaagccgttgtcggtgtccttggcatcgagaagaagtccacccctaagctctagaactccagattttgaaacttgctgagagggaaaaacaaatttatggggaaaaaatgtgacactgaaagccatttgcttccagcagcttaagaattgttgcggtagatgcaactgaagagggtcttcaagtaagtaaatcaactactacaatggctcactaaaaatggtcgacaggacagtttcggaaccttattgttgttcttcaggtactactctagggaggatgctgaagatgctgtcaaatacattagtggaacaatgcttgacgatcgtccaatccgtgttgatttcgatcggggctttgaagaaggcagacagtggggccgtggacgaagtggtgtacaagctttacaaaccatgatatgtccgtgcgttgtagtagtaagaaagaactaatgttcacagttaaaaagtgtggaatgagaaccgacattaaaataggagaatatatataatgtgggtttcatacatatgttctatgtttcacatctaccaccgaaggccaagtacattttgatatactagcctaaaatgttctgctgatctgatatactagcctaaaatgttccgttgatctgattttttgctacaccctgctgccctctacatttggattgtctgtattttgattttttagttttatttttgttgcatgtataatccaatatgtgattgtatcttttgattcctggaaggatagagtttgcactagaagaggatgctcatgttgttggtgactgtgtaaaagtacctttctgtaattatcattgtctattgtttataaggattaatgttaaa

SEQ ID NO: 73605 - DNA, 1034 bp, Zea Mays
tcaggattgctgcaattactgttagtcatgaagaagatgaggtgtaaaaggttattttggagaagaaacaaactggcatggaaaaaggagccaagatttgatcagaatcacaaccaaatccttctcttatttgcattatgctaatttgattcaccataatgcttaccattcatactattatgcttgtttttttctctttcgtaatcatcgaaatggtccacttttcaaagttcaagcccaacttaattttttaaagcaaaaatgtagcagtacttaaggttttatctataatttatcaatggataagtgagttctattgctccagtttagagagagtctaaacaattttgagtattttgaaattctagatgagctataaatttcctacaggattattgggttagaagttcacgtgtaggcatcacatctgtgtgcttttgggttacccacttaggtggattgtctgagtcactcatgaaatattattgtgtaccatcacaacacatgatttctaagtgtgcaagcaagctaacgacgacttcgactagcttagcgccatggtcactgtgctgctcaacctcgtcaacctacccctccggtgaggtgtggggctgccagacgcctcctgtgaggctgacatagctggatacttagtagtggatcaataatgtactttgcaactgattaccttggttttgttgcatcgcgtacacctaactatcaattattatgctagcacaaaaattgaggaatgcagcaaataaggtatcttttctcacctatcttgttaatgcagtctgacaagtacttgagaaatggaatggtagtatgtttttgtttcttaggtaattagttcaccttatccttagatctctaagtttagatttgaatttgcttgaagtggatgctccctcatcataattttgtcccgtgtaaccagtgtcgttgccattagaattctcctatacagacatctatgcataaggagacatactttgctacagattctcaaggagacaacaacacaaaatcat

SEQ ID NO: 73606 - DNA, 818 bp, Zea Mays
atggcgctcttagttgttagatcccataaagggaaagtgatgggatacacttctccatttttccttttggcttttactacccagttccaactaacaaggaaaatcgagggtcaactgatctttatattatcaggtggatgcaatcaaaaccaagatgcaagtgcatgcgtcactgggttcgagatcgactacagccactgggtggacgagcagaaaaggcacatggcagagctgacgtcgacgctccaggggcagcagacgtcggagctggagctccgcctgctggtggagacgtggctcagcaactacgagcgcctgtttaggatcaaggcgacggcggccaacgcggacgtgttctacgtcatgtcgggcttgtggaagacccccgccaagaggttcttcctctggatcggtgggttccggccgtcggatgtcctcaaggatgtaagcaatctcatgcacctgttgttgctcgcaaggttcatccctcacaagtacaagatcaaagactcgaaagcttaggttgctttgagccgtggtggatctcccggtgtgatgacatggggctgggtctgggagctcttctcaaatctgggggttctcggtctgctcttctcaatttagtgttatctttttcttttagaacaatgccaaagatacatgacagactgctttgcttgtttttgacatgatgcaaaagcaatggagtctttacttttaaacctttgttatttttgttttgattcaattatgatactgctgaaatgtacggatatctattattttgatgcaatagtggtgttttgcgatgtttaaca

SEQ ID NO: 73607 - DNA, 2559 bp, Zea Mays
atggcgctcttagttgttagatcccataaagggaaagtgatgggatacacttctccatttttccttttggcttttactacccagttccaactaacaaggaaaatcgagggtcaactgatctttatattatcaggtggatgcaatcaaaaccaagatgcaagttgcaagtctggaacgaccgactaccattcaatgttgcaagtgatttctattgttaagaagctatgagcgaaaattttgtgtctcaagatttgaagcatgagaagcgttgcgggggagaagcttcagtgcaacattgttgttctatagggatcaacatcctcaagatcacttggaaaactttcacgaaaaacttgtaatgcaagcatatgttttattggaaaagttttccaagctgaatttctaaaagcctcctcactgctttagttatgctgaattggaatttgcaactaggggtttcttacaagtaaatttcttagctaaaggcatggtgcactgcacattgatctttcttcttctatcgtatgatgtgacttgtgattgctttgccaatgcgacctacatggagctggattgttattacagacaacagaactgtatttatcttgaataatgattgatggttaagtgcatgcgtcactgggttcgagatcgactacagccactgggtggacgagcagaaaaggcacatggcagagctgacgtcgacgctccaggggcagcagacgtcggagctggagctccgcctgctggtggagacgtggctcagcaactacgagcgcctgtttaggatcaaggcgacggcggccaacgcggacgtgttctacgtcatgtcgggcttgtggaagacccccgccaagaggttcttcctctggatcggtgggttccggccgtcggatgtcctcaaggatgttgctttgagccgtggtggatctcccggtgtgatgacatggggctgggtctgggagctcttctcaaatctgggggttctcggatttggttcagcttctcactttgtttttaatgagaagaagcagacaacaaattatagtgaaggctcctctcgtcccccgttgcttggtggatcacccccacggaaccagcctagccaaagacagggtgactattcttacctgaatagagtatttcgtgatctctttatccaggaaggtgaaagaaccagtggagctgctgggccctcaatgaataagatggagaaggccccaggagaagcgttcggtagaaggaaccctagcggtcctatgaaccagaccgacagttatgcgcaacagccacacgagaccgtatccatgtcgctaaagaaaattacatgtgtaaagtggtgctcggagtcagagagggatgctatctttgatgttctacagccacatttgcttactctttcttgcaagaaatatgccatttttcttgtaaagaagcttatagaacttgcctctaaaaaacagtttgccagattcatatcttcccttcatggtcgtgttgccaaccttcttcatcatactattggagctgcattcgttgattatgcatttcagcgaggaacacaacgtcagaaaaggcaattgttagttgaactgtactcccctgaacttcagctattcaaggatctgactgtgcaaagttcctcctgatacaatttccaagcttgggttgcagatatcatctgtcctgcttcatatgactattgtgattgataaaatcttggagaaaggtaccgttgagtacttaatagtgcacacggccatattggactactttacaattgcagataagacctcagcctcggatgctatttgtcaacttatcccccttcttactcaaggggcattaatcatagatggagatgaacctacaaacgctccagaactaccaaagaaagcaaaagctaagaagaaaaggtcgaaagagccacttattgttcggatcatgcagacaagggaaggattaaaactaggaattagttgcctcaagtatggcagtgcaaagattagctttggaagatacacgattggccaagcttgagcatggatgaaaattcctagatgatcgcaaagattgttgtggtttgtaatgatgcaatcattggccactctgagcatcaatatgttgctacagggatgcccacaaaagctgctctgaaggacaatgcttccaccagcgcggccgtagaggcggaagcaaggggttgggcttctgtcggtgctggacagcgtgatgccaaacgtgccagccactcttgctgtcgtccgcctccctcttccacgataggttcgcccgcaccgagcctagacgcagatagctctcgaccgtccgctacagtgctgtcgaagagacggtaatggaggaggcctcgcccgagacggtggaggagccactgctggtgagcgcaatcagagggaaaaaggttgagagggcaccaatctggctcatgaggcaagccgagaggtacatgaacacaagtccacttccattttgtgacagtcttctatgttggtctgctaagcatttctgtaattaacattccagtgcgtatctcga

SEQ ID NO: 73608 - DNA, 2069 bp, Zea Mays
atggcgctcttagttgttagatcccataaagggaaagtgatgggatacacttctccatttttccttttggcttttactacccagttccaactaacaaggaaaatcgagggtcaactgatctttatattatcaggtggatgcaatcaaaaccaagatgcaagtgcatgcgtcactgggttcgagatcgactacagccactgggtggacgagcagaaaaggcacatggcagagctgacgtcgacgctccaggggcagcagacgtcggagctggagctccgcctgctggtggagacgtggctcagcaactacgagcgcctgtttaggatcaaggcgacggcggccaacgcggacgtgttctacgtcatgtcgggcttgtggaagacccccgccaagaggttcttcctctggatcggtgggttccggccgtcggatgtcctcaaggatgttgctttgagccgtggtggatctcccggtgtgatgacatggggctgggtctgggagctcttctcaaatctgggggttctcggatttggttcagcttctcactttgtttttaatgagaagaagcagacaacaaattatagtgaaggctcctctcgtcccccgttgcttggtggatcacccccacggaaccagcctagccaaagacagggtgactattcttacctgaatagagtatttcgtgatctctttatccaggaagataccagttcaactatgtgtttgactggaccattctgaagtatcctcagataggctctaacctgtgaaccagggcaggtgaaagaaccagtggagctgctgggccctcaatgaataagatggagaaggccccaggagaagcgttcggtagaaggaaccctagcggtcctatgaaccagaccgacagttatgcgcaacagccacacgagaccgtatccatgtcgctaaagaaaattgctgcaaggtggtgtctatattgttaagctgaggaggctgaaatgatttcaaacatgtgtaaagtggtgctcggagtcagagagggatgctatctttgatgttctacagccacatttgcttactctttcttgcaagaaatatgccatttttcttgtaaagaagcttatagaacttgtcgttgattatgcatttcagcgaggaacacaacgtcagaaaaggcaattgttagttgaactgtactcccctgaacttcagctattcaaggatctgactgtgcaaagttcctcctgatacaatttccaagcttgggttgcagatatcatctgtcctgcttcatatgactattgtgattgataaaatcttggagaaaggtaccgttgagtacttaatagtgcacacggccatattggactactttacaattgcagataagacctcagcctcggatgctatttgtcaacttatcccccttcttactcaaggggcattaatcatagatggagatgaacctacaaacgctccagaactaccaaagaaagcaaaagctaagaagaaaaggtcgaaagagccacttattgttcggatcatgcagacaagggaaggattaaaactaggaattagttgcctcaagtatggcagtgcaaagattagctttggaagatacacgattggccaagcttgagcatggatgaaaattcctagatgatcgcaaagattgttgtggtttgtaatgatgcaatcattggccactctgagcatcaatatgttgctacagggatgcccacaaaagctgctctgaaggacaatgcttccaccagcgcggccgtagaggcggaagcaaggggttgggcttctgtcggtgctggacagcgtgatgccaaacgtgccagccactcttgctgtcgtccgcctccctcttccacgataggttcgcccgcaccgagcctagacgcagatagctctcgaccgtccgctacagtgctgtcgaagagacggtaatggaggaggcctcgcccgagacggtggaggagccactgctggtgagcgcaatcagagggaaaaaggttgagagggcaccaatctggctcatgaggcaagccgagagtgcctcaagattctgaaggtttccg

SEQ ID NO: 73609 - DNA, 2650 bp, Zea Mays
ctagcaaatgttcgaggacacttgatctgcaccaatgaggacacttcaagttgttgtctcaatctttccagttgacctttggcgagcaaaacacagagaagcaagcacatgccattctcgcttattctttggatcaaggtgccagtatcttagacacagtagaaattttccaactaacaaggaaaatcgagggtcaactgatctttatattatcaggtggatgcaatcaaaaccaagatgcaagttgcaagtctggaacgaccgactaccattcaatgttgcaagtgatttctattgttaagaagctatgagcgaaaattttgtgtctcaagatttgaagcatgagaagcgttgcgggggagaagcttcagtgcaacattgttgttctatagggatcaacatcctcaagatcacttggaaaactttcacgaaaaacttgtaatgcaagcatatgttttattggaaaagttttccaagctgaatttctaaaagcctcctcactgctttagttatgctgaattggaatttgcaactaggggtttcttacaagtaaatttcttagctaaaggcatggtgcactgcacattgatctttcttcttctatcgtatgatgtgacttgtgattgctttgccaatgcgacctacatggagctggattgttattacagacaacagaactgtatttatcttgaataatgattgatggttaagtgcatgcgtcactgggttcgagatcgactacagccactgggtggacgagcagaaaaggcacatggcagagctgacgtcgacgctccaggggcagcagacgtcggagctggagctccgcctgctggtggagacgtggctcagcaactacgagcgcctgtttaggatcaaggcgacggcggccaacgcggacgtgttctacgtcatgtcgggcttgtggaagacccccgccaagaggttcttcctctggatcggtgggttccggccgtcggatgtcctcaaggatgttgctttgagccgtggtggatctcccggtgtgatgacatggggctgggtctgggagctcttctcaaatctgggggttctcggatttggttcagcttctcactttgtttttaatgagaagaagcagacaacaaattatagtgaaggctcctctcgtcccccgttgcttggtggatcacccccacggaaccagcctagccaaagacagggtgactattcttacctgaatagagtatttcgtgatctctttatccaggaaggtgaaagaaccagtggagctgctgggccctcaatgaataagatggagaaggccccaggagaagcgttcggtagaaggaaccctagcggtcctatgaaccagaccgacagttatgcgcaacagccacacgagaccgtatccatgtcgctaaagaaaattacatgtgtaaagtggtgctcggagtcagagagggatgctatctttgatgttctacagccacatttgcttactctttcttgcaagaaatatgccatttttcttgtaaagaagcttatagaacttgcctctaaaaaacagtttgccagattcatatcttcccttcatggtcgtgttgccaaccttcttcatcatactattggagctgcattcgttgattatgcatttcagcgaggaacacaacgtcagaaaaggcaattgttagttgaactgtactcccctgaacttcagctattcaaggatctgactgtgcaaagttcctcctgtttgatagatacaatttccaagcttgggttgcagatatcatctgtcctgcttcatatgactattgtgattgataaaatcttggagaaaggtaccgttgagtacttaatagtgcacacggccatattggactactttacaattgcagataagacctcagcctcggatgctatttgtcaacttatcccccttcttactcaaggggcattaatcatagatggagatgaacctacaaacgctccagaactaccaaagaaagcaaaagctaagaagaaaaggtcgaaagagccacttattgttcggatcatgcagacaagggaaggattaaaactaggaattagttgcctcaagtatggcagtgcaaagattagctttggaagatacacgattggccaagcttgagcatggatgaaaattcctagatgatcgcaaagattgttgtggtttgtaatgatgcaatcattggccactctgagcatcaatatgttgctacagggatgcccacaaaagctgctctgaaggacaatgcttccaccagcgcggccgtagaggcggaagcaaggggttgggcttctgtcggtgctggacagcgtgatgccaaacgtgccagccactcttgctgtcgtccgcctccctcttccacgataggttcgcccgcaccgagcctagacgcagatagctctcgaccgtccgctacagtgctgtcgaagagacggtaatggaggaggcctcgcccgagacggtggaggagccactgctggtgagcgcaatcagagggaaaaaggttgagagggcaccaatctggctcatgaggcaagccgagaggtacatgaacacaagtccacttccattttgtgacagtcttctatgttggtctgctaagcatttctgtaattaacattccagtgcgtatctcga

SEQ ID NO: 73610 - DNA, 2728 bp, Zea Mays
ctagcaaatgttcgaggacacttgatctgcaccaatgaggacacttcaagttgttgtctcaatctttccagttgacctttggcgagcaaaacacagagaagcaagcacatgccattctcgcttattctttggatcaaggtgccagtatcttagacacagtagaaattttccaactaacaaggaaaatcgagggtcaactgatctttatattatcaggtggatgcaatcaaaaccaagatgcaagttgcaagtctggaacgaccgactaccattcaatgttgcaagtgatttctattgttaagaagctatgagcgaaaattttgtgtctcaagatttgaagcatgagaagcgttgcgggggagaagcttcagtgcaacattgttgttctatagggatcaacatcctcaagatcacttggaaaactttcacgaaaaacttgtaatgcaagcatatgttttattggaaaagttttccaagctgaatttctaaaagcctcctcactgctttagttatgctgaattggaatttgcaactaggggtttcttacaagtaaatttcttagctaaaggcatggtgcactgcacattgatctttcttcttctatcgtatgatgtgacttgtgattgctttgccaatgcgacctacatggagctggattgttattacagacaacagaactgtatttatcttgaataatgattgatggttaagtgcatgcgtcactgggttcgagatcgactacagccactgggtggacgagcagaaaaggcacatggcagagctgacgtcgacgctccaggggcagcagacgtcggagctggagctccgcctgctggtggagacgtggctcagcaactacgagcgcctgtttaggatcaaggcgacggcggccaacgcggacgtgttctacgtcatgtcgggcttgtggaagacccccgccaagaggttcttcctctggatcggtgggttccggccgtcggatgtcctcaaggatgtaagcaatctcatgcacctgttgttgctcgcaaggttcatccctcacaagtacaagatcaaagactcgaaagcttaggttgctttgagccgtggtggatctcccggtgtgatgacatggggctgggtctgggagctcttctcaaatctgggggttctcggatttggttcagcttctcactttgtttttaatgagaagaagcagacaacaaattatagtgaaggctcctctcgtcccccgttgcttggtggatcacccccacggaaccagcctagccaaagacagggtgactattcttacctgaatagagtatttcgtgatctctttatccaggaaggtgaaagaaccagtggagctgctgggccctcaatgaataagatggagaaggccccaggagaagcgttcggtagaaggaaccctagcggtcctatgaaccagaccgacagttatgcgcaacagccacacgagaccgtatccatgtcgctaaagaaaattacatgtgtaaagtggtgctcggagtcagagagggatgctatctttgatgttctacagccacatttgcttactctttcttgcaagaaatatgccatttttcttgtaaagaagcttatagaacttgcctctaaaaaacagtttgccagattcatatcttcccttcatggtcgtgttgccaaccttcttcatcatactattggagctgcattcgttgattatgcatttcagcgaggaacacaacgtcagaaaaggcaattgttagttgaactgtactcccctgaacttcagctattcaaggatctgactgtgcaaagttcctcctgtttgatagatacaatttccaagcttgggttgcagatatcatctgtcctgcttcatatgactattgtgattgataaaatcttggagaaaggtaccgttgagtacttaatagtgcacacggccatattggactactttacaattgcagataagacctcagcctcggatgctatttgtcaacttatcccccttcttactcaaggggcattaatcatagatggagatgaacctacaaacgctccagaactaccaaagaaagcaaaagctaagaagaaaaggtcgaaagagccacttattgttcggatcatgcagacaagggaaggattaaaactaggaattagttgcctcaagtatggcagtgcaaagattagctttggaagatacacgattggccaagcttgagcatggatgaaaattcctagatgatcgcaaagattgttgtggtttgtaatgatgcaatcattggccactctgagcatcaatatgttgctacagggatgcccacaaaagctgctctgaaggacaatgcttccaccagcgcggccgtagaggcggaagcaaggggttgggcttctgtcggtgctggacagcgtgatgccaaacgtgccagccactcttgctgtcgtccgcctccctcttccacgataggttcgcccgcaccgagcctagacgcagatagctctcgaccgtccgctacagtgctgtcgaagagacggtaatggaggaggcctcgcccgagacggtggaggagccactgctggtgagcgcaatcagagggaaaaaggttgagagggcaccaatctggctcatgaggcaagccgagaggtacatgaacacaagtccacttccattttgtgacagtcttctatgttggtctgctaagcatttctgtaattaacattccagtgcgtatctcga

SEQ ID NO: 73611 - DNA, 2410 bp, Zea Mays
attatctataaagtatggtaaacttttctgtccaccttttctcttggcatttttacaattattatctataaagtatggtaactcagcacttctgtgtggctttgaaatgaagagcgccttttgggttttttgctaagagtaatggtttgtgatctcgaccctccttgtgttttgtatttggagaccagtggtgtgtttctaatatatagcaatactctttcaaggcctcacttgtgagtttgagggtgcatttacttgtactagacaagtttgcacttaaacatttgtttactgtaggtatcgtatttattttaatttgcaaatccattctttaagaatgtgagtccagttccactgtatttcatcatggaaatgaatgtgctagaaaagctcttattttgtgtttttcttatttgtgccatgatgcatttttagtttattgaagttctttacttctgttattgcttgggaagcattataatttacattcaatttgcttgtatggttcatgttttcttaactttgtttgagtggctacaagttctgtactaatgatattgctagggaagccttataattttcattccatttgcttggatgattcattttttcttaagagtttttttgctatcagtatgattcgccaaatcaagttttggattaaatttgtggttaaatgaggacttatgcttatttggcttgatttgttgaggtttcatgtgagtctccatgttatgtttgatgagctttgataatttgtagtgttttttggtgcatgtattaatattttttacatggcgttcgaatatatgtatatgtttgcgtttaatcttcattcatgtttagcattgttatcacagtcacaagcagcgcctctttgagatcttaagcatcatttgcaaattccccttggttgtcaatcgctctgctaattcagtcaactcctatcttgtcaggtcaaatagttttgtactcaacttctatccacgcaacagttctgaggcccccgatgaagtatatctcactataattagtgtgatagttcgtcgcagcttctaattcacacaaccctaatgacaaacaaaacattgcttctgattagcagggaagcacaaaatttaaaccatatagctgaattcaaatgataaacagatagaaaaaacacggtatgatagagggacataactaatcagaagtctagactttatgttgtgcatcctgtaatagtaaaaatttccccattgttgtgatgtccattgctgatgttttgctacatattgcttatgcgtcaattccttgctgctgctgagggctgcaaactttcaaaactaggctgcaaggtggtgtctatattgttaagctgaggaggctgaaatgatttcaatcgttgattatgcatttcagcgaggaacacaacgtcagaaaaggcaattgttagttgaactgtactcccctgaacttcagctattcaaggatctgactgtgcaaagttcctcctgtttgatagatacaatttccaagcttgggttgcagatatcatctgtcctgcttcatatgactattgtgattgataaaatcttggagaaaggtaccgttgagtacttaatagtgcacacggccatattggactactttacaattgcagataagacctcagcctcggatgctatttgtcaacttatcccccttcttactcaaggggcattaatcatagatggagatgaacctacaaacgctccagaactaccaaagaaagcaaaagctaagaagaaaaggtcgaaagagccacttattgttcggatcatgcagacaagggaaggattaaaactaggaattagttgcctcaagtatggcagtgcaaagctttggaagatacacgattggccaagcttgagcatggatgaaaattcctagatgatcgcaaagattgttgtggtttgtaatgatgcaatcattggccactctgagcatcaatatgttgctacagggatgcccacaaaagctgctctgaaggacaatgcttccaccagcgcggccgtagaggcggaagcaaggggttgggcttctgtcggtgctggacagcgtgatgccaaacgtgccagccactcttgctgtcgtccgcctccctcttccacgataggttcgcccgcaccgagcctagacgcagatagctctcgaccgtccgctacagtgctgtcgaagagacggtaatggaggaggcctcgcccgagacggtggaggagccactgctggtgagcgcaatcagagggaaaaaggttgagagggcaccaatctggctcatgaggcaagccgagaggtacatgaacacaagtccacttccattttgtgacagtcttctatgttggtctgctaagcatttctgtaattaacattccagtgcgtatctcga

SEQ ID NO: 73612 - DNA, 2531 bp, Zea Mays
attatctataaagtatggtaaacttttctgtccaccttttctcttggcatttttacaattattatctataaagtatggtaactcagcacttctgtgtggctttgaaatgaagagcgccttttgggttttttgctaagagtaatggtttgtgatctcgaccctccttgtgttttgtatttggagaccagtggtgtgtttctaatatatagcaatactctttcaaggcctcacttgtgagtttgagggtgcatttacttgtactagacaagtttgcacttaaacatttgtttactgtaggtatcgtatttattttaatttgcaaatccattctttaagaatgtgagtccagttccactgtatttcatcatggaaatgaatgtgctagaaaagctcttattttgtgtttttcttatttgtgccatgatgcatttttagtttattgaagttctttacttctgttattgcttgggaagcattataatttacattcaatttgcttgtatggttcatgttttcttaactttgtttgagtggctacaagttctgtactaatgatattgctagggaagccttataattttcattccatttgcttggatgattcattttttcttaagagtttttttgctatcagtatgattcgccaaatcaagttttggattaaatttgtggttaaatgaggacttatgcttatttggcttgatttgttgaggtttcatgtgagtctccatgttatgtttgatgagctttgataatttgtagtgttttttggtgcatgtattaatattttttacatggcgttcgaatatatgtatatgtttgcgtttaatcttcattcatgtttagcattgttatcacagtcacaagcagcgcctctttgagatcttaagcatcatttgcaaattccccttggttgtcaatcgctctgctaattcagtcaactcctatcttgtcaggtcaaatagttttgtactcaacttctatccacgcaacagttctgaggcccccgatgaagtatatctcactataattagtgtgatagttcgtcgcagcttctaattcacacaaccctaatgacaaacaaaacattgcttctgattagcagggaagcacaaaatttaaaccatatagctgaattcaaatgataaacagatagaaaaaacacggtatgatagagggacataactaatcagaagtctagactttatgttgtgcatcctgtaatagtaaaaatttccccattgttgtgatgtccattgctgatgttttgctacatattgcttatgcgtcaattccttgctgctgctgagggctgcaaactttcaaaactaggctgcaaggtggtgtctatattgttaagctgaggaggctgaaatgatttcaaacatgtgtaaagtggtgctcggagtcagagagggatgctatctttgatgttctacagccacatttgcttactctttcttgcaagaaatatgccatttttcttgtaaagaagcttatagaacttgtcgttgattatgcatttcagcgaggaacacaacgtcagaaaaggcaattgttagttgaactgtactcccctgaacttcagctattcaaggatctgactgtgcaaagttcctcctgatacaatttccaagcttgggttgcagatatcatctgtcctgcttcatatgactattgtgattgataaaatcttggagaaaggtaccgttgagtacttaatagtgcacacggccatattggactactttacaattgcagataagacctcagcctcggatgctatttgtcaacttatcccccttcttactcaaggggcattaatcatagatggagatgaacctacaaacgctccagaactaccaaagaaagcaaaagctaagaagaaaaggtcgaaagagccacttattgttcggatcatgcagacaagggaaggattaaaactaggaattagttgcctcaagtatggcagtgcaaagattagctttggaagatacacgattggccaagcttgagcatggatgaaaattcctagatgatcgcaaagattgttgtggtttgtaatgatgcaatcattggccactctgagcatcaatatgttgctacagggatgcccacaaaagctgctctgaaggacaatgcttccaccagcgcggccgtagaggcggaagcaaggggttgggcttctgtcggtgctggacagcgtgatgccaaacgtgccagccactcttgctgtcgtccgcctccctcttccacgataggttcgcccgcaccgagcctagacgcagatagctctcgaccgtccgctacagtgctgtcgaagagacggtaatggaggaggcctcgcccgagacggtggaggagccactgctggtgagcgcaatcagagggaaaaaggttgagagggcaccaatctggctcatgaggcaagccgagaggtacatgaacacaagtccacttccattttgtgacagtcttctatgttggtctgctaagcatttctgtaattaacattccagtgcgtatctcga

SEQ ID NO: 73613 - DNA, 2415 bp, Zea Mays
attatctataaagtatggtaaacttttctgtccaccttttctcttggcatttttacaattattatctataaagtatggtaactcagcacttctgtgtggctttgaaatgaagagcgccttttgggttttttgctaagagtaatggtttgtgatctcgaccctccttgtgttttgtatttggagaccagtggtgtgtttctaatatatagcaatactctttcaaggcctcacttgtgagtttgagggtgcatttacttgtactagacaagtttgcacttaaacatttgtttactgtaggtatcgtatttattttaatttgcaaatccattctttaagaatgtgagtccagttccactgtatttcatcatggaaatgaatgtgctagaaaagctcttattttgtgtttttcttatttgtgccatgatgcatttttagtttattgaagttctttacttctgttattgcttgggaagcattataatttacattcaatttgcttgtatggttcatgttttcttaactttgtttgagtggctacaagttctgtactaatgatattgctagggaagccttataattttcattccatttgcttggatgattcattttttcttaagagtttttttgctatcagtatgattcgccaaatcaagttttggattaaatttgtggttaaatgaggacttatgcttatttggcttgatttgttgaggtttcatgtgagtctccatgttatgtttgatgagctttgataatttgtagtgttttttggtgcatgtattaatattttttacatggcgttcgaatatatgtatatgtttgcgtttaatcttcattcatgtttagcattgttatcacagtcacaagcagcgcctctttgagatcttaagcatcatttgcaaattccccttggttgtcaatcgctctgctaattcagtcaactcctatcttgtcaggtcaaatagttttgtactcaacttctatccacgcaacagttctgaggcccccgatgaagtatatctcactataattagtgtgatagttcgtcgcagcttctaattcacacaaccctaatgacaaacaaaacattgcttctgattagcagggaagcacaaaatttaaaccatatagctgaattcaaatgataaacagatagaaaaaacacggtatgatagagggacataactaatcagaagtctagactttatgttgtgcatcctgtaatagtaaaaatttccccattgttgtgatgtccattgctgatgttttgctacatattgcttatgcgtcaattccttgctgctgctgagggctgcaaactttcaaaactaggctgcaaggtggtgtctatattgttaagctgaggaggctgaaatgatttcaatcgttgattatgcatttcagcgaggaacacaacgtcagaaaaggcaattgttagttgaactgtactcccctgaacttcagctattcaaggatctgactgtgcaaagttcctcctgtttgatagatacaatttccaagcttgggttgcagatatcatctgtcctgcttcatatgactattgtgattgataaaatcttggagaaaggtaccgttgagtacttaatagtgcacacggccatattggactactttacaattgcagataagacctcagcctcggatgctatttgtcaacttatcccccttcttactcaaggggcattaatcatagatggagatgaacctacaaacgctccagaactaccaaagaaagcaaaagctaagaagaaaaggtcgaaagagccacttattgttcggatcatgcagacaagggaaggattaaaactaggaattagttgcctcaagtatggcagtgcaaagattagctttggaagatacacgattggccaagcttgagcatggatgaaaattcctagatgatcgcaaagattgttgtggtttgtaatgatgcaatcattggccactctgagcatcaatatgttgctacagggatgcccacaaaagctgctctgaaggacaatgcttccaccagcgcggccgtagaggcggaagcaaggggttgggcttctgtcggtgctggacagcgtgatgccaaacgtgccagccactcttgctgtcgtccgcctccctcttccacgataggttcgcccgcaccgagcctagacgcagatagctctcgaccgtccgctacagtgctgtcgaagagacggtaatggaggaggcctcgcccgagacggtggaggagccactgctggtgagcgcaatcagagggaaaaaggttgagagggcaccaatctggctcatgaggcaagccgagaggtacatgaacacaagtccacttccattttgtgacagtcttctatgttggtctgctaagcatttctgtaattaacattccagtgcgtatctcga

SEQ ID NO: 73614 - DNA, 2478 bp, Zea Mays
aacttttctgtccaccttttctcttggcatttttacaattattatctataaagtatggtaactcagcacttctgtgtggctttgaaatgaagagcgccttttgggttttttgctaagagtaatggtttgtgatctcgaccctccttgtgttttgtatttggagaccagtggtgtgtttctaatatatagcaatactctttcaaggcctcacttgtgagtttgagggtgcatttacttgtactagacaagtttgcacttaaacatttgtttactgtaggtatcgtatttattttaatttgcaaatccattctttaagaatgtgagtccagttccactgtatttcatcatggaaatgaatgtgctagaaaagctcttattttgtgtttttcttatttgtgccatgatgcatttttagtttattgaagttctttacttctgttattgcttgggaagcattataatttacattcaatttgcttgtatggttcatgttttcttaactttgtttgagtggctacaagttctgtactaatgatattgctagggaagccttataattttcattccatttgcttggatgattcattttttcttaagagtttttttgctatcagtatgattcgccaaatcaagttttggattaaatttgtggttaaatgaggacttatgcttatttggcttgatttgttgaggtttcatgtgagtctccatgttatgtttgatgagctttgataatttgtagtgttttttggtgcatgtattaatattttttacatggcgttcgaatatatgtatatgtttgcgtttaatcttcattcatgtttagcattgttatcacagtcacaagcagcgcctctttgagatcttaagcatcatttgcaaattccccttggttgtcaatcgctctgctaattcagtcaactcctatcttgtcaggtcaaatagttttgtactcaacttctatccacgcaacagttctgaggcccccgatgaagtatatctcactataattagtgtgatagttcgtcgcagcttctaattcacacaaccctaatgacaaacaaaacattgcttctgattagcagggaagcacaaaatttaaaccatatagctgaattcaaatgataaacagatagaaaaaacacggtatgatagagggacataactaatcagaagtctagactttatgttgtgcatcctgtaatagtaaaaatttccccattgttgtgatgtccattgctgatgttttgctacatattgcttatgcgtcaattccttgctgctgctgagggctgcaaactttcaaaactaggctgcaaggtggtgtctatattgttaagctgaggaggctgaaatgatttcaaacatgtgtaaagtggtgctcggagtcagagagggatgctatctttgatgttctacagccacatttgcttactctttcttgcaagaaatatgccatttttcttgtaaagaagcttatagaacttgtcgttgattatgcatttcagcgaggaacacaacgtcagaaaaggcaattgttagttgaactgtactcccctgaacttcagctattcaaggatctgactgtgcaaagttcctcctgatatcatctgtcctgcttcatatgactattgtgattgataaaatcttggagaaaggtaccgttgagtacttaatagtgcacacggccatattggactactttacaattgcagataagcctcggatgctatttgtcaacttatcccccttcttactcaaggggcattaatcatagatggagatgaacctacaaacgctccagaactaccaaagaaagcaaaagctaagaagaaaaggtcgaaagagccacttattgttcggatcatgcagacaagggaaggattaaaactaggaattagttgcctcaagtatggcagtgcaaagattagctttggaagatacacgattggccaagcttgagcatggatgaaaattcctagatgatcgcaaagattgttgtggtttgtaatgatgcaatcattggccactctgagcatcaatatgttgctacagggatgcccacaaaagctgctctgaaggacaatgcttccaccagcgcggccgtagaggcggaagcaaggggttgggcttctgtcggtgctggacagcgtgatgccaaacgtgccagccactcttgctgtcgtccgcctccctcttccacgataggttcgcccgcaccgagcctagacgcagatagctctcgaccgtccgctacagtgctgtcgaagagacggtaatggaggaggcctcgcccgagacggtggaggagccactgctggtgagcgcaatcagagggaaaaaggttgagagggcaccaatctggctcatgaggcaagccgagaggtacatgaacacaagtccacttccattttgtgacagtcttctatgttggtctgctaagcatttctgtaattaacattccagtgcgtatctcga

SEQ ID NO: 73615 - DNA, 2099 bp, Zea Mays
ctccggtctattctctactcttcttccccagtcctccctactcagtacttacctcagcacgccactgctcgaaggcggagcgcctccaaaatccatcccaatcccaaatcctctgaattcggacgccgctcgccccacgcagatggatgcccgcccctcgattcgcccgcgctgagcatccgaacccggttcccgccgcctcggctcattccggcgctgaaagattcagctccgcgcttccggccgccggagctcggtaatggcggggttctagcgcggcggacttaaagatctagcctcctcttttcctttccattttctctctttcgctgctaccccctcacacccccacggcgatggtcacggagatggcggcgcgcggcggcgaggcggcggcgtttggcgcggagaccgaccgcggcgacttcgaggtgtttcgcagtggctccgcgccgcccactgtcgagggagccctgggcgccgccggggccgacggcggccttctcgtggacgacgacctccgcgccgacccggcgtaccagagctactactactccagtgcgcacctcaacccgcgcctcccaccgccgctcctgtccaaggaggactggcggtcctcgcaccaccgcctccgctccgcgggcttcggcgggatcggggacggcaggaggcagcagcagcaggcgtcggctgccgaggggactgtcggcctgcccgggatcgatcttggtcgccagaggagcttctccaccatctttcaggctatagaagttgttgatttggagctgcagactaaaatggttgcggagctggagggccatgtcatgcgctgtgtgcgtgatcaaaatgggaaccatgttatacagaaatgtatagagtgcattcctcagcatgctattgagtttattatctcgacattctatggccaagttgtaatgctatccactcatccatatggttgtcgagttattcagagggttctagagcattgtgatgatcctaaaacacagcaaataatgatggatgagattctccagtctgtttgcttgctggctcaggaccagtatggcaactatgttgttcagcatgttctggaacatggcaaaccccatgagagatcagctattattgagaagctaattggccaaattgtgcaaatgagccagcaaaaatttgcctcaaatgtcatcgagaagtgcttagtctttggaaatcctgtagaacgtcaggttctgattggtgagatgcttggatccactagcgaaagcgaacctcttgaggtaatgatgaaagaccagtttggaaactatgtggtgcagaaggtgttagaaacttgtgacgatcagcagagagagatgatcctaacaaggataaagacacacctgaacacactcaagaagtacacatatgggaagcacatagtagcacgcgtagagaagcttgttgctgctggagagaagcgccttgggcttcaaccagcatgcaccgccgcctgaagggcaaactctctagttgtacagctaacagttgctaggtttgcactcacatttttttctctctactaaaaaccctatatgaaggccccttttggcctcgccggaaaataaacactgtatgtttgcgcgaagagtgtacattaattctgtagcacaagacccatggggcggaatcaatggaggagtgatgcgtgtgagtccgaaggctgctgtaaagaggaagaagatggatggaaggagtgagaagcatgtcggttactctgccgctgtacaaattaaacttagctcttagagtgaggagaaagtaagctgttagctgtctgtctaaaaggaaaaaaaagaaggaaatggtgaggccatcagctccctcctgtggcttttcctgttgtctgtctggcctttgttgtaacataaagctgaggcgcactagcctgccttcgttttcacagttaagctgaagttattagtatcagctttcttgaactgtttggtatgtaatccaggtccctgatgtctgactgttttaattgcaatattcatcaccctgataaacttactttttgtttgttcttgttgagatgttctgttgtaaatttcttttct

SEQ ID NO: 73616 - DNA, 1611 bp, Zea Mays
tttgaaaaacggccgacacgaaggcccctcgggtgcgttttttttacgctgtcaatgcataacctgcgttggcattccgcctgctggacttcctcgtgctgtgtctctgtctgtcgctctcgctctcagacgactgggccgccgccgcttggtgctgaggctttcgttggtctcttcggcggcgacgagcacccaccagcagttctgtagaaatggctgatggtgaggacatccagcctcttgtctgcgacaatggcaccggaatggtcaaggctggttttgctggggacgatgcaccaagggcggttttccctagcattgttggccgtcctcgccacactggtgtcatggtagggatgggacagaaggatgcatatgttggcgatgaggcacagtccaagagaggtattctcacgctcaagtacccgattgagcacggtattgtgagcaactgggatgacatggagaaaatctggcatcatactttctacaacgagcttcgtgttgcaccagaggagcaccctgtgttgctcactgaggctcctttgaacccaaaggccaacagggagaagatgacccaaattatgtttgagactttcaatgttcctgccatgtatgttgcaatccaagcagttctatcactctatgctagtgggcgtactactggtattgttctttgactctggtgatggtgtgagccacactgtgcccatttacgaaggatatgcccttcctcatgccattcttcgtttggatcttgctggtcgggacctcacagactccctcatgaaaatcctgactgagaggggttactccttcacaacctctgccgagcgagaaattgtaagggacatcaaggagaagctggcatatatagcccttgactatgagcaagagttggaaactgccaagaacagctcctcagttgaaaagagctatgagctacctgatggccaagtaatcaccattggtgcagagagattcagatgccctgaggtcctcttccagccatccatgattggtatggaggctgccggaatccatgagacaacatacaattcaatcatgaagtgcgacgtggatatcaggaaggacctctacggcaacattgtgctcagtggaggttcgactatgttcccgggaatcgctgatcgtatgagcaaggagatcacttcccttgcaccaagcagcatgaagatcaaggtcgttgcaccgcctgagaggaagtatagtgtctggataggagggtccatcctagcctcgctgagcactttccaacagatgtggatatctaaggaggagtacgatgagtctggcccggcaattgttcacaggaagtgcttctaggcttcgcaagttcctcatcgttgcctagtctcaagttatgtccccttcatttctcaagatacgtgtggcagatttgcatgagtagagtttgaatatggggatgtggatgagtaagctgctgccaattgtgaagacttggaatataaacagtgacgtagtgcagatatttgacaaccggtggttacacaacaatggtagcctagtttggatttttttaacaaccagaaaacaagtgttagaagagtagcctctgctgcattttat

SEQ ID NO: 73617 - DNA, 1851 bp, Zea Mays
tttgaaaaacggccgacacgaaggcccctcgggtgcgttttttttacgctgtcaatgcataacctgcgttggcattccgcctgctggacttcctcgtgctgtgtctctgtctgtcgctctcgctctcagacgactgggccgccgccgcttggtgctgaggctttcgttggtctcttcggcggcgacgagcacccaccagcagttctgtagaaatggctgatggtgaggacatccagcctcttgtctgcgacaatggcaccggaatggtcaaggctggttttgctggggacgatgcaccaagggcggttttccctagcattgttggccgtcctcgccacactggtgtcatggtagggatgggacagaaggatgcatatgttggcgatgaggcacagtccaagagaggtattctcacgctcaagtacccgattgagcacggtattgtgagcaactgggatgacatggagaaaatctggcatcatactttctacaacgagcttcgtgttgcaccagaggagcaccctgtgttgctcactgaggctcctttgaacccaaaggccaacagggagaagatgacccaaattatgtttgagactttcaatgttcctgccatgtatgttgcaatccaagcagttctatcactctatgctagtgggcgtactactggtattgttctttgactctggtgatggtgtgagccacactgtgcccatttacgaaggatatgcccttcctcatgccattcttcgtttggatcttgctggtcgggacctcacagactccctcatgaaaatcctgactgagaggggttactccttcacaacctctgccgagcgagaaattgtaagggacatcaaggagaagctggcatatatagcccttgactatgagcaagagttggaaactgccaagaacagctcctcagttgaaaagagctatgagctacctgatggccaagtaatcaccattggtgcagagagattcagatgccctgaggtcctcttccagccatccatgattggtatggaggctgccggaatccatgagacaacatacaattcaatcatgaagtgcgacgtggatatcaggaaggacctctacggcaacattgtgctcagtggaggttcgactatgttcccgggaatcgctgatcgtatgagcaaggagatcacttcccttgcaccaagcagcatgaagatcaaggtcgttgcaccgcctgagaggaagtatagtgtctggataggagggtccatcctagcctcgctgagcactttccaacagatgtggatatctaaggaggagtacgatgagtctggcccggcaattgttcacaggaagtgcttctaggcttcgcaagttcctcatcgttgcctagtctcaagttatgtccccttcatttctcaagatacgtgtggcagatttgcatggtacggttcatttatcaaattatgcccaccccctctttgtatgttgtggctccaatccatgtgcgagcacgctgtgtctgtcgtgacacctggttcgtgagatgggttgtcaaacttgattggtttgttgtgcgtggctggaagagctgatagttatatatttggcttggactgtgccgcttgtatgtatctgaattctgaaagcgttgtaatctgagcatccgtgcaaagtatgaatggcccttttatatgggctggattttccggtttctatacaatttggtgtttgtcgactgccaagacttaaaatataaacatgatcgtattgcagatattgaactgtgcaactggagcttatatacaacaatgatagcttggtttggattttcaataagcacaagaaacaaatgttgcatgagttttg

SEQ ID NO: 73618 - DNA, 1372 bp, Zea Mays
tttgaaaaacggccgacacgaaggcccctcgggtgcgttttttttacgctgtcaatgcataacctgcgttggcattccgcctgctggacttcctcgtgctgtgtctctgtctgtcgctctcgctctcagacgactgggccgccgccgcttggtgctgaggctttcgttggtctcttcggcggcgacgagcacccaccagcagttctgtagaaatggctgatggtgaggacatccagcctcttgtctgcgacaatggcaccggaatggtcaaggctggttttgctggggacgatgcaccaagggcggttttccctagcattgttggccgtcctcgccacactggtgtcatggtagggatgggacagaaggatgcatatgttggcgatgaggcacagtccaagagaggtattctcacgctcaagtacccgattgagcacggtattgtgagcaactgggatgacatggagaaaatctggcatcatactttctacaacgagcttcgtgttgcaccagaggagcaccctgtgttgctcactgaggctcctttgaacccaaaggccaacagggagaagatgacccaaattatgtttgagactttcaatgttcctgccatgtatgttgcaatccaagcagttctatcactctatgctagtgggcgtactactggtattgttctttgactctggtgatggtgtgagccacactgtgcccatttacgaaggatatgcccttcctcatgccattcttcgtttggatcttgctggtcgggacctcacagactccctcatgaaaatcctgactgagaggggttactccttcacaacctctgccgagcgagaaattgtaagggacatcaaggagaagctggcatatatagcccttgactatgagcaagagttggaaactgccaagaacagctcctcagttgaaaagagctatgagctacctgatggccaagtaatcaccattggtgcagagagattcagatgccctgaggtcctcttccagccatccatgattggtatggaggctgccggaatccatgagacaacatacaattcaatcatgaagtgcgacgtggatatcaggaaggacctctacggcaacattgtgctcagtggaggttcgactatgttcccgggaatcgctgatcgtatgagcaaggagatcacttcccttgcaccaagcagcatgaagatcaaggtcgttgcaccgcctgagaggaagtatagtgtctggataggagggtccatcctagcctcgctgagcactttccaacagatgtggatatctaaggaggagtacgatgagtctggcccggcaattgttcacaggaagtgcttctaggtaacgacgaggaacttgtgaaacc

SEQ ID NO: 73619 - DNA, 2747 bp, Zea Mays
tgctggccacaagcaagtccagacgagtgcactattttttccttaaaaaaatactccattcgttttaaattataattcgtttaacttttcagtccaaatttgatcggctcattttatttaaaaaattcataattattcggaatgagtattttagactagccgtcgatgcatataccacctgcattcccctttcgtccactgcattttatccttcctggtgctctgtccacctctctcgctctgggccgccgccgccgccctaagccacgtgctgaggctttcgttggtctcttcgccggcgacgagcacccaggtactccctcttcttctcttcccttcgtgctgtgcgaagtcctttgtggggcgacacgggcggagtccgcgctgccgccgcaagagttcgctcgcctcgctcctcccaacctcgccgtcgcctgggcgccggtccaaggatggcggcggcgatgcctctctgctttcctcgcgcgttctccccccaagcgtgcttgtctcctcgtgcctgcgccagctaggacgcttccctggacaagctgccgtcgtcgtcgctgtctcttgcgtggacgatgtcctgccggacggcgactcagcggtggcgccggcctcgatctggtgcggtatggccggatccgtggcgtggtgtgctgtgggtgaagatccacttgccaggggcacggatccgcactccatgagtccggatctgcactccttggaggtggtgaggtgattcaccggcaacaacagcggtgacatctcgacgcacgcgggtggcggtgctatggcaccctcctagctccgaaagtctttgtaaaaaaaattaaaacataaaaataaaaatattgggtgcccctttactgggcttgcccctgaatgtgatgttgcaaatttcagatgcatcagaaactgttgtccttgtgcgaacttttctgtataaattgaatttaccgctctcagttagcatgcacattcaaatccactgttccttttcaaccacatagtgaaccaaaacactctcatcactgagcgatatatgattctatccatatgccacttgcagcagttctgtagaaatggctgatggtgaggacatccagcctcttgtctgcgacaatggcactggaatggtcaaggctggttttgctggcgatgatgcaccaagggcggttttccctagcattgttggccgtcctcgccacactggtgtcatggtagggatgggacagaaggacgcatatgttggcgatgaggcacagtccaagagaggtattcttacgctcaagtacccgattgagcacggtattgtgagcaactgggatgacatggagaaaatctggcatcatactttctacaacgagcttcgtgttgccccagaggagcaccctgtgttgctcaccgaggctcctttgaacccaaaggccaacagggagaagatgacccaaattatgtttgagactttcaatgttcctgccatgtatgttgcaatccaagcggtgctctcactctatgctagtgggcgtactactggtattgtactcgactctggtgatggtgtgagccacactgtgcccatttacgaaggatatgcccttcctcatgccattcttcgtttggatcttgctggtcgggacctcacagactccctcatgaaaattctcactgagaggggttactccttcacaacctcagccgagcgagaaattgtaagggacatcaaggagaagctagcatatatagcccttgactatgagcaagagttggaaactgccaagaacagctcttcagttgaaaagagctatgagctacctgatggacaagtaatcaccattggtgcagagagattcaggtgccctgaggtcctcttccagccgtcgatgattggtatggaggctgctggaatccatgagacaacatacaattcaatcatgaagtgtgacgtggatatcaggaaggacctctatggtaacattgtgctcagtggtggttcgactatgttcccgggtatcgctgatcgtatgagcaaggagatcacttcccttgcaccaagcagcatgaagatcaaggtcgttgcaccgcctgagaggaagtacagtgtctggataggagggtcgatcctagcctcgctcagcactttccaacagatgtggatatcgaaggaggagtacgacgagtctggcccggcaattgttcaccggaagtgcttctagggtttcacaagttcctcgtcgttacctagtctcaaattatgtcccctccatttctcgagatatgtgtggcagatttgcatgatacgtttgtttgtttccatcggacctgaagtcttcttggggataggctcccccctttgtatgttgtggctccaatccatgtgcgagcacgctgtgtctgtcgtgacacctggttcgtgagatgggttgtcaaacttgattggtttgttgtgcgtggctggaagagctgatagttatatatttggcttggactgtgccgcttgtatgtatctgaattctgaaagcgttgtaatctgagcatccgtgcaaagtatgaatggcccttttatatgggctggattttccggtttctatacaatttggtgtttgtcgactgccaagacttaaaatataaacatgatcgtattgcagatattgaactgtgcaactggagcttatatacaacaatgatagcttggtttggattttcaataagcacaagaaacaaatgttgcatgagttttg

SEQ ID NO: 73620 - DNA, 4363 bp, Zea Mays
attggatctaacagttaattgactaaatatttgctagtagaattagctagctaactgttagctaatttgaaaatgtagctaatagctagagtgtttgtcttaaactaattttaacaactagtaactaacagtacctataccgaattgggccaataacagactgcgttgaccaatccggcggcaaaagttgactccaaattcccctctccgcttccgtctcactcgtaatcgtcctcctcttcccatttctgcttcctcctcacgggcgtgcgacgacgtcagcaaccccgccgagtacccctccttcccctcgcagtcgccgagggagcaattccgcccccaatcggccgcctgaacccttcttccttcccttcccgcggcatccgatgtgcgttgccgccgccgccgcgctcagatagcccagcctagctggcgacgacgaggagggggaccgtagccctaacgatccggtccccacatggcggggagctttcgcgagggcgcggggccgggggacacccacgctcccccgcccccgcccaccccacccttcttgcagttcctcgcgctcgacgcgctcgcctcctggggctccgaccccaagcagccgcactggcgccaccccgagctccgccgggcgctcgcctccaacgaccagaccgacgagctcaggcggatccgcgccagcgtccaggactccgcggtcaaggccaaggagaaggtcaggtcgctgcacgaggccatccagaagctcgacaagtacaagaacattgtcacacgcaagcgccagcgcgccaccgaggcgtcgtcctcgcccgacaagctcggggctgccggtgcctgctcctcgtccacaggcgcgctcaggatgggggcgcagaacaactctgctgtcttgagcaagcgcgtgcgctcctctctcgctgatgcccgggtggaaggacgtggtagtgttcctacaaggcaaggccctttggttagtaatgagaaaaattcacctgtggagaaggaaaagaacagtacaagaatatctgctatcgtctcaggactttctgatgaaaaattgcggggtttatctactggcagtgaagggtgggaaaaaaagatgaagcgtagacgctctgttggaacaatgctcagcagaggcagtgatgctgatcgagatgtcaaatccatgggtcagcatagaccagccaatgaagcacgcccacgatctagtgatggccttggatatagacatggagtttctgctggagcactagcaggtaacaagttggatggcacttctcagcagaacaacattgtatcctgcattctgcccaagtcagatgtcgattatgtggctcagccaaatgaaagaagagaacgccatgctggagttgaaaaggaaaggactacagtaaaaggaaacaaggtaaatacttctgatgatatgcaaaacggaagcttaagtcccctgcccaaggctaaagcatgcagggcaccaagaaccagttcacttgctataaactcatgttctaatttccaacgttcaactggaggaaatgatgaatgggaagaagcaccgtacccaaataaagtgtcacctttggcgggcatgacgaatcgcaaacgttccacacattcaaatgcttcctcacctcctattgcctgggtagggcaacgcccacagaagatgtcacggacaagaagagcaaatgttgtttctccagtgtcaaattttgatgaagtgttatctgaaggatcaccacttgacactgccactagatcagcacctatagagtctggcagtgtcttgctgacaaagaacacatcaacaaccaaaatggatagcatcccatctcctgctgggttgtcagaaagtgagggatcggctgtggctgaaagcaagtccaaggagaaaaccatgcatagtggtgaagtggggaacgagggtgcaaatacagcccataatgcaatgggattaatatttttgtcaaataaaaataggattcctttgaaagaagagctcgaagatggtggtgttcgtcgtcaagggaggagtggaaggggtgctatgcatgtcaaggggtgttctctaatgccaaaagaaaaactggtcactgcagaaacaagaaagccaataaaaggtggaagacctggatctgaaaagaacgagagtaagttggggcggccaccaatgaaaaaaggctctgaccgcaaagcttcatcctggcattcacaggctctaaatagtgatcttacagacataacaggtgaaccagaagatgaccaagaggagcttttagctgctgttaatgctgctcgcagtgctattgttagtgcctattctggccctttttggaagaaagtggaacccatgctaacttttatgagctcagaaaatttttctttcttaaaaaatcagatcaaccttgttgaagagcttgagatgagcatgtcctgcatgtatgacagtgaacatgatattatagcatcagttgatcacagaataatgtcaaagatggaggagcattcatctcagggacttgctctgtctaatttccccccctcatcccagcaaagtaaaactaatggagttggagcaaaaggattaatcggctgtttttctcatggtgacaaaatccatactggaccacaaaagctggaagctgataaatggtttaatgaaatggctccaatggcacacagactcctttcggctttaattatggaagatgacttgcctgataccaatggggtgcaaagcgatatacttgttgaatttccaaatagccacaacccttacactgtcaacggatacatggaaaatgaacttcaagctagtaccataacatctaattttgggctgagtgtggatttcgtgcactcaaacagtacttctgtggtacatcagagcatgtgcaatggttttacaagcaatttcaacaattcaaacagtgaaaattctgttcatagtgaggatttatcagatggactcaattttacagtatacacagaaagtggccctttgcatgacttgataccaccgattccacagcaatgtcaaaatccagggaaaaatttccctttatctccatatgagtatcaatatgggcagatgtctgtggaagataagattttaattgagctgcaaagtattggcatttgtccagagacagtgccaaagctagatgacggagaagatgacaacattaataaaatgatttcggagttgaggaaaaggctgcacgatcaggtgaaccaaaagaaatgtagattacataagctagataaatcaattcaagacacaaagaatattgaggagaggagcttggagcaacatgctatgaacaaactggttgaaagggcatacagaaaactcaagggtgggcgcattggctctagtcacaaggccggtgtcagtaaatctgccaataaagctgcgaaacagcttgccttggcttttgccaagcgtactcttgttcgatgccacaaatttgacgaaacagggaaaagctgcttcagtgagccttctctttggagtgtgctgtctgcacccttgccaagcagtgacgcgagattcacggagggtgtagagaggctgaagcatcagaagctcgacagaactccattttgatcaaggtggtgcgaaatggaaaaagggcgacagggaacgggatcacagcagggatgcgtctgcaaagggctctggactgaaatcagggcgccattcctcaggcggcagcggcaggagcggcggcggcgagcgcaagaacaagacgaagccaaagcaaaagctggctcagctatcgacttccggaaacgtgctgggtagagtggttgagccattctcatctccagcggcgcaagcgcaagagccccctgaacctgcaagcgagaagaagactcagcatccctctaggaacgtggccccgcggctgaccgtggatgctggactgccagcattgcctggattagatgacatattggacgtccctggagggctggatgggcagggcaacgacatcagctcgtggttcacggatggccttgacgactcgttgcaagacattgatctttcaggcgccctggagatcccggacgatgacctcacccagctgggttttatatgagaaggaagcacttgttgcttgctctgtgcatatatgttctttttttgggtgcttacctaatgtatggtagtagatataattaaccggtttaatctccctgccacaaccctgtaatcgaacctgcatggcatggaatggttagttgcagatgagttattcgattctcgtagcagcaagaacatgttgagatttgctaatggtatcatgtggttctgcctcctggattgtcctgtcggaatcctacagtt

SEQ ID NO: 73621 - DNA, 4138 bp, Zea Mays
cttcccatttctgcttcctcctcacgggcgtgcgacgacgtcagcaaccccgccgagtacccctccttcccctcgcagtcgccgagggagcaattccgcccccaatcggccgcctgaacccttcttccttcccttcccgcggcatccgatgtgcgttgccgccgccgccgcgctcagatagcccagcctagctggcgacgacgaggagggggaccgtagccctaacgatccggtccccacatggcggggagctttcgcgagggcgcggggccgggggacacccacgctcccccgcccccgcccaccccacccttcttgcagttcctcgcgctcgacgcgctcgcctcctggggctccgaccccaagcagccgcactggcgccaccccgagctccgccgggcgctcgcctccaacgaccagaccgacgagctcaggcggatccgcgccagcgtccaggactccgcggtcaaggccaaggagaaggtcaggtcgctgcacgaggccatccagaagctcgacaagtacaagaacattgtcacacgcaagcgccagcgcgccaccgaggcgtcgtcctcgcccgacaagctcggggctgccggtgcctgctcctcgtccacaggcgcgctcaggatgggggcgcagaacaactctgctgtcttgagcaagcgcgtgcgctcctctctcgctgatgcccgggtggaaggacgtggtagtgttcctacaaggcaaggccctttggttagtaatgagaaaaattcacctgtggagaaggaaaagaacagtacaagaatatctgctatcgtctcaggactttctgatgaaaaattgcggggtttatctactggcagtgaagggtgggaaaaaaagatgaagcgtagacgctctgttggaacaatgctcagcagaggcagtgatgctgatcgagatgtcaaatccatgggtcagcatagaccagccaatgaagcacgcccacgatctagtgatggccttggatatagacatggagtttctgctggagcactagcaggtaacaagttggatggcacttctcagcagaacaacattgtatcctgcattctgcccaagtcagatgtcgattatgtggctcagccaaatgaaagaagagaacgccatgctggagttgaaaaggaaaggactacagtaaaaggaaacaaggtaaatacttctgatgatatgcaaaacggaagcttaagtcccctgcccaaggctaaagcatgcagggcaccaagaaccagttcacttgctataaactcatgttctaatttccaacgttcaactggaggaaatgatgaatgggaagaagcaccgtacccaaataaagtgtcacctttggcgggcatgacgaatcgcaaacgttccacacattcaaatgcttcctcacctcctattgcctgggtagggcaacgcccacagaagatgtcacggacaagaagagcaaatgttgtttctccagtgtcaaattttgatgaagtgttatctgaaggatcaccacttgacactgccactagatcagcacctatagagtctggcagtgtcttgctgacaaagaacacatcaacaaccaaaatggatagcatcccatctcctgctgggttgtcagaaagtgagggatcggctgtggctgaaagcaagtccaaggagaaaaccatgcatagtggtgaagtggggaacgagggtgcaaatacagcccataatgcaatgggattaatatttttgtcaaataaaaataggattcctttgaaagaagagctcgaagatggtggtgttcgtcgtcaagggaggagtggaaggggtgctatgcatgtcaaggggtgttctctaatgccaaaagaaaaactggtcactgcagaaacaagaaagccaataaaaggtggaagacctggatctgaaaagaacgagagtaagttggggcggccaccaatgaaaaaaggctctgaccgcaaagcttcatcctggcattcacaggctctaaatagtgatcttacagacataacaggtgaaccagaagatgaccaagaggagcttttagctgctgttaatgctgctcgcagtgctattgttagtgcctattctggccctttttggaagaaagtggaacccatgctaacttttatgagctcagaaaatttttctttcttaaaaaatcagatcaaccttgttgaagagcttgagatgagcatgtcctgcatgtatgacagtgaacatgatattatagcatcagttgatcacagaataatgtcaaagatggaggagcattcatctcagggacttgctctgtctaatttccccccctcatcccagcaaagtaaaactaatggagttggagcaaaaggattaatcggctgtttttctcatggtgacaaaatccatactggaccacaaaagctggaagctgataaatggtttaatgaaatggctccaatggcacacagactcctttcggctttaattatggaagatgacttgcctgataccaatggggtgcaaagcgatatacttgttgaatttccaaatagccacaacccttacactgtcaacggatacatggaaaatgaacttcaagctagtaccataacatctaattttgggctgagtgtggatttcgtgcactcaaacagtacttctgtggtacatcagagcatgtgcaatggttttacaagcaatttcaacaattcaaacagtgaaaattctgttcatagtgaggatttatcagatggactcaattttacagtatacacagaaagtggccctttgcatgacttgataccaccgattccacagcaatgtcaaaatccagggaaaaatttccctttatctccatatgagtatcaatatgggcagatgtctgtggaagataagattttaattgagctgcaaagtattggcatttgtccagagacagtgccaaagctagatgacggagaagatgacaacattaataaaatgatttcggagttgaggaaaaggctgcacgatcaggtgaaccaaaagaaatgtagattacataagctagataaatcaattcaagacacaaagaatattgaggagaggattacctgacaggagcttggagcaacatgctatgaacaaactggttgaaagggcatacagaaaactcaagggtgggcgcattggctctagtcacaaggccggtgtcagtaaatctgccaataaagctgcgaaacagcttgccttggcttttgccaagcgtactcttgttcgatgccacaaatttgacgaaacagggaaaagctgcttcagtgagccttctctttggagtgtgctgtctgcacccttgccaagcagtgacgcgagattcacggagggtgtagagaggctgaagcatcagaagctcgacagaactccattttgatcaaggtggtgcgaaatggaaaaagggcgacagggaacgggatcacagcagggatgcgtctgcaaagggctctggactgaaatcagggcgccattcctcaggcggcagcggcaggagcggcggcggcgagcgcaagaacaagacgaagccaaagcaaaagctggctcagctatcgacttccggaaacgtgctgggtagagtggttgagccattctcatctccagcggcgcaagcgcaagagccccctgaacctgcaagcgagaagaagactcagcatccctctaggaacgtggccccgcggctgaccgtggatgctggactgccagcattgcctggattagatgacatattggacgtccctggagggctggatgggcagggcaacgacatcagctcgtggttcacggatggccttgacgactcgttgcaagacattgatctttcaggcgccctggagatcccggacgatgacctcacccagctgggttttatatgagaaggaagcacttgttgcttgctctgtgcatatatgttctttttttgggtgcttacctaatgtatggtagtagatataattaaccggtttaatctccctgccacaaccctgtaatcgaacctgcatggcatggaatggttagttgcagatgagttattcgattctcgtagcagcaagaacatgttgagatttgctaatggtatcatgtggttctgcctcctggattgtcctgtcggaatcctacagtt

SEQ ID NO: 73622 - DNA, 975 bp, Zea Mays
agcgagagtagcggccgtggatgattctgccttttcttctccttccctcacctgctctctctctctctctctctctctctctccctttctttcccgcggcgacggtgacgacgaccgcgcgagcgccgccgactccctactgcatcaggtgcctcggccttcgtcgtgctctccgccggcaacgagtatagacgggcgcgcatggccaccttcgagctgtaccggaggtccaccatcggcatgtgcctcaccgagacgctcgacgagatggtctccaacggcaccctcagcccggagctcgctatccaggtcctcgtccagttcgacaagtccatgacggatgctctggagaaccaagtgaagagcaaggttactgtcaagggtcacctgcacacctacaggttctgtgacaatgtgtggaccttcatcttgacagacgcaagcttcaagaacgaggaggccacggagcaggtgggcaaggtgaagattgtggcatgtgattccaaattgctcggacaataggcctgtgtaccctcgaggtcaaggaaggaagcttttaagtgcggcgaggcggggtctgtctgcgtcagctgtacacgcctaggctaccgcccgaacggcatttcatttgccttcttcgtactgtatgtgtatcttcttttttccccttgtatacaatctgctgcagctataccggccaagagtatggcatggtatggcggcaggcagccgcaaacttgtttttacctacttggtgtagcgcctgtgtaacagttttcgatcgatcttgcttgttgtgttgtcgatgctaataccgcagtgtaattgacgaaatgactaaaatgaagagtagtgtagtagatgtccaactatagcatttcaccagtccaatctgcctgtctgatggtactcagtgtttgatttctgggcaaggccacgcgaatgcacagacatgcatgagaaagaaaaaatata

SEQ ID NO: 73623 - DNA, 592 bp, Zea Mays
agcgagagtagcggccgtggatgattctgccttttcttctccttccctcacctgctctctctctctctctctctctctctctccctttctttcccgcggcgacggtgacgacgaccgcgcgagcgccgccgactccctactgcatcaggtgcctcggccttcgtcgtgctctccgccggcaacgagtatagacgggcgcgcatggccaccttcgagctgtaccggaggtccaccatcggcatgtgcctcaccgagacgctcgacgagatggtctccaacggcaccctcagcccggagctcgctatccaggtcctcgtccagttcgacaagtccatgacggatgctctggagaaccaagtgaagagcaaggttactgtcaaggtatgggtcacctgcacacctacaggttctgtgacaatgtgtggaccttcatcttgacagacgcaagcttcaagaacgaggaggccacggagcaggtgggcaaggtgaagattgtggcatgtgattccaaattgctcggacaataggcctgtgtaccctcgaggtcaaggaaggaagcttttaagtgcggcgaggcggggaggcggaggag

SEQ ID NO: 73624 - DNA, 1844 bp, Zea Mays
atctccttcgtatgttctgttgtttccttctatagcgcaacgccgcctcctctctcagccttatccccaaatcgcttcttctctgttgattccatggtgcatcagccgagctcctctccctggccgatccatggtgctcgtctctagctcatgtcttgccgccggccgagcccctccccagcgcccttggagccggcgtcctctgccctcatctcattccccgacgccgccctctccccctcggtgctctgctggtcggcgtcttctccctgcccgacgtttctggcgccatggccgccgcgccttgggtcgcctgctccactgcgccgatccgcccatctccctgctgccgctctcccatggcgcgtccctgcatcttgcttcagctcgctctgccatctcccttggcgccctagccccaacgccgagctccctacccggtcgcgcccccggtggttgaactcgccgagcttccttttctatcgctcgtcctcgcccattcggcgccctcatctcaagccagtccagcctctctactcgccactctcctctatccccttgctgttagaacatggcgagctaaccccatgtgccagtagagttcgtcattccctgagcagcacctccctccatggatgccacgttgccgacttgtgcagttcatatttatcggggaaatcccaggatttggtggagaagaagcacagttcaatttgacgcccgccaggtgttcgacgaaatgttcgaattgggtttcgtcattgatattgtggatttgagtcgcgttttgtattgaaaaacaagaatcgtgagtgcaatggcaaatggaaggtgaaggcccttttgattgacaacttaggaaaagatggaatggaactcaaattttggtggtcggtcaagtgtgtagagttgaaatcatatatacttagttaggctcaaatttagcgcaaactgttggtgaccatgtttttcggttagtattttagtttttaaattggatttaaagtacacttatgtatgagttatttaggaatgcttatttatgtgatattgaatgatacttatctacattatattaactatagtgttattaaatatatgtgtgtatgtatattataatgtggtatctcaaaaaatgattataaattgaagaatgtactgccatgtaagtcattccatttaaaccataataagacagttcccaaaacgtacaataccagtctctaaaaaagtcggttcctaaaatgtctaatatcagtcgcctaaataagatggttttcctattgcaagcgtctattattataggacattctagacaatttgataaatattttgtgacttataatgtccgtattctcgatggttctttagaataagtgtcttaaacaaaatttaatttaaggcggtttaccggacaaaatgacttaaacaaatatcttttttagacggttataaattaaaaaatgtcttatataatatcttttaagacggtttatatccatcttaaatgtgggacatcttttacgactccatcaaatttggacacttcataagtgtcttaataactggaaattaaccgtcttatataacatgatttgtagtagtgcactctggccctaatcatgcttttatgtataagggtgagacatctagttctaggcaaccaacccgtgctaagttgcctaaaaggaaaactcctagtgcatcaaatgatcataacatttcatttaaaacttttgatgcatcctatgttttgactaacaaatccggcaaggtagttgccaagtatgttgggggcaagcacaaggggtcaaagacttgtgtttggatacccaaagttcttg

SEQ ID NO: 73625 - DNA, 445 bp, Zea Mays
cgaacaagcccctagtgggtatggtccccatgtggcagttgtatgggaggtgatttaacgcatttttgtgctgttctgagttggattttagactgagggtcattgactgattgaaattactattgattgatgccgtgctgctactgcaggatgaaagggcagccaatacagcagaagcgcagctgctgctcatcatagacagggttcagggggcacttaatcttgaaacttgcagctaactacatgatgtccggtgtgagtgctggctgttgtttgttgaacgtggtaattaaagtcacctatctcatcttttgccagccggagcttgcctgtctatcaagattctgtgtttgaattttggaaagcagatctcagttagagaacatgtgtatgtaggcttgccgaaacttgatactatatggtaattggcttggtgcttcagttt

SEQ ID NO: 73626 - DNA, 212 bp, Zea Mays
  misc_feature (1)..(1): n is a, c, g, or t
nagaccaacctactacagtacagtacagtacacctacctgagcgagcggaagaagcctcctagactgtgtttgtgtctgtagtgttgcggcaacccaatgcaaaggggggaaaaggaggaggtgtctctctctctcccggtttgccctccccccctcggcgctcgggctctattgatacaaacggtgacagatccaggatttaaaggatgac

SEQ ID NO: 73627 - DNA, 1669 bp, Zea Mays
atcttttcagcgcttgtccactgcgggcctgcggcattcctttccttctcctcgaaggcgaagcaaagctaccaacgcatacaagagtgagagcagggagcacgagcgctctgagtgagtggaagacgagaggagttggagttccccagggctagggtttcattcgccacccgcgccgcccttcccttccccagcatccgtccgccatggtgaggaagaaaagaactggccctggagagagttctggggagtcttctggagcgcctggtcatggctcctcacagcgtcctcaggcaacacaacagggtacccgtggtggagggcaacaccagggccgtggtggatatctgggccctggagtgccgccttcacagcacccaggtggtggcccacctgagtatcatcaaccgcttgactaccagggacgtggtggatatcagggccgtggtggaccaccttcacagcatcctggtggtgggacaccccctgggtctcaaccgcgtggctaccaggggcacggtggataccagggccgtggcgggccaccttcacagtatcctggtggtgggacaccccctgggtctcaaccacgtgactaccacggacgtggtggtccgcgtcccagagggggaatgccacagtcataccgtggcgggcatgtgggaggtagtgttgtaccaagtgttccttcaggtccatctaggccagttcccgagctgcaccaagccccagatgtccaacatcaagcccctgtggtggcaacaccatcttcgccaggagctggctcgtcctcgcagcctgggaaggctgaggtgagcgctggacaagtccagcaacagttccagcagcttgcgattcgtaaccaaagcttagccagccaagctggtcagatggcaccagcgtcaagcaaatctgttaggttcccattgcgccctggcaagggtacgcatgggtccaggtgcattgtgaaggcaaatcatttctttgctgagctgcctaataaagaccttcaccaatacgatgtatcaataacacctgaggttacttcacgcggcgtcaatcgtgctgtcatggcagagctagtaaaactttacagacactcccatttggatgggcgtctgcctgcatatgatggaaggaagagtctttatacagctggagcgttgccatttgcttcgaagacattcgaaattactctgcaagatgaggaagacagtcttggtggaggccaaaggcgccagagggtatttcgggtgaccatcaaatttgctgctcgcgctgatctccaccatctggctatgtttcttgctgggaggcagccagatgcccctcaagaggctcttcaagtacttgacatcgtgctacgtgaaatgcctactgccaagtattgtcctgttggtagatcattttattctcccaagttagggagacctcagcaacttggtgaagatatgtcctctactgcattttttgaggccctccctgtaattgattttgtttctcagcttcttaatagagatatctcagttagaccattgtctgattctgatcgcgtgaagattaaaaaagccctacgaggtgtgaaagtggaggtcacacaccgtggaaacatgcgtaggaaatatcggatatctggccttactccacaagcaacaagggagttatcgta

SEQ ID NO: 73628 - DNA, 1738 bp, Zea Mays
atcttttcagcgcttgtccactgcgggcctgcggcattcctttccttctcctcgaaggcgaagcaaagctaccaacgcatacaagagtgagagcagggagcacgagcgctctgagtgagtggaagacgagaggagttggagttccccagggctagggtttcattcgccacccgcgccgcccttcccttccccagcatccgtccgccatggtgaggaagaaaagaactggccctggagagagttctggggagtcttctggagcgcctggtcatggctcctcacagcgtcctcaggcaacacaacagggtacccgtggtggagggcaacaccagggccgtggtggatatctgggccctggagtgccgccttcacagcacccaggtggtggcccacctgagtatcatcaaccgcttgactaccagggacgtggtggatatcagggccgtggtggaccaccttcacagcatcctggtggtgggacaccccctgggtctcaaccgcgtggctaccaggggcacggtggataccagggccgtggcgggccaccttcacagtatcctggtggtgggacaccccctgggtctcaaccacgtgactaccacggacgtggtggtccgcgtcccagagggggaatgccacagtcataccgtggcgggcatgtgggaggtagtgttgtaccaagtgttccttcaggtccatctaggccagttcccgagctgcaccaagccccagatgtccaacatcaagcccctgtggtggcaacaccatcttcgccaggagctggctcgtcctcgcagcctgggaaggctgaggtgagcgctggacaagtccagcaacagttccagcagcttgcgattcgtaaccaaagcttagccagccaagctggtcagatggcaccagcgtcaagcaaatctgttaggttcccattgcgccctggcaagggtacgcatgggtccaggtgcattgtgaaggcaaatcatttctttgctgagctgcctaataaagaccttcaccaatacgatgtatcaataacacctgaggttacttcacgcggcgtcaatcgtgctgtcatggcagagctagtaaaactttacagacactcccatttggatgggcgtctgcctgcatatgatggaaggaagagtctttatacagctggagcgttgccatttgcttcgaagacattcgaaattactctgcaagatgaggaagacagtcttggtggaggccaaaggcgccagagggtatttcgggtgaccatcaaatttgctgctcgcgctgatctccaccatctggctatgtttcttgctgggaggcagccagatgcccctcaagaggctcttcaagtacttgacatcgtgctacgtgaaatgcctactgccaagtattgtcctgttggtagatcattttattctcccaagttagggagacctcagcaacttggtgaaggtttggaaacttggcgtggtttctaccaaagcataaggcccacacagatgggtctttctctgaatattgatatgtcctctactgcattttttgaggccctccctgtaattgattttgtttctcagcttcttaatagagatatctcagttagaccattgtctgattctgatcgcgtgaagattaaaaaagccctacgaggtgtgaaagtggaggtcacacaccgtggaaacatgcgtaggaaatatcggatatctggccttactccacaagcaacaagggagttatcgta

SEQ ID NO: 73629 - DNA, 1396 bp, Zea Mays
tcgaaggcgaagcaaagctaccaacgcatacaagagtgagagcagggagcacgagcgctctgagtgagtggaagacgagaggagttggagttccccagggctagggtttcattcgccacccgcgccgcccttcccttccccagcatccgtccgccatggtgaggaagaaaagaactggccctggagagagttctggggagtcttctggagcgcctggtcatggctcctcacagcgtcctcaggcaacacaacagggtacccgtggtggagggcaacaccagggccgtggtggatatctgggccctggagtgccgccttcacagcacccaggtggtggcccacctgagtatcatcaaccgcttgactaccagggacgtggtggatatcagggccgtggtggaccaccttcacagcatcctggtggtgggacaccccctgggtctcaaccgcgtggctaccaggggcacggtggataccagggccgtggcgggccaccttcacagtatcctggtggtgggacaccccctgggtctcaaccacgtgactaccacggacgtggtggtccgcgtcccagagggggaatgccacagtcataccgtggcgggcatgtgggaggtagtgttgtaccaagtgttccttcaggtccatctaggccagttcccgagctgcaccaagccccagatgtccaacatcaagcccctgtggtggcaacaccatcttcgccaggagctggctcgtcctcgcagcctgggaaggctgaggtgagcgctggacaagtccagcaacagttccagcagcttgcgattcgtaaccaaagcttagccagccaagctggtcagatggcaccagcgtcaagcaaatctgttaggttcccattgcgccctggcaagggtacgcatgggtccaggtgcattgtgaaggcaaatcatttctttgctgagctgcctaataaagaccttcaccaatacgatgtatcaataacacctgaggttacttcacgcggcgtcaatcgtgctgtcatggcagagctagtaaaactttacagacactcccatttggatgggcgtctgcctgcatatgatggaaggaagagtctttatacagctggagcgttgccatttgcttcgaagacattcgaaattactctgcaagatgaggaagacagtcttggtggaggccaaaggcgccagagggtatttcgggtgaccatcaaatttgctgctcgcgctgatctccaccatctggctatgtttcttgctgggaggcagccagatgcccctcaagaggctcttcaagtacttgacatcgtgctactggaggtcacacaccgtggaaacatgcgtaggaaatatcggatatctggccttactccacaagcaacaagggagttatcgta

SEQ ID NO: 73630 - DNA, 1525 bp, Zea Mays
atggtgaggaagaaaagaactggccctggagagagttctggggagtcttctggagcgcctggtcatggctcctcacagcgtcctcaggcaacacaacagggtacccgtggtggagggcaacaccagggccgtggtggatatctgggccctggagtgccgccttcacagcacccaggtggtggcccacctgagtatcatcaaccgcttgactaccagggacgtggtggatatcagggccgtggtggaccaccttcacagcatcctggtggtgggacaccccctgggtctcaaccgcgtggctaccaggggcacggtggataccagggccgtggcgggccaccttcacagtatcctggtggtgggacaccccctgggtctcaaccacgtgactaccacggacgtggtggtccgcgtcccagagggggaatgccacagtcataccgtggcgggcatgtgggaggtagtgttgtaccaagtgttccttcaggtccatctaggccagttcccgagctgcaccaagccccagatgtccaacatcaagcccctgtggtggcaacaccatcttcgccaggagctggctcgtcctcgcagcctgggaaggctgaggtgagcgctggacaagtccagcaacagttccagcagcttgcgattcgtaaccaaagcttagccagccaagctggtcagatggcaccagcgtcaagcaaatctgttaggttcccattgcgccctggcaagggtacgcatgggtccaggtgcattgtgaaggcaaatcatttctttgctgagctgcctaataaagaccttcaccaatacgatgtatcaataacacctgaggttacttcacgcggcgtcaatcgtgctgtcatggcagagctagtaaaactttacagacactcccatttggatgggcgtctgcctgcatatgatggaaggaagagtctttatacagctggagcgttgccatttgcttcgaagacattcgaaattactctgcaagatgaggaagacagtcttggtggaggccaaagagggtatttcgggtgaccatcaaatttgctgctcgcgctgatctccaccatctggctatgtttcttgctgggaggcagccagatgcccctcaagaggctcttcaagtacttgacatcgtgctacgtgaaatgcctactgccaagtattgtcctgttggtagatcattttattctcccaagttagggagacctcagcaacttggtgaaggtttggaaacttggcgtggtttctaccaaagcataaggcccacacagatgggtctttctctgaatattgatatgtcctctactgcattttttgaggccctccctgtaattgattttgtttctcagcttcttaatagagatatctcagttagaccattgtctgattctgatcgcgtgaagattaaaaaagccctacgaggtgtgaaagtggaggtcacacaccgtggaaacatgcgtaggaaatatcggatatctggccttactccacaagcaacaagggagttatcgta

SEQ ID NO: 73631 - DNA, 3628 bp, Zea Mays
  misc_feature (1)..(2): n is a, c, g, or t
nnagtattcagcacaccactttaccttgtttgcaagtgggcaatcagcaaagaccaaattatctgcctatggaggtctgtaagatagttgaggggcagcgctactcaaaacgacttaatgataaacagatcactgctctactgaaggtgacttgccaacgtccccaagcacgtgagaaggacatcttggagactgtgtatcacaatgcctactccaaggatccttatgcccaggaatttggtataacgattgatgagcgtcttgcatcggttgaagctcgtgttctgcctcccccaaggctgaaataccatgatagtggcagagaaagggatgtattgccaaaaattggccagtggaacatgatgaataagaaaatggtcaatggtggtagagttagcagctgggcatgcattaacttctcacggaatgtgcaagatggtgctgccgggagtttctgtcatgaattggctttgatgtgccaagtatcaggaatggattttgtacttgaacctgtgctgtcaccttgctatgcaaggcctgaacttgttgaaagagcactaaagggacgctatcaagatgcgatgaacatactcgggcctcagggccgagaactcgacttgctgattgttatactgcctgacaataatggttctctttacggggatgtcaaaaggatctgtgagactaatcttggattggtctcccaatgctgtctgactaaacatgttttcaaggtgaacaagcagcagtatcttgcaaatgttgccctgaaaataaatgtgaaggttgggggaaggaatactgtgcttgttgatgctttggcaaggagaatcccccttgtcagtgacatagcgactattatctttggtgctgatgtgacccatccccatcctggggaagattctagtccttccattgcagctgtggttgcttctcaagactggcctgaggttacaaagtatgcaggattggtgagtgctcaagcccatcgtcaagaattgatacaggatcttttcaaggtatggcaagatcccgaaagggggactgtctctggtggcatgatcagggagcttctcatatctttctggagggcaactggacagaaaccaaagaggatcatattctacagggatggcgtcagtgagggacaattctaccaagttctgttgtatgaacttgatgccattagaaaggcctgtgcgtcattggagtctgactaccagcctccagttacttttgtcgtggtccagaagcgtcatcacaccaggttgtttgctaataatcacaatgataatcgtgctgtcgataaaagcgggaacatactgcctggcaccgtggtggactcgaagatctgccatccaactgagtttgatttctacctgtgcagccatgctggcattcagggaacaagccgccctgcccattaccatgttctgtgggatgagaacaactttacggctgatgggttgcaaactctcaccaacaacttgtgttacacgtgcacacgctcagtatcgattgttcctcctgcatactatgctcacctggcagccttccgagctcggttctacatggagccagatacgagtgacagtggatctatggcaagccgtggccctccaccaggggggcgcaacaccaaggctgctggtgttgggaatgttgctgtgaggccattacctgccctcaaggaaaacgtgaagcgggtcatgttctactgctaagactgatgctgttaaggcagagctaccttttattattacagtatatcgtgaagactagagtattttttccatgtacttgatgatgctgagctaccttttattatgtcgtacgatatatatgcgtggtactggttacagtaactttagttgtgtgttccatcgtcatgctggtctctagctggtgggcaggtggtgttacgtgaaaaacattctctaaaattcatcaaatttggacatagacttgaacatatcaagaaaaagagtggatgtatttcacttaccccatcctcacttcttgggctcgtgatgaaaagagcttgattaataaattccgaaggaaatgatattttgaacggaaagaccttggcatcgtcagcggcggggtcaccgtaccgttggtattatattatactgatttactgaatacgtaattaattaggtgactgaaaatatgacgatgaggtgacgcatgttcgtctcatctgttgactgcgaatagccgccggctgtcggcggcgtgcagcttcctgccttcttcgtcttcctcacttcatctttcttttggctgcagcatcatcatcgtcgactctataaattaatgtaatgactgtccatctctcctcccattgcttaccttccttgctccattctatacgtacatagtagtactgaatcatcagatcacaccgaccatggccatggagacgcagacgcccgagaccatcgtccctccgaccaccatccctcctcttctgaccccctacaagatgggcgcatttgagctggaacacagggtggtgctggcgccgctgacgcggcagcgctcctacggcaacgtcccgcagccgcacggcgccgtctactacgcgcagcgcgccacccggggcggcctcctcatcactgaggccacgggcgtctccgacacggcgcagggctacaccgacacgccgggagtgtggacgcccgaccaggtggcggcgtggcggcccatcgtagacgccgtccacgccaagggcgccgtcttcttctgccagctctggcacgtcggccgcgtctccaccaccgcgctccagccgggcggggccgcgcccatctccagcaccgaccgggccgtcgcgccgcagctcagcttcgacggccacctcgagaagttctccccgccgcgccgcctggaggcgcgcgagatccccgccatcgtcgacgacttccgccgcgcggcgcgcaacgcgctcctcgcgggcttcgacggcgtcgaggtccacggcgccaacggctacctcatcgagcagttcctcaaggacagcgccaacgaccgggacgacgagtacggcggctccctcgagaaccgctgccgcttcgcgctcgaggtcgtgcgcgccgtcgccggcgaggtcgggccgggccgcgtcggcgtccgcctctcccccttcactgactacatggactgccacgactccgacccggaggccctggcggggtacctcgtccgcagcctcagcgacgtcggtgtgctctactgccacatgatcgagccacggatggccatcgttgacggccgacgccagatcccgcaccgcctgcgcccgttcagggaggcattccggggcaccttcatcgccgccggagggtacgacagggcggagggggacaaggtggtggaggaaggctacacggacctcgtcgcctacggcaggctgttcctggccaacccggatctgccccggaggttccgcctccccgacgcgccgctcaacaagtacgaccgcaccaccttctacacctccgaccccgtcattggatacacagactacccctttctcgccgacgccgacgccgacaaataaatgatccatctaccgtcgccgacacgccggcctcccctcccctcccggcctccccagtcc

SEQ ID NO: 73632 - DNA, 3628 bp, Zea Mays
  misc_feature (1)..(1): n is a, c, g, or t
nagtattcagcacaccactttaccttgtttgcaagtgggcaatcagcaaagaccaaattatctgcctatggaggtctgtaagatagttgaggggcagcgctactcaaaacgacttaatgataaacagatcactgctctactgaaggtgacttgccaacgtccccaagcacgtgagaaggacatcttggagactgtgtatcacaatgcctactccaaggatccttatgcccaggaatttggtataacgattgatgagcgtcttgcatcggttgaagctcgtgttctgcctcccccaaggctgaaataccatgatagtggcagagaaagggatgtattgccaaaaattggccagtggaacatgatgaataagaaaatggtcaatggtggtagagttagcagctgggcatgcattaacttctcacggaatgtgcaagatggtgctgccgggagtttctgtcatgaattggctttgatgtgccaagtatcaggaatggattttgtacttgaacctgtgctgtcaccttgctatgcaaggcctgaacttgttgaaagagcactaaagggacgctatcaagatgcgatgaacatactcgggcctcagggccgagaactcgacttgctgattgttatactgcctgacaataatggttctctttacggggatgtcaaaaggatctgtgagactaatcttggattggtctcccaatgctgtctgactaaacatgttttcaaggtgaacaagcagcagtatcttgcaaatgttgccctgaaaataaatgtgaaggttgggggaaggaatactgtgcttgttgatgctttggcaaggagaatcccccttgtcagtgacatagcgactattatctttggtgctgatgtgacccatccccatcctggggaagattctagtccttccattgcagctgtggttgcttctcaagactggcctgaggttacaaagtatgcaggattggtgagtgctcaagcccatcgtcaagaattgatacaggatcttttcaaggtatggcaagatcccgaaagggggactgtctctggtggcatgatcagggagcttctcatatctttctggagggcaactggacagaaaccaaagaggatcatattctacagggatggcgtcagtgagggacaattctaccaagttctgttgtatgaacttgatgccattagaaaggcctgtgcgtcattggagtctgactaccagcctccagttacttttgtcgtggtccagaagcgtcatcacaccaggttgtttgctaataatcacaatgataatcgtgctgtcgataaaagcgggaacatactgcctggcaccgtggtggactcgaagatctgccatccaactgagtttgatttctacctgtgcagccatgctggcattcagccgccctgcccattaccatgttctgtgggatgagaacaactttacggctgatgggttgcaaactctcaccaacaacttgtgttacacgtatgctaggtgcacacgctcagtatcgattgttcctcctgcatactatgctcacctggcagccttccgagctcggttctacatggagccagatacgagtgacagtggatctatggcaagccgtggccctccaccaggggggcgcaacaccaaggctgctggtgttgggaatgttgctgtgaggccattacctgccctcaaggaaaacgtgaagcgggtcatgttctactgctaagactgatgctgttaaggcagagctaccttttattattacagtatatcgtgaagactagagtattttttccatgtacttgatgatgctgagctaccttttattatgtcgtacgatatatatgcgtggtactggttacagtaactttagttgtgtgttccatcgtcatgctggtctctagctggtgggcaggtggtgttacgtgaaaaacattctctaaaattcatcaaatttggacatagacttgaacatatcaagaaaaagagtggatgtatttcacttaccccatcctcacttcttgggctcgtgatgaaaagagcttgattaataaattccgaaggaaatgatattttgaacggaaagaccttggcatcgtcagcggcggggtcaccgtaccgttggtattatattatactgatttactgaatacgtaattaattaggtgactgaaaatatgacgatgaggtgacgcatgttcgtctcatctgttgactgcgaatagccgccggctgtcggcggcgtgcagcttcctgccttcttcgtcttcctcacttcatctttcttttggctgcagcatcatcatcgtcgactctataaattaatgtaatgactgtccatctctcctcccattgcttaccttccttgctccattctatacgtacatagtagtactgaatcatcagatcacaccgaccatggccatggagacgcagacgcccgagaccatcgtccctccgaccaccatccctcctcttctgaccccctacaagatgggcgcatttgagctggaacacagggtggtgctggcgccgctgacgcggcagcgctcctacggcaacgtcccgcagccgcacggcgccgtctactacgcgcagcgcgccacccggggcggcctcctcatcactgaggccacgggcgtctccgacacggcgcagggctacaccgacacgccgggagtgtggacgcccgaccaggtggcggcgtggcggcccatcgtagacgccgtccacgccaagggcgccgtcttcttctgccagctctggcacgtcggccgcgtctccaccaccgcgctccagccgggcggggccgcgcccatctccagcaccgaccgggccgtcgcgccgcagctcagcttcgacggccacctcgagaagttctccccgccgcgccgcctggaggcgcgcgagatccccgccatcgtcgacgacttccgccgcgcggcgcgcaacgcgctcctcgcgggcttcgacggcgtcgaggtccacggcgccaacggctacctcatcgagcagttcctcaaggacagcgccaacgaccgggacgacgagtacggcggctccctcgagaaccgctgccgcttcgcgctcgaggtcgtgcgcgccgtcgccggcgaggtcgggccgggccgcgtcggcgtccgcctctcccccttcactgactacatggactgccacgactccgacccggaggccctggcggggtacctcgtccgcagcctcagcgacgtcggtgtgctctactgccacatgatcgagccacggatggccatcgttgacggccgacgccagatcccgcaccgcctgcgcccgttcagggaggcattccggggcaccttcatcgccgccggagggtacgacagggcggagggggacaaggtggtggaggaaggctacacggacctcgtcgcctacggcaggctgttcctggccaacccggatctgccccggaggttccgcctccccgacgcgccgctcaacaagtacgaccgcaccaccttctacacctccgaccccgtcattggatacacagactacccctttctcgccgacgccgacgccgacaaataaatgatccatctaccgtcgccgacacgccggcctcccctcccctcccggcctccccagtcc

SEQ ID NO: 73633 - DNA, 3571 bp, Zea Mays
agtattcagcacaccactttaccttgtttgcaagtgggcaatcagcaaagaccaaattatctgcctatggaggtctgtaagatagttgaggggcagcgctactcaaaacgacttaatgataaacagatcactgctctactgaaggtgacttgccaacgtccccaagcacgtgagaaggacatcttggagactgtgtatcacaatgcctactccaaggatccttatgcccaggaatttggtataacgattgatgagcgtcttgcatcggttgaagctcgtgttctgcctcccccaaggctgaaataccatgatagtggcagagaaagggatgtattgccaaaaattggccagtggaacatgatgaataagaaaatggtcaatggtggtagagttagcagctgggcatgcattaacttctcacggaatgtgcaagatggtgctgccgggagtttctgtcatgaattggctttgatgtgccaagtatcaggaatggattttgtacttgaacctgtgctgtcaccttgctatgcaaggcctgaacttgttgaaagagcactaaagggacgctatcaagatgcgatgaacatactcgggcctcagggccgagaactcgacttgctgattgttatactgcctgacaataatggttctctttacggggatgtcaaaaggatctgtgagactaatcttggattggtctcccaatgctgtctgactaaacatgttttcaaggtgaacaagcagcagtatcttgcaaatgttgccctgaaaataaatgtgaaggttgggggaaggaatactgtgcttgttgatgctttggcaaggagaatcccccttgtcagtgacatagcgactattatctttggtgctgatgtgacccatccccatcctggggaagattctagtccttccattgcagctgtggttgcttctcaagactggcctgaggttacaaagtatgcaggattggtgagtgctcaagcccatcgtcaagaattgatacaggatcttttcaaggtatggcaagatcccgaaagggggactgtctctggtggcatgatcagggagcttctcatatctttctggagggcaactggacagaaaccaaagaggatcatattctacaggcctgtgcgtcattggagtctgactaccagcctccagttacttttgtcgtggtccagaagcgtcatcacaccaggttgtttgctaataatcacaatgataatcgtgctgtcgataaaagcgggaacatactgcctggcaccgtggtggactcgaagatctgccatccaactgagtttgatttctacctgtgcagccatgctggcattcagggaacaagccgccctgcccattaccatgttctgtgggatgagaacaactttacggctgatgggttgcaaactctcaccaacaacttgtgttacacgtatgctaggtgcacacgctcagtatcgattgttcctcctgcatactatgctcacctggcagccttccgagctcggttctacatggagccagatacgagtgacagtggatctatggcaagccgtggccctccaccaggggggcgcaacaccaaggctgctggtgttgggaatgttgctgtgaggccattacctgccctcaaggaaaacgtgaagcgggtcatgttctactgctaagactgatgctgttaaggcagagctaccttttattattacagtatatcgtgaagactagagtattttttccatgtacttgatgatgctgagctaccttttattatgtcgtacgatatatatgcgtggtactggttacagtaactttagttgtgtgttccatcgtcatgctggtctctagctggtgggcaggtggtgttacgtgaaaaacattctctaaaattcatcaaatttggacatagacttgaacatatcaagaaaaagagtggatgtatttcacttaccccatcctcacttcttgggctcgtgatgaaaagagcttgattaataaattccgaaggaaatgatattttgaacggaaagaccttggcatcgtcagcggcggggtcaccgtaccgttggtattatattatactgatttactgaatacgtaattaattaggtgactgaaaatatgacgatgaggtgacgcatgttcgtctcatctgttgactgcgaatagccgccggctgtcggcggcgtgcagcttcctgccttcttcgtcttcctcacttcatctttcttttggctgcagcatcatcatcgtcgactctataaattaatgtaatgactgtccatctctcctcccattgcttaccttccttgctccattctatacgtacatagtagtactgaatcatcagatcacaccgaccatggccatggagacgcagacgcccgagaccatcgtccctccgaccaccatccctcctcttctgaccccctacaagatgggcgcatttgagctggaacacagggtggtgctggcgccgctgacgcggcagcgctcctacggcaacgtcccgcagccgcacggcgccgtctactacgcgcagcgcgccacccggggcggcctcctcatcactgaggccacgggcgtctccgacacggcgcagggctacaccgacacgccgggagtgtggacgcccgaccaggtggcggcgtggcggcccatcgtagacgccgtccacgccaagggcgccgtcttcttctgccagctctggcacgtcggccgcgtctccaccaccgcgctccagccgggcggggccgcgcccatctccagcaccgaccgggccgtcgcgccgcagctcagcttcgacggccacctcgagaagttctccccgccgcgccgcctggaggcgcgcgagatccccgccatcgtcgacgacttccgccgcgcggcgcgcaacgcgctcctcgcgggcttcgacggcgtcgaggtccacggcgccaacggctacctcatcgagcagttcctcaaggacagcgccaacgaccgggacgacgagtacggcggctccctcgagaaccgctgccgcttcgcgctcgaggtcgtgcgcgccgtcgccggcgaggtcgggccgggccgcgtcggcgtccgcctctcccccttcactgactacatggactgccacgactccgacccggaggccctggcggggtacctcgtccgcagcctcagcgacgtcggtgtgctctactgccacatgatcgagccacggatggccatcgttgacggccgacgccagatcccgcaccgcctgcgcccgttcagggaggcattccggggcaccttcatcgccgccggagggtacgacagggcggagggggacaaggtggtggaggaaggctacacggacctcgtcgcctacggcaggctgttcctggccaacccggatctgccccggaggttccgcctccccgacgcgccgctcaacaagtacgaccgcaccaccttctacacctccgaccccgtcattggatacacagactacccctttctcgccgacgccgacgccgacaaataaatgatccatctaccgtcgccgacacgccggcctcccctcccctcccggcctccccagtcc

SEQ ID NO: 73634 - DNA, 3487 bp, Zea Mays
atttcttggagtctgcttctaacccgtgacctggtgacttaactgtgtatcacaatgcctactccaaggatccttatgcccaggaatttggtataacgattgatgagcgtcttgcatcggttgaagctcgtgttctgcctcccccaaggctgaaataccatgatagtggcagagaaagggatgtattgccaaaaattggccagtggaacatgatgaataagaaaatggtcaatggtggtagagttagcagctgggcatgcattaacttctcacggaatgtgcaagatggtgctgccgggagtttctgtcatgaattggctttgatgtgccaagtatcaggaatggattttgtacttgaacctgtgctgtcaccttgctatgcaaggcctgaacttgttgaaagagcactaaagggacgctatcaagatgcgatgaacatactcgggcctcagggccgagaactcgacttgctgattgttatactgcctgacaataatggttctctttacggggatgtcaaaaggatctgtgagactaatcttggattggtctcccaatgctgtctgactaaacatgttttcaaggtgaacaagcagcagtatcttgcaaatgttgccctgaaaataaatgtgaaggttgggggaaggaatactgtgcttgttgatgctttggcaaggagaatcccccttgtcagtgacatagcgactattatctttggtgctgatgtgacccatccccatcctggggaagattctagtccttccattgcagctgtggttgcttctcaagactggcctgaggttacaaagtatgcaggattggtgagtgctcaagcccatcgtcaagaattgatacaggatcttttcaaggtatggcaagatcccgaaagggggactgtctctggtggcatgatcagggagcttctcatatctttctggagggcaactggacagaaaccaaagaggatcatattctacagggatggcgtcagtgagggacaattctaccaagttctgttgtatgaacttgatgccattagaaaggcctgtgcgtcattggagtctgactaccagcctccagttacttttgtcgtggtccagaagcgtcatcacaccaggttgtttgctaataatcacaatgataatcgtgctgtcgataaaagcgggaacatactgcctggcaccgtggtggactcgaagatctgccatccaactgagtttgatttctacctgtgcagccatgctggcattcagggaacaagccgccctgcccattaccatgttctgtgggatgagaacaactttacggctgatgggttgcaaactctcaccaacaacttgtgttacacgtatgctaggtgcacacgctcagtatcgattgttcctcctgcatactatgctcacctggcagccttccgagctcggttctacatggagccagatacgagtgacagtggatctatggcaagccgtggccctccaccaggggggcgcaacaccaaggctgctggtgttgggaatgttgctgtgaggccattacctgccctcaaggaaaacgtgaagcgggtcatgttctactgctaagactgatgctgttaaggcagagctaccttttattattacagtatatcgtgaagactagagtattttttccatgtacttgatgatgctgagctaccttttattatgtcgtacgatatatatgcgtggtactggttacagtaactttagttgtgtgttccatcgtcatgctggtctctagctggtgggcaggtggtgttacgtgaaaaacattctctaaaattcatcaaatttggacatagacttgaacatatcaagaaaaagagtggatgtatttcacttaccccatcctcacttcttgggctcgtgatgaaaagagcttgattaataaattccgaaggaaatgatattttgaacggaaagaccttggcatcgtcagcggcggggtcaccgtaccgttggtattatattatactgatttactgaatacgtaattaattaggtgactgaaaatatgacgatgaggtgacgcatgttcgtctcatctgttgactgcgaatagccgccggctgtcggcggcgtgcagcttcctgccttcttcgtcttcctcacttcatctttcttttggctgcagcatcatcatcgtcgactctataaattaatgtaatgactgtccatctctcctcccattgcttaccttccttgctccattctatacgtacatagtagtactgaatcatcagatcacaccgaccatggccatggagacgcagacgcccgagaccatcgtccctccgaccaccatccctcctcttctgaccccctacaagatgggcgcatttgagctggaacacagggtggtgctggcgccgctgacgcggcagcgctcctacggcaacgtcccgcagccgcacggcgccgtctactacgcgcagcgcgccacccggggcggcctcctcatcactgaggccacgggcgtctccgacacggcgcagggctacaccgacacgccgggagtgtggacgcccgaccaggtggcggcgtggcggcccatcgtagacgccgtccacgccaagggcgccgtcttcttctgccagctctggcacgtcggccgcgtctccaccaccgcgctccagccgggcggggccgcgcccatctccagcaccgaccgggccgtcgcgccgcagctcagcttcgacggccacctcgagaagttctccccgccgcgccgcctggaggcgcgcgagatccccgccatcgtcgacgacttccgccgcgcggcgcgcaacgcgctcctcgcgggcttcgacggcgtcgaggtccacggcgccaacggctacctcatcgagcagttcctcaaggacagcgccaacgaccgggacgacgagtacggcggctccctcgagaaccgctgccgcttcgcgctcgaggtcgtgcgcgccgtcgccggcgaggtcgggccgggccgcgtcggcgtccgcctctcccccttcactgactacatggactgccacgactccgacccggaggccctggcggggtacctcgtccgcagcctcagcgacgtcggtgtgctctactgccacatgatcgagccacggatggccatcgttgacggccgacgccagatcccgcaccgcctgcgcccgttcagggaggcattccggggcaccttcatcgccgccggagggtacgacagggcggagggggacaaggtggtggaggaaggctacacggacctcgtcgcctacggcaggctgttcctggccaacccggatctgccccggaggttccgcctccccgacgcgccgctcaacaagtacgaccgcaccaccttctacacctccgaccccgtcattggatacacagactacccctttctcgccgacgccgacgccgacaaataaatgatccatctaccgtcgccgacacgccggcctcccctcccctcccggcctccccagtcc

SEQ ID NO: 73635 - DNA, 4032 bp, Zea Mays
ctcgaattttgctgtgagtatattatgaaaaaaaatactaaatggaaatatgacgactggcgagagctagctagcacaaaggtcgtcgtcgaccatgtctgtggcgtctataaagcaaagctacatacatggcgcgtactgcaccaccgtaccttgcgtaccggctggaagaagcaaacaagccaagctataggctctagctagctccggcggacctcagcggccgggatcagatcggaatcggatgggcagcgtgggcgtggaggcggatgacgacggcagcatcgtcaaggagttcctgcagcggtgcgagccctccggcgacgccgcctacggcgagctcagggctctgctggcgcgcctccacgacccggccaccaggcgcgacgcgcgcctcttcctcgccgcgctccaccgccaccagcagcgcagctcgtcggccgccggcggactaacgcacgagcaattctttcgacgcttcggcttccgcatgcaggagctgctgctccaggataccgccaccgacataaccgcctccagcttcatcgccaccaagcccgccgcagccgcaggtttccaacaaatgaagaagttgacaatgatggagataccaagcatcttcattcctgaagattggtcattcactttctatgagggcctcaaccgtcatccagactccattttcagggataagacagtagctgagctgggatgtggcaacggttggatatctattgctcttgcagagaagtggtgcccttcaaaggtctatggcctggatataaacccaagagctgtgaagattgcatggataaacctgtacttgaacgcattagatgacgacggtctcccgatctatgacggggaggggaaaacattgctcgatagagttgaattctatgaatctgatctcctttcttactgtagagacaacaagatagagctcgatcgtattgttggatgcataccacagattctcaacccaaatccagaggcgatgtcaaagattgtaacagagaattcaagtgaggagttcttgtacgccttgagtaactactgtgctcttcagggttttgtcgaggaccaatttggccttgggttgattgctcgtgcggtggaagaagggatatctgtcataaagccttcaggtattatggtattcaacatgggaggtcgaccaggacagggtgtctgtgaacgtctatttcgacggcgtgggtttcgcattactaagctctggcaaaccaaaattatgcaggctgctgacacagatatttcagctttggttgaaattgagaaaaacagcagacatcgattcgagttcttcatggatcttgttggggatcagcctatctgtgctcgcacagcctgggcatacatgaaatctggtggtcacatttcacatgctttgtctgtgtatagctgtcaacttcgccagcccaaccaggtgaagaaaatatttgagtttcttaaagatggattccatgaagtcagcagttcccttgatttatcctttgacgatgattctgtagctgaggaaaaaattcccttcctagcttaccttgctagttttctgaaagagaacaagtcaaatccctgtgagccaccagctggatgtctaaactttaggaaacttgttgctggatttatgaagagctaccatcacattcctctaactcctgataatgtcgttgtgttcccttctcgctctgtggcaatagagaatgctcttcaattgttctcaccggcgcttgcaattgttgatgaacatttaaccagacacttgcccaagcaatggttaacatctttagcaattgagggaagagcagattgtaatcacgccgatggtacagttactgtaattgaggcaccacgccaatcagatttactgattgagttgatcaggaagctgcagcctcaggtggttgttactggcatggctcaatttgaggctatcaccagtgctgcttttgagaacctactaaacgtaacaaaagatgttggctcccggctgttcctggatatttctgagcatctggagttgtctagcctgccaagctctaatggtgtattgaaatatcttgctggaaagacattaccgtcacatgcagctatactgtgtggtttagtaaagaatcaggtgtactctgatctggaggttgcttttgccatttccgaagatgcagctgtatataaagcattatcacaaactattgagctattggaaggccacacttctctgatcagccagcactattatggttgccttttccacgagcttctggcatttcagattgctgaccgtcatccacagcaagagagacaacctgcggaagtgatacctcagcagatgataggattttctgacccagctgtgtctaccctaaaggctactgaatttttcgttcctggttcagctgaatccagcattattcatatggatttagatcgcagcttcctgccagtaccttcagcagtgaatgcgtctgtttttgaaagttttgtcaggcagaacatcactgattctgaaaccgatgtccgttccagcatccaacagctggtgaaagacagctatggtttatccgcagctggttgtgcagaaattatctacggaaacacctccgtagcactcttcaacaagctcgtcctttgttgcatgcaagaacagggcaccttgcttttccccttgggcaccaatggccactacgtctccgcagcaaagtttgtgaacgctagcaccgtgactataccgacaaatcccagttcagggttcaggatcgagcccaaggttctagctgacactcttaagaatgtatctcggccgtgggtgtatgtttgcggccccacgatcaaccctactggctttctgtacagtgacagtgacatccgagagctgctctccgtatgcgctgaatatggagccagggtagtgatagatacatccttctctggcctggagtacgagaccgatggatggaggcagtggaatctggcaggatgcctttcctctttgaagcgttcagagccatcgttctctgtggtcctgctcggagagctgtcctttgcgctgactgcaggtgggcatgactttgggtttgtgatattgggtgactcgtcgttggctgagacgttccatagtttttctagcttgagtcgaccgcacaccacattgaagtacactttcaagaagctgctggggcttaagaaccagaaggaccagcatttctcggatctgatagtggagcagaaggaggagctgaagaatcgcgccaaccagttgatacagacactggagagctgtggctgggaagctgccatcggttgcggtggcatctcgatgctggcgaagcccaccgcgtacatggggaaggccttcaaagctgctggcttcgacggcgagctggacgcgagcaacatccgggaagccatcctgagggccactgggctgtgcataaacagcagctcctggacggggatccctggctactgccggttcagctttgctctggagaggggggaattcgagcgtgcgatgggatgcatagctcggttcaaggagctggttctgggaggcgctcagatgaatggtgcctgatggagcaatccatgttatacgtaaccttggtgctgtgtagtagcgatgatattgttccaggtgatggagatatcaaggaataacaagagcctacctgctgtgaagtcaatgtactactaggatggatagggcgcttcgatgcgccctttctgtcttcgaattgctgtgctgtgcacggagaataaacatatactattatatatatacatacaatttgctaagatatactcctatttgttgtcgttccatgcataaccgtaacccattaattccaaagaaacctggggggtcatgatcttgtgaaccgttgggatcatgattagagggaaatttttgtttttagaatggattgcgcagcttgatttaactggaaatactgatttgatggatggaatggaacaagtgtacataaattgttggaggttacaatgtaggcc

SEQ ID NO: 73636 - DNA, 4030 bp, Zea Mays
ctcgaattttgctgtgagtatattatgaaaaaaaatactaaatggaaatatgacgactggcgagagctagctagcacaaaggtcgtcgtcgaccatgtctgtggcgtctataaagcaaagctacatacatggcgcgtactgcaccaccgtaccttgcgtaccggctggaagaagcaaacaagccaagctataggctctagctagctccggcggacctcagcggccgggatcagatcggaatcggatgggcagcgtgggcgtggaggcggatgacgacggcagcatcgtcaaggagttcctgcagcggtgcgagccctccggcgacgccgcctacggcgagctcagggctctgctggcgcgcctccacgacccggccaccaggcgcgacgcgcgcctcttcctcgccgcgctccaccgccaccagcagcgcagctcgtcggccgccggcggactaacgcacgagcaattctttcgacgcttcggcttccgcatgcaggagctgctgctccaggataccgccaccgacataaccgcctccagcttcatcgccaccaagcccgccgcagccgcaggtttccaacaaatgaagaagttgacaatgatggagataccaagcatcttcattcctgaagattggtcattcactttctatgagggcctcaaccgtcatccagactccattttcagggataagacagtagctgagctgggatgtggcaacggttggatatctattgctcttgcagagaagtggtgcccttcaaaggtctatggcctggatataaacccaagagctgtgaagattgcatggataaacctgtacttgaacgcattagatgacgacggtctcccgatctatgacggggaggggaaaacattgctcgatagagttgaattctatgaatctgatctcctttcttactgtagagacaacaagatagagctcgatcgtattgttggatgcataccacagattctcaacccaaatccagaggcgatgtcaaagattgtaacagagaattcaagtgaggagttcttgtacgccttgagtaactactgtgctcttcagggttttgtcgaggaccaatttggccttgggttgattgctcgtgcggtggaagaagggatatctgtcataaagccttcaggtattatggtattcaacatgggaggtcgaccaggacagggtgtctgtgaacgtctatttcgacggcgtgggtttcgcattactaagctctggcaaaccaaaattatgcaggctgctgacacagatatttcagctttggttgaaattgagaaaaacagcagacatcgattcgagttcttcatggatcttgttggggatcagcctatctgtgctcgcacagcctgggcatacatgaaatctggtggtcacatttcacatgctttgtctgtgtatagctgtcaacttcgccagcccaaccaggtgaagaaaatatttgagtttcttaaagatggattccatgaagtcagcagttcccttgatttatcctttgacgatgattctgtagctgaggaaaaaattcccttcctagcttaccttgctagttttctgaaagagaacaagtcaaatccctgtgagccaccagctggatgtctaaactttaggaaacttgttgctggatttatgaagagctaccatcacattcctctaactcctgataatgtcgttgtgttcccttctcgctctgtggcaatagagaatgctcttcaattgttctcaccggcgcttgcaattgttgatgaacatttaaccagacacttgcccaagcaatggttaacatctttagcaattgagggaagagcagattgtaatcacgccgatggtacagttactgtaattgaggcaccacgccaatcagatttactgattgagttgatcaggaagctgcagcctcaggtggttgttactggcatggctcaatttgaggctatcaccagtgctgcttttgagaacctactaaacgtaacaaaagatgttggctcccggctgttcctggatatttctgagcatctggagttgtctagcctgccaagctctaatggtgtattgaaatatcttgctggaaagacattaccgtcacatgcagctatactgtgtggtttagtaaagaatcaggtactctgatctggaggttgcttttgccatttccgaagatgcagctgtatataaagcattatcacaaactattgagctattggaaggccacacttctctgatcagccagcactattatggttgccttttccacgagcttctggcatttcagattgctgaccgtcatccacagcaagagagacaacctgcggaagtgatacctcagcagatgataggattttctgacccagctgtgtctaccctaaaggctactgaatttttcgttcctggttcagctgaatccagcattattcatatggatttagatcgcagcttcctgccagtaccttcagcagtgaatgcgtctgtttttgaaagttttgtcaggcagaacatcactgattctgaaaccgatgtccgttccagcatccaacagctggtgaaagacagctatggtttatccgcagctggttgtgcagaaattatctacggaaacacctccgtagcactcttcaacaagctcgtcctttgttgcatgcaagaacagggcaccttgcttttccccttgggcaccaatggccactacgtctccgcagcaaagtttgtgaacgctagcaccgtgactataccgacaaatcccagttcagggttcaggatcgagcccaaggttctagctgacactcttaagaatgtatctcggccgtgggtgtatgtttgcggccccacgatcaaccctactggctttctgtacagtgacagtgacatccgagagctgctctccgtatgcgctgaatatggagccagggtagtgatagatacatccttctctggcctggagtacgagaccgatggatggaggcagtggaatctggcaggatgcctttcctctttgaagcgttcagagccatcgttctctgtggtcctgctcggagagctgtcctttgcgctgactgcaggtgggcatgactttgggtttgtgatattgggtgactcgtcgttggctgagacgttccatagtttttctagcttgagtcgaccgcacaccacattgaagtacactttcaagaagctgctggggcttaagaaccagaaggaccagcatttctcggatctgatagtggagcagaaggaggagctgaagaatcgcgccaaccagttgatacagacactggagagctgtggctgggaagctgccatcggttgcggtggcatctcgatgctggcgaagcccaccgcgtacatggggaaggccttcaaagctgctggcttcgacggcgagctggacgcgagcaacatccgggaagccatcctgagggccactgggctgtgcataaacagcagctcctggacggggatccctggctactgccggttcagctttgctctggagaggggggaattcgagcgtgcgatgggatgcatagctcggttcaaggagctggttctgggaggcgctcagatgaatggtgcctgatggagcaatccatgttatacgtaaccttggtgctgtgtagtagcgatgatattgttccaggtgatggagatatcaaggaataacaagagcctacctgctgtgaagtcaatgtactactaggatggatagggcgcttcgatgcgccctttctgtcttcgaattgctgtgctgtgcacggagaataaacatatactattatatatatacatacaatttgctaagatatactcctatttgttgtcgttccatgcataaccgtaacccattaattccaaagaaacctggggggtcatgatcttgtgaaccgttgggatcatgattagagggaaatttttgtttttagaatggattgcgcagcttgatttaactggaaatactgatttgatggatggaatggaacaagtgtacataaattgttggaggttacaatgtaggcc

SEQ ID NO: 73637 - DNA, 3724 bp, Zea Mays
cacctcactgaccctctccttcctcccaccttcggcccatccatctgtccgtcttcgccacccgtggtctccagaccaatccgaggcacgggacatatggcggcgctggcgggcgaggacaaggacgttgacgccttcctcgcggactgcacggcgtcgggagacgccgcgtatggcgccgccaaggccgtgctcgagcgcctccacgcccccgccacgcgccccgccgcacgacgcctccttggcgccgtccgccgacgcttcgccgcctcccgcgccgcgggggaggactgcttccgcaccttccactttcgcatccacgacgtcgtcctcgacccacacgtacaaggtttccaacaaatgaagaagttgacaatgatggagataccaagcatcttcattcctgaagattggtcattcactttctatgagggcctcaaccgtcatccagactccattttcagggataagacagtagctgagctgggatgtggcaacggttggatatctattgctcttgcagagaagtggtgcccttcaaaggtctatggcctggatataaacccaagagctgtgaagattgcatggataaacctgtacttgaacgcattagatgacgacggtctcccgatctatgacggggaggggaaaacattgctcgatagagttgaattctatgaatctgatctcctttcttactgtagagacaacaagatagagctcgatcgtattgttggatgcataccacagattctcaacccaaatccagaggcgatgtcaaagattgtaacagagaattcaagtgaggagttcttgtacgccttgagtaactactgtgctcttcagggttttgtcgaggaccaatttggccttgggttgattgctcgtgcggtggaagaagggatatctgtcataaagccttcaggtattatggtattcaacatgggaggtcgaccaggacagggtgtctgtgaacgtctatttcgacggcgtgggtttcgcattactaagctctggcaaaccaaaattatgcaggctgctgacacagatatttcagctttggttgaaattgagaaaaacagcagacatcgattcgagttcttcatggatcttgttggggatcagcctatctgtgctcgcacagcctgggcatacatgaaatctggtggtcacatttcacatgctttgtctgtgtatagctgtcaacttcgccagcccaaccagctgaggaaaaaattcccttcctagcttaccttgctagttttctgaaagagaacaagtcaaatccctgtgagccaccagctggatgtctaaactttaggaaacttgttgctggatttatgaagagctaccatcacattcctctaactcctgataatgtcgttgtgttcccttctcgctctgtggcaatagagaatgctcttcaattgttctcaccggcgcttgcaattgttgatgaacatttaaccagacacttgcccaagcaatggttaacatctttagcaattgagggaagagcagattgtaatcacgccgatggtacagttactgtaattgaggcaccacgccaatcagatttactgattgagttgatcaggaagctgcagcctcaggtggttgttactggcatggctcaatttgaggctatcaccagtgctgcttttgagaacctactaaacgtaacaaaagatgttggctcccggctgttcctggatatttctgagcatctggagttgtctagcctgccaagctctaatggtgtattgaaatatcttgctggaaagacattaccgtcacatgcagctatactgtgtggtttagtaaagaatcaggtgtactctgatctggaggttgcttttgccatttccgaagatgcagctgtatataaagcattatcacaaactattgagctattggaaggccacacttctctgatcagccagcactattatggttgccttttccacgagcttctggcatttcagattgctgaccgtcatccacagcaagagagacaacctgcggaagtgatacctcagcagatgataggattttctgacccagctgtgtctaccctaaaggctactgaatttttcgttcctggttcagctgaatccagcattattcatatggatttagatcgcagcttcctgccagtaccttcagcagtgaatgcgtctgtttttgaaagttttgtcaggcagaacatcactgattctgaaaccgatgtccgttccagcatccaacagctggtgaaagacagctatggtttatccgcagctggttgtgcagaaattatctacggaaacacctccgtagcactcttcaacaagctcgtcctttgttgcatgcaagaacagggcaccttgcttttccccttgggcaccaatggccactacgtctccgcagcaaagtttgtgaacgctagcaccgtgactataccgacaaatcccagttcagggttcaggatcgagcccaaggttctagctgacactcttaagaatgtatctcggccgtgggtgtatgtttgcggccccacgatcaaccctactggctttctgtacagtgacagtgacatccgagagctgctctccgtatgcgctgaatatggagccagggtagtgatagatacatccttctctggcctggagtacgagaccgatggatggaggcagtggaatctggcaggatgcctttcctctttgaagcgttcagagccatcgttctctgtggtcctgctcggagagctgtcctttgcgctgactgcaggtgggcatgactttgggtttgtgatattgggtgactcgtcgttggctgagacgttccatagtttttctagcttgagtcgaccgcacaccacattgaagtacactttcaagaagctgctggggcttaagaaccagaaggaccagcatttctcggatctgatagtggagcagaaggaggagctgaagaatcgcgccaaccagttgatacagacactggagagctgtggctgggaagctgccatcggttgcggtggcatctcgatgctggcgaagcccaccgcgtacatggggaaggccttcaaagctgctggcttcgacggcgagctggacgcgagcaacatccgggaagccatcctgagggccactgggctgtgcataaacagcagctcctggacggggatccctggctactgccggttcagctttgctctggagaggggggaattcgagcgtgcgatgggatgcatagctcggttcaaggagctggttctgggaggcgctcagatgaatggtgcctgatggagcaatccatgttatacgtaaccttggtgctgtgtagtagcgatgatattgttccaggtgatggagatatcaaggaataacaagagcctacctgctgtgaagtcaatgtactactaggatggatagggcgcttcgatgcgccctttctgtcttcgaattgctgtgctgtgcacggagaataaacatatactattatatatatacatacaatttgctaagatatactcctatttgttgtcgttccatgcataaccgtaacccattaattccaaagaaacctggggggtcatgatcttgtgaaccgttgggatcatgattagagggaaatttttgtttttagaatggattgcgcagcttgatttaactggaaatactgatttgatggatggaatggaacaagtgtacataaattgttggaggttacaatgtaggcc

SEQ ID NO: 73638 - DNA, 3699 bp, Zea Mays
cacctcactgaccctctccttcctcccaccttcggcccatccatctgtccgtcttcgccacccgtggtctccagaccaatccgaggcacgggacatatggcggcgctggcgggcgaggacaaggacgttgacgccttcctcgcggactgcacggcgtcgggagacgccgcgtatggcgccgccaaggccgtgctcgagcgcctccacgcccccgccacgcgccccgccgcacgacgcctccttggcgccgtccgccgacgcttcgccgcctcccgcgccgcgggggaggactgcttccgcaccttccactttcgcatccacgacgtcgtcctcgacccacacgtacaaggtttccaacaaatgaagaagttgacaatgatggagataccaagcatcttcattcctgaagattggtcattcactttctatgagggcctcaaccgtcatccagactccattttcagggataagacagtagctgagctgggatgtggcaacggttggatatctattgctcttgcagagaagtggtgcccttcaaaggtctatggcctggatataaacccaagagctgtgaagattgcatggataaacctgtacttgaacgcattagatgacgacggtctcccgatctatgacggggaggggaaaacattgctcgatagagttgaattctatgaatctgatctcctttcttactgtagagacaacaagatagagctcgatcgtattgttggatgcataccacagattctcaacccaaatccagaggcgatgtcaaagattgtaacagagaattcaagtgaggagttcttgtacgccttgagtaactactgtgctcttcagggttttgtcgaggaccaatttggccttgggttgattgctcgtgcggtggaagaagggatatctgtcataaagccttcaggctgctgacacagatatttcagctttggttgaaattgagaaaaacagcagacatcgattcgagttcttcatggatcttgttggggatcagcctatctgtgctcgcacagcctgggcatacatgaaatctggtggtcacatttcacatgctttgtctgtgtatagctgtcaacttcgccagcccaaccaggtgaagaaaatatttgagtttcttaaagatggattccatgaagtcagcagttcccttgatttatcctttgacgatgattctgtagctgaggaaaaaattcccttcctagcttaccttgctagttttctgaaagagaacaagtcaaatccctgtgagccaccagctggatgtctaaactttaggaaacttgttgctggatttatgaagagctaccatcacattcctctaactcctgataatgtcgttgtgttcccttctcgctctgtggcaatagagaatgctcttcaattgttctcaccggcgcttgcaattgttgatgaacatttaaccagacacttgcccaagcaatggttaacatctttagcaattgagggaagagcagattgtaatcacgccgatggtacagttactgtaattgaggcaccacgccaatcagatttactgattgagttgatcaggaagctgcagcctcaggtggttgttactggcatggctcaatttgaggctatcaccagtgctgcttttgagaacctactaaacgtaacaaaagatgttggctcccggctgttcctggatatttctgagcatctggagttgtctagcctgccaagctctaatggtgtattgaaatatcttgctggaaagacattaccgtcacatgcagctatactgtgtggtttagtaaagaatcaggtgtactctgatctggaggttgcttttgccatttccgaagatgcagctgtatataaagcattatcacaaactattgagctattggaaggccacacttctctgatcagccagcactattatggttgccttttccacgagcttctggcatttcagattgctgaccgtcatccacagcaagagagacaacctgcggaagtgatacctcagcagatgataggattttctgacccagctgtgtctaccctaaaggctactgaatttttcgttcctggttcagctgaatccagcattattcatatggatttagatcgcagcttcctgccagtaccttcagcagtgaatgcgtctgtttttgaaagttttgtcaggcagaacatcactgattctgaaaccgatgtccgttccagcatccaacagctggtgaaagacagctatggtttatccgcagctggttgtgcagaaattatctacggaaacacctccgtagcactcttcaacaagctcgtcctttgttgcatgcaagaacagggcaccttgcttttccccttgggcaccaatggccactacgtctccgcagcaaagtttgtgaacgctagcaccgtgactataccgacaaatcccagttcagggttcaggatcgagcccaaggttctagctgacactcttaagaatgtatctcggccgtgggtgtatgtttgcggccccacgatcaaccctactggctttctgtacagtgacagtgacatccgagagctgctctccgtatgcgctgaatatggagccagggtagtgatagatacatccttctctggcctggagtacgagaccgatggatggaggcagtggaatctggcaggatgcctttcctctttgaagcgttcagagccatcgttctctgtggtcctgctcggagagctgtcctttgcgctgactgcaggtgggcatgactttgggtttgtgatattgggtgactcgtcgttggctgagacgttccatagtttttctagcttgagtcgaccgcacaccacattgaagtacactttcaagaagctgctggggcttaagaaccagaaggaccagcatttctcggatctgatagtggagcagaaggaggagctgaagaatcgcgccaaccagttgatacagacactggagagctgtggctgggaagctgccatcggttgcggtggcatctcgatgctggcgaagcccaccgcgtacatggggaaggccttcaaagctgctggcttcgacggcgagctggacgcgagcaacatccgggaagccatcctgagggccactgggctgtgcataaacagcagctcctggacggggatccctggctactgccggttcagctttgctctggagaggggggaattcgagcgtgcgatgggatgcatagctcggttcaaggagctggttctgggaggcgctcagatgaatggtgcctgatggagcaatccatgttatacgtaaccttggtgctgtgtagtagcgatgatattgttccaggtgatggagatatcaaggaataacaagagcctacctgctgtgaagtcaatgtactactaggatggatagggcgcttcgatgcgccctttctgtcttcgaattgctgtgctgtgcacggagaataaacatatactattatatatatacatacaatttgctaagatatactcctatttgttgtcgttccatgcataaccgtaacccattaattccaaagaaacctggggggtcatgatcttgtgaaccgttgggatcatgattagagggaaatttttgtttttagaatggattgcgcagcttgatttaactggaaatactgatttgatggatggaatggaacaagtgtacataaattgttggaggttacaatgtaggcc

SEQ ID NO: 73639 - DNA, 1672 bp, Zea Mays
aagccgtggtgggcctgacacaaattaagtgggccggtccgggcgacatgcaacaagtgaagaagaggaagaaaggagacgagaaagaaaggaaaccctaggccgctacgcccttggccccttctctctcttcgtcgcgccgccgtagcacgactccgactcggccatggcgacacccccagctctcctattcccttcgccctcttcggcatcttctccgccgtcatccgcgcaggtagaggcggtggtcctcttcaacgtctgcgacagctacgtgcggcgaccggaccaggcagaccgtgtcatcggcaccctccttggatccctcctccccgatggcaccgtccacgtccgcaactcctacgtggtcccccacagcgagtcggccgaccaggtcgccatcgacatcgactaccaccataacatgtacgcctcgcaccagaaggtgaaccccaaggaagtcatcgtcggatggttctcgactggatttggtgtttctgggggaagtacgcttatccatgagttctattcaagggaagtacaaagccccatccatcttacagtcgacaccggcttcactaggggggaagcttccatcaaagcctacgtctcatccaacctgtccctcggtgataggcaactcgctgcgcaatttcaggaaatccctctggatcttaggatgatcggggcagaaaaggctggatttgagatcctgaaatctacgatggtagagaagctccccaatgatctggaaggaatggagtcctcaatggagaagctttacattcttattgatgagatctacaaatacgtcgatgatgttgtggacgcgtggcacctgataacagaatcggaaggttggtctctgaatctgttgcttcaatgccgaaattgtccccagctgctttcgataagcttttcaatgacaagattcaggataaccttgcgctggtatacctgtcaagcatcacaaggacacaaatcagcatcgccgagaagttgaacactgctgctcaggcgctgtgactttggttgtggcagatctatctggttgaaacgtggatgtttggcctacgtgaccaattggtgacagggatgcattttttgttatttgttattaaaaaatgggagagctggcaggaaagaaaagggttagtcaatgatgggatcccggtagagtggtggatgtttctgtttggatagcattatgtgctccaggctgaatatttgtaatgctccttggttgtgtagcgacacagttaacgacatggcaggcaaccgaggtcgtctgggtacatcgcaaataggctggtgccgaggtgacctcgacaggagtcgcagcaggctggcactaatgatgcgaataaagcaatacctcccaacacgttaaaacggggtccaaaattcaccatgattatgaagaagctgtacagctgatggaaacgtaggctcattgcaaatcaataaaatgtactccgtctcaaattaaaattttatttgtatttctagtggatttatttatacaataattaatgtatgttctatatatatatgcttgatacagtaggagtgggtactctagttgcggggtaccgatagtaaacacttgatgaagagcaattacgaaacgcttcacttatcgcatcgtgtttcatgtggttccaagtgaaga

SEQ ID NO: 73640 - DNA, 1576 bp, Zea Mays
aagccgtggtgggcctgacacaaattaagtgggccggtccgggcgacatgcaacaagtgaagaagaggaagaaaggagacgagaaagaaaggaaaccctaggccgctacgcccttggccccttctctctcttcgtcgcgccgccgtagcacgactccgactcggccatggcgacacccccagctctcctattcccttcgccctcttcggcatcttctccgccgtcatccgcgcaggtagaggcggtggtcctcttcaacgtctgcgacagctacgtgcggcgaccggaccaggcagaccgtgtcatcggcaccctccttggatccctcctccccgatggcaccgtccacgtccgcaactcctacgtggtcccccacagcgagtcggccgaccaggtcgccatcgacatcgactaccaccataacatgtacgcctcgcaccagaaggtgaaccccaaggaagtcatcgtcggatggttctcgactggatttggtgtttctgggggaagtacgcttatccatgagttctattcaagggaagtacaaagccccatccatcttacagtcgacaccggcttcactaggggggaagcttccatcaaagcctacgtctcatccaacctgtccctcggtgataggcaactcgctgcgcaatttcaggaaatccctctggatcttaggatgatcggggcagaaaaggctggatttgagatcctgaaatctacgatggtagagaagctccccaatgatctggaaggaatggagtcctcaatggagaagctttacattcttattgatgagatctacaaatacgtcgatgatgttgtggaaggacgcgtggcacctgataacagaatcggaaggttggtctctgaatctgttgcttcaatgccgaaattgtccccagctgctttcgataagcttttcaatgacaagattcaggataaccttgcgctggtatacctgtcaagcatcacaaggacacaaatcagcatcgccgagaagttgaacactgctgctcaggcgctgtgactttggttgtggcagatctatctggttgaaacgtggatgtttggcctacgtgaccaattggtgacagggatgcattttttgttatttgttattaaaaaatgggagagctggcaggaaagaaaaggcgacacagttaacgacatggcaggcaaccgaggtcgtctgggtacatcgcaaataggctggtgccgaggtgacctcgacaggagtcgcagcaggctggcactaatgatgcgaataaagcaatacctcccaacacgttaaaacggggtccaaaattcaccatgattatgaagaagctgtacagctgatggaaacgtaggctcattgcaaatcaataaaatgtactccgtctcaaattaaaattttatttgtatttctagtggatttatttatacaataattaatgtatgttctatatatatatgcttgatacagtaggagtgggtactctagttgcggggtaccgatagtaaacacttgatgaagagcaattacgaaacgcttcacttatcgcatcgtgtttcatgtggttccaagtgaaga

SEQ ID NO: 73641 - DNA, 2166 bp, Zea Mays
aagccgtggtgggcctgacacaaattaagtgggccggtccgggcgacatgcaacaagtgaagaagaggaagaaaggagacgagaaagaaaggaaaccctaggccgctacgcccttggccccttctctctcttcgtcgcgccgccgtagcacgactccgactcggccatggcgacacccccagctctcctattcccttcgccctcttcggcatcttctccgccgtcatccgcgcaggtagaggcggtggtcctcttcaacgtctgcgacagctacgtgcggcgaccggaccaggcagaccgtgtcatcggcaccctccttggatccctcctccccgatggcaccgtccacgtccgcaactcctacgtggtcccccacagcgagtcggccgaccaggtcgccatcgacatcgactaccaccataacatgtacgcctcgcaccagaaggtgaaccccaaggaagtcatcgtcggatggtgagcaacccaccccatcgcctcacgattccacaccctcgttttatttattttttctggctccatcggtatatcaacacatatgtgaatgccagtgctcctaatgattatataattgggcaccgtttatatgcaacaactgaatcccccaatgcatagtgtgtttttttgggctgaattactttgagtggatgcacccatttttcttatcaaatgcacattatgcactgtacatctcgttgttaggatactgctttgacattacaaggcagatagcagccgaggacagaataactctagagtaattagttccatctttgtgattaacaaccatcgatgtgctcagagctatattcagtgtcagttgctttgatatcatcgaaagcacattcagacactagaaaaatcggcttggaaagcctgtgaattggtttgccaagtatccttactgaacttttcaaacctgtatgttacctatctacttgtgtaggttctcgactggatttggtgtttctgggggaagtacgcttatccatgagttctattcaagggaagtacaaagccccatccatcttacagtcgacaccggcttcactaggggggaagcttccatcaaagcctacgtctcatccaacctgtccctcggtgataggcaactcgctgcgcaatttcaggaaatccctctggatcttaggatgatcggggcagaaaaggctggatttgagatcctgaaatctacgatggtagagaagctccccaatgatctggaaggaatggagtcctcaatggagaagctttacattcttattgatgagatctacaaatacgtcgatgatgttgtggaaggacgcgtggcacctgataacagaatcggaaggttggtctctgaatctgttgcttcaatgccgaaattgtccccagctgctttcgataagcttttcaatgacaagattcaggataaccttgcgctggtatacctgtcaagcatcacaaggacacaaatcagcatcgccgagaagttgaacactgctgctcaggcgctgtgactttggttgtggcagatctatctggttgaaacgtggatgtttggcctacgtgaccaattggtgacagggatgcattttttgttatttgttattaaaaaatgggagagctggcaggaaagaaaagggttagtcaatgatgggatcccggtagagtggtggatgtttctgtttggatagcattatgtgctccaggctgaatatttgtaatgctccttggttgtgtagcgacacagttaacgacatggcaggcaaccgaggtcgtctgggtacatcgcaaataggctggtgccgaggtgacctcgacaggagtcgcagcaggctggcactaatgatgcgaataaagcaatacctcccaacacgttaaaacggggtccaaaattcaccatgattatgaagaagctgtacagctgatggaaacgtaggctcattgcaaatcaataaaatgtactccgtctcaaattaaaattttatttgtatttctagtggatttatttatacaataattaatgtatgttctatatatatatgcttgatacagtaggagtgggtactctagttgcggggtaccgatagtaaacacttgatgaagagcaattacgaaacgcttcacttatcgcatcgtgtttcatgtggttccaagtgaaga

SEQ ID NO: 73642 - DNA, 1035 bp, Zea Mays
ggaaagcctgcaccttgctccgagctgccaaggccatatctctgcaatgggtgactacacaatccagattagcaccaagctcattgaccagcttgctcgtgatgacgagaaggtaaaacggaaagccaggaagcccaagcctaagaagaagcccaccgtccagccacatgaagagcccctggaattcccgagagaaccaaagacgacaagccttgctactgctcctgggtggcctctgcagcctccccctatgtttctgccagtgacccctgctcccccgccacccccggccacaatgccggaggtggaagccattcgttccgtcctgaaagaaagtgaggcgcttctcaagaagctggagaaccaggaaactggggcacgccaagagctcagcaagagagcaaaggagctgcacgacaaggagttcaagctaccataccagaaacccatgccctgcacccaggagagggcaggctgccttgagtgttacaagaccaatacaaaggacccgctcaagtgtgctgaagcagtcaagagatttgaggcatgtgctctcatggccatcaaaagtactgccgcaaaagctgattagtatgtagtccgtgaagctttgtgagttggggcgagctgatacgcggactctgttttttatcttttgaggcaattcaaataaccaaggattttcatgggacccactgtagatttctaatgccactgcactgggctacctgaggcagcgcaccttgagcttagcgatattgcatatgtttgttaaaattggtatatcaagttgctggtgcaaaggttttttctgaaatatatattgatcttgtgttggattggtatccactagccacgctgcagatttttgctgtgttctatggtgtcattattgtgctattgtcgtactcttgtgtgcatgatgcctctgtttacctattttccgtgccagcactgctattttgtatttcattcagtccatgggctgtagaattctgttccaagtggatcaatattattatcttctcttgtgct

SEQ ID NO: 73643 - DNA, 994 bp, Zea Mays
aaaccctagcttaagctatttgcctattcctattcggatctgatccagtcgcaattctgtgcgccgctgtgcaacaaatcacgtctgtcgagggcatggatccctacatgacaaggctcggcgccggagccactcaccagctttccagggctgaagcaatgcctgaccgaaggtctaggttttggcagacagatgtgcagcttgcgcctcggatagacatcatctgccctctgcctcgccgcccttctcgcctaccggttctcaatagccccaagctcaatggggcactcccactgtatagagcagaccccacttttgatatcgttgacctcatccttagcaagaatgaccctgatgtggatactgattcaagcagccaggcgggctttttctgtggctcgcctcctgcacgcactgacaaccctgttatcaatgacccacagtttggaaagaaaacaccatccttttctcctttatttggtggaagctcttccgggaaaatgacagctggaagagtcgaagtaggttctccgtcgtcttgcggggcgagcagcccgaaagtaaggatcgaaggttttgcttgcgggaacaaagagccccctcactgttttgcctgatgatccggatcattgaccctacctaaccctgttttgctacccccgcaacatgtacatttcccctgctagtttctttggttaaaaaacctggtagtttctttgagtcggagtcgagtaagagcgcttgttgttgccccttgtgatgaccgtgggtggcttttggtgcaagggagcagagcacagctctcggatgtaaatagggtggcgtatgtagtgctagatgtttgtatgtgtctgctaaaatgtagtagtaaggttgggtgggtccatgtgtcggcgtctgtaaatagcgtcatgcatttggatgtaaattgaaatgcgtcttcaattattgtcacctgtctctctgctggtgctgggtccaaattgcaaccggt

SEQ ID NO: 73644 - DNA, 2098 bp, Zea Mays
gtatcctgatggcatctattctacttgtactgccgggaggccggccggagctggtggctgctcctgttgcattgcgatggcaagtggagtgagtgattgcgaatgtgaccgacgacgggctcatcttcttctcttttacactagagcatgatgcatgggcaggagctgtcctatgactcctatccctcctccttcctagccatggacgacatgcaccgccaactccaagcaccaccagcctgccaaagccacagcagcagcagcagcatcttctttttctttttcttagcagcggtcatcatctactgcgtcgtgatcatcagacgattgatcaaattccaagggaggaggagggtgaagaatgatcatgcagcagcagcagcagcaccaccaccaccaccaccaccgagaaggggtagccgctggtggtggtccgtcgtggagacgctggccttcctgtccgccaacagcagcggcaggggcttctaccacttcgtggaggctcgccaccgcaggtacggtcccggcccctgcttccgcacctcgctcttgggcgccacccacgtgttcgtctcgtcggccgacgccgccaggtcgctcctgggcgccgagccagccggcttctcgaagcgctacgtgcgcaccgtggcggagctcctcggcgagcacagcctgctgtgcgcctcccacgccacccaccgcgccctgcggcgcgccgtggcgcccctcttcaacgcgcaggccacggcgtccctggccgccaccttcgacggcctcacgcggaggctcatgaagcgcgactggagcagcagcactggggccgtggtggtgctcgacgccgcgctggacctaacattcgaggccatctgcgacatgctcatcgggaggacgctgcggcccgatgcgaggaggcggctgcagagcgacgtgctggccgtgacgcgggccatgctggcgttcccgctcagggctgccggggaccaggttccacgcgggcctccgggccaggaaaaggatcatggacgtgctcaggcaagagataggatcaagacagagacagatcatggacatggaggaggaggaggaggagcagcagcacggcgacgactttctgcagagccttcttcttctcaggagtaggaggaggaggcggagccagcagcaacaacaccttttaccatcgtcgtcagctcatcataacgacgacgacgacctcttcctcactgacgaccagattctcgataacatcttgacgctcatcattgccggtgacgacagcgagcgcaattacatggatggtcaagtacctggctgacaacaaagtcttccaagaaaccttgaggtcagttcagctggagctgaagcagcagcagcagcaggaggaggcagatcatgatctcctccaacatctcaacagcatggagcttgcatacatgacggttaaagaatcattgaggatggcgagcatagtttcctggtttccaagggtagcactcgaggactgccaggtcgcagggttccacatccacaaggggtggattgtgaacattgatgcgagggccctacactacgatgcgacgctctaccacaaccccaccatgtttgatccttcaagattcaaaggcgggcatagcatgcacacgaagcagccgtacagcttcctggtgtttggagcaggcgggagaacctgcctggggatgaacctcgccaaaatcatgatgctcatttttctgcaccaccttgttacaacatggagatgggagatggccgacgacgaccccagccttgagaagtgggcaatgtttcccaggctcagaaacggatgccccattcacctcgcacgcatatgatgattaagcatgcactagctaccagaggaaactagtatatatcttctgtaaccctaaaccacaatgcaaccacaaagcaccgatgtgatgtgtactttattttcaccaccttatgtatgtaattgtctcgcatgttatatcaagagaagtactctattcctctctctctcttatggagctcttgtcggtttaggctattaaagagcttaattgatagatttctctatttacaatgacttgacgaatcg

SEQ ID NO: 73645 - DNA, 978 bp, Zea Mays
cccgtggccgccccagctgccgcgtgccgcccgtttccatggctatggaggggagcggcggcagccagagccagctgatccatccggccgtggacgaggcagccctggccgtcaccaagagagagcgcaagagaagcaggcccagacgacggatcgtccttggccaagaagaggaagagaaagacgatgaagaccgttgggcagcacagctatgtcgggaatcctgtggcacttgtgctggacttggcagagggaactccgctgccctccagggaggacctcctctccactttcagcaggtttggctttgtgatcgactccgagaccagcatcacccaagacaagaacaagcacaccgcgcgcgtggtgttcgccaccagggctcaagcagagagcgccttgagctgtgccgcgactcttggcggcgcatttgcagcaccgagcgtccaggatctccctcccatcacgcctcttccaaagctccctctcacagatattaggaacaatcttgggaagatgatcttgtccttgtcgtctaaagccaagtcacctcaagaagcgaatgcaaagccggccgtggacagtctcagtcttgtgggagaaatgcaacatcttcttgccaaggttgacaaggtgctgcaagcgcagcgtgcatctgctacagatcatcatgcaatccaccactgaccagtctgtatggttaggatgcatctaggtcgttcagctactgacccatgttccttgtagctgctgatcgtcagtcttttgtaaatggatcctgaaatccaccagttcagcggctggtttctctccccatgcatttgtgtaaatggtagacctacatgcatcgctgctctatctagtggtactccgcactagcatcctttatcatcctctgtcagggtaatgttcctttgctggtggtatcccacctttgacctgagacaacaacaataattggaatcctgtcataagttt

SEQ ID NO: 73646 - DNA, 1120 bp, Zea Mays
ctcaaagcagtttctatgctgttctccttattctgtttgaatgaacataaataatggaaatgaggggaaagaataccacgtccaacgatttgacattggattcttttcttcctctaggttcaggttcacatagccaagctgagaaggcagttaaccatgatagaaggaatgccccagcaatcgaaagccttttctgtccctggacagcagtttaggcacatctaatgtagtgcacctggtttgtaaggaagatgttggaatggaacctttcagcaactgcttgacagattgggttctgtgtattcgcattgcagtcgctgccttgggcttgcaaatgacctgtatattctatgaagtgtagtaccgttaggctcataagagaacactactagcatgacctgttctttttaactttttcttatatctccattaccgttcgtttccctatgaaaatggcatgtcctcgttgtggctcttcagtatttttttccttgtatatggtggtgatggatctgccatagcgaaagagagtaaggacaaactaggctcacctcctaaccacacatgggggcacgggttaacagtaagtagctgtgctgaactgttgattagtgcgacattatgtgatgatcttgttttttgcacaagccttatgtaaccacacatgatgtcatcttccagtcaatatattgttgatctctgtgccgttttctatggatgaaatgaaactttgcatatcagcatgcatgctccatattttctgatcacaagctacagtatccagtaaaaggaatctgaagacatgggtgggactgggagtacagctcttatacttcactcttctctagtgtcctgtgactggtcctctaagcgccttcatgagtagttgtgcactgtgcaagactatgccagcttgtctgggcattgcagctactcatgtgactagcaatgttgactcttgactgtaaagtttcgagctgccgacattttttttacacttgtcataatctgccgtccactccctgcttttgaaactaataaggcatttttcttttgtcttgggtcaagaaatcattcaaggtgagtacactatctttttattaaacatgtaaagtctaag

SEQ ID NO: 73647 - DNA, 1889 bp, Zea Mays
gtttcttcgcccaacagatattttccagtgccgctctgaacagtgtgatgtggccgcgcgagccgcgaggagccagctagccatggtcgtcccagtcccgccgccgcctctcctcgcttcccacgtggccgtccgggccgcggcctccgccatatcccacggccgccgggtcctccttaacggcgaccacccgccgcaggtcgcggccctcgggcgcggcgactgggtcaagctcatctgcggcgccagctttgaggatgcagctgatgtcaggaatctctcccttgtctacactcttgctggagtggattgcattgattgtgcagcagatgcatctgtggtgggagcagtgaatgaaggtattgaagtagcagcatcaattgtaccaacagttcaaaggccttggctgatgattagtgttaatgatgattgcagagatcttcatttccgtaaagctgagtttgatcctgatgattgcccactggattgctcaaagccatgtgagaaagtttgcccagctgatgcaatatcactaaagcattccatggttgatggagagcgcacactatctgatcccttacgtggtaaatatgagggtggtgtaattactgagcggtgctatggatgtggtcggtgcttgccagtttgcccgtatgacagaataagagctgtgtcctatgttcgagaccctactatgactgctgaattattgaaaagagatgatgttgatgcaatagagatacataccactggaaaaggaactgatatgttcaataccctctgggacaacttgagtgggtccatcaataatgtgaagctggttgcagtaggttccacaattggtttgttgctgtatccacatatttgtattgctggaaatgtagccagtgactttttattgaaaaaaaaacttccattccatcattattaacgtgaaagttcactcttttcaggttagtcttcctgatataggtgaatcaactgttgacctcatgaacacaatatacacaataatggagccccattttaaagggtataatctttggcagttagatggccgacctatgagtggtgacattggccgaggtgcaacaagggagacagtttcttttgccgctcatgtggcttcaatgtcagaaagacctcctgttggctggtggcaccaactcatacactgttgattacttaaagaaagctggtcttttccaatcatcaaattggaattcagggaccgcaacctctgaaatggccagttctcaccaagctttaataggagggattgcttatggtggctatgctcgcaagatcgttggacgggttttgcgcaaaataccagaacagtttggccgtgtgcacatcgaggatcatcctgatcatctactggaggctctacaagaagccatgtcattagtaggacctgtgaagggttatatacccagtcattccaagcctttcatgaaacaagtagatagacaataggaagtaggaaaagcgcaggatatacccttcaacccagttttgggcgaagataaggcgcatcgtactttagctgtgacagtgaggagttcaatgtggtcattgggccaggaatctagtggttgctgtcggtcgctcgttctagatggattatgggctatggaacctggagtgccgtggtgctgcaaacatctcatgtttcattctgaaatctttttagatgtataatacgtagtagttgaattttctgtaaaaaaacatgttgcttggtgtttgcctttccaattggctgataagcctggccatatcgttatgcagacacggtcatctgcagcagacgacctttgaggctttgacaaatttgagcagcagccgtcggtttcggacgacgtgttctgtagcgtcgcgtaatg

SEQ ID NO: 73648 - DNA, 1928 bp, Zea Mays
gtttcttcgcccaacagatattttccagtgccgctctgaacagtgtgatgtggccgcgcgagccgcgaggagccagctagccatggtcgtcccagtcccgccgccgcctctcctcgcttcccacgtggccgtccgggccgcggcctccgccatatcccacggccgccgggtcctccttaacggcgaccacccgccgcaggtcgcggccctcgggcgcggcgactgggtcaagctcatctgcggcgccagctttgaggatgcagctgatgtcaggaatctctcccttgtctacactcttgctggagtggattgcattgattgtgcagcagatgcatctgtggtgggagcagtgaatgaaggtattgaagtagcagcatcaattgtaccaacagttcaaaggccttggctgatgattagtgttaatgatgattgcagagatcttcatttccgtaaagctgagtttgatcctgatgattgcccactggattgctcaaagccatgtgagaaagtttgcccagctgatgcaatatcactaaagcattccatggttgatggagagcgcacactatctgatcccttacgtggtaaatatgagggtggtgtaattactgagcggtgctatggatgtggtcggtgcttgccagtttgcccgtatgacagaataactgcaagctttgcttgaaaccatttcaggagctgtgtcctatgttcgagaccctactatgactgctgaattattgaaaagagatgatgttgatgcaatagagatacataccactggaaaaggaactgatatgttcaataccctctgggacaacttgagtgggtccatcaataatgtgaagctggttgcagtaggttccacaattggtttgttgctgtatccacatatttgtattgctggaaatgtagccagtgactttttattgaaaaaaaaacttccattccatcattattaacgtgaaagttcactcttttcaggttagtcttcctgatataggtgaatcaactgttgacctcatgaacacaatatacacaataatggagccccattttaaagggtataatctttggcagttagatggccgacctatgagtggtgacattggccgaggtgcaacaagggagacagtttcttttgccgctcatgtggcttcaatgtcagaaagacctcctgggttctatcagttggctggtggcaccaactcatacactgttgattacttaaagaaagctggtcttttccaatcatcaaattggaattcagggaccgcaacctctgaaatggccagttctcaccaagctttaataggagggattgcttatggtggctatgctcgcaagatcgttggacgggttttgcgcaaaataccagaacagtttggccgtgtgcacatcgaggatcatcctgatcatctactggaggctctacaagaagccatgtcattagtaggacctgtgaagggttatatacccagtcattccaagcctttcatgaaacaagtagatagacaataggaagtaggaaaagcgcaggatatacccttcaacccagttttgggcgaagataaggcgcatcgtactttagctgtgacagtgaggagttcaatgtggtcattgggccaggaatctagtggttgctgtcggtcgctcgttctagatggattatgggctatggaacctggagtgccgtggtgctgcaaacatctcatgtttcattctgaaatctttttagatgtataatacgtagtagttgaattttctgtaaaaaaacatgttgcttggtgtttgcctttccaattggctgataagcctggccatatcgttatgcagacacggtcatctgcagcagacgacctttgaggctttgacaaatttgagcagcagccgtcggtttcggacgacgtgttctgtagcgtcgcgtaatg

SEQ ID NO: 73649 - DNA, 1804 bp, Zea Mays
gtttcttcgcccaacagatattttccagtgccgctctgaacagtgtgatgtggccgcgcgagccgcgaggagccagctagccatggtcgtcccagtcccgccgccgcctctcctcgcttcccacgtggccgtccgggccgcggcctccgccatatcccacggccgccgggtcctccttaacggcgaccacccgccgcaggtcgcggccctcgggcgcggcgactgggtcaagctcatctgcggcgccagctttgaggatgcagctgatgtcaggaatctctcccttgtctacactcttgctggagtggattgcattgattgtgcagcagatgcatctgtggtgggagcagtgaatgaaggtattgaagtagcagcatcaattgtaccaacagttcaaaggccttggctgatgattagtgttaatgatgattgcagagatcttcatttccgtaaagctgagtttgatcctgatgattgcccactggattgctcaaagccatgtgagaaagtttgcccagctgatgcaatatcactaaagcattccatggttgatggagagcgcacactatctgatcccttacgtggtaaatatgagggtggtgtaattactgagcggtgctatggatgtggtcggtgcttgccagtttgcccgtatgacagaataaaagctgcaagctttgcttgaaaccatttcaggagctgtgtcctatgttcgagaccctactatgactgctgaattattgaaaagagatgatgttgatgcaatagagatacataccactggaaaaggaactgatatgttcaataccctctgggacaacttgagtgggtccatcaataatgtgaagctggttgcagttagtcttcctgatataggtgaatcaactgttgacctcatgaacacaatatacacaataatggagccccattttaaagggtataatctttggcagttagatggccgacctatgagtggtgacattggccgaggtgcaacaagggagacagtttcttttgccgctcatgtggcttcaatgtcagaaagacctcctgggttctatcagttggctggtggcaccaactcatacactgttgattacttaaagaaagctggtcttttccaatcatcaaattggaattcagggaccgcaacctctgaaatggccagttctcaccaagctttaataggagggattgcttatggtggctatgctcgcaagatcgttggacgggttttgcgcaaaataccagaacagtttggccgtgtgcacatcgaggatcatcctgatcatctactggaggctctacaagaagccatgtcattagtaggacctgtgaagggttatatacccagtcattccaagcctttcatgaaacaagtagatagacaataggaagtaggaaaagcgcaggatatacccttcaacccagttttgggcgaagataaggcgcatcgtactttagctgtgacagtgaggagttcaatgtggtcattgggccaggaatctagtggttgctgtcggtcgctcgttctagatggattatgggctatggaacctggagtgccgtggtgctgcaaacatctcatgtttcattctgaaatctttttagatgtataatacgtagtagttgaattttctgtaaaaaaacatgttgcttggtgtttgcctttccaattggctgataagcctggccatatcgttatgcagacacggtcatctgcagcagacgacctttgaggctttgacaaatttgagcagcagccgtcggtttcggacgacgtgttctgtagcgtcgcgtaatg

SEQ ID NO: 73650 - DNA, 1907 bp, Zea Mays
gtttcttcgcccaacagatattttccagtgccgctctgaacagtgtgatgtggccgcgcgagccgcgaggagccagctagccatggtcgtcccagtcccgccgccgcctctcctcgcttcccacgtggccgtccgggccgcggcctccgccatatcccacggccgccgggtcctccttaacggcgaccacccgccgcaggtcgcggccctcgggcgcggcgactgggtcaagctcatctgcggcgccagctttgaggatgcagctgatgtcaggaatctctcccttgtctacactcttgctggagatgcatctgtggtgggagcagtgaatgaaggtattgaagtagcagcatcaattgtaccaacagttcaaaggccttggctgatgattagtgttaatgatgattgcagagatcttcatttccgtaaagctgagtttgatcctgatgattgcccactggattgctcaaagccatgtgagaaagtttgcccagctgatgcaatatcactaaagcattccatggttgatggagagcgcacactatctgatcccttacgtggtaaatatgagggtggtgtaattactgagcggtgctatggatgtggtcggtgcttgccagtttgcccgtatgacagaataaaagctgcaagctttgcttgaaaccatttcaggagctgtgtcctatgttcgagaccctactatgactgctgaattattgaaaagagatgatgttgatgcaatagagatacataccactggaaaaggaactgatatgttcaataccctctgggacaacttgagtgggtccatcaataatgtgaagctggttgcagtaggttccacaattggtttgttgctgtatccacatatttgtattgctggaaatgtagccagtgactttttattgaaaaaaaaacttccattccatcattattaacgtgaaagttcactcttttcaggttagtcttcctgatataggtgaatcaactgttgacctcatgaacacaatatacacaataatggagccccattttaaagggtataatctttggcagttagatggccgacctatgagtggtgacattggccgaggtgcaacaagggagacagtttcttttgccgctcatgtggcttcaatgtcagaaagacctcctgggttctatcagttggctggtggcaccaactcatacactgttgattacttaaagaaagctggtcttttccaatcatcaaattggaattcagggaccgcaacctctgaaatggccagttctcaccaagctttaataggagggattgcttatggtggctatgctcgcaagatcgttggacgggttttgcgcaaaataccagaacagtttggccgtgtgcacatcgaggatcatcctgatcatctactggaggctctacaagaagccatgtcattagtaggacctgtgaagggttatatacccagtcattccaagcctttcatgaaacaagtagatagacaataggaagtaggaaaagcgcaggatatacccttcaacccagttttgggcgaagataaggcgcatcgtactttagctgtgacagtgaggagttcaatgtggtcattgggccaggaatctagtggttgctgtcggtcgctcgttctagatggattatgggctatggaacctggagtgccgtggtgctgcaaacatctcatgtttcattctgaaatctttttagatgtataatacgtagtagttgaattttctgtaaaaaaacatgttgcttggtgtttgcctttccaattggctgataagcctggccatatcgttatgcagacacggtcatctgcagcagacgacctttgaggctttgacaaatttgagcagcagccgtcggtttcggacgacgtgttctgtagcgtcgcgtaatg

SEQ ID NO: 73651 - DNA, 1820 bp, Zea Mays
gtttcttcgcccaacagatattttccagtgccgctctgaacagtgtgatgtggccgcgcgagccgcgaggagccagctagccatggtcgtcccagtcccgccgccgcctctcctcgcttcccacgtggccgtccgggccgcggcctccgccatatcccacggccgccgggtcctccttaacggcgaccacccgccgcaggtcgcggccctcgggcgcggcgactgggtcaagctcatctgcggcgccagctttgaggatgcagctgatgtcaggaatctctcccttgtctacactcttgctggagtggattgcattgattgtgcagcagatgcatctgtggtgggagcagtgaatgaaggtattgaagtagcagcatcaattgtaccaacagttcaaaggccttggctgatgattagtgttaatgatgattgcagagatcttcatttccgtaaagctgagtttgatcctgatgattgcccactggattgctcaaagccatgtgagaaagtttgcccagctgatgcaatatcactaaagcattccatggttgatggagagcgcacactatctgatcccttacgtggtaaatatgagggtggtgtaattactgagcggtgctatggatgtggtcggtgcttgccagtttgcccgtatgacagaataaaagctgcaagctttgcttgaaaccatttcaggagctgtgtcctatgttcgagaccctactatgactgctgaattattgaaaagagatgatgttgatgcaatagagatacataccactggaaaaggaactgatatgttcaataccctctgggacaacttgagtgggtccatcaataatgtgaagctggttgcagtaggttccacaattggttagtcttcctgatataggtgaatcaactgttgacctcatgaacacaatatacacaataatggagccccattttaaagggtataatctttggcagttagatggccgacctatgagtggtgacattggccgaggtgcaacaagggagacagtttcttttgccgctcatgtggcttcaatgtcagaaagacctcctgggttctatcagttggctggtggcaccaactcatacactgttgattacttaaagaaagctggtcttttccaatcatcaaattggaattcagggaccgcaacctctgaaatggccagttctcaccaagctttaataggagggattgcttatggtggctatgctcgcaagatcgttggacgggttttgcgcaaaataccagaacagtttggccgtgtgcacatcgaggatcatcctgatcatctactggaggctctacaagaagccatgtcattagtaggacctgtgaagggttatatacccagtcattccaagcctttcatgaaacaagtagatagacaataggaagtaggaaaagcgcaggatatacccttcaacccagttttgggcgaagataaggcgcatcgtactttagctgtgacagtgaggagttcaatgtggtcattgggccaggaatctagtggttgctgtcggtcgctcgttctagatggattatgggctatggaacctggagtgccgtggtgctgcaaacatctcatgtttcattctgaaatctttttagatgtataatacgtagtagttgaattttctgtaaaaaaacatgttgcttggtgtttgcctttccaattggctgataagcctggccatatcgttatgcagacacggtcatctgcagcagacgacctttgaggctttgacaaatttgagcagcagccgtcggtttcggacgacgtgttctgtagcgtcgcgtaatg

SEQ ID NO: 73652 - DNA, 1789 bp, Zea Mays
gtttcttcgcccaacagatattttccagtgccgctctgaacagtgtgatgtggccgcgcgagccgcgaggagccagctagccatggtcgtcccagtcccgccgccgcctctcctcgcttcccacgtggccgtccgggccgcggcctccgccatatcccacggccgccgggtcctccttaacggcgaccacccgccgcaggtcgcggccctcgggcgcggcgactgggtcaagctcatctgcggcgccagctttgaggatgcagctgatgtcaggaatctctcccttgtctacactcttgctggagtggattgcattgattgtgcagcagatgcatctgtggtgggagcagtgaatgaaggtattgaagtagcagcatcaattgtaccaacagttcaaaggccttggctgatgattagtgttaatgatgattgcagagatcttcatttccgtaaagctgagtttgatcctgatgattgcccactggattgctcaaagccatgtgagaaagtttgcccagctgatgcaatatcactaaagcattccatggttgatggagagcgcacactatctgatcccttacgtggtaaatatgagggtggtgtaattactgagcggtgctatggatgtggtcggtgcttgccagtttgcccgtatgacagaataagagctgtgtcctatgttcgagaccctactatgactgctgaattattgaaaagagatgatgttgatgcaatagagatacataccactggaaaaggaactgatatgttcaataccctctgggacaacttgagtgggtccatcaataatgtgaagctggttgcagtaggttccacaattggttagtcttcctgatataggtgaatcaactgttgacctcatgaacacaatatacacaataatggagccccattttaaagggtataatctttggcagttagatggccgacctatgagtggtgacattggccgaggtgcaacaagggagacagtttcttttgccgctcatgtggcttcaatgtcagaaagacctcctgggttctatcagttggctggtggcaccaactcatacactgttgattacttaaagaaagctggtcttttccaatcatcaaattggaattcagggaccgcaacctctgaaatggccagttctcaccaagctttaataggagggattgcttatggtggctatgctcgcaagatcgttggacgggttttgcgcaaaataccagaacagtttggccgtgtgcacatcgaggatcatcctgatcatctactggaggctctacaagaagccatgtcattagtaggacctgtgaagggttatatacccagtcattccaagcctttcatgaaacaagtagatagacaataggaagtaggaaaagcgcaggatatacccttcaacccagttttgggcgaagataaggcgcatcgtactttagctgtgacagtgaggagttcaatgtggtcattgggccaggaatctagtggttgctgtcggtcgctcgttctagatggattatgggctatggaacctggagtgccgtggtgctgcaaacatctcatgtttcattctgaaatctttttagatgtataatacgtagtagttgaattttctgtaaaaaaacatgttgcttggtgtttgcctttccaattggctgataagcctggccatatcgttatgcagacacggtcatctgcagcagacgacctttgaggctttgacaaatttgagcagcagccgtcggtttcggacgacgtgttctgtagcgtcgcgtaatg

SEQ ID NO: 73653 - DNA, 1910 bp, Zea Mays
gtttcttcgcccaacagatattttccagtgccgctctgaacagtgtgatgtggccgcgcgagccgcgaggagccagctagccatggtcgtcccagtcccgccgccgcctctcctcgcttcccacgtggccgtccgggccgcggcctccgccatatcccacggccgccgggtcctccttaacggcgaccacccgccgcaggtcgcggccctcgggcgcggcgactgggtcaagctcatctgcggcgccagctttgaggatgcagctgatgtcaggaatctctcccttgtctacactcttgctggagcagatgcatctgtggtgggagcagtgaatgaaggtattgaagtagcagcatcaattgtaccaacagttcaaaggccttggctgatgattagtgttaatgatgattgcagagatcttcatttccgtaaagctgagtttgatcctgatgattgcccactggattgctcaaagccatgtgagaaagtttgcccagctgatgcaatatcactaaagcattccatggttgatggagagcgcacactatctgatcccttacgtggtaaatatgagggtggtgtaattactgagcggtgctatggatgtggtcggtgcttgccagtttgcccgtatgacagaataaaagctgcaagctttgcttgaaaccatttcaggagctgtgtcctatgttcgagaccctactatgactgctgaattattgaaaagagatgatgttgatgcaatagagatacataccactggaaaaggaactgatatgttcaataccctctgggacaacttgagtgggtccatcaataatgtgaagctggttgcagtaggttccacaattggtttgttgctgtatccacatatttgtattgctggaaatgtagccagtgactttttattgaaaaaaaaacttccattccatcattattaacgtgaaagttcactcttttcaggttagtcttcctgatataggtgaatcaactgttgacctcatgaacacaatatacacaataatggagccccattttaaagggtataatctttggcagttagatggccgacctatgagtggtgacattggccgaggtgcaacaagggagacagtttcttttgccgctcatgtggcttcaatgtcagaaagacctcctgggttctatcagttggctggtggcaccaactcatacactgttgattacttaaagaaagctggtcttttccaatcatcaaattggaattcagggaccgcaacctctgaaatggccagttctcaccaagctttaataggagggattgcttatggtggctatgctcgcaagatcgttggacgggttttgcgcaaaataccagaacagtttggccgtgtgcacatcgaggatcatcctgatcatctactggaggctctacaagaagccatgtcattagtaggacctgtgaagggttatatacccagtcattccaagcctttcatgaaacaagtagatagacaataggaagtaggaaaagcgcaggatatacccttcaacccagttttgggcgaagataaggcgcatcgtactttagctgtgacagtgaggagttcaatgtggtcattgggccaggaatctagtggttgctgtcggtcgctcgttctagatggattatgggctatggaacctggagtgccgtggtgctgcaaacatctcatgtttcattctgaaatctttttagatgtataatacgtagtagttgaattttctgtaaaaaaacatgttgcttggtgtttgcctttccaattggctgataagcctggccatatcgttatgcagacacggtcatctgcagcagacgacctttgaggctttgacaaatttgagcagcagccgtcggtttcggacgacgtgttctgtagcgtcgcgtaatg

SEQ ID NO: 73654 - DNA, 1896 bp, Zea Mays
gtttcttcgcccaacagatattttccagtgccgctctgaacagtgtgatgtggccgcgcgagccgcgaggagccagctagccatggtcgtcccagtcccgccgccgcctctcctcgcttcccacgtggccgtccgggccgcggcctccgccatatcccacggccgccgggtcctccttaacggcgaccacccgccgcaggtcgcggccctcgggcgcggcgactgggtcaagctcatctgcggcgccagctttgaggatgcagctgatgtcaggaatctctcccttgtctacactcttgctggagtggattgcattgattgtgcagcagatgcatctgtggtgggagcagtgaatgaaggtattgaagtagcagcatcaattgtaccaacagttcaaaggccttggctgatgattagtgttaatgatgattgcagagatcttcatttccgtaaagctgagtttgatcctgatgattgcccactggattgctcaaagccatgtgagaaagtttgcccagctgatgcaatatcactaaagcattccatggttgatggagagcgcacactatctgatcccttacgtggtaaatatgagggtggtgtaattactgagcggtgctatggatgtggtcggtgcttgccagtttgcccgtatgacagaataagagctgtgtcctatgttcgagaccctactatgactgctgaattattgaaaagagatgatgttgatgcaatagagatacataccactggaaaaggaactgatatgttcaataccctctgggacaacttgagtgggtccatcaataatgtgaagctggttgcagtaggttccacaattggtttgttgctgtatccacatatttgtattgctggaaatgtagccagtgactttttattgaaaaaaaaacttccattccatcattattaacgtgaaagttcactcttttcaggttagtcttcctgatataggtgaatcaactgttgacctcatgaacacaatatacacaataatggagccccattttaaagggtataatctttggcagatggccgacctatgagtggtgacattggccgaggtgcaacaagggagacagtttcttttgccgctcatgtggcttcaatgtcagaaagacctcctgggttctatcagttggctggtggcaccaactcatacactgttgattacttaaagaaagctggtcttttccaatcatcaaattggaattcagggaccgcaacctctgaaatggccagttctcaccaagctttaataggagggattgcttatggtggctatgctcgcaagatcgttggacgggttttgcgcaaaataccagaacagtttggccgtgtgcacatcgaggatcatcctgatcatctactggaggctctacaagaagccatgtcattagtaggacctgtgaagggttatatacccagtcattccaagcctttcatgaaacaagtagatagacaataggaagtaggaaaagcgcaggatatacccttcaacccagttttgggcgaagataaggcgcatcgtactttagctgtgacagtgaggagttcaatgtggtcattgggccaggaatctagtggttgctgtcggtcgctcgttctagatggattatgggctatggaacctggagtgccgtggtgctgcaaacatctcatgtttcattctgaaatctttttagatgtataatacgtagtagttgaattttctgtaaaaaaacatgttgcttggtgtttgcctttccaattggctgataagcctggccatatcgttatgcagacacggtcatctgcagcagacgacctttgaggctttgacaaatttgagcagcagccgtcggtttcggacgacgtgttctgtagcgtcgcgtaatg

SEQ ID NO: 73655 - DNA, 1069 bp, Zea Mays
atgacgaaaaacgtctgcacagaaaaagagatggggcaaggtcaaggaagcaaatatgcagggatcattgtcactgccacatgcacctccgtggcaagtgtcctttggctttggcatcaatcaaatagacaagaggccacctctaccaccgccatccgcagtccatacagtgacccccacgaggtcaagaacctgtacgaggagaggaaagaacctggaagagaggagcttgaggagatggcgagcgccgagggcgagaggtgggtgggactggcgacggacttctcgcaggggagccgagaggcgctgcagtgggcggcgaccaacctgctccgcgccggcgaccacctgctgctgctgcacgtcatcaaggagcccgactacgagcagagcgaggccatcctctgggaatccaccggctccccgttgattcccctctcggagttctctgaccctattatcgcgaagaaatatggagcaaaacccgacatggaaaccttggacctcctgaacactacagctacccagaaggaaattatggtggttgtgaaagtcctgtggggagatccgcgtgagaagctctgtcaagttatccatgacaccccgttgagctgcttggttataggaagcaggggccttggcaaactcaagagggtgctcttaggaagtgtcagcgattacgtcgtgaacaacgcaacctgccctgtcaccgttgtcaagtcatcaagcaccgaaggttgatctcatcaccgaaatgcctgaatattgctgttgttataataaaagatggttggcctcatgaagaacatgcactagtttctagctacctgaaacatgttgaaccgggcaatcctattgtaataatagacaaagtgccttatgaagggcatggttatgtaataggtctgttctccagagtagatgtgccatgcttttgtgtcatcaccgaaagtgccttacgatgatagcctcgcggagcaggaggcccttgcggtccagctggctaggtgagatcaacacattccatgacatctctgcctcaagaaaaaccatggctgcgtaccttgat

SEQ ID NO: 73656 - DNA, 1450 bp, Zea Mays
ggagtccaaactccaaaccaaaccggcgcttctcccacgtcttctcgagttcccacgcgcccgcctgctataaatcgcatccctcaatccccactctttatcccctcctcagccatcgcctccctctcccctcaacccagcgcccccctcccgccgccgctagggtttctcctccctccccgcccacccctaaatcatttccgaagcttccagtgcgccgcagccatgagcgacggcaaggactccctcgacctctccgccctcggcgctgccatccccaactcggccgagctcagcgcggaggacaaggctaaccttgtggcgtcgatcaagaacacgctcgagggattggcgtcgcggcataccgacgtgctcgagagcctcgagcccaaggtcaggaagcgcgtcgagaagctcagggagatccagggcgaacacgacgaacttgaggcaaaatttttcgaggagagagctgctctagaagctaagtatcagaagttgtatgaaccactttactcaaagcgttacgaaattgtcaatggtgtggtcgaggttgagggtatcacagtagaaagtgcagctgaaacccctgcggagcaaaagactggagatgagacctctgctgatcaaaaagaagaaaaaggtgtaccagctttctggcttaatgcaatgaagaatcatgaaattctagctgaggagatccaggagagggacgaggaagctctcaagtacctcaagaacatcacgtggtataggatcagcgagccgaagggctttaagcttgaatttcaatttggtacaaatccgttcttcaagaattcagtgcttacaaaaacatatcacatgattgatgaggatgaaccaattttggagaaagccattggtactgaaattgaatggtaccctgggaagtgcttgacacaaaaggtgctaaaaaagaagccacggaagggttcaaagaacactaaacctatcacaaaaactgaagattgtgagagcttcttcaacttcttcagtccacctcaagtccctgatgatgatgaggaaattgatgaggatatagctgaacagttgcagaacgaaatggaacaagattatgatattggatctaccatcagagacaagattatcccacatgctgtctcgtggttcactggagaggctgctcaagatgaggagtttgaagttatggatggtgaggatgacgatgatgaagacaatgatgatgaagacgaagatgacgaggatgatgatgatgatgatgattacgattcaaagccgacgttccaggggccactcaggaaggaacagacggctcctggtctacagggttgtctccacttctctattgaggcgtctgggtcctacagggttgtctccacttctctattgaggcgtctgggtcctgtaccggcatctactcctttttcctgtacatgtataaatatca

SEQ ID NO: 73657 - DNA, 1702 bp, Zea Mays
ggagtccaaactccaaaccaaaccggcgcttctcccacgtcttctcgagttcccacgcgcccgcctgctataaatcgcatccctcaatccccactctttatcccctcctcagccatcgcctccctctcccctcaacccagcgcccccctcccgccgccgctagggtttctcctccctccccgcccacccctaaatcatttccgaagcttccagtgcgccgcagccatgagcgacggcaaggactccctcgacctctccgccctcggcgctgccatccccaactcggccgagctcagcgcggaggacaaggctaaccttgtggcgtcgatcaagaacacgctcgagggattggcgtcgcggcataccgacgtgctcgagagcctcgagcccaaggtcaggaagcgcgtcgagaagctcagggagatccagggcgaacacgacgaacttgaggcaaaatttttcgaggagagagctgctctagaagctaagtatcagaagttgtatgaaccactttactcaaagcgttacgaaattgtcaatggtgtggtcgaggttgagggtatcacagtagaaagtgcagctgaaacccctgcggagcaaaagactggagatgagacctctgctgatcaaaaagaagaaaaaggtgtaccagctttctggcttaatgcaatgaagaatcatgaaattctagctgaggagatccaggagagggacgaggaagctctcaagtacctcaagaacatcacgtggtataggatcagcgagccgaagggctttaagcttgaatttcaatttggtacaaatccgttcttcaagaattcagtgcttacaaaaacatatcacatgattgatgaggatgaaccaattttggagaaagccattggtactgaaattgaatggtaccctgggaagtgcttgacacaaaaggtgctaaaaaagaagccacggaagggttcaaagaacactaaacctatcacaaaaactgaagattgtgagagcttcttcaacttcttcagtccacctcaagtccctgatgatgatgaggaaattgatgaggatatagctgaacagttgcagaacgaaatggaacaagattatgatattggatctaccatcagagacaagattatcccacatgctgtctcgtggttcactggagaggctgctcaagatgaggagtttgaagttatggatggtgaggatgacgatgatgaagacaatgatgatgaagacgaagatgacgaggatgatgatgatgatgatgattacgattcaaagaagaccaagggaactgccggaggggaagggcagcagggcgaacgacctgcagagtgcaagcagcagtgaggagatatgctgcccagtgagcgcgctaggcctcatgggggtaactgcgtgaagattttatttttgtaccgctctagcgttccagactccatttcagaagttccggaattcatcttggtctttagaaataaagaaagcagatttgtgaactttaacgccagccaccgttactactgctcccagccgacgttccaggggccactcaggaaggaacagacggctcctggtctacagggttgtctccacttctctattgaggcgtctgggtcctacagggttgtctccacttctctattgaggcgtctgggtcctgtaccggcatctactcctttttcctgtacatgtataaatatca

SEQ ID NO: 73658 - DNA, 1536 bp, Zea Mays
ggagtccaaactccaaaccaaaccggcgcttctcccacgtcttctcgagttcccacgcgcccgcctgctataaatcgcatccctcaatccccactctttatcccctcctcagccatcgcctccctctcccctcaacccagcgcccccctcccgccgccgctagggtttctcctccctccccgcccacccctaaatcatttccgaagcttccagtgcgccgcagccatgagcgacggcaaggactccctcgacctctccgccctcggcgctgccatccccaactcggccgagctcagcgcggaggacaaggctaaccttgtggcgtcgatcaagaacacgctcgagggattggcgtcgcggcataccgacgtgctcgagagcctcgagcccaaggtcaggaagcgcgtcgagaagctcagggagatccagggcgaacacgacgaacttgaggcaaaatttttcgaggagagagctgctctagaagctaagtatcagaagttgtatgaaccactttactcaaagcgttacgaaattgtcaatggtgtggtcgaggttgagggtatcacagtagaaagtgcagctgaaacccctgcggagcaaaagactggagatgagacctctgctgatcaaaaagaagaaaaaggtgtaccagctttctggcttaatgcaatgaagaatcatgaaattctagctgaggagatccaggagagggacgaggaagctctcaagtacctcaagaacatcacgtggtataggatcagcgagccgaagggctttaagcttgaatttcaatttggtacaaatccgttcttcaagaattcagtgcttacaaaaacatatcacatgattgatgaggatgaaccaattttggagaaagccattggtactgaaattgaatggtaccctgggaagtgcttgacacaaaaggtgctaaaaaagaagccacggaagggttcaaagaacactaaacctatcacaaaaactgaagattgtgagagcttcttcaacttcttcagtccacctcaagtccctgatgatgatgaggaaattgatgaggatatagctgaacagttgcagaacgaaatggaacaagattatgatattggatctaccatcagagacaagattatcccacatgctgtctcgtggttcactggagaggctgctcaagatgaggagtttgaagttatggatggtgaggatgacgatgatgaagacaatgatgatgaagacgaagatgacgaggatgatgatgatgatgatgattacgattcaaagaagaccaagggaactgccggaggggaagggcagcagggcgaacgacctgcagagtgcaagcagcagtgagttactactgctcccagccgacgttccaggggccactcaggaaggaacagacggctcctggtctacagggttgtctccacttctctattgaggcgtctgggtcctacagggttgtctccacttctctattgaggcgtctgggtcctgtaccggcatctactcctttttcctgtacatgtataaatatca

SEQ ID NO: 73659 - DNA, 1083 bp, Zea Mays
ttgctcttttcctcctcccttcggccctcgcccatccgcctctctccccacgcgcgcgcgcatcgccctcccacagtcccccccccccccccccccccctcctcatcacccacccctagcaataccacactcctactgcaagacccgcccgcccaccgcttcctcgcatctcgggcgcgtgcctgcctgctctcgcggacgtggtggtggttctccggcgccgtggtgggcgggggacgagcgggtgggggaccggcgggtatttttggttgctgtggtttcgtgatggcggcggcggcgatctgcgtggaggacgaggcggcgtgcgccgccgcggaatgcgcggggatcgggaatctggatctcgctgccgccggcgccggggctggcggcaagaggagcgtctatctcatggactgcgcgccggtctggggctgcgcgtccacgcgcggccgcagcaccgagatggaggacgcctgcgccgcggccccgcgcttcgcggacgtgccggtgcgcctgctcgccagccgccgggacctcgaccgtctgggcctcgacgctgacacgctccgcctgccggcgcacctgttcggcgtcttcgacggccacggcggcgccgaggtggccagctactgccgggagaggctccaggtgctcctgaggcaggaactgaggctgctcagcaaggatttgggggagacaagcgaggccgacatgaaggagcactgggacgagctgttcaccaggtgtttccagaggctggatgacgaagtgtcggggcaggcgagcaggctcgtcggtggcgtccaggagacacggccggtggccgccgagaacgtcggctccactgcggttgtcgccgtcgtgtgctcctcccatgtggtggtcgccaactgcggggattcgcgtgttgttctctgccgtggaaaggagcccttagagctgtcgattgatcataagcctgacaggaaggatgaacgagcgaggattgaggccctggggggaaaggtcatccaatggaatggctaccgggtctccggtatacttgctatgtcaagatcgattggcttcggcaaaaagagg

SEQ ID NO: 73660 - DNA, 1461 bp, Zea Mays
ttgctcttttcctcctcccttcggccctcgcccatccgcctctctccccacgcgcgcgcgcatcgccctcccacagtcccccccccccccccccccccctcctcatcacccacccctagcaataccacactcctactgcaagacccgcccgcccaccgcttcctcgcatctcgggcgcgtgcctgcctgctctcgcggacgtggtggtggttctccggcgccgtggtgggcgggggacgagcgggtgggggaccggcgggtatttttggttgctgtggtttcgtgatggcggcggcggcgatctgcgtggaggacgaggcggcgtgcgccgccgcggaatgcgcggggatcgggaatctggatctcgctgccgccggcgccggggctggcggcaagaggagcgtctatctcatggactgcgcgccggtctggggctgcgcgtccacgcgcggccgcagcaccgagatggaggacgcctgcgccgcggccccgcgcttcgcggacgtgccggtgcgcctgctcgccagccgccgggacctcgaccgtctgggcctcgacgctgacacgctccgcctgccggcgcacctgttcggcgtcttcgacggccacggcggcgccgaggtggccagctactgccgggagaggctccaggtgctcctgaggcaggaactgaggctgctcagcaaggatttgggggagacaagcgaggccgacatgaaggagcactgggacgagctgttcaccaggtgtttccagaggctggatgacgaagtgtcggggcaggcgagcaggctcgtcggtggcgtccaggagacacggccggtggccgccgagaacgtcggctccactgcggttgtcgccgtcgtgtgctcctcccatgtggtggtcgccaactgcggggattcgcgtgttgttctctgccgtggaaaggagcccttagagctgtcgattgatcataagcctgacaggaaggatgaacgagcgaggattgaggccctggggggaaaggtcatccaatggaatggctaccgggtctccggtatacttgctatgtcaagatcgattggggaccggtatctgaagccgttcgtgattccaaaaccagaggtcacggtcgttcccagggcgaaagatgacgactgtctcatcctcgcaagcgatgggctgtgggatgtggtgacgaacgaagaggcatgcaaagctgcgcgccggcaaatccaagtgtggcacaagaacaacggtgccgctggcgcatcgtggtcgttgtgcgacgagggtgatggatccaccaccgaccccgctgcccaagccgcagcggattatctcgtgagggtcgcgctgaagaagggtaccgaggacaacgtcaccgtcatcgtggttgacctgaaacctcgaaagaaaagctcaggagcaactcgtagcatcgggcgttctgggtccatcacagtagagctgagctga

SEQ ID NO: 73661 - DNA, 435 bp, Zea Mays
gtcggaagtagaaaagacaactttaatcgacacggcaaaggggaccggtatctgaagccgttcgtgattccaaaaccagaggtcacggtcgttcccagggcgaaagatgacgactgtctcatcctcgcaagcgatgggctgtgggatgtggtgacgaacgaagaggcatgcaaagctgcgcgccggcaaatccaagtgtggcacaagaacaacggtgccgctggcgcatcgtggtcgttgtgcgacgagggtgatggatccaccaccgaccccgctgcccaagccgcagcggattatctcgtgagggtcgcgctgaagaagggtaccgaggacaacgtcaccgtcatcgtggttgacctgaaacctcgaaagaaaagctcaggagcaactcgtagcatcgggcgttctgggtccatcacagtagagctgagctga

SEQ ID NO: 73662 - DNA, 1705 bp, Zea Mays
tgaacggcagcggtacatgggtgggcttccagatccagcggcctcaccatcaccacccgacacgaggacacgcgacgactgactaggcgaggggagcagtcggcgggcgatggtcggcggcggcgcacatggcggcaccacctacaaaggctacaccatcccgcacaacaagcgctggcacaccgtcgccggcaagggcctctgcgctgtgatgtgaactgggtattggcggcggcggctatgggcaccggcggcggcggctatgggcactggcggcggctatggaccggcggaggcggctatggactgggcactgttctgggtcttctacagggctaagcaggatggtgctacgctcttgggtttgcgtcatccttgggatgggcatgatgaccactctcatggtcatggacatgggaatgaggtaggagaccatctgatcccttctatttacttagcattacagaatgcattcttttagcttgttttgttaatgaattgctgtttgactcctgtcaatttgcaatcttattttcattttcatttgatgtttttttattcccccgtggcagtttttttatgtgttatacttttgaaaaattactaacataagaagaaattatgcctggtgacctaaatatttgtttctgcaaatatcactttgtggattatggtgagaaaaatacatgtttcgaatgtatgagtgttgcatgatcatttcaatgtattataatatggtgctttaattggtaagtctaacacctcacgaaatagttgatcagcttagtctgttctttattgtgtaaacatgctttcccttttgtttgcattgggttgggggagtgtgactggtaattcccagatattatcaagtgtttttatttgccatgtttgcttaatacttatatcgtgcacgtttaaggatttatactttctagcactaaactgtgtatgatgttctgactggaaattaataaaaactgcagaaaacaaagaatcatttgcttacactgatccaccgtgctattccagtcttatttaaaagaaataaagaaactagagatgtcaatggggacccgatacccgccaacccgtggggaattcccttattagggtacgggtatgagacgaaaattgtccccatgggtatggatatgggacaaaatctccactcattgggtaaacgggtatgagtttgggaagcaataatccgaacccgattacccatgggtatttcatacgtgtacacctgtcgtgtttgtatgaatgagttgagccgagtcggccaccaagcccagcacgacagcgcaccaggccctaggtcctagcccaacaaggcaactagcatagcagactagtaaaaaacaaaaccctaaaataaccagtcatatgctacgccctaccaagatgacggtgacgaccatggattctcatgcgccaacgaactcagatggtgaccaaggaagagatcgtgacattaagttgcctactctcggcggacggtgatttgatgctttgcatgtcacaacaactaaagattgagttaataaattctatcacccttcatggtactcatgttgtatgcaactggtttagcacaaactggtttcgttacgattgtgcttatgtatttgatttgaagcatcggttatgtggaaaagaatctggtttatgttgatagttcagtacattgctttgcttcgaa

SEQ ID NO: 73663 - DNA, 2305 bp, Zea Mays
gttattattgattttttttttccgcgcagccgatttcttttcgtctctctcgctctcgccttctcggcgcagcgcagtactacgagctagcagcaccaggctctgaaccccctccggtccggtgcgcggcagattagactccgatggggaagtctccggcgaagtggatcaagtccgtgctcttcgggaagaagtcgtcgtccaggtccggctccaccaaggccaaagatttatcgaaaggtgcgagtaacaaaggagctgctgctgcggggaaggagcccgtgttctctgagagctccccagtgatctcggagcctgtgcttgttagcgcccacaacaatgagaccgtgcgggaggtggcgaagggtgagaattccagcgtgcaagaagtgccagtgaccgatgtcagtcaagacttggagaagcagggcagtgtggggtctgatacgtccaatgatgctgagagggtgaaggaagagcgagcggccgtgaaggcacaagctgccttccgtggttatctggcacgccgagcattccgtgccctgaaagggatcataagactacaggcattgattcggggtcatcttgtaaggaggcaagctgtttcaactcttcgtgcaacatggttgattgtgaagtttcaagccctggtccgtgggaggaatcttagactttctgaagcttccattcaagcaaccatggaactttcccaacagaaccttgcgggtgctaaacctggttcctggaaggagaagttgtcgtcaaatgcatttgctcgcaagcttctatcttcatcaattgtggttgaggctcttcacttccagtatgatgagatggaccctaattcagccttcaattggttagagaggtggacgataagtcatgtctggaagcccgcttcccaaccaaggagagttagtgctgatgctaagccacatacaaggaaggccagctatgcaatggaaacagagtcagtgaaattaaagcgtaatgcacggaggagctctgcagggccatttgaaccttctcaaacaaacactgccattgaaattgagaagacaagacggaatccaaggaaattaagtagcactcctgctgagtcagttcctgatggccagttaacagaacttgagaaggttaaacgtagccttaggaaggttactaattccgtggctgaaacctcgaaggcatctagtccaaaaactgagattcctaaccatcaagaggtccaatgtgagagaccactaagaagagcaaaacaagttccaattcatcttgagaatcaagagcctgataatgttaatctgtcggacaatgcaaagatggatattctggtacctgatatccagcctgatgtggaagttgcttcagatccagtcaccatcactaatgaagaaaatgttgatgaaccaccatctgttgttgctccagtggccgaaattatgcctctgcaagacatcaacaacgatgaaaatgctttggtgaatgatgtggaagagagatccaaagaagaacatccttctactgagagcctgaaaggcagcaagaggaggtcttcattctcagctaagcctgaatatccagaaaatggctccaaaaattctccagctctgccaagctacatggctgctacacaatcagcaaaggcgaaactgcggggaaatagctcaccaaaacttagctctgattcagcagagaaaaacggcttcactcgtcgtcactcccttccatcctctaacaacggtaagatggtttcacattctccacgtacacaaaggccagctaatgctggtggcaaggatggagcgaaaggtgacaaggctatgctgtcatcaagagatgcaagcgagagaccactgaaagctgagtggagacgttgaggcggcgaatcaaatccaaatccttcatttgattagcgcgaccgtttgggtggatggatcgcccttgcagtttgctcggatttgttttgtttgtgatgtaaaaaaatgatgtccttatcgtcggcgagatgaatgaaccggctttgttgtgatgaatccgctgggagtcaacttatttattatagggttttccgtcatgccttttgtgatgtatagctgaagtattttcccggtttgttttggtttccagaccccccagacttcctcccttctccttgttgagagctgctgatgttagagagaatgagaacatgcatggattgaattgaacaatcttacccatttggtgaaatgtgggctgcgttttgactgatggttgtttgccattcatggttattgtccttgaagccgcagtatacttgtcc

SEQ ID NO: 73664 - DNA, 2194 bp, Zea Mays
attgattttttttttccgcgcagccgatttcttttcgtctctctcgctctcgccttctcggcgcagcgcagtactacgagctagcagcaccaggctctgaaccccctccggtccggtgcgcggcagattagactccgatggggaagtctccggcgaagtggatcaagtccgtgctcttcgggaagaagtcgtcgtccaggtccggctccaccaaggccaaagatttatcgaaaggtgcgagtaacaaaggagctgctgctgcggggaaggagcccgtgttctctgagagctccccagtgatctcggagcctgtgcttgttagcgcccacaacaatgagaccgtgcgggaggtggcgaagggtgagaattccagcgtgcaagaagtgccagtgaccgatgtcagtcaagacttggagaagcagggcagtgtggggtctgatacgtccaatgatgctgagagggtgaaggaagagcgagcggccgtgaaggcacaagctgccttccgtggttatctggcacgccgagcattccgtgccctgaaagggatcataagactacaggcattgattcggggtcatcttgtaaggaggcaagctgtttcaactcttcgtgcaacatggttgattgtgaagtttcaagccctggtccgtgggaggaatcttagactttctgaagcttccattcaagcaaccatggaactttcccaacagaaccttgcgggtgctaaacctggttcctggaaggagaagttgtcgtcaaatgcatttgctcgcaagcttctatcttcatcaattgtggttgaggctcttcacttccagtatgatgagatggaccctaattcagccttcaattggttagagaggtggacgataagtcatgtctggaagcccgcttcccaaccaaggagagttagtgctgatgctaagccacatacaaggaaggccagctatgcaatggaaacagagtcagtgaaattaaagcgtaatgcacggaggagctctgcagggccatttgaaccttctcaaacaaacactgccattgaaattgagaagacaagacggaatccaaggaaattaagtagcactcctgctgagtcagttcctgatggccagttaacagaacttgagaaggttaaacgtagccttaggaaggttactaattccgtggctgaaacctcgaaggcatctagtccaaaaactgagattcctaaccatcaagaggtccaatgtgagagaccactaagaagagcaaaacaagttccaattcatcttgagaatcaagagcctgataatgttaatctgtcggacaatgcaaagatggatattctggtacctgatatccagcctgatgtggaagttgcttcagatccagtcaccatcactaatgaagaaaatgttgatgaaccaccatctgttgttgctccagtggccgaaattatgcctctgcaagacatcaacaacgatgaaaatgctttggtgaatgatgtggaagagagatccaaagaagaacatccttctactgagagcctgaaaggcagcaagaggaggtcttcattctcagctaagcctgaatatccagaaaatggctccaaaaattctccagctctgccaagctacatggctgctacacaatcagcaaaggcgaaactgcggggaaatagctcaccaaaacttagctctgattcagcagagaaaaacggcttcactcgtcgtcactcccttccatcctctaacaacgagagaccactgaaagctgagtggagacgttgaggcggcgaatcaaatccaaatccttcatttgattagcgcgaccgtttgggtggatggatcgcccttgcagtttgctcggatttgttttgtttgtgatgtaaaaaaatgatgtccttatcgtcggcgagatgaatgaaccggctttgttgtgatgaatccgctgggagtcaacttatttattatagggttttccgtcatgccttttgtgatgtatagctgaagtattttcccggtttgttttggtttccagaccccccagacttcctcccttctccttgttgagagctgctgatgttagagagaatgagaacatgcatggattgaattgaacaatcttacccatttggtgaaatgtgggctgcgttttgactgatggttgtttgccattcatggttattgtccttgaagccgcagtatacttgtcc

SEQ ID NO: 73665 - DNA, 2316 bp, Zea Mays
cttcatgctgcatttgcgggagttcgccgcgcgctcgcgtcggtgttttttttatcctgtgattcttttttggacctccgcgagggttgctttcgttgggagttgctgtagctctgaaccccctccggtccggtgcgcggcagattagactccgatggggaagtctccggcgaagtggatcaagtccgtgctcttcgggaagaagtcgtcgtccaggtccggctccaccaaggccaaagatttatcgaaaggtgcgagtaacaaaggagctgctgctgcggggaaggagcccgtgttctctgagagctccccagtgatctcggagcctgtgcttgttagcgcccacaacaatgagaccgtgcgggaggtggcgaagggtgagaattccagcgtgcaagaagtgccagtgaccgatgtcagtcaagacttggagaagcagggcagtgtggggtctgatacgtccaatgatgctgagagggtgaaggaagagcgagcggccgtgaaggcacaagctgccttccgtggttatctggcacgccgagcattccgtgccctgaaagggatcataagactacaggcattgattcggggtcatcttgtaaggaggcaagctgtttcaactcttcgtgcaacatggttgattgtgaagtttcaagccctggtccgtgggaggaatcttagactttctgaagcttccattcaagcaaccatggaactttcccaacagaaccttgcgggtgctaaacctggttcctggaaggagaagttgtcgtcaaatgcatttgctcgcaagcttctatcttcatcaattgtggttgaggctcttcacttccagtatgatgagatggaccctaattcagccttcaattggttagagaggtggacgataagtcatgtctggaagcccgcttcccaaccaaggagagttagtgctgatgctaagccacatacaaggaaggccagctatgcaatggaaacagagtcagtgaaattaaagcgtaatgcacggaggagctctgcagggccatttgaaccttctcaaacaaacactgccattgaaattgagaagacaagacggaatccaaggaaattaagtagcactcctgctgagtcagttcctgatggccagttaacagaacttgagaaggttaaacgtagccttaggaaggttactaattccgtggctgaaacctcgaaggcatctagtccaaaaactgagattcctaaccatcaagaggtccaatgtgagagaccactaagaagagcaaaacaagttccaattcatcttgagaatcaagagcctgataatgttaatctgtcggacaatgcaaagatggatattctggtacctgatatccagcctgatgtggaagttgcttcagatccagtcaccatcactaatgaagaaaatgttgatgaaccaccatctgttgttgctccagtggccgaaattatgcctctgcaagacatcaacaacgatgaaaatgctttggtgaatgatgtggaagagagatccaaagaagaacatccttctactgagagcctgaaaggcagcaagaggaggtcttcattctcagctaagcctgaatatccagaaaatggctccaaaaattctccagctctgccaagctacatggctgctacacaatcagcaaaggcgaaactgcggggaaatagctcaccaaaacttagctctgattcagcagagaaaaacggcttcactcgtcgtcactcccttccatcctctaacaacggtaagatggtttcacattctccacgtacacaaaggccagctaatgctggtggcaaggatggagcgaaaggtgacaaggctatgctgtcatcaagagatgcaagcgagagaccactgaaagctgagtggagacgttgaggcggcgaatcaaatccaaatccttcatttgattagcgcgaccgtttgggtggatggatcgcccttgcagtttgctcggatttgttttgtttgtgatgtaaaaaaatgatgtccttatcgtcggcgagatgaatgaaccggctttgttgtgatgaatccgctgggagtcaacttatttattatagggttttccgtcatgccttttgtgatgtatagctgaagtattttcccggtttgttttggtttccagaccccccagacttcctcccttctccttgttgagagctgctgatgttagagagaatgagaacatgcatggattgaattgaacaatcttacccatttggtgaaatgtgggctgcgttttgactgatggttgtttgccattcatggttattgtccttgaagccgcagtatacttgtcc

SEQ ID NO: 73666 - DNA, 7997 bp, Zea Mays
ctggaagacaagtagtagcccaaaaagcctaggccgtggcccgcgcaataatgtagcccatgtccgtgcacaaccgcgcacagtagtcgccggctttgcagagatcgaccgtggtattggcaaccggtgtccggtgagggggatccacgcaactcctgctaccaccaccatcgccgctacagcggcgcatgcagcagccggcacgacgatgggggagcgagacgcgctcccgccgctgccgctcgccctcggtccgccgcatctaatcccgccggcgcccacccgcgacccgcgcgccatcgccttcctccctgacctcgtgggcttccactgggtcgcctacgctgccggctccttccttgtcgtatcccacctcccctccccttgccgggacgacaacaacaacgacagttgctccccgttcttccgccaggtcatcgacctccgcgcccccgtgtccgcagttgcttggtgccgccgcgggagcggagaggtcgccgccgctacagacaattctatacacatattccagcctgcgcccgcctcttctccaggttcgtttggatggctcctgagatggtctatcaccgagacgttcgccatcgttgctgtatcctggaccggctgcggcaatggcattgtggcagttggcgcaggtgtttccatgtgggcaagattggagtcctcctggcagctcgcttggaggtctacaccgcaggtgccgcaagcccttgtctccactacctgttccatgcaaggtcctgtcgcgacagtggcagctcttgctccagccgagggcagtgtgcctgttcttgtgtttctgaacgatgccaggagggggctggagcaagctgagcttgtgcatcctcagcctgtttgtatgatccagtggagatcctgttcgttatacccccatgatctgtctgagatcaggagagagatcctcatgacttgctgctttgatgggactgtccggctatggagtaaggatgaggtgtctaggtcgaagaagcagcgtggtttgctaatatcattcagtgtcattgcagtaatagaggtgaacaacactctgaatggagtcctcggagttgatattattgtgagatggtccatggaatctggcagcgttgtgtcaagggacgaacaaggtagattcaagttgttttcaggtgatttgagggagagccaggttggtaaatgtgagtggcttgtaagtcttggccccgggccttgcattagcttttgggctatccattgtttggatgatgtatttccgccaaggtacccacggattactttatggaaacagagcaaacttcagggctggggggattcctatgttaaatcaggtcctctaaaatctatggaacagtcaatttttgttgaggctgtcatctcaagaaggctatgctctggtccacctgcaacatgttttttgcttcatttgctggtggatgattcgtttgcttggtcaaccgtatccaccaaactgttagctgattctgggaaccatgctttaagtgattctgctaaaaatatcttgtgttgtttgactaaacctgtcaaacaagatggacataagggtagcatcagacaagtgtctgtccatccatatagctgcgaaatagagttagctgtctccatggattcaaacagaatgatatttttctggtctctgtcaactttctcaactctcataccgacaatgcatgcacctatgtatcctctatggaagctgttgtgcaaatttgatttgcgtaacatttctgaagatttcgagtactcatgtttgtgttgggcaccttctgttactcgtgataatagatttcttgttcttggatgggaaagtggagtcgattgtttcgtagttagaattcagaaagaagaggttctttcatgccagaagattttcacaatccccttccttgcagaaagcaatacagaagggccacctgacagcattcatacgataccattagcttctaaatgcagcagctctctttccaccacaaaccaaggggcacatgcatgcttcagcaatgaaatgttttcagcagtggtttatgaaggttcttcagtctttccttctggcctggagggagaatataccacgtgcatttctgtaatgccgctgaataatactgtactgcctatacaacaacatgacccttacagaactgttccaggctatcatattgctactggttgctctgatggcactgtaaaactttggaagatgacttgtgcagaggactctttgcagactaagaaagaaagacacatctgggagctagtaggcatgtttggtgctcatcaaggaccaattgacatagtttcattgtcaggctgtggtagagttattactgttggcagaaatttgaagaaaaatagcacctccattcatatctgggaagcaacaaaaatcaggggagacgggaattttctgctaggagatacactaatgttgcaagaccatattgttggtttagatggactatccttaggtgatggacgatttctacttgcagtttatctagctaatgagttacgtatatattctcataagcacccgtccttccagaatgtactacacactaagaattcaaaagaagagcatctttggagctgtattgtattatcccattctcatcatgatattgttggctttctttggggaccaaaggcaactgttgtgcttgttcatgagaaccatctttcactcttcagttcatggctagtaactggagataatgagtacatgacccagatacattcttgtcctgtagttcatgagatgttgccatgtactaacaattttaacgaagctacttttggtaaactcaagttaccagaaaatttcaacagtggaaacattgatagcaataatgtcctgctaacagaccaacatagccactattctcatggtttatggagcttgctgcacatagctcatagattgagtggaccgttggcatcatatcacccaagagcacttatccagtatctttattcaggtgaatggaaacgtgcggatgctgctctgcaccatcttgttcggtccatgaaagtgagtgaaacttcaaagggcgtgtcaaattacagtacatgccatagtattccagaacttcctttgtctgaatactttgcggcaacagtgtccaacaacatttctaccaaggggtttatgtgggacattgttgagctccttgacaagagtttcagcaaatatggtataagtgactcagagaaaaatcagatacttgcaatttctgatcttatggctggaatcactgatcagagccattcctctccctacaaaaatcttgacgaagcaggaagaaggttctgggttgctgtgcagttcgaacaattccatgctcttagaagatctgcagattcatccagtaatgaagggtgccgtgttgattctgcttccatagcctgggccttccaatctgattgtcaggatgatctacttaattctgtgcttcctgcagagccaacctggccagagatgcgaaagcttggtataggattatggtatacaaatgtgtcccaactaaggacaaggatggagaagttggcaaggttgcaatatcttaaaagcaaggatcccaaggattgtgctttgctctacatagcattgaacagaataaaagtgttggttggtcttttcaagattagtagagatgaaaaggataaacgtctatatgagtttctgtccagaaacttccaggaagaaaggcacaaggctgctgctctaaaaaatgcttatgtactaatgggaaggcaccaatgggagcttgctatagcttttttcctccttggtgatgatacttcatcagcagtgaatgtttgtgcaaagaaccttcaagatgaacagcttgccattgtaatttgtcggcttattgaaggatctggagggcctctggagcgtaatctcatttctaatgtgctacttccagatgcagttgagagaggagataactggctgtcaagcctgcttgagtggatgttaggaaattattgccagtccgtcaatagaatatttggttgccatccaaagttgcttattgatcaaaatgtgcttgcagacccagaattgggtcattattgtgcaattctctcagcaaaaagtagtttcagaaactctgttggtgaagctgtatctgcaaagttatctaagctttcatttgcagtggctgcatgtgccttgaataagtgcggactacctcttgaagcactagaatgcttgtctactaactcgagcatagatggcaaggatagcataatcgcacatggtgatggagaccacaagattttttatggaatactgagccctgtctctgcttctaagaattggctgtcttcatctgtcattagtggcattgagtccaaccttaaactaactatggcttcaaaatatctatctagccttctgagaaagcactcactctgttcacaattgaacgcaccattatctgaagaaaaggtccttaatgagtacaacaatcatcaaattgaaaaactgacgtgtgatattacaacagtaatctcaatatttgataaaaggttctccctcaaatttgctgatatagctgagaagatcctaatcttttgtagccatgatggtttattgtttctagcgtatgttttgttatggggtactaggtcaccagatgttgcaactgataattatattcttgaatgtcaccctctctgcccaattgattatctgttattgttttcattcaaagagagctgcaagttttttagtcgatatgttgtcctctcctccatgtgttctgttctgaatatggaggacaccaattctactgcatgggcacttaaagagagacataagtacattgtaataagtttgtcaaattacctgaatgtcagcaggttacttcttaaacatgacaaaagtggaaattatattctggatgacaggtcagctatgctggcagttatggatctgtttgagtacattatagagttttctttttcttggttgtattatgacataaaatcattacttatcatgataaatccagtcctagctacttctgttaatggggattcctttcaagtactattagatcaactgatgcatgctatatgccacaaaaatcatgatatatcatcaagtacaggaggaatgccccatgctgcattgagtaaaacacaactgaaaaagagtgtgaattcaaatcttttagcagatgagaagtggcatttgataggcgcttctgtgtgggttcggttgatatctgtgcttgaacatcgtctaagggaattctttgagaaagagggacttgaacatgaagctggtgttagtggttcagaattcaggggtcttatcacttctgttgctgcaaagtttgttatggattccattcattttgtgtcatcttcattagtaccactgcatgcatcgttcttgaggaagaatttaccgatgaattcaagttcaagtttgctcttctggttagagtccaagttgcctcagcaactcccagtcagtgatagctatgatcacctctcgaggatttcacagctttcaaacagtgagaatatggaggcattgtttaatattttgtgggaaatatctgttaatcctgtggatgtttgtaatgcctttgtgagtgaaggagttaattgtttttccttaagcaacacgaatgtcactagatcttggaaggacataagatgtcctgtggttgagtgtgataaaattattactgaaagaagtggagaggaacatgaacacagacttggctccaagagattgggacagggattcgctgaaaaagcctcttataatggtgaagtgttgtatgaaactaaaaggagggagttgatcatacaaaaagagtttcagagcccaagggaaattctaaggagaagcggggagcttcttgaggcggtatgtcttaactctgtcaatgagaaacaagctgctattgctactaatcgaaagggccttgttttcttcaattggagtgacaagcagcataacaagagtttttcagagtacgtctggtcaggatctgattggccattagatggctgggctggctgtcagtctacacctactccaacttctatctctcctggtgttgatcttggtcggaaaaaagggtcacaacttggttcagttggagcaactacaggtttgagttctttagcaaagccaggaagagatctaactggtggtggagcatttggaattccaggctatgctggtattggggcctctgggtttgggtggggcgaacctgaagaatttgaggatttcattgatcctccagcaacacttgagaacatacattcaagagcattatcccgccatccctcattaccattgtttcttgttggttcaagcaatacacatgtgtatctgtgggagtttggtaaagctagtgctatggctacatatggtgttctacctgctgctaatattccaccgccttatgcactggcctccatatcatctgttcaatttgactgttatggacagcggtttgccactgctgcattagatggtaccatttgtacatggcaagttgaggtgggtggaagaagcaatgtctatcctacagagtcatctatatgctttgacagccacgcctcggatgttgcctatgtgtctgcaagtagatcagttattgcttctgctggatatagttcaaatggttcaaatgttgttatatgggacacactgtctccaccagctacatctcaaacatctatcatgtgtcatgaaggaggagctcggtctatttctgtgtttgatagtgatagaggctatgggtctatctcaccgcttgttgtaactggtgggaaaaatggagatatagctttgcatgattgccgcttcctttctactggaaagtccaagcatcatagagttaccactgagcatggtgtcgaggcatcttccatgcatgacatcaaatctagtacttttggtggtactgacagtgggatggtctggcatataccaaaggctcatctaggtagtgtcacaaaggtaacgaccatcccaaataccagcttgttcttaaccggaagcaaagatggagatgtgaaactttgggatgctaaaaactcccagctagtctttcactggacaaagatgcatgaacggcacaccttttttcaaccaacctccaggggctttggcggtgttgttagagctgctgtaacagatctccaggtgttgcctaatggtttcgtttcatgtggaggtgatggttctgtgaagcttgttcagataaaagatgatctcgctgcagcatatcagcgttaaaacaagcaaagagggaagaagacatgctagaaaatgcgatggatgcagttggtcacttgatatcattctattttgctttgctcattatacttttgagatgctttactcctttcaggggtggtatagcaaggaggaagctatgatttaagagcactagagcagacatctaggcaatttgacatcagcatttatacgtcgagtttttatacgagcctggtttgtggctagtcaaactgccctcagtggtttttttgaggcctgaattttcgcactttggacagggcaatgcggaccataattttttgtacatctgtacagtcaaatatcttgttttgttggccaggatgttgatggagggtgtaaagttgtaagctagaagtatggagataccaagctacaatacctttttgttacttaatacaaaagtgctgggtttagggttaatgtacaatggcagagcaaatggaccaaacaaatattgtatttggtacgggagtatgtatgcggtttgtcaaggggaccgcagtagttcatcattcaaaacaatattttgcattattttgtactgtagatttcactgtttctatagtgaagtttgaatatgagaatgtagatgagtaaattgctagagatagtcttagtgtgatcttttaatatcctgaaacctaaggtccaatcgaac

SEQ ID NO: 73667 - DNA, 7792 bp, Zea Mays
tgcagagatcgaccgtggtattggcaaccggtgtccggtgagggggatccacgcaactcctgctaccaccaccatcgccgctacagcggcgcatgcagcagccggcacgacgatgggggagcgagacgcgctcccgccgctgccgctcgccctcggtccgccgcatctaatcccgccggcgcccacccgcgacccgcgcgccatcgccttcctccctgacctcgtgggcttccactgggtcgcctacgctgccggctccttccttgtcgtatcccacctcccctccccttgccgggacgacaacaacaacgacagttgctccccgttcttccgccaggtcatcgacctccgcgcccccgtgtccgcagttgcttggtgccgccgcgggagcggagaggtcgccgccgctacagacaattctatacacatattccagcctgcgcccgcctcttctccaggttcgtttggatggctcctgagatggtctatcaccgagacgttcgccatcgttgctgtatcctggaccggctgcggcaatggcattgtggcagttggcgcaggtgtttccatgtgggcaagattggagtcctcctggcagctcgcttggaggtctacaccgcaggtgccgcaagcccttgtctccactacctgttccatgcaaggtcctgtcgcgacagtggcagctcttgctccagccgagggcagtgtgcctgttcttgtgtttctgaacgatgccaggagggggctggagcaagctgagcttgtgcatcctcagcctgtttgtatgatccagtggagatcctgttcgttatacccccatgatctgtctgagatcaggagagagatcctcatgacttgctgctttgatgggactgtccggctatggagtaaggatgaggtgtctaggtcgaagaagcagcgtggtttgctaatatcattcagtgtcattgcagtaatagaggtgaacaacactctgaatggagtcctcggagttgatattattgtgagatggtccatggaatctggcagcgttgtgtcaagggacgaacaaggtagattcaagttgttttcaggtgatttgagggagagccaggttggtaaatgtgagtggcttgtaagtcttggccccgggccttgcattagcttttgggctatccattgtttggatgatgtatttccgccaaggtacccacggattactttatggaaacagagcaaacttcagggctggggggattcctatgttaaatcaggtcctctaaaatctatggaacagtcaatttttgttgaggctgtcatctcaagaaggctatgctctggtccacctgcaacatgttttttgcttcatttgctggtggatgattcgtttgcttggtcaaccgtatccaccaaactgttagctgattctgggaaccatgctttaagtgattctgctaaaaatatcttgtgttgtttgactaaacctgtcaaacaagatggacataagggtagcatcagacaagtgtctgtccatccatatagctgcgaaatagagttagctgtctccatggattcaaacagaatgatatttttctggtctctgtcaactttctcaactctcataccgacaatgcatgcacctatgtatcctctatggaagctgttgtgcaaatttgatttgcgtaacatttctgaagatttcgagtactcatgtttgtgttgggcaccttctgttactcgtgataatagatttcttgttcttggatgggaaagtggagtcgattgtttcgtagttagaattcagaaagaagaggttctttcatgccagaagattttcacaatccccttccttgcagaaagcaatacagaagggccacctgacagcattcatacgataccattagcttctaaatgcagcaggtgttttgtgaacaacagtttcctagtagtatgtatatggaagaagaccttcaaaggtttctcatggaaagtagtattgcattcagaaaatcaatatgtcaatgggagatgcttgtgtggttttgctcctagctctctttccaccacaaaccaaggggcacatgcatgcttcagcaatgaaatgttttcagcagtggtttatgaaggttcttcagtctttccttctggcctggagggagaatataccacgtgcatttctgtaatgccgctgaataatactgtactgcctatacaacaacatgacccttacagaactgttccaggctatcatattgctactggttgctctgatggcactgtaaaactttggaagatgacttgtgcagaggactctttgcagactaagaaagaaagacacatctgggagctagtaggcatgtttggtgctcatcaaggaccaattgacatagtttcattgtcaggctgtggtagagttattactgttggcagaaatttgaagaaaaatagcacctccattcatatctgggaagcaacaaaaatcaggggagacgggaattttctgctaggagatacactaatgttgcaagaccatattgttggtttagatggactatccttaggtgatggacgatttctacttgcagtttatctagctaatgagttacgtatatattctcataagcacccgtccttccagaatgtactacacactaagaattcaaaagaagagcatctttggagctgtattgtattatcccattctcatcatgatattgttggctttctttggggaccaaaggcaactgttgtgcttgttcatgagaaccatctttcactcttcagttcatggctagtaactggagataatgagtacatgacccagatacattcttgtcctgtagttcatgagatgttgccatgtactaacaattttaacgaagctacttttggtaaactcaagttaccagaaaatttcaacagtggaaacattgatagcaataatgtcctgctaacagaccaacatagccactattctcatggtttatggagcttgctgcacatagctcatagattgagtggaccgttggcatcatatcacccaagagcacttatccagtatctttattcaggtgaatggaaacgtgcggatgctgctctgcaccatcttgttcggtccatgaaagtgagtgaaacttcaaagggcgtgtcaaattacagtacatgccatagtattccagaacttcctttgtctgaatactttgcggcaacagtgtccaacaacatttctaccaaggggtttatgtggggtattaatactacaactagtgcatctgaaaaaccagacattgttgagctccttgacaagagtttcagcaaatatggtataagtgactcagagaaaaatcagatacttgcaatttctgatcttatggctggaatcactgatcagagccattcctctccctacaaaaatcttgacgaagcaggaagaagttcgaacaattccatgctcttagaagatctgcagattcatccagtaatgaagggtgccgtgttgattctgcttccatagcctgggccttccaatctgattgtcaggatgatctacttaattctgtgcttcctgcagagccaacctggccagagatgcgaaagcttggtataggattatggtatacaaatgtgtcccaactaaggacaaggatggagaagttggcaaggttgcaatatcttaaaagcaaggatcccaaggattgtgctttgctctacatagcattgaacagaataaaagtgttggttggtcttttcaagattagtagagatgaaaaggataaacgtctatatgagtttctgtccagaaacttccaggaagaaaggcacaaggctgctgctctaaaaaatgcttatgtactaatgggaaggcaccaatgggagcttgctatagcttttttcctccttggtgatgatacttcatcagcagtgaatgtttgtgcaaagaaccttcaagatgaacagcttgccattgtaatttgtcggcttattgaaggatctggagggcctctggagcgtaatctcatttctaatgtgctacttccagatgcagttgagagaggagataactggctgtcaagcctgcttgagtggatgttaggaaattattgccagtccgtcaatagaatatttggttgccatccaaagttgcttattgatcaaaatgtgcttgcagacccagaattgggtcattattgtgcaattctctcagcaaaaagtagtttcagaaactctgttggtgaagctgtatctgcaaagttatctaagctttcatttgcagtggctgcatgtgccttgaataagtgcggactacctcttgaagcactagaatgcttgtctactaactcgagcatagatggcaaggatagcataatcgcacatggtgatggagaccacaagattttttatggaatactgagccctgtctctgcttctaagaattggctgtcttcatctgtcattagtggcattgagtccaaccttaaactaactatggcttcaaaatatctatctagccttctgagaaagcactcactctgttcacaattgaacgcaccattatctgaagaaaaggtccttaatgagtacaacaatcatcaaattgaaaaactgacgtgtgatattacaacagtaatctcaatatttgataaaaggttctccctcaaatttgctgatatagctgagaagatcctaatcttttgtagccatgatggtttattgtttctagcgttacttcttaaacatgacaaaagtggaaattatattctggatgacaggtcagctatgctggcagttatggatctgtttgagtacattatagagttttctttttcttggttgtattatgacataaaatcattacttatcatgataaatccagtcctagctacttctgttaatggggattcctttcaagtactattagatcaactgatgcatgctatatgccacaaaaatcatgatatatcatcaagtacaggaggaatgccccatgctgcattgagtaaaacacaactgaaaaagagtgtgaattcaaatcttttagcagatgagaagtggcatttgataggcgcttctgtgtgggttcggttgatatctgtgcttgaacatcgtctaagggaattctttgagaaagagggacttgaacatgaagctggtgttagtggttcagaattcaggggtcttatcacttctgttgctgcaaagtttgttatggattccattcattttgtgtcatcttcattagtaccactgcatgcatcgttcttgaggaagaatttaccgatgaattcaagttcaagtttgctcttctggttagagtccaagttgcctcagcaactcccagtcagtgatagctatgatcacctctcgaggatttcacagctttcaaacagtgagaatatggaggcattgtttaatattttgtgggaaatatctgttaatcctgtggatgtttgtaatgcctttgtgagtgaaggagttaattgtttttccttaagcaacacgaatgtcactagatcttggaaggacataagatgtcctgtggttgagtgtgataaaattattactgaaagaagtggagaggaacatgaacacagacttggctccaagagattgggacagggattcgctgaaaaagcctcttataatggtgaagtgttgtatgaaactaaaaggagggagttgatcatacaaaaagagtttcagagcccaagggaaattctaaggagaagcggggagcttcttgaggcggtatgtcttaactctgtcaatgagaaacaagctgctattgctactaatcgaaagggccttgttttcttcaattggagtgacaagcagcataacaagagtttttcagagtacgtctggtcaggatctgattggccattagatggctgggctggctgtcagtctacacctactccaacttctatctctcctggtgttgatcttggtcggaaaaaagggtcacaacttggttcagttggagcaactacaggtttgagttctttagcaaagccaggaagagatctaactggtggtggagcatttggaattccaggctatgctggtattggggcctctgggtttgggtggggcgaacctgaagaatttgaggatttcattgatcctccagcaacacttgagaacatacattcaagagcattatcccgccatccctcattaccattgtttcttgttggttcaagcaatacacatgtgtatctgtgggagtttggtaaagctagtgctatggctacatatggtgttctacctgctgctaatattccaccgccttatgcactggcctccatatcatctgttcaatttgactgttatggacagcggtttgccactgctgcattagatggtaccatttgtacatggcaagttgaggtgggtggaagaagcaatgtctatcctacagagtcatctatatgctttgacagccacgcctcggatgttgcctatgtgtctgcaagtagatcagttattgcttctgctggatatagttcaaatggttcaaatgttgttatatgggacacactgtctccaccagctacatctcaaacatctatcatgtgtcatgaaggaggagctcggtctatttctgtgtttgatagtgatagaggctatgggtctatctcaccgcttgttgtaactggtgggaaaaatggagatatagctttgcatgattgccgcttcctttctactggaaagtccaagcatcatagagttaccactgagcatggtgtcgaggcatcttccatgcatgacatcaaatctagtacttttggtggtactgacagtgggatggtctggcatataccaaaggctcatctaggtagtgtcacaaaggtaacgaccatcccaaataccagcttgttcttaaccggaagcaaagatggagatgtgaaactttgggatgctaaaaactcccagctagtctttcactggacaaagatgcatgaacggcacaccttttttcaaccaacctccaggggctttggcggtgttgttagagctgctgtaacagatctccaggtgttgcctaatggtttcgtttcatgtggaggtgatggttctgtgaagcttgttcagataaaagatgatctcgctgcagcatatcagcgttaaaacaagcaaagagggaagaagacatgctagaaaatgcgatggatgcagttggtcacttgatatcattctattttgctttgctcattatacttttgagatgctttactcctttcaggggtggtatagcaaggaggaagctatgatttaagagcactagagcagacatctaggcaatttgacatcagcatttatacgtcgagtttttatacgagcctggtttgtggctagtcaaactgccctcagtggtttttttgaggcctgaattttcgcactttggacagggcaatgcggaccataattttttgtacatctgtacagtcaaatatcttgttttgttggccaggatgttgatggagggtgtaaagttgtaagctagaagtatggagataccaagctacaatacctttttgttacttaatacaaaagtgctgggtttagggttaatgtacaatggcagagcaaatggaccaaacaaatattgtatttggtacgggagtatgtatgcggtttgtcaaggggaccgcagtagttcatcattcaaaacaatattttgcattattttgtactgtagatttcactgtttctatagtgaagtttgaatatgagaatgtagatgagtaaattgctagagatagtcttagtgtgatcttttaatatcctgaaacctaaggtccaatcgaac

SEQ ID NO: 73668 - DNA, 8066 bp, Zea Mays
tggcaaccggtgtccggtgagggggatccacgcaactcctgctaccaccaccatcgccgctacagcggcgcatgcagcagccggcacgacgatgggggagcgagacgcgctcccgccgctgccgctcgccctcggtccgccgcatctaatcccgccggcgcccacccgcgacccgcgcgccatcgccttcctccctgacctcgtgggcttccactgggtcgcctacgctgccggctccttccttgtcgtatcccacctcccctccccttgccgggacgacaacaacaacgacagttgctccccgttcttccgccaggtcatcgacctccgcgcccccgtgtccgcagttgcttggtgccgccgcgggagcggagaggtcgccgccgctacagacaattctatacacatattccagcctgcgcccgcctcttctccaggttcgtttggatggctcctgagatggtctatcaccgagacgttcgccatcgttgctgtatcctggaccggctgcggcaatggcattgtggcagttggcgcaggtgtttccatgtgggcaagattggagtcctcctggcagctcgcttggaggtctacaccgcaggtgccgcaagcccttgtctccactacctgttccatgcaaggtcctgtcgcgacagtggcagctcttgctccagccgagggcagtgtgcctgttcttgtgtttctgaacgatgccaggagggggctggagcaagctgagcttgtgcatcctcagcctgtttgtatgatccagtggagatcctgttcgttatacccccatgatctgtctgagatcaggagagagatcctcatgacttgctgctttgatgggactgtccggctatggagtaaggatgaggtgtctaggtcgaagaagcagcgtggtttgctaatatcattcagtgtcattgcagtaatagaggtgaacaacactctgaatggagtcctcggagttgatattattgtgagatggtccatggaatctggcagcgttgtgtcaagggacgaacaaggtagattcaagttgttttcaggtgatttgagggagagccaggttggtaaatgtgagtggcttgtaagtcttggccccgggccttgcattagcttttgggctatccattgtttggatgatgtatttccgccaaggtacccacggattactttatggaaacagagcaaacttcagggctggggggattcctatgttaaatcaggtcctctaaaatctatggaacagtcaatttttgttgaggctgtcatctcaagaaggctatgctctggtccacctgcaacatgttttttgcttcatttgctggtggatgattcgtttgcttggtcaaccgtatccaccaaactgttagctgattctgggaaccatgctttaagtgattctgctaaaaatatcttgtgttgtttgactaaacctgtcaaacaagatggacataagggtagcatcagacaagtgtctgtccatccatatagctgcgaaatagagttagctgtctccatggattcaaacagaatgatatttttctggtctctgtcaactttctcaactctcataccgacaatgcatgcacctatgtatcctctatggaagctgttgtgcaaatttgatttgcgtaacatttctgaagatttcgagtactcatgtttgtgttgggcaccttctgttactcgtgataatagatttcttgttcttggatgggaaagtggagtcgattgtttcgtagttagaattcagaaagaagaggttctttcatgccagaagattttcacaatccccttccttgcagaaagcaatacagaagggccacctgacagcattcatacgataccattagcttctaaatgcagcagctctctttccaccacaaaccaaggggcacatgcatgcttcagcaatgaaatgttttcagcagtggtttatgaaggttcttcagtctttccttctggcctggagggagaatataccacgtgcatttctgtaatgccgctgaataatactgtactgcctatacaacaacatgacccttacagaactgttccaggctatcatattgctactggttgctctgatggcactgtaaaactttggaagatgacttgtgcagaggactctttgcagactaagaaagaaagacacatctgggagctagtaggcatgtttggtgctcatcaaggaccaattgacatagtttcattgtcaggctgtggtagagttattactgttggcagaaatttgaagaaaaatagcacctccattcatatctgggaagcaacaaaaatcaggggagacgggaattttctgctaggagatacactaatgttgcaagaccatattgttggtttagatggactatccttaggtgatggacgatttctacttgcagtttatctagctaatgagttacgtatatattctcataagcacccgtccttccagaatgtactacacactaagaattcaaaagaagagcatctttggagctgtattgtattatcccattctcatcatgatattgttggctttctttggggaccaaaggcaactgttgtgcttgttcatgagaaccatctttcactcttcagttcatggctagtaactggagataatgagtacatgacccagatacattcttgtcctgtagttcatgagatgttgccatgtactaacaattttaacgaagctacttttggtaaactcaagttaccagaaaatttcaacagtggaaacattgatagcaataatgtcctgctaacagaccaacatagccactattctcatggtttatggagcttgctgcacatagctcatagattgagtggaccgttggcatcatatcacccaagagcacttatccagtatctttattcaggtgaatggaaacgtgcggatgctgctctgcaccatcttgttcggtccatgaaagtgagtgaaacttcaaagggcgtgtcaaattacagtacatgccatagtattccagaacttcctttgtctgaatactttgcggcaacagtgtccaacaacatttctaccaaggggtttatgtggggtgagaatagaagtaacacaacttttaatttgttgtcaccttcaacttcatttctttacgaggatggcaatttaggtattaatactacaactagtgcatctgaaaaaccagacattgttgagctccttgacaagagtttcagcaaatatggtataagtgactcagagaaaaatcagatacttgcaatttctgatcttatggctggaatcactgatcagagccattcctctccctacaaaaatcttgacgaagcaggaagaaggttctgggttgctgtgcagttcgaacaattccatgctcttagaagatctgcagattcatccagtaatgaagggtgccgtgttgattctgcttccatagcctgggccttccaatctgattgtcaggatgatctacttaattctgtgcttcctgcagagccaacctggccagagatgcgaaagcttggtataggattatggtatacaaatgtgtcccaactaaggacaaggatggagaagttggcaaggttgcaatatcttaaaagcaaggatcccaaggattgtgctttgctctacatagcattgaacagaataaaagtgttggttggtcttttcaagattagtagagatgaaaaggataaacgtctatatgagtttctgtccagaaacttccaggaagaaaggcacaaggctgctgctctaaaaaatgcttatgtactaatgggaaggcaccaatgggagcttgctatagcttttttcctccttggtgatgatacttcatcagcagtgaatgtttgtgcaaagaaccttcaagatgaacagcttgccattgtaatttgtcggcttattgaaggatctggagggcctctggagcgtaatctcatttctaatgtgctacttccagatgcagttgagagaggagataactggctgtcaagcctgcttgagtggatgttaggaaattattgccagtccgtcaatagaatatttggttgccatccaaagttgcttattgatcaaaatgtgcttgcagacccagaattgggtcattattgtgcaattctctcagcaaaaagtagtttcagaaactctgttggtgaagctgtatctgcaaagttatctaagctttcatttgcagtggctgcatgtgccttgaataagtgcggactacctcttgaagcactagaatgcttgtctactaactcgagcatagatggcaaggatagcataatcgcacatggtgatggagaccacaagattttttatggaatactgagccctgtctctgcttctaagaattggctgtcttcatctgtcattagtggcattgagtccaaccttaaactaactatggcttcaaaatatctatctagccttctgagaaagcactcactctgttcacaattgaacgcaccattatctgaagaaaaggtccttaatgagtacaacaatcatcaaattgaaaaactgacgtgtgatattacaacagtaatctcaatatttgataaaaggttctccctcaaatttgctgatatagctgagaagatcctaatcttttgtagccatgatggtttattgtttctagcgtatgttttgttatggggtactaggtcaccagatgttgcaactgataattatattcttgaatgtcaccctctctgcccaattgattatctgttattgttttcattcaaagagagctgcaagttttttagtcgatatgttgtcctctcctccatgtgttctgttctgaatatggaggacaccaattctactgcatgggcacttaaagagagacataagtacattgtaataagtttgtcaaattacctgaatgtcagcaggttacttcttaaacatgacaaaagtggaaattatattctggatgacaggtcagctatgctggcagttatggatctgtttgagtacattatagagttttctttttcttggttgtattatgacataaaatcattacttatcatgataaatccagtcctagctacttctgttaatggggattcctttcaagtactattagatcaactgatgcatgctatatgccacaaaaatcatgatatatcatcaagtacaggaggaatgccccatgctgcattgagtaaaacacaactgaaaaagagtgtgaattcaaatcttttagcagatgagaagtggcatttgataggcgcttctgtgtgggttcggttgatatctgtgcttgaacatcgtctaagggaattctttgagaaagagggacttgaacatgaagctggtgttagtggttcagaattcaggggtcttatcacttctgttgctgcaaagtttgttatggattccattcattttgtgtcatcttcattagtaccactgcatgcatcgttcttgaggaagaatttaccgatgaattcaagttcaagtttgctcttctggttagagtccaagttgcctcagcaactcccagtcagtgatagctatgatcacctctcgaggatttcacagctttcaaacagtgagaatatggaggcattgtttaatattttgtgggaaatatctgttaatcctgtggatgtttgtaatgcctttgtgagtgaaggagttaattgtttttccttaagcaacacgaatgtcactagatcttggaaggacataagatgtcctgtggttgagtgtgataaaattattactgaaagaagtggagaggaacatgaacacagacttggctccaagagattgggacagggattcgctgaaaaagcctcttataatggtgaagtgttgtatgaaactaaaaggagggagttgatcatacaaaaagagtttcagagcccaagggaaattctaaggagaagcggggagcttcttgaggcggtatgtcttaactctgtcaatgagaaacaagctgctattgctactaatcgaaagttttgctggccaaacctcatttcaagagctgtctttgtacatactgtataccatctaagggcagcgtctttacagggccttgttttcttcaattggagtgacaagcagcataacaagagtttttcagagtacgtctggtcaggatctgattggccattagatggctgggctggctgtcagtctacacctactccaacttctatctctcctggtgttgatcttggtcggaaaaaagggtcacaacttggttcagttggagcaactacaggtttgagttctttagcaaagccaggaagagatctaactggtggtggagcatttggaattccaggctatgctggtattggggcctctgggtttgggtggggcgaacctgaagaatttgaggatttcattgatcctccagcaacacttgagaacatacattcaagagcattatcccgccatccctcattaccattgtttcttgttggttcaagcaatacacatgtgtatctgtgggagtttggtaaagctagtgctatggctacatatggtgttctacctgctgctaatattccaccgccttatgcactggcctccatatcatctgttcaatttgactgttatggacagcggtttgccactgctgcattagatggtaccatttgtacatggcaagttgaggtgggtggaagaagcaatgtctatcctacagagtcatctatatgctttgacagccacgcctcggatgttgcctatgtgtctgcaagtagatcagttattgcttctgctggatatagttcaaatggttcaaatgttgttatatgggacacactgtctccaccagctacatctcaaacatctatcatgtgtcatgaaggaggagctcggtctatttctgtgtttgatagtgatagaggctatgggtctatctcaccgcttgttgtaactggtgggaaaaatggagatatagctttgcatgattgccgcttcctttctactggaaagtccaagcatcatagagttaccactgagcatggtgtcgaggcatcttccatgcatgacatcaaatctagtacttttggtggtactgacagtgggatggtctggcatataccaaaggctcatctaggtagtgtcacaaaggtaacgaccatcccaaataccagcttgttcttaaccggaagcaaagatggagatgtgaaactttgggatgctaaaaactcccagctagtctttcactggacaaagatgcatgaacggcacaccttttttcaaccaacctccaggggctttggcggtgttgttagagctgctgtaacagatctccaggtgttgcctaatggtttcgtttcatgtggaggtgatggttctgtgaagcttgttcagataaaagatgatctcgctgcagcatatcagcgttaaaacaagcaaagagggaagaagacatgctagaaaatgcgatggatgcagttggtcacttgatatcattctattttgctttgctcattatacttttgagatgctttactcctttcaggggtggtatagcaaggaggaagctatgatttaagagcactagagcagacatctaggcaatttgacatcagcatttatacgtcgagtttttatacgagcctggtttgtggctagtcaaactgccctcagtggtttttttgaggcctgaattttcgcactttggacagggcaatgcggaccataattttttgtacatctgtacagtcaaatatcttgttttgttggccaggatgttgatggagggtgtaaagttgtaagctagaagtatggagataccaagctacaatacctttttgttacttaatacaaaagtgctgggtttagggttaatgtacaatggcagagcaaatggaccaaacaaatattgtatttggtacgggagtatgtatgcggtttgtcaaggggaccgcagtagttcatcattcaaaacaatattttgcattattttgtactgtagatttcactgtttctatagtgaagtttgaatatgagaatgtagatgagtaaattgctagagatagtcttagtgtgatcttttaatatcctgaaacctaaggtccaatcgaac

SEQ ID NO: 73669 - DNA, 7859 bp, Zea Mays
gcaaccggtgtccggtgagggggatccacgcaactcctgctaccaccaccatcgccgctacagcggcgcatgcagcagccggcacgacgatgggggagcgagacgcgctcccgccgctgccgctcgccctcggtccgccgcatctaatcccgccggcgcccacccgcgacccgcgcgccatcgccttcctccctgacctcgtgggcttccactgggtcgcctacgctgccggctccttccttgtcgtatcccacctcccctccccttgccgggacgacaacaacaacgacagttgctccccgttcttccgccaggtcatcgacctccgcgcccccgtgtccgcagttgcttggtgccgccgcgggagcggagaggtcgccgccgctacagacaattctatacacatattccagcctgcgcccgcctcttctccaggttcgtttggatggctcctgagatggtctatcaccgagacgttcgccatcgttgctgtatcctggaccggctgcggcaatggcattgtggcagttggcgcaggtgtttccatgtgggcaagattggagtcctcctggcagctcgcttggaggtctacaccgcaggtgccgcaagcccttgtctccactacctgttccatgcaaggtcctgtcgcgacagtggcagctcttgctccagccgagggcagtgtgcctgttcttgtgtttctgaacgatgccaggagggggctggagcaagctgagcttgtgcatcctcagcctgtttgtatgatccagtggagatcctgttcgttatacccccatgatctgtctgagatcaggagagagatcctcatgacttgctgctttgatgggactgtccggctatggagtaaggatgaggtgtctaggtcgaagaagcagcgtggtttgctaatatcattcagtgtcattgcagtaatagaggtgaacaacactctgaatggagtcctcggagttgatattattgtgagatggtccatggaatctggcagcgttgtgtcaagggacgaacaaggtagattcaagttgttttcaggtgatttgagggagagccaggttggtaaatgtgagtggcttgtaagtcttggccccgggccttgcattagcttttgggctatccattgtttggatgatgtatttccgccaaggtacccacggattactttatggaaacagagcaaacttcagggctggggggattcctatgttaaatcaggtcctctaaaatctatggaacagtcaatttttgttgaggctgtcatctcaagaaggctatgctctggtccacctgcaacatgttttttgcttcatttgctggtggatgattcgtttgcttggtcaaccgtatccaccaaactgttagctgattctgggaaccatgctttaagtgattctgctaaaaatatcttgtgttgtttgactaaacctgtcaaacaagatggacataagggtagcatcagacaagtgtctgtccatccatatagctgcgaaatagagttagctgtctccatggattcaaacagaatgatatttttctggtctctgtcaactttctcaactctcataccgacaatgcatgcacctatgtatcctctatggaagctgttgtgcaaatttgatttgcgtaacatttctgaagatttcgagtactcatgtttgtgttgggcaccttctgttactcgtgataatagatttcttgttcttggatgggaaagtggagtcgattgtttcgtagttagaattcagaaagaagaggttctttcatgccagaagattttcacaatccccttccttgcagaaagcaatacagaagggccacctgacagcattcatacgataccattagcttctaaatgcagcaggtgttttgtgaacaacagtttcctagtagtatgtatatggaagaagaccttcaaaggtttctcatggaaagtagtattgcattcagaaaatcaatatgtcaatgggagatgcttgtgtggttttgctcctagctctctttccaccacaaaccaaggggcacatgcatgcttcagcaatgaaatgttttcagcagtggtttatgaaggttcttcagtctttccttctggcctggagggagaatataccacgtgcatttctgtaatgccgctgaataatactgtactgcctatacaacaacatgacccttacagaactgttccaggctatcatattgctactggttgctctgatggcactgtaaaactttggaagatgacttgtgcagaggactctttgcagactaagaaagaaagacacatctgggagctagtaggcatgtttggtgctcatcaaggaccaattgacatagtttcattgtcaggctgtggtagagttattactgttggcagaaatttgaagaaaaatagcacctccattcatatctgggaagcaacaaaaatcaggggagacgggaattttctgctaggagatacactaatgttgcaagaccatattgttggtttagatggactatccttaggtgatggacgatttctacttgcagtttatctagctaatgagttacgtatatattctcataagcacccgtccttccagaatgtactacacactaagaattcaaaagaagagcatctttggagctgtattgtattatcccattctcatcatgatattgttggctttctttggggaccaaaggcaactgttgtgcttgttcatgagaaccatctttcactcttcagttcatggctagtaactggagataatgagtacatgacccagatacattcttgtcctgtagttcatgagatgttgccatgtactaacaattttaacgaagctacttttggtaaactcaagttaccagaaaatttcaacagtggaaacattgatagcaataatgtcctgctaacagaccaacatagccactattctcatggtttatggagcttgctgcacatagctcatagattgagtggaccgttggcatcatatcacccaagagcacttatccagtatctttattcaggtgaatggaaacgtgcggatgctgctctgcaccatcttgttcggtccatgaaagtgagtgaaacttcaaagggcgtgtcaaattacagtacatgccatagtattccagaacttcctttgtctgaatactttgcggcaacagtgtccaacaacatttctaccaaggggtttatgtggggtgagaatagaagtaacacaacttttaatttgttgtcaccttcaacttcatttctttacgaggatggcaatttaggtattaatactacaactagtgcatctgaaaaaccagacattgttgagctccttgacaagagtttcagcaaatatggtataagtgactcagagaaaaatcagatacttgcaatttctgatcttatggctggaatcactgatcagagccattcctctccctacaaaaatcttgacgaagcaggaagaaggttctgggttgctgtgcagttcgaacaattccatgctcttagaagatctgcagattcatccagtaatgaagggtgccgtgttgattctgcttccatagcctgggccttccaatctgattgtcaggatgatctacttaattctgtgcttcctgcagagccaacctggccagagatgcgaaagcttggtataggattatggtatacaaatgtgtcccaactaaggacaaggatggagaagttggcaaggttgcaatatcttaaaagcaaggatcccaaggattgtgctttgctctacatagcattgaacagaataaaagtgttggttggtcttttcaagattagtagagatgaaaaggataaacgtctatatgagtttctgtccagaaacttccagaaaggcacaaggctgctgctctaaaaaatgcttatgtactaatgggaaggcaccaatgggagcttgctatagcttttttcctccttggtgatgatacttcatcagcagtgaatgtttgtgcaaagaaccttcaagatgaacagcttgccattgtaatttgtcggcttattgaaggatctggagggcctctggagcgtaatctcatttctaatgtgctacttccagatgcagttgagagaggagataactggctgtcaagcctgcttgagtggatgttaggaaattattgccagtccgtcaatagaatatttggttgccatccaaagttgcttattgatcaaaatgtgcttgcagacccagaattgggtcattattgtgcaattctctcagcaaaaagtagtttcagaaactctgttggtgaagctgtatctgcaaagttatctaagctttcatttgcagtggctgcatgtgccttgaataagtgcggactacctcttgaagcactagaatgcttgtctactaactcgagcatagatggcaaggatagcataatcgcacatggtgatggagaccacaagattttttatggaatactgagccctgtctctgcttctaagaattggctgtcttcatctgtcattagtggcattgagtccaaccttaaactaactatggcttcaaaatatctatctagccttctgagaaagcactcactctgttcacaattgaacgcaccattatctgaagaaaaggtccttaatgagtacaacaatcatcaaattgaaaaactgacgtgtgatattacaacagtaatctcaatatttgataaaaggttctccctcaaatttgctgatatagctgagaagatcctaatcttttgtagccatgatggtttattgtttctagcgttacttcttaaacatgacaaaagtggaaattatattctggatgacaggtcagctatgctggcagttatggatctgtttgagtacattatagagttttctttttcttggttgtattatgacataaaatcattacttatcatgataaatccagtcctagctacttctgttaatggggattcctttcaagtactattagatcaactgatgcatgctatatgccacaaaaatcatgatatatcatcaagtacaggaggaatgccccatgctgcattgagtaaaacacaactgaaaaagagtgtgaattcaaatcttttagcagatgagaagtggcatttgataggcgcttctgtgtgggttcggttgatatctgtgcttgaacatcgtctaagggaattctttgagaaagagggacttgaacatgaagctggtgttagtggttcagaattcaggggtcttatcacttctgttgctgcaaagtttgttatggattccattcattttgtgtcatcttcattagtaccactgcatgcatcgttcttgaggaagaatttaccgatgaattcaagttcaagtttgctcttctggttagagtccaagttgcctcagcaactcccagtcagtgatagctatgatcacctctcgaggatttcacagctttcaaacagtgagaatatggaggcattgtttaatattttgtgggaaatatctgttaatcctgtggatgtttgtaatgcctttgtgagtgaaggagttaattgtttttccttaagcaacacgaatgtcactagatcttggaaggacataagatgtcctgtggttgagtgtgataaaattattactgaaagaagtggagaggaacatgaacacagacttggctccaagagattgggacagggattcgctgaaaaagcctcttataatggtgaagtgttgtatgaaactaaaaggagggagttgatcatacaaaaagagtttcagagcccaagggaaattctaaggagaagcggggagcttcttgaggcggtatgtcttaactctgtcaatgagaaacaagctgctattgctactaatcgaaagggccttgttttcttcaattggagtgacaagcagcataacaagagtttttcagagtacgtctggtcaggatctgattggccattagatggctgggctggctgtcagtctacacctactccaacttctatctctcctggtgttgatcttggtcggaaaaaagggtcacaacttggttcagttggagcaactacaggtttgagttctttagcaaagccaggaagagatctaactggtggtggagcatttggaattccaggctatgctggtattggggcctctgggtttgggtggggcgaacctgaagaatttgaggatttcattgatcctccagcaacacttgagaacatacattcaagagcattatcccgccatccctcattaccattgtttcttgttggttcaagcaatacacatgtgtatctgtgggagtttggtaaagctagtgctatggctacatatggtgttctacctgctgctaatattccaccgccttatgcactggcctccatatcatctgttcaatttgactgttatggacagcggtttgccactgctgcattagatggtaccatttgtacatggcaagttgaggtgggtggaagaagcaatgtctatcctacagagtcatctatatgctttgacagccacgcctcggatgttgcctatgtgtctgcaagtagatcagttattgcttctgctggatatagttcaaatggttcaaatgttgttatatgggacacactgtctccaccagctacatctcaaacatctatcatgtgtcatgaaggaggagctcggtctatttctgtgtttgatagtgatagaggctatgggtctatctcaccgcttgttgtaactggtgggaaaaatggagatatagctttgcatgattgccgcttcctttctactggaaagtccaagcatcatagagttaccactgagcatggtgtcgaggcatcttccatgcatgacatcaaatctagtacttttggtggtactgacagtgggatggtctggcatataccaaaggctcatctaggtagtgtcacaaaggtaacgaccatcccaaataccagcttgttcttaaccggaagcaaagatggagatgtgaaactttgggatgctaaaaactcccagctagtctttcactggacaaagatgcatgaacggcacaccttttttcaaccaacctccaggggctttggcggtgttgttagagctgctgtaacagatctccaggtgttgcctaatggtttcgtttcatgtggaggtgatggttctgtgaagcttgttcagataaaagatgatctcgctgcagcatatcagcgttaaaacaagcaaagagggaagaagacatgctagaaaatgcgatggatgcagttggtcacttgatatcattctattttgctttgctcattatacttttgagatgctttactcctttcaggggtggtatagcaaggaggaagctatgatttaagagcactagagcagacatctaggcaatttgacatcagcatttatacgtcgagtttttatacgagcctggtttgtggctagtcaaactgccctcagtggtttttttgaggcctgaattttcgcactttggacagggcaatgcggaccataattttttgtacatctgtacagtcaaatatcttgttttgttggccaggatgttgatggagggtgtaaagttgtaagctagaagtatggagataccaagctacaatacctttttgttacttaatacaaaagtgctgggtttagggttaatgtacaatggcagagcaaatggaccaaacaaatattgtatttggtacgggagtatgtatgcggtttgtcaaggggaccgcagtagttcatcattcaaaacaatattttgcattattttgtactgtagatttcactgtttctatagtgaagtttgaatatgagaatgtagatgagtaaattgctagagatagtcttagtgtgatcttttaatatcctgaaacctaaggtccaatcgaac

SEQ ID NO: 73670 - DNA, 7478 bp, Zea Mays
cgcaactcctgctaccaccaccatcgccgctacagcggcgcatgcagcagccggcacgacgatgggggagcgagacgcgctcccgccgctgccgctcgccctcggtccgccgcatctaatcccgccggcgcccacccgcgacccgcgcgccatcgccttcctccctgacctcgtgggcttccactgggtcgcctacgctgccggctccttccttgtcgtatcccacctcccctccccttgccgggacgacaacaacaacgacagttgctccccgttcttccgccaggtcatcgacctccgcgcccccgtgtccgcagttgcttggtgccgccgcgggagcggagaggtcgccgccgctacagacaattctatacacatattccagcctgcgcccgcctcttctccaggttcgtttggatggctcctgagatggtctatcaccgagacgttcgccatcgttgctgtatcctggaccggctgcggcaatggcattgtggcagttggcgcaggtgtttccatgtgggcaagattggagtcctcctggcagctcgcttggaggtctacaccgcaggtgccgcaagcccttgtctccactacctgttccatgcaaggtcctgtcgcgacagtggcagctcttgctccagccgagggcagtgtgcctgttcttgtgtttctgaacgatgccaggagggggctggagcaagctgagcttgtgcatcctcagcctgtttgtatgatccagtggagatcctgttcgttatacccccatgatctgtctgagatcaggagagagatcctcatgacttgctgctttgatgggactgtccggctatggagtaaggatgaggtgtctaggtcgaagaagcagcgtggtttgctaatatcattcagtgtcattgcagtaatagaggtgaacaacactctgaatggagtcctcggagttgatattattgtgagatggtccatggaatctggcagcgttgtgtcaagggacgaacaaggtagattcaagttgttttcaggtgatttgagggagagccaggttggtaaatgtgagtggcttgtaagtcttggccccgggccttgcattagcttttgggctatccattgtttggatgatgtatttccgccaaggtacccacggattactttatggaaacagagcaaacttcagggctggggggattcctatgttaaatcaggtcctctaaaatctatggaacagtcaatttttgttgaggctgtcatctcaagaaggctatgctctggtccacctgcaacatgttttttgcttcatttgctggtggatgattcgtttgcttggtcaaccgtatccaccaaactgttagctgattctgggaaccatgctttaagtgattctgctaaaaatatcttgtgttgtttgactaaacctgtcaaacaagatggacataagggtagcatcagacaagtgtctgtccatccatatagctgcgaaatagagttagctgtctccatggattcaaacagaatgatatttttctggtctctgtcaactttctcaactctcataccgacaatgcatgcacctatgtatcctctatggaagctgttgtgcaaatttgatttgcgtaacatttctgaagatttcgagtactcatgtttgtgttgggcaccttctgttactcgtgataatagatttcttgttcttggatgggaaagtggagtcgattgtttcgtagttagaattcagaaagaagaggttctttcatgccagaagattttcacaatccccttccttgcagaaagcaatacagaagggccacctgacagcattcatacgataccattagcttctaaatgcagcaggtgttttgtgaacaacagtttcctagtagtatgtatatggaagaagaccttcaaaggtttctcatggaaagtagtattgcattcagaaaatcaatatgtcaatgggagatgcttgtgtggttttgctcctagctctctttccaccacaaaccaaggggcacatgcatgcttcagcaatgaaatgttttcagcagtggtttatgaaggttcttcagtctttccttctggcctggagggagaatataccacgtgcatttctgtaatgccgctgaataatactgtactgcctatacaacaacatgacccttacagaactgttccaggctatcatattgctactggttgctctgatggcactgtaaaactttggaagatgacttgtgcagaggactctttgcagactaagaaagaaagacacatctgggagctagtaggcatgtttggtgctcatcaaggaccaattgacatagtttcattgtcaggctgtggtagagttattactgttggcagaaatttgaagaaaaatagcacctccattcatatctgggaagcaacaaaaatcaggggagacgggaattttctgctaggagatacactaatgttgcaagaccatattgttggtttagatggactatccttaggtgatggacgatttctacttgcagtttatctagctaatgagttacgtatatattctcataagcacccgtccttccagaatgtactacacactaagaattcaaaagaagagcatctttggagctgtattgtattatcccattctcatcatgatattgttggctttctttggggaccaaaggcaactgttgtgcttgttcatgagaaccatctttcactcttcagttcatggctagtaactggagataatgagtacatgacccagatacattcttgtcctgtagttcatgagatgttgccatgtactaacaattttaacgaagctacttttggtaaactcaagttaccagaaaatttcaacagtggaaacattgatagcaataatgtcctgctaacagaccaacatagccactattctcatggtttatggagcttgctgcacatagctcatagattgagtggaccgttggcatcatatcacccaagagcacttatccagtatctttattcaggtgaatggaaacgtgcggatgctgctctgcaccatcttgttcggtccatgaaagtgagtgaaacttcaaagggcgtgtcaaattacagtacatgccatagtattccagaacttcctttgtctgaatactttgcggcaacagtgtccaacaacatttctaccaaggggtttatgtggggtgagaatagaagtaacacaacttttaatttgttgtcaccttcaacttcatttctttacgaggatggcaatttaggtattaatactacaactagtgcatctgaaaaaccagacattgttgagctccttgacaagagtttcagcaaatatggtataagtgactcagagaaaaatcagatacttgcaatttctgatcttatggctggaatcactgatcagagccattcctctccctacaaaaatcttgacgaagcaggaagaaggttctgggttgctgtgcagttcgaacaattccatgctcttagaagatctgcagattcatccagtaatgaagggtgccgtgttgattctgcttccatagcctgggccttccaatctgattgtcaggatgatctacttaattctgtgcttcctgcagagccaacctggccagagatgcgaaagcttggtataggattatggtatacaaatgtgtcccaactaaggacaaggatggagaagttggcaaggttgcaatatcttaaaagcaaggatcccaaggattgtgctttgctctacatagcattgaacagaataaaagtgttggttggtcttttcaagattagtagagatgaaaaggataaacgtctatatgagtttctgtccagaaacttccaggaagaaaggcacaaggctgctgctctaaaaaatgcttatgtactaatgggaaggcaccaatgggagcttgctatagcttttttcctccttggtgatgatacttcatcagcagtgaatgtttgtgcaaagaaccttcaagatgaacagcttgccattgtaatttgtcggcttattgaaggatctggagggcctctggagcgtaatctcatttctaatgtgctacttccagatgcagttgagagaggagataactggctgtcaagcctgcttgagtggatgttaggaaattattgccagtccgtcaatagaatatttggttgccatccaaagttgcttattgatcaaaatgtgcttgcagacccagaattgggtcattattgtgcaattctctcagcaaaaagtagtttcagaaactctgttggtgaagctgtatctgcaaagttatctaagctttcatttgcagtggctgcatgtgccttgaataagtgcggactacctcttgaagcactagaatgcttgtctactaactcgagcatagatggcaaggatagcataatcgcacatggtgatggagaccacaagattttttatggaatactgagccctgtctctgcttctaagaattggctgtcttcatctgtcattagtggcattgagtccaaccttaaactaactatggcttcaaaatatctatctagccttctgagaaagcactcactctgttcacaattgaacgcaccattatctgaagaaaaggtccttaatgagtacaacaatcatcaaattgaaaaactgacgtgtgatattacaacagtaatctcaatatttgataaaaggttctccctcaaatttgctgatatagctgagaagcgtctaagggaattctttgagaaagagggacttgaacatgaagctggtgttagtggttcagaattcaggggtcttatcacttctgttgctgcaaagtttgttatggattccattcattttgtgtcatcttcattagtaccactgcatgcatcgttcttgaggaagaatttaccgatgaattcaagttcaagtttgctcttctggttagagtccaagttgcctcagcaactcccagtcagtgatagctatgatcacctctcgaggatttcacagctttcaaacagtgagaatatggaggcattgtttaatattttgtgggaaatatctgttaatcctgtggatgtttgtaatgcctttgtgagtgaaggagttaattgtttttccttaagcaacacgaatgtcactagatcttggaaggacataagatgtcctgtggttgagtgtgataaaattattactgaaagaagtggagaggaacatgaacacagacttggctccaagagattgggacagggattcgctgaaaaagcctcttataatggtgaagtgttgtatgaaactaaaaggagggagttgatcatacaaaaagagtttcagagcccaagggaaattctaaggagaagcggggagcttcttgaggcggtatgtcttaactctgtcaatgagaaacaagctgctattgctactaatcgaaagggccttgttttcttcaattggagtgacaagcagcataacaagagtttttcagagtacgtctggtcaggatctgattggccattagatggctgggctggctgtcagtctacacctactccaacttctatctctcctggtgttgatcttggtcggaaaaaagggtcacaacttggttcagttggagcaactacaggtttgagttctttagcaaagccaggaagagatctaactggtggtggagcatttggaattccaggctatgctggtattggggcctctgggtttgggtggggcgaacctgaagaatttgaggatttcattgatcctccagcaacacttgagaacatacattcaagagcattatcccgccatccctcattaccattgtttcttgttggttcaagcaatacacatgtgtatctgtgggagtttggtaaagctagtgctatggctacatatggtgttctacctgctgctaatattccaccgccttatgcactggcctccatatcatctgttcaatttgactgttatggacagcggtttgccactgctgcattagatggtaccatttgtacatggcaagttgaggtgggtggaagaagcaatgtctatcctacagagtcatctatatgctttgacagccacgcctcggatgttgcctatgtgtctgcaagtagatcagttattgcttctgctggatatagttcaaatggttcaaatgttgttatatgggacacactgtctccaccagctacatctcaaacatctatcatgtgtcatgaaggaggagctcggtctatttctgtgtttgatagtgatagaggctatgggtctatctcaccgcttgttgtaactggtgggaaaaatggagatatagctttgcatgattgccgcttcctttctactggaaagtccaagcatcatagagttaccactgagcatggtgtcgaggcatcttccatgcatgacatcaaatctagtacttttggtggtactgacagtgggatggtctggcatataccaaaggctcatctaggtagtgtcacaaaggtaacgaccatcccaaataccagcttgttcttaaccggaagcaaagatggagatgtgaaactttgggatgctaaaaactcccagctagtctttcactggacaaagatgcatgaacggcacaccttttttcaaccaacctccaggggctttggcggtgttgttagagtatgtagtactgtaaagactataaaatgtttaatgacttcgttcataaattttgttcatgttatggctgctgtaacagatctccaggtgttgcctaatggtttcgtttcatgtggaggtgatggttctgtgaagcttgttcagataaaagatgatctcgctgcagcatatcagcgttaaaacaagcaaagagggaagaagacatgctagaaaatgcgatggatgcagttggtcacttgatatcattctattttgctttgctcattatacttttgagatgctttactcctttcaggggtggtatagcaaggaggaagctatgatttaagagcactagagcagacatctaggcaatttgacatcagcatttatacgtcgagtttttatacgagcctggtttgtggctagtcaaactgccctcagtggtttttttgaggcctgaattttcgcactttggacagggcaatgcggaccataattttttgtacatctgtacagtcaaatatcttgttttgttggccaggatgttgatggagggtgtaaagttgtaagctagaagtatggagataccaagctacaatacctttttgttacttaatacaaaagtgctgggtttagggttaatgtacaatggcagagcaaatggaccaaacaaatattgtatttggtacgggagtatgtatgcggtttgtcaaggggaccgcagtagttcatcattcaaaacaatattttgcattattttgtactgtagatttcactgtttctatagtgaagtttgaatatgagaatgtagatgagtaaattgctagagatagtcttagtgtgatcttttaatatcctgaaacctaaggtccaatcgaac

SEQ ID NO: 73671 - DNA, 3831 bp, Zea Mays
cgccgctacagcggcgcatgcagcagccggcacgacgatgggggagcgagacgcgctcccgccgctgccgctcgccctcggtccgccgcatctaatcccgccggcgcccacccgcgacccgcgcgccatcgccttcctccctgacctcgtgggcttccactgggtcgcctacgctgccggctccttccttgtcgtatcccacctcccctccccttgccgggacgacaacaacaacgacagttgctccccgttcttccgccaggtcatcgacctccgcgcccccgtgtccgcagttgcttggtgccgccgcgggagcggagaggtcgccgccgctacagacaattctatacacatattccagcctgcgcccgcctcttctccaggttcgtttggatggctcctgagatggtctatcaccgagacgttcgccatcgttgctgtatcctggaccggctgcggcaatggcattgtggcagttggcgcaggtgtttccatgtgggcaagattggagtcctcctggcagctcgcttggaggtctacaccgcaggtgccgcaagcccttgtctccactacctgttccatgcaaggtcctgtcgcgacagtggcagctcttgctccagccgagggcagtgtgcctgttcttgtgtttctgaacgatgccaggagggggctggagcaagctgagcttgtgcatcctcagcctgtttgtatgatccagtggagatcctgttcgttatacccccatgatctgtctgagatcaggagagagatcctcatgacttgctgctttgatgggactgtccggctatggagtaaggatgaggtgtctaggtcgaagaagcagcgtggtttgctaatatcattcagtgtcattgcagtaatagaggtgaacaacactctgaatggagtcctcggagttgatattattgtgagatggtccatggaatctggcagcgttgtgtcaagggacgaacaaggtagattcaagttgttttcaggtgatttgagggagagccaggttggtaaatgtgagtggcttgtaagtcttggccccgggccttgcattagcttttgggctatccattgtttggatgatgtatttccgccaaggtacccacggattactttatggaaacagagcaaacttcagggctggggggattcctatgttaaatcaggtcctctaaaatctatggaacagtcaatttttgttgaggctgtcatctcaagaaggctatgctctggtccacctgcaacatgttttttgcttcatttgctggtggatgattcgtttgcttggtcaaccgtatccaccaaactgttagctgattctgggaaccatgctttaagtgattctgctaaaaatatcttgtgttgtttgactaaacctgtcaaacaagatggacataagggtagcatcagacaagtgtctgtccatccatatagctgcgaaatagagttagctgtctccatggattcaaacagaatgatatttttctggtctctgtcaactttctcaactctcataccgacaatgcatgcacctatgtatcctctatggaagctgttgtgcaaatttgatttgcgtaacatttctgaagatttcgagtactcatgtttgtgttgggcaccttctgttactcgtgataatagatttcttgttcttggatgggaaagtggagtcgattgtttcgtagttagaattcagaaagaagaggttctttcatgccagaagattttcacaatccccttccttgcagaaagcaatacagaagggccacctgacagcattcatacgataccattagcttctaaatgcagcaggtgttttgtgaacaacagtttcctagtagtatgtatatggaagaagaccttcaaaggtttctcatggaaagtagtattgcattcagaaaatcaatatgtcaatgggagatgcttgtgtggttttgctcctagctctctttccaccacaaaccaaggggcacatgcatgcttcagcaatgaaatgttttcagcagtggtttatgaaggttcttcagtctttccttctggcctggagggagaatataccacgtgcatttctgtaatgccgctgaataatactgtactgcctatacaacaacatgacccttacagaactgttccaggctatcatattgctactggttgctctgatggcactgtaaaactttggaagatgacttgtgcagaggactctttgcagactaagaaagaaagacacatctgggagctagtaggcatgtttggtgctcatcaaggaccaattgacatagtttcattgtcaggctgtggtagagttattactgttggcagaaatttgaagaaaaatagcacctccattcatatctgggaagcaacaaaaatcaggggagacgggaattttctgctaggagatacactaatgttgcaagaccatattgttggtttagatggactatccttaggtgatggacgatttctacttgcagtttatctagctaatgagttacgtatatattctcataagcacccgtccttccagaatgtactacacactaagaattcaaaagaagagcatctttggagctgtattgtattatcccattctcatcatgatattgttggctttctttggggaccaaaggcaactgttgtgcttgttcatgagaaccatctttcactcttcagttcatggctagtaactggagataatgagtacatgacccagatacattcttgtcctgtagttcatgagatgttgccatgtactaacaattttaacgaagctacttttggtaaactcaagttaccagaaaatttcaacagtggaaacattgatagcaataatgtcctgctaacagaccaacatagccactattctcatggtttatggagcttgctgcacatagctcatagattgagtggaccgttggcatcatatcacccaagagcacttatccagtatctttattcaggtgaatggaaacgtgcggatgctgctctgcaccatcttgttcggtccatgaaagtgagtgaaacttcaaagggcgtgtcaaattacagtacatgccatagtattccagaacttcctttgtctgaatactttgcggcaacagtgtccaacaacatttctaccaaggggtttatgtggggtgagaatagaagtaacacaacttttaatttgttgtcaccttcaacttcatttctttacgaggatggcaatttaggtattaatactacaactagtgcatctgaaaaaccagacattgttgagctccttgacaagagtttcagcaaatatggtataagtgactcagagaaaaatcagatacttgcaatttctgatcttatggctggaatcactgatcagagccattcctctccctacaaaaatcttgacgaagcaggaagaaggttctgggttgctgtgcagttcgaacaattccatgctcttagaagatctgcagattcatccagtaatgaagggtgccgtgttgattctgcttccatagcctgggccttccaatctgattgtcaggatgatctacttaattctgtgcttcctgcagagccaacctggccagagatgcgaaagcttggtataggattatggtatacaaatgtgtcccaactaaggacaaggatggagaagttggcaaggttgcaatatcttaaaagcaaggatcccaaggattgtgctttgctctacatagcattgaacagaataaaagtgttggttggtcttttcaagattagtagagatgaaaaggataaacgtctatatgagtttctgtccagaaacttccaggttccttctgcaataagttcatg

SEQ ID NO: 73672 - DNA, 7804 bp, Zea Mays
gcagccggcacgacgatgggggagcgagacgcgctcccgccgctgccgctcgccctcggtccgccgcatctaatcccgccggcgcccacccgcgacccgcgcgccatcgccttcctccctgacctcgtgggcttccactgggtcgcctacgctgccggctccttccttgtcgtatcccacctcccctccccttgccgggacgacaacaacaacgacagttgctccccgttcttccgccaggtcatcgacctccgcgcccccgtgtccgcagttgcttggtgccgccgcgggagcggagaggtcgccgccgctacagacaattctatacacatattccagcctgcgcccgcctcttctccaggttcgtttggatggctcctgagatggtctatcaccgagacgttcgccatcgttgctgtatcctggaccggctgcggcaatggcattgtggcagttggcgcaggtgtttccatgtgggcaagattggagtcctcctggcagctcgcttggaggtctacaccgcaggtgccgcaagcccttgtctccactacctgttccatgcaaggtcctgtcgcgacagtggcagctcttgctccagccgagggcagtgtgcctgttcttgtgtttctgaacgatgccaggagggggctggagcaagctgagcttgtgcatcctcagcctgtttgtatgatccagtggagatcctgttcgttatacccccatgatctgtctgagatcaggagagagatcctcatgacttgctgctttgatgggactgtccggctatggagtaaggatgaggtgtctaggtcgaagaagcagcgtggtttgctaatatcattcagtgtcattgcagtaatagaggtgaacaacactctgaatggagtcctcggagttgatattattgtgagatggtccatggaatctggcagcgttgtgtcaagggacgaacaaggtagattcaagttgttttcaggtgatttgagggagagccaggttggtaaatgtgagtggcttgtaagtcttggccccgggccttgcattagcttttgggctatccattgtttggatgatgtatttccgccaaggtacccacggattactttatggaaacagagcaaacttcagggctggggggattcctatgttaaatcaggtcctctaaaatctatggaacagtcaatttttgttgaggctgtcatctcaagaaggctatgctctggtccacctgcaacatgttttttgcttcatttgctggtggatgattcgtttgcttggtcaaccgtatccaccaaactgttagctgattctgggaaccatgctttaagtgattctgctaaaaatatcttgtgttgtttgactaaacctgtcaaacaagatggacataagggtagcatcagacaagtgtctgtccatccatatagctgcgaaatagagttagctgtctccatggattcaaacagaatgatatttttctggtctctgtcaactttctcaactctcataccgacaatgcatgcacctatgtatcctctatggaagctgttgtgcaaatttgatttgcgtaacatttctgaagatttcgagtactcatgtttgtgttgggcaccttctgttactcgtgataatagatttcttgttcttggatgggaaagtggagtcgattgtttcgtagttagaattcagaaagaagaggttctttcatgccagaagattttcacaatccccttccttgcagaaagcaatacagaagggccacctgacagcattcatacgataccattagcttctaaatgcagcagctctctttccaccacaaaccaaggggcacatgcatgcttcagcaatgaaatgttttcagcagtggtttatgaaggttcttcagtctttccttctggcctggagggagaatataccacgtgcatttctgtaatgccgctgaataatactgtactgcctatacaacaacatgacccttacagaactgttccaggctatcatattgctactggttgctctgatggcactgtaaaactttggaagatgacttgtgcagaggactctttgcagactaagaaagaaagacacatctgggagctagtaggcatgtttggtgctcatcaaggaccaattgacatagtttcattgtcaggctgtggtagagttattactgttggcagaaatttgaagaaaaatagcacctccattcatatctgggaagcaacaaaaatcaggggagacgggaattttctgctaggagatacactaatgttgcaagaccatattgttggtttagatggactatccttaggtgatggacgatttctacttgcagtttatctagctaatgagttacgtatatattctcataagcacccgtccttccagaatgtactacacactaagaattcaaaagaagagcatctttggagctgtattgtattatcccattctcatcatgatattgttggctttctttggggaccaaaggcaactgttgtgcttgttcatgagaaccatctttcactcttcagttcatggctagtaactggagataatgagtacatgacccagatacattcttgtcctgtagttcatgagatgttgccatgtactaacaattttaacgaagctacttttggtaaactcaagttaccagaaaatttcaacagtggaaacattgatagcaataatgtcctgctaacagaccaacatagccactattctcatggtttatggagcttgctgcacatagctcatagattgagtggaccgttggcatcatatcacccaagagcacttatccagtatctttattcaggtgaatggaaacgtgcggatgctgctctgcaccatcttgttcggtccatgaaagtgagtgaaacttcaaagggcgtgtcaaattacagtacatgccatagtattccagaacttcctttgtctgaatactttgcggcaacagtgtccaacaacatttctaccaaggggtttatgtggggtgagaatagaagtaacacaacttttaatttgttgtcaccttcaacttcatttctttacgaggatggcaatttaggtattaatactacaactagtgcatctgaaaaaccagacattgttgagctccttgacaagagtttcagcaaatatggtataagtgactcagagaaaaatcagatacttgcaatttctgatcttatggctggaatcactgatcagagccattcctctccctacaaaaatcttgacgaagcaggaagaaggttctgggttgctgtgcagttcgaacaattccatgctcttagaagatctgcagattcatccagtaatgaagggtgccgtgttgattctgcttccatagcctgggccttccaatctgattgtcaggatgatctacttaattctgtgcttcctgcagagccaacctggccagagatgcgaaagcttggtataggattatggtatacaaatgtgtcccaactaaggacaaggatggagaagttggcaaggttgcaatatcttaaaagcaaggatcccaaggattgtgctttgctctacatagcattgaacagaataaaagtgttggttggtcttttcaagattagtagagatgaaaaggataaacgtctatatgagtttctgtccagaaacttccaggaagaaaggcacaaggctgctgctctaaaaaatgcttatgtactaatgggaaggcaccaatgggagcttgctatagcttttttcctccttggtgatgatacttcatcagcagtgaatgtttgtgcaaagaaccttcaagatgaacagcttgccattgtaatttgtcggcttattgaaggatctggagggcctctggagcgtaatctcatttctaatgtgctacttccagatgcagttgagagaggagataactggctgtcaagcctgcttgagtggatgttaggaaattattgccagtccgtcaatagaatatttggttgccatccaaagttgcttattgatcaaaatgtgcttgcagacccagaattgggtcattattgtgcaattctctcagcaaaaagtagtttcagaaactctgttggtgaagctgtatctgcaaagttatctaagctttcatttgcagtggctgcatgtgccttgaataagtgcggactacctcttgaagcactagaatgcttgtctactaactcgagcatagatggcaaggatagcataatcgcacatggtgatggagaccacaagattttttatggaatactgagccctgtctctgcttctaagaattggctgtcttcatctgtcattagtggcattgagtccaaccttaaactaactatggcttcaaaatatctatctagccttctgagaaagcactcactctgttcacaattgaacgcaccattatctgaagaaaaggtccttaatgagtacaacaatcatcaaattgaaaaactgacgtgtgatattacaacagtaatctcaatatttgataaaaggttctccctcaaatttgctgatatagctgagaagatcctaatcttttgtagccatgatggtttattgtttctagcgtatgttttgttatggggtactaggtcaccagatgttgcaactgataattatattcttgaatgtcaccctctctgcccaattgattatctgttattgttttcattcaaagagagctgcaagttttttagtcgatatgttgtcctctcctccatgtgttctgttctgaatatggaggacaccaattctactgcatgggcacttaaagagagacataagtacattgtaataagtttgtcaaattacctgaatgtcagcaggttacttcttaaacatgacaaaagtggaaattatattctggatgacaggtcagctatgctggcagttatggatctgtttgagtacattatagagttttctttttcttggttgtattatgacataaaatcattacttatcatgataaatccagtcctagctacttctgttaatggggattcctttcaagtactattagatcaactgatgcatgctatatgccacaaaaatcatgatatatcatcaagtacaggaggaatgccccatgctgcattgagtaaaacacaactgaaaaagagtgtgaattcaaatcttttagcagatgagaagtggcatttgataggcgcttctgtgtgggttcggttgatatctgtgcttgaacatcgtctaagggaattctttgagaaagagggacttgaacatgaagctggtgttagtggttcagaattcaggggtcttatcacttctgttgctgcaaagtttgttatggattccattcattttgtgtcatcttcattagtaccactgcatgcatcgttcttgaggaagaatttaccgatgaattcaagttcaagtttgctcttctggttagagtccaagttgcctcagcaactcccagtcagtgatagctatgatcacctctcgaggatttcacagctttcaaacagtgagaatatggaggcattgtttaatattttgtgggaaatatctgttaatcctgtggatgtttgtaatgcctttgtgagtgaaggagttaattgtttttccttaagcaacacgaatgtcactagatcttggaaggacataagatgtcctgtggttgagtgtgataaaattattactgaaagaagtggagaggaacatgaacacagacttggctccaagagattgggacagggattcgctgaaaaagcctcttataatggtgaagtgttgtatgaaactaaaaggagggagttgatcatacaaaaagagtttcagagcccaagggaaattctaaggagaagcggggagcttcttgaggcggtatgtcttaactctgtcaatgagaaacaagctgctattgctactaatcgaaagggccttgttttcttcaattggagtgacaagcagcataacaagagtttttcagagtacgtctggtcaggatctgattggccattagatggctgggctggctgtcagtctacacctactccaacttctatctctcctggtgttgatcttggtcggaaaaaagggtcacaacttggttcagttggagcaactacaggtttgagttctttagcaaagccaggaagagatctaactggtggtggagcatttggaattccaggctatgctggtattggggcctctgggtttgggtggggcgaacctgaagaatttgaggatttcattgatcctccagcaacacttgagaacatacattcaagagcattatcccgccatccctcattaccattgtttcttgttggttcaagcaatacacatgtgtatctgtgggagtttggtaaagctagtgctatggctacatatggtgttctacctgctgctaatattccaccgccttatgcactggcctccatatcatctgttcaatttgactgttatggacagcgggatgttgcctatgtgtctgcaagtagatcagttattgcttctgctggatatagttcaaatggttcaaatgttgttatatgggacacactgtctccaccagctacatctcaaacatctatcatgtgtcatgaaggaggagctcggtctatttctgtgtttgatagtgatagaggctatgggtctatctcaccgcttgttgtaactggtgggaaaaatggagatatagctttgcatgattgccgcttcctttctactggaaagtccaagcatcatagagttaccactgagcatggtgtcgaggcatcttccatgcatgacatcaaatctagtacttttggtggtactgacagtgggatggtctggcatataccaaaggctcatctaggtagtgtcacaaaggtaacgaccatcccaaataccagcttgttcttaaccggaagcaaagatggagatgtgaaactttgggatgctaaaaactcccagctagtctttcactggacaaagatgcatgaacggcacaccttttttcaaccaacctccaggggctttggcggtgttgttagagctgctgtaacagatctccaggtgttgcctaatggtttcgtttcatgtggaggtgatggttctgtgaagcttgttcagataaaagatgatctcgctgcagcatatcagcgttaaaacaagcaaagagggaagaagacatgctagaaaatgcgatggatgcagttggtcacttgatatcattctattttgctttgctcattatacttttgagatgctttactcctttcaggggtggtatagcaaggaggaagctatgatttaagagcactagagcagacatctaggcaatttgacatcagcatttatacgtcgagtttttatacgagcctggtttgtggctagtcaaactgccctcagtggtttttttgaggcctgaattttcgcactttggacagggcaatgcggaccataattttttgtacatctgtacagtcaaatatcttgttttgttggccaggatgttgatggagggtgtaaagttgtaagctagaagtatggagataccaagctacaatacctttttgttacttaatacaaaagtgctgggtttagggttaatgtacaatggcagagcaaatggaccaaacaaatattgtatttggtacgggagtatgtatgcggtttgtcaaggggaccgcagtagttcatcattcaaaacaatattttgcattattttgtactgtagatttcactgtttctatagtgaagtttgaatatgagaatgtagatgagtaaattgctagagatagtcttagtgtgatcttttaatatcctgaaacctaaggtccaatcgaac

SEQ ID NO: 73673 - DNA, 7974 bp, Zea Mays
atgggggagcgagacgcgctcccgccgctgccgctcgccctcggtccgccgcatctaatcccgccggcgcccacccgcgacccgcgcgccatcgccttcctccctgacctcgtgggcttccactgggtcgcctacgctgccggctccttccttgtcgtatcccacctcccctccccttgccgggacgacaacaacaacgacagttgctccccgttcttccgccaggtcatcgacctccgcgcccccgtgtccgcagttgcttggtgccgccgcgggagcggagaggtcgccgccgctacagacaattctatacacatattccagcctgcgcccgcctcttctccaggttcgtttggatggctcctgagatggtctatcaccgagacgttcgccatcgttgctgtatcctggaccggctgcggcaatggcattgtggcagttggcgcaggtgtttccatgtgggcaagattggagtcctcctggcagctcgcttggaggtctacaccgcaggtgccgcaagcccttgtctccactacctgttccatgcaaggtcctgtcgcgacagtggcagctcttgctccagccgagggcagtgtgcctgttcttgtgtttctgaacgatgccaggagggggctggagcaagctgagcttgtgcatcctcagcctgtttgtatgatccagtggagatcctgttcgttatacccccatgatctgtctgagatcaggagagagatcctcatgacttgctgctttgatgggactgtccggctatggagtaaggatgaggtgtctaggtcgaagaagcagcgtggtttgctaatatcattcagtgtcattgcagtaatagaggtgaacaacactctgaatggagtcctcggagttgatattattgtgagatggtccatggaatctggcagcgttgtgtcaagggacgaacaaggtagattcaagttgttttcaggtgatttgagggagagccaggttggtaaatgtgagtggcttgtaagtcttggccccgggccttgcattagcttttgggctatccattgtttggatgatgtatttccgccaaggtacccacggattactttatggaaacagagcaaacttcagggctggggggattcctatgttaaatcaggtcctctaaaatctatggaacagtcaatttttgttgaggctgtcatctcaagaaggctatgctctggtccacctgcaacatgttttttgcttcatttgctggtggatgattcgtttgcttggtcaaccgtatccaccaaactgttagctgattctgggaaccatgctttaagtgattctgctaaaaatatcttgtgttgtttgactaaacctgtcaaacaagatggacataagggtagcatcagacaagtgtctgtccatccatatagctgcgaaatagagttagctgtctccatggattcaaacagaatgatatttttctggtctctgtcaactttctcaactctcataccgacaatgcatgcacctatgtatcctctatggaagctgttgtgcaaatttgatttgcgtaacatttctgaagatttcgagtactcatgtttgtgttgggcaccttctgttactcgtgataatagatttcttgttcttggatgggaaagtggagtcgattgtttcgtagttagaattcagaaagaagaggttctttcatgccagaagattttcacaatccccttccttgcagaaagcaatacagaagggccacctgacagcattcatacgataccattagcttctaaatgcagcagctctctttccaccacaaaccaaggggcacatgcatgcttcagcaatgaaatgttttcagcagtggtttatgaaggttcttcagtctttccttctggcctggagggagaatataccacgtgcatttctgtaatgccgctgaataatactgtactgcctatacaacaacatgacccttacagaactgttccaggctatcatattgctactggttgctctgatggcactgtaaaactttggaagatgacttgtgcagaggactctttgcagactaagaaagaaagacacatctgggagctagtaggcatgtttggtgctcatcaaggaccaattgacatagtttcattgtcaggctgtggtagagttattactgttggcagaaatttgaagaaaaatagcacctccattcatatctgggaagcaacaaaaatcaggggagacgggaattttctgctaggagatacactaatgttgcaagaccatattgttggtttagatggactatccttaggtgatggacgatttctacttgcagtttatctagctaatgagttacgtatatattctcataagcacccgtccttccagaatgtactacacactaagaattcaaaagaagagcatctttggagctgtattgtattatcccattctcatcatgatattgttggctttctttggggaccaaaggcaactgttgtgcttgttcatgagaaccatctttcactcttcagttcatggctagtaactggagataatgagtacatgacccagatacattcttgtcctgtagttcatgagatgttgccatgtactaacaattttaacgaagctacttttggtaaactcaagttaccagaaaatttcaacagtggaaacattgatagcaataatgtcctgctaacagaccaacatagccactattctcatggtttatggagcttgctgcacatagctcatagattgagtggaccgttggcatcatatcacccaagagcacttatccagtatctttattcagctatagtcaaggtggttctaactgcttctaccatttatcatgctattgccctcgagcttcctaaatgggtaatcaaggtcactgataaatggcgcaaaccctttggaaagttcaagagagtgccagtagatggagttggggggtggggtggggggctaggtgaatggaaacgtgcggatgctgctctgcaccatcttgttcggtccatgaaagtgagtgaaacttcaaagggcgtgtcaaattacagtacatgccatagtattccagaacttcctttgtctgaatactttgcggcaacagtgtccaacaacatttctaccaaggggtttatgtggggtgagaatagaagtaacacaacttttaatttgttgtcaccttcaacttcatttctttacgaggatggcaatttaggtattaatactacaactagtgcatctgaaaaaccagacattgttgagctccttgacaagagtttcagcaaatatggtataagtgactcagagaaaaatcagatacttgcaatttctgatcttatggctggaatcactgatcagagccattcctctccctacaaaaatcttgacgaagcaggaagaaggttctgggttgctgtgcagttcgaacaattccatgctcttagaagatctgcagattcatccagtaatgaagggtgccgtgttgattctgcttccatagcctgggccttccaatctgattgtcaggatgatctacttaattctgtgcttcctgcagagccaacctggccagagatgcgaaagcttggtataggattatggtatacaaatgtgtcccaactaaggacaaggatggagaagttggcaaggttgcaatatcttaaaagcaaggatcccaaggattgtgctttgctctacatagcattgaacagaataaaagtgttggttggtcttttcaagattagtagagatgaaaaggataaacgtctatatgagtttctgtccagaaacttccaggaagaaaggcacaaggctgctgctctaaaaaatgcttatgtactaatgggaaggcaccaatgggagcttgctatagcttttttcctccttggtgatgatacttcatcagcagtgaatgtttgtgcaaagaaccttcaagatgaacagcttgccattgtaatttgtcggcttattgaaggatctggagggcctctggagcgtaatctcatttctaatgtgctacttccagatgcagttgagagaggagataactggctgtcaagcctgcttgagacccagaattgggtcattattgtgcaattctctcagcaaaaagtagtttcagaaactctgttggtgaagctgtatctgcaaagttatctaagctttcatttgcagtggctgcatgtgccttgaataagtgcggactacctcttgaagcactagaatgcttgtctactaactcgagcatagatggcaaggatagcataatcgcacatggtgatggagaccacaagattttttatggaatactgagccctgtctctgcttctaagaattggctgtcttcatctgtcattagtggcattgagtccaaccttaaactaactatggcttcaaaatatctatctagccttctgagaaagcactcactctgttcacaattgaacgcaccattatctgaagaaaaggtccttaatgagtacaacaatcatcaaattgaaaaactgacgtgtgatattacaacagtaatctcaatatttgataaaaggttctccctcaaatttgctgatatagctgagaagatcctaatcttttgtagccatgatggtttattgtttctagcgtatgttttgttatggggtactaggtcaccagatgttgcaactgataattatattcttgaatgtcaccctctctgcccaattgattatctgttattgttttcattcaaagagagctgcaagttttttagtcgatatgttgtcctctcctccatgtgttctgttctgaatatggaggacaccaattctactgcatgggcacttaaagagagacataagtacattgtaataagtttgtcaaattacctgaatgtcagcaggttacttcttaaacatgacaaaagtggaaattatattctggatgacaggtcagctatgctggcagttatggatctgtttgagtacattatagagttttctttttcttggttgtattatgacataaaatcattacttatcatgataaatccagtcctagctacttctgttaatggggattcctttcaagtactattagatcaactgatgcatgctatatgccacaaaaatcatgatatatcatcaagtacaggaggaatgccccatgctgcattgagtaaaacacaactgaaaaagagtgtgaattcaaatcttttagcagatgagaagtggcatttgataggcgcttctgtgtgggttcggttgatatctgtgcttgaacatcgtctaagggaattctttgagaaagagggacttgaacatgaagctggtgttagtggttcagaattcaggggtcttatcacttctgttgctgcaaagtttgttatggattccattcattttgtgtcatcttcattagtaccactgcatgcatcgttcttgaggaagaatttaccgatgaattcaagttcaagtttgctcttctggttagagtccaagttgcctcagcaactcccagtcagtgatagctatgatcacctctcgaggatttcacagctttcaaacagtgagaatatggaggcattgtttaatattttgtgggaaatatctgttaatcctgtggatgtttgtaatgcctttgtgagtgaaggagttaattgtttttccttaagcaacacgaatgtcactagatcttggaaggacataagatgtcctgtggttgagtgtgataaaattattactgaaagaagtggagaggaacatgaacacagacttggctccaagagattgggacagggattcgctgaaaaagcctcttataatggtgaagtgttgtatgaaactaaaaggagggagttgatcatacaaaaagagtttcagagcccaagggaaattctaaggagaagcggggagcttcttgaggcggtatgtcttaactctgtcaatgagaaacaagctgctattgctactaatcgaaagggccttgttttcttcaattggagtgacaagcagcataacaagagtttttcagagtacgtctggtcaggatctgattggccattagatggctgggctggctgtcagtctacacctactccaacttctatctctcctggtgttgatcttggtcggaaaaaagggtcacaacttggttcagttggagcaactacaggtttgagttctttagcaaagccaggaagagatctaactggtggtggagcatttggaattccaggctatgctggtattggggcctctgggtttgggtggggcgaacctgaagaatttgaggatttcattgatcctccagcaacacttgagaacatacattcaagagcattatcccgccatccctcattaccattgtttcttgttggttcaagcaatacacatgtgtatctgtgggagtttggtaaagctagtgctatggctacatatggtgttctacctgctgctaatattccaccgccttatgcactggcctccatatcatctgttcaatttgactgttatggacagcggtttgccactgctgcattagatggtaccatttgtacatggcaagttgaggtgggtggaagaagcaatgtctatcctacagagtcatctatatgctttgacagccacgcctcggatgttgcctatgtgtctgcaagtagatcagttattgcttctgctggatatagttcaaatggttcaaatgttgttatatgggacacactgtctccaccagctacatctcaaacatctatcatgtgtcatgaaggaggagctcggtctatttctgtgtttgatagtgatagaggctatgggtctatctcaccgcttgttgtaactggtgggaaaaatggagatatagctttgcatgattgccgcttcctttctactggaaagtccaagcatcatagagttaccactgagcatggtgtcgaggcatcttccatgcatgacatcaaatctagtacttttggtggtactgacagtgggatggtctggcatataccaaaggctcatctaggtagtgtcacaaaggtaacgaccatcccaaataccagcttgttcttaaccggaagcaaagatggagatgtgaaactttgggatgctaaaaactcccagctagtctttcactggacaaagatgcatgaacggcacaccttttttcaaccaacctccaggggctttggcggtgttgttagagctgctgtaacagatctccaggtgttgcctaatggtttcgtttcatgtggaggtgatggttctgtgaagcttgttcagataaaagatgatctcgctgcagcatatcagcgttaaaacaagcaaagagggaagaagacatgctagaaaatgcgatggatgcagttggtcacttgatatcattctattttgctttgctcattatacttttgagatgctttactcctttcaggggtggtatagcaaggaggaagctatgatttaagagcactagagcagacatctaggcaatttgacatcagcatttatacgtcgagtttttatacgagcctggtttgtggctagtcaaactgccctcagtggtttttttgaggcctgaattttcgcactttggacagggcaatgcggaccataattttttgtacatctgtacagtcaaatatcttgttttgttggccaggatgttgatggagggtgtaaagttgtaagctagaagtatggagataccaagctacaatacctttttgttacttaatacaaaagtgctgggtttagggttaatgtacaatggcagagcaaatggaccaaacaaatattgtatttggtacgggagtatgtatgcggtttgtcaaggggaccgcagtagttcatcattcaaaacaatattttgcattattttgtactgtagatttcactgtttctatagtgaagtttgaatatgagaatgtagatgagtaaattgctagagatagtcttagtgtgatcttttaatatcctgaaacctaaggtccaatcgaac

SEQ ID NO: 73674 - DNA, 7946 bp, Zea Mays
atgggggagcgagacgcgctcccgccgctgccgctcgccctcggtccgccgcatctaatcccgccggcgcccacccgcgacccgcgcgccatcgccttcctccctgacctcgtgggcttccactgggtcgcctacgctgccggctccttccttgtcgtatcccacctcccctccccttgccgggacgacaacaacaacgacagttgctccccgttcttccgccaggtcatcgacctccgcgcccccgtgtccgcagttgcttggtgccgccgcgggagcggagaggtcgccgccgctacagacaattctatacacatattccagcctgcgcccgcctcttctccaggttcgtttggatggctcctgagatggtctatcaccgagacgttcgccatcgttgctgtatcctggaccggctgcggcaatggcattgtggcagttggcgcaggtgtttccatgtgggcaagattggagtcctcctggcagctcgcttggaggtctacaccgcaggtgccgcaagcccttgtctccactacctgttccatgcaaggtcctgtcgcgacagtggcagctcttgctccagccgagggcagtgtgcctgttcttgtgtttctgaacgatgccaggagggggctggagcaagctgagcttgtgcatcctcagcctgtttgtatgatccagtggagatcctgttcgttatacccccatgatctgtctgagatcaggagagagatcctcatgacttgctgctttgatgggactgtccggctatggagtaaggatgaggtgtctaggtcgaagaagcagcgtggtttgctaatatcattcagtgtcattgcagtaatagaggtgaacaacactctgaatggagtcctcggagttgatattattgtgagatggtccatggaatctggcagcgttgtgtcaagggacgaacaaggtagattcaagttgttttcaggtgatttgagggagagccaggttggtaaatgtgagtggcttgtaagtcttggccccgggccttgcattagcttttgggctatccattgtttggatgatgtatttccgccaaggtacccacggattactttatggaaacagagcaaacttcagggctggggggattcctatgttaaatcaggtcctctaaaatctatggaacagtcaatttttgttgaggctgtcatctcaagaaggctatgctctggtccacctgcaacatgttttttgcttcatttgctggtggatgattcgtttgcttggtcaaccgtatccaccaaactgttagctgattctgggaaccatgctttaagtgattctgctaaaaatatcttgtgttgtttgactaaacctgtcaaacaagatggacataagggtagcatcagacaagtgtctgtccatccatatagctgcgaaatagagttagctgtctccatggattcaaacagaatgatatttttctggtctctgtcaactttctcaactctcataccgacaatgcatgcacctatgtatcctctatggaagctgttgtgcaaatttgatttgcgtaacatttctgaagatttcgagtactcatgtttgtgttgggcaccttctgttactcgtgataatagatttcttgttcttggatgggaaagtggagtcgattgtttcgtagttagaattcagaaagaagaggttctttcatgccagaagattttcacaatccccttccttgcagaaagcaatacagaagggccacctgacagcattcatacgataccattagcttctaaatgcagcagctctctttccaccacaaaccaaggggcacatgcatgcttcagcaatgaaatgttttcagcagtggtttatgaaggttcttcagtctttccttctggcctggagggagaatataccacgtgcatttctgtaatgccgctgaataatactgtactgcctatacaacaacatgacccttacagaactgttccaggctatcatattgctactggttgctctgatggcactgtaaaactttggaagatgacttgtgcagaggactctttgcagactaagaaagaaagacacatctgggagctagtaggcatgtttggtgctcatcaaggaccaattgacatagtttcattgtcaggctgtggtagagttattactgttggcagaaatttgaagaaaaatagcacctccattcatatctgggaagcaacaaaaatcaggggagacgggaattttctgctaggagatacactaatgttgcaagaccatattgttggtttagatggactatccttaggtgatggacgatttctacttgcagtttatctagctaatgagttacgtatatattctcataagcacccgtccttccagaatgtactacacactaagaattcaaaagaagagcatctttggagctgtattgtattatcccattctcatcatgatattgttggctttctttggggaccaaaggcaactgttgtgcttgttcatgagaaccatctttcactcttcagttcatggctagtaactggagataatgagtacatgacccagatacattcttgtcctgtagttcatgagatgttgccatgtactaacaattttaacgaagctacttttggtaaactcaagttaccagaaaatttcaacagtggaaacattgatagcaataatgtcctgctaacagaccaacatagccactattctcatggtttatggagcttgctgcacatagctcatagattgagtggaccgttggcatcatatcacccaagagcacttatccagtatctttattcaggtgaatggaaacgtgcggatgctgctctgcaccatcttgttcggtccatgaaagtgagtgaaacttcaaagggcgtgtcaaattacagtacatgccatagtattccagaacttcctttgtctgaatactttgcggcaacagtgtccaacaacatttctaccaaggggtttatgtggggtattaatactacaactagtgcatctgaaaaaccagacattgttgagctccttgacaagagtttcagcaaatatggtataagtgactcagagaaaaatcagatacttgcaatttctgatcttatggctggaatcactgatcagagccattcctctccctacaaaaatcttgacgaagcaggaagaaggttctgggttgctgtgcagttcgaacaattccatgctcttagaagatctgcagattcatccagtaatgaagggtgccgtgttgattctgcttccatagcctgggccttccaatctgattgtcaggatgatctacttaattctgtgcttcctgcagagccaacctggccagagatgcgaaagcttggtataggattatggtatacaaatgtgtcccaactaaggacaaggatggagaagttggcaaggttgcaatatcttaaaagcaaggatcccaaggattgtgctttgctctacatagcattgaacagaataaaagtgttggttggtcttttcaagattagtagagatgaaaaggataaacgtctatatgagtttctgtccagaaacttccagaaaggcacaaggctgctgctctaaaaaatgcttatgtactaatgggaaggcaccaatgggagcttgctatagcttttttcctccttggtgatgatacttcatcagcagtgaatgtttgtgcaaagaaccttcaagatgaacagcttgccattgtaatttgtcggcttattgaaggatctggagggcctctggagcgtaatctcatttctaatgtgctacttccagatgcagttgagagaggagataactggctgtcaagcctgcttgaggtgtgtcatatacgtggcttttgtctaattgcctttctatttttttatgttgagaatcaatataaattatcgtgtttccagagttacaatccttcaacttaactttatctcatctgaatcctcagtggatgttaggaaattattgccagtccgtcaatagaatatttggttgccatccaaagttgcttattgatcaaaatgtgcttgcagacccagaattgggtcattattgtgcaattctctcagcaaaaagtagtttcagaaactctgttggtgaagctgtatctgcaaagttatctaagctttcatttgcagtggctgcatgtgccttgaataagtgcggactacctcttgaagcactagaatgcttgtctactaactcgagcatagatggcaaggatagcataatcgcacatggtgatggagaccacaagattttttatggaatactgagccctgtctctgcttctaagaattggctgtcttcatctgtcattagtggcattgagtccaaccttaaactaactatggcttcaaaatatctatctagccttctgagaaagcactcactctgttcacaattgaacgcaccattatctgaagaaaaggtccttaatgagtacaacaatcatcaaattgaaaaactgacgtgtgatattacaacagtaatctcaatatttgataaaaggttctccctcaaatttgctgatatagctgagaagatcctaatcttttgtagccatgatggtttattgtttctagcgtatgttttgttatggggtactaggtcaccagatgttgcaactgataattatattcttgaatgtcaccctctctgcccaattgattatctgttattgttttcattcaaagagagctgcaagttttttagtcgatatgttgtcctctcctccatgtgttctgttctgaatatggaggacaccaattctactgcatgggcacttaaagagagacataagtacattgtaataagtttgtcaaattacctgaatgtcagcaggttacttcttaaacatgacaaaagtggaaattatattctggatgacaggtcagctatgctggcagttatggatctgtttgagtacattatagagttttctttttcttggttgtattatgacataaaatcattacttatcatgataaatccagtcctagctacttctgttaatggggattcctttcaagtactattagatcaactgatgcatgctatatgccacaaaaatcatgatatatcatcaagtacaggaggaatgccccatgctgcattgagtaaaacacaactgaaaaagagtgtgaattcaaatcttttagcagatgagaagtggcatttgataggcgcttctgtgtgggttcggttgatatctgtgcttgaacatcgtctaagggaattctttgagaaagagggacttgaacatgaagctggtgttagtggttcagaattcaggggtcttatcacttctgttgctgcaaagtttgttatggattccattcattttgtgtcatcttcattagtaccactgcatgcatcgttcttgaggaagaatttaccgatgaattcaagttcaagtttgctcttctggttagagtccaagttgcctcagcaactcccagtcagtgatagctatgatcacctctcgaggatttcacagctttcaaacagtgagaatatggaggcattgtttaatattttgtgggaaatatctgttaatcctgtggatgtttgtaatgcctttgtgagtgaaggagttaattgtttttccttaagcaacacgaatgtcactagatcttggaaggacataagatgtcctgtggttgagtgtgataaaattattactgaaagaagtggagaggaacatgaacacagacttggctccaagagattgggacagggattcgctgaaaaagcctcttataatggtgaagtgttgtatgaaactaaaaggagggagttgatcatacaaaaagagtttcagagcccaagggaaattctaaggagaagcggggagcttcttgaggcggtatgtcttaactctgtcaatgagaaacaagctgctattgctactaatcgaaagggccttgttttcttcaattggagtgacaagcagcataacaagagtttttcagagtacgtctggtcaggatctgattggccattagatggctgggctggctgtcagtctacacctactccaacttctatctctcctggtgttgatcttggtcggaaaaaagggtcacaacttggttcagttggagcaactacaggtttgagttctttagcaaagccaggaagagatctaactggtggtggagcatttggaattccaggctatgctggtattggggcctctgggtttgggtggggcgaacctgaagaatttgaggatttcattgatcctccagcaacacttgagaacatacattcaagagcattatcccgccatccctcattaccattgtttcttgttggttcaagcaatacacatgtgtatctgtgggagtttggtaaagctagtgctatggctacatatggtgttctacctgctgctaatattccaccgccttatgcactggcctccatatcatctgttcaatttgactgttatggacagcggtttgccactgctgcattagatggtaccatttgtacatggcaagttgaggtgggtggaagaagcaatgtctatcctacagagtcatctatatgctttgacagccacgcctcggatgttgcctatgtgtctgcaagtagatcagttattgcttctgctggatatagttcaaatggttcaaatgttgttatatgggacacactgtctccaccagctacatctcaaacatctatcatgtgtcatgaaggaggagctcggtctatttctgtgtttgatagtgatagaggctatgggtctatctcaccgcttgttgtaactggtgggaaaaatggagatatagctttgcatgattgccgcttcctttctactggaaagtccaagcatcatagagttaccactgagcatggtgtcgaggcatcttccatgcatgacatcaaatctagtacttttggtggtactgacagtgggatggtctggcatataccaaaggctcatctaggtagtgtcacaaaggtaacgaccatcccaaataccagcttgttcttaaccggaagcaaagatggagatgtgaaactttgggatgctaaaaactcccagctagtctttcactggacaaagatgcatgaacggcacaccttttttcaaccaacctccaggggctttggcggtgttgttagagctgctgtaacagatctccaggtgttgcctaatggtttcgtttcatgtggaggtgatggttctgtgaagcttgttcagataaaagatgatctcgctgcagcatatcagcgttaaaacaagcaaagagggaagaagacatgctagaaaatgcgatggatgcagttggtcacttgatatcattctattttgctttgctcattatacttttgagatgctttactcctttcaggggtggtatagcaaggaggaagctatgatttaagagcactagagcagacatctaggcaatttgacatcagcatttatacgtcgagtttttatacgagcctggtttgtggctagtcaaactgccctcagtggtttttttgaggcctgaattttcgcactttggacagggcaatgcggaccataattttttgtacatctgtacagtcaaatatcttgttttgttggccaggatgttgatggagggtgtaaagttgtaagctagaagtatggagataccaagctacaatacctttttgttacttaatacaaaagtgctgggtttagggttaatgtacaatggcagagcaaatggaccaaacaaatattgtatttggtacgggagtatgtatgcggtttgtcaaggggaccgcagtagttcatcattcaaaacaatattttgcattattttgtactgtagatttcactgtttctatagtgaagtttgaatatgagaatgtagatgagtaaattgctagagatagtcttagtgtgatcttttaatatcctgaaacctaaggtccaatcgaac

SEQ ID NO: 73675 - DNA, 7071 bp, Zea Mays
atgggggagcgagacgcgctcccgccgctgccgctcgccctcggtccgccgcatctaatcccgccggcgcccacccgcgacccgcgcgccatcgccttcctccctgacctcgtgggcttccactgggtcgcctacgctgccggctccttccttgtcgtatcccacctcccctccccttgccgggacgacaacaacaacgacagttgctccccgttcttccgccaggtcatcgacctccgcgcccccgtgtccgcagttgcttggtgccgccgcgggagcggagaggtcgccgccgctacagacaattctatacacatattccagcctgcgcccgcctcttctccaggttcgtttggatggctcctgagatggtctatcaccgagacgttcgccatcgttgctgtatcctggaccggctgcggcaatggcattgtggcagttggcgcaggtgtttccatgtgggcaagattggagtcctcctggcagctcgcttggaggtctacaccgcaggtgccgcaagcccttgtctccactacctgttccatgcaaggtcctgtcgcgacagtggcagctcttgctccagccgagggcagtgtgcctgttcttgtgtttctgaacgatgccaggagggggctggagcaagctgagcttgtgcatcctcagcctgtttgtatgatccagtggagatcctgttcgttatacccccatgatctgtctgagatcaggagagagatcctcatgacttgctgctttgatgggactgtccggctatggagtaaggatgaggtgtctaggtcgaagaagcagcgtggtttgctaatatcattcagtgtcattgcagtaatagaggtgaacaacactctgaatggagtcctcggagttgatattattgtgagatggtccatggaatctggcagcgttgtgtcaagggacgaacaaggtagattcaagttgttttcaggtgatttgagggagagccaggttggtaaatgtgagtggcttgtaagtcttggccccgggccttgcattagcttttgggctatccattgtttggatgatgtatttccgccaaggtacccacggattactttatggaaacagagcaaacttcagggctggggggattcctatgttaaatcaggtcctctaaaatctatggaacagtcaatttttgttgaggctgtcatctcaagaaggctatgctctggtccacctgcaacatgttttttgcttcatttgctggtggatgattcgtttgcttggtcaaccgtatccaccaaactgttagctgattctgggaaccatgctttaagtgattctgctaaaaatatcttgtgttgtttgactaaacctgtcaaacaagatggacataagggtagcatcagacaagtgtctgtccatccatatagctgcgaaatagagttagctgtctccatggattcaaacagaatgatatttttctggtctctgtcaactttctcaactctcataccgacaatgcatgcacctatgtatcctctatggaagctgttgtgcaaatttgatttgcgtaacatttctgaagatttcgagtactcatgtttgtgttgggcaccttctgttactcgtgataatagatttcttgttcttggatgggaaagtggagtcgattgtttcgtagttagaattcagaaagaagaggttctttcatgccagaagattttcacaatccccttccttgcagaaagcaatacagaagggccacctgacagcattcatacgataccattagcttctaaatgcagcagctctctttccaccacaaaccaaggggcacatgcatgcttcagcaatgaaatgttttcagcagtggtttatgaaggttcttcagtctttccttctggcctggagggagaatataccacgtgcatttctgtaatgccgctgaataatactgtactgcctatacaacaacatgacccttacagaactgttccaggctatcatattgctactggttgctctgatggcactgtaaaactttggaagatgacttgtgcagaggactctttgcagactaagaaagaaagacacatctgggagctagtaggcatgtttggtgctcatcaaggaccaattgacatagtttcattgtcaggctgtggtagagttattactgttggcagaaatttgaagaaaaatagcacctccattcatatctgggaagcaacaaaaatcaggggagacgggaattttctgctaggagatacactaatgttgcaagaccatattgttggtttagatggactatccttaggtgatggacgatttctacttgcagtttatctagctaatgagttacgtatatattctcataagcacccgtccttccagaatgtactacacactaagaattcaaaagaagagcatctttggagctgtattgtattatcccattctcatcatgatattgttggctttctttggggaccaaaggcaactgttgtgcttgttcatgagaaccatctttcactcttcagttcatggctagtaactggagataatgagtacatgacccagatacattcttgtcctgtagttcatgagatgttgccatgtactaacaattttaacgaagctacttttggtaaactcaagttaccagaaaatttcaacagtggaaacattgatagcaataatgtcctgctaacagaccaacatagccactattctcatggtttatggagcttgctgcacatagctcatagattgagtggaccgttggcatcatatcacccaagagcacttatccagtatctttattcaggtgaatggaaacgtgcggatgctgctctgcaccatcttgttcggtccatgaaagtgagtgaaacttcaaagggcgtgtcaaattacagtacatgccatagtattccagaacttcctttgtctgaatactttgcggcaacagtgtccaacaacatttctaccaaggggtttatgtggggtattaatactacaactagtgcatctgaaaaaccagacattgttgagctccttgacaagagtttcagcaaatatggtataagtgactcagagaaaaatcagatacttgcaatttctgatcttatggctggaatcactgatcagagccattcctctccctacaaaaatcttgacgaagcaggaagaaggttctgggttgctgtgcagttcgaacaattccatgctcttagaagatctgcagattcatccagtaatgaagggtgccgtgttgattctgcttccatagcctgggccttccaatctgattgtcaggatgatctacttaattctgtgcttcctgcagagccaacctggccagagatgcgaaagcttggtataggattatggtatacaaatgtgtcccaactaaggacaaggatggagaagttggcaaggttgcaatatcttaaaagcaaggatcccaaggattgtgctttgctctacatagcattgaacagaataaaagtgttggttggtcttttcaagattagtagagatgaaaaggataaacgtctatatgagtttctgtccagaaacttccaggatctggagggcctctggagcgtaatctcatttctaatgtgctacttccagatgcagttgagagaggagataactggctgtcaagcctgcttgagtggatgttaggaaattattgccagtccgtcaatagaatatttggttgccatccaaagttgcttattgatcaaaatgtgcttgcagacccagaattgggtcattattgtgcaattctctcagcaaaaagtagtttcagaaactctgttggtgaagctgtatctgcaaagttatctaagctttcatttgcagtggctgcatgtgccttgaataagtgcggactacctcttgaagcactagaatgcttgtctactaactcgagcatagatggcaaggatagcataatcgcacatggtgatggagaccacaagattttttatggaatactgagccctgtctctgcttctaagaattggctgtcttcatctgtcattagtggcattgagtccaaccttaaactaactatggcttcaaaatatctatctagccttctgagaaagcactcactctgttcacaattgaacgcaccattatctgaagaaaaggtccttaatgagtacaacaatcatcaaattgaaaaactgacgtgtgatattacaacagtaatctcaatatttgataaaaggttctccctcaaatttgctgatatagctgagaagcgtctaagggaattctttgagaaagagggacttgaacatgaagctggtgttagtggttcagaattcaggggtcttatcacttctgttgctgcaaagtttgttatggattccattcattttgtgtcatcttcattagtaccactgcatgcatcgttcttgaggaagaatttaccgatgaattcaagttcaagtttgctcttctggttagagtccaagttgcctcagcaactcccagtcagtgatagctatgatcacctctcgaggatttcacagctttcaaacagtgagaatatggaggcattgtttaatattttgtgggaaatatctgttaatcctgtggatgtttgtaatgcctttgtgagtgaaggagttaattgtttttccttaagcaacacgaatgtcactagatcttggaaggacataagatgtcctgtggttgagtgtgataaaattattactgaaagaagtggagaggaacatgaacacagacttggctccaagagattgggacagggattcgctgaaaaagcctcttataatggtgaagtgttgtatgaaactaaaaggagggagttgatcatacaaaaagagtttcagagcccaagggaaattctaaggagaagcggggagcttcttgagtactgcattttaaccttttcagtggcgcaggcggtatgtcttaactctgtcaatgagaaacaagctgctattgctactaatcgaaagttttgctggccaaacctcatttcaagagctgtctttgtacatactgtataccatctaagggcagcgtctttacagggccttgttttcttcaattggagtgacaagcagcataacaagagtttttcagagtacgtctggtcaggatctgattggccattagatggctgggctggctgtcagtctacacctactccaacttctatctctcctggtgttgatcttggtcggaaaaaagggtcacaacttggttcagttggagcaactacaggtttgagttctttagcaaagccaggaagagatctaactggtggtggagcatttggaattccaggctatgctggtattggggcctctgggtttgggtggggcgaacctgaagaatttgaggatttcattgatcctccagcaacacttgagaacatacattcaagagcattatcccgccatccctcattaccattgtttcttgttggttcaagcaatacacatgtgtatctgtgggagtttggtaaagctagtgctatggctacatatggtgttctacctgctgctaatattccaccgccttatgcactggcctccatatcatctgttcaatttgactgttatggacagcggtttgccactgctgcattagatggtaccatttgtacatggcaagttgaggtgggtggaagaagcaatgtctatcctacagagtcatctatatgctttgacagccacgcctcggatgttgcctatgtgtctgcaagtagatcagttattgcttctgctggatatagttcaaatggttcaaatgttgttatatgggacacactgtctccaccagctacatctcaaacatctatcatgtgtcatgaaggaggagctcggtctatttctgtgtttgatagtgatagaggctatgggtctatctcaccgcttgttgtaactggtgggaaaaatggagatatagctttgcatgattgccgcttcctttctactggaaagtccaagcatcatagagttaccactgagcatggtgtcgaggcatcttccatgcatgacatcaaatctagtacttttggtggtactgacagtgggatggtctggcatataccaaaggctcatctaggtagtgtcacaaaggtaacgaccatcccaaataccagcttgttcttaaccggaagcaaagatggagatgtgaaactttgggatgctaaaaactcccagctagtctttcactggacaaagatgcatgaacggcacaccttttttcaaccaacctccaggggctttggcggtgttgttagagctgctgtaacagatctccaggtgttgcctaatggtttcgtttcatgtggaggtgatggttctgtgaagcttgttcagataaaagatgatctcgctgcagcatatcagcgttaaaacaagcaaagagggaagaagacatgctagaaaatgcgatggatgcagttggtcacttgatatcattctattttgctttgctcattatacttttgagatgctttactcctttcaggggtggtatagcaaggaggaagctatgatttaagagcactagagcagacatctaggcaatttgacatcagcatttatacgtcgagtttttatacgagcctggtttgtggctagtcaaactgccctcagtggtttttttgaggcctgaattttcgcactttggacagggcaatgcggaccataattttttgtacatctgtacagtcaaatatcttgttttgttggccaggatgttgatggagggtgtaaagttgtaagctagaagtatggagataccaagctacaatacctttttgttacttaatacaaaagtgctgggtttagggttaatgtacaatggcagagcaaatggaccaaacaaatattgtatttggtacgggagtatgtatgcggtttgtcaaggggaccgcagtagttcatcattcaaaacaatattttgcattattttgtactgtagatttcactgtttctatagtgaagtttgaatatgagaatgtagatgagtaaattgctagagatagtcttagtgtgatcttttaatatcctgaaacctaaggtccaatcgaac

SEQ ID NO: 73676 - DNA, 7701 bp, Zea Mays
atgggggagcgagacgcgctcccgccgctgccgctcgccctcggtccgccgcatctaatcccgccggcgcccacccgcgacccgcgcgccatcgccttcctccctgacctcgtgggcttccactgggtcgcctacgctgccggctccttccttgtcgtatcccacctcccctccccttgccgggacgacaacaacaacgacagttgctccccgttcttccgccaggtcatcgacctccgcgcccccgtgtccgcagttgcttggtgccgccgcgggagcggagaggtcgccgccgctacagacaattctatacacatattccagcctgcgcccgcctcttctccaggttcgtttggatggctcctgagatggtctatcaccgagacgttcgccatcgttgctgtatcctggaccggctgcggcaatggcattgtggcagttggcgcaggtgtttccatgtgggcaagattggagtcctcctggcagctcgcttggaggtctacaccgcaggtgccgcaagcccttgtctccactacctgttccatgcaaggtcctgtcgcgacagtggcagctcttgctccagccgagggcagtgtgcctgttcttgtgtttctgaacgatgccaggagggggctggagcaagctgagcttgtgcatcctcagcctgtttgtatgatccagtggagatcctgttcgttatacccccatgatctgtctgagatcaggagagagatcctcatgacttgctgctttgatgggactgtccggctatggagtaaggatgaggtgtctaggtcgaagaagcagcgtggtttgctaatatcattcagtgtcattgcagtaatagaggtgaacaacactctgaatggagtcctcggagttgatattattgtgagatggtccatggaatctggcagcgttgtgtcaagggacgaacaaggtagattcaagttgttttcaggtgatttgagggagagccaggttggtaaatgtgagtggcttgtaagtcttggccccgggccttgcattagcttttgggctatccattgtttggatgatgtatttccgccaaggtacccacggattactttatggaaacagagcaaacttcagggctggggggattcctatgttaaatcaggtcctctaaaatctatggaacagtcaatttttgttgaggctgtcatctcaagaaggctatgctctggtccacctgcaacatgttttttgcttcatttgctggtggatgattcgtttgcttggtcaaccgtatccaccaaactgttagctgattctgggaaccatgctttaagtgattctgctaaaaatatcttgtgttgtttgactaaacctgtcaaacaagatggacataagggtagcatcagacaagtgtctgtccatccatatagctgcgaaatagagttagctgtctccatggattcaaacagaatgatatttttctggtctctgtcaactttctcaactctcataccgacaatgcatgcacctatgtatcctctatggaagctgttgtgcaaatttgatttgcgtaacatttctgaagatttcgagtactcatgtttgtgttgggcaccttctgttactcgtgataatagatttcttgttcttggatgggaaagtggagtcgattgtttcgtagttagaattcagaaagaagaggttctttcatgccagaagattttcacaatccccttccttgcagaaagcaatacagaagggccacctgacagcattcatacgataccattagcttctaaatgcagcagctctctttccaccacaaaccaaggggcacatgcatgcttcagcaatgaaatgttttcagcagtggtttatgaaggttcttcagtctttccttctggcctggagggagaatataccacgtgcatttctgtaatgccgctgaataatactgtactgcctatacaacaacatgacccttacagaactgttccaggctatcatattgctactggttgctctgatggcactgtaaaactttggaagatgacttgtgcagaggactctttgcagactaagaaagaaagacacatctgggagctagtaggcatgtttggtgctcatcaaggaccaattgacatagtttcattgtcaggctgtggtagagttattactgttggcagaaatttgaagaaaaatagcacctccattcatatctgggaagcaacaaaaatcaggggagacgggaattttctgctaggagatacactaatgttgcaagaccatattgttggtttagatggactatccttaggtgatggacgatttctacttgcagtttatctagctaatgagttacgtatatattctcataagcacccgtccttccagaatgtactacacactaagaattcaaaagaagagcatctttggagctgtattgtattatcccattctcatcatgatattgttggctttctttggggaccaaaggcaactgttgtgcttgttcatgagaaccatctttcactcttcagttcatggctagtaactggagataatgagtacatgacccagatacattcttgtcctgtagttcatgagatgttgccatgtactaacaattttaacgaagctacttttggtaaactcaagttaccagaaaatttcaacagtggaaacattgatagcaataatgtcctgctaacagaccaacatagccactattctcatggtttatggagcttgctgcacatagctcatagattgagtggaccgttggcatcatatcacccaagagcacttatccagtatctttattcaggttctgggttgctgtgcagttcgaacaattccatgctcttagaagatctgcagattcatccagtaatgaagggtgccgtgttgattctgcttccatagcctgggccttccaatctgattgtcaggatgatctacttaattctgtgcttcctgcagagccaacctggccagagatgcgaaagcttggtataggattatggtatacaaatgtgtcccaactaaggacaaggatggagaagttggcaaggttgcaatatcttaaaagcaaggatcccaaggattgtgctttgctctacatagcattgaacagaataaaagtgttggttggtcttttcaagattagtagagatgaaaaggataaacgtctatatgagtttctgtccagaaacttccaggaagaaaggcacaaggctgctgctctaaaaaatgcttatgtactaatgggaaggcaccaatgggagcttgctatagcttttttcctccttggtgatgatacttcatcagcagtgaatgtttgtgcaaagaaccttcaagatgaacagcttgccattgtaatttgtcggcttattgaaggatctggagggcctctggagcgtaatctcatttctaatgtgctacttccagatgcagttgagagaggagataactggctgtcaagcctgcttgaggtgtgtcatatacgtggcttttgtctaattgcctttctatttttttatgttgagaatcaatataaattatcgtgtttccagagttacaatccttcaacttaactttatctcatctgaatcctcagtggatgttaggaaattattgccagtccgtcaatagaatatttggttgccatccaaagttgcttattgatcaaaatgtgcttgcagacccagaattgggtcattattgtgcaattctctcagcaaaaagtagtttcagaaactctgttggtgaagctgtatctgcaaagttatctaagctttcatttgcagtggctgcatgtgccttgaataagtgcggactacctgtaagtttaccctgtgctggctaacttcttttcacctgtccaccctttgtatctgcatattttgtatctattattttgcattattctaattgttgaattttttcccactcattagcttgaagcactagaatgcttgtctactaactcgagcatagatggcaaggatagcataatcgcacatggtgatggagaccacaagattttttatggaatactgagccctgtctctgcttctaagaattggctgtcttcatctgtcattagtggcattgagtccaaccttaaactaactatggcttcaaaatatctatctagccttctgagaaagcactcactctgttcacaattgaacgcaccattatctgaagaaaaggtccttaatgagtacaacaatcatcaaattgaaaaactgacgtgtgatattacaacagtaatctcaatatttgataaaaggttctccctcaaatttgctgatatagctgagaagatcctaatcttttgtagccatgatggtttattgtttctagcgtatgttttgttatggggtactaggtcaccagatgttgcaactgataattatattcttgaatgtcaccctctctgcccaattgattatctgttattgttttcattcaaagagagctgcaagttttttagtcgatatgttgtcctctcctccatgtgttctgttctgaatatggaggacaccaattctactgcatgggcacttaaagagagacataagtacattgtaataagtttgtcaaattacctgaatgtcagcaggttacttcttaaacatgacaaaagtggaaattatattctggatgacaggtcagctatgctggcagttatggatctgtttgagtacattatagagttttctttttcttggttgtattatgacataaaatcattacttatcatgataaatccagtcctagctacttctgttaatggggattcctttcaagtactattagatcaactgatgcatgctatatgccacaaaaatcatgatatatcatcaagtacaggaggaatgccccatgctgcattgagtaaaacacaactgaaaaagagtgtgaattcaaatcttttagcagatgagaagtggcatttgataggcgcttctgtgtgggttcggttgatatctgtgcttgaacatcgtctaagggaattctttgagaaagagggacttgaacatgaagctggtgttagtggttcagaattcaggggtcttatcacttctgttgctgcaaagtttgttatggattccattcattttgtgtcatcttcattagtaccactgcatgcatcgttcttgaggaagaatttaccgatgaattcaagttcaagtttgctcttctggttagagtccaagttgcctcagcaactcccagtcagtgatagctatgatcacctctcgaggatttcacagctttcaaacagtgagaatatggaggcattgtttaatattttgtgggaaatatctgttaatcctgtggatgtttgtaatgcctttgtgagtgaaggagttaattgtttttccttaagcaacacgaatgtcactagatcttggaaggacataagatgtcctgtggttgagtgtgataaaattattactgaaagaagtggagaggaacatgaacacagacttggctccaagagattgggacagggattcgctgaaaaagcctcttataatggtgaagtgttgtatgaaactaaaaggagggagttgatcatacaaaaagagtttcagagcccaagggaaattctaaggagaagcggggagcttcttgaggcggtatgtcttaactctgtcaatgagaaacaagctgctattgctactaatcgaaagggccttgttttcttcaattggagtgacaagcagcataacaagagtttttcagagtacgtctggtcaggatctgattggccattagatggctgggctggctgtcagtctacacctactccaacttctatctctcctggtgttgatcttggtcggaaaaaagggtcacaacttggttcagttggagcaactacaggtttgagttctttagcaaagccaggaagagatctaactggtggtggagcatttggaattccaggctatgctggtattggggcctctgggtttgggtggggcgaacctgaagaatttgaggatttcattgatcctccagcaacacttgagaacatacattcaagagcattatcccgccatccctcattaccattgtttcttgttggttcaagcaatacacatgtgtatctgtgggagtttggtaaagctagtgctatggctacatatggtgttctacctgctgctaatattccaccgccttatgcactggcctccatatcatctgttcaatttgactgttatggacagcggtttgccactgctgcattagatggtaccatttgtacatggcaagttgaggtgggtggaagaagcaatgtctatcctacagagtcatctatatgctttgacagccacgcctcggatgttgcctatgtgtctgcaagtagatcagttattgcttctgctggatatagttcaaatggttcaaatgttgttatatgggacacactgtctccaccagctacatctcaaacatctatcatgtgtcatgaaggaggagctcggtctatttctgtgtttgatagtgatagaggctatgggtctatctcaccgcttgttgtaactggtgggaaaaatggagatatagctttgcatgattgccgcttcctttctactggaaagtccaagcatcatagagttaccactgagcatggtgtcgaggcatcttccatgcatgacatcaaatctagtacttttggtggtactgacagtgggatggtctggcatataccaaaggctcatctaggtagtgtcacaaaggtaacgaccatcccaaataccagcttgttcttaaccggaagcaaagatggagatgtgaaactttgggatgctaaaaactcccagctagtctttcactggacaaagatgcatgaacggcacaccttttttcaaccaacctccaggggctttggcggtgttgttagagctgctgtaacagatctccaggtgttgcctaatggtttcgtttcatgtggaggtgatggttctgtgaagcttgttcagataaaagatgatctcgctgcagcatatcagcgttaaaacaagcaaagagggaagaagacatgctagaaaatgcgatggatgcagttggtcacttgatatcattctattttgctttgctcattatacttttgagatgctttactcctttcaggggtggtatagcaaggaggaagctatgatttaagagcactagagcagacatctaggcaatttgacatcagcatttatacgtcgagtttttatacgagcctggtttgtggctagtcaaactgccctcagtggtttttttgaggcctgaattttcgcactttggacagggcaatgcggaccataattttttgtacatctgtacagtcaaatatcttgttttgttggccaggatgttgatggagggtgtaaagttgtaagctagaagtatggagataccaagctacaatacctttttgttacttaatacaaaagtgctgggtttagggttaatgtacaatggcagagcaaatggaccaaacaaatattgtatttggtacgggagtatgtatgcggtttgtcaaggggaccgcagtagttcatcattcaaaacaatattttgcattattttgtactgtagatttcactgtttctatagtgaagtttgaatatgagaatgtagatgagtaaattgctagagatagtcttagtgtgatcttttaatatcctgaaacctaaggtccaatcgaac

SEQ ID NO: 73677 - DNA, 7377 bp, Zea Mays
atgggggagcgagacgcgctcccgccgctgccgctcgccctcggtccgccgcatctaatcccgccggcgcccacccgcgacccgcgcgccatcgccttcctccctgacctcgtgggcttccactgggtcgcctacgctgccggctccttccttgtcgtatcccacctcccctccccttgccgggacgacaacaacaacgacagttgctccccgttcttccgccaggtcatcgacctccgcgcccccgtgtccgcagttgcttggtgccgccgcgggagcggagaggtcgccgccgctacagacaattctatacacatattccagcctgcgcccgcctcttctccaggttcgtttggatggctcctgagatggtctatcaccgagacgttcgccatcgttgctgtatcctggaccggctgcggcaatggcattgtggcagttggcgcaggtgtttccatgtgggcaagattggagtcctcctggcagctcgcttggaggtctacaccgcaggtgccgcaagcccttgtctccactacctgttccatgcaaggtcctgtcgcgacagtggcagctcttgctccagccgagggcagtgtgcctgttcttgtgtttctgaacgatgccaggagggggctggagcaagctgagcttgtgcatcctcagcctgtttgtatgatccagtggagatcctgttcgttatacccccatgatctgtctgagatcaggagagagatcctcatgacttgctgctttgatgggactgtccggctatggagtaaggatgaggtgtctaggtcgaagaagcagcgtggtttgctaatatcattcagtgtcattgcagtaatagaggtgaacaacactctgaatggagtcctcggagttgatattattgtgagatggtccatggaatctggcagcgttgtgtcaagggacgaacaaggtagattcaagttgttttcaggtgatttgagggagagccaggttggtaaatgtgagtggcttgtaagtcttggccccgggccttgcattagcttttgggctatccattgtttggatgatgtatttccgccaaggtacccacggattactttatggaaacagagcaaacttcagggctggggggattcctatgttaaatcaggtcctctaaaatctatggaacagtcaatttttgttgaggctgtcatctcaagaaggctatgctctggtccacctgcaacatgttttttgcttcatttgctggtggatgattcgtttgcttggtcaaccgtatccaccaaactgttagctgattctgggaaccatgctttaagtgattctgctaaaaatatcttgtgttgtttgactaaacctgtcaaacaagatggacataagggtagcatcagacaagtgtctgtccatccatatagctgcgaaatagagttagctgtctccatggattcaaacagaatgatatttttctggtctctgtcaactttctcaactctcataccgacaatgcatgcacctatgtatcctctatggaagctgttgtgcaaatttgatttgcgtaacatttctgaagatttcgagtactcatgtttgtgttgggcaccttctgttactcgtgataatagatttcttgttcttggatgggaaagtggagtcgattgtttcgtagttagaattcagaaagaagaggttctttcatgccagaagattttcacaatccccttccttgcagaaagcaatacagaagggccacctgacagcattcatacgataccattagcttctaaatgcagcagctctctttccaccacaaaccaaggggcacatgcatgcttcagcaatgaaatgttttcagcagtggtttatgaaggttcttcagtctttccttctggcctggagggagaatataccacgtgcatttctgtaatgccgctgaataatactgtactgcctatacaacaacatgacccttacagaactgttccaggctatcatattgctactggttgctctgatggcactgtaaaactttggaagatgacttgtgcagaggactctttgcagactaagaaagaaagacacatctgggagctagtaggcatgtttggtgctcatcaaggaccaattgacatagtttcattgtcaggctgtggtagagttattactgttggcagaaatttgaagaaaaatagcacctccattcatatctgggaagcaacaaaaatcaggggagacgggaattttctgctaggagatacactaatgttgcaagaccatattgttggtttagatggactatccttaggtgatggacgatttctacttgcagtttatctagctaatgagttacgtatatattctcataagcacccgtccttccagaatgtactacacactaagaattcaaaagaagagcatctttggagctgtattgtattatcccattctcatcatgatattgttggctttctttggggaccaaaggcaactgttgtgcttgttcatgagaaccatctttcactcttcagttcatggctagtaactggagataatgagtacatgacccagatacattcttgtcctgtagttcatgagatgttgccatgtactaacaattttaacgaagctacttttggtaaactcaagttaccagaaaatttcaacagtggaaacattgatagcaataatgtcctgctaacagaccaacatagccactattctcatggtttatggagcttgctgcacatagctcatagattgagtggaccgttggcatcatatcacccaagagcacttatccagtatctttattcaggtgaatggaaacgtgcggatgctgctctgcaccatcttgttcggtccatgaaagtgagtgaaacttcaaagggcgtgtcaaattacagtacatgccatagtattccagaacttcctttgtctgaatactttgcggcaacagtgtccaacaacatttctaccaaggggtttatgtggggtattaatactacaactagtgcatctgaaaaaccagacattgttgagctccttgacaagagtttcagcaaatatggtataagtgactcagagaaaaatcagatacttgcaatttctgatcttatggctggaatcactgatcagagccattcctctccctacaaaaatcttgacgaagcaggaagaaggttctgggttgctgtgcagttcgaacaattccatgctcttagaagatctgcagattcatccagtaatgaagggtgccgtgttgattctgcttccatagcctgggccttccaatctgattgtcaggatgatctacttaattctgtgcttcctgcagagccaacctggccagagatgcgaaagcttggtataggattatggtatacaaatgtgtcccaactaaggacaaggatggagaagttggcaaggttgcaatatcttaaaagcaaggatcccaaggattgtgctttgctctacatagcattgaacagaataaaagtgttggttggtcttttcaagattagtagagatgaaaaggataaacgtctatatgagtttctgtccagaaacttccaggaagaaaggcacaaggctgctgctctaaaaaatgcttatgtactaatgggaaggcaccaatgggagcttgctatagcttttttcctccttggtgatgatacttcatcagcagtgaatgtttgtgcaaagaaccttcaagatgaacagcttgccattgtaatttgtcggcttattgaaggatctggagggcctctggagcgtaatctcatttctaatgtgctacttccagatgcagttgagagaggagataactggctgtcaagcctgcttgagtggctgcatgtgccttgaataagtgcggactacctcttgaagcactagaatgcttgtctactaactcgagcatagatggcaaggatagcataatcgcacatggtgatggagaccacaagattttttatggaatactgagccctgtctctgcttctaagaattggctgtcttcatctgtcattagtggcattgagtccaaccttaaactaactatggcttcaaaatatctatctagccttctgagaaagcactcactctgttcacaattgaacgcaccattatctgaagaaaaggtccttaatgagtacaacaatcatcaaattgaaaaactgacgtgtgatattacaacagtaatctcaatatttgataaaaggttctccctcaaatttgctgatatagctgagaagatcctaatcttttgtagccatgatggtttattgtttctagcgttacttcttaaacatgacaaaagtggaaattatattctggatgacaggtcagctatgctggcagttatggatctgtttgagtacattatagagttttctttttcttggttgtattatgacataaaatcattacttatcatgataaatccagtcctagctacttctgttaatggggattcctttcaagtactattagatcaactgatgcatgctatatgccacaaaaatcatgatatatcatcaagtacaggaggaatgccccatgctgcattgagtaaaacacaactgaaaaagagtgtgaattcaaatcttttagcagatgagaagtggcatttgataggcgcttctgtgtgggttcggttgatatctgtgcttgaacatcgtctaagggaattctttgagaaagagggacttgaacatgaagctggtgttagtggttcagaattcaggggtcttatcacttctgttgctgcaaagtttgttatggattccattcattttgtgtcatcttcattagtaccactgcatgcatcgttcttgaggaagaatttaccgatgaattcaagttcaagtttgctcttctggttagagtccaagttgcctcagcaactcccagtcagtgatagctatgatcacctctcgaggatttcacagctttcaaacagtgagaatatggaggcattgtttaatattttgtgggaaatatctgttaatcctgtggatgtttgtaatgcctttgtgagtgaaggagttaattgtttttccttaagcaacacgaatgtcactagatcttggaaggacataagatgtcctgtggttgagtgtgataaaattattactgaaagaagtggagaggaacatgaacacagacttggctccaagagattgggacagggattcgctgaaaaagcctcttataatggtgaagtgttgtatgaaactaaaaggagggagttgatcatacaaaaagagtttcagagcccaagggaaattctaaggagaagcggggagcttcttgaggcggtatgtcttaactctgtcaatgagaaacaagctgctattgctactaatcgaaagggccttgttttcttcaattggagtgacaagcagcataacaagagtttttcagagtacgtctggtcaggatctgattggccattagatggctgggctggctgtcagtctacacctactccaacttctatctctcctggtgttgatcttggtcggaaaaaagggtcacaacttggttcagttggagcaactacaggtttgagttctttagcaaagccaggaagagatctaactggtggtggagcatttggaattccaggctatgctggtattggggcctctgggtttgggtggggcgaacctgaagaatttgaggatttcattgatcctccagcaacacttgagaacatacattcaagagcattatcccgccatccctcattaccattgtttcttgttggttcaagcaatacacatgtgtatctgtgggagtttggtaaagctagtgctatggctacatatggtgttctacctgctgctaatattccaccgccttatgcactggcctccatatcatctgttcaatttgactgttatggacagcggtttgccactgctgcattagatggtaccatttgtacatggcaagttgaggtgggtggaagaagcaatgtctatcctacagagtcatctatatgctttgacagccacgcctcggatgttgcctatgtgtctgcaagtagatcagttattgcttctgctggatatagttcaaatggttcaaatgttgttatatgggacacactgtctccaccagctacatctcaaacatctatcatgtgtcatgaaggaggagctcggtctatttctgtgtttgatagtgatagaggctatgggtctatctcaccgcttgttgtaactggtgggaaaaatggagatatagctttgcatgattgccgcttcctttctactggaaagtccaagcatcatagagttaccactgagcatggtgtcgaggcatcttccatgcatgacatcaaatctagtacttttggtggtactgacagtgggatggtctggcatataccaaaggctcatctaggtagtgtcacaaaggtaacgaccatcccaaataccagcttgttcttaaccggaagcaaagatggagatgtgaaactttgggatgctaaaaactcccagctagtctttcactggacaaagatgcatgaacggcacaccttttttcaaccaacctccaggggctttggcggtgttgttagagctgctgtaacagatctccaggtgttgcctaatggtttcgtttcatgtggaggtgatggttctgtgaagcttgttcagataaaagatgatctcgctgcagcatatcagcgttaaaacaagcaaagagggaagaagacatgctagaaaatgcgatggatgcagttggtcacttgatatcattctattttgctttgctcattatacttttgagatgctttactcctttcaggggtggtatagcaaggaggaagctatgatttaagagcactagagcagacatctaggcaatttgacatcagcatttatacgtcgagtttttatacgagcctggtttgtggctagtcaaactgccctcagtggtttttttgaggcctgaattttcgcactttggacagggcaatgcggaccataattttttgtacatctgtacagtcaaatatcttgttttgttggccaggatgttgatggagggtgtaaagttgtaagctagaagtatggagataccaagctacaatacctttttgttacttaatacaaaagtgctgggtttagggttaatgtacaatggcagagcaaatggaccaaacaaatattgtatttggtacgggagtatgtatgcggtttgtcaaggggaccgcagtagttcatcattcaaaacaatattttgcattattttgtactgtagatttcactgtttctatagtgaagtttgaatatgagaatgtagatgagtaaattgctagagatagtcttagtgtgatcttttaatatcctgaaacctaaggtccaatcgaac

SEQ ID NO: 73678 - DNA, 8257 bp, Zea Mays
atgggggagcgagacgcgctcccgccgctgccgctcgccctcggtccgccgcatctaatcccgccggcgcccacccgcgacccgcgcgccatcgccttcctccctgacctcgtgggcttccactgggtcgcctacgctgccggctccttccttgtcgtatcccacctcccctccccttgccgggacgacaacaacaacgacagttgctccccgttcttccgccaggtcatcgacctccgcgcccccgtgtccgcagttgcttggtgccgccgcgggagcggagaggtcgccgccgctacagacaattctatacacatattccagcctgcgcccgcctcttctccaggttcgtttggatggctcctgagatggtctatcaccgagacgttcgccatcgttgctgtatcctggaccggctgcggcaatggcattgtggcagttggcgcaggtgtttccatgtgggcaagattggagtcctcctggcagctcgcttggaggtctacaccgcaggtgccgcaagcccttgtctccactacctgttccatgcaaggtcctgtcgcgacagtggcagctcttgctccagccgagggcagtgtgcctgttcttgtgtttctgaacgatgccaggagggggctggagcaagctgagcttgtgcatcctcagcctgtttgtatgatccagtggagatcctgttcgttatacccccatgatctgtctgagatcaggagagagatcctcatgacttgctgctttgatgggactgtccggctatggagtaaggatgaggtgtctaggtcgaagaagcagcgtggtttgctaatatcattcagtgtcattgcagtaatagaggtgaacaacactctgaatggagtcctcggagttgatattattgtgagatggtccatggaatctggcagcgttgtgtcaagggacgaacaaggtagattcaagttgttttcaggtgatttgagggagagccaggttggtaaatgtgagtggcttgtaagtcttggccccgggccttgcattagcttttgggctatccattgtttggatgatgtatttccgccaaggtacccacggattactttatggaaacagagcaaacttcagggctggggggattcctatgttaaatcaggtcctctaaaatctatggaacagtcaatttttgttgaggctgtcatctcaagaaggctatgctctggtccacctgcaacatgttttttgcttcatttgctggtggatgattcgtttgcttggtcaaccgtatccaccaaactgttagctgattctgggaaccatgctttaagtgattctgctaaaaatatcttgtgttgtttgactaaacctgtcaaacaagatggacataagggtagcatcagacaagtgtctgtccatccatatagctgcgaaatagagttagctgtctccatggattcaaacagaatgatatttttctggtctctgtcaactttctcaactctcataccgacaatgcatgcacctatgtatcctctatggaagctgttgtgcaaatttgatttgcgtaacatttctgaagatttcgagtactcatgtttgtgttgggcaccttctgttactcgtgataatagatttcttgttcttggatgggaaagtggagtcgattgtttcgtagttagaattcagaaagaagaggttctttcatgccagaagattttcacaatccccttccttgcagaaagcaatacagaagggccacctgacagcattcatacgataccattagcttctaaatgcagcaggtgttttgtgaacaacagtttcctagtagtatgtatatggaagaagaccttcaaaggtttctcatggaaagtagtattgcattcagaaaatcaatatgtcaatgggagatgcttgtgtggttttgctcctagctctctttccaccacaaaccaaggggcacatgcatgcttcagcaatgaaatgttttcagcagtggtttatgaaggttcttcagtctttccttctggcctggagggagaatataccacgtgcatttctgtaatgccgctgaataatactgtactgcctatacaacaacatgacccttacagaactgttccaggctatcatattgctactggttgctctgatggcactgtaaaactttggaagatgacttgtgcagaggactctttgcagactaagaaagaaagacacatctgggagctagtaggcatgtttggtgctcatcaaggaccaattgacatagtttcattgtcaggctgtggtagagttattactgttggcagaaatttgaagaaaaatagcacctccattcatatctgggaagcaacaaaaatcaggggagacgggaattttctgctaggagatacactaatgttgcaagaccatattgttggtttagatggactatccttaggtgatggacgatttctacttgcagtttatctagctaatgagttacgtatatattctcataagcacccgtccttccagaatgtactacacactaagaattcaaaagaagagcatctttggagctgtattgtattatcccattctcatcatgatattgttggctttctttggggaccaaaggcaactgttgtgcttgttcatgagaaccatctttcactcttcagttcatggctagtaactggagataatgagtacatgacccagatacattcttgtcctgtagttcatgagatgttgccatgtactaacaattttaacgaagctacttttggtaaactcaagttaccagaaaatttcaacagtggaaacattgatagcaataatgtcctgctaacagaccaacatagccactattctcatggtttatggagcttgctgcacatagctcatagattgagtggaccgttggcatcatatcacccaagagcacttatccagtatctttattcagctatagtcaaggtggttctaactgcttctaccatttatcatgctattgccctcgagcttcctaaatgggtaatcaaggtcactgataaatggcgcaaaccctttggaaagttcaagagagtgccagtagatggagttggggggtggggtggggggctaggtgaatggaaacgtgcggatgctgctctgcaccatcttgttcggtccatgaaagtgagtgaaacttcaaagggcgtgtcaaattacagtacatgccatagtattccagaacttcctttgtctgaatactttgcggcaacagtgtccaacaacatttctaccaaggggtttatgtggggtgagaatagaagtaacacaacttttaatttgttgtcaccttcaacttcatttctttacgaggatggcaatttaggtattaatactacaactagtgcatctgaaaaaccagacattgttgagctccttgacaagagtttcagcaaatatggtataagtgactcagagaaaaatcagatacttgcaatttctgatcttatggctggaatcactgatcagagccattcctctccctacaaaaatcttgacgaagcaggaagaaggttctgggttgctgtgcagttcgaacaattccatgctcttagaagatctgcagattcatccagtaatgaagggtgccgtgttgattctgcttccatagcctgggccttccaatctgattgtcaggatgatctacttaattctgtgcttcctgcagagccaacctggccagagatgcgaaagcttggtataggattatggtatacaaatgtgtcccaactaaggacaaggatggagaagttggcaaggttgcaatatcttaaaagcaaggatcccaaggattgtgctttgctctacatagcattgaacagaataaaagtgttggttggtcttttcaagattagtagagatgaaaaggataaacgtctatatgagtttctgtccagaaacttccaggaagaaaggcacaaggctgctgctctaaaaaatgcttatgtactaatgggaaggcaccaatgggagcttgctatagcttttttcctccttggtgatgatacttcatcagcagtgaatgtttgtgcaaagaaccttcaagatgaacagcttgccattgtaatttgtcggcttattgaaggatctggagggcctctggagcgtaatctcatttctaatgtgctacttccagatgcagttgagagaggagataactggctgtcaagcctgcttgagtggatgttaggaaattattgccagtccgtcaatagaatatttggttgccatccaaagttgcttattgatcaaaatgtgcttgcagacccagaattgggtcattattgtgcaattctctcagcaaaaagtagtttcagaaactctgttggtgaagctgtatctgcaaagttatctaagctttcatttgcagtggctgcatgtgccttgaataagtgcggactacctcttgaagcactagaatgcttgtctactaactcgagcatagatggcaaggatagcataatcgcacatggtgatggagaccacaagattttttatggaatactgagccctgtctctgcttctaagaattggctgtcttcatctgtcattagtggcattgagtccaaccttaaactaactatggcttcaaaatatctatctagccttctgagaaagcactcactctgttcacaattgaacgcaccattatctgaagaaaaggtccttaatgagtacaacaatcatcaaattgaaaaactgacgtgtgatattacaacagtaatctcaatatttgataaaaggttctccctcaaatttgctgatatagctgagaagatcctaatcttttgtagccatgatggtttattgtttctagcgtatgttttgttatggggtactaggtcaccagatgttgcaactgataattatattcttgaatgtcaccctctctgcccaattgattatctgttattgttttcattcaaagagagctgcaagttttttagtcgatatgttgtcctctcctccatgtgttctgttctgaatatggaggacaccaattctactgcatgggcacttaaagagagacataagtacattgtaataagtttgtcaaattacctgaatgtcagcaggttacttcttaaacatgacaaaagtggaaattatattctggatgacaggtcagctatgctggcagttatggatctgtttgagtacattatagagttttctttttcttggttgtattatgacataaaatcattacttatcatgataaatccagtcctagctacttctgttaatggggattcctttcaagtactattagatcaactgatgcatgctatatgccacaaaaatcatgatatatcatcaagtacaggaggaatgccccatgctgcattgagtaaaacacaactgaaaaagagtgtgaattcaaatcttttagcagatgagaagtggcatttgataggcgcttctgtgtgggttcggttgatatctgtgcttgaacatcgtctaagggaattctttgagaaagagggacttgaacatgaagctggtgttagtggttcagaattcaggggtcttatcacttctgttgctgcaaagtttgttatggattccattcattttgtgtcatcttcattagtaccactgcatgcatcgttcttgaggaagaatttaccgatgaattcaagttcaagtttgctcttctggttagagtccaagttgcctcagcaactcccagtcagtgatagctatgatcacctctcgaggatttcacagctttcaaacagtgagaatatggaggcattgtttaatattttgtgggaaatatctgttaatcctgtggatgtttgtaatgcctttgtgagtgaaggagttaattgtttttccttaagcaacacgaatgtcactagatcttggaaggacataagatgtcctgtggttgagtgtgataaaattattactgaaagaagtggagaggaacatgaacacagacttggctccaagagattgggacagggattcgctgaaaaagcctcttataatggtgaagtgttgtatgaaactaaaaggagggagttgatcatacaaaaagagtttcagagcccaagggaaattctaaggagaagcggggagcttcttgaggcggtatgtcttaactctgtcaatgagaaacaagctgctattgctactaatcgaaagggccttgttttcttcaattggagtgacaagcagcataacaagagtttttcagagtacgtctggtcaggatctgattggccattagatggctgggctggctgtcagtctacacctactccaacttctatctctcctggtgttgatcttggtcggaaaaaagggtcacaacttggttcagttggagcaactacaggtttgagttctttagcaaagccaggaagagatctaactggtggtggagcatttggaattccaggctatgctggtattggggcctctgggtttgggtggggcgaacctgaagaatttgaggatttcattgatcctccagcaacacttgagaacatacattcaagagcattatcccgccatccctcattaccattgtttcttgttggttcaagcaatacacatgtgtatctgtgggagtttggtaaagctagtgctatggctacatatggtgttctacctgctgctaatattccaccgccttatgcactggcctccatatcatctgttcaatttgactgttatggacagcggtttgccactgctgcattagatggtaccatttgtacatggcaagttgaggtgggtggaagaagcaatgtctatcctacagagtcatctatatgctttgacagccacgcctcggatgttgcctatgtgtctgcaagtagatcagttattgcttctgctggatatagttcaaatggttcaaatgttgttatatgggacacactgtctccaccagctacatctcaaacatctatcatgtgtcatgaaggaggagctcggtctatttctgtgtttgatagtgatagaggctatgggtctatctcaccgcttgttgtaactggtgggaaaaatggagatatagctttgcatgattgccgcttcctttctactggaaagtccaagcatcatagagttaccactgagcatggtgtcgaggcatcttccatgcatgacatcaaatctagtacttttggtggtactgacagtgggatggtctggcatataccaaaggctcatctaggtagtgtcacaaaggtaacgaccatcccaaataccagcttgttcttaaccggaagcaaagatggagatgtgaaactttgggatgctaaaaactcccagctagtctttcactggacaaagatgcatgaacggcacaccttttttcaaccaacctccaggggctttggcggtgttgttagagtatgtagtactgtaaagactataaaatgtttaatgacttcgttcataaattttgttcatgttatggctgctgtaacagatctccaggtgttgcctaatggtttcgtttcatgtggaggtgatggttctgtgaagcttgttcagataaaagatgatctcgctgcagcatatcagcgttaaaacaagcaaagagggaagaagacatgctagaaaatgcgatggatgcagttggtcacttgatatcattctattttgctttgctcattatacttttgagatgctttactcctttcaggggtggtatagcaaggaggaagctatgatttaagagcactagagcagacatctaggcaatttgacatcagcatttatacgtcgagtttttatacgagcctggtttgtggctagtcaaactgccctcagtggtttttttgaggcctgaattttcgcactttggacagggcaatgcggaccataattttttgtacatctgtacagtcaaatatcttgttttgttggccaggatgttgatggagggtgtaaagttgtaagctagaagtatggagataccaagctacaatacctttttgttacttaatacaaaagtgctgggtttagggttaatgtacaatggcagagcaaatggaccaaacaaatattgtatttggtacgggagtatgtatgcggtttgtcaaggggaccgcagtagttcatcattcaaaacaatattttgcattattttgtactgtagatttcactgtttctatagtgaagtttgaatatgagaatgtagatgagtaaattgctagagatagtcttagtgtgatcttttaatatcctgaaacctaaggtccaatcgaac

SEQ ID NO: 73679 - DNA, 7836 bp, Zea Mays
atgggggagcgagacgcgctcccgccgctgccgctcgccctcggtccgccgcatctaatcccgccggcgcccacccgcgacccgcgcgccatcgccttcctccctgacctcgtgggcttccactgggtcgcctacgctgccggctccttccttgtcgtatcccacctcccctccccttgccgggacgacaacaacaacgacagttgctccccgttcttccgccaggtcatcgacctccgcgcccccgtgtccgcagttgcttggtgccgccgcgggagcggagaggtcgccgccgctacagacaattctatacacatattccagcctgcgcccgcctcttctccaggttcgtttggatggctcctgagatggtctatcaccgagacgttcgccatcgttgctgtatcctggaccggctgcggcaatggcattgtggcagttggcgcaggtgtttccatgtgggcaagattggagtcctcctggcagctcgcttggaggtctacaccgcaggtgccgcaagcccttgtctccactacctgttccatgcaaggtcctgtcgcgacagtggcagctcttgctccagccgagggcagtgtgcctgttcttgtgtttctgaacgatgccaggagggggctggagcaagctgagcttgtgcatcctcagcctgtttgtatgatccagtggagatcctgttcgttatacccccatgatctgtctgagatcaggagagagatcctcatgacttgctgctttgatgggactgtccggctatggagtaaggatgaggtgtctaggtcgaagaagcagcgtggtttgctaatatcattcagtgtcattgcagtaatagaggtgaacaacactctgaatggagtcctcggagttgatattattgtgagatggtccatggaatctggcagcgttgtgtcaagggacgaacaaggtagattcaagttgttttcaggtgatttgagggagagccaggttggtaaatgtgagtggcttgtaagtcttggccccgggccttgcattagcttttgggctatccattgtttggatgatgtatttccgccaaggtacccacggattactttatggaaacagagcaaacttcagggctggggggattcctatgttaaatcaggtcctctaaaatctatggaacagtcaatttttgttgaggctgtcatctcaagaaggctatgctctggtccacctgcaacatgttttttgcttcatttgctggtggatgattcgtttgcttggtcaaccgtatccaccaaactgttagctgattctgggaaccatgctttaagtgattctgctaaaaatatcttgtgttgtttgactaaacctgtcaaacaagatggacataagggtagcatcagacaagtgtctgtccatccatatagctgcgaaatagagttagctgtctccatggattcaaacagaatgatatttttctggtctctgtcaactttctcaactctcataccgacaatgcatgcacctatgtatcctctatggaagctgttgtgcaaatttgatttgcgtaacatttctgaagatttcgagtactcatgtttgtgttgggcaccttctgttactcgtgataatagatttcttgttcttggatgggaaagtggagtcgattgtttcgtagttagaattcagaaagaagaggttctttcatgccagaagattttcacaatccccttccttgcagaaagcaatacagaagggccacctgacagcattcatacgataccattagcttctaaatgcagcagctctctttccaccacaaaccaaggggcacatgcatgcttcagcaatgaaatgttttcagcagtggtttatgaaggttcttcagtctttccttctggcctggagggagaatataccacgtgcatttctgtaatgccgctgaataatactgtactgcctatacaacaacatgacccttacagaactgttccaggctatcatattgctactggttgctctgatggcactgtaaaactttggaagatgacttgtgcagaggactctttgcagactaagaaagaaagacacatctgggagctagtaggcatgtttggtgctcatcaaggaccaattgacatagtttcattgtcaggctgtggtagagttattactgttggcagaaatttgaagaaaaatagcacctccattcatatctgggaagcaacaaaaatcaggggagacgggaattttctgctaggagatacactaatgttgcaagaccatattgttggtttagatggactatccttaggtgatggacgatttctacttgcagtttatctagctaatgagttacgtatatattctcataagcacccgtccttccagaatgtactacacactaagaattcaaaagaagagcatctttggagctgtattgtattatcccattctcatcatgatattgttggctttctttggggaccaaaggcaactgttgtgcttgttcatgagaaccatctttcactcttcagttcatggctagtaactggagataatgagtacatgacccagatacattcttgtcctgtagttcatgagatgttgccatgtactaacaattttaacgaagctacttttggtaaactcaagttaccagaaaatttcaacagtggaaacattgatagcaataatgtcctgctaacagaccaacatagccactattctcatggtttatggagcttgctgcacatagctcatagattgagtggaccgttggcatcatatcacccaagagcacttatccagtatctttattcaggtgaatggaaacgtgcggatgctgctctgcaccatcttgttcggtccatgaaagtgagtgaaacttcaaagggcgtgtcaaattacagtacatgccatagtattccagaacttcctttgtctgaatactttgcggcaacagtgtccaacaacatttctaccaaggggtttatgtggggtattaatactacaactagtgcatctgaaaaaccagacattgttgagctccttgacaagagtttcagcaaatatggtataagtgactcagagaaaaatcagatacttgcaatttctgatcttatggctggaatcactgatcagagccattcctctccctacaaaaatcttgacgaagcaggaagaagttcgaacaattccatgctcttagaagatctgcagattcatccagtaatgaagggtgccgtgttgattctgcttccatagcctgggccttccaatctgattgtcaggatgatctacttaattctgtgcttcctgcagagccaacctggccagagatgcgaaagcttggtataggattatggtatacaaatgtgtcccaactaaggacaaggatggagaagttggcaaggttgcaatatcttaaaagcaaggatcccaaggattgtgctttgctctacatagcattgaacagaataaaagtgttggttggtcttttcaagattagtagagatgaaaaggataaacgtctatatgagtttctgtccagaaacttccaggaagaaaggcacaaggctgctgctctaaaaaatgcttatgtactaatgggaaggcaccaatgggagcttgctatagcttttttcctccttggtgatgatacttcatcagcagtgaatgtttgtgcaaagaaccttcaagatgaacagcttgccattgtaatttgtcggcttattgaaggatctggagggcctctggagcgtaatctcatttctaatgtgctacttccagatgcagttgagagaggagataactggctgtcaagcctgcttgagacccagaattgggtcattattgtgcaattctctcagcaaaaagtagtttcagaaactctgttggtgaagctgtatctgcaaagttatctaagctttcatttgcagtggctgcatgtgccttgaataagtgcggactacctgtaagtttaccctgtgctggctaacttcttttcacctgtccaccctttgtatctgcatattttgtatctattattttgcattattctaattgttgaattttttcccactcattagcttgaagcactagaatgcttgtctactaactcgagcatagatggcaaggatagcataatcgcacatggtgatggagaccacaagattttttatggaatactgagccctgtctctgcttctaagaattggctgtcttcatctgtcattagtggcattgagtccaaccttaaactaactatggcttcaaaatatctatctagccttctgagaaagcactcactctgttcacaattgaacgcaccattatctgaagaaaaggtccttaatgagtacaacaatcatcaaattgaaaaactgacgtgtgatattacaacagtaatctcaatatttgataaaaggttctccctcaaatttgctgatatagctgagaagatcctaatcttttgtagccatgatggtttattgtttctagcgtatgttttgttatggggtactaggtcaccagatgttgcaactgataattatattcttgaatgtcaccctctctgcccaattgattatctgttattgttttcattcaaagagagctgcaagttttttagtcgatatgttgtcctctcctccatgtgttctgttctgaatatggaggacaccaattctactgcatgggcacttaaagagagacataagtacattgtaataagtttgtcaaattacctgaatgtcagcaggttacttcttaaacatgacaaaagtggaaattatattctggatgacaggtcagctatgctggcagttatggatctgtttgagtacattatagagttttctttttcttggttgtattatgacataaaatcattacttatcatgataaatccagtcctagctacttctgttaatggggattcctttcaagtactattagatcaactgatgcatgctatatgccacaaaaatcatgatatatcatcaagtacaggaggaatgccccatgctgcattgagtaaaacacaactgaaaaagagtgtgaattcaaatcttttagcagatgagaagtggcatttgataggcgcttctgtgtgggttcggttgatatctgtgcttgaacatcgtctaagggaattctttgagaaagagggacttgaacatgaagctggtgttagtggttcagaattcaggggtcttatcacttctgttgctgcaaagtttgttatggattccattcattttgtgtcatcttcattagtaccactgcatgcatcgttcttgaggaagaatttaccgatgaattcaagttcaagtttgctcttctggttagagtccaagttgcctcagcaactcccagtcagtgatagctatgatcacctctcgaggatttcacagctttcaaacagtgagaatatggaggcattgtttaatattttgtgggaaatatctgttaatcctgtggatgtttgtaatgcctttgtgagtgaaggagttaattgtttttccttaagcaacacgaatgtcactagatcttggaaggacataagatgtcctgtggttgagtgtgataaaattattactgaaagaagtggagaggaacatgaacacagacttggctccaagagattgggacagggattcgctgaaaaagcctcttataatggtgaagtgttgtatgaaactaaaaggagggagttgatcatacaaaaagagtttcagagcccaagggaaattctaaggagaagcggggagcttcttgaggcggtatgtcttaactctgtcaatgagaaacaagctgctattgctactaatcgaaagggccttgttttcttcaattggagtgacaagcagcataacaagagtttttcagagtacgtctggtcaggatctgattggccattagatggctgggctggctgtcagtctacacctactccaacttctatctctcctggtgttgatcttggtcggaaaaaagggtcacaacttggttcagttggagcaactacaggtttgagttctttagcaaagccaggaagagatctaactggtggtggagcatttggaattccaggctatgctggtattggggcctctgggtttgggtggggcgaacctgaagaatttgaggatttcattgatcctccagcaacacttgagaacatacattcaagagcattatcccgccatccctcattaccattgtttcttgttggttcaagcaatacacatgtgtatctgtgggagtttggtaaagctagtgctatggctacatatggtgttctacctgctgctaatattccaccgccttatgcactggcctccatatcatctgttcaatttgactgttatggacagcggtttgccactgctgcattagatggtaccatttgtacatggcaagttgaggtgggtggaagaagcaatgtctatcctacagagtcatctatatgctttgacagccacgcctcggatgttgcctatgtgtctgcaagtagatcagttattgcttctgctggatatagttcaaatggttcaaatgttgttatatgggacacactgtctccaccagctacatctcaaacatctatcatgtgtcatgaaggaggagctcggtctatttctgtgtttgatagtgatagaggctatgggtctatctcaccgcttgttgtaactggtgggaaaaatggagatatagctttgcatgattgccgcttcctttctactggaaagtccaagcatcatagagttaccactgagcatggtgtcgaggcatcttccatgcatgacatcaaatctagtacttttggtggtactgacagtgggatggtctggcatataccaaaggctcatctaggtagtgtcacaaaggtaacgaccatcccaaataccagcttgttcttaaccggaagcaaagatggagatgtgaaactttgggatgctaaaaactcccagctagtctttcactggacaaagatgcatgaacggcacaccttttttcaaccaacctccaggggctttggcggtgttgttagagctgctgtaacagatctccaggtgttgcctaatggtttcgtttcatgtggaggtgatggttctgtgaagcttgttcagataaaagatgatctcgctgcagcatatcagcgttaaaacaagcaaagagggaagaagacatgctagaaaatgcgatggatgcagttggtcacttgatatcattctattttgctttgctcattatacttttgagatgctttactcctttcaggggtggtatagcaaggaggaagctatgatttaagagcactagagcagacatctaggcaatttgacatcagcatttatacgtcgagtttttatacgagcctggtttgtggctagtcaaactgccctcagtggtttttttgaggcctgaattttcgcactttggacagggcaatgcggaccataattttttgtacatctgtacagtcaaatatcttgttttgttggccaggatgttgatggagggtgtaaagttgtaagctagaagtatggagataccaagctacaatacctttttgttacttaatacaaaagtgctgggtttagggttaatgtacaatggcagagcaaatggaccaaacaaatattgtatttggtacgggagtatgtatgcggtttgtcaaggggaccgcagtagttcatcattcaaaacaatattttgcattattttgtactgtagatttcactgtttctatagtgaagtttgaatatgagaatgtagatgagtaaattgctagagatagtcttagtgtgatcttttaatatcctgaaacctaaggtccaatcgaac

SEQ ID NO: 73680 - DNA, 2090 bp, Zea Mays
catccacgtctcatcgcccgggcgcgacgcggtttggccaccttccctgaggcttccctccgctcaaatccacaatcagcaaccactacgggagcgagacgagacgcaccaccaaccgaagcggcgataacacctccccccttggccctcggcacacgcgtcggcaccttgcacacttgcacttggttggagctcctctaccttttccatcgctctgctctgctccgcgtctccgtccgccccggcaaaagcaaaacacagccatggaggggtacgaccgcgagttctggcagttcagcgaccagctgcgcctgcagacgaccgccttctccggcctctccctcggcgactccatctggtctccggccaccggcgccggcgggcggcgcaacaacaacaccgacctactcgcggcctccgcgtcggcagccgacgccggcaagcacaacggcgtgggcctcagcctgaatgatggagggcccggactcattggctccgggaagctcgccttcggcggcagcaaggccggccgctacaacaacctcccatccgagaaggccgcgcccgtctacaaccacagcggcgccacgatcaacggcggctacgccaggagcgacaacgccggcctggcggcgttcaacaagatggggagctacttccacaacagtaacggcaacggcggcggcggcggggaggtgaagagctacttcaacaagtccgccggacgggcggcgagcaacaacagccacgggcacgccggcggcggcaagaagggcggcggcgggaagcacggcaagaacgagggcaacggcggcgcggtggcggccacggacaagcggttcaagacgctgccggcgtcggaggcgctgccgcggggcgaggccatcggcggctacatcttcgtctgcaacaacgacaccatggacgagaacctcaggagggagctgttcgggctgccgtcgaggtacagggactcggtgcgggccatccgcccggggctgcccctcttcctctacaactactccacccaccagctgcacggcatcttcaaggccgccagcttcggcgggaccaacatcgacccgacggcgtgggaggacaagaagtgccccggcgagtcgcgcttccctgcacaggtgcgagtggcaacgcggaagatctacgatccactggaggaggacgccttccgccccatccttcaccactacgacgggcccaagtttcggctcgagctctccgtcgccgagaccctcgccctcctcgacatcttcgctgacaaggatgacgcctgagccttccttgccgccccctcgccgccagtgccaatccattaatgcacagacaataaaatggctggagggacagaccaaactatccacctttgtttgatatgataaagggctatgtatgaggcacgcgtcccattatttttgtttttattataagactagacctcgttccgtaagatacatgtatcaatattatataaaaacaaaccatcagttcttgtgctgcactacagatgttgtgttggattggaattcgtccctcgcgacaatacctcggttataatactgcgtctgaatgctccagattcgacagcatcagctacctgccacttccacaccatgacttgagcttcgaccgattctggttctagaataaaactcaatcaactcgctggtagctgaactgcacgacacgacaaagcatgctgcacaaacggttggcaccagataaatcaaagtcagctgcggcccataaccttccattcacctaaaacatatttgtacaaaactgcggaacgaagctccagaggagcaatattaacaaacagaaccacaacggagaaaaagggtgggggtgggggtggggggaatctcatctctcctcaactcaaatacatccgacaatctatctccggtcaagaaaacattcataccacatcaaattttcttcccaaaggttttctttgctttccttctccagcttcaaccaaacatattgtgcggagcagggtgagccatgagcgagctgtggtgatggaccatataccacctcccattacagagctcgtacacgttcgtcac

SEQ ID NO: 73681 - DNA, 992 bp, Zea Mays
gtccgtgcgaaacaaccaatctgcctgcctctgcctgggtgcgagtggcaacgcggaagatctacgatccactggaggaggacgccttccgccccatccttcaccactacgacgggcccaagtttcggctcgagctctccgtcgccgagaccctcgccctcctcgacatcttcgctgacaaggatgacgcctgagccttccttgccgccccctcgccgccagtgccaatccattaatgcacagacaataaaatggctggagggacagaccaaactatccacctttgtttgatatgataaagggctatgtatgaggcacgcgtcccattatttttgtttttattataagactagacctcgttccgtaagatacatgtatcaatattatataaaaacaaaccatcagttcttgtgctgcactacagatgttgtgttggattggaattcgtccctcgcgacaatacctcggttataatactgcgtctgaatgctccagattcgacagcatcagctacctgccacttccacaccatgacttgagcttcgaccgattctggttctagaataaaactcaatcaactcgctggtagctgaactgcacgacacgacaaagcatgctgcacaaacggttggcaccagataaatcaaagtcagctgcggcccataaccttccattcacctaaaacatatttgtacaaaactgcggaacgaagctccagaggagcaatattaacaaacagaaccacaacggagaaaaagggtgggggtgggggtggggggaatctcatctctcctcaactcaaatacatccgacaatctatctccggtcaagaaaacattcataccacatcaaattttcttcccaaaggttttctttgctttccttctccagcttcaaccaaacatattgtgcggagcagggtgagccatgagcgagctgtggtgatggaccatataccacctcccattacagagctcgtacacgttcgtcac

SEQ ID NO: 73682 - DNA, 997 bp, Zea Mays
ggtcccgttgccatctttagacgagatggtgcaactgcaagaggtgcgagtggcaacgcggaagatctacgatccactggaggaggacgccttccgccccatccttcaccactacgacgggcccaagtttcggctcgagctctccgtcgccgagaccctcgccctcctcgacatcttcgctgacaaggatgacgcctgagccttccttgccgccccctcgccgccagtgccaatccattaatgcacagacaataaaatggctggagggacagaccaaactatccacctttgtttgatatgataaagggctatgtatgaggcacgcgtcccattatttttgtttttattataagactagacctcgttccgtaagatacatgtatcaatattatataaaaacaaaccatcagttcttgtgctgcactacagatgttgtgttggattggaattcgtccctcgcgacaatacctcggttataatactgcgtctgaatgctccagattcgacagcatcagctacctgccacttccacaccatgacttgagcttcgaccgattctggttctagaataaaactcaatcaactcgctggtagctgaactgcacgacacgacaaagcatgctgcacaaacggttggcaccagataaatcaaagtcagctgcggcccataaccttccattcacctaaaacatatttgtacaaaactgcggaacgaagctccagaggagcaatattaacaaacagaaccacaacggagaaaaagggtgggggtgggggtggggggaatctcatctctcctcaactcaaatacatccgacaatctatctccggtcaagaaaacattcataccacatcaaattttcttcccaaaggttttctttgctttccttctccagcttcaaccaaacatattgtgcggagcagggtgagccatgagcgagctgtggtgatggaccatataccacctcccattacagagctcgtacacgttcgtcac

SEQ ID NO: 73683 - DNA, 976 bp, Zea Mays
atgcaacctgtagctgtagcatgtgcgagtggcaacgcggaagatctacgatccactggaggaggacgccttccgccccatccttcaccactacgacgggcccaagtttcggctcgagctctccgtcgccgagaccctcgccctcctcgacatcttcgctgacaaggatgacgcctgagccttccttgccgccccctcgccgccagtgccaatccattaatgcacagacaataaaatggctggagggacagaccaaactatccacctttgtttgatatgataaagggctatgtatgaggcacgcgtcccattatttttgtttttattataagactagacctcgttccgtaagatacatgtatcaatattatataaaaacaaaccatcagttcttgtgctgcactacagatgttgtgttggattggaattcgtccctcgcgacaatacctcggttataatactgcgtctgaatgctccagattcgacagcatcagctacctgccacttccacaccatgacttgagcttcgaccgattctggttctagaataaaactcaatcaactcgctggtagctgaactgcacgacacgacaaagcatgctgcacaaacggttggcaccagataaatcaaagtcagctgcggcccataaccttccattcacctaaaacatatttgtacaaaactgcggaacgaagctccagaggagcaatattaacaaacagaaccacaacggagaaaaagggtgggggtgggggtggggggaatctcatctctcctcaactcaaatacatccgacaatctatctccggtcaagaaaacattcataccacatcaaattttcttcccaaaggttttctttgctttccttctccagcttcaaccaaacatattgtgcggagcagggtgagccatgagcgagctgtggtgatggaccatataccacctcccattacagagctcgtacacgttcgtcac

SEQ ID NO: 73684 - DNA, 1846 bp, Zea Mays
tttttttccagccctgtgctgcccccttcctccccccaagtaaacctcgtttccacacgtcttgcacccccgccatgccgaccgtaaacgtgaaatggcagaaggaggtctttccaggcatagagattgacactagccagcctccgattgttttgaagagtcagctatacacactaactggtgtgccacctgaacgccaaaaaattatggtgaagggtggattattgaaggatgatgcagattggtctactttgggagtgaaagatggccaaaagttaatgatgataggcacagctgatgagattgttaaagctccagagaaaggtccgctgtttgttgaggatctaccagaagaagagcaagtggttgcactgggtcacagtgctggtctttacaatcttgggaatacatgctatatgaattccacattgcaatgtttgcattcagttccagagctgaagtcagcgctgctaagctattcagatactgtaaaaggtaatggcattgaccaagcttctcataatttgactcttgctactcgtaacacctttggtgatcttgatcaaagcgttcgccctgttacacctttacaattcttacagacactgcgtaaaaaatacccgcaatttgcgcagcaacataataatgtctacatgcaacaggatgcagaagaatgctggacacagttggtgtatacactttctcaaactcttacctcagattcaagggttcactgtgcagaaagtggtgaggagagcatggagacagaattagtttattcccttaagtgtcatatatctcaagatgtgaaccatcttcatgagggaattaagcatggcttgaagacagaacttgagaaagcttcacctacactgggtcgaactgcagtttatactagagaatcaagaataaatgagctgcctaggtacttgactgtgcagttcgttcgtttcttttggaaaagggaatcaaaccaaaaggcgaagattttacgaaaagttgattacccactggaactggatgtttacgaattttgctctgatgaactgaaaaagaaactcaaagctcctcggcagatgctgagagatgcagaaaatgcaaagcttggattgtacatgggaaagctagcagctcaaaagaaaatgaggagtcatcaagtagcgctggggaatcgtctagtatggacattgacaaagctgagtcttctctaccaaagaaacaattaactggcgtctatgatttggttgctgtcttgacacacaagggaagaagtgcagactctggccactatgttggctgggttaagcaagatgatggaaaatggatcgagtttgatgatgacaatccgaacattcgcaaggatgaagacattttgaaactttctggtggaggtgattggcacatggcttatatctgcttgtacaaagcccgcatggcagaatcaaagagttaggtcgaattggttctacatttctgtattgcgaatgcaacactagtttttgtgcccatgagcgagcgtggtaattatttttccagttcgtaaagtggttactggtgaatttgcttcaattatgttcgccattattcacccggatatgtatctttaggatttctagtacattttgtgttgtcaaaatataggacaaaaaattcaggggaaagcttttgccttcagtggatctgatttatttggtttcatccgtgtcttcctaataagaatgttttcaaaaaaaaaaagtagcctaaattgagtggaaagcttttgccttcagtggatctgatttatttggtttcatccgtgtcttcctcataagaatgcgttttttcttttaaaaaaacaaaaaaa

SEQ ID NO: 73685 - DNA, 2317 bp, Zea Mays
gttcgatttgtctctactgagggggaagtacggggatatgattgcggttgtggtgccgtagcgtcgcgggttgcttcgggattgttttggtggttcttggaagttcgcttgggaacataggatttggttctgtatgccagattccatgctgaggcgctacatcgcgctccaggctccctttctgcatttgcttttgctgcttgccaatgcgtgctctggtgtcttttgggtccatggcctgagtctgatcacttaatggcagagcgactatagatactaagctacaataattgtatgtgttgtgtccccttttgcaaattgtttttttatccatagtgcttggagggacctaatttcggctaggaccatgcaaagttgtgtgcctaattgcccatattccttgatgtttgttgcttaatctaagtgttaaacgcatcaccacttatgacaatggtttctgcctcacatccaaaatggagatatagacgacataagtctgagtaaacgtgaaatggcagaaggaggtctttccaggcatagagattgacactagccagcctccgattgttttgaagagtcagctatacacactaactggtgtgccacctgaacgccaaaaaattatggtgaagggtggattattgaaggatgatgcagattggtctactttgggagtgaaagatggccaaaagttaatgatgataggcacagctgatgagattgttaaagctccagagaaaggtccgctgtttgttgaggatctaccagaagaagagcaagtggttgcactgggtcacagtgctggtctttacaatcttgggaatacatgctatatgaattccacattgcaatgtttgcattcagttccagagctgaagtcagcgctgctaagctattcagatactgtaaaaggtaatggcattgaccaagcttctcataatttgactcttgctactcgtaacacctttggtgatcttgatcaaagcgttcgccctgttacacctttacaattcttacagacactgcgtaaaaaatacccgcaatttgcgcagcaacataataatgtctacatgcaacaggatgcagaagaatgctggacacagttggtgtatacactttctcaaactcttacctcagattcaagtgaatctgcagttcttccaatgaagcaactatttgggatagatctcgtgagcagggttcactgtgcagaaagtggtgaggagagcatggagacagaattagtttattcccttaagtgtcatatatctcaagatgtgaaccatcttcatgagggaattaagcatggcttgaagacagaacttgagaaagcttcacctacactgggtcgaactgcagtttatactagagaatcaagaataaatgagctgcctaggtacttgactgtgcagttcgttcgtttcttttggaaaagggaatcaaaccaaaaggcgaagattttacgaaaagttgattacccactggaactggatgtttacgaattttgctctgatgaactgaaaaagaaactcaaagctcctcggcagatgctgagagatgcagaaaatgcaaagcttggattgtacatgggaaagctagcagctcaaaagaaaatgaggagtcatcaagtagcgctggggaatcgtctagtatggacattgacaaagctgagtcttctctaccaaagaaacaattaactggcgtctatgatttggttgctgtcttgacacacaagggaagaagtgcagactctggccactatgttggctgggttaagcaagatgatggaaaatggatcgagtttgatgatgacaatccgaacattcgcaaggatgaagacattttgaaactttctggtggaggtgattggcacatggcttatatctgcttgtacaaagcccgcatggcagaatcaaagagttaggtcgaattggttctacatttctgtattgcgaatgcaacactagtttttgtgcccatgagcgagcgtggtaattatttttccagttcgtaaagtggttactggtgaatttgcttcaattatgttcgccattattcacccggatatgtatctttaggatttctagtacattttgtgttgtcaaaatataggacaaaaaattcaggggaaagcttttgccttcagtggatctgatttatttggtttcatccgtgtcttcctaataagaatgttttcaaaaaaaaaaagtagcctaaattgagtggaaagcttttgccttcagtggatctgatttatttggtttcatccgtgtcttcctcataagaatgcgttttttcttttaaaaaaacaaaaaaa

SEQ ID NO: 73686 - DNA, 1921 bp, Zea Mays
attgttttggtggttcttggaagttcgcttgggaacataggatttggttctgtatgccagattccatgctgaggcgctacatcgcgctccaggctccctttctgcatttgcttttgctgcttgccaatgcgtgctctggtgtcttttgggtccatggcctgagtctgatcacttaatggcagagcgactatagatactaagctacaataattgtatgtgttgtgtccccttttgcaaattgtttttttatccatagtgcttggagggacctaatttcggctaggaccatgcaaagttgtgtgcctaattgcccatattccttgatgtttgttgcttaatctaagtgttaaacgcatcaccacttatgacaatggtttctgcctcacatccaaaatggagatatagacgacataagtctgagtaaacgtgaaatggcagaaggaggtctttccaggcatagagattgacactagccagcctccgattgttttgaagagtcagctatacacactaactggtgtgccacctgaacgccaaaaaattatggtgaagggtggattattgaaggatgatgcagattggtctactttgggagtgaaagatggccaaaagttaatgatgataggcacagctgatgagattgttaaagctccagagaaaggtccgctgtttgttgaggatctaccagaagaagagcaagtggttgcactgacactgcgtaaaaaatacccgcaatttgcgcagcaacataataatgtctacatgcaacaggatgcagaagaatgctggacacagttggtgtatacactttctcaaactcttacctcagattcaagtgaatctgcagttcttccaatgaagcaactatttgggatagatctcgtgagcagggttcactgtgcagaaagtggtgaggagagcatggagacagaattagtttattcccttaagtgtcatatatctcaagatgtgaaccatcttcatgagggaattaagcatggcttgaagacagaacttgagaaagcttcacctacactgggtcgaactgcagtttatactagagaatcaagaataaatgagctgcctaggtacttgactgtgcagttcgttcgtttcttttggaaaagggaatcaaaccaaaaggcgaagattttacgaaaagttgattacccactggaactggatgtttacgaattttgctctgatgaactgaaaaagaaactcaaagctcctcggcagatgctgagagatgcagaaaatgcaaagcttggattgtacatgggaaagctagcagctcaaaagaaaatgaggagtcatcaagtagcgctggggaatcgtctagtatggacattgacaaaggttagttactgaaattccatattaaccatcaggaaaatggatcgagtttgatgatgacaatccgaacattcgcaaggatgaagacattttgaaactttctggtggaggtgattggcacatggcttatatctgcttgtacaaagcccgcatggcagaatcaaagagttaggtcgaattggttctacatttctgtattgcgaatgcaacactagtttttgtgcccatgagcgagcgtggtaattatttttccagttcgtaaagtggttactggtgaatttgcttcaattatgttcgccattattcacccggatatgtatctttaggatttctagtacattttgtgttgtcaaaatataggacaaaaaattcaggggaaagcttttgccttcagtggatctgatttatttggtttcatccgtgtcttcctaataagaatgttttcaaaaaaaaaaagtagcctaaattgagtggaaagcttttgccttcagtggatctgatttatttggtttcatccgtgtcttcctcataagaatgcgttttttcttttaaaaaaacaaaaaaa

SEQ ID NO: 73687 - DNA, 2194 bp, Zea Mays
ataggatttggttctgtatgccagattccatgctgaggcgctacatcgcgctccaggctccctttctgcatttgcttttgctgcttgccaatgcgtgctctggtgtcttttgggtccatggcctgagtctgatcacttaatggcagagcgactatagatactaagctacaataattgtatgtgttgtgtccccttttgcaaattgtttttttatccatagtgcttggagggacctaatttcggctaggaccatgcaaagttgtgtgcctaattgcccatattccttgatgtttgttgcttaatctaagtgttaaacgcatcaccacttatgacaatggtttctgcctcacatccaaaatggagatatagacgacataagtctgagtaaacgtgaaatggcagaaggaggtctttccaggcatagagattgacactagccagcctccgattgttttgaagagtcagctatacacactaactggtgtgccacctgaacgccaaaaaattatggtgaagggtggattattgaaggatgatgcagattggtctactttgggagtgaaagatggccaaaagttaatgatgataggcacagctgatgagattgttaaagctccagagaaaggtccgctgtttgttgaggatctaccagaagaagagcaagtggttgcactgggtcacagtgctggtctttacaatcttgggaatacatgctatatgaattccacattgcaatgtttgcattcagttccagagctgaagtcagcgctgctaagctattcagatactgtaaaaggtaatggcattgaccaagcttctcataatttgactcttgctactcgtaacacctttggtgatcttgatcaaagcgttcgccctgttacacctttacaattcttacagacactgcgtaaaaaatacccgcaatttgcgcagcaacataataatgtctacatgcaacagaagaatgctggacacagttggtgtatacactttctcaaactcttacctcagattcaagtgaatctgcagttcttccaatgaagcaactatttgggatagatctcgtgagcagggttcactgtgcagaaagtggtgaggagagcatggagacagaattagtttattcccttaagtgtcatatatctcaagatgtgaaccatcttcatgagggaattaagcatggcttgaagacagaacttgagaaagcttcacctacactgggtcgaactgcagtttatactagagaatcaagaataaatgagctgcctaggtacttgactgtgcagttcgttcgtttcttttggaaaagggaatcaaaccaaaaggcgaagattttacgaaaagttgattacccactggaactggatgtttacgaattttgctctgatgaactgaaaaagaaactcaaagctcctcggcagatgctgagagatgcagaaaatgcaaagcttggattgtacatgggaaagctagcagctcaaaagaaaatgaggagtcatcaagtagcgctggggaatcgtctagtatggacattgacaaagctgagtcttctctaccaaagaaacaattaactggcgtctatgatttggttgctgtcttgacacacaagggaagaagtgcagactctggccactatgttggctgggttaagcaagatgatggaaaatggatcgagtttgatgatgacaatccgaacattcgcaaggatgaagacattttgaaactttctggtggaggtgattggcacatggcttatatctgcttgtacaaagcccgcatggcagaatcaaagagttaggtcgaattggttctacatttctgtattgcgaatgcaacactagtttttgtgcccatgagcgagcgtggtaattatttttccagttcgtaaagtggttactggtgaatttgcttcaattatgttcgccattattcacccggatatgtatctttaggatttctagtacattttgtgttgtcaaaatataggacaaaaaattcaggggaaagcttttgccttcagtggatctgatttatttggtttcatccgtgtcttcctaataagaatgttttcaaaaaaaaaaagtagcctaaattgagtggaaagcttttgccttcagtggatctgatttatttggtttcatccgtgtcttcctcataagaatgcgttttttcttttaaaaaaacaaaaaaa

SEQ ID NO: 73688 - DNA, 2137 bp, Zea Mays
gttctgtatgccagattccatgctgaggcgctacatcgcgctccaggctccctttctgcatttgcttttgctgcttgccaatgcgtgctctggtgtcttttgggtccatggcctgagtctgatcacttaatggcagagcgactatagatactaagctacaataattgtatgtgttgtgtccccttttgcaaattgtttttttatccatagtgcttggagggacctaatttcggctaggaccatgcaaagttgtgtgcctaattgcccatattccttgatgtttgttgcttaatctaagtgttaaacgcatcaccacttatgacaatggtttctgcctcacatccaaaatggagatatagacgacataagtctgagtaaacgtgaaatggcagaaggaggtctttccaggcatagagattgacactagccagcctccgattgttttgaagagtcagctatacacactaactggtgtgccacctgaacgccaaaaaattatggtgaagggtggattattgaaggatgatgcagattggtctactttgggagtgaaagatggccaaaagttaatgatgataggcacagctgatgagattgttaaagctccagagaaaggtccgctgtttgttgaggatctaccagaagaagagcaagtggttgcactgggtcacagtgctggtctttacaatcttgggaatacatgctatatgaattccacattgcaatgtttgcattcagttccagagctgaagtcagcgctgctaagctattcagatactgtaaaaggtaatggcattgaccaagcttctcataatttgactcttgctactcgtaacacctttggtgatcttgatcaaagcgttcgccctgttacacctttacaattcttacagacactgcgtaaaaaatacccgcaatttgcgcagcaacataataatgtctacatgcaacaggatgcagaagaatgctggacacagttggtgtatacactttctcaaactcttacctcagattcaagggttcactgtgcagaaagtggtgaggagagcatggagacagaattagtttattcccttaagtgtcatatatctcaagatgtgaaccatcttcatgagggaattaagcatggcttgaagacagaacttgagaaagcttcacctacactgggtcgaactgcagtttatactagagaatcaagaataaatgagctgcctaggtacttgactgtgcagttcgttcgtttcttttggaaaagggaatcaaaccaaaaggcgaagattttacgaaaagttgattacccactggaactggatgtttacgaattttgctctgatgaactgaaaaagaaactcaaagctcctcggcagatgctgagagatgcagaaaatgcaaagcttggattgtacatgggaaagctagcagctcaaaagaaaatgaggagtcatcaagtagcgctggggaatcgtctagtatggacattgacaaagctgagtcttctctaccaaagaaacaattaactggcgtctatgatttggttgctgtcttgacacacaagggaagaagtgcagactctggccactatgttggctgggttaagcaagatgatggaaaatggatcgagtttgatgatgacaatccgaacattcgcaaggatgaagacattttgaaactttctggtggaggtgattggcacatggcttatatctgcttgtacaaagcccgcatggcagaatcaaagagttaggtcgaattggttctacatttctgtattgcgaatgcaacactagtttttgtgcccatgagcgagcgtggtaattatttttccagttcgtaaagtggttactggtgaatttgcttcaattatgttcgccattattcacccggatatgtatctttaggatttctagtacattttgtgttgtcaaaatataggacaaaaaattcaggggaaagcttttgccttcagtggatctgatttatttggtttcatccgtgtcttcctaataagaatgttttcaaaaaaaaaaagtagcctaaattgagtggaaagcttttgccttcagtggatctgatttatttggtttcatccgtgtcttcctcataagaatgcgttttttcttttaaaaaaacaaaaaaa

SEQ ID NO: 73689 - DNA, 2064 bp, Zea Mays
cttttgcaaattgtttttttatccatagtgcttggagggacctaatttcggctaggaccatgcaaagttgtgtgcctaattgcccatattccttgatgtttgttgcttaatctaagtgttaaacgcatcaccacttatgacaatggtttctgcctcacatccaaaatggagatatagacgacataagtctgagtaaacgtgaaatggcagaaggaggtctttccaggcatagagattgacactagccagcctccgattgttttgaagagtcagctatacacactaactggtgtgccacctgaacgccaaaaaattatggtgaagggtggattattgaaggatgatgcagattggtctactttgggagtgaaagatggccaaaagttaatgatgataggcacagctgatgagattgttaaagctccagagaaaggtccgctgtttgttgaggatctaccagaagaagagcaagtggttgcactgggtcacagtgctggtctttacaatcttgggaatacatgctatatgaattccacattgcaatgtttgcattcagttccagagctgaagtcagcgctgctaagctattcagatactgtaaaaggtaatggcattgaccaagcttctcataatttgactcttgctactcgtaacacctttggtgatcttgatcaaagcgttcgccctgttacacctttacaattcttacagacactgcgtaaaaaatacccgcaatttgcgcagcaacataataatgtctacatgcaacaggatgcagaagaatgctggacacagttggtgtatacactttctcaaactcttacctcagattcaagtgaatctgcagttcttccaatgaagcaactatttgggatagatctcgtgagcagggttcactgtgcagaaagtggtgaggagagcatggagacagaattagtttattcccttaagtgtcatatatctcaagatgtgaaccatcttcatgagggaattaagcatggcttgaagacagaacttgagaaagcttcacctacactgggtcgaactgcagtttatactagagaatcaagaataaatgagctgcctaggtacttgactgtgcagttcgttcgtttcttttggaaaagggaatcaaaccaaaaggcgaagattttacgaaaagttgattacccactggaactggatgtttacgaattttgctctgatgaactgaaaaagaaactcaaagctcctcggcagatgctgagagatgcagaaaatgcaaagcttggattgtacatgggaaagctagcagctcaaaagaaaatgagttttcagatttggatcgtcaatccattgtcatgcaattcggccatttcatttcaggagtcatcaagtagcgctggggaatcgtctagtatggacattgacaaagctgagtcttctctaccaaagaaacaattaactggcgtctatgatttggttgctgtcttgacacacaagggaagaagtgcagactctggccactatgttggctgggttaagcaagatgatggaaaatggatcgagtttgatgatgacaatccgaacattcgcaaggatgaagacattttgaaactttctggtggaggtgattggcacatggcttatatctgcttgtacaaagcccgcatggcagaatcaaagagttaggtcgaattggttctacatttctgtattgcgaatgcaacactagtttttgtgcccatgagcgagcgtggtaattatttttccagttcgtaaagtggttactggtgaatttgcttcaattatgttcgccattattcacccggatatgtatctttaggatttctagtacattttgtgttgtcaaaatataggacaaaaaattcaggggaaagcttttgccttcagtggatctgatttatttggtttcatccgtgtcttcctaataagaatgttttcaaaaaaaaaaagtagcctaaattgagtggaaagcttttgccttcagtggatctgatttatttggtttcatccgtgtcttcctcataagaatgcgttttttcttttaaaaaaacaaaaaaa

SEQ ID NO: 73690 - DNA, 1556 bp, Zea Mays
gtcactcatcagctcgtctgctatcgcgagggtcacagtgctggtctttacaatcttgggaatacatgctatatgaattccacattgcaatgtttgcattcagttccagagctgaagtcagcgctgctaagctattcagatactgtaaaaggtaatggcattgaccaagcttctcataatttgactcttgctactcgtaacacctttggtgatcttgatcaaagcgttcgccctgttacacctttacaattcttacagacactgcgtaaaaaatacccgcaatttgcgcagcaacataataatgtctacatgcaacaggatgcagaagaatgctggacacagttggtgtatacactttctcaaactcttacctcagattcaagtgaatctgcagttcttccaatgaagcaactatttgggatagatctcgtgagcagggttcactgtgcagaaagtggtgaggagagcatggagacagaattagtttattcccttaagtgtcatatatctcaagatgtgaaccatcttcatgagggaattaagcatggcttgaagacagaacttgagaaagcttcacctacactgggtcgaactgcagtttatactagagaatcaagaataaatgagctgcctaggtacttgactgtgcagttcgttcgtttcttttggaaaagggaatcaaaccaaaaggcgaagattttacgaaaagttgattacccactggaactggatgtttacgaattttgctctgatgaactgaaaaagaaactcaaagctcctcggcagatgctgagagatgcagaaaatgcaaagcttggattgtacatgggaaagctagcagctcaaaagaaaatgaggagtcatcaagtagcgctggggaatcgtctagtatggacattgacaaagctgagtcttctctaccaaagaaacaattaactggcgtctatgatttggttgctgtcttgacacacaagggaagaagtgcagactctggccactatgttggctgggttaagcaagatgatggaaaatggatcgagtttgatgatgacaatccgaacattcgcaaggatgaagacattttgaaactttctggtggaggtgattggcacatggcttatatctgcttgtacaaagcccgcatggcagaatcaaagagttaggtcgaattggttctacatttctgtattgcgaatgcaacactagtttttgtgcccatgagcgagcgtggtaattatttttccagttcgtaaagtggttactggtgaatttgcttcaattatgttcgccattattcacccggatatgtatctttaggatttctagtacattttgtgttgtcaaaatataggacaaaaaattcaggggaaagcttttgccttcagtggatctgatttatttggtttcatccgtgtcttcctaataagaatgttttcaaaaaaaaaaagtagcctaaattgagtggaaagcttttgccttcagtggatctgatttatttggtttcatccgtgtcttcctcataagaatgcgttttttcttttaaaaaaacaaaaaaa

SEQ ID NO: 73691 - DNA, 346 bp, Zea Mays
ctccattgcttcgtatagttgcagatacactttcttttcttccatctttttagctctttcctgccttctctgcatcaattcagagttcacactatatatcgaacaaaggtttcaaaccacaacgagcattggcctggccattggttagagaacatcctatacagttcctggtgaaaaacagacaaactatggattcaacgggctaagactctgagcagacacactgaaacccagtacaatactgagaccaatcatcacagagaactcaccgtatcagcttcgacaagagactcgagcagctcctgttcctgcactcataaacaaatattatgagtgcagtaatcag

SEQ ID NO: 73692 - DNA, 1306 bp, Zea Mays
tctaaacaggcaaattaattgccaaaactcagtgtgtggacatcagataaactcagagtgtggacatcagataaactcagtgtggacatcagatgaaccagaaagaactcatatgtaaggcttctgagcaaaatgacacaacttatgttactagactcacgccaatttcaagtgtgcccacacaaatcaaacaaaacaaactacactagcagtacaatttgctcagcctacttatcacaattgaactaccaattacttgagctaaatgatctgcagaacacagaaataccagtagcacaagaattaaagctttggtcagagcatagcaagataaagcagaaacaagcttgattaaatgaaagttgtagtgttgtagttctagctatctctggttgaatctccgaagttaaaacatgctcattaccttctacaactgtagattaaattagaagtatctgaatattatattaacatagtattatggttcgtaaaggactggcctggtacaatagcgagagaggtctcaagtcaccatgtcacgggtttgaagcagggctggtacaatagcgggagttgctctaagtcaccatgtcacaggttcgaagcagtctcacaagtatcatggttcatatacaagaattagtaaattggataagttagtacccccaacacataatccacgatgacaagcccaagcaaaaaatagcagtaagacctgcaataatgaccctaatcattaactacttcaaggtagaagacactgaacaaacacaatgcaagttgaaggttgtaggtctgaatagatgcaaactagttccttcatgcccagctatcacctagagatctgcagtcaatgagaccaccctcggataactacctatttgatagtgacaactgagaacacaaacagcatgaacattcatcaaataacttaggaataggataaagcgtgatcaatgggcaacaatttcagctagaagtcctatctctgtagcaatgcctcccaaaactgcacatccagtaccagaacatgaaaagcctacgagggaagtaaatttttaaagaccattgacagcaaaagtttcgaacaacattgacagcaaaccaagggaatcctgaacagtttataacttattgctcatgcagaaccagaatctaactcaggctcctccgaccatacaatccagttgctgtacaagtagagaatcaccatcccaaatgtgtaaggaacaagaaatttaagagtaccaataaaatagaggtagagccaaatgatgttctccagatgcaataaacttcagtccag

SEQ ID NO: 73693 - DNA, 302 bp, Zea Mays
atggctgaggggaggggcgagctcagcgacggcgtggagaaagggctagagcagaggatgggcgagctcgactggggcactcggggaagcggtgccaaggccgacgctaggaagggcgatgcagcggcgctggccaccggcgaggacgcggccgggtggaggtccgagcaggggatggatgccgtggcaagagctggaggcgagggcttggggatccgagttgagaggatggtgtgctctgctgctgggcggagagggcggctggaagatgagcccaggtgagcggcatcgcagggataagg

SEQ ID NO: 73694 - DNA, 2463 bp, Zea Mays
cacaaaggtctgctggaagtcaggaactcactggagggcagcagccgaagcccgaaggtatctttgttgtgcccctctgttccctgaactttcagcaaagagtgtcaatagctcatgcttcatttccttttatctacaagcttgtatatatcccaggttataaagatttgttcttgttcagtgaacactggtgcttgctgaagcagacttgttagtattttgcagccttttcttgcttttgttcttcttgcttaagaatctcgccatgaaattctaacaagaacaagaaatagagtggttcagtgtctccagaatgagatgttaccgttgttttcttctggctcctgtcgtaattgcctgtttcttctcccggataacaaccactaccctggccgaccctcgggcgacggtggttcgtgagttgtgcaacaaaaccaaagatgacggtcctggggcggtttgggccaacaacttcgtcgtcgccttcgacaacctgaactcggatctcgagcaaaagggatggggggtaacctccgttgggcaagatcctatcaccttctacgcgctcgtgcaatgcctagaagatctcagcacggttgactgcacactgtgctactcagagataaggtctcttctcccgaaatgctatccggagatcggaggccggatatatctcgatggctgctttatgaggtacgcgaactactctttcttcggcgaggccgtggactcgttggatacaagcgtgtgctcttccagtaaccgcagctcagagaagcggggcttcggttcagctgtggatgccgtgttgagcaacgtgacttccttggctgtcaagagcggcaaagggttcgcagtcacttcagctttcggatcaacagaatttgcagcttatgcacttgctcagtgctgggagaacctgaacacttctagctgtgcagcctgtctcagtgcagctgcaggttcggtggccaaatgtgcaccggcagaggaaggccgtgcactctttgccggctgcttcgtcagatattcgacagcacctttctggaactcggaggattctggctccagctcaaagaagcacgttgttccttggacagtcctgggtttctcggttggtctcgttcttgtactcatcggttcagtactggcatggaggaagaagaagaaagcttgcagggcaggagaaggatcattgaggggcttgtatgggtctgaacttcctgcaaggatttctcaatcaagtctgaattacagctataaggatctgaagaaagcaacgtgttccttcagcgtagagaacaagataggacaaggcagcaatggtactgtgtacaaggctgttcttcctggtgggaatgaagtcgctgcaaagagattgttcctgaacacgaaacaatgtctcgatcagttcttcaatgaagttgacgtgataagccaggtacgtcacaaaaatctggtgaaactgctcggatgcagcgttgatggcccggaaagcttcttgatatatgagtaccacttgaacaggagcttagatctgtccatattcgctgatggccagcagaagaggcgtctggattggcagcaaaggttcgatgttatttttggcgtagcagagggcctctgctacctccacgaagagtcagaaactcggatcatccaccgggacatcaaagccagcaacgtcctgttggaccagaagctgaagcccaagataactgactttgggcttgctcgagtcctatgcggtgacaggactcatcttaccacagggattgccgggacagttggttatatggctcctgagtatgttgtccatggccacctcaccaagaaggccgacgtgtacagcttcggcgtgctggctgtcgagatcgtcaccggaaagcggtgttgtgggtcgacagggtctcactctggtcactcacttctagcacaggtttggcatagttacaagaccaacacgacggagaaagtcgttgacacgaggctgcagcaagagagtgctccgttggacttggaggagatcacgcgcgtcgtgcaggtcgggctgctgtgcacacaggcaaaccccgacgagcggccggccatgtcgagagtggtggagctgctgagggacagagacggagaacgtggcgatgcggacttcatcctaggcgaccccccgtttttcgaggtcgaaatcgacgccgccgggggaggcgtcgacggcgaagcatgcacgctgctgccctgaaactcgacgaccactcatgaggtatccgggtggacgtattctgggttcagagtcccatgatttatcggatccggtggctttcggaatctgatattggacactttccaacctgatgtggtgcgaccaggttgaagttgagggttgtgcggtgcctcactcatgtaatgtgccttgaactaaaagtgcccactccactttggaacgtatggaatttttttagctggtta

SEQ ID NO: 73695 - DNA, 3091 bp, Zea Mays
aggacctcatactattagatatgtgccatgaaccactgcgacatagaataggacatgatggaattcttatgtgcatttgtataaatatttataatgttccttatgttgtctggccagatccaatcaagaagataatgtcgctgtttattattccgctcgtttctcaggagtcaggacctcgccccggccccaatcccttctccttcgtgcagctgcgcgccagatcgacttcaccgtcgcaactcgtgctgacggtccggccagcatcgcctcctgctcgcgacctcgcccagctccctccaccctccggtgagacgcagatctcctgctcgtggcctcgcccagctccctccaccctccggtgagacacagatcttggtgcgacggggcactacggaggcagggtagtgcggttgtgcgtgtgttggtggcctggttctagcaaccgagatggatagaagttgggtgcatgctagactattttctcatgaatatataaatggcgtcaaagaatttatgagcttcattcatgggaaatttggagaggatgaagaaatcttatgtccatgtagtagatgccttaatcaaaagtaccaacatcaagctcttgtggagaggcatatattgatgaatggcatggaaagtacatatactcgatggattcatcatggagagaaccttgatgtatatggtttgttaaatgagtcaggtatgactgaggacaacagctatgatgatggtaatttgaatgggttgttacaagacttagacagcgcagagaaagataagcaagacaatgaaaatgagaatgatccagaacctaatgacaaggattcattttttaaatcggtgatgaaagaggctaagcgtcaactttatccaggttgtacgaaattttcgaagttgtcatttgtggtaaaacttcttgatatgaagtcattgtataggatatgcaactctgcattttctgcaatattaaaactgttaggtgatgctttcccagaatgcaatacactccccaaatcatattatgaagcaaagagcattttaaagaaattaggtcttggatatgaatcaatacatgtgtgctataataattgtgtgctcttcagaaaagaatatagcaagcttgacaattgccctatttgtggtctctcaagatgggttgatgttgaaggaaagaagattccacagaaagtgttacgccattttccgttgatacctaggctacagaggatgtttgtgaacaaagaaacagcagaacaagcacagtggcacaagctgaagggaaatcctaaggaaaatgaaatgagtcacccagctgatggtgaggcatggcaagattttgatagaaaatatccaaattttgcaaaagatgccagaaaccttagacttggcttagcaactgatgggtttaaccccttttcggaaaaaaacactaaatacagcatgtggcctgtacttgttgtgccatacaacctttcaccttgggcgtgcatggaggagtcaaatttcatgatggctttacttattcctggtcctacatcacctggaaaggacttcgatatttttttagagcctcttatagaagatttacttgagctttggacaggtgtacctacttacgatgctctaactggacaaaaatttaacctacgtgctgcagttttatggtgcatccacgattatccagctttgggcactctttcagggcgtaaaacaaaaggtttttttgcatgtattcattgtgacaagcaacctctttcatacagcctaaggagcaaaattggttattttgggcattttcgtttccttccggtgggacatcgcttgcgcaaaaataatgaatttgttggtcttcatgaaagcaatgatcccccaggtaaattctctatggaagagttgatggctgaattggagagagtcaaacatgttaggcctgggaagcaacaaggaagtaggaaaaggaaacgttctaatttggacaaggatcatgtggtaatttggagtcggatggttagtttatggaagttaccatattggaagaatttgaaactgagacataatcttgatatcatgcacattgagaaaaacatatgtgaaaacttgattgggactattctcaatatacccgggaagacaaaggatacaattaaagctaggtttgatctgaaagatatgggtattagaaaggagttgcattttagagggaatgtagattcatgtgagatgccttatgcaagatataccttgcccacagaatataagaaggccttttgtgattttttgcgggaggtgaagtttccagatggatttgcatccaacatatcaagatgtttaaatgctgagggaaccaaattacaagggcttaaaacacatgattgtcacattcttttgcaaagaatattaccagttgccatgagaggatttttggacaaggatatttatgaagcactagcggatctggggaaattttttagggaattgtgcagcagaactcttaaaaaggatgtgttggctgaaatgaggaaagaaattccaataattttggtgaagcttgagaaaatatttcccccagctttctttgatgtgatggtgcatctagctgtgcatctacctgatgaggcattattgcgaggtcctgtgcattatggttggatgtacccaattgaaaggcgattgtatactttgaagcgctatgtgaggaacagggcacgaccggaaggctcaatcgctgaggcatatattgcggacgagtgcttgacattttgctctaaatacatggatgatgtcgaaacaaaatttaatcgggaaccaagaaataaagggttttctaatgaggaagcctataccgttgatgtttttgggcatggagttaattttacctctgcgcctgaactagtgtatgatgatagtgccattgatcaaatggtatggtatgttctgaacaattgtagtcaggttgacaaatatatgagaatgttcagagatgaattagagagagatggcatgcctaacattgaaagaacattgcgacaaggattccagacttggttcagaacccatatcctcagaatgcggaatataaatc

SEQ ID NO: 73696 - DNA, 417 bp, Zea Mays
attattccgctcgtttctcaggagtcaggacctcgccccggccccaatcccttctccttcgtgcagctgcgcgccagatcgacttcaccgtcgcaactcgtgctgacggtccggccagcatcgcctcctgctcgcgacctcgcccagctccctccaccctccggtgagacgcagatctcctgctcgtggcctcgcccagctccctccaccctccggtgagacacagatcttggtgcgacggggcactacggaggcagggtagtgcggttgtgcgtgtgttggtggcctggttctagcaaccgagaatgttcagagatgaattagagagagatggcatgcctaacattgaaagaacattgcgacaaggattccagacttggttcagaacccatatcctcagaatgcggaatataaatc

SEQ ID NO: 73697 - DNA, 2686 bp, Zea Mays
attattccgctcgtttctcaggagtcaggacctcgccccggccccaatcccttctccttcgtgcagctgcgcgccagatcgacttcaccgtcgcaactcgtgctgacggtccggccagcatcgcctcctgctcgcgacctcgcccagctccctccaccctccggtgagacgcagatctcctgctcgtggcctcgcccagctccctccaccctccggtgagacacagatcttggtgcgacggggcactacggaggcagggtagtgcggttgtgcgtgtgttggtggcctggttctagcaaccgaggtatgactgaggacaacagctatgatgatggtaatttgaatgggttgttacaagacttagacagcgcagagaaagataagcaagacaatgaaaatgagaatgatccagaacctaatgacaaggattcattttttaaatcggtgatgaaagaggctaagcgtcaactttatccaggttgtacgaaattttcgaagttgtcatttgtggtaaaacttcttgatatgaagtcattgtataggatatgcaactctgcattttctgcaatattaaaactgttaggtgatgctttcccagaatgcaatacactccccaaatcatattatgaagcaaagagcattttaaagaaattaggtcttggatatgaatcaatacatgtgtgctataataattgtgtgctcttcagaaaagaatatagcaagcttgacaattgccctatttgtggtctctcaagatgggttgatgttgaaggaaagaagattccacagaaagtgttacgccattttccgttgatacctaggctacagaggatgtttgtgaacaaagaaacagcagaacaagcacagtggcacaagctgaagggaaatcctaaggaaaatgaaatgagtcacccagctgatggtgaggcatggcaagattttgatagaaaatatccaaattttgcaaaagatgccagaaaccttagacttggcttagcaactgatgggtttaaccccttttcggaaaaaaacactaaatacagcatgtggcctgtacttgttgtgccatacaacctttcaccttgggcgtgcatggaggagtcaaatttcatgatggctttacttattcctggtcctacatcacctggaaaggacttcgatatttttttagagcctcttatagaagatttacttgagctttggacaggtgtacctacttacgatgctctaactggacaaaaatttaacctacgtgctgcagttttatggtgcatccacgattatccagctttgggcactctttcagggcgtaaaacaaaaggtttttttgcatgtattcattgtgacaagcaacctctttcatacagcctaaggagcaaaattggttattttgggcattttcgtttccttccggtgggacatcgcttgcgcaaaaataatgaatttgttggtcttcatgaaagcaatgatcccccaggtaaattctctatggaagagttgatggctgaattggagagagtcaaacatgttaggcctgggaagcaacaaggaagtaggaaaaggaaacgttctaatttggacaaggatcatgtggtaatttggagtcggatggttagtttatggaagttaccatattggaagaatttgaaactgagacataatcttgatatcatgcacattgagaaaaacatatgtgaaaacttgattgggactattctcaatatacccgggaagacaaaggatacaattaaagctaggtttgatctgaaagatatgggtattagaaaggagttgcattttagagggaatgtagattcatgtgagatgccttatgcaagatataccttgcccacagaatataagaaggccttttgtgattttttgcgggaggtgaagtttccagatggatttgcatccaacatatcaagatgtttaaatgctgagggaaccaaattacaagggcttaaaacacatgattgtcacattcttttgcaaagaatattaccagttgccatgagaggatttttggacaaggatatttatgaagcactagcggatctggggaaattttttagggaattgtgcagcagaactcttaaaaaggatgtgttggctgaaatgaggaaagaaattccaataattttggtgaagcttgagaaaatatttcccccagctttctttgatgtgatggtgcatctagctgtgcatctacctgatgaggcattattgcgaggtcctgtgcattatggttggatgtacccaattgaaaggcgattgtatactttgaagcgctatgtgaggaacagggcacgaccggaaggctcaatcgctgaggcatatattgcggacgagtgcttgacattttgctctaaatacatggatgatgtcgaaacaaaatttaatcgggaaccaagaaataaagggttttctaatgaggaagcctataccgttgatgtttttgggcatggagttaattttacctctgcgcctgaactagtgtatgatgatagtgccattgatcaaatggtatggtatgttctgaacaattgtagtcaggttgacaaatatatgagaatgttcagagatgaattagagagagatggcatgcctaacattgaaagaacattgcgacaaggattccagacttggttcagaacccatatcctcagaatgcggaatataaatc

SEQ ID NO: 73698 - DNA, 1554 bp, Zea Mays
atggcggttgttcccagaccggctcaggtccaggcatccaggctcagcgtctagggaccagccccagccctagcccctagccctggcggccggcgtggcggcacacagtgcccggcgccttcgtccacttcccggcccggcgtgacgttggcccgggcgcctcgcccattcgatttcgtcttccggtgcagcacaggcgagaagcgcactcagctcgacgacccgacccgtcgatcgccgctcccttccatcaaggaagaaaatccattggtggcgcagtcctaggatcagcacaaagatgcctcctggtcgtgagaaggttggagtcaaaaggccacatggacctcagctatcagaaccaccattgcatccatacgaacaactgcgtctaagacaatgtatgaggaataattcaaggctacaacaattaggaatccctgctttatcaagcatgcttgcaagcacaaattctatttctcagaggaataggccaagtcatagaaatagtgaggactctgagtctgattatgatatttcacaagatgagactggtgatgacaatgttaaggtgggctcaaaggaatgtaacataagaactactgataattcgcttggtgcaatcaagctctgctctaagagagtttttgcgcagcaagaaactactagaattacaaggtcaaagaaaaatattgctcaacctgatgcaactcttacaccaaggcacaacattgattaccacacacagggtatagttgaagctaatggccatgcccatttggatgagaacactaacatgaccaatgaaggtcatgttgctccttttgatgggaagaaccctacaggcaatgaagataatgtggatgtcctagctgataacaacaggacgattggaggtcaagttgatgacactaatcagatgtcgaacagagatttagaattaggtcagaatgatcggtgggaaaggggaatcaatatgggacatggtcttcatagaattaaccgaggtttgcgtggaaagttgcaagttgttattcctgaagggaagataaggcctatggcaccacttgttgctgctaagtttgcaactgaatgcaacatttctgtgaggaaccatgtgccagtgttcaaacattggaaggattacaagaaccattcaggcctattcaatctatttacaggaaaacttagtgcaaagtttgacattaacacaagtgatgcaccagttcaaaaggcttgttcccagatgatgaagagtgcggttcgacaacaacgataccggctcaagaaaaagtactttgatccttttccgctacatctagtggcaaaaaaatctccaatcagatctatgactgatgaagagtggaatgaacttgtggagtattggaagagtccaaaaaagtggttgtggtcttagttctctcaataagtgttgttctgttcttgtttgtatagacatgaacattgttgtgatcaaagaacttattgctgatatgactgcaaatataagttcattatttctagagaatcttattgctgtgaatgtttttataccag

SEQ ID NO: 73699 - DNA, 1435 bp, Zea Mays
ctcaggtccaggcatccaggctcagcgtctagggaccagccccagccctagcccctagccctggcggccggcgtggcggcacacagtgcccggcgccttcgtccacttcccggcccggcgtgacgttggcccgggcgcctcgcccattcgatttcgtcttccggtgcagcacaggcgagaagcgcactcagctcgacgacccgacccgtcgatcgccgctcccttccatcaaggaagaaaatccattggtggcgcagtcctaggatcagcacaaagatgcctcctggtcgtgagaaggttggagtcaaaaggccacatggacctcagctatcagaaccaccattgcatccatacgaacaactgcgtctaagacaatgtatgaggaataattcaaggctacaacaattaggaatccctgctttatcaagcatgcttgcaagcacaaattctatttctcagaggaataggccaagtcatagaaatagtgaggactctgagtctgattatgatatttcacaagatgagactggtgatgacaatgttaaggtgggctcaaaggaatgtaacataagaactactgataattcgcttggtgcaatcaagctctgctctaagagagtttttgcgcagcaagaaactactagaattacaaggtcaaagaaaaatattgctcaacctgatgcaactcttacaccaaggcacaacattgattaccacacacaggctaatggccatgcccatttggatgagaacactaacatgaccaatgaaggtcatgttgctccttttgatgggaagaaccctacaggcaatgaagataatgtggatgtcctagctgataacaacaggacgattggaggtcaagttgatgacactaatcagatgtcgaacagagatttagaattaggtcagaatgatcggtgggaaaggggaatcaatatgggacatggtcttcatagaattaaccgaggtttgcgtggaaagttgcaagttgttattcctgaagggaagataaggcctatggcaccacttgttgctgctaagtttgcaactgaatgcaacatttctgtgaggaaccatgtgccagtgttcaaacattggaaggattacaagaaccattcaggcctattcaatctatttacaggaaaacttagtgcaaagtttgacattaacacaagtgatgcaccagttcaaaaggcttgttcccagatgatgaagagtgcggttcgacaacaacgataccggctcaagaaaaagtactttgatccttttccgctacatctagtggcaaaaaaatctccaatcagatctatgactgatgaagagtggaatgaacttgtggagtattggaagagtccaaaaaagtggagacatctcaaaaaaacaaagagaatcgatccaaagttaaattccatcaaacaactggctctcgtag

SEQ ID NO: 73700 - DNA, 1450 bp, Zea Mays
ggcatccaggctcagcgtctagggaccagccccagccctagcccctagccctggcggccggcgtggcggcacacagtgcccggcgccttcgtccacttcccggcccggcgtgacgttggcccgggcgcctcgcccattcgatttcgtcttccggtgcagcacaggcgagaagcgcactcagctcgacgacccgacccgtcgatcgccgctcccttccatcaaggcaagtagtcaggaaggaagaaaatccattggtggcgcagtcctaggatcagcacaaagatgcctcctggtcgtgagaaggttggagtcaaaaggccacatggacctcagctatcagaaccaccattgcatccatacgaacaactgcgtctaagacaatgtatgaggaataattcaaggctacaacaattaggaatccctgctttatcaagcatgcttgcaagcacaaattctatttctcagaggaataggccaagtcatagaaatagtgaggactctgagtctgattatgatatttcacaagatgagactggtgatgacaatgttaagggctcaaaggaatgtaacataagaactactgataattcgcttggtgcaatcaagctctgctctaagagagtttttgcgcagcaagaaactactagaattacaaggtcaaagaaaaatattgctcaacctgatgcaactcttacaccaaggcacaacattgattaccacacacagggtatagttgaagctaatggccatgcccatttggatgagaacactaacatgaccaatgaaggtcatgttgctccttttgatgggaagaaccctacaggcaatgaagataatgtggatgtcctagctgataacaacaggacgattggaggtcaagttgatgacactaatcagatgtcgaacagagatttagaattaggtcagaatgatcggtgggaaaggggaatcaatatgggacatggtcttcatagaattaaccgaggtttgcgtggaaagttgcaagttgttattcctgaagggaagataaggcctatggcaccacttgttgctgctaagtttgcaactgaatgcaacatttctgtgaggaaccatgtgccagtgttcaaacattggaaggattacaagaaccattcaggcctattcaatctatttacaggaaaacttagtgcaaagtttgacattaacacaagtgatgcaccagttcaaaaggcttgttcccagatgatgaagagtgcggttcgacaacaacgataccggctcaagaaaaagtactttgatccttttccgctacatctagtggcaaaaaaatctccaatcagatctatgactgatgaagagtggaatgaacttgtggagtattggaagagtccaaaaaagtggagacatctcaaaaaaacaaagagaatcgatccaaagttaaattccatcaaacaactggctctcgtag

SEQ ID NO: 73701 - DNA, 1238 bp, Zea Mays
ggcatccaggctcagcgtctagggaccagccccagccctagcccctagccctggcggccggcgtggcggcacacagtgcccggcgccttcgtccacttcccggcccggcgtgacgttggcccgggcgcctcgcccattcgatttcgtcttccggtgcagcacaggcgagaagcgcactcagctcgacgacccgacccgtcgatcgccgctcccttccatcaaggcaagtagtcaggaaggaagaaaatccattggtggcgcagtcctaggatcagcacaaagatgcctcctggtcgtgagaaggttggagtcaaaaggccacatggacctcagctatcagggctcaaaggaatgtaacataagaactactgataattcgcttggtgcaatcaagctctgctctaagagagtttttgcgcagcaagaaactactagaattacaaggtcaaagaaaaatattgctcaacctgatgcaactcttacaccaaggcacaacattgattaccacacacagggtatagttgaagctaatggccatgcccatttggatgagaacactaacatgaccaatgaaggtcatgttgctccttttgatgggaagaaccctacaggcaatgaagataatgtggatgtcctagctgataacaacaggacgattggaggtcaagttgatgacactaatcagatgtcgaacagagatttagaattaggtcagaatgatcggtgggaaaggggaatcaatatgggacatggtcttcatagaattaaccgaggtttgcgtggaaagttgcaagttgttattcctgaagggaagataaggcctatggcaccacttgttgctgctaagtttgcaactgaatgcaacatttctgtgaggaaccatgtgccagtgttcaaacattggaaggattacaagaaccattcaggcctattcaatctatttacaggaaaacttagtgcaaagtttgacattaacacaagtgatgcaccagttcaaaaggcttgttcccagatgatgaagagtgcggttcgacaacaacgataccggctcaagaaaaagtactttgatccttttccgctacatctagtggcaaaaaaatctccaatcagatctatgactgatgaagagtggaatgaacttgtggagtattggaagagtccaaaaaagtggagacatctcaaaaaaacaaagagaatcgatccaaagttaaattccatcaaacaactggctctcgtag

SEQ ID NO: 73702 - DNA, 1453 bp, Zea Mays
ggcatccaggctcagcgtctagggaccagccccagccctagcccctagccctggcggccggcgtggcggcacacagtgcccggcgccttcgtccacttcccggcccggcgtgacgttggcccgggcgcctcgcccattcgatttcgtcttccggtgcagcacaggcgagaagcgcactcagctcgacgacccgacccgtcgatcgccgctcccttccatcaaggcaagtagtcaggaaggaagaaaatccattggtggcgcagtcctaggatcagcacaaagatgcctcctggtcgtgagaaggttggagtcaaaaggccacatggacctcagctatcagaaccaccattgcatccatacgaacaactgcgtctaagacaatgtatgaggaataattcaaggctacaacaattaggaatccctgctttatcaagcatgcttgcaagcacaaattctatttctcagaggaataggccaagtcatagaaatagtgaggactctgagtctgattatgatatttcacaagatgagactggtgatgacaatgttaaggtgggctcaaaggaatgtaacataagaactactgataattcgcttggtgcaatcaagctctgctctaagagagtttttgcgcagcaagaaactactagaattacaaggtcaaagaaaaatattgctcaacctgatgcaactcttacaccaaggcacaacattgattaccacacacagggtatagttgaagctaatggccatgcccatttggatgagaacactaacatgaccaatgaaggtcatgttgctccttttgatgggaagaaccctacaggcaatgaagataatgtggatgtcctagctgataacaacaggacgattggaggtcaagttgatgacactaatcagatgtcgaacagagatttagaattaggtcagaatgatcggtgggaaaggggaatcaatatgggacatggtcttcatagaattaaccgaggtttgcgtggaaagttgcaagttgttattcctgaagggaagataaggcctatggcaccacttgttgctgctaagtttgcaactgaatgcaacatttctgtgaggaaccatgtgccagtgttcaaacattggaaggattacaagaaccattcaggcctattcaatctatttacaggaaaacttagtgcaaagtttgacattaacacaagtgatgcaccagttcaaaaggcttgttcccagatgatgaagagtgcggttcgacaacaacgataccggctcaagaaaaagtactttgatccttttccgctacatctagtggcaaaaaaatctccaatcagatctatgactgatgaagagtggaatgaacttgtggagtattggaagagtccaaaaaagtggagacatctcaaaaaaacaaagagaatcgatccaaagttaaattccatcaaacaactggctctcgtag

SEQ ID NO: 73703 - DNA, 4073 bp, Zea Mays
gttagaggaggggaaacaaaatatgatttttttcctgaaagaatacagtgcccctgcactgcagaaggtaaagcagggagggaggggtctggaaaggaagcagggaaggaaaggaagagaggaagaaaacggacgctccgagggcaagtggtgccggatttttgtcagtctcctccccacctagtctcttgtatccaatacaacctttgccttcattgccgcagttccgtttcacatcccatcctctccatttccaccccctcccatggcctgatttccgagcccccccgccattcgccccgcccccgaatccgccgtctcatcgaacgcccggtgccgtggggagaagcgaggctccggttctttgtttcttggcggccgaaatataagggaatatgattgacgatgaggaaagccaagggattaagaaggtgcatttcagggattcgttctcccagcaccctatagttacctacaagaggcgtcggcagcagaagccacagacgcagcagcaattacggcaaccaccgccatccctacagcagcatccggagccacagctacaggtgaagctggagccaaagactgaagatgtgccggaacagcagtttccgatattgagagcaagggatattggctgggagcatgctgtggatcttgatggaaataaaagacggtggcaatgcaagttctgttctctatgtcgaagtggtggtgtaactactttgaaggctcatctcattgatgacagctgcccaaacgttccaaaggaaatttcaaagaaagtatcaaacttcattgaagagaaaagagcaacacgccttcttttgaataattatgtctttaatgttgatgaggacttcaacacaatacttcaagaagggactgtagaatatgtaaatgaacaacaaccttcaagaaaggctacatatgtgcaaacattatctaagtgtgctattaatgagatagcagcgggaagcaagcaatgtggtgcagaatgtagtggccagccagttgagcattgtgatcagcctgaagagcagtgcacaatggattatggcaggatggatcgattgactagcaataagaaccagattttggacaagaatactgagaattcaaaaaatacaaagatgttgaaaccatgccggaaaagtgagtttaacacaaggaagcacataattattgttgataaaattgggaggcattggaagtgtagatactgtggcatggatgtgtatggtaaaaagtttcagctccattatcatctagctggtgcatttcgtcaggctaagtgtccaaatgttcctagagaagtttttgcaaaagcaagacagcatgttctgacaaagaaaatgctaaaaaagagtaaagctgagcaacagattccttctagtccacatattcttgcccaatctggtgaagaacggcagaacaatgatccattttgtgggaatcagtctcaactgtcaataaacaatgaacctagggaggtacacaattaccctgcagtgctaagggacagtgcatgggaacattctctgatatatgagaaagaaaacggacactggaagtgcaagtggtgcagtattgagggtgatcatggtttaactagattgatgtggcatcttgttggatggcagaatcgacctcagtgcccaaatataccaaaggatgttgctgaaaagatgaaggatcaaatgatgtcaaagaaggagcagaaagcgagatcaggtttgtttgacggcaatggctgttgtgaggtgttgtgctcttctaatagttcacaacttgatcagaaccatctcactgcaagaatacatgacagatgttcttcccaggcttttgaccatgctaacagtgaattaaaaggatgcaacatgttatccaatactattctttcacaacagagttccaatcctcaggtgcatcatgaggatcctcaggtgtgtcatgagcaagagaggaaggaggttgccacctcttcagaacctggctgtgagcaaggtcagaggatgcagtggcagtcgcaaaataagccaatgatggaaggacctcatgacaatggattatgtggtgacacaaaccagttggaggaacaaaaaagtggctttggaattagtgactgctggaggtatgttttggatggacaaatgcacttgcctgatgtacaggagggtgctggaattgggacatgcatccgtgatgctcttctctatggttgtgctgaatttggcacagtacctgacaaaatggaaatggattgtgataaaacagtggatgcgaacactgctaagtgccagaatattcttaaggatgttttaagatcggagaactttgctttgttgtgcagtgtactctgcagaactgtacatcaagatggggaaagaactagatattttgattttggtgtgattgattcaaggatgaaaaatggaaattatgggcctgaacctgaattattcgtccatgatctgaaactgttatgggaagatcttaaagtggctggtcaagatattgttcacctagcaaataatctatcaagcctcacagaggactcctatgaaaagctggttggaagagagagaggatcagatgatgatgagctcaatgaagctgtggtggccaggtctgaaccgaaaaacctagttcaaccaaatgcatcggtacccttgacctcacaaggctttaaccaattattggatcaacccgggccttctgatccttctgttgtatacaaggacagtatctgcaaccgatgtgggaaagtagcaggagctggtagcgttctcaaatgttacaggtgcatgctaccttgccacatttcatgcattgaggctactggttcacccatttcaactggaaggtggtgttgtaaaaactgcagcgctggcactaaggaaccagttgaaggagacatggtcttagcccatggcaatccaaattgcttgcatgaaagttgtgtcgtctgcgacagacttgcggcctgcaggtctccaaaatgtgataactcaagagcattggttatttccagcgtggacccagagattgatacatgttactcatgcaagatatgtggaggcaccgaagaggatgagaagaggttcttgatatgcggcaacgtcctctgccgatacatgtactaccacattgggtgcctcaagtccatgcagatctctaccagtgtagagaggggcagcccgtgctggtactgcccgtcttgcctttgccgagtttgtctgtgtgacaaagacgacgacctgaccattctgtgcgatggttgcgacgaggcttaccatatctactgcataacacctcgccatacttcaatacccaaggggcagtggtattgctcatcgtgcagcgtggagagggcagaagaggggatgagacagtacgagaggaggacgctgaagctccaccggaaggaggatgctggactacaaagttggaattttgatggtgtggacctgctgctatctgccgcggagcagctcaggatagatgagcagctggagactcgtacagattagcgtgttgcacctacactctggtccttttgccgtgctaaagtgagtttgttgtttgaagagcagaggcctgcctcaggatcagagctcgggcaagggcagttaacaaaatttgctgcagtcctctcacgaactgatgaaaatacaaggatcttcaaacagcattcgccttttgagatgcgtgctatatgataacatgctgtaggatatttgtttcgtttatctgtctttttgctttgttgcacttgcacctgcttgagaagatacttaactcgatacaccttactggtatccaaactgcaagggatgttcttaaattcaaggaaaatctccaatttgagagagcaagccgtctttgaaaactgcctcaggtttttgttgaggctgttattatgctttgtggcctgaattattttagacatacaaacttattgcttcacgaccttcttctcaagtcggtctagatacttcttggggcaacgtcgaatgctatgtccttcatccttgcagtagtagtaaacactatttgctttgaggtctttg

SEQ ID NO: 73704 - DNA, 3258 bp, Zea Mays
gaagcagggaaggaaaggaagagaggaagaaaacggacgctccgagggcaagtggtgccggatttttgtcagtctcctccccacctagtctcttgtatccaatacaacctttgccttcattgccgcagttccgtttcacatcccatcctctccatttccaccccctcccatggcctgatttccgagcccccccgccattcgccccgcccccgaatccgccgtctcatcgaacgcccggtgccgtggggagaagcgaggctccggttctttgtttcttggcggccgaaatataagggaatatgattgacgatgaggaaagccaagggattaagaaggtgcatttcagggattcgttctcccagcaccctatagttacctacaagaggcgtcggcagcagaagccacagacgcagcagcaattacggcaaccaccgccatccctacagcagcatccggagccacagctacaggtgaagctggagccaaagactgaagatgtgccggaacagcagtttccgatattgagagcaagggatattggctgggagcatgctgtggatcttgatggaaataaaagacggtggcaatgcaagttctgttctctatgtcgaagtggtggtgtaactactttgaaggctcatctcattgatgacagctgcccaaacgttccaaaggaaatttcaaagaaagtatcaaacttcattgaagagaaaagagcaacacgccttcttttgaataattatgtctttaatgttgatgaggacttcaacacaatacttcaagaagggactgtagaatatgtaaatgaacaacaaccttcaagaaaggctacatatgtgcaaacattatctaagtgtgctattaatgaggtacacaattaccctgcagtgctaagggacagtgcatgggaacattctctgatatatgagaaagaaaacggacactggaagtgcaagtggtgcagtattgagggtgatcatggtttaactagattgatgtggcatcttgttggatggcagaatcgacctcagtgcccaaatataccaaaggatgttgctgaaaagatgaaggatcaaatgatgtcaaagaaggagcagaaagcgagatcaggtgcatcatgaggatcctcaggtgtgtcatgagcaagagaggaaggaggttgccacctcttcagaacctggctgtgagcaaggtcagaggatgcagtggcagtcgcaaaataagccaatgatggaaggacctcatgacaatggattatgtggtgacacaaaccagttggaggaacaaaaaagtggctttggaattagtgactgctggaggtatgttttggatggacaaatgcacttgcctgatgtacaggagggtgctggaattgggacatgcatccgtgatgctcttctctatggttgtgctgaatttggcacagtacctgacaaaatggaaatggattgtgataaaacagtggatgcgaacactgctaagtgccagaatattcttaaggatgttttaagatcggagaactttgctttgttgtgcagtgtactctgcagaactgtacatcaagatggggaaagaactagatattttgattttggtgtgattgattcaaggatgaaaaatggaaattatgggcctgaacctgaattattcgtccatgatctgaaactgttatgggaagatcttaaagtggctggtcaagatattgttcacctagcaaataatctatcaagcctcacagaggactcctatgaaaagctggttggaagagagagaggatcagatgatgatgagctcaatgaagctgtggtggccaggtctgaaccgaaaaacctagttcaaccaaatgcatcggtacccttgacctcacaaggctttaaccaattattggatcaacccgggccttctgatccttctgttgtatacaaggacagtatctgcaaccgatgtgggaaagtagcaggagctggtagcgttctcaaatgttacaggtgcatgctaccttgccacatttcatgcattgaggctactggttcacccatttcaactggaaggtggtgttgtaaaaactgcagcgctggcactaaggaaccagttgaaggagacatggtcttagcccatggcaatccaaattgcttgcatgaaagttgtgtcgtctgcgacagacttgcggcctgcaggtctccaaaatgtgataactcaagagcattggttatttccagcgtggacccagagattgatacatgttactcatgcaagatatgtggaggcaccgaagaggatgagaagaggttcttgatatgcggcaacgtcctctgccgatacatgtactaccacattgggtgcctcaagtccatgcagatctctaccagtgtagagaggggcagcccgtgctggtactgcccgtcttgcctttgccgagtttgtctgtgtgacaaagacgacgacctgaccattctgtgcgatggttgcgacgaggcttaccatatctactgcataacacctcgccatacttcaatacccaaggggcagtggtattgctcatcgtgcagcgtggagagggcagaagaggggatgagacagtacgagaggaggacgctgaagctccaccggaaggaggatgctggactacaaagttggaattttgatggtgtggacctgctgctatctgccgcggagcagctcaggatagatgagcagctggagactcgtacagattagcgtgttgcacctacactctggtccttttgccgtgctaaagtgagtttgttgtttgaagagcagaggcctgcctcaggatcagagctcgggcaagggcagttaacaaaatttgctgcagtcctctcacgaactgatgaaaatacaaggatcttcaaacagcattcgccttttgagatgcgtgctatatgataacatgctgtaggatatttgtttcgtttatctgtctttttgctttgttgcacttgcacctgcttgagaagatacttaactcgatacaccttactggtatccaaactgcaagggatgttcttaaattcaaggaaaatctccaatttgagagagcaagccgtctttgaaaactgcctcaggtttttgttgaggctgttattatgctttgtggcctgaattattttagacatacaaacttattgcttcacgaccttcttctcaagtcggtctagatacttcttggggcaacgtcgaatgctatgtccttcatccttgcagtagtagtaaacactatttgctttgaggtctttg

SEQ ID NO: 73705 - DNA, 3430 bp, Zea Mays
aagcagggaaggaaaggaagagaggaagaaaacggacgctccgagggcaagtggtgccggatttttgtcagtctcctccccacctagtctcttgtatccaatacaacctttgccttcattgccgcagttccgtttcacatcccatcctctccatttccaccccctcccatggcctgatttccgagcccccccgccattcgccccgcccccgaatccgccgtctcatcgaacgcccggtgccgtggggagaagcgaggctccggttctttgtttcttggcggccgaaatataagggaatatgattgacgatgaggaaagccaagggattaagaaggtgcatttcagggattcgttctcccagcaccctatagttacctacaagaggcgtcggcagcagaagccacagacgcagcagcaattacggcaaccaccgccatccctacagcagcatccggagccacagctacaggtgaagctggagccaaagactgaagatgtgccggaacagcagtttccgatattgagagcaagggatattggctgggagcatgctgtggatcttgatggaaataaaagacggtggcaatgcaagttctgttctctatgtcgaagtggtggtgtaactactttgaaggctcatctcattgatgacagctgcccaaacgttccaaaggaaatttcaaagaaagtatcaaacttcattgaagagaaaagagcaacacgccttcttttgaataattatgtctttaatgttgatgaggacttcaacacaatacttcaagaagggactgtagaatatgtaaatgaacaacaaccttcaagaaaggctacatatgtgcaaacattatctaagtgtgctattaatgagatagcagcgggaagcaagcaatgtggtgcagaatgtagtggccagccagttgagcattgtgatcagcctgaagagcagtgcacaatggattatggcaggatggatcgattgactagcaataagaaccagattttggacaagaatactgagaattcaaaaaatacaaagatgttgaaaccatgccggaaaagtgagtttaacacaaggaagcacataattattgttgataaaattgggaggcattggaagtgtagatactgtggcatggatgtgtatggtaaaaagtttcagctccattatcatctagctggtgcatttcgtcaggctaagtgtccaaatgttcctagagaagtttttgcaaaagcaagacagcatgttctgacaaagaaaatgctaaaaaagagtaaagctgagcaacagattccttctagtccacatattcttgcccaatctggtgaagaacggcagaacaatgatccattttgtgggaatcagtctcaactgtcaataaacaatgaacctagggagccaatgatggaaggacctcatgacaatggattatgtggtgacacaaaccagttggaggaacaaaaaagtggctttggaattagtgactgctggaggtatgttttggatggacaaatgcacttgcctgatgtacaggagggtgctggaattgggacatgcatccgtgatgctcttctctatggttgtgctgaatttggcacagtacctgacaaaatggaaatggattgtgataaaacagtggatgcgaacactgctaagtgccagaatattcttaaggatgttttaagatcggagaactttgctttgttgtgcagtgtactctgcagaactgtacatcaagatggggaaagaactagatattttgattttggtgtgattgattcaaggatgaaaaatggaaattatgggcctgaacctgaattattcgtccatgatctgaaactgttatgggaagatcttaaagtggctggtcaagatattgttcacctagcaaataatctatcaagcctcacagaggactcctatgaaaagctggttggaagagagagaggatcagatgatgatgagctcaatgaagctgtggtggccaggtctgaaccgaaaaacctagttcaaccaaatgcatcggtacccttgacctcacaaggctttaaccaattattggatcaacccgggccttctgatccttctgttgtatacaaggacagtatctgcaaccgatgtgggaaagtagcaggagctggtagcgttctcaaatgttacaggtgcatgctaccttgccacatttcatgcattgaggctactggttcacccatttcaactggaaggtggtgttgtaaaaactgcagcgctggcactaaggaaccagttgaaggagacatggtcttagcccatggcaatccaaattgcttgcatgaaagttgtgtcgtctgcgacagacttgcggcctgcaggtctccaaaatgtgataactcaagagcattggttatttccagcgtggacccagagattgatacatgttactcatgcaagatatgtggaggcaccgaagaggatgagaagaggttcttgatatgcggcaacgtcctctgccgatacatgtactaccacattgggtgcctcaagtccatgcagatctctaccagtgtagagaggggcagcccgtgctggtactgcccgtcttgcctttgccgagtttgtctgtgtgacaaagacgacgacctgaccattctgtgcgatggttgcgacgaggcttaccatatctactgcataacacctcgccatacttcaatacccaaggggcagtggtattgctcatcgtgcagcgtggagagggcagaagaggggatgagacagtacgagaggaggacgctgaagctccaccggaaggaggatgctggactacaaagttggaattttgatggtgtggacctgctgctatctgccgcggagcagctcaggatagatgagcagctggagactcgtacagattagcgtgttgcacctacactctggtccttttgccgtgctaaagtgagtttgttgtttgaagagcagaggcctgcctcaggatcagagctcgggcaagggcagttaacaaaatttgctgcagtcctctcacgaactgatgaaaatacaaggatcttcaaacagcattcgccttttgagatgcgtgctatatgataacatgctgtaggatatttgtttcgtttatctgtctttttgctttgttgcacttgcacctgcttgagaagatacttaactcgatacaccttactggtatccaaactgcaagggatgttcttaaattcaaggaaaatctccaatttgagagagcaagccgtctttgaaaactgcctcaggtttttgttgaggctgttattatgctttgtggcctgaattattttagacatacaaacttattgcttcacgaccttcttctcaagtcggtctagatacttcttggggcaacgtcgaatgctatgtccttcatccttgcagtagtagtaaacactatttgctttgaggtctttg

SEQ ID NO: 73706 - DNA, 3326 bp, Zea Mays
aaaacggacgctccgagggcaagtggtgccggatttttgtcagtctcctccccacctagtctcttgtatccaatacaacctttgccttcattgccgcagttccgtttcacatcccatcctctccatttccaccccctcccatggcctgatttccgagcccccccgccattcgccccgcccccgaatccgccgtctcatcgaacgcccggtgccgtggggagaagcgaggctccggttctttgtttcttggcggccgaaatataagggaatatgattgacgatgaggaaagccaagggattaagaaggtgcatttcagggattcgttctcccagcaccctatagttacctacaagaggcgtcggcagcagaagccacagacgcagcagcaattacggcaaccaccgccatccctacagcagcatccggagccacagctacaggtgaagctggagccaaagactgaagatgtgccggaacagcagtttccgatattgagagcaagggatattggctgggagcatgctgtggatcttgatggaaataaaagacggtggcaatgcaagttctgttctctatgtcgaagtggtggtgtaactactttgaaggctcatctcattgatgacagctgcccaaacgttccaaaggaaatttcaaagaaagtatcaaacttcattgaagagaaaagagcaacacgccttcttttgaataattatgtctttaatgttgatgaggacttcaacacaatacttcaagaagggactgtagaatatgtaaatgaacaacaaccttcaagaaaggctacatatgtgcaaacattatctaagtgtgctattaatgaggtacacaattaccctgcagtgctaagggacagtgcatgggaacattctctgatatatgagaaagaaaacggacactggaagtgcaagtggtgcagtattgagggtgatcatggtttaactagattgatgtggcatcttgttggatggcagaatcgacctcagtgcccaaatataccaaaggatgttgctgaaaagatgaaggatcaaatgatgtcaaagaaggagcagaaagcgagatcagatgttcttcccaggcttttgaccatgctaacagtgaattaaaaggatgcaacatgttatccaatactattctttcacaacagagttccaatcctcaggtgcatcatgaggatcctcaggtgtgtcatgagcaagagaggaaggaggttgccacctcttcagaacctggctgtgagcaaggtcagaggatgcagtggcagtcgcaaaataagccaatgatggaaggacctcatgacaatggattatgtggtgacacaaaccagttggaggaacaaaaaagtggctttggaattagtgactgctggaggtatgttttggatggacaaatgcacttgcctgatgtacaggagggtgctggaattgggacatgcatccgtgatgctcttctctatggttgtgctgaatttggcacagtacctgacaaaatggaaatggattgtgataaaacagtggatgcgaacactgctaagtgccagaatattcttaaggatgttttaagatcggagaactttgctttgttgtgcagtgtactctgcagaactgtacatcaagatggggaaagaactagatattttgattttggtgtgattgattcaaggatgaaaaatggaaattatgggcctgaacctgaattattcgtccatgatctgaaactgttatgggaagatcttaaagtggctggtcaagatattgttcacctagcaaataatctatcaagcctcacagaggactcctatgaaaagctggttggaagagagagaggatcagatgatgatgagctcaatgaagctgtggtggccaggtctgaaccgaaaaacctagttcaaccaaatgcatcggtacccttgacctcacaaggctttaaccaattattggatcaacccgggccttctgatccttctgttgtatacaaggacagtatctgcaaccgatgtgggaaagtagcaggagctggtagcgttctcaaatgttacaggtgcatgctaccttgccacatttcatgcattgaggctactggttcacccatttcaactggaaggtggtgttgtaaaaactgcagcgctggcactaaggaaccagttgaaggagacatggtcttagcccatggcaatccaaattgcttgcatgaaagttgtgtcgtctgcgacagacttgcggcctgcaggtctccaaaatgtgataactcaagagcattggttatttccagcgtggacccagagattgatacatgttactcatgcaagatatgtggaggcaccgaagaggatgagaagaggttcttgatatgcggcaacgtcctctgccgatacatgtactaccacattgggtgcctcaagtccatgcagatctctaccagtgtagagaggggcagcccgtgctggtactgcccgtcttgcctttgccgagtttgtctgtgtgacaaagacgacgacctgaccattctgtgcgatggttgcgacgaggcttaccatatctactgcataacacctcgccatacttcaatacccaaggggcagtggtattgctcatcgtgcagcgtggagagggcagaagaggggatgagacagtacgagaggaggacgctgaagctccaccggaaggaggatgctggactacaaagttggaattttgatggtgtggacctgctgctatctgccgcggagcagctcaggatagatgagcagctggagactcgtacagattagcgtgttgcacctacactctggtccttttgccgtgctaaagtgagtttgttgtttgaagagcagaggcctgcctcaggatcagagctcgggcaagggcagttaacaaaatttgctgcagtcctctcacgaactgatgaaaatacaaggatcttcaaacagcattcgccttttgagatgcgtgctatatgataacatgctgtaggatatttgtttcgtttatctgtctttttgctttgttgcacttgcacctgcttgagaagatacttaactcgatacaccttactggtatccaaactgcaagggatgttcttaaattcaaggaaaatctccaatttgagagagcaagccgtctttgaaaactgcctcaggtttttgttgaggctgttattatgctttgtggcctgaattattttagacatacaaacttattgcttcacgaccttcttctcaagtcggtctagatacttcttggggcaacgtcgaatgctatgtccttcatccttgcagtagtagtaaacactatttgctttgaggtctttg

SEQ ID NO: 73707 - DNA, 3914 bp, Zea Mays
ggatttttgtcagtctcctccccacctagtctcttgtatccaatacaacctttgccttcattgccgcagttccgtttcacatcccatcctctccatttccaccccctcccatggcctgatttccgagcccccccgccattcgccccgcccccgaatccgccgtctcatcgaacgcccggtgccgtggggagaagcgaggctccggttctttgtttcttggcggccgaaatataagggaatatgattgacgatgaggaaagccaagggattaagaaggtgcatttcagggattcgttctcccagcaccctatagttacctacaagaggcgtcggcagcagaagccacagacgcagcagcaattacggcaaccaccgccatccctacagcagcatccggagccacagctacaggtgaagctggagccaaagactgaagatgtgccggaacagcagtttccgatattgagagcaagggatattggctgggagcatgctgtggatcttgatggaaataaaagacggtggcaatgcaagttctgttctctatgtcgaagtggtggtgtaactactttgaaggctcatctcattgatgacagctgcccaaacgttccaaaggaaatttcaaagaaagtatcaaacttcattgaagagaaaagagcaacacgccttcttttgaataattatgtctttaatgttgatgaggacttcaacacaatacttcaagaagggactgtagaatatgtaaatgaacaacaaccttcaagaaaggctacatatgtgcaaacattatctaagtgtgctattaatgagcagcgggaagcaagcaatgtggtgcagaatgtagtggccagccagttgagcattgtgatcagcctgaagagcagtgcacaatggattatggcaggatggatcgattgactagcaataagaaccagattttggacaagaatactgagaattcaaaaaatacaaagatgttgaaaccatgccggaaaagtgagtttaacacaaggaagcacataattattgttgataaaattgggaggcattggaagtgtagatactgtggcatggatgtgtatggtaaaaagtttcagctccattatcatctagctggtgcatttcgtcaggctaagtgtccaaatgttcctagagaagtttttgcaaaagcaagacagcatgttctgacaaagaaaatgctaaaaaagagtaaagctgagcaacagattccttctagtccacatattcttgcccaatctggtgaagaacggcagaacaatgatccattttgtgggaatcagtctcaactgtcaataaacaatgaacctagggaggtacacaattaccctgcagtgctaagggacagtgcatgggaacattctctgatatatgagaaagaaaacggacactggaagtgcaagtggtgcagtattgagggtgatcatggtttaactagattgatgtggcatcttgttggatggcagaatcgacctcagtgcccaaatataccaaaggatgttgctgaaaagatgaaggatcaaatgatgtcaaagaaggagcagaaagcgagatcaggtttgtttgacggcaatggctgttgtgaggtgttgtgctcttctaatagttcacaacttgatcagaaccatctcactgcaagaatacatgacagatgttcttcccaggcttttgaccatgctaacagtgaattaaaaggatgcaacatgttatccaatactattctttcacaacagagttccaatcctcaggtgcatcatgaggatcctcaggtgtgtcatgagcaagagaggaaggaggttgccacctcttcagaacctggctgtgagcaaggtcagaggatgcagtggcagtcgcaaaataagccaatgatggaaggacctcatgacaatggattatgtggtgacacaaaccagttggaggaacaaaaaagtggctttggaattagtgactgctggaggtatgttttggatggacaaatgcacttgcctgatgtacaggagggtgctggaattgggacatgcatccgtgatgctcttctctatggttgtgctgaatttggcacagtacctgacaaaatggaaatggattgtgataaaacagtggatgcgaacactgctaagtgccagaatattcttaaggatgttttaagatcggagaactttgctttgttgtgcagtgtactctgcagaactgtacatcaagatggggaaagaactagatattttgattttggtgtgattgattcaaggatgaaaaatggaaattatgggcctgaacctgaattattcgtccatgatctgaaactgttatgggaagatcttaaagtggctggtcaagatattgttcacctagcaaataatctatcaagcctcacagaggactcctatgaaaagctggttggaagagagagaggatcagatgatgatgagctcaatgaagctgtggtggccaggtctgaaccgaaaaacctagttcaaccaaatgcatcggtacccttgacctcacaaggctttaaccaattattggatcaacccgggccttctgatccttctgttgtatacaaggacagtatctgcaaccgatgtgggaaagtagcaggagctggtagcgttctcaaatgttacaggtgcatgctaccttgccacatttcatgcattgaggctactggttcacccatttcaactggaaggtggtgttgtaaaaactgcagcgctggcactaaggaaccagttgaaggagacatggtcttagcccatggcaatccaaattgcttgcatgaaagttgtgtcgtctgcgacagacttgcggcctgcaggtctccaaaatgtgataactcaagagcattggttatttccagcgtggacccagagattgatacatgttactcatgcaagatatgtggaggcaccgaagaggatgagaagaggttcttgatatgcggcaacgtcctctgccgatacatgtactaccacattgggtgcctcaagtccatgcagatctctaccagtgtagagaggggcagcccgtgctggtactgcccgtcttgcctttgccgagtttgtctgtgtgacaaagacgacgacctgaccattctgtgcgatggttgcgacgaggcttaccatatctactgcataacacctcgccatacttcaatacccaaggggcagtggtattgctcatcgtgcagcgtggagagggcagaagaggggatgagacagtacgagaggaggacgctgaagctccaccggaaggaggatgctggactacaaagttggaattttgatggtgtggacctgctgctatctgccgcggagcagctcaggatagatgagcagctggagactcgtacagattagcgtgttgcacctacactctggtccttttgccgtgctaaagtgagtttgttgtttgaagagcagaggcctgcctcaggatcagagctcgggcaagggcagttaacaaaatttgctgcagtcctctcacgaactgatgaaaatacaaggatcttcaaacagcattcgccttttgagatgcgtgctatatgataacatgctgtaggatatttgtttcgtttatctgtctttttgctttgttgcacttgcacctgcttgagaagatacttaactcgatacaccttactggtatccaaactgcaagggatgttcttaaattcaaggaaaatctccaatttgagagagcaagccgtctttgaaaactgcctcaggtttttgttgaggctgttattatgctttgtggcctgaattattttagacatacaaacttattgcttcacgaccttcttctcaagtcggtctagatacttcttggggcaacgtcgaatgctatgtccttcatccttgcagtagtagtaaacactatttgctttgaggtctttg

SEQ ID NO: 73708 - DNA, 3266 bp, Zea Mays
ggatttttgtcagtctcctccccacctagtctcttgtatccaatacaacctttgccttcattgccgcagttccgtttcacatcccatcctctccatttccaccccctcccatggcctgatttccgagcccccccgccattcgccccgcccccgaatccgccgtctcatcgaacgcccggtgccgtggggagaagcgaggctccggttctttgtttcttggcggccgaaatataagggaatatgattgacgatgaggaaagccaagggattaagaaggtgcatttcagggattcgttctcccagcaccctatagttacctacaagaggcgtcggcagcagaagccacagacgcagcagcaattacggcaaccaccgccatccctacagcagcatccggagccacagctacaggtgaagctggagccaaagactgaagatgtgccggaacagcagtttccgatattgagagcaagggatattggctgggagcatgctgtggatcttgatggaaataaaagacggtggcaatgcaagttctgttctctatgtcgaagtggtggtgtaactactttgaaggctcatctcattgatgacagctgcccaaacgttccaaaggaaatttcaaagaaagtatcaaacttcattgaagagaaaagagcaacacgccttcttttgaataattatgtctttaatgttgatgaggacttcaacacaatacttcaagaagggactgtagaatatgtaaatgaacaacaaccttcaagaaaggctacatatgtgcaaacattatctaagtgtgctattaatgagatagcagcgggaagcaagcaatgtggtgcagaatgtagtggccagccagttgagcattgtgatcagcctgaagagcagtgcacaatggattatggcaggatggatcgattgactagcaataagaaccagattttggacaagaatactgagaattcaaaaaatacaaagatgttgaaaccatgccggaaaagtgagtttaacacaaggaagcacataattattgttgataaaattgggaggcattggaagtgtagatactgtggcatggatgtgtatggtaaaaagtttcagctccattatcatctagctggtgcatttcgtcaggctaagtgtccaaatgttcctagagaagtttttgcaaaagcaagacagcatgttctgacaaagaaaatgctaaaaaagagtaaagctgagcaacagattccttctagtccacatattcttgcccaatctggtgaagaacggcagaacaatgatccattttgtgggaatcagtctcaactgtcaataaacaatgaacctagggagccaatgatggaaggacctcatgacaatggattatgtggtgacacaaaccagttggaggaacaaaaaagtggctttggaattagtgactgctggaggtacctgacaaaatggaaatggattgtgataaaacagtggatgcgaacactgctaagtgccagaatattcttaaggatgttttaagatcggagaactttgctttgttgtgcagtgtactctgcagaactgtacatcaagatggggaaagaactagatattttgattttggtgtgattgattcaaggatgaaaaatggaaattatgggcctgaacctgaattattcgtccatgatctgaaactgttatgggaagatcttaaagtggctggtcaagatattgttcacctagcaaataatctatcaagcctcacagaggactcctatgaaaagctggttggaagagagagaggatcagatgatgatgagctcaatgaagctgtggtggccaggtctgaaccgaaaaacctagttcaaccaaatgcatcggtacccttgacctcacaaggctttaaccaattattggatcaacccgggccttctgatccttctgttgtatacaaggacagtatctgcaaccgatgtgggaaagtagcaggagctggtagcgttctcaaatgttacaggtgcatgctaccttgccacatttcatgcattgaggctactggttcacccatttcaactggaaggtggtgttgtaaaaactgcagcgctggcactaaggaaccagttgaaggagacatggtcttagcccatggcaatccaaattgcttgcatgaaagttgtgtcgtctgcgacagacttgcggcctgcaggtctccaaaatgtgataactcaagagcattggttatttccagcgtggacccagagattgatacatgttactcatgcaagatatgtggaggcaccgaagaggatgagaagaggttcttgatatgcggcaacgtcctctgccgatacatgtactaccacattgggtgcctcaagtccatgcagatctctaccagtgtagagaggggcagcccgtgctggtactgcccgtcttgcctttgccgagtttgtctgtgtgacaaagacgacgacctgaccattctgtgcgatggttgcgacgaggcttaccatatctactgcataacacctcgccatacttcaatacccaaggggcagtggtattgctcatcgtgcagcgtggagagggcagaagaggggatgagacagtacgagaggaggacgctgaagctccaccggaaggaggatgctggactacaaagttggaattttgatggtgtggacctgctgctatctgccgcggagcagctcaggatagatgagcagctggagactcgtacagattagcgtgttgcacctacactctggtccttttgccgtgctaaagtgagtttgttgtttgaagagcagaggcctgcctcaggatcagagctcgggcaagggcagttaacaaaatttgctgcagtcctctcacgaactgatgaaaatacaaggatcttcaaacagcattcgccttttgagatgcgtgctatatgataacatgctgtaggatatttgtttcgtttatctgtctttttgctttgttgcacttgcacctgcttgagaagatacttaactcgatacaccttactggtatccaaactgcaagggatgttcttaaattcaaggaaaatctccaatttgagagagcaagccgtctttgaaaactgcctcaggtttttgttgaggctgttattatgctttgtggcctgaattattttagacatacaaacttattgcttcacgaccttcttctcaagtcggtctagatacttcttggggcaacgtcgaatgctatgtccttcatccttgcagtagtagtaaacactatttgctttgaggtctttg

SEQ ID NO: 73709 - DNA, 3417 bp, Zea Mays
ggatttttgtcagtctcctccccacctagtctcttgtatccaatacaacctttgccttcattgccgcagttccgtttcacatcccatcctctccatttccaccccctcccatggcctgatttccgagcccccccgccattcgccccgcccccgaatccgccgtctcatcgaacgcccggtgccgtggggagaagcgaggctccggttctttgtttcttggcggccgaaatataagggaatatgattgacgatgaggaaagccaagggattaagaaggtgcatttcagggattcgttctcccagcaccctatagttacctacaagaggcgtcggcagcagaagccacagacgcagcagcaattacggcaaccaccgccatccctacagcagcatccggagccacagctacaggtgaagctggagccaaagactgaagatgtgccggaacagcagtttccgatattgagagcaagggatattggctgggagcatgctgtggatcttgatggaaataaaagacggtggcaatgcaagttctgttctctatgtcgaagtggtggtgtaactactttgaaggctcatctcattgatgacagctgcccaaacgttccaaaggaaatttcaaagaaagtatcaaacttcattgaagagaaaagagcaacacgccttcttttgaataattatgtctttaatgttgatgaggacttcaacacaatacttcaagaagggactgtagaatatgtaaatgaacaacaaccttcaagaaaggctacatatgtgcaaacattatctaagtgtgctattaatgaggtacacaattaccctgcagtgctaagggacagtgcatgggaacattctctgatatatgagaaagaaaacggacactggaagtgcaagtggtgcagtattgagggtgatcatggtttaactagattgatgtggcatcttgttggatggcagaatcgacctcagtgcccaaatataccaaaggatgttgctgaaaagatgaaggatcaaatgatgtcaaagaaggagcagaaagcgagatcaggtttgtttgacggcaatggctgttgtgaggtgttgtgctcttctaatagttcacaacttgatcagaaccatctcactgcaagaatacatgacagatgttcttcccaggcttttgaccatgctaacagtgaattaaaaggatgcaacatgttatccaatactattctttcacaacagagttccaatcctcaggtgcatcatgaggatcctcaggtgtgtcatgagcaagagaggaaggaggttgccacctcttcagaacctggctgtgagcaaggtcagaggatgcagtggcagtcgcaaaataagttaagtactaaaatttttattatgcagccaatgatggaaggacctcatgacaatggattatgtggtgacacaaaccagttggaggaacaaaaaagtggctttggaattagtgactgctggaggtatgttttggatggacaaatgcacttgcctgatgtacaggagggtgctggaattgggacatgcatccgtgatgctcttctctatggttgtgctgaatttggcacagtacctgacaaaatggaaatggattgtgataaaacagtggatgcgaacactgctaagtgccagaatattcttaaggatgttttaagatcggagaactttgctttgttgtgcagtgtactctgcagaactgtacatcaagatggggaaagaactagatattttgattttggtgtgattgattcaaggatgaaaaatggaaattatgggcctgaacctgaattattcgtccatgatctgaaactgttatgggaagatcttaaagtggctggtcaagatattgttcacctagcaaataatctatcaagcctcacagaggactcctatgaaaagctggttggaagagagagaggatcagatgatgatgagctcaatgaagctgtggtggccaggtctgaaccgaaaaacctagttcaaccaaatgcatcggtacccttgacctcacaaggctttaaccaattattggatcaacccgggccttctgatccttctgttgtatacaaggacagtatctgcaaccgatgtgggaaagtagcaggagctggtagcgttctcaaatgttacaggtgcatgctaccttgccacatttcatgcattgaggctactggttcacccatttcaactggaaggtggtgttgtaaaaactgcagcgctggcactaaggaaccagttgaaggagacatggtcttagcccatggcaatccaaattgcttgcatgaaagttgtgtcgtctgcgacagacttgcggcctgcaggtctccaaaatgtgataactcaagagcattggttatttccagcgtggacccagagattgatacatgttactcatgcaagatatgtggaggcaccgaagaggatgagaagaggttcttgatatgcggcaacgtcctctgccgatacatgtactaccacattgggtgcctcaagtccatgcagatctctaccagtgtagagaggggcagcccgtgctggtactgcccgtcttgcctttgccgagtttgtctgtgtgacaaagacgacgacctgaccattctgtgcgatggttgcgacgaggcttaccatatctactgcataacacctcgccatacttcaatacccaaggggcagtggtattgctcatcgtgcagcgtggagagggcagaagaggggatgagacagtacgagaggaggacgctgaagctccaccggaaggaggatgctggactacaaagttggaattttgatggtgtggacctgctgctatctgccgcggagcagctcaggatagatgagcagctggagactcgtacagattagcgtgttgcacctacactctggtccttttgccgtgctaaagtgagtttgttgtttgaagagcagaggcctgcctcaggatcagagctcgggcaagggcagttaacaaaatttgctgcagtcctctcacgaactgatgaaaatacaaggatcttcaaacagcattcgccttttgagatgcgtgctatatgataacatgctgtaggatatttgtttcgtttatctgtctttttgctttgttgcacttgcacctgcttgagaagatacttaactcgatacaccttactggtatccaaactgcaagggatgttcttaaattcaaggaaaatctccaatttgagagagcaagccgtctttgaaaactgcctcaggtttttgttgaggctgttattatgctttgtggcctgaattattttagacatacaaacttattgcttcacgaccttcttctcaagtcggtctagatacttcttggggcaacgtcgaatgctatgtccttcatccttgcagtagtagtaaacactatttgctttgaggtctttg

SEQ ID NO: 73710 - DNA, 3812 bp, Zea Mays
ggatttttgtcagtctcctccccacctagtctcttgtatccaatacaacctttgccttcattgccgcagttccgtttcacatcccatcctctccatttccaccccctcccatggcctgatttccgagcccccccgccattcgccccgcccccgaatccgccgtctcatcgaacgcccggtgccgtggggagaagcgaggctccggttctttgtttcttggcggccgaaatataagggaatatgattgacgatgaggaaagccaagggattaagaaggtgcatttcagggattcgttctcccagcaccctatagttacctacaagaggcgtcggcagcagaagccacagacgcagcagcaattacggcaaccaccgccatccctacagcagcatccggagccacagctacaggtgaagctggagccaaagactgaagatgtgccggaacagcagtttccgatattgagagcaagggatattggctgggagcatgctgtggatcttgatggaaataaaagacggtggcaatgcaagttctgttctctatgtcgaagtggtggtgtaactactttgaaggctcatctcattgatgacagctgcccaaacgttccaaaggaaatttcaaagaaagtatcaaacttcattgaagagaaaagagcaacacgccttcttttgaataattatgtctttaatgttgatgaggacttcaacacaatacttcaagaagggactgtagaatatgtaaatgaacaacaaccttcaagaaaggctacatatgtgcaaacattatctaagtgtgctattaatgagatagcagcgggaagcaagcaatgtggtgcagaatgtagtggccagccagttgagcattgtgatcagcctgaagagcagtgcacaatggattatggcaggatggatcgattgactagcaataagaaccagattttggacaagaatactgagaattcaaaaaatacaaagatgttgaaaccatgccggaaaagtgagtttaacacaaggaagcacataattattgttgataaaattgggaggcattggaagtgtagatactgtggcatggatgtgtatggtaaaaagtttcagctccattatcatctagctggtgcatttcgtcaggctaagtgtccaaatgttcctagagaagtttttgcaaaagcaagacagcatgttctgacaaagaaaatgctaaaaaagagtaaagctgagcaacagattccttctagtccacatattcttgcccaatctggtgaagaacggcagaacaatgatccattttgtgggaatcagtctcaactgtcaataaacaatgaacctagggaggtacacaattaccctgcagtgctaagggacagtgcatgggaacattctctgatatatgagaaagaaaacggacactggaagtgcaagtggtgcagtattgagggtgatcatggtttaactagattgatgtggcatcttgttggatggcagaatcgacctcagtgcccaaatataccaaaggatgttgctgaaaagatgaaggatcaaatgatgtcaaagaaggagcagaaagcgagatcaggtttgtttgacggcaatggctgttgtgaggtgttgtgctcttctaatagttcacaacttgatcagaaccatctcactgcaagaatacatgacagatgttcttcccaggcttttgaccatgctaacagtgaattaaaaggatgcaacatgttatccaatactattctttcacaacagagttccaatcctcaggtgcatcatgaggatcctcaggtgtgtcatgagcaagagaggaaggaggttgccacctcttcagaacctggctgtgagcaaggtcagaggatgcagtggcagtcgcaaaataagccaatgatggaaggacctcatgacaatggattatgtggtgacacaaaccagttggaggaacaaaaaagtggctttggaattagtgactgctggaggtacctgacaaaatggaaatggattgtgataaaacagtggatgcgaacactgctaagtgccagaatattcttaaggatgttttaagatcggagaactttgctttgttgtgcagtgtactctgcagaactgtacatcaagatggggaaagaactagatattttgattttggtgtgattgattcaaggatgaaaaatggaaattatgggcctgaacctgaattattcgtccatgatctgaaactgttatgggaagatcttaaagtggctggtcaagatattgttcacctagcaaataatctatcaagcctcacagaggactcctatgaaaagctggttggaagagagagaggatcagatgatgatgagctcaatgaagctgtggtggccaggtctgaaccgaaaaacctagttcaaccaaatgcatcggtacccttgacctcacaaggctttaaccaattattggatcaacccgggccttctgatccttctgttgtatacaaggacagtatctgcaaccgatgtgggaaagtagcaggagctggtagcgttctcaaatgttacaggtgcatgctaccttgccacatttcatgcattgaggctactggttcacccatttcaactggaaggtggtgttgtaaaaactgcagcgctggcactaaggaaccagttgaaggagacatggtcttagcccatggcaatccaaattgcttgcatgaaagttgtgtcgtctgcgacagacttgcggcctgcaggtctccaaaatgtgataactcaagagcattggttatttccagcgtggacccagagattgatacatgttactcatgcaagatatgtggaggcaccgaagaggatgagaagaggttcttgatatgcggcaacgtcctctgccgatacatgtactaccacattgggtgcctcaagtccatgcagatctctaccagtgtagagaggggcagcccgtgctggtactgcccgtcttgcctttgccgagtttgtctgtgtgacaaagacgacgacctgaccattctgtgcgatggttgcgacgaggcttaccatatctactgcataacacctcgccatacttcaatacccaaggggcagtggtattgctcatcgtgcagcgtggagagggcagaagaggggatgagacagtacgagaggaggacgctgaagctccaccggaaggaggatgctggactacaaagttggaattttgatggtgtggacctgctgctatctgccgcggagcagctcaggatagatgagcagctggagactcgtacagattagcgtgttgcacctacactctggtccttttgccgtgctaaagtgagtttgttgtttgaagagcagaggcctgcctcaggatcagagctcgggcaagggcagttaacaaaatttgctgcagtcctctcacgaactgatgaaaatacaaggatcttcaaacagcattcgccttttgagatgcgtgctatatgataacatgctgtaggatatttgtttcgtttatctgtctttttgctttgttgcacttgcacctgcttgagaagatacttaactcgatacaccttactggtatccaaactgcaagggatgttcttaaattcaaggaaaatctccaatttgagagagcaagccgtctttgaaaactgcctcaggtttttgttgaggctgttattatgctttgtggcctgaattattttagacatacaaacttattgcttcacgaccttcttctcaagtcggtctagatacttcttggggcaacgtcgaatgctatgtccttcatccttgcagtagtagtaaacactatttgctttgaggtctttg

SEQ ID NO: 73711 - DNA, 3135 bp, Zea Mays
cagtttccgatattgagagcaagggatattggctgggagcatgctgtggatcttgatggaaataaaagacggtggcaatgcaagttctgttctctatgtcgaagtggtggtgtaactactttgaaggctcatctcattgatgacagctgcccaaacgttccaaaggaaatttcaaagaaagtatcaaacttcattgaagagaaaagagcaacacgccttcttttgaataattatgtctttaatgttgatgaggacttcaacacaatacttcaagaagggactgtagaatatgtaaatgaacaacaaccttcaagaaaggctacatatgtgcaaacattatctaagtgtgctattaatgagatagcagcgggaagcaagcaatgtggtgcagaatgtagtggccagccagttgagcattgtgatcagcctgaagagcagtgcacaatggattatggcaggatggatcgattgactagcaataagaaccagattttggacaagaatactgagaattcaaaaaatacaaaggtacacaattaccctgcagtgctaagggacagtgcatgggaacattctctgatatatgagaaagaaaacggacactggaagtgcaagtggtgcagtattgagggtgatcatggtttaactagattgatgtggcatcttgttggatggcagaatcgacctcagtgcccaaatataccaaaggatgttgctgaaaagatgaaggatcaaatgatgtcaaagaaggagcagaaagcgagatcaggtttgtttgacggcaatggctgttgtgaggtgttgtgctcttctaatagttcacaacttgatcagaaccatctcactgcaagaatacatgacagatgttcttcccaggcttttgaccatgctaacagtgaattaaaaggatgcaacatgttatccaatactattctttcacaacagagttccaatcctcaggtgcatcatgaggatcctcaggtgtgtcatgagcaagagaggaaggaggttgccacctcttcagaacctggctgtgagcaaggtcagaggatgcagtggcagtcgcaaaataagttaagtactaaaatttttattatgcagccaatgatggaaggacctcatgacaatggattatgtggtgacacaaaccagttggaggaacaaaaaagtggctttggaattagtgactgctggaggtatgttttggatggacaaatgcacttgcctgatgtacaggagggtgctggaattgggacatgcatccgtgatgctcttctctatggttgtgctgaatttggcacagtacctgacaaaatggaaatggattgtgataaaacagtggatgcgaacactgctaagtgccagaatattcttaaggatgttttaagatcggagaactttgctttgttgtgcagtgtactctgcagaactgtacatcaagatggggaaagaactagatattttgattttggtgtgattgattcaaggatgaaaaatggaaattatgggcctgaacctgaattattcgtccatgatctgaaactgttatgggaagatcttaaagtggctggtcaagatattgttcacctagcaaataatctatcaagcctcacagaggactcctatgaaaagctggttggaagagagagaggatcagatgatgatgagctcaatgaagctgtggtggccaggtctgaaccgaaaaacctagttcaaccaaatgcatcggtacccttgacctcacaaggctttaaccaattattggatcaacccgggccttctgatccttctgttgtatacaaggacagtatctgcaaccgatgtgggaaagtagcaggagctggtagcgttctcaaatgttacaggtgcatgctaccttgccacatttcatgcattgaggctactggttcacccatttcaactggaaggtggtgttgtaaaaactgcagcgctggcactaaggaaccagttgaaggagacatggtcttagcccatggcaatccaaattgcttgcatgaaagttgtgtcgtctgcgacagacttgcggcctgcaggtctccaaaatgtgataactcaagagcattggttatttccagcgtggacccagagattgatacatgttactcatgcaagatatgtggaggcaccgaagaggatgagaagaggttcttgatatgcggcaacgtcctctgccgatacatgtactaccacattgggtgcctcaagtccatgcagatctctaccagtgtagagaggggcagcccgtgctggtactgcccgtcttgcctttgccgagtttgtctgtgtgacaaagacgacgacctgaccattctgtgcgatggttgcgacgaggcttaccatatctactgcataacacctcgccatacttcaatacccaaggggcagtggtattgctcatcgtgcagcgtggagagggcagaagaggggatgagacagtacgagaggaggacgctgaagctccaccggaaggaggatgctggactacaaagttggaattttgatggtgtggacctgctgctatctgccgcggagcagctcaggatagatgagcagctggagactcgtacagattagcgtgttgcacctacactctggtccttttgccgtgctaaagtgagtttgttgtttgaagagcagaggcctgcctcaggatcagagctcgggcaagggcagttaacaaaatttgctgcagtcctctcacgaactgatgaaaatacaaggatcttcaaacagcattcgccttttgagatgcgtgctatatgataacatgctgtaggatatttgtttcgtttatctgtctttttgctttgttgcacttgcacctgcttgagaagatacttaactcgatacaccttactggtatccaaactgcaagggatgttcttaaattcaaggaaaatctccaatttgagagagcaagccgtctttgaaaactgcctcaggtttttgttgaggctgttattatgctttgtggcctgaattattttagacatacaaacttattgcttcacgaccttcttctcaagtcggtctagatacttcttggggcaacgtcgaatgctatgtccttcatccttgcagtagtagtaaacactatttgctttgaggtctttg

SEQ ID NO: 73712 - DNA, 2288 bp, Zea Mays
cagtttccgatattgagagcaagggatattggctgggagcatgctgtggatcttgatggaaataaaagacggtggcaatgcaagttctgttctctatgtcgaagtggtggtgtaactactttgaaggctcatctcattgatgacagctgcccaaacgttccaaaggaaatttcaaagaaagtatcaaacttcattgaagagaaaagagcaacacgccttcttttgaataattatgtctttaatgttgatgaggacttcaacacaatacttcaagaagggactgtagaatatgtaaatgaacaacaaccttcaagaaaggctacatatgtgcaaacattatctaagtgtgctattaatgagccaatgatggaaggacctcatgacaatggattatgtggtgacacaaaccagttggaggaacaaaaaagtggctttggaattagtgactgctggaggtacctgacaaaatggaaatggattgtgataaaacagtggatgcgaacactgctaagtgccagaatattcttaaggatgttttaagatcggagaactttgctttgttgtgcagtgtactctgcagaactgtacatcaagatggggaaagaactagatattttgattttggtgtgattgattcaaggatgaaaaatggaaattatgggcctgaacctgaattattcgtccatgatctgaaactgttatgggaagatcttaaagtggctggtcaagatattgttcacctagcaaataatctatcaagcctcacagaggactcctatgaaaagctggttggaagagagagaggatcagatgatgatgagctcaatgaagctgtggtggccaggtctgaaccgaaaaacctagttcaaccaaatgcatcggtacccttgacctcacaaggctttaaccaattattggatcaacccgggccttctgatccttctgttgtatacaaggacagtatctgcaaccgatgtgggaaagtagcaggagctggtagcgttctcaaatgttacaggtgcatgctaccttgccacatttcatgcattgaggctactggttcacccatttcaactggaaggtggtgttgtaaaaactgcagcgctggcactaaggaaccagttgaaggagacatggtcttagcccatggcaatccaaattgcttgcatgaaagttgtgtcgtctgcgacagacttgcggcctgcaggtctccaaaatgtgataactcaagagcattggttatttccagcgtggacccagagattgatacatgttactcatgcaagatatgtggaggcaccgaagaggatgagaagaggttcttgatatgcggcaacgtcctctgccgatacatgtactaccacattgggtgcctcaagtccatgcagatctctaccagtgtagagaggggcagcccgtgctggtactgcccgtcttgcctttgccgagtttgtctgtgtgacaaagacgacgacctgaccattctgtgcgatggttgcgacgaggcttaccatatctactgcataacacctcgccatacttcaatacccaaggggcagtggtattgctcatcgtgcagcgtggagagggcagaagaggggatgagacagtacgagaggaggacgctgaagctccaccggaaggaggatgctggactacaaagttggaattttgatggtgtggacctgctgctatctgccgcggagcagctcaggatagatgagcagctggagactcgtacagattagcgtgttgcacctacactctggtccttttgccgtgctaaagtgagtttgttgtttgaagagcagaggcctgcctcaggatcagagctcgggcaagggcagttaacaaaatttgctgcagtcctctcacgaactgatgaaaatacaaggatcttcaaacagcattcgccttttgagatgcgtgctatatgataacatgctgtaggatatttgtttcgtttatctgtctttttgctttgttgcacttgcacctgcttgagaagatacttaactcgatacaccttactggtatccaaactgcaagggatgttcttaaattcaaggaaaatctccaatttgagagagcaagccgtctttgaaaactgcctcaggtttttgttgaggctgttattatgctttgtggcctgaattattttagacatacaaacttattgcttcacgaccttcttctcaagtcggtctagatacttcttggggcaacgtcgaatgctatgtccttcatccttgcagtagtagtaaacactatttgctttgaggtctttg

SEQ ID NO: 73713 - DNA, 3730 bp, Zea Mays
aataagtcacccaaccaaacagcgagcgcaaggaagaaaggtcgaagcgtcgtctctctcggcacggagcctagtgcccggcctcgtgagatccgaaattcagaagcgaggatggcgacgaccgcgactaggcggtggtggaggcggcacgacggcggcgacgatgacccagacgacctcgtccccatggacacccaagagcaagaagagctggtccggtctctggaggctaagcaggcgcagcaaggccgccgttggaggcgcgtcttcgcggggttcctcctaggttacgtggccttccttgtctactccagtttccatcatgcttggtctccctgggagctggttggtttcttactcctgacaactattcttctgtttatgacgtttatggtcatgttttatgcccaattgttgattacacctgccattaattgaggccccaagttcattcaggcaccacacagtgagttccttttacattggatttggaccataatatcatgttattttgtcttgtatacttacgctttcttgaaagcttcctgataactaaaatgcttgcaatattggaaatagttagtcactgatgtatgcttggcactaggaagaatcattattataggaagaatcaagtttttcttattggtgtagttaatcgatttgccttaaactgtgcttctcaaattaacagcggtaccatgcttacttcatggaagatttgcctgcaccaatggtcataattgcagattggatagctgctctagcatgcctatttgctgtgaaaggattactacagaattcaggcccatcaaagaagtggatgtggtattcttgctatgttggcattttggtagccatcttttggacatactacatcttgaggttgccaagaattcgatgggatgttgcatggctcccactcggtcctttgatggctggtgcattgagcctgtatgtggaccatgtgctgctggagtcaatgcaagatatcagcacattgagaagttacatgtataacttcaaggccttgtagttttgagcataatttcccttgcacctatatgcagctatatgtggaacaggttcaggtcatttctccttttttttagtggcagagttgcggtggtaccttgttaaatggtgtgttagcatgaatttttaacctcagagaatacttgtgcatcacttccgctctgtggcgggtgtatgtacaagctgtggtgccaataggcaccgcggctgtttgaaacacccccctgcttcagtgcttctactgatgtccatatttgttgtagaaattgatgatttttgagaggcttaggttgtgtttggttgcgggattgctggggtcgacatacttcttctagtagtagtacaacaggttctagtagtagtataacagggagtggagtactgccatgcttgcgatgatatgtgtgttagattatgtgttgtctgcaggattacagtaagttttcagtacatttccatacagctaaagcagagacaatgtgatttgattttagaggattttacatatggcattcaacctggtttaggtcactgtacctagacagcaacatttcttttctttatctttaaagccggtacaaaacggaagcaacgagcctatccacgtcatcaagaaattgcgaaccgttcgatttctaatccaagcttccagtgcgccgacgcagcagtatcattggcaagttagaaaaaggaaatttctttatctttaaagccggtacaaaacggaagcaacgagcctatccacgtcatcaagaaattgcgaaccgttcgatttctaatccaagcttccagtgcgccgacgcagcagtatcattggcaagttagaaaaaggaaataaaaaaggtctactctgtccagaagactgtccagagaattctgtcgcacttcgggacacttctccctccgctgcatctcactttctctcccggctgtttcgtcttccttggctttcctcctctctacgcgctttcatttcatccatgtcggcttcctcgtttgctcggcttcagcacaaacgcttcatctggtattgacatccacctcggctctgtttgtttggtgagatacagtttcttttctcccccgtcgtctgctccttctcggtgggtatctggttctagattggaaatatccaacgccctctcgctttttaaatccttcaatcttccatatgcctgcttggcactgctagattcgtttaggttttccctacaacatgtgaatatgtcactgcctttttttggataaaatggtttggaagatctgcaaacttcatttttctttttttaggattccacccttctactgaaaggttcgtgttctcttgtttgtgctctccaattttgttttttttctttttcctaggcttcaggttcgtttcttttccgaaaatgatcctttttggttgagctaagttttcctttttatatcctcgtctgtttcgttttaggtggacatctgatttcattcaggtgaactgtttgcatcgaagcggagatttcattttccttttttgtcgatacattgaggttcgaaaagggcactattttacttagctaattgattgagtgcctctgttcttcaaactttttttcaatgtttagggtttgtctggttttagcttttcgagctattccttggtttctgtgctccattctaagacctgtatattgctcgtaactttgactatttgcaaataacagtgttgctattcctgagaagtaatagcagtgttgcttctgattttctacctttccctgagttcttcgtctttattttttttcactttaaccaaatgtagtttttatttcctgctcgttccgaacatttccttgtctctcatttttatatatgtctcctaagatcggttcatgcatccaacccacatcaaaatcaacagacatggtatctattgataaacagaggcaattactattgcagcttgggatcaaacatggtttacaaatttgttgtattactatgggcgtgtaaaaagggtcaattctatgttctaaacttatttccaaacattcaggcagaatttgatctgggcacaaggtacaatatgtcctaccttagagattttactacaaagaggacctcagatcgttagagacttcgctaacgagagcttgccggattgtttaattctctttaggggtacccatacgcacgcgcttgcgccaatcgtgccttattcaatggagaatagtgttgcagatgcaatgtacaacaaaattattgtttttgttttcgaccaagttgtggataccacaccctggaagagttggtggtagattcttcatcaagtatggaatgtctgcgatgcctagctaggtgcttgatggcaacaggtgcatatcaaaactattaattattttcatgtgttcctgcttcaagaacacatgcaatagtaataggtttccattagtttaaatgtcacatgcaaagaagcaaacaccacccagactttcttcttagtttgccattatcacatctgtactcatcatgcacatgaaacttttggttatgtacaactcaaaggtagaaggaagaccttaaggcacatgataaagctcgagctttatcgatggtcggacgatgataacgcgctggaagaagtaatgagtagagattaactgtttcctgagcaatgaatgtaagaaaggttaccagacgttccaatgcagtcaaa

SEQ ID NO: 73714 - DNA, 1560 bp, Zea Mays
aaccaaacagcgagcgcaaggaagaaaggtcgaagcgtcgtctctctcggcacggagcctagtgcccggcctcgtgagatccgaaattcagaagcgaggatggcgacgaccgcgactaggcggtggtggaggcggcacgacggcggcgacgatgacccagacgacctcgtccccatggacacccaagagcaagaagagctggtccggtctctggaggctaagcaggcgcagcaaggccgccgttggaggcgcgtcttcgcggggttcctcctaggttacgtggccttccttgtctactccagtttccatcatgcttggtctccctgggagctgcggtaccatgcttacttcatggaagatttgcctgcaccaatggtcataattgcagattggatagctgctctagcatgcctatttgctgtgaaaggattactacagaattcaggcccatcaaagaagtggatgtggtattcttgctatgttggcattttggtagccatcttttggacatactacatcttgaggttgccaagaattcgatgggatgttgcatggctcccactcggtcctttgatggctggtgcattgagcctgtatgtggaccatgtgctgctggagtcaatgcaagatatcagcacattgagaagttacatgcagaatttgatctgggcacaaggtacaatatgtcctaccttagagattttactacaaagtttatgtttattcctgttctttcgttgaaacatgttgaagaggacctcagatcgttagagacttcgctaacgagagcttgccggattgtttaattctctttaggggtacccatacgcacgcgcttgcgccaatcgtgccttattcaatggagaatagtgttgcagatgcaatgtacaacaaaattattgtttttgttttcgaccaagttgtggataccacaccctggaagagttggtggtagattcttcatcaagtatggaatgtctgcgatgcctagctaggtgcttgatggcaacaggtgcatatcaaaactattaattattttcatgtgttcctgcttcaagaacacatgcaatagtaataggtttccattagtttaaatgtcacatgcaaagaagcaaacaccacccagactttcttcttagtttgccattatcacatctgtactcatcatgcacatgaaacttttggttatgtacaactcaaaggtagaaggaagaccttaaggtatgttgtcatagtaattgtgaaatggatttggcactggtatttgatattttctgacttctagcatcactctgaaggcacatgataaagctcgagctttatcgatggtcggacgatgataacgcgctggaagaagtaatgagtagagagtatgttctttatttcttatttatgtacaaattaagatctcacggacgaatttaacaccgtgcgcagggcgcgcggcaatacactagtacagattaaattttgttgattgtgtgcctcttgaacatgcagttaactgtttcctgagcaatgaatgtaagaaaggttaccagacgttccaatgcagtcaaa

SEQ ID NO: 73715 - DNA, 1700 bp, Zea Mays
aaccaaacagcgagcgcaaggaagaaaggtcgaagcgtcgtctctctcggcacggagcctagtgcccggcctcgtgagatccgaaattcagaagcgaggatggcgacgaccgcgactaggcggtggtggaggcggcacgacggcggcgacgatgacccagacgacctcgtccccatggacacccaagagcaagaagagctggtccggtctctggaggctaagcaggcgcagcaaggccgccgttggaggcgcgtcttcgcggggttcctcctaggttacgtggccttccttgtctactccagtttccatcatgcttggtctccctgggagctgcggtaccatgcttacttcatggaagatttgcctgcaccaatggtcataattgcagattggatagctgctctagcatgcctatttgctgtgaaaggattactacagaattcaggcccatcaaagaagtggatgtggtattcttgctatgttggcattttggtagccatcttttggacatactacatcttgaggtatatcgtcttagtcaacttatctttttttcccttcccatgtcactcaaatgctttgctaaaatattagcatttcaaaaccatttgtatcatgtcagcactattctagctgttgtagctacactaacacacagcagccagttctagatatggtattccttctgactgttggtgttgtaggttgccaagaattcgatgggatgttgcatggctcccactcggtcctttgatggctggtgcattgagcctgtatgtggaccatgtgctgctggagtcaatgcaagatatcagcacattgagaagttacatgcagaatttgatctgggcacaaggtacaatatgtcctaccttagagattttactacaaagaggacctcagatcgttagagacttcgctaacgagagcttgccggattgtttaattctctttaggggtacccatacgcacgcgcttgcgccaatcgtgccttattcaatggagaatagtgttgcagatgcaatgtacaacaaaattattgtttttgttttcgaccaagttgtggataccacaccctggaagagttggtggtagattcttcatcaagtatggaatgtctgcgatgcctagctaggtgcttgatggcaacaggtgcatatcaaaactattaattattttcatgtgttcctgcttcaagaacacatgcaatagtaataggtttccattagtttaaatgtcacatgcaaagaagcaaacaccacccagactttcttcttagtttgccattatcacatctgtactcatcatgcacatgaaacttttggttatgtacaactcaaaggtagaaggaagaccttaaggtatgttgtcatagtaattgtgaaatggatttggcactggtatttgatattttctgacttctagcatcactctgaaggcacatgataaagctcgagctttatcgatggtcggacgatgataacgcgctggaagaagtaatgagtagagagtatgttctttatttcttatttatgtacaaattaagatctcacggacgaatttaacaccgtgcgcagggcgcgcggcaatacactagtacagattaaattttgttgattgtgtgcctcttgaacatgcagttaactgtttcctgagcaatgaatgtaagaaaggttaccagacgttccaatgcagtcaaa

SEQ ID NO: 73716 - DNA, 1131 bp, Zea Mays
cttcgggacacttctccctccgctgcatctcactttctctcccggctgtttcgtcttccttggctttcctcctctctacgcgctttcatttcatccatgtcggcttcctcgtttgctcggcttcagcacaaacgcttcatctggcagaatttgatctgggcacaaggtacaatatgtcctaccttagagattttactacaaaggggtacccatacgcacgcgcttgcgccaatcgtgccttattcaatggagaatagtgttgcagatgcaatgtacaacaaaattattgtttttggtgagtatgtttttcaaaaaataattatgaacatcatctctacatacttcctgagaacgtgttccgattacaaatatgaacatcatttcatagctttttaccattttcctttttccctagcacattaatgaagagcttagtactgaaactacttgaactgcatactaaaattatttacctgtagttttcgaccaagttgtggataccacaccctggaagagttggtggtagattcttcatcaagtatggaatgtctgcgatgcctagctaggtgcttgatggcaacaggtgcatatcaaaactattaattattttcatgtgttcctgcttcaagaacacatgcaatagtaataggtttccattagtttaaatgtcacatgcaaagaagcaaacaccacccagactttcttcttagtttgccattatcacatctgtactcatcatgcacatgaaacttttggttatgtacaactcaaaggtagaaggaagaccttaaggtatgttgtcatagtaattgtgaaatggatttggcactggtatttgatattttctgacttctagcatcactctgaaggcacatgataaagctcgagctttatcgatggtcggacgatgataacgcgctggaagaagtaatgagtagagagtatgttctttatttcttatttatgtacaaattaagatctcacggacgaatttaacaccgtgcgcagggcgcgcggcaatacactagtacagattaaattttgttgattgtgtgcctcttgaacatgcagttaactgtttcctgagcaatgaatgtaagaaaggttaccagacgttccaatgcagtcaaa

SEQ ID NO: 73717 - DNA, 997 bp, Zea Mays
ctccctccgctgcatctcactttctctcccggctgtttcgtcttccttggctttcctcctctctacgcgctttcatttcatccatgtcggcttcctcgtttgctcggcttcagcacaaacgcttcatctggcagaatttgatctgggcacaaggtacaatatgtcctaccttagagattttactacaaagaggacctcagatcgttagagacttcgctaacgagagcttgccggattgtttaattctctttaggggtacccatacgcacgcgcttgcgccaatcgtgccttattcaatggagaatagtgttgcagatgcaatgtacaacaaaattattgtttttgttttcgaccaagttgtggataccacaccctggaagagttggtggtagattcttcatcaagtatggaatgtctgcgatgcctagctaggtgcttgatggcaacaggtgcatatcaaaactattaattattttcatgtgttcctgcttcaagaacacatgcaatagtaataggtttccattagtttaaatgtcacatgcaaagaagcaaacaccacccagactttcttcttagtttgccattatcacatctgtactcatcatgcacatgaaacttttggttatgtacaactcaaaggtagaaggaagaccttaaggtatgttgtcatagtaattgtgaaatggatttggcactggtatttgatattttctgacttctagcatcactctgaaggcacatgataaagctcgagctttatcgatggtcggacgatgataacgcgctggaagaagtaatgagtagagagtatgttctttatttcttatttatgtacaaattaagatctcacggacgaatttaacaccgtgcgcagggcgcgcggcaatacactagtacagattaaattttgttgattgtgtgcctcttgaacatgcagttaactgtttcctgagcaatgaatgtaagaaaggttaccagacgttccaatgcagtcaaa

SEQ ID NO: 73718 - DNA, 1759 bp, Zea Mays
ctccctccgctgcatctcactttctctcccggctgtttcgtcttccttggctttcctcctctctacgcgctttcatttcatccatgtcggcttcctcgtttgctcggcttcagcacaaacgcttcatctggtattgacatccacctcggctctgtttgtttggtgagatacagtttcttttctcccccgtcgtctgctccttctcggtgggtatctggttctagattggaaatatccaacgccctctcgctttttaaatccttcaatcttccatatgcctgcttggcactgctagattcgtttaggttttccctacaacatgtgaatatgtcactgcctttttttggataaaatggtttggaagatctgcaaacttcatttttctttttttaggattccacccttctactgaaaggttcgtgttctcttgtttgtgctctccaattttgttttttttctttttcctaggcttcaggttcgtttcttttccgaaaatgatcctttttggttgagctaagttttcctttttatatcctcgtctgtttcgttttaggtggacatctgatttcattcaggtgaactgtttgcatcgaagcggagatttcattttccttttttgtcgatacattgaggttcgaaaagggcactattttacttagctaattgattgagtgcctctgttcttcaaactttttttcaatgtttagggtttgtctggttttagcttttcgagctattccttggtttctgtgctccattctaagacctgtatattgctcgtaactttgactatttgcaaataacagtgttgctattcctgagaagtaatagcagtgttgcttctgattttctacctttccctgagttcttcgtctttattttttttcactttaaccaaatgtagtttttatttcctgctcgttccgaacatttccttgtctctcatttttatatatgtctcctaagatcggttcatgcatccaacccacatcaaaatcaacagacatggtatctattgataaacagaggcaattactattgcagcttgggatcaaacatggtttacaaatttgttgtattactatgggcgtgtaaaaagggtcaattctatgttctaaacttatttccaaacattcaggcagaatttgatctgggcacaaggtacaatatgtcctaccttagagattttactacaaagtttatgtttattcctgttctttcgttgaaacatgttgaagaggacctcagatcgttagagacttcgctaacgagagcttgccggattgtttaattctctttaggggtacccatacgcacgcgcttgcgccaatcgtgccttattcaatggagaatagtgttgcagatgcaatgtacaacaaaattattgtttttgttttcgaccaagttgtggataccacaccctggaagagttggtggtagattcttcatcaagtatggaatgtctgcgatgcctagctaggtgcttgatggcaacaggcacatgataaagctcgagctttatcgatggtcggacgatgataacgcgctggaagaagtaatgagtagagagtatgttctttatttcttatttatgtacaaattaagatctcacggacgaatttaacaccgtgcgcagggcgcgcggcaatacactagtacagattaaattttgttgattgtgtgcctcttgaacatgcagttaactgtttcctgagcaatgaatgtaagaaaggttaccagacgttccaatgcagtcaaa

SEQ ID NO: 73719 - DNA, 987 bp, Zea Mays
ctccctccgctgcatctcactttctctcccggctgtttcgtcttccttggctttcctcctctctacgcgctttcatttcatccatgtcggcttcctcgtttgctcggcttcagcacaaacgcttcatctggcagaatttgatctgggcacaaggtacaatatgtcctaccttagagattttactacaaagatcgttagagacttcgctaacgagagcttgccggattgtttaattctctttaggggtacccatacgcacgcgcttgcgccaatcgtgccttattcaatggagaatagtgttgcagatgcaatgtacaacaaaattattgtttttgttttcgaccaagttgtggataccacaccctggaagagttggtggtagattcttcatcaagtatggaatgtctgcgatgcctagctaggtgcttgatggcaacaggtgcatatcaaaactattaattattttcatgtgttcctgcttcaagaacacatgcaatagtaataggtttccattagtttaaatgtcacatgcaaagaagcaaacaccacccagactttcttcttagtttgccattatcacatctgtactcatcatgcacatgaaacttttggttatgtacaactcaaaggtagaaggaagaccttaaggtatgttgtcatagtaattgtgaaatggatttggcactggtatttgatattttctgacttctagcatcactctgaaggcacatgataaagctcgagctttatcgatggtcggacgatgataacgcgctggaagaagtaatgagtagagagtatgttctttatttcttatttatgtacaaattaagatctcacggacgaatttaacaccgtgcgcagggcgcgcggcaatacactagtacagattaaattttgttgattgtgtgcctcttgaacatgcagttaactgtttcctgagcaatgaatgtaagaaaggttaccagacgttccaatgcagtcaaa

SEQ ID NO: 73720 - DNA, 935 bp, Zea Mays
ctccctccgctgcatctcactttctctcccggctgtttcgtcttccttggctttcctcctctctacgcgctttcatttcatccatgtcggcttcctcgtttgctcggcttcagcacaaacgcttcatctggcagaatttgatctgggcacaaggtacaatatgtcctaccttagagattttactacaaagtttatgtttattcctgttctttcgttgaaacatgttgaagaggacctcagatcgttagagacttcgctaacgagagcttgccggattgtttaattctctttaggggtacccatacgcacgcgcttgcgccaatcgtgccttattcaatggagaatagtgttgcagatgcaatgtacaacaaaattattgtttttggtgagtatgtttttcaaaaaataattatgaacatcatctctacatacttcctgagaacgtgttccgattacaaatatgaacatcatttcatagctttttaccattttcctttttccctagcacattaatgaagagcttagtactgaaactacttgaactgcatactaaaattatttacctgtagttttcgaccaagttgtggataccacaccctggaagagttggtggtagattcttcatcaagtatggaatgtctgcgatgcctagctaggtgcttgatggcaacaggcacatgataaagctcgagctttatcgatggtcggacgatgataacgcgctggaagaagtaatgagtagagagtatgttctttatttcttatttatgtacaaattaagatctcacggacgaatttaacaccgtgcgcagggcgcgcggcaatacactagtacagattaaattttgttgattgtgtgcctcttgaacatgcagttaactgtttcctgagcaatgaatgtaagaaaggttaccagacgttccaatgcagtcaaa

SEQ ID NO: 73721 - DNA, 2863 bp, Zea Mays
ctccctccgctgcatctcactttctctcccggctgtttcgtcttccttggctttcctcctctctacgcgctttcatttcatccatgtcggcttcctcgtttgctcggcttcagcacaaacgcttcatctggcagaatttgatctgggcacaaggtacaatatgtcctaccttagagattttactacaaaggtaattgtcacatacttaaacatgttcttcattcatactaccgttatgctaaatggtctgtgatggttacaatttcattttccgcactgaacttatatgttgtctatgcttcagtttatgtttattcctgttctttcgttgaaacatgttgaagaggacctcagatcgttagagacttcgctaacgaggtaattggcacttaaagctggttcaaaacggccgcattcagcctatccacgtcgcttctttacaatttccttcatcttttactattgaagttccagtggcatgtctccatagaattctgcacaaacttttatttttaacttttttatatttacaaattctgaaaatgtctcgtcgggctcatgtgttctacataagaaaccaaacaagcagcttcttggtgtgattgtgtaccaaacaaacaatgaaccttgactttttttcccgttgctcacctaataagtattttatatttacaattttcccagcatcagaatggtgtttcaattcattttttttgtttctagaactataaaaagaaaagctttttttaaccaaacgtataatagtagtaaccacaagtgataaggccaattagggaggcatcgtattggatcacaagtttgatgttcttcttggctttctctttcttacaattcacagtatagagcgatcctggtttgctactctaggaggaagatgtttgtattgttactgctgatgatatgatatctttttagctcttggctcttgctatatatctgaacccaaggtatcagcattggagtagctatatatagttaggatcactgccaataatactaacacgagttccctgctccctgctgtacgttttacataattttttatttttttaatctggtgatttgctgacattaatgatatttatgcagtatgcaaaactgacatcaaatataattatccccttgtatcaacacaaaacccaaccaaaacaaactatacaatggatacaatatttccaaaatcttagcttatgatacacactaattccgtagtttctacaaggatggaatgtttgacatcattgtagtcaggccatgaaaggaatcatatgaaattccacaaatcttatcttatgatacagactattttctatattttctacaatgatggggtgtttggcattattgtggtcagtcatgaacagaactatatgtggtaatcttttttccttttggttcatactaactagaaaatgttatggacattattcatataagtgtttgtccctgtcaaaaatagtcctacatgcaataccctttacttttatacatacatttttgaaaaaatcatacagacaagaaccacatatgttgttgtgtatccacttgtggaaccaaagaaagagccccccccatgatttatcattctattgacattttccattcaaatgcttctactataatcgtttcttatgatgtttaactagatgctaaatacattgattcatataaatacaatgattcatatggtggcacatacaaagagtttctttacaaattatctgacttcctgaacgataatacacacatgctatgatttttattttactctttcagatcatgtaaaagttaccgtatacctaatatttatgctctcttccccttatgctcatggacaataatacccatattttaattaactctattttttacctgctttctacagagcttgccggattgtttaattctctttaggggtacccatacgcacgcgcttgcgccaatcgtgccttattcaatggagaatagtgttgcagatgcaatgtacaacaaaattattgtttttggtgagtatgtttttcaaaaaataattatgaacatcatctctacatacttcctgagaacgtgttccgattacaaatatgaacatcatttcatagctttttaccattttcctttttccctagcacattaatgaagagcttagtactgaaactacttgaactgcatactaaaattatttacctgtagttttcgaccaagttgtggataccacaccctggaagagttggtggtagattcttcatcaagtatggaatgtctgcgatgcctagctaggtgcttgatggcaacaggtgcatatcaaaactattaattattttcatgtgttcctgcttcaagaacacatgcaatagtaataggtttccattagtttaaatgtcacatgcaaagaagcaaacaccacccagactttcttcttagtttgccattatcacatctgtactcatcatgcacatgaaacttttggttatgtacaactcaaaggtagaaggaagaccttaaggtatgttgtcatagtaattgtgaaatggatttggcactggtatttgatattttctgacttctagcatcactctgaaggcacatgataaagctcgagctttatcgatggtcggacgatgataacgcgctggaagaagtaatgagtagagagtatgttctttatttcttatttatgtacaaattaagatctcacggacgaatttaacaccgtgcgcagggcgcgcggcaatacactagtacagattaaattttgttgattgtgtgcctcttgaacatgcagttaactgtttcctgagcaatgaatgtaagaaaggttaccagacgttccaatgcagtcaaa

SEQ ID NO: 73722 - DNA, 1036 bp, Zea Mays
ctccctccgctgcatctcactttctctcccggctgtttcgtcttccttggctttcctcctctctacgcgctttcatttcatccatgtcggcttcctcgtttgctcggcttcagcacaaacgcttcatctggcagaatttgatctgggcacaaggtacaatatgtcctaccttagagattttactacaaagtttatgtttattcctgttctttcgttgaaacatgttgaagaggacctcagatcgttagagacttcgctaacgagagcttgccggattgtttaattctctttaggggtacccatacgcacgcgcttgcgccaatcgtgccttattcaatggagaatagtgttgcagatgcaatgtacaacaaaattattgtttttgtttcgaccaagttgtggataccacaccctggaagagttggtggtagattcttcatcaagtatggaatgtctgcgatgcctagctaggtgcttgatggcaacaggtgcatatcaaaactattaattattttcatgtgttcctgcttcaagaacacatgcaatagtaataggtttccattagtttaaatgtcacatgcaaagaagcaaacaccacccagactttcttcttagtttgccattatcacatctgtactcatcatgcacatgaaacttttggttatgtacaactcaaaggtagaaggaagaccttaaggtatgttgtcatagtaattgtgaaatggatttggcactggtatttgatattttctgacttctagcatcactctgaaggcacatgataaagctcgagctttatcgatggtcggacgatgataacgcgctggaagaagtaatgagtagagagtatgttctttatttcttatttatgtacaaattaagatctcacggacgaatttaacaccgtgcgcagggcgcgcggcaatacactagtacagattaaattttgttgattgtgtgcctcttgaacatgcagttaactgtttcctgagcaatgaatgtaagaaaggttaccagacgttccaatgcagtcaaa

SEQ ID NO: 73723 - DNA, 1024 bp, Zea Mays
aagcgtcacctcccgccgggccccacttcgtgggcccaacgcgaacactacggcccacgataaaaggagacgttggatgctttcctcctcccggaccccaaccaaaaccccttcttgatcttgacttcttcccaaccgactcccagttccactctcgcttccttccctccctccctcccacgcaaatggtggccgctcgcctccgcctctcgctgctactctccgtctgcctctcctccgcgtgggcgcgcccacgcctcgagccggccatccgcctgccgtcgcagcgcgccgcggcggccgacgaaacggacgacggcgacgtcgggacccgctgggctgtgctcatcgccggctccagcggctactacaactaccgccaccaggcggacatctgccatgcataccagatcatgaagaagggcggactcaaggatgagaacatcattgtctttatgtacgatgacatcgcgcatagcccggagaatccgaggcctggtgtcatcatcaaccatccccagggtggcgacgtctatgctggggtgccaaaggattacactggtcgagatgtcaacgtcgacaatttcttcgctgttctgcttggcaacaaaactgcactcaggggtgggagcggcaaggttgtggacagtggccccaatgatcatatctttgttttctacagtgaccatgggggtcctggtgtccttggaatgcctacgtatccatatctctatggtgatgacctcgtagatgtcctgaagaagaagcatgctgccgggacctacaaaagcctggtcttttaccttgaagcatgcgaatctgggagcatctttgagggcctcctgccgaatgacatcaatgtgtatgcgaccaccgcgtcaaatgcagacgagagcagctgggggacgtactgccctggcgagttcccgagccctccaccggagtatgacacttgtttgggagacctgtacagtgttgcttggatggaagacagttcgctttatgggatagagaagaaacggaa

SEQ ID NO: 73724 - DNA, 1797 bp, Zea Mays
aagcgtcacctcccgccgggccccacttcgtgggcccaacgcgaacactacggcccacgataaaaggagacgttggatgctttcctcctcccggaccccaaccaaaaccccttcttgatcttgacttcttcccaaccgactcccagttccactctcgcttccttccctccctccctcccacgcaaatggtggccgctcgcctccgcctctcgctgctactctccgtctgcctctcctccgcgtgggcgcgcccacgcctcgagccggccatccgcctgccgtcgcagcgcgccgcggcggccgacgaaacggacgacggcgacgtcgggacccgctgggctgtgctcatcgccggctccagcggctactacaactaccgccaccaggattacactggtcgagatgtcaacgtcgacaatttcttcgctgttctgcttggcaacaaaactgcactcaggggtgggagcggcaaggttgtggacagtggccccaatgatcatatctttgttttctacagtgaccatgggggtcctggtgtccttggaatgcctacgtatccatatctctatggtgatgacctcgtagatgtcctgaagaagaagcatgctgccgggacctacaaaagcctggtcttttaccttgaagcatgcgaatctgggagcatctttgagggcctcctgccgaatgacatcaatgtgtatgcgaccaccgcgtcaaatgcagacgagagcagctgggggacgtactgccctggcgagttcccgagccctccaccggagtatgacacttgtttgggagacctgtacagtgttgcttggatggaagacagtgatttccacaatctgcgaactgaatccctcaagcagcagtacaagttggtcaaggataggacagcggttcatgacacgttcagctatggttcccatgtgatgcaatatggcgcattggagctgaatgttcagcgtttgttttcgtacattggcacagaccctgctaacgatggcaacacttttatagaagataactcactgccatcgttctcaaaagccgttaatcagcgcgacgctgaccttgtctacttctggcagaagtaccgcaaattggctgatagctcgcatgcgaaaaatgaggctcggaaggaactgcttgaagtgatggcccacaggtctcatgttgacagcagcgttgagctcattggaagccttctctttggctccgaggacggtccaagggttctgaaagccgtccgtgcacctggtgaacctctggttgatgattggagctgcctcaagtccatagttcgcacttttgaggcgcgatgcgggtccttggcgcagtatgggatgaagcacatgcgatccttcgcgaacatgtgcaacgctggcatccttcctgaagcagtgtcgaaggtggccgctcaggcctgcagcagcattccgtccaacccctggagctctatccacaagggttttagcgcttaagaaccataggtgaggcgaactccatgacgctgcagctctcagggaggtcttagttcttgaacgaccataggtgaagcagacttatgtataccctgccacattgcgtacctatggccagtttccggtgtacatatatagtcggaaatttattcggcaattgtattggtcgttggtgtatatattccctatagtttgttagcagatgtgtttgtttgtaatcccgtaataaatgaagaatgcatgatgttcatgcggaactttacctgattcttgttgggcaatggatgaatggactatccatagtgggattcttgcc

SEQ ID NO: 73725 - DNA, 1606 bp, Zea Mays
cacacgtgcgtgtccgtcttatcttatggggcggacatctgccatgcataccagatcatgaagaagggcggactcaaggatgagaacatcattgtctttatgtacgatgacatcgcgcatagcccggagaatccgaggcctggtgtcatcatcaaccatccccagggtggcgacgtctatgctggggtgccaaaggattacactggtcgagatgtcaacgtcgacaatttcttcgctgttctgcttggcaacaaaactgcactcaggggtgggagcggcaaggttgtggacagtggccccaatgatcatatctttgttttctacagtgaccatgggggtcctggtgtccttggaatgcctacgtatccatatctctatggtgatgacctcgtagatgtcctgaagaagaagcatgctgccgggacctacaaaagcctggtcttttaccttgaagcatgcgaatctgggagcatctttgagggcctcctgccgaatgacatcaatgtgtatgcgaccaccgcgtcaaatgcagacgagagcagctgggggacgtactgccctggcgagttcccgagccctccaccggagtatgacacttgtttgggagacctgtacagtgttgcttggatggaagacagtgatttccacaatctgcgaactgaatccctcaagcagcagtacaagttggtcaaggataggacagcggttcatgacacgttcagctatggttcccatgtgatgcaatatggcgcattggagctgaatgttcagcgtttgttttcgtacattggcacagaccctgctaacgatggcaacacttttatagaagataactcactgccatcgttctcaaaagccgttaatcagcgcgacgctgaccttgtctacttctggcagaagtaccgcaaattggctgatagctcgcatgcgaaaaatgaggctcggaaggaactgcttgaagtgatggcccacaggtctcatgttgacagcagcgttgagctcattggaagccttctctttggctccgaggacggtccaagggttctgaaagccgtccgtgcacctggtgaacctctggttgatgattggagctgcctcaagtccatagttcgcacttttgaggcgcgatgcgggtccttggcgcagtatgggatgaagcacatgcgatccttcgcgaacatgtgcaacgctggcatccttcctgaagcagtgtcgaaggtggccgctcaggcctgcagcagcattccgtccaacccctggagctctatccacaagggttttagcgcttaagaaccataggtgaggcgaactccatgacgctgcagctctcagggaggtcttagttcttgaacgaccataggtgaagcagacttatgtataccctgccacattgcgtacctatggccagtttccggtgtacatatatagtcggaaatttattcggcaattgtattggtcgttggtgtatatattccctatagtttgttagcagatgtgtttgtttgtaatcccgtaataaatgaagaatgcatgatgttcatgcggaactttacctgattcttgttgggcaatggatgaatggactatccatagtgggattcttgcc

SEQ ID NO: 73726 - DNA, 1457 bp, Zea Mays
cattgccatccctaaaccagacagacagtttcggcctcagcccaactggtgccgtgacgtctcctctcctctcttcgtctcatccccagcccacccacaacaatgccctcctcccttcccacctgacctgcgccgcgccgcgccgcgctgcgcagccatccttgttctgtcccgggtacgccgccacacacatcagttcaagcgcttctctccctccctcctcttcgtggatcggaatcgacgcctggaagtggatgacgatggcgggttcttgcgccgcggtgcccgttgccggtctcccctcgttgaggacgccgatgccaactcacctcagacttggcggctttatgccctgttcctcggccgcgcggagtcgcggcgccgccgtgctgggatgcgctcttggggccaggaagcagacgccgggagttctgaaccagggctgtttttattgtgcttgtatagttgctctgcagatacatgcgaagagatgggcatgaaggtgatgtgagcaatcaaggaagggatggtgctgttatgtttgggccagatgatgatggtgtaaagattcctactcaggtagagactcttgtaaagggcactgcagcggttgctgaaccagaatacaagcagatcccagatgtagattacctacagaaaaatcatatattcacatctggggcttctggaacaaatgcagctgttattaggggcgctttaagagctgaaaagccagagttgcttactgtaattttacctcaaagtctaaagaagcagcctcctgaaagccaagaactgttgtctaaagtacaaaacttactcgagaaaccacagtatgatcatttgccactaattgaggctagcaggttatgcaatatggacatcatctctaaggtccaacaggtaatctgcttcgcgttccacgacagcaaactgctgatggaaacatgccaggaggccatgaaccttcggaagatcgtgacactcttctacttggattagctccggtagggatctagtctcctttttttttgggtccgtggcgtaggctaacgttggggggataaaaagcaagctgaacagtttagttagtttcggaatatattggataggtggtgcggtgaccttctattggaggagaaagtcattttgtttctcccattgttttgattcttgtcacaaagaaaccaataatcttgtcgatatgcctaattcgtcattgaagggaataagattattagctggagtatatttgttgttgacctcaaggattatagttagttcgtgctccagtttttccatctattttatgtcagtttcctgcttttttatttgagatgagatgtttatcttgattgatgtcttatttttcatttttcaagtgcattattaatatggttatatctttcaaaaagcgagttgggtaaaattaaatttcaacctcttggccgcgcttg

SEQ ID NO: 73727 - DNA, 1538 bp, Zea Mays
cattgccatccctaaaccagacagacagtttcggcctcagcccaactggtgccgtgacgtctcctctcctctcttcgtctcatccccagcccacccacaacaatgccctcctcccttcccacctgacctgcgccgcgccgcgccgcgctgcgcagccatccttgttctgtcccgggtacgccgccacacacatcagttcaagcgcttctctccctccctcctcttcgtggatcggaatcgacgcctggaagtggatgacgatggcgggttcttgcgccgcggtgcccgttgccggtctcccctcgttgaggacgccgatgccaactcacctcagacttggcggctttatgccctgttcctcggccgcgcggagtcgcggcgccgccgtgctgggatgcgctcttggggccaggaagcagacgccgggagttctgaaccagatacatgcgaagagatgggcatgaaggtgatgtgagcaatcaaggaagggatggtgctgttatgtttgggccagatgatgatggtgtaaagattcctactcaggtagagactcttgtaaagggcactgcagcggttgctgaaccagaatacaagcagatcccagatgtagattacctacaggagctgctggctattcagcagcaaggacctcgtgcaataggtttctttggaacccgcaacatgggatttatgcaccaacagcttattgagatcctgagctatgctatggtcataacaaaaaatcatatattcacatctggggcttctggaacaaatgcagctgttattaggggcgctttaagagctgaaaagccagagttgcttactgtaattttacctcaaagtctaaagaagcagcctcctgaaagccaagaactgttgtctaaagtacaaaacttactcgagaaaccacagtatgatcatttgccactaattgaggctagcaggttatgcaatatggacatcatctctaaggtccaacaggtaatctgcttcgcgttccacgacagcaaactgctgatggaaacatgccaggaggccatgaaccttcggaagatcgtgacactcttctacttggattagctccggtagggatctagtctcctttttttttgggtccgtggcgtaggctaacgttggggggataaaaagcaagctgaacagtttagttagtttcggaatatattggataggtggtgcggtgaccttctattggaggagaaagtcattttgtttctcccattgttttgattcttgtcacaaagaaaccaataatcttgtcgatatgcctaattcgtcattgaagggaataagattattagctggagtatatttgttgttgacctcaaggattatagttagttcgtgctccagtttttccatctattttatgtcagtttcctgcttttttatttgagatgagatgtttatcttgattgatgtcttatttttcatttttcaagtgcattattaatatggttatatctttcaaaaagcgagttgggtaaaattaaatttcaacctcttggccgcgcttg

SEQ ID NO: 73728 - DNA, 683 bp, Zea Mays
caacagcatgctcgtgatgctgataagctgattgtacaaaacttactcgagaaaccacagtatgatcatttgccactaattgaggctagcaggttatgcaatatggacatcatctctaaggtccaacaggtaatctgcttcgcgttccacgacagcaaactgctgatggaaacatgccaggaggccatgaaccttcggaagatcgtgacactcttctacttggattagctccggtagggatctagtctcctttttttttgggtccgtggcgtaggctaacgttggggggataaaaagcaagctgaacagtttagttagtttcggaatatattggataggtggtgcggtgaccttctattggaggagaaagtcattttgtttctcccattgttttgattcttgtcacaaagaaaccaataatcttgtcgatatgcctaattcgtcattgaagggaataagattattagctggagtatatttgttgttgacctcaaggattatagttagttcgtgctccagtttttccatctattttatgtcagtttcctgcttttttatttgagatgagatgtttatcttgattgatgtcttatttttcatttttcaagtgcattattaatatggttatatctttcaaaaagcgagttgggtaaaattaaatttcaacctcttggccgcgcttg

SEQ ID NO: 73729 - DNA, 619 bp, Zea Mays
gcgcgagccaggcgcccagggcgcgccggttatgcaatatggacatcatctctaaggtccaacaggtaatctgcttcgcgttccacgacagcaaactgctgatggaaacatgccaggaggccatgaaccttcggaagatcgtgacactcttctacttggattagctccggtagggatctagtctcctttttttttgggtccgtggcgtaggctaacgttggggggataaaaagcaagctgaacagtttagttagtttcggaatatattggataggtggtgcggtgaccttctattggaggagaaagtcattttgtttctcccattgttttgattcttgtcacaaagaaaccaataatcttgtcgatatgcctaattcgtcattgaagggaataagattattagctggagtatatttgttgttgacctcaaggattatagttagttcgtgctccagtttttccatctattttatgtcagtttcctgcttttttatttgagatgagatgtttatcttgattgatgtcttatttttcatttttcaagtgcattattaatatggttatatctttcaaaaagcgagttgggtaaaattaaatttcaacctcttggccgcgcttg

SEQ ID NO: 73730 - DNA, 897 bp, Zea Mays
ccgcgctccgcacggggacgcctcgtcagccggacaactctaccgttgcgggtgccctttacaggagccgacccgatagtcgcgtcgcgtcgccggatcgtccaatcagagcgcgcgctgcacgtcatccgcgtcgaagcggatacagtgtcggggcatacgcaacccggaagcgggcgtatatgaacagcgtgggcgtgggtcagacgcggagggtgcactttggattcgctcgatcggtcatcatcggactgtgcaagcacgagaggggtatacaggcatacagcggattcataaaccgtcagagtgttaggacaagatggtggccaatggtgatgcacctgctagagggagcgcggcggcagccgcaagcctgcgtaggcgtaggaccacaagcggtgctgctgctggtggaggcggtgccagctcaatgctccaattctacactgatgaggctgccggccgcaaaatgtcaccaaacactgttctgatcatgagtattgggttcgtagccgtcgttgctgtgctccatgtattcgggaagctgtaccgcacctccaactaggttggcattgccatatccaagaaagctgagtccaccaagagaggattcctgtagaacaatttaaatggatagcaagtgactatcagactctgttgtagaagtttatttatacaacttgcaatgctgcgaggctattcataaatgcctgcgagttttgtttaagtcattgcttcgtattttgaaatttgctggcataaagcatatgccgtgagagtttcatggcatttattctcattaaatgacatgtcacgaaatcaaaataacaatgtatggataaaattctatctacaataaaatggcatatacaatctatatactatgttgcggttttt

SEQ ID NO: 73731 - DNA, 792 bp, Zea Mays
gcgtgggcgtgggtcagacgcggagggtgcactttggattcgctcgatcggtcatcatcggactgtgcaagcacgagaggggtatacaggcatacagcggattcataaaccgtcaggtacgcgcgcatacagcatacctccatgcacggctgacggcccttcccgcttcccctcggccggtggttccaagttttgatttgagtgttaggacaagatggtggccaatggtgatgcacctgctagagggagcgcggcggcagccgcaagcctgcgtaggcgtaggaccacaagcggtgctgctgctggtggaggcggtgccagctcaatgctccaattctacactgatgaggctgccggccgcaaaatgtcaccaaacactgttctgatcatgagtattgggttcgtagccgtcgttgctgtgctccatgtattcgggaagctgtaccgcacctccaactaggttggcattgccatatccaagaaagctgagtccaccaagagaggattcctgtagaacaatttaaatggatagcaagtgactatcagactctgttgtagaagtttatttatacaacttgcaatgctgcgaggctattcataaatgcctgcgagttttgtttaagtcattgcttcgtattttgaaatttgctggcataaagcatatgccgtgagagtttcatggcatttattctcattaaatgacatgtcacgaaatcaaaataacaatgtatggataaaattctatctacaataaaatggcatatacaatctatatactatgttgcggttttt

SEQ ID NO: 73732 - DNA, 630 bp, Zea Mays
gtggattgtgtcgcctcttcgaattccccgtgtttaggagtgttaggacaagatggtggccaatggtgatgcacctgctagagggagcgcggcggcagccgcaagcctgcgtaggcgtaggaccacaagcggtgctgctgctggtggaggcggtgccagctcaatgctccaattctacactgatgaggctgccggccgcaaaatgtcaccaaacactgttctgatcatgagtattgggttcgtagccgtcgttgctgtgctccatgtattcgggaagctgtaccgcacctccaactaggttggcattgccatatccaagaaagctgagtccaccaagagaggattcctgtagaacaatttaaatggatagcaagtgactatcagactctgttgtagaagtttatttatacaacttgcaatgctgcgaggctattcataaatgcctgcgagttttgtttaagtcattgcttcgtattttgaaatttgctggcataaagcatatgccgtgagagtttcatggcatttattctcattaaatgacatgtcacgaaatcaaaataacaatgtatggataaaattctatctacaataaaatggcatatacaatctatatactatgttgcggttttt

SEQ ID NO: 73733 - DNA, 632 bp, Zea Mays
gctgattcctgcctagtaggcggtaccgcgcgcgccagtgagtgttaggacaagatggtggccaatggtgatgcacctgctagagggagcgcggcggcagccgcaagcctgcgtaggcgtaggaccacaagcggtgctgctgctggtggaggcggtgccagctcaatgctccaattctacactgatgaggctgccggccgcaaaatgtcaccaaacactgttctgatcatgagtattgggttcgtagccgtcgttgctgtgctccatgtattcgggaagctgtaccgcacctccaactaggttggcattgccatatccaagaaagctgagtccaccaagagaggattcctgtagaacaatttaaatggatagcaagtgactatcagactctgttgtagaagtttatttatacaacttgcaatgctgcgaggctattcataaatgcctgcgagttttgtttaagtcattgcttcgtattttgaaatttgctggcataaagcatatgccgtgagagtttcatggcatttattctcattaaatgacatgtcacgaaatcaaaataacaatgtatggataaaattctatctacaataaaatggcatatacaatctatatactatgttgcggttttt

SEQ ID NO: 73734 - DNA, 630 bp, Zea Mays
gcgcgaaggagccgagcagcagaaagctagatgttttgagtgttaggacaagatggtggccaatggtgatgcacctgctagagggagcgcggcggcagccgcaagcctgcgtaggcgtaggaccacaagcggtgctgctgctggtggaggcggtgccagctcaatgctccaattctacactgatgaggctgccggccgcaaaatgtcaccaaacactgttctgatcatgagtattgggttcgtagccgtcgttgctgtgctccatgtattcgggaagctgtaccgcacctccaactaggttggcattgccatatccaagaaagctgagtccaccaagagaggattcctgtagaacaatttaaatggatagcaagtgactatcagactctgttgtagaagtttatttatacaacttgcaatgctgcgaggctattcataaatgcctgcgagttttgtttaagtcattgcttcgtattttgaaatttgctggcataaagcatatgccgtgagagtttcatggcatttattctcattaaatgacatgtcacgaaatcaaaataacaatgtatggataaaattctatctacaataaaatggcatatacaatctatatactatgttgcggttttt

SEQ ID NO: 73735 - DNA, 2545 bp, Zea Mays
acgacagccaatcatgccgagctgcaaacctaggaagcgctgggccaaccaccatcgagcctgaccacagcatgcgaccatcgcatctgatgtgtatgccgccaggtgtgtaacctctgtgtgttgtgtcaccctctgaattagtacaaacaaattccttacaaatcaaacagaaaacatcaaaattgcatcgctttctaaccaattcaatccttttcaaaatctataatggaatcttagcgatcgaaccactgttaattcatatgatctaaatgaatcgttaatattattggaccggcctcggacttctatattgattcccttgtccttgcccatcccacaccgctttctacgattcgacatggagaaggtccactacacagtgtctgaaagcacggcgtataaacagtgagcttgtattgtggttgttgcttgctgccactctcgcgtcgtccttgtttgtactatacagctgctctcaacctttcgttccgtggcccctctcgtttattcgcccctgccacgaccaggaccgcgtcgcgcgctcgcgcccttcacgccctgcgctgtgcttgcctcgtcgcggccacgtccacctacctatacctctctgtccgacgacctcatcccctttcccaagatccgagccgcggcgtctccaagtacctcgctcgcaggagcaggttgcaaggagccagccactcctgcgagtttctggcgatggtggccgttgcggcgggaaggcgggccggcggcgttggtggccgccggcgctcgggctgcggcccggggcaggcacagcagaagctactagcgatcgccgtcgccgcgcgcttcgctgaggccgtggcgccgccgtctgcggaggcctcccgtgccggctccggcggctgttgcgtagagctcctcgagtgcctcctcggggctctgagcgtcaacgcggccccgccgcccgcgcagcacaggcgggccgtgcactcgatccgccgccgccgcccccgtggcggggggtccgccgacgaccgccacgccgacgctccctcgggccgcatcgcgggaaacggcgcatccgcatccgcagccgcgtcgctctacaccatgcagggcaggaagggtgtcaatcaggacgccatggtggtctgggagaattttggttcaaaggatgataccattttttgtggagtttttgatggccatggaccaaacggccatttggttgccaagagggtcagagatcttctccctgtaaaggttgaagatactgatgcttcccctggaaatgaagagaatggcgagtacccagaatttttcacagcactgagggcttcattcttgcaggcgttttatgtgatggacagggatctgaaggcacatagaaatattgattgtgaattcagtggtacaacagcagtcacagtaatcaagcagggacaaaatcttataattggcaacttgggagattctagagctgtcttgggcacaagaggtgaacataatcagctagttgctcttcagctgacagtggacctcaaacctagtatcccgagtgaagcagaacgaattaggcaacaaagtggcagagtattttctcttccagatgaaccagacgttgttcgtgtgtggcttccaactttcaacttgccagggttggccatggcaagatcatttggagacttctgtctgaagaaatatggaataatttctatgcctgatgttttctaccatcgcatcacggataaggatgaatttgttgtgctggcgactgacggggtgtgggatgtgctttccaatgctgaagctgttagcatcatcagcaatgctccttcacaggcctcagcagctcgatttctggttgaatcggctcacagggcatggaggacacggtaccccacatcaaaaactgatgattgtgctgttgtttgcctctttctgaaaacagaagcagcaagtacatcctccagtgctgtaaccaaagatttggtgaagaacagagaaatgagcagcgagcccacttcagttgtgaaggatagctcaaaagattgagcttgcctgccaattgagatggcataatttttgctggaaatttgttcgccttcgtttgcaagcttgtgtgcatcagatttgttgtgacgtgaagaccagtgccagtttcattggcgagttgaggaagttattgcatagtggaatggataagtgtgcagattttgttctttttgtacagtattcaatcagtttagtgggatcagttggtagtaatgataactataataatactgtgcctattattgatggatgggggtgatcagatccatgcataggatgaagtttctcccttcttttgtaatataaataattgtgtcggttccagcagctctaataaattttcttttaggtgttgctttgttttatgtcataggttttctagttttgctttgtccaattaagtttagtattatatttccattgatgctatgacaaaccattccagttagatattggatgactaagtaagttttcctctgtatgttctgtattatgatggttt

SEQ ID NO: 73736 - DNA, 1690 bp, Zea Mays
cttcctctttcttcacatggattgccactggatattgccgaattttggttcaaaggatgataccattttttgtggagtttttgatggccatggaccaaacggccatttggttgccaagagggtcagagatcttctccctgtaaagttgagtgcaaatttagggaagggtgaattcaaagagatttctactagcgatgtcaagagtgggactactaaaggagttgcaaccgaacacagggttgaagatactgatgcttcccctggaaatgaagagaatggcgagtacccagaatttttcacagcactgagggcttcattcttgcaggcgttttatgtgatggacagggatctgaaggcacatagaaatattgattgtgaattcagtggtacaacagcagtcacagtaatcaagcagggacaaaatcttataattggcaacttgggagattctagagctgtcttgggcacaagaggtgaacataatcagctagttgctcttcagctgacagtggacctcaaacctagtatcccgaatactaccgaaaataaagaaaaatgaatcatttacaggtgaagcagaacgaattaggcaacaaagtggcagagtattttctcttccagatgaaccagacgttgttcgtgtgtggcttccaactttcaacttgccagggttggccatggcaagatcatttggagacttctgtctgaagaaatatggaataatttctatgcctgatgttttctaccatcgcatcacggataaggatgaatttgttgtgctggcgactgacggggtgtgggatgtgctttccaatgctgaagctgttagcatcatcagcaatgctccttcacaggcctcagcagctcgatttctggttgaatcggctcacagggcatggaggacacggtaccccacatcaaaaactgatgattgtgctgttgtttgcctctttctgaaaacagaagcagcaagtacatcctccagtgctgtaaccaaagatttggtgaagaacagagaaatgagcagcggtaagcattcattggctgttaaaacaagcacccaaggttcctgaaaatcttgttactgcaaaagatgagtggtcttttgttgatggttcctctgggtgtgtcgcgctgccaactttaccagagcccacttcagttgtgaaggatagctcaaaagattgagcttgcctgccaattgagatggcataatttttgctggaaatttgttcgccttcgtttgcaagcttgtgtgcatcagatttgttgtgacgtgaagaccagtgccagtttcattggcgagttgaggaagttattgcatagtggaatggataagtgtgcagattttgttctttttgtacagtattcaatcagtttagtgggatcagttggtagtaatgataactataataatactgtgcctattattgatggatgggggtgatcagatccatgcataggatgaagtttctcccttcttttgtaatataaataattgtgtcggttccagcagctctaataaattttcttttaggtgttgctttgttttatgtcataggttttctagttttgctttgtccaattaagtttagtattatatttccattgatgctatgacaaaccattccagttagatattggatgactaagtaagttttcctctgtatgttctgtattatgatggttt

SEQ ID NO: 73737 - DNA, 1647 bp, Zea Mays
ctttcttcacatggattgccactggatattgccgaattttggttcaaaggatgataccattttttgtggagtttttgatggccatggaccaaacggccatttggttgccaagagggtcagagatcttctccctgtaaagttgagtgcaaatttagggaagggtgaattcaaagagatttctactagcgatgtcaagagtgggactactaaaggagttgcaaccgaacacagggttgaagatactgatgcttcccctggaaatgaagagaatggcgagtacccagaatttttcacagcactgagggcttcattcttgcaggcgttttatgtgatggacagggatctgaaggcacatagaaatattgattgtgaattcagtggtacaacagcagtcacagtaatcaagcagggacaaaatcttataattggcaacttgggagattctagagctgtcttgggcacaagaggtgaacataatcagctagttgctcttcagctgacagtggacctcaaacctagtatcccgagtgaagcagaacgaattaggcaacaaagtggcagagtattttctcttccagatgaaccagacgttgttcgtgtgtggcttccaactttcaacttgccagggttggccatggcaagatcatttggagacttctgtctgaagaaatatggaataatttctatgcctgatgttttctaccatcgcatcacggataaggatgaatttgttgtgctggcgactgacggggtgtgggatgtgctttccaatgctgaagctgttagcatcatcagcaatgctccttcacaggcctcagcagctcgatttctggttgaatcggctcacagggcatggaggacacggtaccccacatcaaaaactgatgattgtgctgttgtttgcctctttctgaaaacagaagcagcaagtacatcctccagtgctgtaaccaaagatttggtgaagaacagagaaatgagcagcggtaagcattcattggctgttaaaacaagcacccaaggttcctgaaaatcttgttactgcaaaagatgagtggtcttttgttgatggttcctctgggtgtgtcgcgctgccaactttaccagagcccacttcagttgtgaaggatagctcaaaagattgagcttgcctgccaattgagatggcataatttttgctggaaatttgttcgccttcgtttgcaagcttgtgtgcatcagatttgttgtgacgtgaagaccagtgccagtttcattggcgagttgaggaagttattgcatagtggaatggataagtgtgcagattttgttctttttgtacagtattcaatcagtttagtgggatcagttggtagtaatgataactataataatactgtgcctattattgatggatgggggtgatcagatccatgcataggatgaagtttctcccttcttttgtaatataaataattgtgtcggttccagcagctctaataaattttcttttaggtgttgctttgttttatgtcataggttttctagttttgctttgtccaattaagtttagtattatatttccattgatgctatgacaaaccattccagttagatattggatgactaagtaagttttcctctgtatgttctgtattatgatggttt

SEQ ID NO: 73738 - DNA, 1662 bp, Zea Mays
gtggctgtcacgttaccacatgaaccattgcattctgaagattcagctgaattttggttcaaaggatgataccattttttgtggagtttttgatggccatggaccaaacggccatttggttgccaagagggtcagagatcttctccctgtaaagttgagtgcaaatttagggaagggtgaattcaaagagatttctactagcgatgtcaagagtgggactactaaaggagttgcaaccgaacacagggttgaagatactgatgcttcccctggaaatgaagagaatggcgagtacccagaatttttcacagcactgagggcttcattcttgcaggcgttttatgtgatggacagggatctgaaggcacatagaaatattgattgtgaattcagtggtacaacagcagtcacagtaatcaagcagggacaaaatcttataattggcaacttgggagattctagagctgtcttgggcacaagaggtgaacataatcagctagttgctcttcagctgacagtggacctcaaacctagtatcccgagtgaagcagaacgaattaggcaacaaagtggcagagtattttctcttccagatgaaccagacgttgttcgtgtgtggcttccaactttcaacttgccagggttggccatggcaagatcatttggagacttctgtctgaagaaatatggaataatttctatgcctgatgttttctaccatcgcatcacggataaggatgaatttgttgtgctggcgactgacggggtgtgggatgtgctttccaatgctgaagctgttagcatcatcagcaatgctccttcacaggcctcagcagctcgatttctggttgaatcggctcacagggcatggaggacacggtaccccacatcaaaaactgatgattgtgctgttgtttgcctctttctgaaaacagaagcagcaagtacatcctccagtgctgtaaccaaagatttggtgaagaacagagaaatgagcagcggtaagcattcattggctgttaaaacaagcacccaaggttcctgaaaatcttgttactgcaaaagatgagtggtcttttgttgatggttcctctgggtgtgtcgcgctgccaactttaccagagcccacttcagttgtgaaggatagctcaaaagattgagcttgcctgccaattgagatggcataatttttgctggaaatttgttcgccttcgtttgcaagcttgtgtgcatcagatttgttgtgacgtgaagaccagtgccagtttcattggcgagttgaggaagttattgcatagtggaatggataagtgtgcagattttgttctttttgtacagtattcaatcagtttagtgggatcagttggtagtaatgataactataataatactgtgcctattattgatggatgggggtgatcagatccatgcataggatgaagtttctcccttcttttgtaatataaataattgtgtcggttccagcagctctaataaattttcttttaggtgttgctttgttttatgtcataggttttctagttttgctttgtccaattaagtttagtattatatttccattgatgctatgacaaaccattccagttagatattggatgactaagtaagttttcctctgtatgttctgtattatgatggttt

SEQ ID NO: 73739 - DNA, 3463 bp, Zea Mays
gacattttgatgtcgataccattaactaaaataaatagtttttcttcgatgtaaatgtccgtaaaatatttagttcctgaatttctttcttcctttctagtgtgactgtcccatctaatattctgaaggtgacatgtcattgttgggttgaaaatcacaaggggagagaaggaaaaaggcagggaatgggaggggaaagtacctaagccagctaggaagcaagcagctggaggcagagatgccaaccgcaatgtcctgtcatctttgctcatgaccaaatcggtcaaggtcgcccatggatggagatcacaggaggcaagccgccgccgcggtcaccgtcacgcaagtcagcccggcgcggcgcctgatcgcctggctgaggcttctcttccgggcgttcgttcatagatacggcaaggtcgcgagctggaacgcggcggggcgccctgtcttcgtcgtcctcgcggtcttcttcctccagaggagcctgcgccgccggtacctgtcatggaaggagtcgtcgcgtcttccgctgatggccgccgccgccgtcaccgtgcagacgaccgtcagggcgatggcggcgcagcgcgagctctctgtccggaagcagaccagagctgccacacgcatccaggcgcaatggcgtgcgcacagggcggtgtggagctacctgacgacgaagagagccgccgtcatctgccaacgtgcttggaggcaaagcgttgcacgcaaggagctcaggaagctcagactgtgtgtgcaggagaatctggagagggaaatgctggaggaggtgtgcaggctgcgtgagatggtggacgtgctccagcaggctgtcaatgacgccgagacgagggccgtcaacgagagggaggcggcgaaggatgcgatggcgcagttggaagcagcctcggcgatcgaagagaccgtggtgatggttgaggacactgagaaggtcaagtcgctgagtgccgaagttgaccgcctcaaggatttgctgggagctgaaatgagtgaaacttttgccgccaagaaggcgctttctgaagccgagctgaggaacgagaagctggccaggctgcttggagttgaggaagttaagaacaaacggcttcaagacaccctgaaaaggatggaggagaaggcttctagtctggacgaggaaaacagaatgctgcgacaggctgtggcgtcaaaccctgctattgtcaggtcgccatcgggcgaaaaccatgaagcacctggaattcaggcagctcctgataatgagaaatcaaggaatggtacagtgaagcctatagcagtggatcgggaggctaatgtccatgagaagggcgctgaacagcccagctcaaatggtcaagaagctgggaagcaacagcaagagcttctgatcaagtgcctatccgaagacctgggtttctcggtcggcaggcctatcgctgcatacctcatctacaggtgtctggtgcattggagatcatttgaagaagagaggagcgtggtctttgaccggattatccagaagattactgctgcgcttgaggcgcgagacaacaacgatgcactagcatactggctgtccaattcatgcgcgctcctggttcttcttcaaaggacactgaaaatcaacggggtagctgccttggctcgtcagaggcgaagaacgtcgtcacctctcaaggaaaaccaagatccagctcccgacggacagttgatctgtggactagcccaagtctaccaggttgaggccaagtacccagctatcgcgttcaagcagcagctcaccgcactgctggagaaggtctatgggatgatccggcacaacctgaagaaggaactgtcgccgcttctgggcctctgcattcaggcgccacgcacattcgtcgtcagtcccagaggatcgtgttcccaaggaacagatctggcgcaacaagcctccatggcgcattggcagagcatcatcaagatcttgacaaattctctcgatgttctgaaatcaaattacgtgcctccgttcctgatctgcaagatgttcacgcaagtcttctcgtttatcaatgtgcagctttttaacagccttctgctgcggcgtgagtgctgctcgttcagtaacggagagtacgtgaaggctgggctggatgagctagagcattggtgcttttggctgactgaagagtacgcaggatctgcatgggacgagctgaagcatatcaggcaggcagttaccctcttgatacttgacgacaagcatagccggagtctcgcggagatcacagacgacttctgcccagtgctgagcatgcagcaactgtaccggatcagcacgatgtactgcgacgacaagtttgggaccctgggcattccatcagaagtcgtctccagcatgcggaccaagatgatcgagggctcgtcgagcagcccgtcggcgcacgacgacatcaactcgttcctgctagacgatgacttcagcataccgttctccgtggatgacttcacgaagctgatagtgcacgtcgacgtagcggacatggatttgccaccgctcattcaggagagcagcggcggcggctccaaaatgggacattgaggagtgacaatatgcacgccttttttgtgtgtgttgcggtgatgtgcatagtgcgtgacatattgctctgagaccagggttttgtttttttcttcgtcgactggtcttccatttttctcccatatgactactacctgagtgagtagtgcctgtttgggtttgcgcgtgtgtatgattgtacagaactgagctgtggcatataaggtaaggaaagaaagcctgtgtgattcaattttttttatcaaaagagtgagtgatgcttgcaagtcaagctttcctttgccaagtgtgatctcagattctaactgctgtgacacctgtacttttgttgtttgtttgttttttttttttttttgaaagaagcctggcgctgatggcctccatttaactgttgagcatctgtcactcgctcaatagttaatggtctagagaaacattgtcgaccatctgtgtcactagaattgatgacttgttgtctatccttattgcctctgtttcaaccctgccagtgcgatttggatctggtcatggccggcgccatgcacagtaatgtggtcaataacaaatatgctaaactacatacatataacatataccatgttcatctaagataacatgtgaacagagtattatagatcgttatctctaaagtctaaacatatagtgcagcggaagaagaccataacgatatagtagaagttgtcgtacgtctgcacgtaccaccaacaacgatatgtttacccgtgcttctcatattcgtagccgatcaataccgctccaatagcagtagcgtctccaatccctagagagacatcaattaggttatgcgatgtctctcaaccatagcatatgagctctttagtgaacttt

SEQ ID NO: 73740 - DNA, 3469 bp, Zea Mays
gacattttgatgtcgataccattaactaaaataaatagtttttcttcgatgtaaatgtccgtaaaatatttagttcctgaatttctttcttcctttctagtgtgactgtcccatctaatattctgaaggtgacatgtcattgttgggttgaaaatcacaaggggagagaaggaaaaaggcagggaatgggaggggaaagtacctaagccagctaggaagcaagcagctggaggcagagatgccaaccgcaatgtcctgtcatctttgctcatgaccaaatcggtcaaggtcgcccatggatggagatcacaggaggcaagccgccgccgcggtcaccgtcacgcaagtcagcccggcgcggcgcctgatcgcctggctgaggcttctcttccgggcgttcgttcatagatacggcaaggtcgcgagctggaacgcggcggggcgccctgtcttcgtcgtcctcgcggtcttcttcctccagaggagcctgcgccgccggtacctgtcatggaaggagtcgtcgcgtcttccgctgatggccgccgccgccgtcaccgtgcagacgaccgtcagggcgatggcggcgcagcgcgagctctctgtccggaagcagaccagagctgccacacgcatccaggcgcaatggcgtgcgcacagggcggtgtggagctacctgacgacgaagagagccgccgtcatctgccaacgtgcttggaggcaaagcgttgcacgcaaggagctcaggaagctcagactgtgtgtgcaggagaatctggagagggaaatgctggaggaggtgtgcaggctgcgtgagatggtggacgtgctccagcaggctgtcaatgacgccgagacgagggccgtcaacgagagggaggcggcgaaggatgcgatggcgcagttggaagcagcctcggcgatcgaagagaccgtggtgatggttgaggacactgagaaggtcaagtcgctgagtgccgaagttgaccgcctcaaggatttgctgggagctgaaatgagtgaaacttttgccgccaagaaggcgctttctgaagccgagctgaggaacgagaagctggccaggctgcttggagttgaggaagttaagaacaaacggcttcaagacaccctgaaaaggatggaggagaaggcttctagtctggacgaggaaaacagaatgctgcgacaggctgtggcgtcaaaccctgctattgtcaggtcgccatcgggcgaaaaccatgaagcacctggaattcaggcagctcctgataatgagaaatcaaggaatggtacagtgaagcctatagcagtggatcgggaggctaatgtccatggcgctgaacagcccagctcaaatggtcaagaagctgggaagcaacagcaagagcttctgatcaagtgcctatccgaagacctgggtttctcggtcggcaggcctatcgctgcatacctcatctacaggtgtctggtgcattggagatcatttgaagaagagaggagcgtggtctttgaccggattatccagaagattactgctgcgcttgaggcgcgagacaacaacgatgcactagcatactggctgtccaattcatgcgcgctcctggttcttcttcaaaggacactgaaaatcaacggggtagctgccttggctcgtcagaggcgaagaacgtcgtcacctctcaaggtgccacagcaggaaaaccaagatccagctcccgacggacagttgatctgtggactagcccaagtctaccaggttgaggccaagtacccagctatcgcgttcaagcagcagctcaccgcactgctggagaaggtctatgggatgatccggcacaacctgaagaaggaactgtcgccgcttctgggcctctgcattcaggcgccacgcacattcgtcgtcagtcccagaggatcgtgttcccaaggaacagatctggcgcaacaagcctccatggcgcattggcagagcatcatcaagatcttgacaaattctctcgatgttctgaaatcaaattacgtgcctccgttcctgatctgcaagatgttcacgcaagtcttctcgtttatcaatgtgcagctttttaacagccttctgctgcggcgtgagtgctgctcgttcagtaacggagagtacgtgaaggctgggctggatgagctagagcattggtgcttttggctgactgaagagtacgcaggatctgcatgggacgagctgaagcatatcaggcaggcagttaccctcttgatacttgacgacaagcatagccggagtctcgcggagatcacagacgacttctgcccagtgctgagcatgcagcaactgtaccggatcagcacgatgtactgcgacgacaagtttgggaccctgggcattccatcagaagtcgtctccagcatgcggaccaagatgatcgagggctcgtcgagcagcccgtcggcgcacgacgacatcaactcgttcctgctagacgatgacttcagcataccgttctccgtggatgacttcacgaagctgatagtgcacgtcgacgtagcggacatggatttgccaccgctcattcaggagagcagcggcggcggctccaaaatgggacattgaggagtgacaatatgcacgccttttttgtgtgtgttgcggtgatgtgcatagtgcgtgacatattgctctgagaccagggttttgtttttttcttcgtcgactggtcttccatttttctcccatatgactactacctgagtgagtagtgcctgtttgggtttgcgcgtgtgtatgattgtacagaactgagctgtggcatataaggtaaggaaagaaagcctgtgtgattcaattttttttatcaaaagagtgagtgatgcttgcaagtcaagctttcctttgccaagtgtgatctcagattctaactgctgtgacacctgtacttttgttgtttgtttgttttttttttttttttgaaagaagcctggcgctgatggcctccatttaactgttgagcatctgtcactcgctcaatagttaatggtctagagaaacattgtcgaccatctgtgtcactagaattgatgacttgttgtctatccttattgcctctgtttcaaccctgccagtgcgatttggatctggtcatggccggcgccatgcacagtaatgtggtcaataacaaatatgctaaactacatacatataacatataccatgttcatctaagataacatgtgaacagagtattatagatcgttatctctaaagtctaaacatatagtgcagcggaagaagaccataacgatatagtagaagttgtcgtacgtctgcacgtaccaccaacaacgatatgtttacccgtgcttctcatattcgtagccgatcaataccgctccaatagcagtagcgtctccaatccctagagagacatcaattaggttatgcgatgtctctcaaccatagcatatgagctctttagtgaacttt

SEQ ID NO: 73741 - DNA, 3475 bp, Zea Mays
gacattttgatgtcgataccattaactaaaataaatagtttttcttcgatgtaaatgtccgtaaaatatttagttcctgaatttctttcttcctttctagtgtgactgtcccatctaatattctgaaggtgacatgtcattgttgggttgaaaatcacaaggggagagaaggaaaaaggcagggaatgggaggggaaagtacctaagccagctaggaagcaagcagctggaggcagagatgccaaccgcaatgtcctgtcatctttgctcatgaccaaatcggtcaaggtcgcccatggatggagatcacaggaggcaagccgccgccgcggtcaccgtcacgcaagtcagcccggcgcggcgcctgatcgcctggctgaggcttctcttccgggcgttcgttcatagatacggcaaggtcgcgagctggaacgcggcggggcgccctgtcttcgtcgtcctcgcggtcttcttcctccagaggagcctgcgccgccggtacctgtcatggaaggagtcgtcgcgtcttccgctgatggccgccgccgccgtcaccgtgcagacgaccgtcagggcgatggcggcgcagcgcgagctctctgtccggaagcagaccagagctgccacacgcatccaggcgcaatggcgtgcgcacagggcggtgtggagctacctgacgacgaagagagccgccgtcatctgccaacgtgcttggaggcaaagcgttgcacgcaaggagctcaggaagctcagactgtgtgtgcaggagaatctggagagggaaatgctggaggaggtgtgcaggctgcgtgagatggtggacgtgctccagcaggctgtcaatgacgccgagacgagggccgtcaacgagagggaggcggcgaaggatgcgatggcgcagttggaagcagcctcggcgatcgaagagaccgtggtgatggttgaggacactgagaaggtcaagtcgctgagtgccgaagttgaccgcctcaaggatttgctgggagctgaaatgagtgaaacttttgccgccaagaaggcgctttctgaagccgagctgaggaacgagaagctggccaggctgcttggagttgaggaagttaagaacaaacggcttcaagacaccctgaaaaggatggaggagaaggcttctagtctggacgaggaaaacagaatgctgcgacaggctgtggcgtcaaaccctgctattgtcaggtcgccatcgggcgaaaaccatgaagcacctggaattcaggcagctcctgataatgagaaatcaaggaatggtacagtgaagcctatagcagtggatcgggaggctaatgtccatgagaagggcgctgaacagcccagctcaaatggtcaagaagctgggaagcaacagcaagagcttctgatcaagtgcctatccgaagacctgggtttctcggtcggcaggcctatcgctgcatacctcatctacaggtgtctggtgcattggagatcatttgaagaagagaggagcgtggtctttgaccggattatccagaagattactgctgcgcttgaggcgcgagacaacaacgatgcactagcatactggctgtccaattcatgcgcgctcctggttcttcttcaaaggacactgaaaatcaacggggtagctgccttggctcgtcagaggcgaagaacgtcgtcacctctcaaggtgccacagcaggaaaaccaagatccagctcccgacggacagttgatctgtggactagcccaagtctaccaggttgaggccaagtacccagctatcgcgttcaagcagcagctcaccgcactgctggagaaggtctatgggatgatccggcacaacctgaagaaggaactgtcgccgcttctgggcctctgcattcaggcgccacgcacattcgtcgtcagtcccagaggatcgtgttcccaaggaacagatctggcgcaacaagcctccatggcgcattggcagagcatcatcaagatcttgacaaattctctcgatgttctgaaatcaaattacgtgcctccgttcctgatctgcaagatgttcacgcaagtcttctcgtttatcaatgtgcagctttttaacagccttctgctgcggcgtgagtgctgctcgttcagtaacggagagtacgtgaaggctgggctggatgagctagagcattggtgcttttggctgactgaagagtacgcaggatctgcatgggacgagctgaagcatatcaggcaggcagttaccctcttgatacttgacgacaagcatagccggagtctcgcggagatcacagacgacttctgcccagtgctgagcatgcagcaactgtaccggatcagcacgatgtactgcgacgacaagtttgggaccctgggcattccatcagaagtcgtctccagcatgcggaccaagatgatcgagggctcgtcgagcagcccgtcggcgcacgacgacatcaactcgttcctgctagacgatgacttcagcataccgttctccgtggatgacttcacgaagctgatagtgcacgtcgacgtagcggacatggatttgccaccgctcattcaggagagcagcggcggcggctccaaaatgggacattgaggagtgacaatatgcacgccttttttgtgtgtgttgcggtgatgtgcatagtgcgtgacatattgctctgagaccagggttttgtttttttcttcgtcgactggtcttccatttttctcccatatgactactacctgagtgagtagtgcctgtttgggtttgcgcgtgtgtatgattgtacagaactgagctgtggcatataaggtaaggaaagaaagcctgtgtgattcaattttttttatcaaaagagtgagtgatgcttgcaagtcaagctttcctttgccaagtgtgatctcagattctaactgctgtgacacctgtacttttgttgtttgtttgttttttttttttttttgaaagaagcctggcgctgatggcctccatttaactgttgagcatctgtcactcgctcaatagttaatggtctagagaaacattgtcgaccatctgtgtcactagaattgatgacttgttgtctatccttattgcctctgtttcaaccctgccagtgcgatttggatctggtcatggccggcgccatgcacagtaatgtggtcaataacaaatatgctaaactacatacatataacatataccatgttcatctaagataacatgtgaacagagtattatagatcgttatctctaaagtctaaacatatagtgcagcggaagaagaccataacgatatagtagaagttgtcgtacgtctgcacgtaccaccaacaacgatatgtttacccgtgcttctcatattcgtagccgatcaataccgctccaatagcagtagcgtctccaatccctagagagacatcaattaggttatgcgatgtctctcaaccatagcatatgagctctttagtgaacttt

SEQ ID NO: 73742 - DNA, 3403 bp, Zea Mays
gacattttgatgtcgataccattaactaaaataaatagtttttcttcgatgtaaatgtccgtaaaatatttagttcctgaatttctttcttcctttctagtgtgactgtcccatctaatattctgaaggtgacatgtcattgttgggttgaaaatcacaaggggagagaaggaaaaaggcagggaatgggaggggaaagtacctaagccagctaggaagcaagcagctggaggcagagatgccaaccgcaatgtcctgtcatctttgctcatgaccaaatcggtcaaggtcgcccatggatggagatcacaggaggcaagccgccgccgcggtcaccgtcacgcaagtcagcccggcgcggcgcctgatcgcctggctgaggcttctcttccgggcgttcgttcatagatacggcaaggtcgcgagctggaacgcggcggggcgccctgtcttcgtcgtcctcgcggtcttcttcctccagaggagcctgcgccgccggtacctgtcatggaaggagtcgtcgcgtcttccgctgatggccgccgccgccgtcaccgtgcagacgaccgtcagggcgatggcggcgcagcgcgagctctctgtccggaagcagaccagagctgccacacgcatccaggcgcaatggcgtgcgcacagggcggtgtggagctacctgacgacgaagagagccgccgtcatctgccaacgtgcttggaggcaaagcgttgcacgcaaggagctcaggaagctcagactgtgtgtgcaggagaatctggagagggaaatgctggaggaggtgtgcaggctgcgtgagatggtggacgtgctccagcaggctgtcaatgacgccgagacgagggccgtcaacgagagggaggcggcgaaggatgcgatggcgcagttggaagcagcctcggcgatcgaagagaccgtggtgatggttgaggacactgagaaggtcaagtcgctgagtgccgaagttgaccgcctcaaggatttgctgggagctgaaatgagtgaaacttttgccgccaagaaggcgctttctgaagccgagctgaggaacgagaagctggccaggctgcttggagttgaggaagttaagaacaaacggcttcaagacaccctgaaaaggatggaggagaaggcttctagtctggacgaggaaaacagaatgctgcgacaggctgtggcgtcaaaccctgctattgtcaggtcgccatcgggcgaaaaccatgaagcacctggaattcaggcagctcctgataatgagaaatcaaggaatggtacagtgaagcctatagcagtggatcgggaggctaatgtccatgagaagggcgctgaacagcccagctcaaatggtcaagaagctgggaagcaacagcaagagcttctgatcaagtgcctatccgaagacctgggtttctcggtcggcaggcctatcgctgcatacctcatctacaggtgtctggtgcattggagatcatttgaagaagagaggagcgtggtctttgaccggattatccagaagattactgctgcgcttgaggcgcgagacaacaacgatgcactagcatactggctgtccaattcatgcgcgctcctggttcttcttcaaaggacactgaaaatcaacggggtagctgccttggctcgtcagaggcgaagaacgtcgtcacctctcaaggaaaaccaagatccagctcccgacggacagttgatctgtggactagcccaagtctaccaggttgaggccaagtacccagctatcgcgttcaagcagcagctcaccgcactgctggagaaggtctatgggatgatccggcacaacctgaagaaggaactgtcgccgcttctgggcctctgcattcaggcgccacgcacattcgtcgtcagtcccagaggatcgtgttcccaaggaacagatctggcgcaacaagcctccatggcgcattggcagagcatcatcaagatcttgacaaattctctcgatgttctgaaatcaaattacctttttaacagccttctgctgcggcgtgagtgctgctcgttcagtaacggagagtacgtgaaggctgggctggatgagctagagcattggtgcttttggctgactgaagagtacgcaggatctgcatgggacgagctgaagcatatcaggcaggcagttaccctcttgatacttgacgacaagcatagccggagtctcgcggagatcacagacgacttctgcccagtgctgagcatgcagcaactgtaccggatcagcacgatgtactgcgacgacaagtttgggaccctgggcattccatcagaagtcgtctccagcatgcggaccaagatgatcgagggctcgtcgagcagcccgtcggcgcacgacgacatcaactcgttcctgctagacgatgacttcagcataccgttctccgtggatgacttcacgaagctgatagtgcacgtcgacgtagcggacatggatttgccaccgctcattcaggagagcagcggcggcggctccaaaatgggacattgaggagtgacaatatgcacgccttttttgtgtgtgttgcggtgatgtgcatagtgcgtgacatattgctctgagaccagggttttgtttttttcttcgtcgactggtcttccatttttctcccatatgactactacctgagtgagtagtgcctgtttgggtttgcgcgtgtgtatgattgtacagaactgagctgtggcatataaggtaaggaaagaaagcctgtgtgattcaattttttttatcaaaagagtgagtgatgcttgcaagtcaagctttcctttgccaagtgtgatctcagattctaactgctgtgacacctgtacttttgttgtttgtttgttttttttttttttttgaaagaagcctggcgctgatggcctccatttaactgttgagcatctgtcactcgctcaatagttaatggtctagagaaacattgtcgaccatctgtgtcactagaattgatgacttgttgtctatccttattgcctctgtttcaaccctgccagtgcgatttggatctggtcatggccggcgccatgcacagtaatgtggtcaataacaaatatgctaaactacatacatataacatataccatgttcatctaagataacatgtgaacagagtattatagatcgttatctctaaagtctaaacatatagtgcagcggaagaagaccataacgatatagtagaagttgtcgtacgtctgcacgtaccaccaacaacgatatgtttacccgtgcttctcatattcgtagccgatcaataccgctccaatagcagtagcgtctccaatccctagagagacatcaattaggttatgcgatgtctctcaaccatagcatatgagctctttagtgaacttt

SEQ ID NO: 73743 - DNA, 3541 bp, Zea Mays
gacattttgatgtcgataccattaactaaaataaatagtttttcttcgatgtaaatgtccgtaaaatatttagttcctgaatttctttcttcctttctagtgtgactgtcccatctaatattctgaaggtgacatgtcattgttgggttgaaaatcacaaggggagagaaggaaaaaggcagggaatgggaggggaaagtacctaagccagctaggaagcaagcagctggaggcagagatgccaaccgcaatgtcctgtcatctttgctcatgaccaaatcggtcaaggtcgcccatggatggagatcacaggaggcaagccgccgccgcggtcaccgtcacgcaagtcagcccggcgcggcgcctgatcgcctggctgaggcttctcttccgggcgttcgttcatagatacggcaaggtcgcgagctggaacgcggcggggcgccctgtcttcgtcgtcctcgcggtcttcttcctccagaggagcctgcgccgccggtacctgtcatggaaggagtcgtcgcgtcttccgctgatggccgccgccgccgtcaccgtgcagacgaccgtcagggcgatggcggcgcagcgcgagctctctgtccggaagcagaccagagctgccacacgcatccaggcgcaatggcgtgcgcacagggcggtgtggagctacctgacgacgaagagagccgccgtcatctgccaacgtgcttggaggcaaagcgttgcacgcaaggagctcaggaagctcagactgtgtgtgcaggagaatctggagagggaaatgctggaggaggtgtgcaggctgcgtgagatggtggacgtgctccagcaggctgtcaatgacgccgagacgagggccgtcaacgagagggaggcggcgaaggatgcgatggcgcagttggaagcagcctcggcgatcgaagagaccgtggtgatggttgaggacactgagaaggtcaagtcgctgagtgccgaagttgaccgcctcaaggatttgctgggagctgaaatgagtgaaacttttgccgccaagaaggcgctttctgaagccgagctgaggaacgagaagctggccaggctgcttggagttgaggaagttaagaacaaacggcttcaagacaccctgaaaaggatggaggagaaggcttctagtctggacgaggaaaacagaatgctgcgacaggctgtggcgtcaaaccctgctattgtcaggtcgccatcgggcgaaaaccatgaagcacctggaattcaggcagctcctgataatgagaaatcaaggaatggtacagtgaagcctatagcagtggatcgggaggctaatgtccatgtatgagaagggcgctgaacagcccagctcaaatggtcaagaagctgggaagcaacagcaagagcttctgatcaagtgcctatccgaagacctgggtttctcggtcggcaggcctatcgctgcatacctcatctacaggtgtctggtgcattggagatcatttgaagaagagaggagcgtggtctttgaccggattatccagaagattactgctgcgcttgaggcgcgagacaacaacgatgcactagcatactggctgtccaattcatgcgcgctcctggttcttcttcaaaggacactgaaaatcaacggggtagctgccttggctcgtcagaggcgaagaacgtcgtcacctctcaaggtgccacaggtaaaccaattctgaaacctgagaattctgaaacctgagagctctgaaacctgatctcgcagcaggaaaaccaagatccagctcccgacggacagttgatctgtggactagcccaagtctaccaggttgaggccaagtacccagctatcgcgttcaagcagcagctcaccgcactgctggagaaggtctatgggatgatccggcacaacctgaagaaggaactgtcgccgcttctgggcctctgcattcaggcgccacgcacattcgtcgtcagtcccagaggatcgtgttcccaaggaacagatctggcgcaacaagcctccatggcgcattggcagagcatcatcaagatcttgacaaattctctcgatgttctgaaatcaaattacgtgcctccgttcctgatctgcaagatgttcacgcaagtcttctcgtttatcaatgtgcagctttttaacagccttctgctgcggcgtgagtgctgctcgttcagtaacggagagtacgtgaaggctgggctggatgagctagagcattggtgcttttggctgactgaagagtacgcaggatctgcatgggacgagctgaagcatatcaggcaggcagttaccctcttgatacttgacgacaagcatagccggagtctcgcggagatcacagacgacttctgcccagtgctgagcatgcagcaactgtaccggatcagcacgatgtactgcgacgacaagtttgggaccctgggcattccatcagaagtcgtctccagcatgcggaccaagatgatcgagggctcgtcgagcagcccgtcggcgcacgacgacatcaactcgttcctgctagacgatgacttcagcataccgttctccgtggatgacttcacgaagctgatagtgcacgtcgacgtagcggacatggatttgccaccgctcattcaggagagcagcggcggcggctccaaaatgggacattgaggagtgacaatatgcacgccttttttgtgtgtgttgcggtgatgtgcatagtgcgtgacatattgctctgagaccagggttttgtttttttcttcgtcgactggtcttccatttttctcccatatgactactacctgagtgagtagtgcctgtttgggtttgcgcgtgtgtatgattgtacagaactgagctgtggcatataaggtaaggaaagaaagcctgtgtgattcaattttttttatcaaaagagtgagtgatgcttgcaagtcaagctttcctttgccaagtgtgatctcagattctaactgctgtgacacctgtacttttgttgtttgtttgttttttttttttttttgaaagaagcctggcgctgatggcctccatttaactgttgagcatctgtcactcgctcaatagttaatggtctagagaaacattgtcgaccatctgtgtcactagaattgatgacttgttgtctatccttattgcctctgtttcaaccctgccagtgcgatttggatctggtcatggccggcgccatgcacagtaatgtggtcaataacaaatatgctaaactacatacatataacatataccatgttcatctaagataacatgtgaacagagtattatagatcgttatctctaaagtctaaacatatagtgcagcggaagaagaccataacgatatagtagaagttgtcgtacgtctgcacgtaccaccaacaacgatatgtttacccgtgcttctcatattcgtagccgatcaataccgctccaatagcagtagcgtctccaatccctagagagacatcaattaggttatgcgatgtctctcaaccatagcatatgagctctttagtgaacttt

SEQ ID NO: 73744 - DNA, 3460 bp, Zea Mays
gacattttgatgtcgataccattaactaaaataaatagtttttcttcgatgtaaatgtccgtaaaatatttagttcctgaatttctttcttcctttctagtgtgactgtcccatctaatattctgaaggtgacatgtcattgttgggttgaaaatcacaaggggagagaaggaaaaaggcagggaatgggaggggaaagtacctaagccagctaggaagcaagcagctggaggcagagatgccaaccgcaatgtcctgtcatctttgctcatgaccaaatcggtcaaggtcgcccatggatggagatcacaggaggcaagccgccgccgcggtcaccgtcacgcaagtcagcccggcgcggcgcctgatcgcctggctgaggcttctcttccgggcgttcgttcatagatacggcaaggtcgcgagctggaacgcggcggggcgccctgtcttcgtcgtcctcgcggtcttcttcctccagaggagcctgcgccgccggtacctgtcatggaaggagtcgtcgcgtcttccgctgatggccgccgccgccgtcaccgtgcagacgaccgtcagggcgatggcggcgcagcgcgagctctctgtccggaagcagaccagagctgccacacgcatccaggcgcaatggcgtgcgcacagggcggtgtggagctacctgacgacgaagagagccgccgtcatctgccaacgtgcttggaggcaaagcgttgcacgcaaggagctcaggaagctcagactgtgtgtgcaggagaatctggagagggaaatgctggaggaggtgtgcaggctgcgtgagatggtggacgtgctccagcaggctgtcaatgacgccgagacgagggccgtcaacgagagggaggcggcgaaggatgcgatggcgcagttggaagcagcctcggcgatcgaagagaccgtggtgatggttgaggacactgagaaggtcaagtcgctgagtgccgaagttgaccgcctcaaggatttgctgggagctgaaatgagtgaaacttttgccgccaagaaggcgctttctgaagccgagctgaggaacgagaagctggccaggctgcttggagttgaggaagttaagaacaaacggcttcaagacaccctgaaaaggatggaggagaaggcttctagtctggacgaggaaaacagaatgctgcgacaggctgtggcgtcaaaccctgctattgtcaggtcgccatcgggcgaaaaccatgaagcacctggaattcaggcagctcctgataatgagaaatcaaggaatggtacagtgaagcctatagcagtggatcgggaggctaatgtccataagggcgctgaacagcccagctcaaatggtcaagaagctgggaagcaacagcaagagcttctgatcaagtgcctatccgaagacctgggtttctcggtcggcaggcctatcgctgcatacctcatctacaggtgtctggtgcattggagatcatttgaagaagagaggagcgtggtctttgaccggattatccagaagattactgctgcgcttgaggcgcgagacaacaacgatgcactagcatactggctgtccaattcatgcgcgctcctggttcttcttcaaaggacactgaaaatcaacggggtagctgccttggctcgtcagaggcgaagaacgtcgtcacctctcaaggaaaaccaagatccagctcccgacggacagttgatctgtggactagcccaagtctaccaggttgaggccaagtacccagctatcgcgttcaagcagcagctcaccgcactgctggagaaggtctatgggatgatccggcacaacctgaagaaggaactgtcgccgcttctgggcctctgcattcaggcgccacgcacattcgtcgtcagtcccagaggatcgtgttcccaaggaacagatctggcgcaacaagcctccatggcgcattggcagagcatcatcaagatcttgacaaattctctcgatgttctgaaatcaaattacgtgcctccgttcctgatctgcaagatgttcacgcaagtcttctcgtttatcaatgtgcagctttttaacagccttctgctgcggcgtgagtgctgctcgttcagtaacggagagtacgtgaaggctgggctggatgagctagagcattggtgcttttggctgactgaagagtacgcaggatctgcatgggacgagctgaagcatatcaggcaggcagttaccctcttgatacttgacgacaagcatagccggagtctcgcggagatcacagacgacttctgcccagtgctgagcatgcagcaactgtaccggatcagcacgatgtactgcgacgacaagtttgggaccctgggcattccatcagaagtcgtctccagcatgcggaccaagatgatcgagggctcgtcgagcagcccgtcggcgcacgacgacatcaactcgttcctgctagacgatgacttcagcataccgttctccgtggatgacttcacgaagctgatagtgcacgtcgacgtagcggacatggatttgccaccgctcattcaggagagcagcggcggcggctccaaaatgggacattgaggagtgacaatatgcacgccttttttgtgtgtgttgcggtgatgtgcatagtgcgtgacatattgctctgagaccagggttttgtttttttcttcgtcgactggtcttccatttttctcccatatgactactacctgagtgagtagtgcctgtttgggtttgcgcgtgtgtatgattgtacagaactgagctgtggcatataaggtaaggaaagaaagcctgtgtgattcaattttttttatcaaaagagtgagtgatgcttgcaagtcaagctttcctttgccaagtgtgatctcagattctaactgctgtgacacctgtacttttgttgtttgtttgttttttttttttttttgaaagaagcctggcgctgatggcctccatttaactgttgagcatctgtcactcgctcaatagttaatggtctagagaaacattgtcgaccatctgtgtcactagaattgatgacttgttgtctatccttattgcctctgtttcaaccctgccagtgcgatttggatctggtcatggccggcgccatgcacagtaatgtggtcaataacaaatatgctaaactacatacatataacatataccatgttcatctaagataacatgtgaacagagtattatagatcgttatctctaaagtctaaacatatagtgcagcggaagaagaccataacgatatagtagaagttgtcgtacgtctgcacgtaccaccaacaacgatatgtttacccgtgcttctcatattcgtagccgatcaataccgctccaatagcagtagcgtctccaatccctagagagacatcaattaggttatgcgatgtctctcaaccatagcatatgagctctttagtgaacttt

SEQ ID NO: 73745 - DNA, 3575 bp, Zea Mays
gacattttgatgtcgataccattaactaaaataaatagtttttcttcgatgtaaatgtccgtaaaatatttagttcctgaatttctttcttcctttctagtgtgactgtcccatctaatattctgaaggtgacatgtcattgttgggttgaaaatcacaaggggagagaaggaaaaaggcagggaatgggaggggaaagtacctaagccagctaggaagcaagcagctggaggcagagatgccaaccgcaatgtcctgtcatctttgctcatgaccaaatcggtcaaggtcgcccatggatggagatcacaggaggcaagccgccgccgcggtcaccgtcacgcaagtcagcccggcgcggcgcctgatcgcctggctgaggcttctcttccgggcgttcgttcatagatacggcaaggtcgcgagctggaacgcggcggggcgccctgtcttcgtcgtcctcgcggtcttcttcctccagaggagcctgcgccgccggtacctgtcatggaaggagtcgtcgcgtcttccgctgatggccgccgccgccgtcaccgtgcagacgaccgtcagggcgatggcggcgcagcgcgagctctctgtccggaagcagaccagagctgccacacgcatccaggcgcaatggcgtgcgcacagggcggtgtggagctacctgacgacgaagagagccgccgtcatctgccaacgtgcttggaggcaaagcgttgcacgcaaggagctcaggaagctcagactgtgtgtgcaggagaatctggagagggaaatgctggaggaggtgtgcaggctgcgtgagatggtggacgtgctccagcaggctgtcaatgacgccgagacgagggccgtcaacgagagggaggcggcgaaggatgcgatggcgcagttggaagcagcctcggcgatcgaagagaccgtggtgatggttgaggacactgagaaggtcaagtcgctgagtgccgaagttgaccgcctcaaggatttgctgggagctgaaatgagtgaaacttttgccgccaagaaggcgctttctgaagccgagctgaggaacgagaagctggccaggctgcttggagttgaggaagttaagaacaaacggcttcaagacaccctgaaaaggatggaggagaaggcttctagtctggacgaggaaaacagaatgctgcgacaggctgtggcgtcaaaccctgctattgtcaggtcgccatcgggcgaaaaccatgaagcacctggaattcaggcagctcctgataatgagaaatcaaggaatggtacagtgaagcctatagcagtggatcgggaggctaatgtccatgagaagggcgctgaacagcccagctcaaatggtcaagaagctgggaagcaacagcaagagcttctgatcaagtgcctatccgaagacctgggtttctcggtcggcaggcctatcgctgcatacctcatctacaggtgtctggtgcattggagatcatttgaagaagagaggagcgtggtctttgaccggattatccagaagattactgctgcgcttgaggcgcgagacaacaacgatgcactagcatactggctgtccaattcatgcgcgctcctggttcttcttcaaaggacactgaaaatcaacggggtagctgccttggctcgtcagaggcgaagaacgtcgtcacctctcaagcaggaaaaccaagatccagctcccgacggacagttgatctgtggactagcccaagtctaccaggttgaggccaagtacccagctatcgcgttcaagcagcagctcaccgcactgctggagaaggtctatgggatgatccggcacaacctgaagaaggaactgtcgccgcttctgggcctctgcattcaggtacgtagtagtgtctgccaggatgcggttctcaaacaagtgtatttgccaaaaataaaaaaataaaaaaaagtcatgacccaacaagggtttcaatcttctcctgcaggcgccacgcacattcgtcgtcagtcccagaggatcgtgttcccaaggaacagatctggcgcaacaagcctccatggcgcattggcagagcatcatcaagatcttgacaaattctctcgatgttctgaaatcaaattacgtgcctccgttcctgatctgcaagatgttcacgcaagtcttctcgtttatcaatgtgcagctttttaacagccttctgctgcggcgtgagtgctgctcgttcagtaacggagagtacgtgaaggctgggctggatgagctagagcattggtgcttttggctgactgaagagtacgcaggatctgcatgggacgagctgaagcatatcaggcaggcagttaccctcttgatacttgacgacaagcatagccggagtctcgcggagatcacagacgacttctgcccagtgctgagcatgcagcaactgtaccggatcagcacgatgtactgcgacgacaagtttgggaccctgggcattccatcagaagtcgtctccagcatgcggaccaagatgatcgagggctcgtcgagcagcccgtcggcgcacgacgacatcaactcgttcctgctagacgatgacttcagcataccgttctccgtggatgacttcacgaagctgatagtgcacgtcgacgtagcggacatggatttgccaccgctcattcaggagagcagcggcggcggctccaaaatgggacattgaggagtgacaatatgcacgccttttttgtgtgtgttgcggtgatgtgcatagtgcgtgacatattgctctgagaccagggttttgtttttttcttcgtcgactggtcttccatttttctcccatatgactactacctgagtgagtagtgcctgtttgggtttgcgcgtgtgtatgattgtacagaactgagctgtggcatataaggtaaggaaagaaagcctgtgtgattcaattttttttatcaaaagagtgagtgatgcttgcaagtcaagctttcctttgccaagtgtgatctcagattctaactgctgtgacacctgtacttttgttgtttgtttgttttttttttttttttgaaagaagcctggcgctgatggcctccatttaactgttgagcatctgtcactcgctcaatagttaatggtctagagaaacattgtcgaccatctgtgtcactagaattgatgacttgttgtctatccttattgcctctgtttcaaccctgccagtgcgatttggatctggtcatggccggcgccatgcacagtaatgtggtcaataacaaatatgctaaactacatacatataacatataccatgttcatctaagataacatgtgaacagagtattatagatcgttatctctaaagtctaaacatatagtgcagcggaagaagaccataacgatatagtagaagttgtcgtacgtctgcacgtaccaccaacaacgatatgtttacccgtgcttctcatattcgtagccgatcaataccgctccaatagcagtagcgtctccaatccctagagagacatcaattaggttatgcgatgtctctcaaccatagcatatgagctctttagtgaacttt

SEQ ID NO: 73746 - DNA, 3465 bp, Zea Mays
gacattttgatgtcgataccattaactaaaataaatagtttttcttcgatgtaaatgtccgtaaaatatttagttcctgaatttctttcttcctttctagtgtgactgtcccatctaatattctgaaggtgacatgtcattgttgggttgaaaatcacaaggggagagaaggaaaaaggcagggaatgggaggggaaagtacctaagccagctaggaagcaagcagctggaggcagagatgccaaccgcaatgtcctgtcatctttgctcatgaccaaatcggtcaaggtcgcccatggatggagatcacaggaggcaagccgccgccgcggtcaccgtcacgcaagtcagcccggcgcggcgcctgatcgcctggctgaggcttctcttccgggcgttcgttcatagatacggcaaggtcgcgagctggaacgcggcggggcgccctgtcttcgtcgtcctcgcggtcttcttcctccagaggagcctgcgccgccggtacctgtcatggaaggagtcgtcgcgtcttccgctgatggccgccgccgccgtcaccgtgcagacgaccgtcagggcgatggcggcgcagcgcgagctctctgtccggaagcagaccagagctgccacacgcatccaggcgcaatggcgtgcgcacagggcggtgtggagctacctgacgacgaagagagccgccgtcatctgccaacgtgcttggaggcaaagcgttgcacgcaaggagctcaggaagctcagactgtgtgtgcaggagaatctggagagggaaatgctggaggaggtgtgcaggctgcgtgagatggtggacgtgctccagcaggctgtcaatgacgccgagacgagggccgtcaacgagagggaggcggcgaaggatgcgatggcgcagttggaagcagcctcggcgatcgaagagaccgtggtgatggttgaggacactgagaaggtcaagtcgctgagtgccgaagttgaccgcctcaaggatttgctgggagctgaaatgagtgaaacttttgccgccaagaaggcgctttctgaagccgagctgaggaacgagaagctggccaggctgcttggagttgaggaagttaagaacaaacggcttcaagacaccctgaaaaggatggaggagaaggcttctagtctggacgaggaaaacagaatgctgcgacaggctgtggcgtcaaaccctgctattgtcaggtcgccatcgggcgaaaaccatgaagcacctggaattcaggcagctcctgataatgagaaatcaaggaatggtacagtgaagcctatagcagtggatcgggaggctaatgtccatgagaagggcgctgaacagcccagctcaaatggtcaagaagctgggaagcaacagcaagagcttctgatcaagtgcctatccgaagacctgggtttctcggtcggcaggcctatcgctgcatacctcatctacaggtgtctggtgcattggagatcatttgaagaagagaggagcgtggtctttgaccggattatccagaagattactgctgcgcttgaggcgcgagacaacaacgatgcactagcatactggctgtccaattcatgcgcgctcctggttcttcttcaaaggacactgaaaatcaacggggtagctgccttggctcgtcagaggcgaagaacgtcgtcacctctcaaggtgccacaggaaaaccaagatccagctcccgacggacagttgatctgtggactagcccaagtctaccaggttgaggccaagtacccagctatcgcgttcaagcagcagctcaccgcactgctggagaaggtctatgggatgatccggcacaacctgaagaaggaactgtcgccgcttctgggcctctgcattcaggcgccacgcacattcgtcgtcagtcccagaggatcgtgttcccaaggaacagatctggcgcaacaagcctccatggcgcattggcagagcatcatcaagatcttgacaaattctctcgatgttctgaaatcaaattacgtgcctccgttcctgatctgcaagatgttcacgcaagtcttctcgtttatcaatgtgcagctttttaacagccttctgctgcggcgtgagtgctgctcgttcagtaacggagagtacgtgaaggctgggctggatgagctagagcattggtgcttttggctgactgaagaggatctgcatgggacgagctgaagcatatcaggcaggcagttaccctcttgatacttgacgacaagcatagccggagtctcgcggagatcacagacgacttctgcccagtgctgagcatgcagcaactgtaccggatcagcacgatgtactgcgacgacaagtttgggaccctgggcattccatcagaagtcgtctccagcatgcggaccaagatgatcgagggctcgtcgagcagcccgtcggcgcacgacgacatcaactcgttcctgctagacgatgacttcagcataccgttctccgtggatgacttcacgaagctgatagtgcacgtcgacgtagcggacatggatttgccaccgctcattcaggagagcagcggcggcggctccaaaatgggacattgaggagtgacaatatgcacgccttttttgtgtgtgttgcggtgatgtgcatagtgcgtgacatattgctctgagaccagggttttgtttttttcttcgtcgactggtcttccatttttctcccatatgactactacctgagtgagtagtgcctgtttgggtttgcgcgtgtgtatgattgtacagaactgagctgtggcatataaggtaaggaaagaaagcctgtgtgattcaattttttttatcaaaagagtgagtgatgcttgcaagtcaagctttcctttgccaagtgtgatctcagattctaactgctgtgacacctgtacttttgttgtttgtttgttttttttttttttttgaaagaagcctggcgctgatggcctccatttaactgttgagcatctgtcactcgctcaatagttaatggtctagagaaacattgtcgaccatctgtgtcactagaattgatgacttgttgtctatccttattgcctctgtttcaaccctgccagtgcgatttggatctggtcatggccggcgccatgcacagtaatgtggtcaataacaaatatgctaaactacatacatataacatataccatgttcatctaagataacatgtgaacagagtattatagatcgttatctctaaagtctaaacatatagtgcagcggaagaagaccataacgatatagtagaagttgtcgtacgtctgcacgtaccaccaacaacgatatgtttacccgtgcttctcatattcgtagccgatcaataccgctccaatagcagtagcgtctccaatccctagagagacatcaattaggttatgcgatgtctctcaaccatagcatatgagctctttagtgaacttt

SEQ ID NO: 73747 - DNA, 3461 bp, Zea Mays
gacattttgatgtcgataccattaactaaaataaatagtttttcttcgatgtaaatgtccgtaaaatatttagttcctgaatttctttcttcctttctagtgtgactgtcccatctaatattctgaaggtgacatgtcattgttgggttgaaaatcacaaggggagagaaggaaaaaggcagggaatgggaggggaaagtacctaagccagctaggaagcaagcagctggaggcagagatgccaaccgcaatgtcctgtcatctttgctcatgaccaaatcggtcaaggtcgcccatggatggagatcacaggaggcaagccgccgccgcggtcaccgtcacgcaagtcagcccggcgcggcgcctgatcgcctggctgaggcttctcttccgggcgttcgttcatagatacggcaaggtcgcgagctggaacgcggcggggcgccctgtcttcgtcgtcctcgcggtcttcttcctccagaggagcctgcgccgccggtacctgtcatggaaggagtcgtcgcgtcttccgctgatggccgccgccgccgtcaccgtgcagacgaccgtcagggcgatggcggcgcagcgcgagctctctgtccggaagcagaccagagctgccacacgcatccaggcaatggcgtgcgcacagggcggtgtggagctacctgacgacgaagagagccgccgtcatctgccaacgtgcttggaggcaaagcgttgcacgcaaggagctcaggaagctcagactgtgtgtgcaggagaatctggagagggaaatgctggaggaggtgtgcaggctgcgtgagatggtggacgtgctccagcaggctgtcaatgacgccgagacgagggccgtcaacgagagggaggcggcgaaggatgcgatggcgcagttggaagcagcctcggcgatcgaagagaccgtggtgatggttgaggacactgagaaggtcaagtcgctgagtgccgaagttgaccgcctcaaggatttgctgggagctgaaatgagtgaaacttttgccgccaagaaggcgctttctgaagccgagctgaggaacgagaagctggccaggctgcttggagttgaggaagttaagaacaaacggcttcaagacaccctgaaaaggatggaggagaaggcttctagtctggacgaggaaaacagaatgctgcgacaggctgtggcgtcaaaccctgctattgtcaggtcgccatcgggcgaaaaccatgaagcacctggaattcaggcagctcctgataatgagaaatcaaggaatggtacagtgaagcctatagcagtggatcgggaggctaatgtccatgagaagggcgctgaacagcccagctcaaatggtcaagaagctgggaagcaacagcaagagcttctgatcaagtgcctatccgaagacctgggtttctcggtcggcaggcctatcgctgcatacctcatctacaggtgtctggtgcattggagatcatttgaagaagagaggagcgtggtctttgaccggattatccagaagattactgctgcgcttgaggcgcgagacaacaacgatgcactagcatactggctgtccaattcatgcgcgctcctggttcttcttcaaaggacactgaaaatcaacggggtagctgccttggctcgtcagaggcgaagaacgtcgtcacctctcaaggaaaaccaagatccagctcccgacggacagttgatctgtggactagcccaagtctaccaggttgaggccaagtacccagctatcgcgttcaagcagcagctcaccgcactgctggagaaggtctatgggatgatccggcacaacctgaagaaggaactgtcgccgcttctgggcctctgcattcaggcgccacgcacattcgtcgtcagtcccagaggatcgtgttcccaaggaacagatctggcgcaacaagcctccatggcgcattggcagagcatcatcaagatcttgacaaattctctcgatgttctgaaatcaaattacgtgcctccgttcctgatctgcaagatgttcacgcaagtcttctcgtttatcaatgtgcagctttttaacagccttctgctgcggcgtgagtgctgctcgttcagtaacggagagtacgtgaaggctgggctggatgagctagagcattggtgcttttggctgactgaagagtacgcaggatctgcatgggacgagctgaagcatatcaggcaggcagttaccctcttgatacttgacgacaagcatagccggagtctcgcggagatcacagacgacttctgcccagtgctgagcatgcagcaactgtaccggatcagcacgatgtactgcgacgacaagtttgggaccctgggcattccatcagaagtcgtctccagcatgcggaccaagatgatcgagggctcgtcgagcagcccgtcggcgcacgacgacatcaactcgttcctgctagacgatgacttcagcataccgttctccgtggatgacttcacgaagctgatagtgcacgtcgacgtagcggacatggatttgccaccgctcattcaggagagcagcggcggcggctccaaaatgggacattgaggagtgacaatatgcacgccttttttgtgtgtgttgcggtgatgtgcatagtgcgtgacatattgctctgagaccagggttttgtttttttcttcgtcgactggtcttccatttttctcccatatgactactacctgagtgagtagtgcctgtttgggtttgcgcgtgtgtatgattgtacagaactgagctgtggcatataaggtaaggaaagaaagcctgtgtgattcaattttttttatcaaaagagtgagtgatgcttgcaagtcaagctttcctttgccaagtgtgatctcagattctaactgctgtgacacctgtacttttgttgtttgtttgttttttttttttttttgaaagaagcctggcgctgatggcctccatttaactgttgagcatctgtcactcgctcaatagttaatggtctagagaaacattgtcgaccatctgtgtcactagaattgatgacttgttgtctatccttattgcctctgtttcaaccctgccagtgcgatttggatctggtcatggccggcgccatgcacagtaatgtggtcaataacaaatatgctaaactacatacatataacatataccatgttcatctaagataacatgtgaacagagtattatagatcgttatctctaaagtctaaacatatagtgcagcggaagaagaccataacgatatagtagaagttgtcgtacgtctgcacgtaccaccaacaacgatatgtttacccgtgcttctcatattcgtagccgatcaataccgctccaatagcagtagcgtctccaatccctagagagacatcaattaggttatgcgatgtctctcaaccatagcatatgagctctttagtgaacttt

SEQ ID NO: 73748 - DNA, 3469 bp, Zea Mays
gacattttgatgtcgataccattaactaaaataaatagtttttcttcgatgtaaatgtccgtaaaatatttagttcctgaatttctttcttcctttctagtgtgactgtcccatctaatattctgaaggtgacatgtcattgttgggttgaaaatcacaaggggagagaaggaaaaaggcagggaatgggaggggaaagtacctaagccagctaggaagcaagcagctggaggcagagatgccaaccgcaatgtcctgtcatctttgctcatgaccaaatcggtcaaggtcgcccatggatggagatcacaggaggcaagccgccgccgcggtcaccgtcacgcaagtcagcccggcgcggcgcctgatcgcctggctgaggcttctcttccgggcgttcgttcatagatacggcaaggtcgcgagctggaacgcggcggggcgccctgtcttcgtcgtcctcgcggtcttcttcctccagaggagcctgcgccgccggtacctgtcatggaaggagtcgtcgcgtcttccgctgatggccgccgccgccgtcaccgtgcagacgaccgtcagggcgatggcggcgcagcgcgagctctctgtccggaagcagaccagagctgccacacgcatccaggcgcaatggcgtgcgcacagggcggtgtggagctacctgacgacgaagagagccgccgtcatctgccaacgtgcttggaggcaaagcgttgcacgcaaggagctcaggaagctcagactgtgtgtgcaggagaatctggagagggaaatgctggaggaggtgtgcaggctgcgtgagatggtggacgtgctccagcaggctgtcaatgacgccgagacgagggccgtcaacgagagggaggcggcgaaggatgcgatggcgcagttggaagcagcctcggcgatcgaagagaccgtggtgatggttgaggacactgagaaggtcaagtcgctgagtgccgaagttgaccgcctcaaggatttgctgggagctgaaatgagtgaaacttttgccgccaagaaggcgctttctgaagccgagctgaggaacgagaagctggccaggctgcttggagttgaggaagttaagaacaaacggcttcaagacaccctgaaaaggatggaggagaaggcttctagtctggacgaggaaaacagaatgctgcgacaggctgtggcgtcaaaccctgctattgtcaggtcgccatcgggcgaaaaccatgaagcacctggaattcaggcagctcctgataatgagaaatcaaggaatggtacagtgaagcctatagcagtggatcgggaggctaatgtccataagggcgctgaacagcccagctcaaatggtcaagaagctgggaagcaacagcaagagcttctgatcaagtgcctatccgaagacctgggtttctcggtcggcaggcctatcgctgcatacctcatctacaggtgtctggtgcattggagatcatttgaagaagagaggagcgtggtctttgaccggattatccagaagattactgctgcgcttgaggcgcgagacaacaacgatgcactagcatactggctgtccaattcatgcgcgctcctggttcttcttcaaaggacactgaaaatcaacggggtagctgccttggctcgtcagaggcgaagaacgtcgtcacctctcaaggtgccacaggaaaaccaagatccagctcccgacggacagttgatctgtggactagcccaagtctaccaggttgaggccaagtacccagctatcgcgttcaagcagcagctcaccgcactgctggagaaggtctatgggatgatccggcacaacctgaagaaggaactgtcgccgcttctgggcctctgcattcaggcgccacgcacattcgtcgtcagtcccagaggatcgtgttcccaaggaacagatctggcgcaacaagcctccatggcgcattggcagagcatcatcaagatcttgacaaattctctcgatgttctgaaatcaaattacgtgcctccgttcctgatctgcaagatgttcacgcaagtcttctcgtttatcaatgtgcagctttttaacagccttctgctgcggcgtgagtgctgctcgttcagtaacggagagtacgtgaaggctgggctggatgagctagagcattggtgcttttggctgactgaagagtacgcaggatctgcatgggacgagctgaagcatatcaggcaggcagttaccctcttgatacttgacgacaagcatagccggagtctcgcggagatcacagacgacttctgcccagtgctgagcatgcagcaactgtaccggatcagcacgatgtactgcgacgacaagtttgggaccctgggcattccatcagaagtcgtctccagcatgcggaccaagatgatcgagggctcgtcgagcagcccgtcggcgcacgacgacatcaactcgttcctgctagacgatgacttcagcataccgttctccgtggatgacttcacgaagctgatagtgcacgtcgacgtagcggacatggatttgccaccgctcattcaggagagcagcggcggcggctccaaaatgggacattgaggagtgacaatatgcacgccttttttgtgtgtgttgcggtgatgtgcatagtgcgtgacatattgctctgagaccagggttttgtttttttcttcgtcgactggtcttccatttttctcccatatgactactacctgagtgagtagtgcctgtttgggtttgcgcgtgtgtatgattgtacagaactgagctgtggcatataaggtaaggaaagaaagcctgtgtgattcaattttttttatcaaaagagtgagtgatgcttgcaagtcaagctttcctttgccaagtgtgatctcagattctaactgctgtgacacctgtacttttgttgtttgtttgttttttttttttttttgaaagaagcctggcgctgatggcctccatttaactgttgagcatctgtcactcgctcaatagttaatggtctagagaaacattgtcgaccatctgtgtcactagaattgatgacttgttgtctatccttattgcctctgtttcaaccctgccagtgcgatttggatctggtcatggccggcgccatgcacagtaatgtggtcaataacaaatatgctaaactacatacatataacatataccatgttcatctaagataacatgtgaacagagtattatagatcgttatctctaaagtctaaacatatagtgcagcggaagaagaccataacgatatagtagaagttgtcgtacgtctgcacgtaccaccaacaacgatatgtttacccgtgcttctcatattcgtagccgatcaataccgctccaatagcagtagcgtctccaatccctagagagacatcaattaggttatgcgatgtctctcaaccatagcatatgagctctttagtgaacttt

SEQ ID NO: 73749 - DNA, 3468 bp, Zea Mays
gacattttgatgtcgataccattaactaaaataaatagtttttcttcgatgtaaatgtccgtaaaatatttagttcctgaatttctttcttcctttctagtgtgactgtcccatctaatattctgaaggtgacatgtcattgttgggttgaaaatcacaaggggagagaaggaaaaaggcagggaatgggaggggaaagtacctaagccagctaggaagcaagcagctggaggcagagatgccaaccgcaatgtcctgtcatctttgctcatgaccaaatcggtcaaggtcgcccatggatggagatcacaggaggcaagccgccgccgcggtcaccgtcacgcaagtcagcccggcgcggcgcctgatcgcctggctgaggcttctcttccgggcgttcgttcatagatacggcaaggtcgcgagctggaacgcggcggggcgccctgtcttcgtcgtcctcgcggtcttcttcctccagaggagcctgcgccgccggtacctgtcatggaaggagtcgtcgcgtcttccgctgatggccgccgccgccgtcaccgtgcagacgaccgtcagggcgatggcggcgcagcgcgagctctctgtccggaagcagaccagagctgccacacgcatccaggcgcaatggcgtgcgcacagggcggtgtggagctacctgacgacgaagagagccgccgtcatctgccaacgtgcttggaggcaaagcgttgcacgcaaggagctcaggaagctcagactgtgtgtgcaggagaatctggagagggaaatgctggaggaggtgtgcaggctgcgtgagatggtggacgtgctccagcaggctgtcaatgacgccgagacgagggccgtcaacgagagggaggcggcgaaggatgcgatggcgcagttggaagcagcctcggcgatcgaagagaccgtggtgatggttgaggacactgagaaggtcaagtcgctgagtgccgaagttgaccgcctcaaggatttgctgggagctgaaatgagtgaaacttttgccgccaagaaggcgctttctgaagccgagctgaggaacgagaagctggccaggctgcttggagttgaggaagttaagaacaaacggcttcaagacaccctgaaaaggatggaggagaaggcttctagtctggacgaggaaaacagaatgctgcgacaggctgtggcgtcaaaccctgctattgtcaggtcgccatcgggcgaaaaccatgaagcacctggaattcagctcctgataatgagaaatcaaggaatggtacagtgaagcctatagcagtggatcgggaggctaatgtccatgagaagggcgctgaacagcccagctcaaatggtcaagaagctgggaagcaacagcaagagcttctgatcaagtgcctatccgaagacctgggtttctcggtcggcaggcctatcgctgcatacctcatctacaggtgtctggtgcattggagatcatttgaagaagagaggagcgtggtctttgaccggattatccagaagattactgctgcgcttgaggcgcgagacaacaacgatgcactagcatactggctgtccaattcatgcgcgctcctggttcttcttcaaaggacactgaaaatcaacggggtagctgccttggctcgtcagaggcgaagaacgtcgtcacctctcaaggtgccacaggaaaaccaagatccagctcccgacggacagttgatctgtggactagcccaagtctaccaggttgaggccaagtacccagctatcgcgttcaagcagcagctcaccgcactgctggagaaggtctatgggatgatccggcacaacctgaagaaggaactgtcgccgcttctgggcctctgcattcaggcgccacgcacattcgtcgtcagtcccagaggatcgtgttcccaaggaacagatctggcgcaacaagcctccatggcgcattggcagagcatcatcaagatcttgacaaattctctcgatgttctgaaatcaaattacgtgcctccgttcctgatctgcaagatgttcacgcaagtcttctcgtttatcaatgtgcagctttttaacagccttctgctgcggcgtgagtgctgctcgttcagtaacggagagtacgtgaaggctgggctggatgagctagagcattggtgcttttggctgactgaagagtacgcaggatctgcatgggacgagctgaagcatatcaggcaggcagttaccctcttgatacttgacgacaagcatagccggagtctcgcggagatcacagacgacttctgcccagtgctgagcatgcagcaactgtaccggatcagcacgatgtactgcgacgacaagtttgggaccctgggcattccatcagaagtcgtctccagcatgcggaccaagatgatcgagggctcgtcgagcagcccgtcggcgcacgacgacatcaactcgttcctgctagacgatgacttcagcataccgttctccgtggatgacttcacgaagctgatagtgcacgtcgacgtagcggacatggatttgccaccgctcattcaggagagcagcggcggcggctccaaaatgggacattgaggagtgacaatatgcacgccttttttgtgtgtgttgcggtgatgtgcatagtgcgtgacatattgctctgagaccagggttttgtttttttcttcgtcgactggtcttccatttttctcccatatgactactacctgagtgagtagtgcctgtttgggtttgcgcgtgtgtatgattgtacagaactgagctgtggcatataaggtaaggaaagaaagcctgtgtgattcaattttttttatcaaaagagtgagtgatgcttgcaagtcaagctttcctttgccaagtgtgatctcagattctaactgctgtgacacctgtacttttgttgtttgtttgttttttttttttttttgaaagaagcctggcgctgatggcctccatttaactgttgagcatctgtcactcgctcaatagttaatggtctagagaaacattgtcgaccatctgtgtcactagaattgatgacttgttgtctatccttattgcctctgtttcaaccctgccagtgcgatttggatctggtcatggccggcgccatgcacagtaatgtggtcaataacaaatatgctaaactacatacatataacatataccatgttcatctaagataacatgtgaacagagtattatagatcgttatctctaaagtctaaacatatagtgcagcggaagaagaccataacgatatagtagaagttgtcgtacgtctgcacgtaccaccaacaacgatatgtttacccgtgcttctcatattcgtagccgatcaataccgctccaatagcagtagcgtctccaatccctagagagacatcaattaggttatgcgatgtctctcaaccatagcatatgagctctttagtgaacttt

SEQ ID NO: 73750 - DNA, 3472 bp, Zea Mays
gacattttgatgtcgataccattaactaaaataaatagtttttcttcgatgtaaatgtccgtaaaatatttagttcctgaatttctttcttcctttctagtgtgactgtcccatctaatattctgaaggtgacatgtcattgttgggttgaaaatcacaaggggagagaaggaaaaaggcagggaatgggaggggaaagtacctaagccagctaggaagcaagcagctggaggcagagatgccaaccgcaatgtcctgtcatctttgctcatgaccaaatcggtcaaggtcgcccatggatggagatcacaggaggcaagccgccgccgcggtcaccgtcacgcaagtcagcccggcgcggcgcctgatcgcctggctgaggcttctcttccgggcgttcgttcatagatacggcaaggtcgcgagctggaacgcggcggggcgccctgtcttcgtcgtcctcgcggtcttcttcctccagaggagcctgcgccgccggtacctgtcatggaaggagtcgtcgcgtcttccgctgatggccgccgccgccgtcaccgtgcagacgaccgtcagggcgatggcggcgcagcgcgagctctctgtccggaagcagaccagagctgccacacgcatccaggcgcaatggcgtgcgcacagggcggtgtggagctacctgacgacgaagagagccgccgtcatctgccaacgtgcttggaggcaaagcgttgcacgcaaggagctcaggaagctcagactgtgtgtgcaggagaatctggagagggaaatgctggaggaggtgtgcaggctgcgtgagatggtggacgtgctccagcaggctgtcaatgacgccgagacgagggccgtcaacgagagggaggcggcgaaggatgcgatggcgcagttggaagcagcctcggcgatcgaagagaccgtggtgatggttgaggacactgagaaggtcaagtcgctgagtgccgaagttgaccgcctcaaggatttgctgggagctgaaatgagtgaaacttttgccgccaagaaggcgctttctgaagccgagctgaggaacgagaagctggccaggctgcttggagttgaggaagttaagaacaaacggcttcaagacaccctgaaaaggatggaggagaaggcttctagtctggacgaggaaaacagaatgctgcgacaggctgtggcgtcaaaccctgctattgtcaggtcgccatcgggcgaaaaccatgaagcacctggaattcaggcagctcctgataatgagaaatcaaggaatggtacagtgaagcctatagcagtggatcgggaggctaatgtccatgagaagggcgctgaacagcccagctcaaatggtcaagaagctgggaagcaacagcaagagcttctgatcaagtgcctatccgaagacctgggtttctcggtcggcaggcctatcgctgcatacctcatctacaggtgtctggtgcattggagatcatttgaagaagagaggagcgtggtctttgaccggattatccagaagattactgctgcgcttgaggcgcgagacaacaacgatgcactagcatactggctgtccaattcatgcgcgctcctggttcttcttcaaaggacactgaaaatcaacggggtagctgccttggctcgtcagaggcgaagaacgtcgtcacctctcaaggtgccacaggaaaaccaagatccagctcccgacggacagttgatctgtggactagcccaagtctaccaggttgaggccaagtacccagctatcgcgttcaagcagcagctcaccgcactgctggagaaggtctatgggatgatccggcacaacctgaagaaggaactgtcgccgcttctgggcctctgcattcaggcgccacgcacattcgtcgtcagtcccagaggatcgtgttcccaaggaacagatctggcgcaacaagcctccatggcgcattggcagagcatcatcaagatcttgacaaattctctcgatgttctgaaatcaaattacgtgcctccgttcctgatctgcaagatgttcacgcaagtcttctcgtttatcaatgtgcagctttttaacagccttctgctgcggcgtgagtgctgctcgttcagtaacggagagtacgtgaaggctgggctggatgagctagagcattggtgcttttggctgactgaagagtacgcaggatctgcatgggacgagctgaagcatatcaggcaggcagttaccctcttgatacttgacgacaagcatagccggagtctcgcggagatcacagacgacttctgcccagtgctgagcatgcagcaactgtaccggatcagcacgatgtactgcgacgacaagtttgggaccctgggcattccatcagaagtcgtctccagcatgcggaccaagatgatcgagggctcgtcgagcagcccgtcggcgcacgacgacatcaactcgttcctgctagacgatgacttcagcataccgttctccgtggatgacttcacgaagctgatagtgcacgtcgacgtagcggacatggatttgccaccgctcattcaggagagcagcggcggcggctccaaaatgggacattgaggagtgacaatatgcacgccttttttgtgtgtgttgcggtgatgtgcatagtgcgtgacatattgctctgagaccagggttttgtttttttcttcgtcgactggtcttccatttttctcccatatgactactacctgagtgagtagtgcctgtttgggtttgcgcgtgtgtatgattgtacagaactgagctgtggcatataaggtaaggaaagaaagcctgtgtgattcaattttttttatcaaaagagtgagtgatgcttgcaagtcaagctttcctttgccaagtgtgatctcagattctaactgctgtgacacctgtacttttgttgtttgtttgttttttttttttttttgaaagaagcctggcgctgatggcctccatttaactgttgagcatctgtcactcgctcaatagttaatggtctagagaaacattgtcgaccatctgtgtcactagaattgatgacttgttgtctatccttattgcctctgtttcaaccctgccagtgcgatttggatctggtcatggccggcgccatgcacagtaatgtggtcaataacaaatatgctaaactacatacatataacatataccatgttcatctaagataacatgtgaacagagtattatagatcgttatctctaaagtctaaacatatagtgcagcggaagaagaccataacgatatagtagaagttgtcgtacgtctgcacgtaccaccaacaacgatatgtttacccgtgcttctcatattcgtagccgatcaataccgctccaatagcagtagcgtctccaatccctagagagacatcaattaggttatgcgatgtctctcaaccatagcatatgagctctttagtgaacttt

SEQ ID NO: 73751 - DNA, 3452 bp, Zea Mays
gacattttgatgtcgataccattaactaaaataaatagtttttcttcgatgtaaatgtccgtaaaatatttagttcctgaatttctttcttcctttctagtgtgactgtcccatctaatattctgaaggtgacatgtcattgttgggttgaaaatcacaaggggagagaaggaaaaaggcagggaatgggaggggaaagtacctaagccagctaggaagcaagcagctggaggcagagatgccaaccgcaatgtcctgtcatctttgctcatgaccaaatcggtcaaggtcgcccatggatggagatcacaggaggcaagccgccgccgcggtcaccgtcacgcaagtcagcccggcgcggcgcctgatcgcctggctgaggcttctcttccgggcgttcgttcatagatacggcaaggtcgcgagctggaacgcggcggggcgccctgtcttcgtcgtcctcgcggtcttcttcctccagaggagcctgcgccgccggtacctgtcatggaaggagtcgtcgcgtcttccgctgatggccgccgccgccgtcaccgtgcagacgaccgtcagggcgatggcggcgcagcgcgagctctctgtccggaagcagaccagagctgccacacgcatccaggcgcaatggcgtgcgcacagggcggtgtggagctacctgacgacgaagagagccgccgtcatctgccaacgtgcttggaggcaaagcgttgcacgcaaggagctcaggaagctcagactgtgtgtgcaggagaatctggagagggaaatgctggaggaggtgtgcaggctgcgtgagatggtggacgtgctccagcaggctgtcaatgacgccgagacgagggccgtcaacgagagggaggcggcgaaggatgcgatggcgcagttggaagcagcctcggcgatcgaagagaccgtggtgatggttgaggacactgagaaggtcaagtcgctgagtgccgaagttgaccgcctcaaggatttgctgggagctgaaatgagtgaaacttttgccgccaagaaggcgctttctgaagccgagctgaggaacgagaagctggccaggctgcttggagttgaggaagttaagaacaaacggcttcaagacaccctgaaaaggatggaggagaaggcttctagtctggacgaggaaaacagaatgctgcgacaggctgtggcgtcaaaccctgctattgtcaggtcgccatcgggcgaaaaccatgaagcacctggaattcagctcctgataatgagaaatcaaggaatggtacagtgaagcctatagcagtggatcgggaggctaatgtccatgagaagggcgctgaacagcccagctcaaatggtcaagaagctgggaagcaacagcaagagcttctgatcaagtgcctatccgaagacctgggtttctcggtcggcaggcctatcgctgcatacctcatctacaggtgtctggtgcattggagatcatttgaagaagagaggagcgtggtctttgaccggattatccagaagattactgctgcgcttgaggcgcgagacaacaacgatgcactagcatactggctgtccaattcatgcgcgctcctggttcttcttcaaaggacactgaaaatcaacggggtagctgccttggctcgtcagaggcgaagaacgtcgtcacctctcaaggtgccacagctcccgacggacagttgatctgtggactagcccaagtctaccaggttgaggccaagtacccagctatcgcgttcaagcagcagctcaccgcactgctggagaaggtctatgggatgatccggcacaacctgaagaaggaactgtcgccgcttctgggcctctgcattcaggcgccacgcacattcgtcgtcagtcccagaggatcgtgttcccaaggaacagatctggcgcaacaagcctccatggcgcattggcagagcatcatcaagatcttgacaaattctctcgatgttctgaaatcaaattacgtgcctccgttcctgatctgcaagatgttcacgcaagtcttctcgtttatcaatgtgcagctttttaacagccttctgctgcggcgtgagtgctgctcgttcagtaacggagagtacgtgaaggctgggctggatgagctagagcattggtgcttttggctgactgaagagtacgcaggatctgcatgggacgagctgaagcatatcaggcaggcagttaccctcttgatacttgacgacaagcatagccggagtctcgcggagatcacagacgacttctgcccagtgctgagcatgcagcaactgtaccggatcagcacgatgtactgcgacgacaagtttgggaccctgggcattccatcagaagtcgtctccagcatgcggaccaagatgatcgagggctcgtcgagcagcccgtcggcgcacgacgacatcaactcgttcctgctagacgatgacttcagcataccgttctccgtggatgacttcacgaagctgatagtgcacgtcgacgtagcggacatggatttgccaccgctcattcaggagagcagcggcggcggctccaaaatgggacattgaggagtgacaatatgcacgccttttttgtgtgtgttgcggtgatgtgcatagtgcgtgacatattgctctgagaccagggttttgtttttttcttcgtcgactggtcttccatttttctcccatatgactactacctgagtgagtagtgcctgtttgggtttgcgcgtgtgtatgattgtacagaactgagctgtggcatataaggtaaggaaagaaagcctgtgtgattcaattttttttatcaaaagagtgagtgatgcttgcaagtcaagctttcctttgccaagtgtgatctcagattctaactgctgtgacacctgtacttttgttgtttgtttgttttttttttttttttgaaagaagcctggcgctgatggcctccatttaactgttgagcatctgtcactcgctcaatagttaatggtctagagaaacattgtcgaccatctgtgtcactagaattgatgacttgttgtctatccttattgcctctgtttcaaccctgccagtgcgatttggatctggtcatggccggcgccatgcacagtaatgtggtcaataacaaatatgctaaactacatacatataacatataccatgttcatctaagataacatgtgaacagagtattatagatcgttatctctaaagtctaaacatatagtgcagcggaagaagaccataacgatatagtagaagttgtcgtacgtctgcacgtaccaccaacaacgatatgtttacccgtgcttctcatattcgtagccgatcaataccgctccaatagcagtagcgtctccaatccctagagagacatcaattaggttatgcgatgtctctcaaccatagcatatgagctctttagtgaacttt

SEQ ID NO: 73752 - DNA, 713 bp, Zea Mays
gttgtcacaatcacaaatgatttgcgcttgtggtagttttacccaatgattgtgcgattagatcacatcagtttatgtatttgccaagacctacaaaagagaccaggaaaagaaaaatgctcagactactgccgctgcagcattgtcatccccagcaagtacatctgccaaggctccagatcctgctcctgcacctgcgcccgaatcggttctcccacctctatccgaagatgagcagtggaatctgtacaaatggattctggaagaggagcggaagatcaaaccacgcaacgccactgagaagaagaagatcgacgaggagaaagctcttctcaaggagataattcgggacaaatctctccctcgtttgtgatggttacatcggctgtccttctgatcttgattttttttcttctctctccacctgcagtccattgaggacaacatctgaaactatgtgccctgttagttagcaaaaccgttagcatttctttgcactatcacatctcttcatttgacaataagaaggtcgagttgttttgctctgatgagaacttattgtgttcggggatgcttgggagatgttttggaagaagcttattgccttgtgaaacgttctaattgacctgctgataatgggcccagctagctatgctctgctattcttatgtaagatgtgaattgagctattcaactgctagtgtttttacata

SEQ ID NO: 73753 - DNA, 704 bp, Zea Mays
cacactaccatttacttgcattgctaattaaacaacaattcaagcctttgagcttctgaaagtttatgtatttgccaagacctacaaaagagaccaggaaaagaaaaatgctcagactactgccgctgcagcattgtcatccccagcaagtacatctgccaaggctccagatcctgctcctgcacctgcgcccgaatcggttctcccacctctatccgaagatgagcagtggaatctgtacaaatggattctggaagaggagcggaagatcaaaccacgcaacgccactgagaagaagaagatcgacgaggagaaagctcttctcaaggagataattcgggacaaatctctccctcgtttgtgatggttacatcggctgtccttctgatcttgattttttttcttctctctccacctgcagtccattgaggacaacatctgaaactatgtgccctgttagttagcaaaaccgttagcatttctttgcactatcacatctcttcatttgacaataagaaggtcgagttgttttgctctgatgagaacttattgtgttcggggatgcttgggagatgttttggaagaagcttattgccttgtgaaacgttctaattgacctgctgataatgggcccagctagctatgctctgctattcttatgtaagatgtgaattgagctattcaactgctagtgtttttacata

SEQ ID NO: 73754 - DNA, 1576 bp, Zea Mays
cggaaacctgccattccaaaccaagcaacacgaaaccgcgggacgaagtttcgttgctgctgctactcactccactccagtccggtccaactgctgcagaattccacatggaatgtgggctccatccagcttcacccatttcacctgcaatgcaagcagcgaacaacacaaattaagtagtggagtgtcagaacttgggaggcacaaattaagtacaaagcagtctaattaatgacgggcccgatggagattccggtgatcgatctcggcggcctcaacggcggcggcgaggagaggtcgcggaccttggcggagctccacgacgcctgcaaggactggggcttcttctgggtggagaaccacggcgtggacgcgccgctgatggacgaggtcaagcgcttcgtctacggccactacgaggagcacctggaggccaagttctacgcctccgccctcgccatggacctcgaggccgccaccagaggtgacactgatgagaagccctccgacgaggtggactgggagtccacctacttcatccagcaccaccccaagaccaacgtcgccgacttcccagagatcacgccgccgacacgagagacgctggacgcgtacgtcgcgcagatggtgtccctcgcggagcgtctggccgagtgcatgagcctcaacctgggcctccccggggcccacgtcgccgccaccttcgcgccgccgttcgtgggcaccaagttcgccatgtacccgtcctgcccgcgcccggagctggtgtggggcctgcgcgcgcacaccgacgccggcggcatcatcctgctcctccaggacgacgtcgtgggcggcctcgagttcctcagggccggcgcccactgggtccccgtcggccccaccaaggggggcaggctcttcgtcaacatcggggaccagatcgaggtcctcagcgccggcgcctaccggagcgtcctgcaccgcgtcgcggccggggaccagggccgccgcctgtccgtggccacgttctacaaccctggcaccgacgccgtggtcgcgccggcgccccgcagggatcaggacgccggcgccgcggcgtaccccggtccctacaggttcggggactacctcgactactaccagggcaccaagttcggcgacaaggacgccaggttccaggccgtcaagaagctgctcggctaagcgaacagctgcaagtaggcagaggcagcttagctcgtggactatgcatagtttcaagcttgctgcttgcttcttgttcgatccattgtctgcatgcgtactgttgcgtgtttaaatttagcaaatcttatacgtagtcgttactggtactacgtattctgtggttgacaatacattgttgcggtttaagggcgcatccgtttggtggacttgcacatgccattcgacaaaaaagttggctttccttgtcaattaatagtcaactagtacaatgacacgcaaatattcggtaagcacacatgtccacatgttgaaaaaacatctgcaagcttccgttcagtttacgtgaaaatcaaaggggttaccggatcaagaaaaaaaaatataaaac

SEQ ID NO: 73755 - DNA, 1545 bp, Zea Mays
cacgaaaccgcgggacgaagtttcgttgctgctgctactcactccactccagtccggtccaactgctgcagaattccacatggaatgtgggctccatccagcttcacccatttcacctgcaatgcaagcgaacaacacaaattaagtagtggagtgtcagaacttgggaggcacaaattaagtacaaagcagtctaattaatgacgggcccgatggagattccggtgatcgatctcggcggcctcaacggcggcggcgaggagaggtcgcggaccttggcggagctccacgacgcctgcaaggactggggcttcttctgggtggagaaccacggcgtggacgcgccgctgatggacgaggtcaagcgcttcgtctacggccactacgaggagcacctggaggccaagttctacgcctccgccctcgccatggacctcgaggccgccaccagaggtgacactgatgagaagccctccgacgaggtggactgggagtccacctacttcatccagcaccaccccaagaccaacgtcgccgacttcccagagatcacgccgccgacacgagagacgctggacgcgtacgtcgcgcagatggtgtccctcgcggagcgtctggccgagtgcatgagcctcaacctgggcctccccggggcccacgtcgccgccaccttcgcgccgccgttcgtgggcaccaagttcgccatgtacccgtcctgcccgcgcccggagctggtgtggggcctgcgcgcgcacaccgacgccggcggcatcatcctgctcctccaggacgacgtcgtgggcggcctcgagttcctcagggccggcgcccactgggtccccgtcggccccaccaaggggggcaggctcttcgtcaacatcggggaccagatcgaggtcctcagcgccggcgcctaccggagcgtcctgcaccgcgtcgcggccggggaccagggccgccgcctgtccgtggccacgttctacaaccctggcaccgacgccgtggtcgcgccggcgccccgcagggatcaggacgccggcgccgcggcgtaccccggtccctacaggttcggggactacctcgactactaccagggcaccaagttcggcgacaaggacgccaggttccaggccgtcaagaagctgctcggctaagcgaacagctgcaagtaggcagaggcagcttagctcgtggactatgcatagtttcaagcttgctgcttgcttcttgttcgatccattgtctgcatgcgtactgttgcgtgtttaaatttagcaaatcttatacgtagtcgttactggtactacgtattctgtggttgacaatacattgttgcggtttaagggcgcatccgtttggtggacttgcacatgccattcgacaaaaaagttggctttccttgtcaattaatagtcaactagtacaatgacacgcaaatattcggtaagcacacatgtccacatgttgaaaaaacatctgcaagcttccgttcagtttacgtgaaaatcaaaggggttaccggatcaagaaaaaaaaatataaaac

SEQ ID NO: 73756 - DNA, 679 bp, Zea Mays
ccaaaacaagccccatatagtatatgatctctaaagtctggacacatgccacacatgaatagcacgaactaagtcagggataatggtttgatgtgacactatactaccattacacaacataacccctgcaaatttcgtttcaagtgagaagagtcaacctaccccttaagaatactttgttcaaccctactaagaactggaggttgagttatagcaatcaccatgagaccgcgacaagaaacgttggagaaaaatcaaagaaaggaacaaactgagaccaagccctttttgaaaacaaaaggatggcatcatacataattcattcaaaatggcagaatagctacattacttgtagaggccatttatatccaaaagctcttctttcatacttggtactcggatactcatttccttcaacgtgtctgttctgaagatgtgaagctcacccttatcaggagacagtgaatgcttccacaaatgacaaggtgagctcgtgcaagtataagctcgtttctagcctagtgattgtgtagtccctgagaaaatcaacccaacaaaccttccaatcatgaacacccagaattaggacactcaacctttatgaagggcatgtcaatatgtgacaactctaagaataagatgaggtaataactcttgtagttaatcaacacaatgttat

SEQ ID NO: 73757 - DNA, 4933 bp, Zea Mays
gtgccaatccaaaaccgccacgtgccatatccggtgatacgcctccccggcctctcgtgtctcgtcgtctccctctccctccacaacggcatagctgcagcagccaagtcctctccgctctcttcgccgccaccgccgacaaataaccgccgcaattcgaagcaagagagccgcaccaggagaagatatagtgagagtgagagcccgaggagggggtggcgcgatggggctctcgggcgcgacgatctcggcgccgctcggctgctgcgtgctgcggtgcggggcagttggcggaggtaaggccctgaaggcggacgcggagaggtggcggcgggcgggatggagccgacgcgttggcggaccgaaggtgaggtgcgtggcgaccgagaagcacgacgagacggcggcggtcggggcggcagtgggcgtggatttcgcggacgaggaggactaccgcaagggcggcggcggcgagctgctttacgtgcaaatgcagtcaaccaagcccatggaaagccagtccaagatcgcttccaagctatcgcccatatctgatgaaaatacagtgcttgatttggttatcattggttgtggtccagctggtctttctctagcttcagagtcagctaagaaaggtctcactgtaggtctcattgggcctgaccttccattcacaaataactatggtgtgtgggaggatgaatttaaagatctcggtctagagagctgtatcgagcacgtctggaaggatactattgtctacctagacaataacaagccgatactgattggccgttcttatggcagggtgcaccgtgacttgctccatgaggaactgctgaaaagatgctatgaagctggcgtgacatacctgaactccaaagtggacaagatcatagaatctccagatggacacagagtagtctgttgtgacaagggtcgcgagataatttgcaggcttgccattgttgcttcgggggcagcatctggtaggcttctagagtatgaggttgggggtccccgtgtttgcgtgcagactgcatacggagtagaagttgaggtggaaaataacccatatgatcctagcttaatggttttcatggactacagagattgtttcaaagaggaattctcacacactgaacaagaaaatcccactttcctgtatgctatgcccatgtcacccacacgagttttctttgaggaaacatgcttagcttctaaagatgctatgtcttttgatctacttaagaagaggctgatgtatcggttgaacgcgatgggaattcgtatcctgaaagtttatgaggaggaatggtcctacattcctgttggagggtccttaccaaacacagatcagaaaaaccttgcattcggtgctgcagcaagtatggtgcatcctgcaacagggtactcagtggtcagatctttgtctgaggctccaagatatgcttctgtgatatcggacatcttaggaaatcgagttcctgcagaatatatgctcggaaattcacaaaattacagtccatcaatgcttgcatggagaacactgtggcctcaagagaggaaacgccaacgatccttcttccttttcggattagcgttgataatccaactgaataatgaaggcatacaaacattcttcgaagcctttttcagggtgccgagatggatgtggcgaggatttcttggctcgaccctttcatccgtcgatctcatactattctcattctacatgtttgcgatagctccaaatcaattgcgaatgaaccttgtcaggcatctcctctctgacccaactggctcatccatgatcaagacctacctgaccttataaaaccatttgcaccaggctgcaagaactcttagaaactgtacagttttgtagttgtacataagttagagaggatctggggggttacttggcggcggatctaggggttagcagcaatgctataatacactgtaaatcttttatggttgctatggtgattggatagagaagcacaccgtgttgtgcacgatggaagaataataagagagatcaggtgatggtcatggttcctgcattggccaattttaggttgcatttgctgtttcaaggcttcttacatgtccaatcaattacacccttattttaggttgctcaatgccaattttcttgtggaacaatatttgcaaaagcaaaaaagggaaaaacataattggatgtgcaagaatagtatgaggctgtccttgctcctgcgccatggcatttagctgcaagatgttggggaaggagaagacctgtaggagactaaggttggaggcaagggagagaaaggaaggagggcaggaggagaggcggaacaacccgtctccctccatctctctaccttcttctcctgcgcccctatccatcgctcgcaccacccactgaccggccggcggcatccttattaccataacatcacgggacggtggcgcgatgcaaggaggcccactgagcccggatgagtactgggtgatatcgccgccggcgctgctgcaccagccggcgtccaccatcgtcgtggccatcgaccgggaccggaacagccaactggccgtgaagtgggtggtggaccacctcctctccggcgcctctcatatcgtcctgctccacgtggccgtccattaccacacgacccatgggttcgccatggttgagaccacgcagggtgcgctggaggctgaaatgaaggagatctttgtcccctacagaggattcttcaaccggaatggggtaaatgtggaagtatccgaggtagtattggaagaggcagacgtgtccaaagccattctaggttacatcactgcaaacaagatccagagcattgcgctcggcggagccaacagaaatgcgttcaccaagaaattcaagaacgcggacgtgccgtcgaccctgatgaagtgcgctccagactactgcaacatctacgtcgtggccaagggcaagtccgtcaatgtcaggctcgccaagtgcggcgtcccgccgatgcacactggcgccgacatcgcttcggacaccgactccctccgggaatcggtgctctacatgcgacgcggctccagggggcacctgccgcgggtgacgcctgacgcctggcgctccattgacgggcgcacaccgccggagctatccacgcggccactgttccgcgagcgcttgctctcgtcatcggccaccaccaagaactttgtcgtcctgccaggaaaggacaacttcgagacgtcctcccgctcggcgagacacgactcgttaggcggcgacctcgacttcggcccgagcacgcgcttctcctacatagacttgggcgagaacctcgatatgtccaccactctccccgctctggaacccatgtcaccggccaccggcgcgcagcgggataccgaggccgagatgcggcggctccggttggagctcaagcagaccatggacatgtacaacgcggcgtgcaaggaggccatcaacgccaagcagcgggccaaggagatgcatatgatgaagctggaggaagcgcgtcggctggaggaggccaggaacgccgaggaggctgctctggcagtggccgagatggagaaggccaagtgccgcgcggccatggaggccgccgaggcggcgcagaggctggctgacctggaggcgcagcggcgccgcaacgccgaggtgcgcgcgcgccgggaggccgacgagaaggtgcgcgctctggatgccatttccaaccacgacttccggtaccgcaagtaccacatcgacgagatcgagatggccacggagcgcttctccgacgagctcaaaatcggcgagggcggctacggccccgtctaccgcgcctccctcgaccacacccccgtcgccatcaaggtgctccggcccgacgcgcaccaggggaggaagcagttcctgcaggaggtggaggtgctcagctgcatccgccaccccaacatggtgctcctcctcggcgcatgcccggagtacggctgtctcgtgtacgagtacatggaccacggcagcctcgaggaccggctgttccgtcggggcggcacgccgccgctcgcgtgggcccagcggttccggatcgcggcggagatcgcgacggcgctgctgttcctgcaccaaacgaagccggagccgctggtgcaccgggacctgaagccggccaacatcctgctggaccgcaactacgtgagcaagatcagcgacgtcgggctggcacgcctggtgccgccgtcggtggcggacaacgtgacgcagtaccggctgacggcgacggcgggcaccttctgctacatcgacccggagtaccagcagacgggcaagctgggcgtcaagtcggacatctactccctcggcgtgctcctgctgcaggtggtcaccgcgcggccacccatggggctcacgcatcacgtcgagaaggccatcgacgcgggcacctttgagcagatgctcgacatcaccgtcaaggactggcccgtcgaggaggcgctcggctacgccaagctcgcgctcaagtgcacggagatgcggcggagggaccggccggacctcgccacagtcatactgccggagctcaaccggttaaggaacctcggccacgcgtacgaggcacgcatgagcgccgccagggccaacggtggaagtggagagagtggtgcccagatcagcggggactcgacaacggtgggtggttcatgggaaacggcggacagctagcgggcggtccggtgatcggtgtggccggtggcccggatgagtcagttagagagcgagctttttttttgatacgggggagttaaaaaatccaaaaatcttggtgtatgtacagttctgtctatgagaaatactaacgcgtcttgcagtgctgctgcctgctgcctcatccttttgagggtcgtcatccatgatccattt

SEQ ID NO: 73758 - DNA, 4834 bp, Zea Mays
gtgccaatccaaaaccgccacgtgccatatccggtgatacgcctccccggcctctcgtgtctcgtcgtctccctctccctccacaacggcatagctgcagcagccaagtcctctccgctctcttcgccgccaccgccgacaaataaccgccgcaattcgaagcaagagagccgcaccaggagaagatatagtgagagtgagagcccgaggagggggtggcgcgatggggctctcgggcgcgacgatctcggcgccgctcggctgctgcgtgctgcggtgcggggcagttggcggaggtaaggccctgaaggcggacgcggagaggtggcggcgggcgggatggagccgacgcgttggcggaccgaaggtgaggtgcgtggcgaccgagaagcacgacgagacggcggcggtcggggcggcagtgggcgtggatttcgcggacgaggaggactaccgcaagggcggcggcggcgagctgctttacgtgcaaatgcagtcaaccaagcccatggaaagccagtccaagatcgcttccaagctatcgcccatatctgatgaaaatacagtgcttgatttggttatcattggttgtggtccagctggtctttctctagcttcagagtcagctaagaaaggtctcactgtaggtctcattgggcctgaccttccattcacaaataactatggtgtgtgggaggatgaatttaaagatctcggtctagagagctgtatcgagcacgtctggaaggatactattgtctacctagacaataacaagccgatactgattggccgttcttatggcagggtgcaccgtgacttgctccatgaggaactgctgaaaagatgctatgaagctggcgtgacatacctgaactccaaagtggacaagatcatagaatctccagatggacacagagtagtctgttgtgacaagggtcgcgagataatttgcaggcttgccattgttgcttcgggggcagcatctggtaggcttctagagtatgaggttgggggtccccgtgtttgcgtgcagactgcatacggagtagaagttgaggtggaaaataacccatatgatcctagcttaatggttttcatggactacagagattgtttcaaagaggaattctcacacactgaacaagaaaatcccactttcctgtatgctatgcccatgtcacccacacgagttttctttgaggaaacatgcttagcttctaaagatgctatgtcttttgatctacttaagaagaggctgatgtatcggttgaacgcgatgggaattcgtatcctgaaagtttatgaggaggaatggtcctacattcctgttggagggtccttaccaaacacagatcagaaaaaccttgcattcggtgctgcagcaagtatggtgcatcctgcaacagggtactcagtggtcagatctttgtctgaggctccaagatatgcttctgtgatatcggacatcttaggaaatcgagttcctgcagaatatatgctcggaaattcacaaaattacagtccatcaatgcttgcatggagaacactgtggcctcaagagaggaaacgccaacgatccttcttccttttcggattagcgttgataatccaactgaataatgaaggcatacaaacattcttcgaagcctttttcagggtgccgagatggatgtggcgaggatttcttggctcgaccctttcatccgtcgatctcatactattctcattctacatgtttgcgatagctccaaatcaattgcgaatgaaccttgtcaggcatctcctctctgacccaactggctcatccatgatcaagacctacctgaccttataaaaccatttgcaccaggctgcaagaactcttagaaactgtacagttttgtagttgtacataagttagagaggatctggggggttacttggcggcggatctaggggttagcagcaatgctataatacactgtaaatcttttatggttgctatggtgattggatagagaagcacaccgtgttgtgcacgatggaagaataataagagagatcaggttgctcaatgccaattttcttgtggaacaatatttgcaaaagcaaaaaagggaaaaacataattggatgtgcaagaatagtatgaggctgtccttgctcctgcgccatggcatttagctgcaagatgttggggaaggagaagacctgtaggagactaaggttggaggcaagggagagaaaggaaggagggcaggaggagaggcggaacaacccgtctccctccatctctctaccttcttctcctgcgcccctatccatcgctcgcaccacccactgaccggccggcggcatccttattaccataacatcacgggacggtggcgcgatgcaaggaggcccactgagcccggatgagtactgggtgatatcgccgccggcgctgctgcaccagccggcgtccaccatcgtcgtggccatcgaccgggaccggaacagccaactggccgtgaagtgggtggtggaccacctcctctccggcgcctctcatatcgtcctgctccacgtggccgtccattaccacacgacccatgggttcgccatggttgagaccacgcagggtgcgctggaggctgaaatgaaggagatctttgtcccctacagaggattcttcaaccggaatggggtggaagtatccgaggtagtattggaagaggcagacgtgtccaaagccattctaggttacatcactgcaaacaagatccagagcattgcgctcggcggagccaacagaaatgcgttcaccaagaaattcaagaacgcggacgtgccgtcgaccctgatgaagtgcgctccagactactgcaacatctacgtcgtggccaagggcaagtccgtcaatgtcaggctcgccaagtgcggcgtcccgccgatgcacactggcgccgacatcgcttcggacaccgactccctccgggaatcggtgctctacatgcgacgcggctccagggggcacctgccgcgggtgacgcctgacgcctggcgctccattgacgggcgcacaccgccggagctatccacgcggccactgttccgcgagcgcttgctctcgtcatcggccaccaccaagaactttgtcgtcctgccaggaaaggacaacttcgagacgtcctcccgctcggcgagacacgactcgttaggcggcgacctcgacttcggcccgagcacgcgcttctcctacatagacttgggcgagaacctcgatatgtccaccactctccccgctctggaacccatgtcaccggccaccggcgcgcagcgggataccgaggccgagatgcggcggctccggttggagctcaagcagaccatggacatgtacaacgcggcgtgcaaggaggccatcaacgccaagcagcgggccaaggagatgcatatgatgaagctggaggaagcgcgtcggctggaggaggccaggaacgccgaggaggctgctctggcagtggccgagatggagaaggccaagtgccgcgcggccatggaggccgccgaggcggcgcagaggctggctgacctggaggcgcagcggcgccgcaacgccgaggtgcgcgcgcgccgggaggccgacgagaaggtgcgcgctctggatgccatttccaaccacgacttccggtaccgcaagtaccacatcgacgagatcgagatggccacggagcgcttctccgacgagctcaaaatcggcgagggcggctacggccccgtctaccgcgcctccctcgaccacacccccgtcgccatcaaggtgctccggcccgacgcgcaccaggggaggaagcagttcctgcaggaggtggaggtgctcagctgcatccgccaccccaacatggtgctcctcctcggcgcatgcccggagtacggctgtctcgtgtacgagtacatggaccacggcagcctcgaggaccggctgttccgtcggggcggcacgccgccgctcgcgtgggcccagcggttccggatcgcggcggagatcgcgacggcgctgctgttcctgcaccaaacgaagccggagccgctggtgcaccgggacctgaagccggccaacatcctgctggaccgcaactacgtgagcaagatcagcgacgtcgggctggcacgcctggtgccgccgtcggtggcggacaacgtgacgcagtaccggctgacggcgacggcgggcaccttctgctacatcgacccggagtaccagcagacgggcaagctgggcgtcaagtcggacatctactccctcggcgtgctcctgctgcaggtggtcaccgcgcggccacccatggggctcacgcatcacgtcgagaaggccatcgacgcgggcacctttgagcagatgctcgacatcaccgtcaaggactggcccgtcgaggaggcgctcggctacgccaagctcgcgctcaagtgcacggagatgcggcggagggaccggccggacctcgccacagtcatactgccggagctcaaccggttaaggaacctcggccacgcgtacgaggcacgcatgagcgccgccagggccaacggtggaagtggagagagtggtgcccagatcagcggggactcgacaacggtgggtggttcatgggaaacggcggacagctagcgggcggtccggtgatcggtgtggccggtggcccggatgagtcagttagagagcgagctttttttttgatacgggggagttaaaaaatccaaaaatcttggtgtatgtacagttctgtctatgagaaatactaacgcgtcttgcagtgctgctgcctgctgcctcatccttttgagggtcgtcatccatgatccattt

SEQ ID NO: 73759 - DNA, 1553 bp, Zea Mays
gtgccaatccaaaaccgccacgtgccatatccggtgatacgcctccccggcctctcgtgtctcgtcgtctccctctccctccacaacggcatagctgcagcagccaagtcctctccgctctcttcgccgccaccgccgacaaataaccgccgcaattcgaagcaagagagccgcaccaggagaagatatagtgagagtgagagcccgaggagggggtggcgcgatggggctctcgggcgcgacgatctcggcgccgctcggctgctgcgtgctgcggtgcggggcagttggcggaggtaaggccctgaaggcggacgcggagaggtggcggcgggcgggatggagccgacgcgttggcggaccgaaggtgaggtgcgtggcgaccgagaagcacgacgagacggcggcggtcggggcggcagtgggcgtggatttcgcggacgaggaggactaccgcaagggcggcggcggcgagctgctttacgtgcaaatgcagtcaaccaagcccatggaaagccagtccaagatcgcttccaagctatcgcccatatctgatgaaaatacagtgcttgatttggttatcattggttgtggtccagctggtctttctctagcttcagagtcagctaagaaaggtctcactgtaggtctcattgggcctgaccttccattcacaaataactatggtgtgtgggaggatgaatttaaagatctcggtctagagagctgtatcgagcacgtctggaaggatactattgtctacctagacaataacaagccgatactgattggccgttcttatggcagggtgcaccgtgacttgctccatgaggaactgctgaaaagatgctatgaagctggcgtgacatacctgaactccaaagtggacaagatcatagaatctccagatggacacagagtagtctgttgtgacaagggtcgcgagataatttgcaggcttgccattgttgcttcgggggcagcatctggtaggcttctagagtatgaggttgggggtccccgtgtttgcgtgcagactgcatacggagtagaagttgaggtggaaaataacccatatgatcctagcttaatggttttcatggactacagagattgtttcaaagaggaattctcacacactgaacaagaaaatcccactttcctgtatgctatgcccatgtcacccacacgagttttctttgaggaaacatgcttagcttctaaagatgctatgtcttttgatctacttaagaagaggctgatgtatcggttgaacgcgatgggaattcgtatcctgaaagtttatgaggaggaatggtcctacattcctgttggagggtccttaccaaacacagatcagaaaaaccttgcattcggtgctgcagcaagtatggtgcatcctgcaacagggtactcagtggtcagatctttgtctgaggctccaagatatgcttctgtgatatcggacatcttaggaaatcgagttcctgcagaatatatgctcggaaattcacaaaattacagtccatcaatgcttggcatcttcggactca

SEQ ID NO: 73760 - DNA, 1107 bp, Zea Mays
gttggttagcagtgagtgtcactactgatcccccactagtggtttgctgatgcccacattttcccctggattcacacgtactgtgcatacttgttcacatggtatgcgcatgcaagcatttggcacattgattcactcaatcactggatggatagtacatcgattcatccgtgctgcgctggtcgctcacatgggtgtgcgaaaccctgtgactgtgcagcaggcagggacgcagcaatattcacattctgaagtctgaacactgtatgcactgaaaagctctctgcatgacatgtctcaaaaaccttttggaattgagtatctgcacagcacaaggacgaacaagccggccctcgtccaccaaaacatctcagcggacaaggtcctgctggactacgcgtacaggcccctcatctccgggtgcggcctgcacaagctcctcgtggacgacctcgtcttctcgacgctcaaagccagcgccgccatggggtacctggcgccggagtacaccaccgtgggccgcttctcggagaagagcgacgtgtacgcgttcggggtcatcgtgttccaggtgctcaccggcaagagcaaggtgacgacgacgcatgcgcagctgcctgacaacgacgtcgatgagctcgtcgacggcaacctgcagggggataattactcggcggccgaggccgcccagctggcgaagatcggctcggcttgcaccagcgagaacccggaccagaggccgacgatggcggagctgctccaagaactgagcaccgtctgaaatctaatggaggtccaacaatcatccgctgtaactgtttcatgcaagagtcacatgccttttgtaacctagctacgtacgtaccctgtctaggatcaccagtcagtaatcgctgatcttagaaagaatctgagctagtaggctctactagttagctagtaatcgctgatcttaggaagcacatgtgcccatgatcatgagatcttgtatgctaatgatgtgtcgttaccaccgcttttgaaaagtgtgcattgtttggatgtgctctagtacatggtagtaatgtgaatgcagccatttcctgcaacactatttttttctttcct

SEQ ID NO: 73761 - DNA, 1198 bp, Zea Mays
tatgtgcactatagataggctagcgcagtggtgaggaaccttcccactgagccaaaggtcctaggttcaatgcagtctctctgcaaaaatacaagggcagagggataaagatggtgatggaaagttaaactttgaagaatactttactgggctacatgaccatatacatggttatgatgacgagaatgcagatatttcccaaattgggaacataacagttgcgaaggatcggtttttcaaacttgacaaagataatgatgggtttatttcggagcatgaactagagcctgttcttgataagctctatctttctgaacgctattattctagacagcaagccatccatgctatttcagaggcagacaaagatcatgatgggaggctgactttggaagagatggttgagaacccctatgcattttatggcagtgtttatctcagcagcagcgacaacgacgacgaagactacttccacgacgaatttcgctgagaccaatattgttactatcctgacacacgcaaggaacacagctgacgagcatcaaggtgcgcacagaggttcggaacgtctagcatactatgtgtgatgcccgggctgggctgctgacagaatgggagagcttagagttacggccatggagtgaggaactagtttttagccgcttggttcttcaagttgtttgtgttaaatggaacgacgacagcatcctagtaccggccaggcccagcagtgatggatgttacgcggcaagttgagccacctttatctaggctgagctgcattggtctccatcctgatgttcctgcagcaggggaaatgtagttcaggagaacaatgagtggaggagcgtcatctctgtggcgagcggcttcagaaatctaacgggaacgtgttgtttggtgtccgaaatgtatgtgtgtgtgtgtatgctatgaattcaattatttctggcagaatgtcgcagtctagcgagctggcccatcccattgagaaacattccatcggctgcatgagtgcgccatggacgggagatggatgtgccgaattattggagggaaagggttcactttattcgtgcctagtcatcagtgtcatcagtacggaggttacagcgtatccacgtggtctgccacgtcatgtgaatcccagccgtggcgcaggtacattctcgctgggtcttgaactggtaataaaaga

SEQ ID NO: 73762 - DNA, 2692 bp, Zea Mays
gtgacactggccttcttaccctttgcttctcttctctgccgctagggaggcgctgacactgttcctcttccctcctcctgctctctccccatgtcctcctcctccggtcctcggcggccatgactgctgcggcctctttcgtccgtgcctgcgcgctgcatggctgctgccagctctagatacacactcctagctaggcagctgttgccttcacctgctgccgcgcgctgctcgatcgactgcacgtcttcacagttcacaccacagagtagagtggagagagaaagccaagaagccggcaggggagagtagggagagagagagggggaggagtcgtatgatagaaagaatctggaattgctttccctctcgttttgtcccccctgcgcctccttgattattgtgttgcttgctgttcctccctgcctgcttgctccctgcttcggcttggaggccttctcatgcatcaacctccttagcatctctctccccctctcccatacatacccccttgtctgatgcctgcttctgcttgccccatcctccttcatccttcacgagttcgtctctcgatttattgtctgccacacctcccttcagctagctatcttcccctagctagctaggtaccagtagtgtgtgtatatatagatagatttatagatatagacacacacaacaagtgcaagatcaggcgaaagctactagccgcccttgcagtcttggactccattcgtcgtcgtccttgggttctcctcctcacctagctactatgttccaccatcagcaggagctcttgcaggcagaagctgcagcggcagatcgggagagcagcatgtccaacctcacctcctccacgtccggcggccccaacgcggcgcctgctgctgctgctgctgccccgccggcgcccgcggcctccggcaacaacaagcggaaacggagcctcccaggcaaccccgaccccgaggcggaggtcgtggctctctccccggcgacgctgatggcgacgaaccgtttcgtgtgcgagatctgcgggaaggggttccagcgggaccagaacctgcagctgcaccggcgcggccacaacctgccgtggaagctgaagcagcgcggcacgggcaaggaggcgcagcggaggaaggtgtacgtgtgccccgaggcgtcgtgcgtgcaccacgaccccgcccgcgcgctgggcgacctcaccggcatcaagaagcacttcttccgcaagcacggcgagaagaagtggaagtgcgacaagtgctccaagaagtacgccgtccactccgactggaaggcgcactccaagatctgcggcaccagggagtacaagtgcgactgcggcaccatcttctccaggcgggacagcttcatcacgcaccgcgccttctgcgacgcgctcaccgaggagagcgccaaggccatcggcctcaacgccatggcggccgtgccggcgcagcaccaccaccacccgatgctcttctcgccgccgcccacgcacgtcatgcagcaggacgtcgccctcctccaggagcaccaccaccaggaggtcatgcagcaggagcactgcaactacgccatgaagacggagatgccgccgtggccggggatgacctacgaccacccgctgctgcagccgctctgcaacgccgccgcaccgcagagctcggccacgtccacgccgccgccgccgacgacgatgcagcttcccgctgcctacgcgcacctatcggccacggcgctgttgcagaaggcggcgcagatgggcgccaccgtcgccggcgcgggctacacccagatggcgggggccgcgacaagcgccaccttcggcctcggcctcccggacctgcagaatacccagcagcagcagcatcaggacggcgagatcatggccgggctcgcgaggacagcctcccacggccgcggcggcgaggaaggcggcggcggcggaggcgacggcatgaccagggatttcctaggcctgcgcgccttctcccaccgcgacatcctcggcctcgccggcttggactcctcgtgcatgggcgccatcatcagtgccagcgccagcatgaactgctacgacgagccacagcagcgtgcacaggctcaggcagagcagcagcagcaaagcagcaacgagcaatggcacagcatgggcagccatcaaagctaggtcgataaaagctactttcttcttcctctcgccagccgtcatcggatatcatctcatgcatgtggtaaccacgcaagcgatcaaaccgttccgatcaaactctagcccggtccaaggatggtgatgacagattggtgatacagaggtacgcagggagttgtataattttttttttttgggttggcgaagagatcggccaacatgtaagctaagctccaatcaagggaagaaaaccatagctatatgtgacagtaataatacatgcatgcattcatcatcttttaaggttggacattgcatccattaattgtagtaataatagatcatatgatccaaatgattcttcgcaattagttcaaaagtaaatataaatatatcctgattctaatctaattcgattgttagattccgttaccatccataatctcatgtgtgcaattttggtggtaaaaatgtttcttttttcgaaaaacggtacggtatttggtgacatgaatggggagagtagatggt

SEQ ID NO: 73763 - DNA, 2878 bp, Zea Mays
gtgacactggccttcttaccctttgcttctcttctctgccgctagggaggcgctgacactgttcctcttccctcctcctgctctctccccatgtcctcctcctccggtcctcggcggccatgactgctgcggcctctttcgtccgtgcctgcgcgctgcatggctgctgccagctctagatacacactcctagctaggcagctgttgccttcacctgctgccgcgcgctgctcgatcgactgcacgtcttcacagttcacaccacagagtagagtggagagagaaagccaagaagccggcaggggagagtagggagagagagagggggaggagtcgtatgatagaaagaatctggaattgctttccctctcgttttgtcccccctgcgcctccttgattattgtgttgcttgctgttcctccctgcctgcttgctccctgcttcggcttggaggccttctcatgcatcaacctccttagcatctctctccccctctcccatacatacccccttgtctgatgcctgcttctgcttgccccatcctccttcatccttcacgagttcgtctctcgatttattgtctgccacacctcccttcagctagctatcttcccctagctagctaggtaccagtagtgtgtgtatatatagatagatttatagatatagacacacacaacaagtgcaagatcaggcgaaagctactagccgcccttgcagtcttggactccattcgtcgtcgtccttgggttctcctcctcacctagctactatgttccaccatcagcaggagctcttgcaggcagaagctgcagcggcagatcgggagagcagcatgtccaacctcacctcctccacgtccggcggccccaacgcggcgcctgctgctgctgctgctgccccgccggcgcccgcggcctccggcaacaacaagcggaaacggagcctcccaggcaaccccgaccccgaggcggaggtcgtggctctctccccggcgacgctgatggcgacgaaccgtttcgtgtgcgagatctgcgggaaggggttccagcgggaccagaacctgcagctgcaccggcgcggccacaacctgccgtggaagctgaagcagcgcggcacgggcaaggaggcgcagcggaggaaggtgtacgtgtgccccgaggcgtcgtgcgtgcaccacgaccccgcccgcgcgctgggcgacctcaccggcatcaagaagcacttcttccgcaagcacggcgagaagaagtggaagtgcgacaagtgctccaagaagtacgccgtccactccgactggaaggcgcactccaagatctgcggcaccagggagtacaagtgcgactgcggcaccatcttctccaggcgggacagcttcatcacgcaccgcgccttctgcgacgcgctcaccgaggagagcgccaaggccatcggcctcaacgccatggcggccgtgccggcgcagcaccaccaccacccgatgctcttctcgccgccgcccacgcacgtcatgcagcaggacgtcgccctcctccaggagcaccaccaccaggaggtcatgcagcaggagcactgcaactacgccatgaagacggagatgccgccgtggccggggatgacctacgaccacccgctgctgcagccgctctgcaacgccgccgcaccgcagagctcggccacgtccacgccgccgccgccgacgacgatgcagcttcccgctgcctacgcgcacctatcggccacggcgctgttgcagaaggcggcgcagatgggcgccaccgtcgccggcgcgggctacacccagatggcgggggccgcgacaagcgccaccttcggcctcggcctcccggacctgcagaatacccagcagcagcagcatcaggacggcgagatcatggccgggctcgcgaggacagcctcccacggccgcggcggcgaggaaggcggcggcggcggaggcgacggcatgaccagggatttcctaggcctgcgcgccttctcccaccgcgacatcctcggcctcgccggcttggactcctcgtgcatgggcgccatcatcagtgccagcgccagcatgaactgctacgacgagccacagcagcgtgcacaggctcaggcagagcagcagcagcaaagcagcaacgagcaatggcacagcatgggcagccatcaaagctaggtcgataaaagctactttcttcttcctctcgccagccgtcatcggatatcatctcatgcatgtggtaaccacgcaagcgatcaaaccgttccgatcaaactctagcccggtccaaggatggtgatgacagattggtgatacagagatgacaatggcaggaagatgcatccacgatcttcattcaaggccttcttggaggtggttaaatggagaagtgttccctgggaggatgttgaaatggatgctatccattctttgcagttaatattacgtgactccctgcaagatgaagatgccaacagaaacaacatcaggtccattgtaaaagctccatctgatgatatgaagaagatacaggggctacttgaactaagaacagttacaaacgagatggtccgcttaattgagacagcaactgcccgtgtcttggctgttgacattgctggtaacataaatggatggaacaaaaaagctgcagaactaacagggttacctgtaatggaagccatagggaggcctctgatagatcttgttgttgctgattctgttgaagtggttaagcagatttcggactcagctttacaaggaattgaagagcaaaatctggaaatcaagcttaaaacattccatgaacaggagtgttgtggtccagtaatcttgatgattaactcctcctcttaaaccaacctcagtcaatac

SEQ ID NO: 73764 - DNA, 693 bp, Zea Mays
cgccagcccaagtgcggtgagggaatagtttctccaccaaaaaaaagtgcggcaacgtagcagaggaggagcagggggaggaggaggctagggttgctcggcgatggcgtcggcggcgaagacccttgcacgggttggatcatccctcttcggccgcattctcgcgtctccgtcctcgtccataccccgcgccgggctgccgctagccaggctgcagccacacgtcccgccgccggcaccggcgggggtggacgcttacgaggcggagaccatcgccaggctgagctcgctccccggcgagatatccttcccctgcggacttccctcgctccgcttcttcatcgacgacgtaaatcgaccaagggtgggcgcaaggtgattgcccggagaatcgccaaaggcaggcacagaatctcagtttagctagatctcgctcgtagcagccctggatgttttctgtaacacagattcgtatcgtgttctttctatggttagcactctgctgaaggtgagcccccgcgcaagcagcagtccatgtatggatttttattgtgaaacttttttttgggtggtttcagtcctggccatccgtaggatatgccttcttccattttattttgcctttgctctccctggtcggtgcggtgcagccgtacgcatcagtggcggatgcagaacaaaattctaggtggg

SEQ ID NO: 73765 - DNA, 980 bp, Zea Mays
gagggaatagtttctccaccaaaaaaaagtgcggcaacgtagcagaggaggagcagggggaggaggaggctagggttgctcggcgatggcgtcggcggcgaagacccttgcacgggttggatcatccctcttcggccgcattctcgcgtctccgtcctcgtccataccccgcgccgggctgccgctagccaggctgcagccacacgtcccgccgccggcaccggcgggggtggacgcttacgaggcggagaccatcgccaggctgagctcgctccccggcgagatatccttcccctgcggacttccctcgctccgcttcttcatcgacgacgtcgaggatcctgttcctaatgacccctttcagttgctcccgaaaagaacttaccagcccagtacaatcaagcggaaaagaacccatggatttcttacacggtctgtctctctagcttttccctggccattattttgcttccctcgtccttcattgaaaaaggaagatgggtttcaagttggtattatcaaattctgtttccgttcatgtttgcctttggcacctcatcatttagattaggaaggtagtttatctggcatgattgtggttcagtgccctcatgtccttgttacattggttctgcagtaaatcgaccaagggtgggcgcaaggtgattgcccggagaatcgccaaaggcaggcacagaatctcagtttagctagatctcgctcgtagcagccctggatgttttctgtaacacagattcgtatcgtgttctttctatggttagcactctgctgaaggtgagcccccgcgcaagcagcagtccatgtatggatttttattgtgaaacttttttttgggtggtttcagtcctggccatccgtaggatatgccttcttccattttattttgcctttgctctccctggtcggtgcggtgcagccgtacgcatcagtggcggatgcagaacaaaattctaggtggg

SEQ ID NO: 73766 - DNA, 1817 bp, Zea Mays
gagggaatagtttctccaccaaaaaaaagtgcggcaacgtagcagaggaggagcagggggaggaggaggctagggttgctcggcgatggcgtcggcggcgaagacccttgcacgggttggatcatccctcttcggccgcattctcgcgtctccgtcctcgtccataccccgcgccgggctgccgctagccaggctgcagccacacgtcccgccgccggcaccggcgggggtggacgcttacgaggcggagaccatcgccaggctgagctcgctccccggcgagatatccttcccctgcggacttccctcgctccgcttcttcatcgacgacggtacagcttctctcacacacacgcactcatgaatggattgggccgtgattgagtattgaagttgggctcggatcgctagtcactgccagtttcagaaatggggaatagggggactgggatcaatgtttttcataaaccgttcgttgaatatagagattgtagtgtcgttgaatatagaaattgcagtgtgtgactactcgaaactcgcatgatttctgttgtaatgcgcattttctgtgatttgcagttataccatttcactattaagctttgctttttgcggacttgggaagaattgccaagatttcatacagttaccttatttgggggcattgttttctgaaaagtcatggttgccttcatcaatgctgatgtgttacttttatctggcttgtgttgaaagttactaagtgattgatcaaccttgagaagtcacgtttctagtgttattgatgctcttacgcatagaagaacacgttgcttgcaatacagtactcagtatttaaagttccttgatgcctttttgttccttaaatagtaggtggcagaacctaaagattgatacactgcataaattgtttgtggatcatttgacagcctaaaactgagattgtgtggagcttaggaaattctgctatgatttatgttgaaattaagtctggtagaaagtgcagtagaaatactcaattacccaagtctccttttgctaagactgtttatttgcatagtgccaaatggtggccatttcttgttccagctgctgctgattgtcctaaaattggttagaaagtgtatgacaaatactcaagtacatgcagttcgtcctgctgttcctggattgtttccttgcatggtcccaaacagtgactgttccttgctacttctgttgctggaaatgttgccgtagttatatttggtgaatactagagtcttgattatgatatgtaggctttggattatgacctggcagctaggatcaacttttatttttgttagtttgatgtctttttctaatccgttgcttctgttctgctatttgtagtcgaggatcctgttcctaatgacccctttcagttgctcccgaaaagaacttaccagcccagtacaatcaagcggaaaagaacccatggatttcttacacgtaaatcgaccaagggtgggcgcaaggtgattgcccggagaatcgccaaaggcaggcacagaatctcagtttagctagatctcgctcgtagcagccctggatgttttctgtaacacagattcgtatcgtgttctttctatggttagcactctgctgaaggtgagcccccgcgcaagcagcagtccatgtatggatttttattgtgaaacttttttttgggtggtttcagtcctggccatccgtaggatatgccttcttccattttattttgcctttgctctccctggtcggtgcggtgcagccgtacgcatcagtggcggatgcagaacaaaattctaggtggg

SEQ ID NO: 73767 - DNA, 1564 bp, Zea Mays
ctaacgcccgtccgcttccgtcgagccgccgagaggtcaggtcctcgctccgctccgctcgtcgccccgtccgtctccatcgaggactgcctccgcagagctcttattgattgcaggctgcggacattccaaagaagtttgccccgaccattggcatttttgtggatcaccaccacgggtacgtatgagtggcgacacggagcgccgtcgctccgccactgggcgtaagtcaactgtgtcgaggtacaaggtggtgaagttcgaccttagcaagacgattcagtccgagaagttcgaagataggcgtacctggggcatctttgttgaaggtcggaacgcggtttcggttttggtggccattaacaatgtatccacattcattcatggccgtaatttagattggcgatgtgtggatacatttgatgagcaatacatgaaagataaaatccgtagtttgatcacggataggcagcgactatcacagatacgcaaggaagtacaaagtatccctgaagatgacatgaaagcattttttgatgtgattagtaacattcgcaaattcacactcagtccacgtttgactggcccatcagcttttgaagtgaatcaaccatatatgctactttgtcatctttttacccctgtgtttcatggttgggttgtaagccctgaattgagcagctatgatgcaattaaagggttcactcgtgatgagttgatacagtattgcaacgcgctgatagccttagaaggtgagtcagacaatgtgagagttattcgagacttattgaatgattcagatcagctgctgacagcttatggctttgattgcctggttcaggagatgagagatgacaagtttggattatttttttggcgtagcagatatgatgtaattcataagcatgacggagatctttttttactggtttctgatgagagggttcgcagtgaaatgccccaggccacttggatgttatttgaacaatctccagaaagcagcatctacttcacatcagaatatctacctgttgaaaaccaatacagtattgacagagccagagaatggcaccagcaaaagcttcagcaaaagacttcgagctcgttagagacagtgaagaaagctaaaaagaaaaggaagaacaagaaatcagcaatggcgagcaaagaaatacctgaacaaggtggtccgaatgttgaagatgtggttgttgctgtcagtatcagtgctgagcttcgaaatgaaggtcaaccaacaacaacaagggagatggacaatcctaaacaaggtggtctgaatgttgaagatgtggttgctgctgttagtgtcagtgatgaaccaacaagggagatatttaactaatcaaacttacaagacctaatgtagcagatcctcatcctaaatatttgtattttttgttcagcatttctgcagatttgaaggaagcggctgttaagtatctgacaatgaacggattggactctgttgatgttgagttgaaaataatcggtctccctgagccgaaaagtgctcattgatgagactcgagatgcatcaattaag

SEQ ID NO: 73768 - DNA, 3267 bp, Zea Mays
atgagagacgggtgcttcgttactttactttccatatatgttgtaggttaactgcatttatgattcaagatcttttagtgttatagtatacagtctttttagtagtcttttgaaccggtacctgcagtcctgcacccggcgctcggctatgtgccgccaaaagagaggctgcccaaaactgcaagctgtagacggacggacgggtgggctgacgtgcgaaggcaggcaggcagggacgcggatccttcgtggactcgtcttccatcccttctccctccccccgctcgcgcggcaatgaccggtcgcgggtcgccgccccctccgcaacgcacaacttggactcgtcctagtcctcagcctcagctccgccccgccccgccgtatatgcatgcgcctgcctagttcatttcttgtatatataggcgcccccgtccgcgctgggagtaccacggatcaaccaaccaacaacagctaggtgaacctgaacccccaaaggaaccgcagcgctgcccattaatcttcctgcgatcaactgctgtctctctctagaacgatcggctctccagcgacggcgcagggagggagccgcgagatgactctgaggctgctcaacacagagcacaaccacctgctgcacccgaggccgcagagcccgcgggatgccgccgccttgtcgtcgctgctgaggtcacccagggtgtcctgctccggccagcagagccccaagcccaagagcgccaagatggcgcacggcggcctggagcgctcgctcagcttcaggaactgggaggcggccagccggggcggcggcggcatcaacggcgcgcgcccggggaccctcgcgctgcagcagcagagcccacggcgggtggtgtccgtgtccccgcacccgcacccgcacccgcaggcgcaggccatgatcgagtacatctcccctcgcccccgcgtggagctcgaccaggcggccaccacgctgcagaaggcctacaagggcctccgcacgcgccgcagcctcgccgacggcgccatcgtcgccgaggagctctggtggaagacggtcgactcggtctacctcaacatcaagtccatctccttcttccacgaggacaggcaggagaccgccgcgtcccgctggtccagggccggcaagagggtcgccaaggtcggcaagggactctgcaaggacgacaaggcgcagaagctcgcgctccagcactggctcgaagccattgacccgcgccaccgctatacgacatctggtgcgcgagctccagctgcgagcccttcttctactggttggatgtcggcaaaggcagagacttgcatcaccagaaatgcccacgaagcaagctcaactcacagctcatcatgtacctcggaccagtacgtgcggtgtgccctttgcccctagataattgtattaatgtatccgactgactgacttactgactgctgagcagaacgagagggcggcgtacgaagtcgtcgtggaggaaggccggctgctgtacaagcaaagcggcgatctggtgaacacgaacgaggagtccaagtggatcttcgtgctgagcaccagcaggtcgctgtacgtcgggcagaagcgcaagggcaagttccagcactcgagcttcctgtccggggcagccacctcggccgccggcaggctggtcgccaaggacggcgtcctcaaggcgatatggccctacagcggccactacctcccgaccgaggagaacttcagggagttcatcgccttcctggaggacaacaacgtggatctcgccaacgtcaagcgatgctcggtggacgacgacgagtacccgtcgttcaagaagcaggcggcggagggcccagaagagccgcaggcagcaggggaggccccagccccagtggccaccgaagaagctgctgaggaggccgtggagctgcccgcggtcgacgtcgtgaaggcggaggacacggccacggacaccgtcgagccgtcgaagatgacgatgatggccagccggccgtcgttcaagtggtcgacgcccacgggcgcgcgcatcggctgcctccagaactacccggccgacgtccagagcatggctctggagcaggtgaacctgtcgccgaggcttgcggcagcggcgccgtccccgcggctgcccatcccgtcgccgcgccccagccccaagatcaggctgtcgcccagcctgcactacatgggctgccccaccccgacgggcagacgctcttcccccaagcagcagcagttcatgggcttctacacggcgccgcccgtggcgctcaccctccccaagcacaaggtcaagtgatctgctcattgacacgacacctccgcagccacagcgccgttttccaaggtgctcgtgctactgcgttgcgttgcgccgttctttccttagcaccagggagggagggagggaagggttaacaatattgttggttggtttgttgcttcgttgtagacaaacatcgtttcggttgcgttctctgatcgggtagcattcttttgtacgtttcttccatcatcgccttttgacctgaggtgcatgcgctccgcctgcacaataaactacaggcctttgcatcctgggtagcctgaatctgcagtttctcggacaaatgtagtactgactgcaggatccttgttgaataaaagaatttgttagcaatacgagcactgccacgagatttcgtgccttcattttcaactacaaatctttgagcagctggatgcttgcattgtcacatctgagttttgtgcataaagatggaagtacagtactcctaaactcctgtaaggcaaaggtgatcaaatgtcagatcttgtcatcaaatgccagaaagggtcaaaggcgcgaaatctcggagaaaggtcagtttccagtatagaacaatggagatctgcaggaaaaggggtcaggaggagtcgaaaccgccgcccggattcgtgtttctgactttttttcgttctcttcggccgacgtgtttcggactatttttttcgcatcttggatatggaattctggtttgttctgtacagcttgcgttttaattttgacttgggagaggccaccagtccaccttctgaaccagagctaggggagctaatcgattgctatatgcctgtttagattgtaagggctaattattagtcactaaactttagcctgtaaattgttagcttatctatcgactaacaattagtccacaaatctttgctaaagtgggctaattttttatggagccgatggaaagaaa

SEQ ID NO: 73769 - DNA, 3035 bp, Zea Mays
atgagagacgggtgcttcgttactttactttccatatatgttgtaggttaactgcatttatgattcaagatcttttagtgttatagtatacagtctttttagtagtcttttgaaccggtacctgcagtcctgcacccggcgctcggctatgtgccgccaaaagagaggctgcccaaaactgcaagctgtagacggacggacgggtgggctgacgtgcgaaggcaggcaggcagggacgcggatccttcgtggactcgtcttccatcccttctccctccccccgctcgcgcggcaatgaccggtcgcgggtcgccgccccctccgcaacgcacaacttggactcgtcctagtcctcagcctcagctccgccccgccccgccgtatatgcatgcgcctgcctagttcatttcttgtatatataggcgcccccgtccgcgctgggagtaccacggatcaaccaaccaacaacagctaggtgaacctgaacccccaaaggaaccgcagcgctgcccattaatcttcctgcgatcaactgctgtctctctctagaacgatcggctctccagcgacggcgcagggagggagccgcgagatgactctgaggctgctcaacacagagcacaaccacctgctgcacccgaggccgcagagcccgcgggatgccgccgccttgtcgtcgctgctgaggtcacccagggtgtcctgctccggccagcagagccccaagcccaagagcgccaagatggcgcacggcggcctggagcgctcgctcagcttcaggaactgggaggcggccagccggggcggcggcggcatcaacggcgcgcgcccggggaccctcgcgctgcagcagcagagcccacggcgggtggtgtccgtgtccccgcacccgcacccgcacccgcaggcgcaggccatgatcgagtacatctcccctcgcccccgcgtggagctcgaccaggcggccaccacgctgcagaaggcctacaagggcctccgcacgcgccgcagcctcgccgacggcgccatcgtcgccgaggagctctggtggaagacggtcgactcggtctacctcaacatcaagtccatctccttcttccacgaggacaggcaggagaccgccgcgtcccgctggtccagggccggcaagagggtcgccaaggtcggcaagggactctgcaaggacgacaaggcgcagaagctcgcgctccagcactggctcgaagccaacgagagggcggcgtacgaagtcgtcgtggaggaaggccggctgctgtacaagcaaagcggcgatctggtgaacacgaacgaggagtccaagtggatcttcgtgctgagcaccagcaggtcgctgtacgtcgggcagaagcgcaagggcaagttccagcactcgagcttcctgtccggggcagccacctcggccgccggcaggctggtcgccaaggacggcgtcctcaaggcgatatggccctacagcggccactacctcccgaccgaggagaacttcagggagttcatcgccttcctggaggacaacaacgtggatctcgccaacgtcaagcgatgctcggtggacgacgacgagtacccgtcgttcaagaagcaggcggcggagggcccagaagagccgcaggcagcaggggaggccccagccccagtggccaccgaagaagctgctgaggaggccgtggagctgcccgcggtcgacgtcgtgaaggcggaggacacggccacggacaccgtcgagccgtcgaagatgacgatgatggccagccggccgtcgttcaagtggtcgacgcccacgggcgcgcgcatcggctgcctccagaactacccggccgacgtccagagcatggctctggagcaggtgaacctgtcgccgaggcttgcggcagcggcgccgtccccgcggctgcccatcccgtcgccgcgccccagccccaagatcaggctgtcgcccagcctgcactacatgggctgccccaccccgacgggcagacgctcttcccccaagcagcagcagttcatgggcttctacacggcgccgcccgtggcgctcaccctccccaagcacaaggtcaagtgatctgctcattgacacgacacctccgcagccacagcgccgttttccaaggtgctcgtgctactgcgttgcgttgcgccgttctttccttagcaccagggagggagggagggaagggttaacaatattgttggttggtttgttgcttcgttgtagacaaacatcgtttcggttgcgttctctgatcgggtagcattcttttgtacgtttcttccatcatcgccttttgacctgaggtgcatgcgctccgcctgcacaataaactacaggcctttgcatcctgggtagcctgaatctgcagtttctcggacaaatgtagtactgactgcaggatccttgttgaataaaagaatttgttagcaatacgagcactgccacgagatttcgtgccttcattttcaactacaaatctttgagcagctggatgcttgcattgtcacatctgagttttgtgcataaagatggaagtacagtactcctaaactcctgtaaggcaaaggtgatcaaatgtcagatcttgtcatcaaatgccagaaagggtcaaaggcgcgaaatctcggagaaaggtcagtttccagtatagaacaatggagatctgcaggaaaaggggtcaggaggagtcgaaaccgccgcccggattcgtgtttctgactttttttcgttctcttcggccgacgtgtttcggactatttttttcgcatcttggatatggaattctggtttgttctgtacagcttgcgttttaattttgacttgggagaggccaccagtccaccttctgaaccagagctaggggagctaatcgattgctatatgcctgtttagattgtaagggctaattattagtcactaaactttagcctgtaaattgttagcttatctatcgactaacaattagtccacaaatctttgctaaagtgggctaattttttatggagccgatggaaagaaa

SEQ ID NO: 73770 - DNA, 3134 bp, Zea Mays
cctagtcctcagcctcagctccgccccgccccgccgtatatgcatgcgcctgcctagttcatttcttgtatatataggcgcccccgtccgcgctgggagtaccacggatcaaccaaccaacaacagctaggtgaacctgaacccccaaaggaaccgcagcgctgcccattaatcttcctgcgatcaactgctgtctctctctaggtatggtattggtgtccctggatgctcttgttcttgcaataagtgctcaatcttgcccttcccaatctttctcaggataagattctggttttataaggccaaacattttcctcggttgtgtttaatgttgattttcttctatattatatataatataatagccaatagagcaaatttctgaccacaacgatcgccgcccgtcatggctgcagaacgatcggctctccagcgacggcgcagggagggagccgcgagatgactctgaggctgctcaacacagagcacaaccacctgctgcacccgaggccgcagagcccgcgggatgccgccgccttgtcgtcgctgctgaggtcacccagggtgtcctgctccggccagcagagccccaagcccaagagcgccaagatggcgcacggcggcctggagcgctcgctcagcttcaggaactgggaggcggccagccggggcggcggcggcatcaacggcgcgcgcccggggaccctcgcgctgcagcagcagagcccacggcgggtggtgtccgtgtccccgcacccgcacccgcacccgcaggcgcaggccatgatcgagtacatctcccctcgcccccgcgtggagctcgaccaggcggccaccacgctgcagaaggcctacaagggcctccgcacgcgccgcagcctcgccgacggcgccatcgtcgccgaggagctctggtggaagacggtcgactcggtctacctcaacatcaagtccatctccttcttccacgaggacaggcaggagaccgccgcgtcccgctggtccagggccggcaagagggtcgccaaggtcggcaagggactctgcaaggacgacaaggcgcagaagctcgcgctccagcactggctcgaagccattgacccgcgccaccgctatacgacatctggtgcgcgagctccagctgcgagcccttcttctactggttggatgtcggcaaaggcagagacttgcatcaccagaaatgcccacgaagcaagctcaactcacagctcatcatgtacctcggaccagtacgtgcggtgtgccctttgcccctagataattgtattaatgtatccgactgactgacttactgactgctgagcagaacgagagggcggcgtacgaagtcgtcgtggaggaaggccggctgctgtacaagcaaagcggcgatctggtgaacacgaacgaggagtccaagtggatcttcgtgctgagcaccagcaggtcgctgtacgtcgggcagaagcgcaagggcaagttccagcactcgagcttcctgtccggggcagccacctcggccgccggcaggctggtcgccaaggacggcgtcctcaaggcgatatggccctacagcggccactacctcccgaccgaggagaacttcagggagttcatcgccttcctggaggacaacaacgtggatctcgccaacgtcaagcgatgctcggtggacgacgacgagtacccgtcgttcaagaagcaggcggcggagggcccagaagagccgcaggcagcaggggaggccccagccccagtggccaccgaagaagctgctgaggaggccgtggagctgcccgcggtcgacgtcgtgaaggcggaggacacggccacggacaccgtcgagccgtcgaagatgacgatgatggccagccggccgtcgttcaagtggtcgacgcccacgggcgcgcgcatcggctgcctccagaactacccggccgacgtccagagcatggctctggagcaggtgaacctgtcgccgaggcttgcggcagcggcgccgtccccgcggctgcccatcccgtcgccgcgccccagccccaagatcaggctgtcgcccagcctgcactacatgggctgccccaccccgacgggcagacgctcttcccccaagcagcagcagttcatgggcttctacacggcgccgcccgtggcgctcaccctccccaagcacaaggtcaagtgatctgctcattgacacgacacctccgcagccacagcgccgttttccaaggtgctcgtgctactgcgttgcgttgcgccgttctttccttagcaccagggagggagggagggaagggttaacaatattgttggttggtttgttgcttcgttgtagacaaacatcgtttcggttgcgttctctgatcgggtagcattcttttgtacgtttcttccatcatcgccttttgacctgaggtgcatgcgctccgcctgcacaataaactacaggcctttgcatcctgggtagcctgaatctgcagtttctcggacaaatgtagtactgactgcaggatccttgttgaataaaagaatttgttagcaatacgagcactgccacgagatttcgtgccttcattttcaactacaaatctttgagcagctggatgcttgcattgtcacatctgagttttgtgcataaagatggaagtacagtactcctaaactcctgtaaggcaaaggtgatcaaatgtcagatcttgtcatcaaatgccagaaagggtcaaaggcgcgaaatctcggagaaaggtcagtttccagtatagaacaatggagatctgcaggaaaaggggtcaggaggagtcgaaaccgccgcccggattcgtgtttctgactttttttcgttctcttcggccgacgtgtttcggactatttttttcgcatcttggatatggaattctggtttgttctgtacagcttgcgttttaattttgacttgggagaggccaccagtccaccttctgaaccagagctaggggagctaatcgattgctatatgcctgtttagattgtaagggctaattattagtcactaaactttagcctgtaaattgttagcttatctatcgactaacaattagtccacaaatctttgctaaagtgggctaattttttatggagccgatggaaagaaa

SEQ ID NO: 73771 - DNA, 2895 bp, Zea Mays
ctcagcctcagctccgccccgccccgccgtatatgcatgcgcctgcctagttcatttcttgtatatataggcgcccccgtccgcgctgggagtaccacggatcaaccaaccaacaacagctaggtgaacctgaacccccaaaggaaccgcagcgctgcccattaatcttcctgcgatcaactgctgtctctctctaggtatggtattggtgtccctggatgctcttgttcttgcaataagtgctcaatcttgcccttcccaatctttctcaggataagattctggttttataaggccaaacattttcctcggttgtgtttaatgttgattttcttctatattatatataatataatagccaatagagcaaatttctgaccacaacgatcgccgcccgtcatggctgcagaacgatcggctctccagcgacggcgcagggagggagccgcgagatgactctgaggctgctcaacacagagcacaaccacctgctgcacccgaggccgcagagcccgcgggatgccgccgccttgtcgtcgctgctgaggtcacccagggtgtcctgctccggccagcagagccccaagcccaagagcgccaagatggcgcacggcggcctggagcgctcgctcagcttcaggaactgggaggcggccagccggggcggcggcggcatcaacggcgcgcgcccggggaccctcgcgctgcagcagcagagcccacggcgggtggtgtccgtgtccccgcacccgcacccgcacccgcaggcgcaggccatgatcgagtacatctcccctcgcccccgcgtggagctcgaccaggcggccaccacgctgcagaaggcctacaagggcctccgcacgcgccgcagcctcgccgacggcgccatcgtcgccgaggagctctggtggaagacggtcgactcggtctacctcaacatcaagtccatctccttcttccacgaggacaggcaggagaccgccgcgtcccgctggtccagggccggcaagagggtcgccaaggtcggcaagggactctgcaaggacgacaaggcgcagaagctcgcgctccagcactggctcgaagccaacgagagggcggcgtacgaagtcgtcgtggaggaaggccggctgctgtacaagcaaagcggcgatctggtgaacacgaacgaggagtccaagtggatcttcgtgctgagcaccagcaggtcgctgtacgtcgggcagaagcgcaagggcaagttccagcactcgagcttcctgtccggggcagccacctcggccgccggcaggctggtcgccaaggacggcgtcctcaaggcgatatggccctacagcggccactacctcccgaccgaggagaacttcagggagttcatcgccttcctggaggacaacaacgtggatctcgccaacgtcaagcgatgctcggtggacgacgacgagtacccgtcgttcaagaagcaggcggcggagggcccagaagagccgcaggcagcaggggaggccccagccccagtggccaccgaagaagctgctgaggaggccgtggagctgcccgcggtcgacgtcgtgaaggcggaggacacggccacggacaccgtcgagccgtcgaagatgacgatgatggccagccggccgtcgttcaagtggtcgacgcccacgggcgcgcgcatcggctgcctccagaactacccggccgacgtccagagcatggctctggagcaggtgaacctgtcgccgaggcttgcggcagcggcgccgtccccgcggctgcccatcccgtcgccgcgccccagccccaagatcaggctgtcgcccagcctgcactacatgggctgccccaccccgacgggcagacgctcttcccccaagcagcagcagttcatgggcttctacacggcgccgcccgtggcgctcaccctccccaagcacaaggtcaagtgatctgctcattgacacgacacctccgcagccacagcgccgttttccaaggtgctcgtgctactgcgttgcgttgcgccgttctttccttagcaccagggagggagggagggaagggttaacaatattgttggttggtttgttgcttcgttgtagacaaacatcgtttcggttgcgttctctgatcgggtagcattcttttgtacgtttcttccatcatcgccttttgacctgaggtgcatgcgctccgcctgcacaataaactacaggcctttgcatcctgggtagcctgaatctgcagtttctcggacaaatgtagtactgactgcaggatccttgttgaataaaagaatttgttagcaatacgagcactgccacgagatttcgtgccttcattttcaactacaaatctttgagcagctggatgcttgcattgtcacatctgagttttgtgcataaagatggaagtacagtactcctaaactcctgtaaggcaaaggtgatcaaatgtcagatcttgtcatcaaatgccagaaagggtcaaaggcgcgaaatctcggagaaaggtcagtttccagtatagaacaatggagatctgcaggaaaaggggtcaggaggagtcgaaaccgccgcccggattcgtgtttctgactttttttcgttctcttcggccgacgtgtttcggactatttttttcgcatcttggatatggaattctggtttgttctgtacagcttgcgttttaattttgacttgggagaggccaccagtccaccttctgaaccagagctaggggagctaatcgattgctatatgcctgtttagattgtaagggctaattattagtcactaaactttagcctgtaaattgttagcttatctatcgactaacaattagtccacaaatctttgctaaagtgggctaattttttatggagccgatggaaagaaa

SEQ ID NO: 73772 - DNA, 1244 bp, Zea Mays
cggcgactatggctaccagtgcctcgtacaaagtcgaccagatctggtataatgacaccacggcgatcgacatatcacaagtgatctcgaccctctgacgatgcgtgaacgttaccagggtggtgatcaagttcaagtcggcaatgccgagccgaccctaaaaagtatgctggcctcaatcagcttgctcagaaattccttgaaggggtgcaaagttcgtctggaagacagaccttcactagcttatgtagaaggggttgttgaggaaattcgccagggtgctactatggagtgccctatctgtcttgactcagcttcagatgatccagtactcacgccttgtgcacaccggatgtgtggtgaatgccttgtttctagctggagcctggaggactccagttggaagtcacaccagcaaatctgacctgatcatattgcctgctcagagtcgtttccaggtggatgccaagaataaccggaaggactcatgcaaagtgaaaaaaaaacttataatgatgctggagagccttcagaagaaaagggagaagagcattgtattcagccagtttacttccttcgtcgatcttctggagacccccttcactcagaacttcagaagggtatcaagttcttgtggtttgatggcaagctgagccagaagcataaagaaaaagttctgaaggagttcagtgaaagtcaggacaagctggtgctaatgatgtcactcaaagctggaggtgtagggctaaatctaattgctgtctccaatgttttttacgatgctgtggaagagcaggctttcatgagaattcaccgtattgggcagaaaagagaggtccgagtcaaaagcttcatcgtcaaggatactgtcgaggagctagcggatgcaacaggtccaaatgcgcaagcagaggatggtttctggggcgctcactgatgaggagattcgtggcgctcgcattgagcatctcaagatgttgtttaaatgattgctgccatgaactcccgatgtgtatagctgacgctatgtcgttgatgcttttgtaggagtattatctgggttcagatcattgtagatggggatggagtgggtggaaccttgccctttggattttgtgtatatctcccccatgctagtatgcatttcatgtagagttgtttctttatggtgttgaaacatcctatgaaaatcgtagtctactattgctggtccttgtggtatgttgccgctgattttggattag

SEQ ID NO: 73773 - DNA, 1087 bp, Zea Mays
caatcagcttgctcagaaattccttgaaggggtgcaaagttcgtctggaagacagaccttcactagcttatgtagaaggggttgttgaggaaattcgccagggtgctactatggagtgccctatctgtcttgactcagcttcagatgatccagtactcacgccttgtgcacaccggatgtgtggtgaatgccttgtttctagctggagcctggaggactccagttggaagtcacaccagcaaatctgacctgatcatattgcctgctcagagtcgtttccaggtggatgccaagaataaccggaaggactcatgcaaagtgaaaaaaaaacttataatgatgctggagagccttcagaagaaaagggagaagagcattgtattcagccagtttacttccttcgtcgatcttctggagacccccttcactcagaacttcagaagggtatcaagttcttgtggtttgatggcaagctgagccagaagcataaagaaaaagttctgaaggagttcagtgaaagtcaggacaagctggtgctaatgatgtcactcaaagctggaggtgtagggctaaatctaattgctgtctccaatgttttttacgatggatccatggtggaatccagctgtggaagagcaggctttcatgagaattcaccgtattgggcagaaaagagaggtccgagtcaaaagcttcatcgtcaaggatactgtcgaggagctagcggatgcaacaggtccaaatgcgcaagcagaggatggtttctggggcgctcactgatgaggagattcgtggcgctcgcattgagcatctcaagatgttgtttaaatgattgctgccatgaactcccgatgtgtatagctgacgctatgtcgttgatgcttttgtaggagtattatctgggttcagatcattgtagatggggatggagtgggtggaaccttgccctttggattttgtgtatatctcccccatgctagtatgcatttcatgtagagttgtttctttatggtgttgaaacatcctatgaaaatcgtagtctactattgctggtccttgtggtatgttgccgctgattttggattag

SEQ ID NO: 73774 - DNA, 1071 bp, Zea Mays
  misc_feature (1070)..(1071): n is a, c, g, or t
caaaaaagtgatatagggggaaaaatttagagggaaccgctgcggatagcctaagccgtggagtgccgccagtggcagcggtggaaactggcagctctgaccacatccaatccaactgcccttgctgcacaaccgaatcccacgccttctcttccttttcccttgctctctccagcccctgctgctcctgccgggcgctgcctgccgccgctgaccgcccccgctctctctctctctctctctctctctctctctctctctctcgtcccccaatcaccccaattgccgggtgctcctcttcctgtcacccccatgttgactgctgcccgccaggccgccagagagggaggattaggaaaggggggaaagagagacggacggcttctcgggagtgggttgctggccgtggaacatttcttcagttgggcccactctctgtgccggttccatcgggttttgacgcaagagtagaggacttggaacccgtaaaacccatccggagaattttccctgcgcgtcccatgattaggagctgcggctggacagtgccctacgctctggagttttagtgcgaatcgttgccagtttcagtcaacttttgatggagcccaggtgttgagcgccaatttgggagttccagctgacgctgcagtctgcattcttctaaggccatcagtgaggaattttcgttccttggtggcagatgggttcctccagctctaaagtggacaatgaggagcccgtgaggcgctccaaggacaggaggcggctcatgaagcagctggtgcgccgccgcccagagcttgcagctgcgcacattgcatacctgcacgccctccgcaacacaggagccactctccggcaatttgtggagctggagtctgctttgtcacagcagcctccggtaggccttgcggcgccgccctcgcctactccacagtcgctgccgcagccgcagcccccgccacctcctgaaccctcactgccaccctcgccacaccccccgccgcctctgccttttagtccagtaaccaccataagaaagatggagaagagggatggtgaattcnn

SEQ ID NO: 73775 - DNA, 950 bp, Zea Mays
  misc_feature (949)..(950): n is a, c, g, or t
gcacaaccgaatcccacgccttctcttccttttcccttgctctctccagcccctgctgctcctgccgggcgctgcctgccgccgctgaccgcccccgctctctctctctctctctctctctctctctctctctctctcgtcccccaatcaccccaattgccgggtgctcctcttcctgtcacccccatgttgactgctgcccgccaggccgccagagagggaggattaggaaaggggggaaagagagacggacggcttctcgggagtgggttgctggccgtggaacatttcttcagttgggcccactctctggtaagtgccggttccatcgggttttgacgcaagagtagaggacttggaacccgtaaaacccatccggagaattttccctgcgcgtcccatgattaggagctgcggctggacagtgccctacgctctggagttttagtgcgaatcgttgccagtttcagtcaacttttgatggagcccaggtgttgagcgccaatttgggagttccagctgacgctgcagtctgcattcttctaaggccatcagtgaggaattttcgttccttggtggcagatgggttcctccagctctaaagtggacaatgaggagcccgtgaggcgctccaaggacaggaggcggctcatgaagcagctggtgcgccgccgcccagagcttgcagctgcgcacattgcatacctgcacgccctccgcaacacaggagccactctccggcaatttgtggagctggagtctgctttgtcacagcagcctccggtaggccttgcggcgccgccctcgcctactccacagtcgctgccgcagccgcagcccccgccacctcctgaaccctcactgccaccctcgccacaccccccgccgcctctgccttttagtccagtaaccaccataagaaagatggagaagagggatggtgaattcnn

SEQ ID NO: 73776 - DNA, 1086 bp, Zea Mays
  misc_feature (1085)..(1086): n is a, c, g, or t
cacaaccgaatcccacgccttctcttccttttcccttgctctctccagcccctgctgctcctgccgggcgctgcctgccgccgctgaccgcccccgctctctctctctctctctctctctctctctctctctctctcgtcccccaatcaccccaattgccgggtgctcctcttcctgtcacccccatgttgactgctgcccgccaggccgccagagagggaggattaggaaaggggggaaagagagacggacggcttctcgggagtgggtaagactcacatgatgcaattacctccatctttccctcttctccttttgcgggcatactcttctcctccgcctggctagatccttctttcctcgtcccggattagctcccaatctcgccaatggtccaggttgctggccgtggaacatttcttcagttgggcccactctctgtgccggttccatcgggttttgacgcaagagtagaggacttgccaattttgcaggaacccgtaaaacccatccggagaattttccctgcgcgtcccatgattaggagctgcggctggacagtgccctacgctctggagttttagtgcgaatcgttgccagtttcagtcaacttttgatggagcccaggtgttgagcgccaatttgggagttccagctgacgctgcagtctgcattcttctaaggccatcagtgaggaattttcgttccttggtggcagatgggttcctccagctctaaagtggacaatgaggagcccgtgaggcgctccaaggacaggaggcggctcatgaagcagctggtgcgccgccgcccagagcttgcagctgcgcacattgcatacctgcacgccctccgcaacacaggagccactctccggcaatttgtggagctggagtctgctttgtcacagcagcctccggtaggccttgcggcgccgccctcgcctactccacagtcgctgccgcagccgcagcccccgccacctcctgaaccctcactgccaccctcgccacaccccccgccgcctctgccttttagtccagtaaccaccataagaaagatggagaagagggatggtgaattcnn

SEQ ID NO: 73777 - DNA, 1076 bp, Zea Mays
  misc_feature (1075)..(1076): n is a, c, g, or t
ccgaatcccacgccttctcttccttttcccttgctctctccagcccctgctgctcctgccgggcgctgcctgccgccgctgaccgcccccgctctctctctctctctctctctctctctctctctctctctcgtcccccaatcaccccaattgccgggtgctcctcttcctgtcacccccatgttgactgctgcccgccaggccgccagagagggaggattaggaaaggggggaaagagagacggacggcttctcgggagtgggtaagactcacatgatgcaattacctccatctttccctcttctccttttgcgggcatactcttctcctccgcctggctagatccttctttcctcgtcccggattagctcccaatctcgccaatggtccaggttgctggccgtggaacatttcttcagttgggcccactctctggtaagagtgccggttccatcgggttttgacgcaagagtagaggacttggaacccgtaaaacccatccggagaattttccctgcgcgtcccatgattaggagctgcggctggacagtgccctacgctctggagttttagtgcgaatcgttgccagtttcagtcaacttttgatggagcccaggtgttgagcgccaatttgggagttccagctgacgctgcagtctgcattcttctaaggccatcagtgaggaattttcgttccttggtggcagatgggttcctccagctctaaagtggacaatgaggagcccgtgaggcgctccaaggacaggaggcggctcatgaagcagctggtgcgccgccgcccagagcttgcagctgcgcacattgcatacctgcacgccctccgcaacacaggagccactctccggcaatttgtggagctggagtctgctttgtcacagcagcctccggtaggccttgcggcgccgccctcgcctactccacagtcgctgccgcagccgcagcccccgccacctcctgaaccctcactgccaccctcgccacaccccccgccgcctctgccttttagtccagtaaccaccataagaaagatggagaagagggatggtgaattcnn

SEQ ID NO: 73778 - DNA, 3275 bp, Zea Mays
atttaccccaaatccaacccaaatcaaatttccccaaacggaggaaagaaacggaagccgaaaagaaaagcgtgctcttttttcatccttcgtgcgtggtgcgcgagcgtgcgcctcccttaccatctcgcgatcccaattcgatccgctcgccagctctccccatcagacctgccctccccggccgggcgattcgccgccgctactcgaattcgcgtggacccgtcatccattctcgctccccggcgccccaaaccctagatccgctgctgttcttcccaccgccgccgccatgttctggcgcatgaccggcctctccgcggcctcgcccgtggatacaattcttgacaaagaaaattttacattggaagaacttcttgacgaggatgaaattattcaggagtgcaaagcacttaactcacgactcataaacttcttacgtgacaaggctcaggtggaacagttgcttcgttatgttgtggaagaagttccagatgatgctgaaaggaagcgatctttcaagttcccatttattgcttctgaaatatttacttgcgaaatcgatgtcattttgaggaccctagtagaggatgaagagctaatggatttgcttttctcatttgtgaaacctgatcatccgcatagtacattattgtctggttacttcagtaaggtggtaatatgtttggtgctgcggaagactgctccacttatgagttatgttcaggggcatccagagatagttgtccagcttgttgacctgattggcatcacatcgataatggaggtgctgatacgactgattggtgctgatgagaccatatattcaaactatggtgatacgttgcagtggttagaaaatacaaatgtacttgaaatgattgcagataagtttaactcgtcggattctcctgaagtgcatgccaatgctgcggaaattctatgtgcagttactcggtgtgcgcctccatctcttgctgcaaagatatgcagtccaagttttgttcggaggttgttccatcacgctcttgaagaatcaagacccaaatctgttctgcttcattcactgtcagtgtgcatatctttgctggatccaaaaagactagcatcagcttcgtatcaagcattcaaaagcaacttaagtcatggggcattggtcatggccagtccagagacagttgatggtatgcttgagagtctaggcaacttgctgaatttattggacacatcggctgctgaaagtgtgttgccaacaacttatggatgtttgcgcccacctcttggaaaacatcgtctgaagattgttgaattcatctctgtgctgcttacaattggaagtgaaactgcagaaaaggagctagtaagacagtcagcaataaagcgatcgattgatttgttctttgagtatccatataacaactttttgcaccatcatgttgagaatataattgtttcttgcctggagggtaaaagacctgaagttgttgagcatgttcttcatgaatgtgatattgttggtaaaattcttgtttcagaaaggctttcatctttgtcgactgagtctaatgggcctactgttcccactgaaggaaaaacacatccaagagttggaaatgttggccacatgacaagaatagccaataagcttattcagttgggcaacagtaacaacacaatccaggctcacttacaggaaaataatgagtgggttgaatggcaaacaaatgtgctggtcaaacgtaatgaagtagagaatgtttatcattgggcttgtgggcgcccggcgtcattacatgaccgtggtagggacagtgatgatgatgacttccgggacagggactacgacgtggcagctcttgctaataacttaagtcaggcatttcgttatgggatatacagcagcgatgacatcgaagaggcacaaggatcacttgaaagagatgatgaggatgtgtattttgatgatgaatcagctgaggtggtaatatcttctttgcgtctgggagatgaccaggaaggctccctctttacaaattcaaactggttcacatttgatggagagagaggcattgatgaccgatcatctgcctctgttccttcatcatcccccaattctgaggagacatcactaaagactgaggaagctgatgatggtaaagtcattggcactgaggatgaaatggaaacagtgtatcttggaaatggtagtgttgaggaggtaaaagatgtagcagaatgtactgaacagccaaattgttgtactgaggaagagcgattgaaaaatgaagaagggatggaatggcatccaaatgcttcaaataacgataccgaggctgaggctgccgcagagtcttcagccccatcagttgagatagtggcagagaaaacagtagatgaaccattagaggtgggaagaaaattggatgaaccggcagaatcatctttggacagttctgtctctgtagctttgccagctcctgttaacggtagtgagcctgccaactcggaagtatcttctgaacaagtagcccatgccactgatgtgcagcaaccagtgaaggaagctcctgccgaggatgatgatgcaaagaaaactgatgcagccaaaacaaacgagtgaagtagcaacatgctgggctgagctgatcagagcgattgcttgtgaactgaaaactctgtagagtgcagcttgggcatccatcttgcttcatgtgtgctcagctgccacaagatagtctgaagcaaactgctgtacaataagcaagtaattgctctaccatcaaccgtggcatgccactgtacaaatgagcaccactgactaacgcacgtcagtcgccttgtctgaaactggtcattttctttgaagttcaccctccagtccatgtgctttggtggcagtcttcatggcatggtatatgatacctgaaagaacattctttgggtggcaactggttttggctacttagtcttctgttgctttaggttaactttggaactgtaatatgagatgtgattttatttctagtctagctattgtatttttttttcggactctacatgtgtcagttcgatttgaacatgttatttttttcataaagatttgaagacatcttgatcgacggctcctcgtctaccccaccccacgtcctcttttccctctctctagactttacagtcattagtcgcggacttctagcagtttttttttaaagacggcacgaattctgtctttcaattaggaaaggaaagactttgcaaacagcaaggatcaaaag

SEQ ID NO: 73779 - DNA, 3119 bp, Zea Mays
cccaaatccaacccaaatcaaatttccccaaacggaggaaagaaacggaagccgaaaagaaaagcgtgctcttttttcatccttcgtgcgtggtgcgcgagcgtgcgcctcccttaccatctcgcgatcccaattcgatccgctcgccagctctccccatcagacctgccctccccggccgggcgattcgccgccgctactcgaattcgcgtggacccgtcatccattctcgctccccggcgccccaaaccctagatccgctgctgttcttcccaccgccgccgccatgttctggcgcatgaccggcctctccgcggcctcgccccttacgtgacaaggctcaggtggaacagttgcttcgttatgttgtggaagaagttccagatgatgctgaaaggaagcgatctttcaagttcccatttattgcttctgaaatatttacttgcgaaatcgatgtcattttgaggaccctagtagaggatgaagagctaatggatttgcttttctcatttgtgaaacctgatcatccgcatagtacattattgtctggttacttcagtaaggtggtaatatgtttggtgctgcggaagactgctccacttatgagttatgttcaggggcatccagagatagttgtccagcttgttgacctgattggcatcacatcgataatggaggtgctgatacgactgattggtgctgatgagaccatatattcaaactatggtgatacgttgcagtggttagaaaatacaaatgtacttgaaatgattgcagataagtttaactcgtcgttactcggtgtgcgcctccatctcttgctgcaaagatatgcagtccaagttttgttcggaggttgttccatcacgctcttgaagaatcaagacccaaatctgttctgcttcattcactgtcagtgtgcatatctttgctggatccaaaaagactagcatcagcttcgtatcaagcattcaaaagcaacttaagtcatggggcattggtcatggccagtccagagacagttgatggtatgcttgagagtctaggcaacttgctgaatttattggacacatcggctgctgaaagtgtgttgccaacaacttatggatgtttgcgcccacctcttggaaaacatcgtctgaagattgttgaattcatctctgtgctgcttacaattggaagtgaaactgcagaaaaggagctagtaagacagtcagcaataaagcgatcgattgatttgttctttgagtatccatataacaactttttgcaccatcatgttgagaatataattgtttcttgcctggagggtaaaagacctgaagttgttgagcatgttcttcatgaatgtgatattgttggtaaaattcttgtttcagaaaggctttcatctttgtcgactgagtctaatgggcctactgttcccactgaaggaaaaacacatccaagagttggaaatgttggccacatgacaagaatagccaataagcttattcagttgggcaacagtaacaacacaatccaggctcacttacaggaaaataatgagtgggttgaatggcaaacaaatgtgctggtcaaacgtaatgaagtagagaatgtttatcattgggcttgtgggcgcccggcgtcattacatgaccgtggtagggacagtgatgatgatgacttccgggacagggactacgacgtggcagctcttgctaataacttaagtcaggcatttcgttatgggatatacagcagcgatgacatcgaagaggcacaaggatcacttgaaagagatgatgaggatgtgtattttgatgatgaatcagctgaggtggtaatatcttctttgcgtctgggagatgaccaggaaggctccctctttacaaattcaaactggttcacatttgatggagagagaggcattgatgaccgatcatctgcctctgttccttcatcatcccccaattctgaggagacatcactaaagactgaggaagctgatgatggtaaagtcattggcactgaggatgaaatggaaacagtgtatcttggaaatggtagtgttgaggaggtaaaagatgtagcagaatgtactgaacagccaaattgttgtactgaggaagagcgattgaaaaatgaagaagggatggaatggcatccaaatgcttcaaataacgataccgaggctgaggctgccgcagagtcttcagccccatcagttgagatagtggcagagaaaacagtagatgaaccattagaggtgggaagaaaattggatgaaccggcagaatcatctttggacagttctgtctctgtagctttgccagctcctgttaacggtagtgagcctgccaactcggaagtatcttctgaacaagtagcccatgccactgatgtgcagcaaccagtgaaggaagctcctgccgaggatgatgatgcaaagaaaactgatgcagccaaaacaaacgagtgaagtagcaacatgctgggctgagctgatcagagcgattgcttgtgaactgaaaactctgtagagtgcagcttgggcatccatcttgcttcatgtgtgctcagctgccacaagatagtctgaagcaaactgctgtacaataagcaagtaattgctctaccatcaaccgtggcatgccactgtacaaatgagcaccactgactaacgcacgtcagtcgccttgtctgaaactggtcattttctttgaagttcaccctccagtccatgtgctttggtggcagtcttcatggcatggtatatgatacctgaaagaacattctttgggtggcaactggttttggctacttagtcttctgttgctttaggttaactttggaactgtaatatgagatgtgattttatttctagtctagctattgtatttttttttcggactctacatgtgtcagttcgatttgaacatgttatttttttcataaagatttgaagacatcttgatcgacggctcctcgtctaccccaccccacgtcctcttttccctctctctagactttacagtcattagtcgcggacttctagcagtttttttttaaagacggcacgaattctgtctttcaattaggaaaggaaagactttgcaaacagcaaggatcaaaag

SEQ ID NO: 73780 - DNA, 3402 bp, Zea Mays
aacccaaatcaaatttccccaaacggaggaaagaaacggaagccgaaaagaaaagcgtgctcttttttcatccttcgtgcgtggtgcgcgagcgtgcgcctcccttaccatctcgcgatcccaattcgatccgctcgccagctctccccatcagacctgccctccccggccgggcgattcgccgccgctactcgaattcgcgtggacccgtcatccattctcgctccccggcgccccaaaccctagatccgctgctgttcttcccaccgccgccgccatgttctggcgcatgaccggcctctccgcggcctcgcccgtggatacaattcttgacaaagaaaattttacattggaagaacttcttgacgaggatgaaattattcaggagtgcaaagcacttaactcacgactcataaacttcttacgtgacaaggctcaggtggaacagttgcttcgttatgttgtggaagaagttccagatgatgctgaaaggaagcgatctttcaagttcccatttattgcttctgaaatatttacttgcgaaatcgatgtcattttgaggaccctagtagaggatgaagagctaatggatttgcttttctcatttgtgaaacctgatcatccgcatagtacattattgtctggttacttcagtaaggtggtaatatgtttggtgctgcggaagactgctccacttatgagttatgttcaggggcatccagagatagttgtccagcttgttgacctgattggcatcacatcgataatggaggtgctgatacgactgattggtgctgatgagaccatatattcaaactatggtgatacgttgcagtggttagaaaatacaaatgtacttgaaatgattgcagataagtttaactcgtcggattctcctgaagtgcatgccaatgctgcggaaattctatgtgcagttactcggtgtgcgcctccatctcttgctgcaaagatatgcagtccaagttttgttcggaggttgttccatcacgctcttgaagaatcaagacccaaatctgttctgcttcattcactgtcagtgtgcatatctttgctggatccaaaaagactagcatcagcttcgtatcaagcattcaaaagcaacttaagtcatggggcattggtcatggccagtccagagacagttgatggtatgcttgagagtctaggcaacttgctgaatttattggacacatcggctgctgaaagtgtgttgccaacaacttatggatgtttgcgcccacctcttggaaaacatcgtctgaagattgttgaattcatctctgtgctgcttacaattggaagtgaaactgcagaaaaggagctagtaagacagtcagcaataaagcgatcgattgatttgttctttgagtatccatataacaactttttgcaccatcatgttgagaatataattgtttcttgcctggagggtaaaagacctgaagttgttgagcatgttcttcatgaatgtgatattgttggtaaaattcttgtttcagaaaggctttcatctttgtcaactgagtctaatgggcctactgttcccactgaaggaaaaacacatccaagagttggaaatgttggccacatgacaagaatagccaataagcttattcagttgggcaacagtaacaacacaatccaggctcacttacaggttaacgtagaaatcttttggcttatggtcatctgtggttttctgctgactatcgtgtttgattatttctttggttttaataggaaaataatgagtgggttgaatggcaaacaaatgtgctggtcaaacgtaatgaagtagagaatgtttatcattgggcttgtgggcgcccggcgtcattacatgaccgtggtagggacagtgatgatgatgacttccgggacagggactacgacgtggcagctcttgctaataacttaagtcaggcatttcgttatgggatatacagcagcgatgacatcgaagaggcacaaggatcacttgaaagagatgatgagctttttatgtaggagagacataattaacctgttcttttggggggaatttggtcattttggatgtgtattttgatgatgaatcagctgaggtggtaatatcttctttgcgtctgggagatgaccaggaaggctccctctttacaaattcaaactggttcacatttgatggagagagaggcattgatgaccgatcatctgcctctgttccttcatcatcccccaattctgaggagacatcactaaagactgaggaagctgatgatggtaaagtcattggcactgaggatgaaatggaaacagtgtatcttggaaatggtagtgttgaggaggtaaaagatgtagcagaatgtactgaacagccaaattgttgtactgaggaagagcgattgaaaaatgaagaagggatggaatggcatccaaatgcttcaaataacgataccgaggctgaggctgccgcagagtcttcagccccatcagttgagatagtggcagagaaaacagtagatgaaccattagaggtgggaagaaaattggatgaaccggcagaatcatctttggacagttctgtctctgtagctttgccagctcctgttaacggtagtgagcctgccaactcggaagtatcttctgaacaagtagcccatgccactgatgtgcagcaaccagtgaaggaagctcctgccgaggatgatgatgcaaagaaaactgatgcagccaaaacaaacgagtgaagtagcaacatgctgggctgagctgatcagagcgattgcttgtgaactgaaaactctgtagagtgcagcttgggcatccatcttgcttcatgtgtgctcagctgccacaagatagtctgaagcaaactgctgtacaataagcaagtaattgctctaccatcaaccgtggcatgccactgtacaaatgagcaccactgactaacgcacgtcagtcgccttgtctgaaactggtcattttctttgaagttcaccctccagtccatgtgctttggtggcagtcttcatggcatggtatatgatacctgaaagaacattctttgggtggcaactggttttggctacttagtcttctgttgctttaggttaactttggaactgtaatatgagatgtgattttatttctagtctagctattgtatttttttttcggactctacatgtgtcagttcgatttgaacatgttatttttttcataaagatttgaagacatcttgatcgacggctcctcgtctaccccaccccacgtcctcttttccctctctctagactttacagtcattagtcgcggacttctagcagtttttttttaaagacggcacgaattctgtctttcaattaggaaaggaaagactttgcaaacagcaaggatcaaaag

SEQ ID NO: 73781 - DNA, 3095 bp, Zea Mays
aacccaaatcaaatttccccaaacggaggaaagaaacggaagccgaaaagaaaagcgtgctcttttttcatccttcgtgcgtggtgcgcgagcgtgcgcctcccttaccatctcgcgatcccaattcgatccgctcgccagctctccccatcagacctgccctccccggccgggcgattcgccgccgctactcgaattcgcgtggacccgtcatccattctcgctccccggcgccccaaaccctagatccgctgctgttcttcccaccgccgccgccatgttctggcgcatgaccggcctctccgcggcctcgccccttacgtgacaaggctcaggtggaacagttgcttcgttatgttgtggaagaagttccagatgatgctgaaaggaagcgatctttcaagttcccatttattgcttctgaaatatttacttgcgaaatcgatgtcattttgaggaccctagtagaggatgaagagctaatggatttgcttttctcatttgtgaaacctgatcatccgcatagtacattattgtctggttacttcagtaaggtggtaatatgtttggtgctgcggaagactgctccacttatgagttatgttcaggggcatccagagatagttgtccagcttgttgacctgattggcatcacatcgataatggaggtgctgatacgactgattggtgctgatgagaccatatattcaaactatggtgatacgttgcagtggttagaaaatacaaatgtacttgaaatgattgcagataagtttaactcgtcggattctcctgaagtgcatgccaatgctgcggaaattctatgtgcagttactcggtgtgcgcctccatctcttgctgcaaagatatgcagtccaagttttgttcggaggttgttccatcacgctcttgaagaatcaagacccaaatctgttctgcttcattcactgtcagtgtgcatatctttgctggatccaaaaagactagcatcagcttcgtatcaagcattcaaaagcaacttaagtcatggggcattggtcatggccagtccagagacagttgatggtatgcttgagagtctaggcaacttgctgaatttattggacacatcggctgctgaaagtgtgttgccaacaacttatggatgtttgcgcccacctcttggaaaacatcgtctgaagattgttgaattcatctctgtgctgcttacaattggaagtgaaactgcagaaaaggagctagtaagacagtcagcaataaagcgatcgattgatttgttctttgaggtaaaagacctgaagttgttgagcatgttcttcatgaatgtgatattgttggtaaaattcttgtttcagaaaggctttcatctttgtcgactgagtctaatgggcctactgttcccactgaaggaaaaacacatccaagagttggaaatgatggccacatgagaaaaaaagccaataagcttattcagttgggcaacagtaacaacacaatccaggctcacttacaggaaaataatgagtgggttgaatggcaaacaaatgtgctggtcaaacgtaatgaagtagagaatgtttatcattgggcttgtgggcgcccggcgtcattacatgaccgtggtagggacagtgatgatgatgacttccgggacagggactacgacgtggcagctcttgctaataacttaagtcaggcatttcgttatgggatatacagcagcgatgacatcgaagaggcacaaggatcacttgaaagagatgatgaggatgtgtattttgatgatgaatcagctgaggtggtaatatcttctttgcgtctgggagatgaccaggaaggctccctctttacaaattcaaactggttcacatttgatggagagagaggcattgatgaccgatcatctgcctctgttccttcatcatcccccaattctgaggagacatcactaaagactgaggaagctgatgatggtaaagtcattggcactgaggatgaaatggaaacagtgtatcttggaaatggtagtgttgaggaggtaaaagatgtagcagaatgtactgaacagccaaattgttgtactgaggaagagcgattgaaaaatgaagaagggatggaatggcatccaaatgcttcaaataacgataccgaggctgaggctgccgcagagtcttcagccccatcagttgagatagtggcagagaaaacagtagatgaaccattagaggtgggaagaaaattggatgaaccggcagaatcatctttggacagttctgtctctgtagctttgccagctcctgttaacggtagtgagcctgccaactcggaagtatcttctgaacaagtagcccatgccactgatgtgcagcaaccagtgaaggaagctcctgccgaggatgatgatgcaaagaaaactgatgcagccaaaacaaacgagtgaagtagcaacatgctgggctgagctgatcagagcgattgcttgtgaactgaaaactctgtagagtgcagcttgggcatccatcttgcttcatgtgtgctcagctgccacaagatagtctgaagcaaactgctgtacaataagcaagtaattgctctaccatcaaccgtggcatgccactgtacaaatgagcaccactgactaacgcacgtcagtcgccttgtctgaaactggtcattttctttgaagttcaccctccagtccatgtgctttggtggcagtcttcatggcatggtatatgatacctgaaagaacattctttgggtggcaactggttttggctacttagtcttctgttgctttaggttaactttggaactgtaatatgagatgtgattttatttctagtctagctattgtatttttttttcggactctacatgtgtcagttcgatttgaacatgttatttttttcataaagatttgaagacatcttgatcgacggctcctcgtctaccccaccccacgtcctcttttccctctctctagactttacagtcattagtcgcggacttctagcagtttttttttaaagacggcacgaattctgtctttcaattaggaaaggaaagactttgcaaacagcaaggatcaaaag

SEQ ID NO: 73782 - DNA, 3262 bp, Zea Mays
aacccaaatcaaatttccccaaacggaggaaagaaacggaagccgaaaagaaaagcgtgctcttttttcatccttcgtgcgtggtgcgcgagcgtgcgcctcccttaccatctcgcgatcccaattcgatccgctcgccagctctccccatcagacctgccctccccggccgggcgattcgccgccgctactcgaattcgcgtggacccgtcatccattctcgctccccggcgccccaaaccctagatccgctgctgttcttcccaccgccgccgccatgttctggcgcatgaccggcctctccgcggcctcgcccgtggatacaattcttgacaaagaaaattttacattggaagaacttcttgacgaggatgaaattattcaggagtgcaaagcacttaactcacgactcataaacttcttacgtgacaaggctcaggtggaacagttgcttcgttatgttgtggaagaagttccagatgatgctgaaaggaagcgatctttcaagttcccatttattgcttctgaaatatttacttgcgaaatcgatgtcattttgaggaccctagtagaggatgaagagctaatggatttgcttttctcatttgtgaaacctgatcatccgcatagtacattattgtctggttacttcagtaaggtggtaatatgtttggtgctgcggaagactgctccacttatgagttatgttcaggggcatccagagatagttgtccagcttgttgacctgattggcatcacatcgataatggaggtgctgatacgactgattggtgctgatgagaccatatattcaaactatggtgatacgttgcagtggttagaaaatacaaatgtacttgaaatgattgcagataagtttaactcgtcggattctcctgaagtgcatgccaatgctgcggaaattctatgtgcagttactcggtgtgcgcctccatctcttgctgcaaagatatgcagtccaagttttgttcggaggttgttccatcacgctcttgaagaatcaagacccaaatctgttctgcttcattcactgtcagtgtgcatatctttgctggatccaaaaagactagcatcagcttcgtatcaagcattcaaaagcaacttaagtcatggggcattggtcatggccagtccagagacagttgatggtatgcttgagagtctaggcaacttgctgaatttattggacacatcggctgctgaaagtgtgttgccaacaacttatggatgtttgcgcccacctcttggaaaacatcgtctgaagagattgttgaattcatctctgtgctgcttacaattggaagtgaaactgcagaaaaggagctagtaagacagtcagcaataaagcgatcgattgatttgttctttgagtatccatataacaactttttgcaccatcatgttgagaatataattgtttcttgcctggagggtaaaagacctgaagttgttgagcatgttcttcatgaatgtgatattgttggtaaaattcttgtttcagaaaggctttcatctttgtcgactgagtctaatgggcctactgttcccactgaaggaaaaacacatccaagagttggaaatgttggccacatgacaagaatagccaataagcttattcagttgggcaacagtaacaacacaatccaggctcacttacaggaaaataatgagtgggttgaatggcaaacaaatgtgctggtcaaacgtaatgaagtagagaatgtttatcattgggcttgtgggcgcccggcgtcattacatgaccgtggtagggacagtgatgatgatgacttccgggacagggactacgacgtggcagctcttgctaataacttaagtcaggcatttcgttatgggatatacagcagcgatgacatcgaagaggcacaaggatcacttgaaagagatgatgaggatgtgtattttgatgatgaatcagctgaggtggtaatatcttctttgcgtctgggagatgaccaggaaggctccctctttacaaattcaaactggttcacatttgatggagagagaggcattgatgaccgatcatctgcctctgttccttcatcatcccccaattctgaggagacatcactaaagactgaggaagctgatgatggtaaagtcattggcactgaggatgaaatggaaacagtgtatcttggaaatggtagtgttgaggaggtaaaagatgtagcagaatgtactgaacagccaaattgttgtactgaggaagagcgattgaaaaatgaagaagggatggaatggcatccaaatgcttcaaataacgataccgaggctgaggctgccgcagagtcttcagccccatcagttgagatagtggcagagaaaacagtagatgaaccattagaggtgggaagaaaattggatgaaccggcagaatcatctttggacagttctgtctctgtagctttgccagctcctgttaacggtagtgagcctgccaactcggaagtatcttctgaacaagtagcccatgccactgatgtgcagcaaccagtgaaggaagctcctgccgaggatgatgatgcaaagaaaactgatgcagccaaaacaaacgagtgaagtagcaacatgctgggctgagctgatcagagcgattgcttgtgaactgaaaactctgtagagtgcagcttgggcatccatcttgcttcatgtgtgctcagctgccacaagatagtctgaagcaaactgctgtacaataagcaagtaattgctctaccatcaaccgtggcatgccactgtacaaatgagcaccactgactaacgcacgtcagtcgccttgtctgaaactggtcattttctttgaagttcaccctccagtccatgtgctttggtggcagtcttcatggcatggtatatgatacctgaaagaacattctttgggtggcaactggttttggctacttagtcttctgttgctttaggttaactttggaactgtaatatgagatgtgattttatttctagtctagctattgtatttttttttcggactctacatgtgtcagttcgatttgaacatgttatttttttcataaagatttgaagacatcttgatcgacggctcctcgtctaccccaccccacgtcctcttttccctctctctagactttacagtcattagtcgcggacttctagcagtttttttttaaagacggcacgaattctgtctttcaattaggaaaggaaagactttgcaaacagcaaggatcaaaag

SEQ ID NO: 73783 - DNA, 3267 bp, Zea Mays
aacccaaatcaaatttccccaaacggaggaaagaaacggaagccgaaaagaaaagcgtgctcttttttcatccttcgtgcgtggtgcgcgagcgtgcgcctcccttaccatctcgcgatcccaattcgatccgctcgccagctctccccatcagacctgccctccccggccgggcgattcgccgccgctactcgaattcgcgtggacccgtcatccattctcgctccccggcgccccaaaccctagatccgctgctgttcttcccaccgccgccgccatgttctggcgcatgaccggcctctccgcggcctcgcccgtggatacaattcttgacaaagaaaattttacattggaagaacttcttgacgaggatgaaattattcaggagtgcaaagcacttaactcacgactcataaacttcttacgtgacaaggctcaggtggaacagttgcttcgttatgttgtggaagaagttccagatgatgctgaaaggaagcgatctttcaagttcccatttattgcttctgaaatatttacttgcgaaatcgatgtcattttgaggaccctagtagaggatgaagagctaatggatttgcttttctcatttgtgaaacctgatcatccgcatagtacattattgtctggttacttcagtaaggtggtaatatgtttggtgctgcggaagactgctccacttatgagttatgttcaggggcatccagagatagttgtccagcttgttgacctgattggcatcacatcgataatggaggtgctgatacgactgattggtgctgatgagaccatatattcaaactatggtgatacgttgcagtggttagaaaatacaaatgtacttgaaatgattgcagataagtttaactcgtcggattctcctgaagtgcatgccaatgctgcggaaattctatgtgcagttactcggtgtgcgcctccatctcttgctgcaaagatatgcagtccaagttttgttcggaggttgttccatcacgctcttgaagaatcaagacccaaatctgttctgcttcattcactgtcagtgtgcatatctttgctggatccaaaaagactagcatcagcttcgtatcaagcattcaaaagcaacttaagtcatggggcattggtcatggccagtccagagacagttgatggtatgcttgagagtctagttttcaggcaacttgctgaatttattggacacatcggctgctgaaagtgtgttgccaacaacttatggatgtttgcgcccacctcttggaaaacatcgtctgaagattgttgaattcatctctgtgctgcttacaattggaagtgaaactgcagaaaaggagctagtaagacagtcagcaataaagcgatcgattgatttgttctttgagtatccatataacaactttttgcaccatcatgttgagaatataattgtttcttgcctggagggtaaaagacctgaagttgttgagcatgttcttcatgaatgtgatattgttggtaaaattcttgtttcagaaaggctttcatctttgtcgactgagtctaatgggcctactgttcccactgaaggaaaaacacatccaagagttggaaatgttggccacatgacaagaatagccaataagcttattcagttgggcaacagtaacaacacaatccaggctcacttacaggaaaataatgagtgggttgaatggcaaacaaatgtgctggtcaaacgtaatgaagtagagaatgtttatcattgggcttgtgggcgcccggcgtcattacatgaccgtggtagggacagtgatgatgatgacttccgggacagggactacgacgtggcagctcttgctaataacttaagtcaggcatttcgttatgggatatacagcagcgatgacatcgaagaggcacaaggatcacttgaaagagatgatgaggatgtgtattttgatgatgaatcagctgaggtggtaatatcttctttgcgtctgggagatgaccaggaaggctccctctttacaaattcaaactggttcacatttgatggagagagaggcattgatgaccgatcatctgcctctgttccttcatcatcccccaattctgaggagacatcactaaagactgaggaagctgatgatggtaaagtcattggcactgaggatgaaatggaaacagtgtatcttggaaatggtagtgttgaggaggtaaaagatgtagcagaatgtactgaacagccaaattgttgtactgaggaagagcgattgaaaaatgaagaagggatggaatggcatccaaatgcttcaaataacgataccgaggctgaggctgccgcagagtcttcagccccatcagttgagatagtggcagagaaaacagtagatgaaccattagaggtgggaagaaaattggatgaaccggcagaatcatctttggacagttctgtctctgtagctttgccagctcctgttaacggtagtgagcctgccaactcggaagtatcttctgaacaagtagcccatgccactgatgtgcagcaaccagtgaaggaagctcctgccgaggatgatgatgcaaagaaaactgatgcagccaaaacaaacgagtgaagtagcaacatgctgggctgagctgatcagagcgattgcttgtgaactgaaaactctgtagagtgcagcttgggcatccatcttgcttcatgtgtgctcagctgccacaagatagtctgaagcaaactgctgtacaataagcaagtaattgctctaccatcaaccgtggcatgccactgtacaaatgagcaccactgactaacgcacgtcagtcgccttgtctgaaactggtcattttctttgaagttcaccctccagtccatgtgctttggtggcagtcttcatggcatggtatatgatacctgaaagaacattctttgggtggcaactggttttggctacttagtcttctgttgctttaggttaactttggaactgtaatatgagatgtgattttatttctagtctagctattgtatttttttttcggactctacatgtgtcagttcgatttgaacatgttatttttttcataaagatttgaagacatcttgatcgacggctcctcgtctaccccaccccacgtcctcttttccctctctctagactttacagtcattagtcgcggacttctagcagtttttttttaaagacggcacgaattctgtctttcaattaggaaaggaaagactttgcaaacagcaaggatcaaaag

SEQ ID NO: 73784 - DNA, 3129 bp, Zea Mays
aacccaaatcaaatttccccaaacggaggaaagaaacggaagccgaaaagaaaagcgtgctcttttttcatccttcgtgcgtggtgcgcgagcgtgcgcctcccttaccatctcgcgatcccaattcgatccgctcgccagctctccccatcagacctgccctccccggccgggcgattcgccgccgctactcgaattcgcgtggacccgtcatccattctcgctccccggcgccccaaaccctagatccgctgctgttcttcccaccgccgccgccatgttctggcgcatgaccggcctctccgcggcctcgcccgtggatacaattcttgacaaagaaaattttacattggaagaacttcttgacgaggatgaaattattcaggagtgcaaagcacttaactcacgactcataaacttcttacgtgacaaggctcaggtggaacagttgcttcgttatgttgtggaagaagttccagatgatgctgaaaggaagcgatctttcaagttcccatttattgcttctgaaatatttacttgcgaaatcgatgtcattttgaggaccctagtagaggatgaagagctaatggatttgcttttctcatttgtgaaacctgatcatccgcatagtacattattgtctggttacttcagtaaggtggtaatatgtttggtgctgcggaagactgctccacttatgagttatgttcaggggcatccagagatagttgtccagcttgttgacctgattggcatcacatcgataatggaggtgctgatacgactgattggtgctgatgagaccatatattcaaactatggtgatacgttgcagtggttagaaaatacaaatgtacttgaaatgattgcagataagtttaactcgtcggattctcctgaagtgcatgccaatgctgcggaaattctatgtgcagttactcggtgtgcgcctccatctcttgctgcaaagatatgcagtccaagttttgttcggaggttgttccatcacgctcttgaagaatcaagacccaaatctgttctgcttcattcactgtcagtgtgcatatctttgctggatccaaaaagactagcatcagcttcgtatcaagcattcaaaagcaacttaagtcatggggcattggtcatggccagtccagagacagttgatggtatgcttgagagtctaggcaacttgctgaatttattggacacatcggctgctgaaagtgtgttgccaacaacttatggatgtttgcgcccacctcttggaaaacatcgtctgaagattgttgaattcatctctgtgctgcttacaattggaagtgaaactgcagaaaaggagctagtaagacagtcagcaataaagcgatcgattgatttgttctttgaaaaggctttcatctttgtcgactgagtctaatgggcctactgttcccactgaaggaaaaacacatccaagagttggaaatgttggccacatgacaagaatagccaataagcttattcagttgggcaacagtaacaacacaatccaggctcacttacaggaaaataatgagtgggttgaatggcaaacaaatgtgctggtcaaacgtaatgaagtagagaatgtttatcattgggcttgtgggcgcccggcgtcattacatgaccgtggtagggacagtgatgatgatgacttccgggacagggactacgacgtggcagctcttgctaataacttaagtcaggcatttcgttatgggatatacagcagcgatgacatcgaagaggcacaaggatcacttgaaagagatgatgaggatgtgtattttgatgatgaatcagctgaggtggtaatatcttctttgcgtctgggagatgaccaggaaggctccctctttacaaattcaaactggttcacatttgatggagagagaggcattgatgaccgatcatctgcctctgttccttcatcatcccccaattctgaggagacatcactaaagactgaggaagctgatgatggtaaagtcattggcactgaggatgaaatggaaacagtgtatcttggaaatggtagtgttgaggaggtaaaagatgtagcagaatgtactgaacagccaaattgttgtactgaggaagagcgattgaaaaatgaagaagggatggaatggcatccaaatgcttcaaataacgataccgaggctgaggctgccgcagagtcttcagccccatcagttgagatagtggcagagaaaacagtagatgaaccattagaggtgggaagaaaattggatgaaccggcagaatcatctttggacagttctgtctctgtagctttgccagctcctgttaacggtagtgagcctgccaactcggaagtatcttctgaacaagtagcccatgccactgatgtgcagcaaccagtgaaggaagctcctgccgaggatgatgatgcaaagaaaactgatgcagccaaaacaaacgagtgaagtagcaacatgctgggctgagctgatcagagcgattgcttgtgaactgaaaactctgtagagtgcagcttgggcatccatcttgcttcatgtgtgctcagctgccacaagatagtctgaagcaaactgctgtacaataagcaagtaattgctctaccatcaaccgtggcatgccactgtacaaatgagcaccactgactaacgcacgtcagtcgccttgtctgaaactggtcattttctttgaagttcaccctccagtccatgtgctttggtggcagtcttcatggcatggtatatgatacctgaaagaacattctttgggtggcaactggttttggctacttagtcttctgttgctttaggttaactttggaactgtaatatgagatgtgattttatttctagtctagctattgtatttttttttcggactctacatgtgtcagttcgatttgaacatgttatttttttcataaagatttgaagacatcttgatcgacggctcctcgtctaccccaccccacgtcctcttttccctctctctagactttacagtcattagtcgcggacttctagcagtttttttttaaagacggcacgaattctgtctttcaattaggaaaggaaagactttgcaaacagcaaggatcaaaag

SEQ ID NO: 73785 - DNA, 3156 bp, Zea Mays
aacccaaatcaaatttccccaaacggaggaaagaaacggaagccgaaaagaaaagcgtgctcttttttcatccttcgtgcgtggtgcgcgagcgtgcgcctcccttaccatctcgcgatcccaattcgatccgctcgccagctctccccatcagacctgccctccccggccgggcgattcgccgccgctactcgaattcgcgtggacccgtcatccattctcgctccccggcgccccaaaccctagatccgctgctgttcttcccaccgccgccgccatgttctggcgcatgaccggcctctccgcggcctcgccccttacgtgacaaggctcaggtggaacagttgcttcgttatgttgtggaagaagttccagatgatgctgaaaggaagcgatctttcaagttcccatttattgcttctgaaatatttacttgcgaaatcgatgtcattttgaggaccctagtagaggatgaagagctaatggatttgcttttctcatttgtgaaacctgatcatccgcatagtacattattgtctggttacttcagtaaggtggtaatatgtttggtgctgcggaagactgctccacttatgagttatgttcaggggcatccagagatagttgtccagcttgttgacctgattggcatcacatcgataatggaggtgctgatacgactgattggtgctgatgagaccatatattcaaactatggtgatacgttgcagtggttagaaaatacaaatgtacttgaaatgattgcagataagtttaactcgtcggattctcctgaagtgcatgccaatgctgcggaaattctatgtgcagttactcggtgtgcgcctccatctcttgctgcaaagatatgcagtccaagttttgttcggaggttgttccatcacgctcttgaagaatcaagacccaaatctgttctgcttcattcactgtcagtgtgcatatctttgctggatccaaaaagactagcatcagcttcgtatcaagcattcaaaagcaacttaagtcatggggcattggtcatggccagtccagagacagttgatggtatgcttgagagtctaggcaacttgctgaatttattggacacatcggctgctgaaagtgtgttgccaacaacttatggatgtttgcgcccacctcttggaaaacatcgtctgaagattgttgaattcatctctgtgctgcttacaattggaagtgaaactgcagaaaaggagctagtaagacagtcagcaataaagcgatcgattgatttgttctttgagtatccatataacaactttttgcaccatcatgttgagaatataattgtttcttgcctggagggtaaaagacctgaagttgttgagcatgttcttcatgaatgtgatattgttggtaaaattcttgtttcagaaaggctttcatctttgtcgactgagtctaatgggcctactgttcccactgaaggaaaaacacatccaagagttggaaatgttggccacatgacaagaatagccaataagcttattcagttgggcaacagtaacaacacaatccaggctcacttacaggaaaataatgagtgggttgaatggcaaacaaatgtgctggtcaaacgtaatgaagtagagaatgtttatcattgggcttgtgggcgcccggcgtcattacatgaccgtggtagggacagtgatgatgatgacttccgggacagggactacgacgtggcagctcttgctaataacttaagtcaggcatttcgttatgggatatacagcagcgatgacatcgaagaggcacaaggatcacttgaaagagatgatgaggatgtgtattttgatgatgaatcagctgaggtggtaatatcttctttgcgtctgggagatgaccaggaaggctccctctttacaaattcaaactggttcacatttgatggagagagaggcattgatgaccgatcatctgcctctgttccttcatcatcccccaattctgaggagacatcactaaagactgaggaagctgatgatggtaaagtcattggcactgaggatgaaatggaaacagtgtatcttggaaatggtagtgttgaggaggtaaaagatgtagcagaatgtactgaacagccaaattgttgtactgaggaagagcgattgaaaaatgaagaagggatggaatggcatccaaatgcttcaaataacgataccgaggctgaggctgccgcagagtcttcagccccatcagttgagatagtggcagagaaaacagtagatgaaccattagaggtgggaagaaaattggatgaaccggcagaatcatctttggacagttctgtctctgtagctttgccagctcctgttaacggtagtgagcctgccaactcggaagtatcttctgaacaagtagcccatgccactgatgtgcagcaaccagtgaaggaagctcctgccgaggatgatgatgcaaagaaaactgatgcagccaaaacaaacgagtgaagtagcaacatgctgggctgagctgatcagagcgattgcttgtgaactgaaaactctgtagagtgcagcttgggcatccatcttgcttcatgtgtgctcagctgccacaagatagtctgaagcaaactgctgtacaataagcaagtaattgctctaccatcaaccgtggcatgccactgtacaaatgagcaccactgactaacgcacgtcagtcgccttgtctgaaactggtcattttctttgaagttcaccctccagtccatgtgctttggtggcagtcttcatggcatggtatatgatacctgaaagaacattctttgggtggcaactggttttggctacttagtcttctgttgctttaggttaactttggaactgtaatatgagatgtgattttatttctagtctagctattgtatttttttttcggactctacatgtgtcagttcgatttgaacatgttatttttttcataaagatttgaagacatcttgatcgacggctcctcgtctaccccaccccacgtcctcttttccctctctctagactttacagtcattagtcgcggacttctagcagtttttttttaaagacggcacgaattctgtctttcaattaggaaaggaaagactttgcaaacagcaaggatcaaaag

SEQ ID NO: 73786 - DNA, 2928 bp, Zea Mays
aaataattaagtactatacttaagtatatacttgaggggggcaatattttcggggccctgggcggccactcggctcgaccccccacagcttacgtgacaaggctcaggtggaacagttgcttcgttatgttgtggaagaagttccagatgatgctgaaaggaagcgatctttcaagttcccatttattgcttctgaaatatttacttgcgaaatcgatgtcattttgaggaccctagtagaggatgaagagctaatggatttgcttttctcatttgtgaaacctgatcatccgcatagtacattattgtctggttacttcagtaaggtggtaatatgtttggtgctgcggaagactgctccacttatgagttatgttcaggggcatccagagatagttgtccagcttgttgacctgattggcatcacatcgataatggaggtgctgatacgactgattggtgctgatgagaccatatattcaaactatggtgatacgttgcagtggttagaaaatacaaatgtacttgaaatgattgcagataagtttaactcgtcggattctcctgaagtgcatgccaatgctgcggaaattctatgtgcagttactcggtgtgcgcctccatctcttgctgcaaagatatgcagtccaagttttgttcggaggttgttccatcacgctcttgaagaatcaagacccaaatctgttctgcttcattcactgtcagtgtgcatatctttgctggatccaaaaagactagcatcagcttcgtatcaagcattcaaaagcaacttaagtcatggggcattggtcatggccagtccagagacagttgatggtatgcttgagagtctaggcaacttgctgaatttattggacacatcggctgctgaaagtgtgttgccaacaacttatggatgtttgcgcccacctcttggaaaacatcgtctgaagattgttgaattcatctctgtgctgcttacaattggaagtgaaactgcagaaaaggagctagtaagacagtcagcaataaagcgatcgattgatttgttctttgagtatccatataacaactttttgcaccatcatgttgagaatataattgtttcttgcctggagggtaaaagacctgaagttgttgagcatgttcttcatgaatgtgatattgttggtaaaattcttgtttcagaaaggctttcatctttgtcgactgagtctaatgggcctactgttcccactgaaggaaaaacacatccaagagttggaaatgttggccacatgacaagaatagccaataagcttattcagttgggcaacagtaacaacacaatccaggctcacttacaggaaaataatgagtgggttgaatggcaaacaaatgtgctggtcaaacgtaatgaagtagagaatgtttatcattgggcttgtgggcgcccggcgtcattacatgaccgtggtagggacagtgatgatgatgacttccgggacagggactacgacgtggcagctcttgctaataacttaagtcaggcatttcgttatgggatatacagcagcgatgacatcgaagaggcacaaggatcacttgaaagagatgatgaggatgtgtattttgatgatgaatcagctgaggtggtaatatcttctttgcgtctgggagatgaccaggaaggctccctctttacaaattcaaactggttcacatttgatggagagagaggcattgatgaccgatcatctgcctctgttccttcatcatcccccaattctgaggagacatcactaaagactgaggaagctgatgatggtaaagtcattggcactgaggatgaaatggaaacagtgtatcttggaaatggtagtgttgaggaggtaaaagatgtagcagaatgtactgaacagccaaattgttgtactgaggaagagcgattgaaaaatgaagaagggatggaatggcatccaaatgcttcaaataacgataccgaggctgaggctgccgcagagtcttcagccccatcagttgagatagtggcagagaaaacagtagatgaaccattagaggtgggaagaaaattggatgaaccggcagaatcatctttggacagttctgtctctgtagctttgccagctcctgttaacggtagtgagcctgccaactcggaagtatcttctgaacaagtagcccatgccactgatgtgcagcaaccagtgaaggaagctcctgccgaggatgatgatgcaaagaaaactgatgcagccaaaacaaacgagtgaagtagcaacatgctgggctgagctgatcagagcgattgcttgtgaactgaaaactctgtagagtgcagcttgggcatccatcttgcttcatgtgtgctcagctgccacaagatagtctgaagcaaactgctgtacaataagcaagtaattgctctaccatcaaccgtggcatgccactgtacaaatgagcaccactgactaacgcacgtcagtcgccttgtctgaaactggtcattttctttgaagttcaccctccagtccatgtgctttggtggcagtcttcatggcatggtatatgatacctgaaagaacattctttgggtggcaactggttttggctacttagtcttctgttgctttaggttaactttggaactgtaatatgagatgtgattttatttctagtctagctattgtatttttttttcggactctacatgtgtcagttcgatttgaacatgttatttttttcataaagatttgaagacatcttgatcgacggctcctcgtctaccccaccccacgtcctcttttccctctctctagactttacagtcattagtcgcggacttctagcagtttttttttaaagacggcacgaattctgtctttcaattaggaaaggaaagactttgcaaacagcaaggatcaaaag

SEQ ID NO: 73787 - DNA, 2901 bp, Zea Mays
gtagttaattattactaaacctagtagaccacagcacattttcttgttggaggatattgctcttacgtgacaaggctcaggtggaacagttgcttcgttatgttgtggaagaagttccagatgatgctgaaaggaagcgatctttcaagttcccatttattgcttctgaaatatttacttgcgaaatcgatgtcattttgaggaccctagtagaggatgaagagctaatggatttgcttttctcatttgtgaaacctgatcatccgcatagtacattattgtctggttacttcagtaaggtggtaatatgtttggtgctgcggaagactgctccacttatgagttatgttcaggggcatccagagatagttgtccagcttgttgacctgattggcatcacatcgataatggaggtgctgatacgactgattggtgctgatgagaccatatattcaaactatggtgatacgttgcagtggttagaaaatacaaatgtacttgaaatgattgcagataagtttaactcgtcggattctcctgaagtgcatgccaatgctgcggaaattctatgtgcagttactcggtgtgcgcctccatctcttgctgcaaagatatgcagtccaagttttgttcggaggttgttccatcacgctcttgaagaatcaagacccaaatctgttctgcttcattcactgtcagtgtgcatatctttgctggatccaaaaagactagcatcagcttcgtatcaagcattcaaaagcaacttaagtcatggggcattggtcatggccagtccagagacagttgatggtatgcttgagagtctaggcaacttgctgaatttattggacacatcggctgctgaaagtgtgttgccaacaacttatggatgtttgcgcccacctcttggaaaacatcgtctgaagattgttgaattcatctctgtgctgcttacaattggaagtgaaactgcagaaaaggagctagtaagacagtcagcaataaagcgatcgattgatttgttctttgagtatccatataacaactttttgcaccatcatgttgagaatataattgtttcttgcctggagggtaaaagacctgaagttgttgagcatgttcttcatgaatgtgatattgttggtaaaattcttgtttcagaaaggctttcatctttgtcgactgagtctaatgggcctactgttcccactgaaggaaaaacacatccaagagttggaaatgatggccacatgagaaaaaaagccaataagcttattcagttgggcaacagtaacaacacaatccaggctcacttacaggaaaataatgagtgggttgaatggcaaacaaatgtgctggtcaaacgtaatgaagtagagaatgtttatcattgggcttgtgggcgcccggcgtcattacatgaccgtggtagggacagtgatgatgatgacttccgggacagggactacgacgtggcagctcttgctaataacttaagtcaggcatttcgttatgggatatacagcagcgatgacatcgaagaggcacaaggatcacttgaaagagatgatgaggatgtgtattttgatgatgaatcagctgaggtggtaatatcttctttgcgtctgggagatgaccaggaaggctccctctttacaaattcaaactggttcacatttgatggagagagaggcattgatgaccgatcatctgcctctgttccttcatcatcccccaattctgaggagacatcactaaagactgaggaagctgatgatggtaaagtcattggcactgaggatgaaatggaaacagtgtatcttggaaatggtagtgttgaggaggtaaaagatgtagcagaatgtactgaacagccaaattgttgtactgaggaagagcgattgaaaaatgaagaagggatggaatggcatccaaatgcttcaaataacgataccgaggctgaggctgccgcagagtcttcagccccatcagttgagatagtggcagagaaaacagtagatgaaccattagaggtgggaagaaaattggatgaaccggcagaatcatctttggacagttctgtctctgtagctttgccagctcctgttaacggtagtgagcctgccaactcggaagtatcttctgaacaagtagcccatgccactgatgtgcagcaaccagtgaaggaagctcctgccgaggatgatgatgcaaagaaaactgatgcagccaaaacaaacgagtgaagtagcaacatgctgggctgagctgatcagagcgattgcttgtgaactgaaaactctgtagagtgcagcttgggcatccatcttgcttcatgtgtgctcagctgccacaagatagtctgaagcaaactgctgtacaataagcaagtaattgctctaccatcaaccgtggcatgccactgtacaaatgagcaccactgactaacgcacgtcagtcgccttgtctgaaactggtcattttctttgaagttcaccctccagtccatgtgctttggtggcagtcttcatggcatggtatatgatacctgaaagaacattctttgggtggcaactggttttggctacttagtcttctgttgctttaggttaactttggaactgtaatatgagatgtgattttatttctagtctagctattgtatttttttttcggactctacatgtgtcagttcgatttgaacatgttatttttttcataaagatttgaagacatcttgatcgacggctcctcgtctaccccaccccacgtcctcttttccctctctctagactttacagtcattagtcgcggacttctagcagtttttttttaaagacggcacgaattctgtctttcaattaggaaaggaaagactttgcaaacagcaaggatcaaaag

SEQ ID NO: 73788 - DNA, 1658 bp, Zea Mays
tggccacatgacaagaatagccaataagcttattcagttgggcaacagtaacaacacaatccaggctcacttacaggaaaataatgagtgggttgaatggcaaacaaatgtgctggtcaaacgtaatgaagtagagaatgtttatcattgggcttgtgggcgcccggcgtcattacatgaccgtggtagggacagtgatgatgatgacttccgggacagggactacgacgtggcagctcttgctaataacttaagtcaggcatttcgttatgggatatacagcagcgatgacatcgaagaggcacaaggatcacttgaaagagatgatgaggatgtgtattttgatgatgaatcagctgaggtggtaatatcttctttgcgtctgggagatgaccaggaaggctccctctttacaaattcaaactggttcacatttgatggagagagaggcattgatgaccgatcatctgcctctgttccttcatcatcccccaattctgaggagacatcactaaagactgaggaagctgatgatggtaaagtcattggcactgaggatgaaatggaaacagtgtatcttggaaatggtagtgttgaggaggtaaaagatgtagcagaatgtactgaacagccaaattgttgtactgaggaagagcgattgaaaaatgaagaagggatggaatggcatccaaatgcttcaaataacgataccgaggctgaggctgccgcagagtcttcagccccatcagttgagatagtggcagagaaaacagtagatgaaccattagaggtgggaagaaaattggatgaaccggcagaatcatctttggacagttctgtctctgtagctttgccagctcctgttaacggtagtgagcctgccaactcggaagtatcttctgaacaagtagcccatgccactgatgtgcagcaaccagtgaaggaagctcctgccgaggatgatgatgcaaagaaaactgatgcagccaaaacaaacgagtgaagtagcaacatgctgggctgagctgatcagagcgattgcttgtgaactgaaaactctgtagagtgcagcttgggcatccatcttgcttcatgtgtgctcagctgccacaagatagtctgaagcaaactgctgtacaataagcaagtaattgctctaccatcaaccgtggcatgccactgtacaaatgagcaccactgactaacgcacgtcagtcgccttgtctgaaactggtcattttctttgaagttcaccctccagtccatgtgctttggtggcagtcttcatggcatggtatatgatacctgaaagaacattctttgggtggcaactggttttggctacttagtcttctgttgctttaggttaactttggaactgtaatatgagatgtgattttatttctagtctagctattgtatttttttttcggactctacatgtgtcagttcgatttgaacatgttatttttttcataaagatttgaagacatcttgatcgacggctcctcgtctaccccaccccacgtcctcttttccctctctctagactttacagtcattagtcgcggacttctagcagtttttttttaaagacggcacgaattctgtctttcaattaggaaaggaaagactttgcaaacagcaaggatcaaaag

SEQ ID NO: 73789 - DNA, 1605 bp, Zea Mays
cacaatccaggctcacttacagggaaaataatgagtgggttgaatggcaaacaaatgtgctggtcaaacgtaatgaagtagagaatgtttatcattgggcttgtgggcgcccggcgtcattacatgaccgtggtagggacagtgatgatgatgacttccgggacagggactacgacgtggcagctcttgctaataacttaagtcaggcatttcgttatgggatatacagcagcgatgacatcgaagaggcacaaggatcacttgaaagagatgatgaggatgtgtattttgatgatgaatcagctgaggtggtaatatcttctttgcgtctgggagatgaccaggaaggctccctctttacaaattcaaactggttcacatttgatggagagagaggcattgatgaccgatcatctgcctctgttccttcatcatcccccaattctgaggagacatcactaaagactgaggaagctgatgatggtaaagtcattggcactgaggatgaaatggaaacagtgtatcttggaaatggtagtgttgaggaggtaaaagatgtagcagaatgtactgaacagccaaattgttgtactgaggaagagcgattgaaaaatgaagaagggatggaatggcatccaaatgcttcaaataacgataccgaggctgaggctgccgcagagtcttcagccccatcagttgagatagtggcagagaaaacagtagatgaaccattagaggtgggaagaaaattggatgaaccggcagaatcatctttggacagttctgtctctgtagctttgccagctcctgttaacggtagtgagcctgccaactcggaagtatcttctgaacaagtagcccatgccactgatgtgcagcaaccagtgaaggaagctcctgccgaggatgatgatgcaaagaaaactgatgcagccaaaacaaacgagtgaagtagcaacatgctgggctgagctgatcagagcgattgcttgtgaactgaaaactctgtagagtgcagcttgggcatccatcttgcttcatgtgtgctcagctgccacaagatagtctgaagcaaactgctgtacaataagcaagtaattgctctaccatcaaccgtggcatgccactgtacaaatgagcaccactgactaacgcacgtcagtcgccttgtctgaaactggtcattttctttgaagttcaccctccagtccatgtgctttggtggcagtcttcatggcatggtatatgatacctgaaagaacattctttgggtggcaactggttttggctacttagtcttctgttgctttaggttaactttggaactgtaatatgagatgtgattttatttctagtctagctattgtatttttttttcggactctacatgtgtcagttcgatttgaacatgttatttttttcataaagatttgaagacatcttgatcgacggctcctcgtctaccccaccccacgtcctcttttccctctctctagactttacagtcattagtcgcggacttctagcagtttttttttaaagacggcacgaattctgtctttcaattaggaaaggaaagactttgcaaacagcaaggatcaaaag

SEQ ID NO: 73790 - DNA, 1693 bp, Zea Mays
ggcgaccttaggcgaggcggagttctgcccgaggtgggagactctcggggagaggccttggtttaagaggtaccttggctgtttcccttcgggggttacgcctttacttctcctgagtgcgttcttcggggggataatttgggtattcctaattatcacccccgacaagcttgttgctaccgacacacttatttcccagcgcctatttcctgcgaggggaatcagctgtctgatgatgctgactatttcatgtttgatattgtaattttctcgtaaatgtagacattctagagtaatggtacatattagtgacacattttggttttgtcaatgcaggcacaaggatcacttgaaagagatgatgaggatgtgtattttgatgatgaatcagctgaggtggtaatatcttctttgcgtctgggagatgaccaggaaggctccctctttacaaattcaaactggttcacatttgatggagagagaggcattgatgaccgatcatctgcctctgttccttcatcatcccccaattctgaggagacatcactaaagactgaggaagctgatgatggtaaagtcattggcactgaggatgaaatggaaacagtgtatcttggaaatggtagtgttgaggaggtaaaagatgtagcagaatgtactgaacagccaaattgttgtactgaggaagagcgattgaaaaatgaagaagggatggaatggcatccaaatgcttcaaataacgataccgaggctgaggctgccgcagagtcttcagccccatcagttgagatagtggcagagaaaacagtagatgaaccattagaggtgggaagaaaattggatgaaccggcagaatcatctttggacagttctgtctctgtagctttgccagctcctgttaacggtagtgagcctgccaactcggaagtatcttctgaacaagtagcccatgccactgatgtgcagcaaccagtgaaggaagctcctgccgaggatgatgatgcaaagaaaactgatgcagccaaaacaaacgagtgaagtagcaacatgctgggctgagctgatcagagcgattgcttgtgaactgaaaactctgtagagtgcagcttgggcatccatcttgcttcatgtgtgctcagctgccacaagatagtctgaagcaaactgctgtacaataagcaagtaattgctctaccatcaaccgtggcatgccactgtacaaatgagcaccactgactaacgcacgtcagtcgccttgtctgaaactggtcattttctttgaagttcaccctccagtccatgtgctttggtggcagtcttcatggcatggtatatgatacctgaaagaacattctttgggtggcaactggttttggctacttagtcttctgttgctttaggttaactttggaactgtaatatgagatgtgattttatttctagtctagctattgtatttttttttcggactctacatgtgtcagttcgatttgaacatgttatttttttcataaagatttgaagacatcttgatcgacggctcctcgtctaccccaccccacgtcctcttttccctctctctagactttacagtcattagtcgcggacttctagcagtttttttttaaagacggcacgaattctgtctttcaattaggaaaggaaagactttgcaaacagcaaggatcaaaag

SEQ ID NO: 73791 - DNA, 1306 bp, Zea Mays
ggtttgtgcctttgcggctgatgcgccttgctggagaagtgaaaaaatttaggacatacttgggaatacaaatatttaggttttacttcaaatgcactaaatgctctgctgagatcacattcaaaacggaccctcagaattctgactacacagtggaatcgggggctagtcgcaattttgaaccatggcgtgcacaggacgaggtaagtgattttggggcatatttgaaggataaattccatgctccaagcatataatcttcaatttgatcaccatgttgcacattcttttcttcaggcagcagacaaagaaaagattaaacgagatgctgaggagatgggtgatgcaatgaaagcgttggaaaatagagcaatggattcaaagcaggatatggacatccttgcagctttggaagagatgcggtccatgaagtctagacatgctggtgtctctgttgaccagatgcttgaaattttgaagcgttcagcacacgagaaggaggaaaaagcaattgcagagcttgatgaagaagatgaggaacttataaaatcaatcactttccgaaactctggattctatgtaaagcggatagaagatgacgacgacgatgatgatgaggatttggctcctggccaatcaagtagaacaataaagatcaatgaatcttctgaatctgtgactaagccaacagatgttttaagcaaaaataacggatcagaggttgccaataaagaagggagcaagagctggatgcccaaatttattgtgaaaccgaagtctgcaagcgcagattctcataagagacagaagattgaatccacggctgtccaagacaccgggaaaggccaagatgatgaacaaaaaagtgaacctgcgaagcaaaccaatgttctccagtccctctgccagaactacgatagtgatgatagtgaatgaatgaggacaccgccctcttgaagccataacagtcctggttgccaatgctgtattataccagaggatgttaacacatgtagttccccaaaccactggcattgtgccatcatggcacatgatatttatcacaaatctctgattgtcaatgggccaactacaagtattggctcttacaaatatgggctatccagatagagctgcgttattggataaaatgatagttgcagaaagtcagatctgcggtttgtacatcaaacagccatacacaagcttgtttatgcagcatcactgaattaatcattgtttgtttgaagtgtgtgatatttacttgcttttgcttgtgaaaattcaatgaaatgtcaaaatgcag

SEQ ID NO: 73792 - DNA, 1947 bp, Zea Mays
ttcgaccgtgaactggcccgagtgaagtccacgcatccgtctcttcccgctccggcccattgcccattccgttcacaaattcacttctctctctctccgtcgagatgcttcgtggctccgccgccctcctccgccgcctcgcccctcgtatctcgggcggtggctgcggaaacacgactcaccggcgccttcttcctcccatcgcccccttcctccgcgcccgcttcttgtctgccccgactacctcttcaccgccttcttcgtcttcagctgcctgccacgaggaggatgcggaggacagagacctccccgagatctccaatggtgatgcaggtgcccggctcagcatctccgtcgaccgctccgggctctacaaccccacagagcactcgcacgagccgtcgtcggaatccgagctcgtcaagcacatcaagagcatcataaagtttcggagtgggccaatcagcatagctgaatacatggaggaggtgctgacgaacccacagtcaggattctacatcaaccgtgacgtgtttggggaatcaggggatttcatcacctcgccagaggtcagccagatgtttggagagatgattggtgtatgggcaatgtgcctctgggagcaaatgggaaagccagcgaaggtgaatctgattgagcttggcccaggacgaggaacactcttggctgatttacttaggggatcggccaagtttgctaacttcaccaaggcactgagcattaacttagttgagtgcagccctacattgcaaaaaatccagtataatactctgaaatgtgaagatgaacatgttggtgatggcaagagaacagttagcaagatttgtggagcccctgtttgttggcatgcctccctcgaacaggttccctcaggatcaccaaccataatcattgcacatgaattctatgatgccttaccaatccatcagtttcagaaagcatcacgtggatggtgcgaaaagatggtggatattgcagaagattctttcctctttaatctacctcgccaagcgttgtggttgggctagctccgaggagcttgagaagattgagcacattgaagtctgccccaaagcaatggagcttaccgaacaaattgcagatagaattagttcggacggcggaggcgctcttattattgactatggaaaaaatggaatagtgtccgatagtctccaggccatccgcaaacacaagtttgtggacatattagacgatcctggctccgctgatttgagtgcctacgttgattttgcttcgatcaagcgctccgccgaggaagcttcagacgatatctcggtccatgggccaatgacgcagtcccagttcctgggttctctcggcatcaacttcagggtagaagctctcctgcagaactgcaccgaggagcaggcggaatcattgcggacgggctactggcgactggttggagacggggaagccccgttctgggaaggccccgaggaccaggcggcacctgttggaatgggcaccaggtacttggccatggccattgtcaacaagaagcagggcacgcccattccgttcgagtgagggtccggctcgggcatagctttccccgttctgttggaatgtagcagcgttgtcgaggggttttgatgatcagatcagccaattcttctctgctttttctcatgtacacgcaaaacatggtctcgttattttgtgacggacggaaggagggtacctactcgactgaaacagctcataattgtgtcctatgccattacaatcgcaatgttcctctcctgtcgaaatgggcctctgcacgctattattcgagacgtgcagcccctgagaaagaagcgtgcgtctgttggccacttggcctgcagagtcagcctgtttagatggtacagtactgcactacatgatgatgatgctttataaatagtagcttgtcta

SEQ ID NO: 73793 - DNA, 2435 bp, Zea Mays
tcgaccgtgaactggcccgagtgaagtccacgcatccgtctcttcccgctccggcccattgcccattccgttcacaaattcacttctctctctctccgtcgagatgcttcgtggctccgccgccctcctccgccgcctcgcccctcgtatctcgggcggtggctgcggaaacacgactcaccggcgccttcttcctcccatcgcccccttcctccgcgcccgcttcttgtctgccccgactacctcttcaccgccttcttcgtcttcagctgcctgccacgaggaggatgcggaggacagagacctccccgagatctccaatggtgatgcaggtgcccggctcagcatctccgtcgaccgctccgggctctacaaccccacagagcactcgcacgagccgtcgtcggaatccgagctcgtcaagcacatcaagagcatcataaagtttcggagtgggccaatcagcatagctgaatacatggaggaggtgctgacgaacccacagtcaggattctacatcaaccgtgacgtgtttggggaatcaggggatttcatcacctcgccagaggtcagccagatgtttggagagatgattggtgtatgggcaatgtgcctctgggagcaaatgggaaagccagcgaaggtgaatctgattgagcttggcccaggacgaggaacactcttggctgatttacttaggggatcggccaagtttgctaacttcaccaaggcactgagcattaacttagttgagtgcagccctacattgcaaaaaatccagtataatactctgaaatgtgaagatgaacatgttggtgatggcaagagaacagttagcaagatttgtggagcccctgtttgttggcatgcctccctcgaacaggttccctcaggatcaccaaccataatcattgcacatgaattctatgatgccttaccaatccatcagtttcagaaagcatcacgtggatggtgcgaaaagatggtggatattgcagaagattctttcctctttaatctacctcgccaagcgttgtggttgggctagctccgaggagcttgagaagattgagcacattgaagtctgccccaaagcaatggagcttaccgaacaaattgcagatagaattagttcggacggcggaggcgctcttattattgactatggaaaaaatggaatagtgtccgatagtctccaggtttggattttaaatcagttcattcattgtgccaaaagtaaattcaaaatgttgcctgtttggtactactgcaacatatattcttgaagctggaagctagtctttgttgatttcgtaggcacatgctctatacaatcagacaaaaaaaaaagatatgttgctgttgttctgaatattttagaatacttactatgcgtacatggaaagagtagatttgagtgcattagtaaatgatcaaagttgtgattttactagattgtgtaaatatagtgcattagtaaatgatcaaagttgtgctttgaggactgttgattcaaaaagcagtactttttttagactggaaagagtagtagcgaaatccaaggtcctgaacttatgcattgtttagcacacagagagctaacctcacggagttttttggttgacatatctttcatgataccggatgaatggtctgggaactaagcaaactataatgaataaatacaggccatccgcaaacacaagtttgtggacatattagacgatcctggctccgctgatttgagtgcctacgttgattttgcttcgatcaagcgctccgccgaggaagcttcagacgatatctcggtccatgggccaatgacgcagtcccagttcctgggttctctcggcatcaacttcagggtagaagctctcctgcagaactgcaccgaggagcaggcggaatcattgcggacgggctactggcgactggttggagacggggaagccccgttctgggaaggccccgaggaccaggcggcacctgttggaatgggcaccaggtacttggccatggccattgtcaacaagaagcagggcacgcccattccgttcgagtgagggtccggctcgggcatagctttccccgttctgttggaatgtagcagcgttgtcgaggggttttgatgatcagatcagccaattcttctctgctttttctcatgtacacgcaaaacatggtctcgttattttgtgacggacggaaggagggtacctactcgactgaaacagctcataattgtgtcctatgccattacaatcgcaatgttcctctcctgtcgaaatgggcctctgcacgctattattcgagacgtgcagcccctgagaaagaagcgtgcgtctgttggccacttggcctgcagagtcagcctgtttagatggtacagtactgcactacatgatgatgatgctttataaatagtagcttgtcta

SEQ ID NO: 73794 - DNA, 1990 bp, Zea Mays
tcgaccgtgaactggcccgagtgaagtccacgcatccgtctcttcccgctccggcccattgcccattccgttcacaaattcacttctctctctctccgtcgagatgcttcgtggctccgccgccctcctccgccgcctcgcccctcgtatctcgggcggtggctgcggaaacacgactcaccggcgccttcttcctcccatcgcccccttcctccgcgcccgcttcttgtctgccccgactacctcttcaccgccttcttcgtcttcagctgcctgccacgaggaggatgcggaggacagagacctccccgagatctccaatggtgatgcaggtgcccggctcagcatctccgtcgaccgctccgggctctacaaccccacaggtgttgttgtgtcaaaatgcggcagagcactcgcacgagccgtcgtcggaatccgagctcgtcaagcacatcaagagcatcataaagtttcggagtgggccaatcagcatagctgaatacatggaggaggtgctgacgaacccacagtcaggattctacatcaaccgtgacgtgtttggggaatcaggggatttcatcacctcgccagaggtcagccagatgtttggagagatgattggtgtatgggcaatgtgcctctgggagcaaatgggaaagccagcgaaggtgaatctgattgagcttggcccaggacgaggaacactcttggctgatttacttaggggatcggccaagtttgctaacttcaccaaggcactgagcattaacttagttgagtgcagccctacattgcaaaaaatccagtataatactctgaaatgtgaagatgaacatgttggtgatggcaagagaacagttagcaagatttgtggagcccctgtttgttggcatgcctccctcgaacagcaccaaccataatcattgcacatgaattctatgatgccttaccaatccatcagtttcagaaagcatcacgtggatggtgcgaaaagatggtggatattgcagaagattctttgtttcggtttgttttgtctccccatcccacagcctctttaatctacctcgccaagcgttgtggttgggctagctccgaggagcttgagaagattgagcacattgaagtctgccccaaagcaatggagcttaccgaacaaattgcagatagaattagttcggacggcggaggcgctcttattattgactatggaaaaaatggaatagtgtccgatagtctccaggccatccgcaaacacaagtttgtggacatattagacgatcctggctccgctgatttgagtgcctacgttgattttgcttcgatcaagcgctccgccgaggaagcttcagacgatatctcggtccatgggccaatgacgcagtcccagttcctgggttctctcggcatcaacttcagggtagaagctctcctgcagaactgcaccgaggagcaggcggaatcattgcggacgggctactggcgactggttggagacggggaagccccgttctgggaaggccccgaggaccaggcggcacctgttggaatgggcaccaggtacttggccatggccattgtcaacaagaagcagggcacgcccattccgttcgagtgagggtccggctcgggcatagctttccccgttctgttggaatgtagcagcgttgtcgaggggttttgatgatcagatcagccaattcttctctgctttttctcatgtacacgcaaaacatggtctcgttattttgtgacggacggaaggagggtacctactcgactgaaacagctcataattgtgtcctatgccattacaatcgcaatgttcctctcctgtcgaaatgggcctctgcacgctattattcgagacgtgcagcccctgagaaagaagcgtgcgtctgttggccacttggcctgcagagtcagcctgtttagatggtacagtactgcactacatgatgatgatgctttataaatagtagcttgtcta

SEQ ID NO: 73795 - DNA, 1971 bp, Zea Mays
tcgaccgtgaactggcccgagtgaagtccacgcatccgtctcttcccgctccggcccattgcccattccgttcacaaattcacttctctctctctccgtcgagatgcttcgtggctccgccgccctcctccgccgcctcgcccctcgtatctcgggcggtggctgcggaaacacgactcaccggcgccttcttcctcccatcgcccccttcctccgcgcccgcttcttgtctgccccgactacctcttcaccgccttcttcgtcttcagctgcctgccacgaggaggatgcggaggacagagacctccccgagatctccaatggtgatgcaggtgcccggctcagcatctccgtcgaccgctccgggctctacaaccccacaggtgttgttgtgtcaaaatgcggcagagcactcgcacgagccgtcgtcggaatccgagctcgtcaagcacatcaagagcatcataaagtttcggagtgggccaatcagcatagctgaatacatggaggaggtgctgacgaacccacagtcaggattctacatcaaccgtgacgtgtttggggaatcaggggatttcatcacctcgccagaggtcagccagatgtttggagagatgattggtgtatgggcaatgtgcctctgggagcaaatgggaaagccagcgaaggtgaatctgattgagcttggcccaggacgaggaacactcttggctgatttacttaggggatcggccaagtttgctaacttcaccaaggcactgagcattaacttagttgagtgcagccctacattgcaaaaaatccagtataatactctgaaatgtgaagatgaacatgttggtgatggcaagagaacagttagcaagatttgtggagcccctgtttgttggcatgcctccctcgaacaggttccctcaggatcaccaaccataatcattgcacatgaattctatgatgccttaccaatccatcagtttcagaaagcatcacgtggatggtgcgaaaagatggtggatattgcagaagattctttcctctttaatctacctcgccaagcgttgtggttgggctagctccgaggagcttgagaagattgagcacattgaagtctgccccaaagcaatggagcttaccgaacaaattgcagatagaattagttcggacggcggaggcgctcttattattgactatggaaaaaatggaatagtgtccgatagtctccaggccatccgcaaacacaagtttgtggacatattagacgatcctggctccgctgatttgagtgcctacgttgattttgcttcgatcaagcgctccgccgaggaagcttcagacgatatctcggtccatgggccaatgacgcagtcccagttcctgggttctctcggcatcaacttcagggtagaagctctcctgcagaactgcaccgaggagcaggcggaatcattgcggacgggctactggcgactggttggagacggggaagccccgttctgggaaggccccgaggaccaggcggcacctgttggaatgggcaccaggtacttggccatggccattgtcaacaagaagcagggcacgcccattccgttcgagtgagggtccggctcgggcatagctttccccgttctgttggaatgtagcagcgttgtcgaggggttttgatgatcagatcagccaattcttctctgctttttctcatgtacacgcaaaacatggtctcgttattttgtgacggacggaaggagggtacctactcgactgaaacagctcataattgtgtcctatgccattacaatcgcaatgttcctctcctgtcgaaatgggcctctgcacgctattattcgagacgtgcagcccctgagaaagaagcgtgcgtctgttggccacttggcctgcagagtcagcctgtttagatggtacagtactgcactacatgatgatgatgctttataaatagtagcttgtcta

SEQ ID NO: 73796 - DNA, 1446 bp, Zea Mays
gtttgatgacgacgacgaagaatcaaagagggcttccttcgaacgccacccccgggcctgtggcaattaatcccctcgccttcgtaaccgccagtcctccgccacctctccacccaacaacaaaacaagcctaatgggacaagtggcgcaacttgagtgtcaccgcaggaggttatgggtctagagagaaggcaaggatggcgttgaagaaaggtagacgtgtggtgcctaagcttactgctgagccaatggatgtagatgtgaaggatatggacgatgctcatgacacagccattgatgtggaaccgttagcaatggctttcgagtccttgccaactgaggaaagtccagataagtcagttgctaggctcgatgatctcatattagaagctataaggaagcttaaggagccttctgggcccagtaaggcagccattgctgcatacattgaggaccaatactggccacctgctgattttcagcgcctgctatctacaaaactgaaggcattggttaattccggaaaattaatcaaggtaaaccaaaagtacagaattgcaccaagtccacccccctcgggcagaataggcactaaggtatcctctgctgaagggatgaaggcagaaaataataatgctaaacgtctaactaagcatcaagtgattgctgagctggagaagatgaaaggcatgaccaaggaagaggcagctgcctttgctgccaaggcagttgctgaggcagaagtagcaatagcagaagctgaggaagcagcaagagttgcagaggctgcagaaaatgatgctgaagctgcaaaggcttttcttgatgctgtcactttatcaatgagaaacaggaatgctgcttccatgatgcttcgagcttgctgatcctttacccatgcggtcatatggttttggccagcagcacaccggtgtttctgctgcaaagattttctggatatatgagtttcttgtatagccttatttatagatcacgacgcatcaactggaggggttttcaacatcttgctgttggtcctttgtcgttgcagcctttagacaatcgacaatatgataacaagaattatcgtgaaagtagtcttcatttatttttgttttcttcccattgtgttgctttgtaattaaactctagccttttcgtttagttagttgaaatggtgtcgtctagtagaactgtagtgaaaagaaaatgaagaaaatgttagatagccaccttagttattcaatttgctgtgatagtatgtttctagatatgattagctaatgacagcgtttaagattacattcctgctgtttcgtttttttctatagagattacctcttttaagaaaagcatgtaagatttacaaattcggctcgggacaccaacaaaagtacaaaaaagttcagcacaaatgatgtctcgtttctcatagctatggacatg

SEQ ID NO: 73797 - DNA, 377 bp, Zea Mays
atgattctcagctcacctttttcttttaaaatcagtagttggcacaaccactctatagcacaactcaaagcacagaagcagacgcctaagaaacacaacacccgccggtaccagcgcagtgtgttgccgaccggtgacacaatgacacaagacattatggtgtcggctaccacctccttggacatcttcaggaacgggtccatgttgtggtggtaccagccattttgcctcactcctatggatgttactctccagggcaggtgagttcatctttaactcacagcttgctgctcatcgtcggaccagtagccatcacgtcgcgcatggctaggccctcatactcctcatctgacttggtcgagtgttcgtccatagag

SEQ ID NO: 73798 - DNA, 2023 bp, Zea Mays
ggtcatcccaaaaaggaaccagagcaagaccctatgagacacaaaaggttcgaagctattcttaaattattaaactgatgccacgtatgaagtgcagatgaaagaagtgcctgcttctaggagcgattttgttgtgtttttaaaccgcaaaacataataggaaaacaaattaaactgctacttaaaaaggcaaacaattgctagcacaactttaaaaattcttcaaaatgaaagtaaaaacagagcaaagttgaaatgagagcaaacaagcaccatagagggaaagtgaactatttgaagcaactctagcaagcacagtaacatacataccacatcatgcattattttaaatgcttgtttaacaggaagctgagtgtccaaaactgttaactgaaatgttcatatgaaatccgattatacacatagtctaaagagaagtgctggcttgcaagaaataaacctaaccttgctagaaaggggaacaacgtcatatatggtattgtgtaataatattccagagaccacatggcggataactgctatttgcatgcttgggttctgagatgatggctccaggggcatctttgtttatttaaggccacagtaaataacagaccattagttatcaggaatatggagaacaagaaaatataatgttaaacttctaagacatactgttttcaaaatggtacccttatccatattagttcctctgatagaaggctctggctgcacaacgggtagtacattgttttccacaagcacttcattgctgatcagtccatattcatcacgtacaaagggttttgtctcatcacacctccagacaccatcaaccaaaaaccggtactaaattgcacaaaaatgccatataaatgtatgtggcatagaaaatgtcacaggagaaacataatatcttatgcaaatagctgggcagtggccatttgtacagcaaatatgcactactatagtatcatgttcaaatagcttgctaaccattgaactgaatcaaaccatcacatgtgaacatcatgatttacagaactcgcaataacaagggtgtgaatttggtacctgtgcgcaatgttatgtccaagaattacattgatagatgaaaaagcgacacatcaaatacaaaaatccatcatgaatatgtcaaatatatcatgtttcgatcaattgctggaattgaaaaacatattgaagttcaaaatagttgtctggtatatgcaaaagtagttccatgtaaagccaacagttaaggggcattcaagattcatttagtctaactgcaagtactaattgctggggaagaagaggtgcaataaaaactccatgtacagaaacctgagagacagaagtgtggttgtatttaatcatcactcactttacaatggcgttaaatggctgctttctgatgcaacaactgcaatggcattctaccttacaggcattatgtaacggccaaaacatcttatcgaaaacgaaagagacagtgggatgtctttacaggcataaagattcatgatgcctttatgggggtgatctcgcaaatcaaattgcgaagaatcccgagctcggttacttattttaggaataaaagcattaacaaacacaattaatttaggaataaaaggattaactaaaaatgcagtcatttgctcctggtattttctctgttcagtagatggacaggggctcaccattccactccttgaggcacttgcgcagcgatgtcttcctaaaatgagcgcttgaagtactcgtgataatcatcctacataccagctccacatgaagtagcatctccagtacgatgaacaagatatagaaattttaggcaataactacatcaagaaactgaaggcaaaaaacacaggactatgaccgcgaactgaaagcgagcagctcaaaaaacacggtattccaccagtgacccagtcatcacacgctgaaagttccacaggtgtggtttcacatgtctacatcccagctattgacttcaatgagtggtatcaaattt

SEQ ID NO: 73799 - DNA, 1699 bp, Zea Mays
ccagccctcacatgggccaagctgcagccgacaacataccagatttaatatgggcctacaacagcagaagaccggccccagaaatagtgaaatactactgctaggaaatcgggacatgatgattgtttgttttctaagctcgttcgccctctctcttctctccgtccaacgacggcgcgattcagatccaggcatacaggccatccttccgccgccgcggactgcacctaatcttccttctccagcagccgggcgttcccgtcgtcctcgatcgtcccctggactggatcgcaacggagatccagctggacctgcggtggtcccttccttttctcgcataatgagctcgccagtggagaggtgattcgtcaggctggtatcaagttcctagtccatggtgcctggatgagcagtagagatgctactggccgtggaaggaggagggttcttctcgtcttcagctacaggttacagccatggcctcgccctcttgctgctcggacgcaaagctgaggagaagcccgtaaaggtctcgccgtggaaccagtaccggctagtcgaccgggagaccgagcaggtgtaccacctgccctccgccaaggaccaggctcctgggaaatgtgctccctttgtctgcttcggatgcacggctaatggcctcgaggtggcgtctcctccaaaagcgacctccagcaatgcgcttggtaccggtacctcacaggaagaagcatcttgttcagcaaacaagacgttgaccactagtggttccatcagtggcagtgagagacgaggctgtcttaagagcaactccaaaagggattctttggagcaccgtatagtggtgagcgagggtgaagaaccgcgtgagtctttggaagaggtgcaaaccctgagatctagcatggaacggaggaaagttcagtggacagatacatgtggaaaggatctttttgagataagggagtttgaaacaaggtaaccatcttgtgaggtaacttatcttcaagttttcaagtaacaaagataccacaaagttcgagccatcttaatgagtagtctccaaccaaaagcgacgagagtctgtcagatgatgacccagaaaatgaaggtttccggaaatgtgagtgtgtgattcagtagatttcttgtgtgcacaacaagcctgacaggaacatctcctcatgggaagcccatgtcctgctgagaaggacatgccatatgttcttctgggaaggatatgccacacccagtgatttcattgcaactggaacgatcgatgacagtcgaaacaaagcaaacggtgatgaatcgatattgtgctagattatttgttggttctacgcttaactagtctgctcggcagggttatagtttcgatgcccacctgtacaataccaagatcccattcctttctttttgttgtcatgttttgtttctctgactttccatcacctttttcacgcccgctgtaccatatgaggctgccctgttacttctgccatggatggtggatccctgacttcatgctgttcccttttgttttgcccctaacgtgttgagtgatgtcttgttgacattttcgtccaaattggtaaaattcattcttcgttgcgtaagagtgacatacgagggctatttggttgtttaactcaaagtccggcgtactgatgtggatctgtctttctgcccctataatgtc

SEQ ID NO: 73800 - DNA, 877 bp, Zea Mays
gtgtccaaaccttctccacgcgttccttccttccctccctccctccctcccctcccaagaaacacaagagccaggcagcgcttgcgaggctcaagcgccgcagcaatgtctctggccccgtccatcccttccatcaaggtgaaggtggggcccgtctcggtggcgcccccgcaccgcgcatgccgatccttcgcggtggtcaggagctccaaggcggagggccccatccggagacccgcggcgcccccgctgtcgccaccgccaaagacgccggctttgtccactcctcccaccctgtcgcagcctcccaagcccgctgctccacccacgtcgtcggagtcgacaccaccgtctcctcagccgaaggcggctgtggccacagcccccgcggcagcgctgcagaggccgctggctggggctgtgacgctggagtaccagaggaaggtggccaaggacctgcaagactacttcaagaagaagaagctggacgaggccgaccagggcccattctttgggttcgtgcccaagaatgagatttccaacggaaggtgggccatgtttgggtttgcagtagggatgctaacagagtacgcaacaggctctgattttgttcagcaattgaagatccttctttccaatttcggaattgtggacttggattaataatgccgggcttggtgttttcgttatgcataagtcttttaaatgtaccttgatttacacgggagaaggacaacactgtaggattgaccgagttgcagtgtgggcaaaaaggattatctttaatcaagttgccaaatgccaataatagtatatgcttctagataaataacaacggatttagattggtattgctatattatgatgtgaatatgtc

SEQ ID NO: 73801 - DNA, 718 bp, Zea Mays
gtgtccaaaccttctccacgcgttccttccttccctccctccctccctcccctcccaagaaacacaagagccaggcagcgcttgcgaggctcaagcgccgcagcaatgtctctggccccgtccatcccttccatcaaggtgaaggtggggcccgtctcggtggcgcccccgcaccgcgcatgccgatccttcgcggtggtcaggagctccaaggcggagggccccatccggagacccgcggcgcccccgctgtcgccaccgccaaagacgccggctttgtccactcctcccaccctgtcgcagcctcccaagcccgctgctccacccacgtcgtcggagtcgacaccaccgtctcctcagccgaaggcggctgtggccacagcccccgcggcagcgctgcagaggccgctggctggggctgtgacgctggagtaccagaggaaggtggccaaggacctgcaagactacttcaagaagaagaagctggacgaggccgaccagggcccattctttgggttcgtgcccaagaatgagatttccaacggaaggtaccttgatttacacgggagaaggacaacactgtaggattgaccgagttgcagtgtgggcaaaaaggattatctttaatcaagttgccaaatgccaataatagtatatgcttctagataaataacaacggatttagattggtattgctatattatgatgtgaatatgtc

SEQ ID NO: 73802 - DNA, 1941 bp, Zea Mays
ggccctcatagaatctcccgatcccagaccagtctcccgctgacccatcctgctcagtgctcacttccacgcgggccccagcccgccacgagtccccgctcccacctgctcctcgccgccgttagcgcgccccgagccccgacagcctttctccttctagggtttctctctgtttcgtcctcatcgaatcggagtttcgcatggagtcatcgcggtctcggaagcggacgcgccaggcgcatgactgtgccgccgcgccgccaccagagcgagaagtggtagcgaggggtggcgcgtcgccaccatggagggaggatgaccgtgatggacacttcgtattcgaccttggcgagaacttgacccgccgatctttacagataaaatcttgagcaaaatgggagaaggtttgggttttctgcaatctgtcgtctcctcttctgctgggtatctccgttattattctaatgaagagggctacgagttggattttcgtaggtacatttgggcgtgttttggaatgctgggaccgtgaaacacatgaatatgttgccataaaagttgttcgcagtatccgcaagtaccgtgatgctgcaatgattgagatagatgtgctcaatcgccttgcagaaaatgaaaagtacagatctctttgtgttcaaattcagagatggtttgactatcgtaatcatatatgcattgtttttgagaagcttgggccaagcttgtatgattttctaaagagaaatagataccaacctttccctgtggaacttgtgcgggagtttggacggcaactgttggaatctgtagcatatatgcatgagttgcggcttatccacactgatctgaagccagaaaacatactacttgtctcttctgagtatataaaagttccaagtacaaagaagaattcgcaaggtgaaatgcatttcaagtgcttgccgaagtccagtgccataaagctgatagattttggcagtaccgcctttgataatcggaaccataactcgattgtttctacgaggcattatagggcacctgaaataatattaggtttaggctggagttttccatgtgatatttggagtgttggctgtattcttgttgagctatgctctgttagatctcttcacacactttatttttctagtaccagtctggtaattgttttcctaacatcacattttttagggggaagcattgtttcagacacacgagaatctggaacacctagcaatgatggagagggttttgggacctctaccagaggatatgatacggaaagcaagctcttcagctcagaaatattttaggagagcaacacgattaaattggcctgaaggtgctgtttcaagagaaagcatcagagctgtgaggaaactggatcgactaaaggacttggtatcgaggaacgctgaccattcaaaggtggcactggtggacttgctatacggtctcctacggttcgagccatcggaacgcctgacagcagaagaagctctggaccatccattcttcaggaacccaacatgacttgttgagcaggcttgactcatgtaactctactgaaggtggtggtaggaagcaggcagagccgtccccattgcaaagctgaaggcatcttgttcctctataccagagagtttgtgtaaggcctgtcaatggggcttcttgtggtgataaaactgatggctttagtcacccaatgtcatgtacactagcatttttcctagggagcttagttcgccagacggcgcttgtatgttgttaaccgggatacactatgagctgtgccccgatgccctggtgctataatccaatcgcaaatgatgaaatcaagcatagcgtgcgtccgtatagtttatgattgaattgtaccttggaatgattgccctacattcgttcattcctacctagcgttgttacttcgatggttctggg

SEQ ID NO: 73803 - DNA, 1654 bp, Zea Mays
ggccctcatagaatctcccgatcccagaccagtctcccgctgacccatcctgctcagtgctcacttccacgcgggccccagcccgccacgagtccccgctcccacctgctcctcgccgccgttagcgcgccccgagccccgacagcctttctccttctagggtttctctctgtttcgtcctcatcgaatcggagtttcgcatggagtcatcgcggtctcggaagcggacgcgccaggcgcatgactgtgccgccgcgccgccaccagagcgagaagtggtagcgaggggtggcgcgtcgccaccatggagggaggatgaccgtgatggacacttcgtattcgaccttggcgagaacttgacccgccgatataaaatcttgagcaaaatgggagaaggtacatttgggcgtgttttggaatgctgggaccgtgaaacacatgaatatgttgccataaaagttgttcgcagtatccgcaagtaccgtgatgctgcaatgattgagatagatgtgctcaatcgccttgcagaaaatgaaaagtacagatctctttgtgttcaaattcagagatggtttgactatcgtaatcatatatgcattatatgcatgagttgcggcttatccacactgatctgaagccagaaaacatactacttgtctcttctgagtatataaaagttccaagtacaaagaagaattcgcaaggtgaaatgcatttcaagtgcttgccgaagtccagtgccataaagctgatagattttggcagtaccgcctttgataatcggaaccataactcgattgtttctacgaggcattatagggcacctgaaataatattaggtttaggctggagttttccatgtgatatttggagtgttggctgtattcttgttgagctatgctctggggaagcattgtttcagacacacgagaatctggaacacctagcaatgatggagagggttttgggacctctaccagaggatatgatacggaaagcaagctcttcagctcagaaatattttaggagagcaacacgattaaattggcctgaaggtgctgtttcaagagaaagcatcagagctgtgaggaaactggatcgactaaaggacttggtatcgaggaacgctgaccattcaaaggtggcactggtggacttgctatacggtctcctacggttcgagccatcggaacgcctgacagcagaagaagctctggaccatccattcttcaggaacccaacatgacttgttgagcaggcttgactcatgtaactctactgaaggtggtggtaggaagcaggcagagccgtccccattgcaaagctgaaggcatcttgttcctctataccagagagtttgtgtaaggcctgtcaatggggcttcttgtggtgataaaactgatggctttagtcacccaatgtcatgtacactagcatttttcctagggagcttagttcgccagacggcgcttgtatgttgttaaccgggatacactatgagctgtgccccgatgccctggtgctataatccaatcgcaaatgatgaaatcaagcatagcgtgcgtccgtatagtttatgattgaattgtaccttggaatgattgccctacattcgttcattcctacctagcgttgttacttcgatggttctggg

SEQ ID NO: 73804 - DNA, 1593 bp, Zea Mays
ccagtctcccgctgacccatcctgctcagtgctcacttccacgcgggccccagcccgccacgagtccccgctcccacctgctcctcgccgccgttagcgcgccccgagccccgacagcctttctccttctagggtttctctctgtttcgtcctcatcgaatcggagtttcgcatggagtcatcgcggtctcggaagcggacgcgccaggcgcatgactgtgccgccgcgccgccaccagagcgagaagtggtagcgaggggtggcgcgtcgccaccatggagggaggatgaccgtgatggacacttcgtattcgaccttggcgagaacttgacccgccgatataaaatcttgagcaaaatgggagaaggtacatttgggcgtgttttggaatgctgggaccgtgaaacacatgaatatgttgccataaaagttgttcgcagtatccgcaagtaccgtgatgctgcaatgattgagatagatgtgctcaatcgccttgcagaaaatgaaaagtacagatctctttgtgttcaaattcagagatggtttgactatcgtaatcatatatgcattgtttttgagaagcttgggccaagcttgtatgattttctaaagagaaatagataccaacctttccctgtggaacttgtgcgggagtttggacggcaactgttggaatctgtagcatatatgcatgagttgcggcttatccacactgatctgaagccagaaaacatactacttgtctcttctgagtatataaaagttccaagtacaaaggtttaggctggagttttccatgtgatatttggagtgttggctgtattcttgttgagctatgctctggggaagcattgtttcagacacacgagaatctggaacacctagcaatgatggagagggttttgggacctctaccagaggatatgatacggaaagcaagctcttcagctcagaaatattttaggagagcaacacgattaaattggcctgaaggtgctgtttcaagagaaagcatcagagctgtgaggaaactggatcgactaaaggacttggtatcgaggaacgctgaccattcaaaggtggcactggtggacttgctatacggtctcctacggttcgagccatcggaacgcctgacagcagaagaagctctggaccatccattcttcaggaacccaacatgacttgttgagcaggcttgactcatgtaactctactgaaggtggtggtaggaagcaggcagagccgtccccattgcaaagctgaaggcatcttgttcctctataccagagagtttgtgtaaggcctgtcaatggggcttcttgtggtgataaaactgatggctttagtcacccaatgtcatgtacactagcatttttcctagggagcttagttcgccagacggcgcttgtatgttgttaaccgggatacactatgagctgtgccccgatgccctggtgctataatccaatcgcaaatgatgaaatcaagcatagcgtgcgtccgtatagtttatgattgaattgtaccttggaatgattgccctacattcgttcattcctacctagcgttgttacttcgatggttctggg

SEQ ID NO: 73805 - DNA, 2158 bp, Zea Mays
gtctcccgctgacccatcctgctcagtgctcacttccacgcgggccccagcccgccacgagtccccgctcccacctgctcctcgccgccgttagcgcgccccgagccccgacagcctttctccttctagggtttctctctgtttcgtcctcatcgaatcggagtttcgcatggagtcatcgcggtctcggaagcggacgcgccaggcgcatgactgtgccgccgcgccgccaccagagcgagaagtggtagcgaggggtggcgcgtcgccaccatggagggaggatgaccgtgatggacacttcgtattcgaccttggcgagaacttgacccgccgatataaaatcttgagcaaaatgggagaaggtttgggttttctgcaatctgtcgtctcctcttctgctgggtatctccgttattattctaatgaagagggctacgagttggattttcgtaggtacatttgggcgtgttttggaatgctgggaccgtgaaacacatgaatatgttgccataaaagttgttcgcagtatccgcaagtaccgtgatgctgcaatgattgagatagatgtgctcaatcgccttgcagaaaatgaaaagtacagatctctgtgagtatctcagagacctaattacttaaagtataaccctattctgtttctgacttgacagttcctcttcaatttgtcagttgtgttcaaattcagagatggtttgactatcgtaatcatatatgcattgtaagtactagcttttggtcaattatactagtttctaaaagtcagttaccaattttgagaatgcatttttttgcagatgtgttggttgtttataatatttatcttattggccctcccagtacattgtatggaatgagagacttgtctatagaaattatgataaatcgcctgtagtatagtctttttgttcttcgctcgtgaaggttccctcatatggtcacaaattaaaaatattctttattcaatggatatcaatgattttgtcaggtttttgagaagcttgggccaagcttgtatgattttctaaagagaaatagataccaacctttccctgtggaacttgtgcgggagtttggacggcaactgttggaatctgtagcatatatgcatgagttgcggcttatccacactgatctgaagccagaaaacatactacttgtctcttctgagtatataaaagttccaagtacaaagaagaattcgcaaggtgaaatgcatttcaagtgcttgccgaagtccagtgccataaagctgatagattttggcagtaccgcctttgataatcggaaccataactcgattgtttctacgaggcattatagggcacctgaaataatattaggtttaggctggagttttccatgtgatatttggagtgttggctgtattcttgttgagctatgctctacacacgagaatctggaacacctagcaatgatggagagggttttgggacctctaccagaggatatgatacggaaagcaagctcttcagctcagaaatattttaggagagcaacacgattaaattggcctgaaggtgctgtttcaagagaaagcatcagagctgtgaggaaactggatcgactaaaggacttggtatcgaggaacgctgaccattcaaaggtggcactggtggacttgctatacggtctcctacggttcgagccatcggaacgcctgacagcagaagaagctctggaccatccattcttcaggaacccaacatgacttgttgagcaggcttgactcatgtaactctactgaaggtggtggtaggaagcaggcagagccgtccccattgcaaagctgaaggcatcttgttcctctataccagagagtttgtgtaaggcctgtcaatggggcttcttgtggtgataaaactgatggctttagtcacccaatgtcatgtacactagcatttttcctagggagcttagttcgccagacggcgcttgtatgttgttaaccgggatacactatgagctgtgccccgatgccctggtgctataatccaatcgcaaatgatgaaatcaagcatagcgtgcgtccgtatagtttatgattgaattgtaccttggaatgattgccctacattcgttcattcctacctagcgttgttacttcgatggttctggg

SEQ ID NO: 73806 - DNA, 1446 bp, Zea Mays
acccatcctgctcagtgctcacttccacgcgggccccagcccgccacgagtccccgctcccacctgctcctcgccgccgttagcgcgccccgagccccgacagcctttctccttctagggtttctctctgtttcgtcctcatcgaatcggagtttcgcatggagtcatcgcggtctcggaagcggacgcgccaggcgcatgactgtgccgccgcgccgccaccagagcgagaagtggtagcgaggggtggcgcgtcgccaccatggagggaggatgaccgtgatggacacttcgtattcgaccttggcgagaacttgacccgccgatataaaatcttgagcaaaatgggagaaggtacatttgggcgtgttttggaatgctgggaccgtgaaacacatgaatatgttgccataaaagttgttcgcagtatccgcaagtaccgtgatgctgcaatgattgagatagatgtgctcaatcgccttgcagaaaatgaaaagtacagatctctttgtgttcaaattcagagatggtttgactatcgtaatcatatatgcattatatgcatgagttgcggcttatccacactgatctgaagccagaaaacatactacttgtctcttctgagtatataaaagttccaagtacaaaggtttaggctggagttttccatgtgatatttggagtgttggctgtattcttgttgagctatgctctacacacgagaatctggaacacctagcaatgatggagagggttttgggacctctaccagaggatatgatacggaaagcaagctcttcagctcagaaatattttaggagagcaacacgattaaattggcctgaaggtgctgtttcaagagaaagcatcagagctgtgaggaaactggatcgactaaaggacttggtatcgaggaacgctgaccattcaaaggtggcactggtggacttgctatacggtctcctacggttcgagccatcggaacgcctgacagcagaagaagctctggaccatccattcttcaggaacccaacatgacttgttgagcaggcttgactcatgtaactctactgaaggtggtggtaggaagcaggcagagccgtccccattgcaaagctgaaggcatcttgttcctctataccagagagtttgtgtaaggcctgtcaatggggcttcttgtggtgataaaactgatggctttagtcacccaatgtcatgtacactagcatttttcctagggagcttagttcgccagacggcgcttgtatgttgttaaccgggatacactatgagctgtgccccgatgccctggtgctataatccaatcgcaaatgatgaaatcaagcatagcgtgcgtccgtatagtttatgattgaattgtaccttggaatgattgccctacattcgttcattcctacctagcgttgttacttcgatggttctggg

SEQ ID NO: 73807 - DNA, 1636 bp, Zea Mays
acccatcctgctcagtgctcacttccacgcgggccccagcccgccacgagtccccgctcccacctgctcctcgccgccgttagcgcgccccgagccccgacagcctttctccttctagggtttctctctgtttcgtcctcatcgaatcggagtttcgcatggagtcatcgcggtctcggaagcggacgcgccaggcgcatgactgtgccgccgcgccgccaccagagcgagaagtggtagcgaggggtggcgcgtcgccaccatggagggaggatgaccgtgatggacacttcgtattcgaccttggcgagaacttgacccgccgatataaaatcttgagcaaaatgggagaaggtacatttgggcgtgttttggaatgctgggaccgtgaaacacatgaatatgttgccataaaagttgttcgcagtatccgcaagtaccgtgatgctgcaatgattgagatagatgtgctcaatcgccttgcagaaaatgaaaagtacagatctctatatgcatgagttgcggcttatccacactgatctgaagccagaaaacatactacttgtctcttctgagtatataaaagttccaagtacaaagaagaattcgcaaggtgaaatgcatttcaagtgcttgccgaagtccagtgccataaagctgatagattttggcagtaccgcctttgataatcggaaccataactcgattgtttctacgaggcattatagggcacctgaaataatattaggtttaggctggagttttccatgtgatatttggagtgttggctgtattcttgttgagctatgctctgttagatctcttcacacactttatttttctagtaccagtctggtaattgttttcctaacatcacattttttagggggaagcattgtttcagacacacgagaatctggaacacctagcaatgatggagagggttttgggacctctaccagaggatatgatacggaaagcaagctcttcagctcagaaatattttaggagagcaacacgattaaattggcctgaaggtgctgtttcaagagaaagcatcagagctgtgaggaaactggatcgactaaaggacttggtatcgaggaacgctgaccattcaaaggtggcactggtggacttgctatacggtctcctacggttcgagccatcggaacgcctgacagcagaagaagctctggaccatccattcttcaggaacccaacatgacttgttgagcaggcttgactcatgtaactctactgaaggtggtggtaggaagcaggcagagccgtccccattgcaaagctgaaggcatcttgttcctctataccagagagtttgtgtaaggcctgtcaatggggcttcttgtggtgataaaactgatggctttagtcacccaatgtcatgtacactagcatttttcctagggagcttagttcgccagacggcgcttgtatgttgttaaccgggatacactatgagctgtgccccgatgccctggtgctataatccaatcgcaaatgatgaaatcaagcatagcgtgcgtccgtatagtttatgattgaattgtaccttggaatgattgccctacattcgttcattcctacctagcgttgttacttcgatggttctggg

SEQ ID NO: 73808 - DNA, 1838 bp, Zea Mays
acccatcctgctcagtgctcacttccacgcgggccccagcccgccacgagtccccgctcccacctgctcctcgccgccgttagcgcgccccgagccccgacagcctttctccttctagggtttctctctgtttcgtcctcatcgaatcggagtttcgcatggagtcatcgcggtctcggaagcggacgcgccaggcgcatgactgtgccgccgcgccgccaccagagcgagaagtggtagcgaggggtggcgcgtcgccaccatggagggaggatgaccgtgatggacacttcgtattcgaccttggcgagaacttgacccgccgatataaaatcttgagcaaaatgggagaaggtacatttgggcgtgttttggaatgctgggaccgtgaaacacatgaatatgttgccataaaagttgttcgcagtatccgcaagtaccgtgatgctgcaatgattgagatagatgtgctcaatcgccttgcagaaaatgaaaagtacagatctctgtgagtatctcagagacctaattacttaaagtataaccctattctgtttctgacttgacagttcctcttcaatttgtcagttgtgttcaaattcagagatggtttgactatcgtaatcatatatgcattgtttttgagaagcttgggccaagcttgtatgattttctaaagagaaatagataccaacctttccctgtggaacttgtgcgggagtttggacggcaactgttggaatctgtagcatatatgcatgagttgcggcttatccacactgatctgaagccagaaaacatactacttgtctcttctgagtatataaaagttccaagtacaaagttttcttgaatgattgcttggggttgtacagaagaattcgcaaggtgaaatgcatttcaagtgcttgccgaagtccagtgccataaagctgatagattttggcagtaccgcctttgataatcggaaccataactcgattgtttctacgaggcattatagggcacctgaaataatattaggtttaggctggagttttccatgtgatatttggagtgttggctgtattcttgttgagctatgctctggggaagcattgtttcagacacacgagaatctggaacacctagcaatgatggagagggttttgggacctctaccagaggatatgatacggaaagcaagctcttcagctcagaaatattttaggagagcaacacgattaaattggcctgaaggtgctgtttcaagagaaagcatcagagctgtgaggaaactggatcgactaaaggacttggtatcgaggaacgctgaccattcaaaggtggcactggtggacttgctatacggtctcctacggttcgagccatcggaacgcctgacagcagaagaagctctggaccatccattcttcaggaacccaacatgacttgttgagcaggcttgactcatgtaactctactgaaggtggtggtaggaagcaggcagagccgtccccattgcaaagctgaaggcatcttgttcctctataccagagagtttgtgtaaggcctgtcaatggggcttcttgtggtgataaaactgatggctttagtcacccaatgtcatgtacactagcatttttcctagggagcttagttcgccagacggcgcttgtatgttgttaaccgggatacactatgagctgtgccccgatgccctggtgctataatccaatcgcaaatgatgaaatcaagcatagcgtgcgtccgtatagtttatgattgaattgtaccttggaatgattgccctacattcgttcattcctacctagcgttgttacttcgatggttctggg

SEQ ID NO: 73809 - DNA, 1999 bp, Zea Mays
acccatcctgctcagtgctcacttccacgcgggccccagcccgccacgagtccccgctcccacctgctcctcgccgccgttagcgcgccccgagccccgacagcctttctccttctagggtttctctctgtttcgtcctcatcgaatcggagtttcgcatggagtcatcgcggtctcggaagcggacgcgccaggcgcatgactgtgccgccgcgccgccaccagagcgagaagtggtagcgaggggtggcgcgtcgccaccatggagggaggatgaccgtgatggacacttcgtattcgaccttggcgagaacttgacccgccgatataaaatcttgagcaaaatgggagaaggtacatttgggcgtgttttggaatgctgggaccgtgaaacacatgaatatgttgccataaaagttgttcgcagtatccgcaagtaccgtgatgctgcaatgattgagatagatgtgctcaatcgccttgcagaaaatgaaaagtacagatctctgtgagtatctcagagacctaattacttaaagtataaccctattctgtttctgacttgacagttcctcttcaatttgtcagttgtgttcaaattcagagatggtttgactatcgtaatcatatatgcattgtaagtactagcttttggtcaattatactagtttctaaaagtcagttaccaattttgagaatgcatttttttgcagatgtgttggttgtttataatatttatcttattggccctcccagtacattgtatggaatgagagacttgtctatagaaattatgataaatcgcctgtagtatagtctttttgttcttcgctcgtgaaggttccctcatatggtcacaaattaaaaatattctttattcaatggatatcaatgattttgtcaggtttttgagaagcttgggccaagcttgtatgattttctaaagagaaatagataccaacctttccctgtggaacttgtgcgggagtttggacggcaactgttggaatctgtagcatatatgcatgagttgcggcttatccacactgatctgaagccagaaaacatactacttgtctcttctgagtatataaaagttccaagtacaaaggtttaggctggagttttccatgtgatatttggagtgttggctgtattcttgttgagctatgctctgttagatctcttcacacactttatttttctagtaccagtctggtaattgttttcctaacatcacattttttagggggaagcattgtttcagacacacgagaatctggaacacctagcaatgatggagagggttttgggacctctaccagaggatatgatacggaaagcaagctcttcagctcagaaatattttaggagagcaacacgattaaattggcctgaaggtgctgtttcaagagaaagcatcagagctgtgaggaaactggatcgactaaaggacttggtatcgaggaacgctgaccattcaaaggtggcactggtggacttgctatacggtctcctacggttcgagccatcggaacgcctgacagcagaagaagctctggaccatccattcttcaggaacccaacatgacttgttgagcaggcttgactcatgtaactctactgaaggtggtggtaggaagcaggcagagccgtccccattgcaaagctgaaggcatcttgttcctctataccagagagtttgtgtaaggcctgtcaatggggcttcttgtggtgataaaactgatggctttagtcacccaatgtcatgtacactagcatttttcctagggagcttagttcgccagacggcgcttgtatgttgttaaccgggatacactatgagctgtgccccgatgccctggtgctataatccaatcgcaaatgatgaaatcaagcatagcgtgcgtccgtatagtttatgattgaattgtaccttggaatgattgccctacattcgttcattcctacctagcgttgttacttcgatggttctggg

SEQ ID NO: 73810 - DNA, 1677 bp, Zea Mays
acccatcctgctcagtgctcacttccacgcgggccccagcccgccacgagtccccgctcccacctgctcctcgccgccgttagcgcgccccgagccccgacagcctttctccttctagggtttctctctgtttcgtcctcatcgaatcggagtttcgcatggagtcatcgcggtctcggaagcggacgcgccaggcgcatgactgtgccgccgcgccgccaccagagcgagaagtggtagcgaggggtggcgcgtcgccaccatggagggaggatgaccgtgatggacacttcgtattcgaccttggcgagaacttgacccgccgatataaaatcttgagcaaaatgggagaaggtacatttgggcgtgttttggaatgctgggaccgtgaaacacatgaatatgttgccataaaagttgttcgcagtatccgcaagtaccgtgatgctgcaatgattgagatagatgtgctcaatcgccttgcagaaaatgaaaagtacagatctctttgtgttcaaattcagagatggtttgactatcgtaatcatatatgcattatatgcatgagttgcggcttatccacactgatctgaagccagaaaacatactacttgtctcttctgagtatataaaagttccaagtacaaagaagaattcgcaaggtgaaatgcatttcaagtgcttgccgaagtccagtgccataaagctgatagattttggcagtaccgcctttgataatcggaaccataactcgattgtttctacgaggcattatagggcacctgaaataatattaggtttaggctggagttttccatgtgatatttggagtgttggctgtattcttgttgagctatgctctgttagatctcttcacacactttatttttctagtaccagtctggtaattgttttcctaacatcacattttttagggggaagcattgtttcagacacacgagaatctggaacacctagcaatgatggagagggttttgggacctctaccagaggatatgatacggaaagcaagctcagaaatattttaggagagcaacacgattaaattggcctgaaggtgctgtttcaagagaaagcatcagagctgtgaggaaactggatcgactaaaggacttggtatcgaggaacgctgaccattcaaaggtggcactggtggacttgctatacggtctcctacggttcgagccatcggaacgcctgacagcagaagaagctctggaccatccattcttcaggaacccaacatgacttgttgagcaggcttgactcatgtaactctactgaaggtggtggtaggaagcaggcagagccgtccccattgcaaagctgaaggcatcttgttcctctataccagagagtttgtgtaaggcctgtcaatggggcttcttgtggtgataaaactgatggctttagtcacccaatgtcatgtacactagcatttttcctagggagcttagttcgccagacggcgcttgtatgttgttaaccgggatacactatgagctgtgccccgatgccctggtgctataatccaatcgcaaatgatgaaatcaagcatagcgtgcgtccgtatagtttatgattgaattgtaccttggaatgattgccctacattcgttcattcctacctagcgttgttacttcgatggttctggg

SEQ ID NO: 73811 - DNA, 1773 bp, Zea Mays
acccatcctgctcagtgctcacttccacgcgggccccagcccgccacgagtccccgctcccacctgctcctcgccgccgttagcgcgccccgagccccgacagcctttctccttctagggtttctctctgtttcgtcctcatcgaatcggagtttcgcatggagtcatcgcggtctcggaagcggacgcgccaggcgcatgactgtgccgccgcgccgccaccagagcgagaagtggtagcgaggggtggcgcgtcgccaccatggagggaggatgaccgtgatggacacttcgtattcgaccttggcgagaacttgacccgccgatgtacatttgggcgtgttttggaatgctgggaccgtgaaacacatgaatatgttgccataaaagttgttcgcagtatccgcaagtaccgtgatgctgcaatgattgagatagatgtgctcaatcgccttgcagaaaatgaaaagtacagatctctttgtgttcaaattcagagatggtttgactatcgtaatcatatatgcattgtttttgagaagcttgggccaagcttgtatgattttctaaagagaaatagataccaacctttccctgtggaacttgtgcgggagtttggacggcaactgttggaatctgtagcatatatgcatgagttgcggcttatccacactgatctgaagccagaaaacatactacttgtctcttctgagtatataaaagttccaagtacaaagaagaattcgcaaggtgaaatgcatttcaagtgcttgccgaagtccagtgccataaagctgatagattttggcagtaccgcctttgataatcggaaccataactcgattgtttctacgaggcattatagggcacctgaaataatattaggtttaggctggagttttccatgtgatatttggagtgttggctgtattcttgttgagctatgctctgttagatctcttcacacactttatttttctagtaccagtctggtaattgttttcctaacatcacattttttagggggaagcattgtttcagacacacgagaatctggaacacctagcaatgatggagagggttttgggacctctaccagaggatatgatacggaaagcaagctcttcagctcagaaatattttaggagagcaacacgattaaattggcctgaaggtgctgtttcaagagaaagcatcagagctgtgaggaaactggatcgactaaaggacttggtatcgaggaacgctgaccattcaaaggtggcactggtggacttgctatacggtctcctacggttcgagccatcggaacgcctgacagcagaagaagctctggaccatccattcttcaggaacccaacatgacttgttgagcaggcttgactcatgtaactctactgaaggtggtggtaggaagcaggcagagccgtccccattgcaaagctgaaggcatcttgttcctctataccagagagtttgtgtaaggcctgtcaatggggcttcttgtggtgataaaactgatggctttagtcacccaatgtcatgtacactagcatttttcctagggagcttagttcgccagacggcgcttgtatgttgttaaccgggatacactatgagctgtgccccgatgccctggtgctataatccaatcgcaaatgatgaaatcaagcatagcgtgcgtccgtatagtttatgattgaattgtaccttggaatgattgccctacattcgttcattcctacctagcgttgttacttcgatggttctggg

SEQ ID NO: 73812 - DNA, 1883 bp, Zea Mays
acccatcctgctcagtgctcacttccacgcgggccccagcccgccacgagtccccgctcccacctgctcctcgccgccgttagcgcgccccgagccccgacagcctttctccttctagggtttctctctgtttcgtcctcatcgaatcggagtttcgcatggagtcatcgcggtctcggaagcggacgcgccaggcgcatgactgtgccgccgcgccgccaccagagcgagaagtggtagcgaggggtggcgcgtcgccaccatggagggaggatgaccgtgatggacacttcgtattcgaccttggcgagaacttgacccgccgatataaaatcttgagcaaaatgggagaaggtttgggttttctgcaatctgtcgtctcctcttctgctgggtatctccgttattattctaatgaagagggctacgagttggattttcgtaggtacatttgggcgtgttttggaatgctgggaccgtgaaacacatgaatatgttgccataaaagttgttcgcagtatccgcaagtaccgtgatgctgcaatgattgagatagatgtgctcaatcgccttgcagaaaatgaaaagtacagatctctttgtgttcaaattcagagatggtttgactatcgtaatcatatatgcattgtttttgagaagcttgggccaagcttgtatgattttctaaagagaaatagataccaacctttccctgtggaacttgtgcgggagtttggacggcaactgttggaatctgtagcatatatgcatgagttgcggcttatccacactgatctgaagccagaaaacatactacttgtctcttctgagtatataaaagttccaagtacaaagaagaattcgcaaggtgaaatgcatttcaagtgcttgccgaagtccagtgccataaagctgatagattttggcagtaccgcctttgataatcggaaccataactcgattgtttctacgaggcattatagggcacctgaaataatattaggtttaggctggagttttccatgtgatatttggagtgttggctgtattcttgttgagctatgctctgttagatctcttcacacactttatttttctagtaccagtctggtaattgttttcctaacatcacattttttagggggaagcattgtttcagacacacgagaatctggaacacctagcaatgatggagagggttttgggacctctaccagaggatatgatacggaaagcaagctcagaaatattttaggagagcaacacgattaaattggcctgaaggtgctgtttcaagagaaagcatcagagctgtgaggaaactggatcgactaaaggacttggtatcgaggaacgctgaccattcaaaggtggcactggtggacttgctatacggtctcctacggttcgagccatcggaacgcctgacagcagaagaagctctggaccatccattcttcaggaacccaacatgacttgttgagcaggcttgactcatgtaactctactgaaggtggtggtaggaagcaggcagagccgtccccattgcaaagctgaaggcatcttgttcctctataccagagagtttgtgtaaggcctgtcaatggggcttcttgtggtgataaaactgatggctttagtcacccaatgtcatgtacactagcatttttcctagggagcttagttcgccagacggcgcttgtatgttgttaaccgggatacactatgagctgtgccccgatgccctggtgctataatccaatcgcaaatgatgaaatcaagcatagcgtgcgtccgtatagtttatgattgaattgtaccttggaatgattgccctacattcgttcattcctacctagcgttgttacttcgatggttctggg

SEQ ID NO: 73813 - DNA, 1265 bp, Zea Mays
ccgatctttacagataaaatcttgagcaaaatgggagaaggtacatttgggcgtgttttggaatgctgggaccgtgaaacacatgaatatgttgccataaaagttgttcgcagtatccgcaagtaccgtgatgctgcaatgattgagatagatgtgctcaatcgccttgcagaaaatgaaaagtacagatctctttgtgttcaaattcagagatggtttgactatcgtaatcatatatgcattgtttttgagaagcttgggccaagcttgtatgattttctaaagagaaatagataccaacctttccctgtggaacttgtgcgggagtttggacggcaactgttggaatctgtagcatatatgcatgagttgcggcttatccacactgatctgaagccagaaaacatactacttgtctcttctgagtatataaaagttccaagtacaaaggtttaggctggagttttccatgtgatatttggagtgttggctgtattcttgttgagctatgctctggggaagcattgtttcagacacacgagaatctggaacacctagcaatgatggagagggttttgggacctctaccagaggatatgatacggaaagcaagctcttcagctcagaaatattttaggagagcaacacgattaaattggcctgaaggtgctgtttcaagagaaagcatcagagctgtgaggaaactggatcgactaaaggacttggtatcgaggaacgctgaccattcaaaggtggcactggtggacttgctatacggtctcctacggttcgagccatcggaacgcctgacagcagaagaagctctggaccatccattcttcaggaacccaacatgacttgttgagcaggcttgactcatgtaactctactgaaggtggtggtaggaagcaggcagagccgtccccattgcaaagctgaaggcatcttgttcctctataccagagagtttgtgtaaggcctgtcaatggggcttcttgtggtgataaaactgatggctttagtcacccaatgtcatgtacactagcatttttcctagggagcttagttcgccagacggcgcttgtatgttgttaaccgggatacactatgagctgtgccccgatgccctggtgctataatccaatcgcaaatgatgaaatcaagcatagcgtgcgtccgtatagtttatgattgaattgtaccttggaatgattgccctacattcgttcattcctacctagcgttgttacttcgatggttctggg

SEQ ID NO: 73814 - DNA, 1265 bp, Zea Mays
gtttctaaaagtcagttaccaattttgagaatgcatttttttgcagatgtgttggttgtttataatatttatcttattggccctcccagtacattgtttttgagaagcttgggccaagcttgtatgattttctaaagagaaatagataccaacctttccctgtggaacttgtgcgggagtttggacggcaactgttggaatctgtagcatatatgcatgagttgcggcttatccacactgatctgaagccagaaaacatactacttgtctcttctgagtatataaaagttccaagtacaaagaagaattcgcaaggtgaaatgcatttcaagtgcttgccgaagtccagtgccataaagctgatagattttggcagtaccgcctttgataatcggaaccataactcgattgtttctacgaggcattatagggcacctgaaataatattaggtttaggctggagttttccatgtgatatttggagtgttggctgtattcttgttgagctatgctctggggaagcattgtttcagacacacgagaatctggaacacctagcaatgatggagagggttttgggacctctaccagaggatatgatacggaaagcaagctcttcagctcagaaatattttaggagagcaacacgattaaattggcctgaaggtgctgtttcaagagaaagcatcagagctgtgaggaaactggatcgactaaaggacttggtatcgaggaacgctgaccattcaaaggtggcactggtggacttgctatacggtctcctacggttcgagccatcggaacgcctgacagcagaagaagctctggaccatccattcttcaggaacccaacatgacttgttgagcaggcttgactcatgtaactctactgaaggtggtggtaggaagcaggcagagccgtccccattgcaaagctgaaggcatcttgttcctctataccagagagtttgtgtaaggcctgtcaatggggcttcttgtggtgataaaactgatggctttagtcacccaatgtcatgtacactagcatttttcctagggagcttagttcgccagacggcgcttgtatgttgttaaccgggatacactatgagctgtgccccgatgccctggtgctataatccaatcgcaaatgatgaaatcaagcatagcgtgcgtccgtatagtttatgattgaattgtaccttggaatgattgccctacattcgttcattcctacctagcgttgttacttcgatggttctggg

SEQ ID NO: 73815 - DNA, 336 bp, Zea Mays
tgccctcgtcacacgcccacaccacacccacacagcatccgccctcgcctcgtcgtgtgtcgtcgttgacacgcgccgtcgtggctccgtgtccctcaccattcctcgtagcgatgcgctcgccgcctcttcctgccgtcgtcgtcgcgagttggagcactaccactcgccggagaagcgccgccctacgcccaagaatgcgatccatctccaagcttcaaggaatcgacagtcaagcttcgtcgaccaagtgatcaagctcctcgagctttacgagattgaagattgaagattctgagcatctgtttggtgaaggcaagtgtcctctgacccatt

SEQ ID NO: 73816 - DNA, 1548 bp, Zea Mays
gctagagcgtaagcgtagaagcaggcagccaggcaacgatggagatgcgggttgttcttctgctttgccaggtgatatgtatgcaggcggcggtcatcggcgccgtcgccgccgccgccggcgctcggccaccggcgatgtacgtgttcgggtcgtcgatactggacgtgggcaacaacaactacctgcgggggccggccgtcggcagggccaacagtccctacaacggcgtcgacttcccgggctccatccccaccggaaggttcagcaacggctacaacatcgccgactacgtcgcaaagagcatgggattcgcgtgcagccctcctccctacctgtcgctagcacaggcaccggcaccggcaccggcacagagctccggccctgacctggcccagacggctctcaccattggcatcaactatgcttctggaggagcaggcatccttgactccactaacgccgggaacacgatcccgttgtcggaggaggtgaagtacttcggcgccaccaaggccaagatggtcgccgcagcgggccccagcgcggtgaacccactgatctccaggtccatcttcctcatcggcatgggcaacaacgacctgtacgtcttcggggcttcggagcgggcgcggaacaggtcagacgcagagcagcggagggacgccgccgccgcgctctacgccagcctcgtctccaactactccgccgccgtgacggaagttcgccgtcatcaacgtgtggccgctaggatgcgtgccgggggagcgcgtgctcagcccgacgggcgcgtgctccggcgtcctcaacgacgtcgccggcggcttcaacgacgccctgcgctccctgctcatcggcctcgccgagaggctgccgggcctcgtctacgccctcgccgactccttcggcttcacgctggacgtcctggcggacccgcgcgcgtcagggtacaccgacgtcgcaagcacgtgctgcggcggcgggcggcggctgggcgcggaggcctggtgcacgcgcagctccacgctctgcgtcgaccgtgaccgccatgtcttctgggaccgtgtccatccgtcccagcggactgcgtttctcttggcgcaagcgttctacgacggaccgcccaagtacaccactcctatcaacttcatgcagctcgcccactcaagctagtgatgatatggttcatgcatatctgatactacttaacaatacatcggtcactttgtagagaaagggcgcgccgcctgctactagcagagaaaggcaattattagccgttaatataagggcctatgtgttcacgaccgacataatcttgggtgtcatccagcatagccactttccaccgaatcggccagaccggatttgcaaatgttatcaaatcttataatttgagttcaacattgtgttccctttatcattatgttggtccctcttgcccctaccactgctcctacagtgcacatagactgcagtaggatatgacctcagtctatagtcatatcaacttttctatttcagaattaacttatttcagaattaact

SEQ ID NO: 73817 - DNA, 4992 bp, Zea Mays
ctttccatcccgttccgttccactggtccctcgctgtccccagcttccccgcccctcctctagccgtcgattcgaactctctcaaaaccaaaacagcagtgcatgagaaaaaaggggaaaaatctcgacacatcgcaacgcgccgctcccaaatctaggttgcttggccatggccgacccgccggcccccgacacacagctggaacaggcgtcacccgccgctgcccccgctgaccctgccgaggacgccccggtcgagaagagccccgcggcgcccctcacgctggagccggacgccgctgcggtgtcggatggggcagcgggtgaggtggaggatgaggagtacgtgagcgaccccgacgatgaggcgcttcctacgatgcggcgccgagaggccagtgacgacgaggggtccgaggacgggaggcccacggcgcggatgggccctgaccaggacgacgacggacaaggggcccccgaggcgtacgacgacgaggtggacgaggaggataaggagtactacgacgaggaagacatgggagaggggttcgaggaggagtacgaagggcgcgtggcacttcccatggacgacggcggcggcagccaggtctcgcgcggagaggatggcgtggctatggaggaggggttgacggagggggaggccaagggcgaggggggagagaaggagcaggagccgtttgcggtgcccacttccggcgccttctacatgcacgatgaccggtttcaggaggagaaccgtggcagacgcaggtaaagggaccaaaggctattgaatgaggacaggactctaatgtataattatggataatattaggctgatattgcctggagttccgaactcgaaaactttgcataaaagttatagcttttcttgacataggtgagtaggaaaaacagaatttgagaaagcgagggcatttgataccgtctgctataatatcaggtttgcctatacaatctctgtcttttgtttcaaaaggcagaatagcaccactttgctgattgcataagcattttgtctaggttctttgctgcctagaatggtttaggccattatctctatgtgagagtgggagtgtgggacagatgggagacagaggaagatgaattgcggttgtggaacttgtatacctgataatgtcaatttaattgttttaactaataggcagatttgctgtgggacactcggaaaacatggaattggctatggcacaccaccaactccagtattggccaagtaccattatgaaaccgggtttgtttgctgtaagacaccacccccataaaatatgatttccattgggttttggagagagaggcaagggaaataacacttttgctctcatcctcttcctcttgctcatcggaggacaccggttgtaacaccccatgccccccctggcggggcgcctcagccaccttggacgccagcttctgttgttggcatggcgaggcggagcgcattggagactaccgccgaggtggagcgccttggaattctgcttgctgctactggcctcagcagggcttcttccctacgctgtgggaggagatggcgtgtgagctgtcgccgggccaggtggcggtcggtgtccaacactggtgttggcgggtgagttgggccaccttggcagacccagcatggtggaggtgctcgtgccgctcatggagggtccagatctggaggcaggccatggcttagcctgtggcggtggcacgtggagggaggtgtgaggacagtcggtggctcggtgcatggtggcactgttgtccgacgagacgggcttgagttggcgagtagggaacatgggtggccgacaccagtagtccaaggcagggcgatgtggagctcctgtctagtgtcaccgagtgggtgagggccggggcgaggaggtgagccacgagtctgcaacggcgcaagcacatgcctgagatgggggcacactgtgtgatctgtttgtcgcgttcctggagaaacagtgattctagctatgagggatgctcgacggagaagagaccggatgatcggtgaacaaccagaggttgaagaaaagggtagaaaagacattcccccaccttgaactctaataatcggtgcgatgtgttatggcaaatatacactcattcataagggtactaggcatatttcaacattggcggtgtggattggccaattccattgaagtcggatgtcctgcagcaaaatttgcctaacagtatgacatatttctagctatcatgtcattacttgagctgtctggagaaaagtacaattacctagggctgtctgactaggtgctactgtggtaggcatagcctgaacacctccctagcaccaattgctttatgaaacatttacttaactactgtttttctgagaatgaggtcaaaatggaaagtacaactaatagttaataatttgtaaatgagtagtactgctatacagcggaatcacacctatgcggcgccatggtttttctctagcctaactcctgtttgaacactgttgaggacatgggaccagaaaaaaaatcagaacagaactacagaagcactggagccggaagtcatataggagcgatgttaggcagctctccctttgtttgtaaatgtacgatgatactgtagaaagtgtgcagtgaagcctcctaacttcgaccactcatttcaggaaatcatttgaatcgatcacatgaagacatcaccattcaatttattgtggaaaagtatttttcatattgatctcatatatgaagttgtggtcaaaattttcatgttgagaatcgtctcaaagtaaaaaatgccatacacttaccaatagagaataattgcaattcggatcaacatagccttttattgcaattcggatactgtatctattagtttgatggaataaaataaagtcatttgccttttattgtggcgaatgtttggtgtgaggaagttatgggatgttaaagacaatcaagcttgggtgcatgacagatttgaggagatgaacttgcatgatgatttctatgaagaccagcggatgtcaagaggtcgtggtggtcgaggtaaagcaagaggtggtggccgtggtttttccagaggtggaaagcagcgtaattaccatgaagatagcaacaacacccaaaatcgcaccccaaaggtagtgagagggcgaggacctcgacgttatgaagctgctgcaaggaacaacagagaggttgttggatcccaacgaaaacaagcagctagatttcgagaatctgctccaaatgctgtagcagccagagattccgggcaagtttcacatgcacagccagaggctgcccctcccaaaaggaatgtcatgagttcaagcctaaattctgcgtccccacctttttatccctccagtgcatctactcaagattttccggtagcagctcaaacgagggacatacaagcaggaggttctaataagatccctccatcttccatgaagatggatgataactcaaagctacaatctggttcaatggttagagggagaatagccatggattatggtgggcgtgataagttacttgctgatggtcctattaggtcatcccaaggaagggcaccaacggcgtcactgaattcaggattcacatcatcatctgttaatcctggccaatcccctattgcgagggcttcagggggcaattcaaacatcggaatatcttcaaataatcagccacaaagtcatggatcagtgatgcaccaaaagttagggcaagtgcagaatcagtctgcaacaagaatcccaactcagcaattgagtcatcggactagtaatttgtcaccagtggctcagcatctacctggtaaatcaggagaaagtggcgagaatggttcataccctactctgaatgattcaaagacagcttctgcggtggtaaaagtcaatagccaggaaactgggatgagttcatttatgtatggtggcacccaggttattggggctgcgggcctttcccagggcgatcaaaattttcctggcactccagctctgctgccagtgatgcaatttgggagtcagcatcctggtggtcttggagttcctactgttggtatggccctccctggctatgtagctcaacagcagatgggaatgggaaacaacgaaatgacatggttgccattattggctggtgcagcaggtgcttttggaggatcatatccaccctatatagcccttgatccgagcttttactctagatcttcaggacagacatcatcatcagttccatccagggaacctagtactaatagagggtcaaaatatcctcaaaatgatattgggaatgaggagcttgatgagcgccagaacaagcctagaagatactcagagatgaacttcagccagtgaagcatcttgtaaggtgaactgcatctgaataagctggttatggtcttatgcctgttcgtggagtgttatctgatgggtcacttcacagcagagcagggggtggaattcgttacttgaattatagtattgctcggttgtgctgcgtctggaaatgtcaaatttgttgctgcgtctgaagacgtggacggttgctgaagagagcttgaaaataatggtttgcgttggttgataaagtttaagagttttttttttaaagtacatcctgttagtgactccagttggtggcagtgtactctgatgtatcgggtccgcatatagtggctgctaagaccaagcggcttcattgccgaagcttgtatattttggaatccgttgagtgcggtttgtgacaattttcagcttgcatgagcgtgtccaacatggattttttttttgaaaagccaacaagaggaatccgcccgtctttttatccccgggtgatagaaatttctatttcatggtgaaaagctacgattgtcatattctgtaattgtggaatgaaccgcatgccatcttactgaagctagaaatgagtagttttaactataaaacct

SEQ ID NO: 73818 - DNA, 2990 bp, Zea Mays
cactggtccctcgctgtccccagcttccccgcccctcctctagccgtcgattcgaactctctcaaaaccaaaacagcagtgcatgagaaaaaaggggaaaaatctcgacacatcgcaacgcgccgctcccaaatctaggttgcttggccatggccgacccgccggcccccgacacacagctggaacaggcgtcacccgccgctgcccccgctgaccctgccgaggacgccccggtcgagaagagccccgcggcgcccctcacgctggagccggacgccgctgcggtgtcggatggggcagcgggtgaggtggaggatgaggagtacgtgagcgaccccgacgatgaggcgcttcctacgatgcggcgccgagaggccagtgacgacgaggggtccgaggacgggaggcccacggcgcggatgggccctgaccaggacgacgacggacaaggggcccccgaggcgtacgacgacgaggtggacgaggaggataaggagtactacgacgaggaagacatgggagaggggttcgaggaggagtacgaagggcgcgtggcacttcccatggacgacggcggcggcagccaggtctcgcgcggagaggatggcgtggctatggaggaggggttgacggagggggaggccaagggcgaggggggagagaaggagcaggagccgtttgcggtgcccacttccggcgccttctacatgcacgatgaccggtttcaggaggagaaccgtggcagacgcaggtaaagggaccaaaggctattgaatgaggacaggactctaatgtataattatggataatattaggctgatattgcctggagttccgaactcgaaaactttgcataaaagttatagcttttcttgacataggtgagtaggaaaaacagaatttgagaaagcgagggcatttgataccgtctgctataatatcaggcgaatgtttggtgtgaggaagttatgggatgttaaagacaatcaagcttgggtgcatgacagatttgaggagatgaacttgcatgatgatttctatgaagaccagcggatgtcaagaggtcgtggtggtcgaggtaaagcaagaggtggtggccgtggtttttccagaggtggaaagcagcgtaattaccatgaagatagcaacaacacccaaaatcgcaccccaaaggtagtgagagggcgaggacctcgacgttatgaagctgctgcaaggaacaacagagaggttgttggatcccaacgaaaacaagcagctagatttcgagaatctgctccaaatgctgtagcagccagagattccgggcaagtttcacatgcacagccagaggctgcccctcccaaaaggaatgtcatgagttcaagcctaaattctgcgtccccacctttttatccctccagtgcatctactcaagattttccggtagcagctcaaacgagggacatacaagcaggaggttctaataagatccctccatcttccatgaagatggatgataactcaaagctacaatctggttcaatggttagagggagaatagccatggattatggtgggcgtgataagttacttgctgatggtcctattaggtcatcccaaggaagggcaccaacggcgtcactgaattcaggattcacatcatcatctgttaatcctggccaatcccctattgcgagggcttcagggggcaattcaaacatcggaatatcttcaaataatcagccacaaagtcatggatcagtgatgcaccaaaagttagggcaagtgcagaatcagtctgcaacaagaatcccaactcagcaattgagtcatcggactagtaatttgtcaccagtggctcagcatctacctggtaaatcaggagaaagtggcgagaatggttcataccctactctgaatgattcaaagacagcttctgcggtggtaaaagtcaatagccaggaaactgggatgagttcatttatgtatggtggcacccaggttattggggctgcgggcctttcccagggcgatcaaaattttcctggcactccagctctgctgccagtgatgcaatttgggagtcagcatcctggtggtcttggagttcctactgttggtatggccctccctggctatgtagctcaacagcagatgggaatgggaaacaacgaaatgacatggttgccattattggctggtgcagcaggtgcttttggaggatcatatccaccctatatagcccttgatccgagcttttactctagatcttcaggacagacatcatcatcagttccatccagggaacctagtactaatagagggtcaaaatatcctcaaaatgatattgggaatgaggagcttgatgagcgccagaacaagcctagaagatactcagagatgaacttcagccagtgaagcatcttgtaaggtgaactgcatctgaataagctggttatggccctatttaggccctttgtgatctccagttctgatctggagcactttgggtggctttgatacccttaattatgttaggtattgctcggttgtgctgcgtctggaaatgtcaaatttgttgctgcgtctgaagacgtggacggttgctgaagagagcttgaaaataatggtttgcgttggttgataaagtttaagagttttttttttaaagtacatcctgttagtgactccagttggtggcagtgtactctgatgtatcgggtccgcatatagtggctgctaagaccaagcggcttcattgccgaagcttgtatattttggaatccgttgagtgcggtttgtgacaattttcagcttgcatgagcgtgtccaacatggattttttttttgaaaagccaacaagaggaatccgcccgtctttttatccccgggtgatagaaatttctatttcatggtgaaaagctacgattgtcatattctgtaattgtggaatgaaccgcatgccatcttactgaagctagaaatgagtagttttaactataaaacct

SEQ ID NO: 73819 - DNA, 2221 bp, Zea Mays
ggtccctcgctgtccccagcttccccgcccctcctctagccgtcgattcgaactctctcaaaaccaaaacagcagtgcatgagaaaaaaggggaaaaatctcgacacatcgcaacgcgccgctcccaaatctaggttgcttggccatggccgacccgccggcccccgacacacagctggaacaggcgtcacccgccgctgcccccgctgaccctgccgaggacgccccggtcgagaagagccccgcggcgcccctcacgctggagccggacgccgctgcggtgtcggatggggcagcgggtgaggtggaggatgaggagtacgtgagcgaccccgacgatgaggcgcttcctacgatgcggcgccgagaggccagtgacgacgaggggtccgaggacgggaggcccacggcgcggatgggccctgaccaggacgacgacggacaaggggcccccgaggcgtacgacgacgaggtggacgaggaggataaggagtactacgacgaggaagacatgggagaggggttcgaggaggagtacgaagggcgcgtggcacttcccatggacgacggcggcggcagccaggtctcgcgcggagaggatggcgtggctatggaggaggggttgacggagggggaggccaagggcgaggggggagagaaggagcaggagccgtttgcggtgcccacttccggcgccttctacatgcacgatgaccggtttcaggaggagaaccgtggcagacgcaggcgaatgtttggtgtgaggaagttatgggatgttaaagacaatcaagcttgggtgcatgacagatttgaggagatgaacttgcatgatgatttctatgaagaccagcggatgtcaagaggtcgtggtggtcgaggtaaagcaagaggtggtggccgtggtttttccagaggtggaaagcagcgtaattaccatgaagatagcaacaacacccaaaatcgcaccccaaaggtagtgagagggcgaggacctcgacgttatgaagctgctgcaaggaacaacagagaggttgttggatcccaacgaaaacaagcagctagatttcgagaatctgctccaaatgctgtagcagccagagattccgggcaagtttcacatgcacagccagaggctgcccctcccaaaaggaatgtcatgagttcaagcctaaattctgcgtccccacctttttatccctccagtgcatctactcaagattttccggtagcagctcaaacgagggacatacaagcaggaggttctaataagatccctccatcttccatgaagatggatgataactcaaagctacaatctggttcaatggttagagggagaatagccatggattatggtgggcgtgataagttacttgctgatggtcctattaggtcatcccaaggaagggcaccaacggcgtcactgaattcaggattcacatcatcatctgttaatcctggccaatcccctattgcgagggcttcagggggcaattcaaacatcggaatatcttcaaataatcagccacaaagtcatggatcagtgatgcaccaaaagttagggcaagtgcagaatcagtctgcaacaagaatcccaactcagcaattgagtcatcggactagtaatttgtcaccagtggctcagcatctacctggtaaatcaggagaaagtggcgagaatggttcataccctactctgaatgattcaaagacagcttctgcggtggtaaaagtcaatagccaggaaactgggatgagttcatttatgtatggtggcacccaggttattggggctgcgggcctttcccagggcgatcaaaattttcctggcactccagctctgctgccagtgatgcaatttgggagtcagcatcctggtggtcttggagttcctactgttggtatggccctccctggctatgtagctcaacagcagatgggaatgggaaacaacgaaatgacatggttgccattattggctggtgcagcaggtgcttttggaggatcatatccaccctatatagcccttgatccgagcttttactctagatcttcaggacagacatcatcatcagttccatccaggtctatttctggaccatgtcaatcattatggtgcaccacttaacaagtttagggggcccagaaatatgttttcgaagtttatgtaccaaagtggcacctgttaacaacttcaggggctgctcatgcatttgat

SEQ ID NO: 73820 - DNA, 2167 bp, Zea Mays
ggtccctcgctgtccccagcttccccgcccctcctctagccgtcgattcgaactctctcaaaaccaaaacagcagtgcatgagaaaaaaggggaaaaatctcgacacatcgcaacgcgccgctcccaaatctaggttgcttggccatggccgacccgccggcccccgacacacagctggaacaggcgtcacccgccgctgcccccgctgaccctgccgaggacgccccggtcgagaagagccccgcggcgcccctcacgctggagccggacgccgctgcggtgtcggatggggcagcgggtgaggtggaggatgaggagtacgtgagcgaccccgacgatgaggcgcttcctacgatgcggcgccgagaggccagtgacgacgaggggtccgaggacgggaggcccacggcgcggatgggccctgaccaggacgacgacggacaaggggcccccgaggcgtacgacgacgaggtggacgaggaggataaggagtactacgacgaggaagacatgggagaggggttcgaggaggagtacgaagggcgcgtggcacttcccatggacgacggcggcggcagccaggtctcgcgcggagaggatggcgtggctatggaggaggggttgacggagggggaggccaagggcgaggggggagagaaggagcaggagccgtttgcggtgcccacttccggcgccttctacatgcacgatgaccggtttcaggaggagaaccgtggcagacgcaggcgaatgtttggtgtgaggaagttatgggatgttaaagacaatcaagcttgggtgcatgacagatttgaggagatgaacttgcatgatgatttctatgaatctttattgcaggaccagcggatgtcaagaggtcgtggtggtcgaggtaaagcaagaggtggtggccgtggtttttccagaggtggaaagcagcgtaattaccatgaagatagcaacaacacccaaaatcgcaccccaaaggtagtgagagggcgaggacctcgacgttatgaagctgctgcaaggaacaacagagaggttgttggatcccaacgaaaacaagcagctagatttcgagaatctgctccaaatgctgtagcagccagagattccgggcaagtttcacatgcacagccagaggctgcccctcccaaaaggaatgtcatgagttcaagcctaaattctgcgtccccacctttttatccctccagtgcatctactcaagattttccggtagcagctcaaacgagggacatacaagcaggaggttctaataagatccctccatcttccatgaagatggatgataactcaaagctacaatctggttcaatggttagagggagaatagccatggattatggtgggcgtgataagttacttgctgatggtcctattaggtcatcccaaggaagggcaccaacggcgtcactgaattcaggattcacatcatcatctgttaatcctggccaatcccctattgcgagggcttcagggggcaattcaaacatcggaatatcttcaaataatcagccacaaagtcatggatcagtgatgcaccaaaagttagggcaagtgcagaatcagtctgcaacaagaatcccaactcagcaattgagtcatcggactagtaatttgtcaccagtggctcagcatctacctggtaaatcaggagaaagtggcgagaatggttcataccctactctgaatgattcaaagacagcttctgcggtggtaaaagtcaatagccaggaaactgggatgagttcatttatgtatggtggcacccaggttattggggctgcgggcctttcccagggcgatcaaaattttcctggcactccagctctgctgccagtgatgcaatttgggagtcagcatcctggtggtcttggagttcctactgttggtatggccctccctggctatgtagctcaacagcagatgggaatgggaaacaacgaaatgacatggttgccattattggctggtgcagcaggtgcttttggaggatcatatccaccctatatagcccttgatccgagcttttactctagatcttcaggacagacatcatcatcagttccatccaggtgactaggcgttcaggcgagagctgggttcatctggacgcctaggcggggcctacgcgacaagtcg

SEQ ID NO: 73821 - DNA, 2155 bp, Zea Mays
ggtccctcgctgtccccagcttccccgcccctcctctagccgtcgattcgaactctctcaaaaccaaaacagcagtgcatgagaaaaaaggggaaaaatctcgacacatcgcaacgcgccgctcccaaatctaggttgcttggccatggccgacccgccggcccccgacacacagctggaacaggcgtcacccgccgctgcccccgctgaccctgccgaggacgccccggtcgagaagagccccgcggcgcccctcacgctggagccggacgccgctgcggtgtcggatggggcagcgggtgaggtggaggatgaggagtacgtgagcgaccccgacgatgaggcgcttcctacgatgcggcgccgagaggccagtgacgacgaggggtccgaggacgggaggcccacggcgcggatgggccctgaccaggacgacgacggacaaggggcccccgaggcgtacgacgacgaggtggacgaggaggataaggagtactacgacgaggaagacatgggagaggggttcgaggaggagtacgaagggcgcgtggcacttcccatggacgacggcggcggcagccaggtctcgcgcggagaggatggcgtggctatggaggaggggttgacggagggggaggccaagggcgaggggggagagaaggagcaggagccgtttgcggtgcccacttccggcgccttctacatgcacgatgaccggtttcaggaggagaaccgtggcagacgcaggcgaatgtttggtgtgaggaagttatgggatgttaaagacaatcaagcttgggtgcatgacagatttgaggagatgaacttgcatgatgatttctatgaagaccagcggatgtcaagaggtcgtggtggtcgaggtaaagcaagaggtggtggccgtggtttttccagaggtggaaagcagcgtaattaccatgaagatagcaacaacacccaaaatcgcaccccaaaggtagtgagagggcgaggacctcgacgttatgaagctgctgcaaggaacaacagagaggttgttggatcccaacgaaaacaagcagctagatttcgagaatctgctccaaatgctgtagcagccagagattccgggcaagtttcacatgcacagccagaggctgcccctcccaaaaggaatgtcatgagttcaagcctaaattctgcgtccccacctttttatccctccagtgcatctactcaagattttccggtagcagctcaaacgagggacatacaagcaggaggttctaataagatccctccatcttccatgaagatggatgataactcaaagctacaatctggttcaatggttagagggagaatagccatggattatggtgggcgtgataagttacttgctgatggtcctattaggtcatcccaaggaagggcaccaacggcgtcactgaattcaggattcacatcatcatctgttaatcctggccaatcccctattgcgagggcttcagggggcaattcaaacatcggaatatcttcaaataatcagccacaaagtcatggatcagtgatgcaccaaaagttagggcaagtgcagaatcagtctgcaacaagaatcccaactcagcaattgagtcatcggactagtaatttgtcaccagtggctcagcatctacctggtaaatcaggagaaagtggcgagaatggttcataccctactctgaatgattcaaagacagcttctgcggtggtaaaagtcaatagccaggaaactgggatgagttcatttatgtatggtggcacccaggttattggggctgcgggcctttcccagggcgatcaaaattttcctggcactccagctctgctgccagtgatgcaatttgggagtcagcatcctggtggtcttggagttcctactgttggtatggccctccctggctatgtagctcaacagcagatgggaatgggaaacaacgaaatgacatggttgccattattggctggtgcagcaggtgcttttggaggatcatatccaccctatatagcccttgatccgagcttttactctagatcttcaggacagacatcatcatcagttccatccaggtgactaggcgttcaggcgagagctgggttcatctggacgcctaggcggggcctacgcgacaagtcg

SEQ ID NO: 73822 - DNA, 3067 bp, Zea Mays
ggtccctcgctgtccccagcttccccgcccctcctctagccgtcgattcgaactctctcaaaaccaaaacagcagtgcatgagaaaaaaggggaaaaatctcgacacatcgcaacgcgccgctcccaaatctaggttgcttggccatggccgacccgccggcccccgacacacagctggaacaggcgtcacccgccgctgcccccgctgaccctgccgaggacgccccggtcgagaagagccccgcggcgcccctcacgctggagccggacgccgctgcggtgtcggatggggcagcgggtgaggtggaggatgaggagtacgtgagcgaccccgacgatgaggcgcttcctacgatgcggcgccgagaggccagtgacgacgaggggtccgaggacgggaggcccacggcgcggatgggccctgaccaggacgacgacggacaaggggcccccgaggcgtacgacgacgaggtggacgaggaggataaggagtactacgacgaggaagacatgggagaggggttcgaggaggagtacgaagggcgcgtggcacttcccatggacgacggcggcggcagccaggtctcgcgcggagaggatggcgtggctatggaggaggggttgacggagggggaggccaagggcgaggggggagagaaggagcaggagccgtttgcggtgcccacttccggcgccttctacatgcacgatgaccggtttcaggaggagaaccgtggcagacgcaggtaaagggaccaaaggctattgaatgaggacaggactctaatgtataattatggataatattaggctgatattgcctggagttccgaactcgaaaactttgcataaaagttatagcttttcttgacataggtgagtaggaaaaacagaatttgagaaagcgagggcatttgataccgtctgctataatatcaggcgaatgtttggtgtgaggaagttatgggatgttaaagacaatcaagcttgggtgcatgacagatttgaggagatgaacttgcatgatgatttctatgaagaccagcggatgtcaagaggtcgtggtggtcgaggtaaagcaagaggtggtggccgtggtttttccagaggtggaaagcagcgtaattaccatgaagatagcaacaacacccaaaatcgcaccccaaaggtagtgagagggcgaggacctcgacgttatgaagctgctgcaaggaacaacagagaggttgttggatcccaacgaaaacaagcagctagatttcgagaatctgctccaaatgctgtagcagccagagattccgggcaagtttcacatgcacagccagaggctgcccctcccaaaaggaatgtcatgagttcaagcctaaattctgcgtccccacctttttatccctccagtgcatctactcaagattttccggtagcagctcaaacgagggacatacaagcaggaggttctaataagatccctccatcttccatgaagatggatgataactcaaagctacaatctggttcaatggttagagggagaatagccatggattatggtgggcgtgataagttacttgctgatggtcctattaggtcatcccaaggaagggcaccaacggcgtcactgaattcaggattcacatcatcatctgttaatcctggccaatcccctattgcgagggcttcagggggcaattcaaacatcggaatatcttcaaataatcagccacaaagtcatggatcagtgatgcaccaaaagttagggcaagtgcagaatcagtctgcaacaagaatcccaactcagcaattgagtcatcggactagtaatttgtcaccagtggctcagcatctacctggtaaatcaggagaaagtggcgagaatggttcataccctactctgaatgattcaaagacagcttctgcggtggtaaaagtcaatagccaggaaactgggatgagttcatttatgtatggtggcacccaggttattggggctgcgggcctttcccagggcgatcaaaattttcctggcactccagctctgctgccagtgatgcaatttgggagtcagcatcctggtggtcttggagttcctactgttggtatggccctccctggctatgtagctcaacagcagatgggaatgggaaacaacgaaatgacatggttgccattattggctggtgcagcaggtgcttttggaggatcatatccaccctatatagcccttgatccgagcttttactctagatcttcaggacagacatcatcatcagttccatccagggaacctagtactaatagagggtcaaaatatcctcaaaatgatattgggaatgaggagcttgatgagcgccagaacaagcctagaagatactcagagatgaacttcagccagtgaagcatcttgtaaggtgaactgcatctgaataagctggttatggccctatttaggccctttgtgatctccagttctgatctggagcactttgggtggctttgatacccttaattatgttaggtcttatgcctgttcgtggagtgttatctgatgggtcacttcacagcagagcagggggtggaattcgttacttgaattatagtattgctcggttgtgctgcgtctggaaatgtcaaatttgttgctgcgtctgaagacgtggacggttgctgaagagagcttgaaaataatggtttgcgttggttgataaagtttaagagttttttttttaaagtacatcctgttagtgactccagttggtggcagtgtactctgatgtatcgggtccgcatatagtggctgctaagaccaagcggcttcattgccgaagcttgtatattttggaatccgttgagtgcggtttgtgacaattttcagcttgcatgagcgtgtccaacatggattttttttttgaaaagccaacaagaggaatccgcccgtctttttatccccgggtgatagaaatttctatttcatggtgaaaagctacgattgtcatattctgtaattgtggaatgaaccgcatgccatcttactgaagctagaaatgagtagttttaactataaaacct

SEQ ID NO: 73823 - DNA, 5632 bp, Zea Mays
ggtccctcgctgtccccagcttccccgcccctcctctagccgtcgattcgaactctctcaaaaccaaaacagcagtgcatgagaaaaaaggggaaaaatctcgacacatcgcaacgcgccgctcccaaatctaggttgcttggccatggccgacccgccggcccccgacacacagctggaacaggcgtcacccgccgctgcccccgctgaccctgccgaggacgccccggtcgagaagagccccgcggcgcccctcacgctggagccggacgccgctgcggtgtcggatggggcagcgggtgaggtggaggatgaggagtacgtgagcgaccccgacgatgaggcgcttcctacgatgcggcgccgagaggccagtgacgacgaggggtccgaggacgggaggcccacggcgcggatgggccctgaccaggacgacgacggacaaggggcccccgaggcgtacgacgacgaggtggacgaggaggataaggagtactacgacgaggaagacatgggagaggggttcgaggaggagtacgaagggcgcgtggcacttcccatggacgacggcggcggcagccaggtctcgcgcggagaggatggcgtggctatggaggaggggttgacggagggggaggccaagggcgaggggggagagaaggagcaggagccgtttgcggtgcccacttccggcgccttctacatgcacgatgaccggtttcaggaggagaaccgtggcagacgcaggtaaagggaccaaaggctattgaatgaggacaggactctaatgtataattatggataatattaggctgatattgcctggagttccgaactcgaaaactttgcataaaagttatagcttttcttgacataggtgagtaggaaaaacagaatttgagaaagcgagggcatttgataccgtctgctataatatcaggtttgcctatacaatctctgtcttttgtttcaaaaggcagaatagcaccactttgctgattgcataagcattttgtctaggttctttgctgcctagaatggtttaggccattatctctatgtgagagtgggagtgtgggacagatgggagacagaggaagatgaattgcggttgtggaacttgtatacctgataatgtcaatttaattgttttaactaataggcagatttgctgtgggacactcggaaaacatggaattggctatggcacaccaccaactccagtattggccaagtaccattatgaaaccgggtttgtttgctgtaagacaccacccccataaaatatgatttccattgggttttggagagagaggcaagggaaataacacttttgctctcatcctcttcctcttgctcatcggaggacaccggttgtaacaccccatgccccccctggcggggcgcctcagccaccttggacgccagcttctgttgttggcatggcgaggcggagcgcattggagactaccgccgaggtggagcgccttggaattctgcttgctgctactggcctcagcagggcttcttccctacgctgtgggaggagatggcgtgtgagctgtcgccgggccaggtggcggtcggtgtccaacactggtgttggcgggtgagttgggccaccttggcagacccagcatggtggaggtgctcgtgccgctcatggagggtccagatctggaggcaggccatggcttagcctgtggcggtggcacgtggagggaggtgtgaggacagtcggtggctcggtgcatggtggcactgttgtccgacgagacgggcttgagttggcgagtagggaacatgggtggccgacaccagtagtccaaggcagggcgatgtggagctcctgtctagtgtcaccgagtgggtgagggccggggcgaggaggtgagccacgagtctgcaacggcgcaagcacatgcctgagatgggggcacactgtgtgatctgtttgtcgcgttcctggagaaacagtgattctagctatgagggatgctcgacggagaagagaccggatgatcggtgaacaaccagaggttgaagaaaagggtagaaaagacattcccccaccttgaactctaataatcggtgcgatgtgttatggcaaatatacactcattcataagggtactaggcatatttcaacattggcggtgtggattggccaattccattgaagtcggatgtcctgcagcaaaatttgcctaacagtatgacatatttctagctatcatgtcattacttgagctgtctggagaaaagtacaattacctagggctgtctgactaggtgctactgtggtaggcatagcctgaacacctccctagcaccaattgctttatgaaacatttacttaactactgtttttctgagaatgaggtcaaaatggaaagtacaactaatagttaataatttgtaaatgagtagtactgctatacagcggaatcacacctatgcggcgccatggtttttctctagcctaactcctgtttgaacactgttgaggacatgggaccagaaaaaaaatcagaacagaactacagaagcactggagccggaagtcatataggagcgatgttaggcagctctccctttgtttgtaaatgtacgatgatactgtagaaagtgtgcagtgaagcctcctaacttcgaccactcatttcaggaaatcatttgaatcgatcacatgaagacatcaccattcaatttattgtggaaaagtatttttcatattgatctcatatatgaagttgtggtcaaaattttcatgttgagaatcgtctcaaagtaaaaaatgccatacacttaccaatagagaataattgcaattcggatcaacatagccttttattgcaattcggatactgtatctattagtttgatggaataaaataaagtcatttgccttttattgtggtgagttgcaacactcttctactgtttctcactttcacgcattttatggttacatggcatagctctcagttttaggctgtagttgtttaagttgctgggatggcagtggatgctaggtagtgagcattgggattgcttactgggaaagggaaatgtttgttggcacttagttttgaccttttttttggggacaacagttctacacgttcgatgttaagtacgtttcatatgaacattcgatgactatgtctgtgtgatagactgtgctggcagttgtgacatcatttgtgccttttaattgttttcatggctggaagcctggcaataggtagactttagtaataattgtccttttaattccaggaaagtataattgggccgttaatcattattccttatattgggtttactgatgaaattgtagttgtgaacagtatcacacatttctcagagggattaaggaaaaaaatgcctgcttatggcttatcatgcaatgggcaactgagcatgccccagtgtgttctaccactgcatgcggttttagtgctgtagtttctattcagtcagtttcctagtgcaataggctgtcataatgccacctgccagtggatggtaatatttaatgcttcatatttatctgcccgttcttgcctcctctaaacaggcgaatgtttggtgtgaggaagttatgggatgttaaagacaatcaagcttgggtgcatgacagatttgaggagatgaacttgcatgatgatttctatgaagaccagcggatgtcaagaggtcgtggtggtcgaggtaaagcaagaggtggtggccgtggtttttccagaggtggaaagcagcgtaattaccatgaagatagcaacaacacccaaaatcgcaccccaaaggtagtgagagggcgaggacctcgacgttatgaagctgctgcaaggaacaacagagaggttgttggatcccaacgaaaacaagcagctagatttcgagaatctgctccaaatgctgtagcagccagagattccgggcaagtttcacatgcacagccagaggctgcccctcccaaaaggaatgtcatgagttcaagcctaaattctgcgtccccacctttttatccctccagtgcatctactcaagattttccggtagcagctcaaacgagggacatacaagcaggaggttctaataagatccctccatcttccatgaagatggatgataactcaaagctacaatctggttcaatggttagagggagaatagccatggattatggtgggcgtgataagttacttgctgatggtcctattaggtcatcccaaggaagggcaccaacggcgtcactgaattcaggattcacatcatcatctgttaatcctggccaatcccctattgcgagggcttcagggggcaattcaaacatcggaatatcttcaaataatcagccacaaagtcatggatcagtgatgcaccaaaagttagggcaagtgcagaatcagtctgcaacaagaatcccaactcagcaattgagtcatcggactagtaatttgtcaccagtggctcagcatctacctggtaaatcaggagaaagtggcgagaatggttcataccctactctgaatgattcaaagacagcttctgcggtggtaaaagtcaatagccaggaaactgggatgagttcatttatgtatggtggcacccaggttattggggctgcgggcctttcccagggcgatcaaaattttcctggcactccagctctgctgccagtgatgcaatttgggagtcagcatcctggtggtcttggagttcctactgttggtatggccctccctggctatgtagctcaacagcagatgggaatgggaaacaacgaaatgacatggttgccattattggctggtgcagcaggtgcttttggaggatcatatccaccctatatagcccttgatccgagcttttactctagatcttcaggacagacatcatcatcagttccatccagggaacctagtactaatagagggtcaaaatatcctcaaaatgatattgggaatgaggagcttgatgagcgccagaacaagcctagaagatactcagagatgaacttcagccagtgaagcatcttgtaaggtgaactgcatctgaataagctggttatggtcttatgcctgttcgtggagtgttatctgatgggtcacttcacagcagagcagggggtggaattcgttacttgaattatagtattgctcggttgtgctgcgtctggaaatgtcaaatttgttgctgcgtctgaagacgtggacggttgctgaagagagcttgaaaataatggtttgcgttggttgataaagtttaagagttttttttttaaagtacatcctgttagtgactccagttggtggcagtgtactctgatgtatcgggtccgcatatagtggctgctaagaccaagcggcttcattgccgaagcttgtatattttggaatccgttgagtgcggtttgtgacaattttcagcttgcatgagcgtgtccaacatggattttttttttgaaaagccaacaagaggaatccgcccgtctttttatccccgggtgatagaaatttctatttcatggtgaaaagctacgattgtcatattctgtaattgtggaatgaaccgcatgccatcttactgaagctagaaatgagtagttttaactataaaacct

SEQ ID NO: 73824 - DNA, 2989 bp, Zea Mays
ggtccctcgctgtccccagcttccccgcccctcctctagccgtcgattcgaactctctcaaaaccaaaacagcagtgcatgagaaaaaaggggaaaaatctcgacacatcgcaacgcgccgctcccaaatctaggttgcttggccatggccgacccgccggcccccgacacacagctggaacaggcgtcacccgccgctgcccccgctgaccctgccgaggacgccccggtcgagaagagccccgcggcgcccctcacgctggagccggacgccgctgcggtgtcggatggggcagcgggtgaggtggaggatgaggagtacgtgagcgaccccgacgatgaggcgcttcctacgatgcggcgccgagaggccagtgacgacgaggggtccgaggacgggaggcccacggcgcggatgggccctgaccaggacgacgacggacaaggggcccccgaggcgtacgacgacgaggtggacgaggaggataaggagtactacgacgaggaagacatgggagaggggttcgaggaggagtacgaagggcgcgtggcacttcccatggacgacggcggcggcagccaggtctcgcgcggagaggatggcgtggctatggaggaggggttgacggagggggaggccaagggcgaggggggagagaaggagcaggagccgtttgcggtgcccacttccggcgccttctacatgcacgatgaccggtttcaggaggagaaccgtggcagacgcaggtaaagggaccaaaggctattgaatgaggacaggactctaatgtataattatggataatattaggctgatattgcctggagttccgaactcgaaaactttgcataaaagttatagcttttcttgacataggtgagtaggaaaaacagaatttgagaaagcgagggcatttgataccgtctgctataatatcaggcgaatgtttggtgtgaggaagttatgggatgttaaagacaatcaagcttgggtgcatgacagatttgaggagatgaacttgcatgatgatttctatgaagaccagcggatgtcaagaggtcgtggtggtcgaggtaaagcaagaggtggtggccgtggtttttccagaggtggaaagcagcgtaattaccatgaagatagcaacaacacccaaaatcgcaccccaaaggtagtgagagggcgaggacctcgacgttatgaagctgctgcaaggaacaacagagaggttgttggatcccaacgaaaacaagcagctagatttcgagaatctgctccaaatgctgtagcagccagagattccgggcaagtttcacatgcacagccagaggctgcccctcccaaaaggaatgtcatgagttcaagcctaaattctgcgtccccacctttttatccctccagtgcatctactcaagattttccggtagcagctcaaacgagggacatacaagcaggaggttctaataagatccctccatcttccatgaagatggatgataactcaaagctacaatctggttcaatggttagagggagaatagccatggattatggtgggcgtgataagttacttgctgatggtcctattaggtcatcccaaggaagggcaccaacggcgtcactgaattcaggattcacatcatcatctgttaatcctggccaatcccctattgcgagggcttcagggggcaattcaaacatcggaatatcttcaaataatcagccacaaagtcatggatcagtgatgcaccaaaagttagggcaagtgcagaatcagtctgcaacaagaatcccaactcagcaattgagtcatcggactagtaatttgtcaccagtggctcagcatctacctggtaaatcaggagaaagtggcgagaatggttcataccctactctgaatgattcaaagacagcttctgcggtggtaaaagtcaatagccaggaaactgggatgagttcatttatgtatggtggcacccaggttattggggctgcgggcctttcccagggcgatcaaaattttcctggcactccagctctgctgccagtgatgcaatttgggagtcagcatcctggtggtcttggagttcctactgttggtatggccctccctggctatgtagctcaacagcagatgggaatgggaaacaacgaaatgacatggttgccattattggctggtgcagcaggtgcttttggaggatcatatccaccctatatagcccttgatccgagcttttactctagatcttcaggacagacatcatcatcagttccatccagggaacctagtactaatagagggtcaaaatatcctcaaaatgatattgggaatgaggagcttgatgagcgccagaacaagcctagaagatactcagagatgaacttcagccagtgaagcatcttgtaaggtgaactgcatctgaataagctggttatggtcttatgcctgttcgtggagtgttatctgatgggtcacttcacagcagagcagggggtggaattcgttacttgaattatagtattgctcggttgtgctgcgtctggaaatgtcaaatttgttgctgcgtctgaagacgtggacggttgctgaagagagcttgaaaataatggtttgcgttggttgataaagtttaagagttttttttttaaagtacatcctgttagtgactccagttggtggcagtgtactctgatgtatcgggtccgcatatagtggctgctaagaccaagcggcttcattgccgaagcttgtatattttggaatccgttgagtgcggtttgtgacaattttcagcttgcatgagcgtgtccaacatggattttttttttgaaaagccaacaagaggaatccgcccgtctttttatccccgggtgatagaaatttctatttcatggtgaaaagctacgattgtcatattctgtaattgtggaatgaaccgcatgccatcttactgaagctagaaatgagtagttttaactataaaacct

SEQ ID NO: 73825 - DNA, 5639 bp, Zea Mays
ggtccctcgctgtccccagcttccccgcccctcctctagccgtcgattcgaactctctcaaaaccaaaacagcagtgcatgagaaaaaaggggaaaaatctcgacacatcgcaacgcgccgctcccaaatctaggttgcttggccatggccgacccgccggcccccgacacacagctggaacaggcgtcacccgccgctgcccccgctgaccctgccgaggacgccccggtcgagaagagccccgcggcgcccctcacgctggagccggacgccgctgcggtgtcggatggggcagcgggtgaggtggaggatgaggagtacgtgagcgaccccgacgatgaggcgcttcctacgatgcggcgccgagaggccagtgacgacgaggggtccgaggacgggaggcccacggcgcggatgggccctgaccaggacgacgacggacaaggggcccccgaggcgtacgacgacgaggtggacgaggaggataaggagtactacgacgaggaagacatgggagaggggttcgaggaggagtacgaagggcgcgtggcacttcccatggacgacggcggcggcagccaggtctcgcgcggagaggatggcgtggctatggaggaggggttgacggagggggaggccaagggcgaggggggagagaaggagcaggagccgtttgcggtgcccacttccggcgccttctacatgcacgatgaccggtttcaggaggagaaccgtggcagacgcaggtaaagggaccaaaggctattgaatgaggacaggactctaatgtataattatggataatattaggctgatattgcctggagttccgaactcgaaaactttgcataaaagttatagcttttcttgacataggtgagtaggaaaaacagaatttgagaaagcgagggcatttgataccgtctgctataatatcaggtttgcctatacaatctctgtcttttgtttcaaaaggcagaatagcaccactttgctgattgcataagcattttgtctaggttctttgctgcctagaatggtttaggccattatctctatgtgagagtgggagtgtgggacagatgggagacagaggaagatgaattgcggttgtggaacttgtatacctgataatgtcaatttaattgttttaactaataggcagatttgctgtgggacactcggaaaacatggaattggctatggcacaccaccaactccagtattggccaagtaccattatgaaaccgggtttgtttgctgtaagacaccacccccataaaatatgatttccattgggttttggagagagaggcaagggaaataacacttttgctctcatcctcttcctcttgctcatcggaggacaccggttgtaacaccccatgccccccctggcggggcgcctcagccaccttggacgccagcttctgttgttggcatggcgaggcggagcgcattggagactaccgccgaggtggagcgccttggaattctgcttgctgctactggcctcagcagggcttcttccctacgctgtgggaggagatggcgtgtgagctgtcgccgggccaggtggcggtcggtgtccaacactggtgttggcgggtgagttgggccaccttggcagacccagcatggtggaggtgctcgtgccgctcatggagggtccagatctggaggcaggccatggcttagcctgtggcggtggcacgtggagggaggtgtgaggacagtcggtggctcggtgcatggtggcactgttgtccgacgagacgggcttgagttggcgagtagggaacatgggtggccgacaccagtagtccaaggcagggcgatgtggagctcctgtctagtgtcaccgagtgggtgagggccggggcgaggaggtgagccacgagtctgcaacggcgcaagcacatgcctgagatgggggcacactgtgtgatctgtttgtcgcgttcctggagaaacagtgattctagctatgagggatgctcgacggagaagagaccggatgatcggtgaacaaccagaggttgaagaaaagggtagaaaagacattcccccaccttgaactctaataatcggtgcgatgtgttatggcaaatatacactcattcataagggtactaggcatatttcaacattggcggtgtggattggccaattccattgaagtcggatgtcctgcagcaaaatttgcctaacagtatgacatatttctagctatcatgtcattacttgagctgtctggagaaaagtacaattacctagggctgtctgactaggtgctactgtggtaggcatagcctgaacacctccctagcaccaattgctttatgaaacatttacttaactactgtttttctgagaatgaggtcaaaatggaaagtacaactaatagttaataatttgtaaatgagtagtactgctatacagcggaatcacacctatgcggcgccatggtttttctctagcctaactcctgtttgaacactgttgaggacatgggaccagaaaaaaaatcagaacagaactacagaagcactggagccggaagtcatataggagcgatgttaggcagctctccctttgtttgtaaatgtacgatgatactgtagaaagtgtgcagtgaagcctcctaacttcgaccactcatttcaggaaatcatttgaatcgatcacatgaagacatcaccattcaatttattgtggaaaagtatttttcatattgatctcatatatgaagttgtggtcaaaattttcatgttgagaatcgtctcaaagtaaaaaatgccatacacttaccaatagagaataattgcaattcggatcaacatagccttttattgcaattcggatactgtatctattagtttgatggaataaaataaagtcatttgccttttattgtggtgagttgcaacactcttctactgtttctcactttcacgcattttatggttacatggcatagctctcagttttaggctgtagttgtttaagttgctgggatggcagtggatgctaggtagtgagcattgggattgcttactgggaaagggaaatgtttgttggcacttagttttgaccttttttttggggacaacagttctacacgttcgatgttaagtacgtttcatatgaacattcgatgactatgtctgtgtgatagactgtgctggcagttgtgacatcatttgtgccttttaattgttttcatggctggaagcctggcaataggtagactttagtaataattgtccttttaattccaggaaagtataattgggccgttaatcattattccttatattgggtttactgatgaaattgtagttgtgaacagtatcacacatttctcagagggattaaggaaaaaaatgcctgcttatggcttatcatgcaatgggcaactgagcatgccccagtgtgttctaccactgcatgcggttttagtgctgtagtttctattcagtcagtttcctagtgcaataggctgtcataatgccacctgccagtggatggtaatatttaatgcttcatatttatctgcccgttcttgcctcctctaaacaggcgaatgtttggtgtgaggaagttatgggatgttaaagacaatcaagcttgggtgcatgacagatttgaggagatgaacttgcatgatgatttctatgaatctttattgcaggaccagcggatgtcaagaggtcgtggtggtcgaggtaaagcaagaggtggtggccgtggtttttccagaggtggaaagcagcgtaattaccatgaagatagcaacaacacccaaaatcgcaccccaaaggtagtgagagggcgaggacctcgacgttatgaagctgctgcaaggaacaacagagaggttgttggatcccaacgaaaacactagatttcgagaatctgctccaaatgctgtagcagccagagattccgggcaagtttcacatgcacagccagaggctgcccctcccaaaaggaatgtcatgagttcaagcctaaattctgcgtccccacctttttatccctccagtgcatctactcaagattttccggtagcagctcaaacgagggacatacaagcaggaggttctaataagatccctccatcttccatgaagatggatgataactcaaagctacaatctggttcaatggttagagggagaatagccatggattatggtgggcgtgataagttacttgctgatggtcctattaggtcatcccaaggaagggcaccaacggcgtcactgaattcaggattcacatcatcatctgttaatcctggccaatcccctattgcgagggcttcagggggcaattcaaacatcggaatatcttcaaataatcagccacaaagtcatggatcagtgatgcaccaaaagttagggcaagtgcagaatcagtctgcaacaagaatcccaactcagcaattgagtcatcggactagtaatttgtcaccagtggctcagcatctacctggtaaatcaggagaaagtggcgagaatggttcataccctactctgaatgattcaaagacagcttctgcggtggtaaaagtcaatagccaggaaactgggatgagttcatttatgtatggtggcacccaggttattggggctgcgggcctttcccagggcgatcaaaattttcctggcactccagctctgctgccagtgatgcaatttgggagtcagcatcctggtggtcttggagttcctactgttggtatggccctccctggctatgtagctcaacagcagatgggaatgggaaacaacgaaatgacatggttgccattattggctggtgcagcaggtgcttttggaggatcatatccaccctatatagcccttgatccgagcttttactctagatcttcaggacagacatcatcatcagttccatccagggaacctagtactaatagagggtcaaaatatcctcaaaatgatattgggaatgaggagcttgatgagcgccagaacaagcctagaagatactcagagatgaacttcagccagtgaagcatcttgtaaggtgaactgcatctgaataagctggttatggtcttatgcctgttcgtggagtgttatctgatgggtcacttcacagcagagcagggggtggaattcgttacttgaattatagtattgctcggttgtgctgcgtctggaaatgtcaaatttgttgctgcgtctgaagacgtggacggttgctgaagagagcttgaaaataatggtttgcgttggttgataaagtttaagagttttttttttaaagtacatcctgttagtgactccagttggtggcagtgtactctgatgtatcgggtccgcatatagtggctgctaagaccaagcggcttcattgccgaagcttgtatattttggaatccgttgagtgcggtttgtgacaattttcagcttgcatgagcgtgtccaacatggattttttttttgaaaagccaacaagaggaatccgcccgtctttttatccccgggtgatagaaatttctatttcatggtgaaaagctacgattgtcatattctgtaattgtggaatgaaccgcatgccatcttactgaagctagaaatgagtagttttaactataaaacct

SEQ ID NO: 73826 - DNA, 5710 bp, Zea Mays
ggtccctcgctgtccccagcttccccgcccctcctctagccgtcgattcgaactctctcaaaaccaaaacagcagtgcatgagaaaaaaggggaaaaatctcgacacatcgcaacgcgccgctcccaaatctaggttgcttggccatggccgacccgccggcccccgacacacagctggaacaggcgtcacccgccgctgcccccgctgaccctgccgaggacgccccggtcgagaagagccccgcggcgcccctcacgctggagccggacgccgctgcggtgtcggatggggcagcgggtgaggtggaggatgaggagtacgtgagcgaccccgacgatgaggcgcttcctacgatgcggcgccgagaggccagtgacgacgaggggtccgaggacgggaggcccacggcgcggatgggccctgaccaggacgacgacggacaaggggcccccgaggcgtacgacgacgaggtggacgaggaggataaggagtactacgacgaggaagacatgggagaggggttcgaggaggagtacgaagggcgcgtggcacttcccatggacgacggcggcggcagccaggtctcgcgcggagaggatggcgtggctatggaggaggggttgacggagggggaggccaagggcgaggggggagagaaggagcaggagccgtttgcggtgcccacttccggcgccttctacatgcacgatgaccggtttcaggaggagaaccgtggcagacgcaggtaaagggaccaaaggctattgaatgaggacaggactctaatgtataattatggataatattaggctgatattgcctggagttccgaactcgaaaactttgcataaaagttatagcttttcttgacataggtgagtaggaaaaacagaatttgagaaagcgagggcatttgataccgtctgctataatatcaggtttgcctatacaatctctgtcttttgtttcaaaaggcagaatagcaccactttgctgattgcataagcattttgtctaggttctttgctgcctagaatggtttaggccattatctctatgtgagagtgggagtgtgggacagatgggagacagaggaagatgaattgcggttgtggaacttgtatacctgataatgtcaatttaattgttttaactaataggcagatttgctgtgggacactcggaaaacatggaattggctatggcacaccaccaactccagtattggccaagtaccattatgaaaccgggtttgtttgctgtaagacaccacccccataaaatatgatttccattgggttttggagagagaggcaagggaaataacacttttgctctcatcctcttcctcttgctcatcggaggacaccggttgtaacaccccatgccccccctggcggggcgcctcagccaccttggacgccagcttctgttgttggcatggcgaggcggagcgcattggagactaccgccgaggtggagcgccttggaattctgcttgctgctactggcctcagcagggcttcttccctacgctgtgggaggagatggcgtgtgagctgtcgccgggccaggtggcggtcggtgtccaacactggtgttggcgggtgagttgggccaccttggcagacccagcatggtggaggtgctcgtgccgctcatggagggtccagatctggaggcaggccatggcttagcctgtggcggtggcacgtggagggaggtgtgaggacagtcggtggctcggtgcatggtggcactgttgtccgacgagacgggcttgagttggcgagtagggaacatgggtggccgacaccagtagtccaaggcagggcgatgtggagctcctgtctagtgtcaccgagtgggtgagggccggggcgaggaggtgagccacgagtctgcaacggcgcaagcacatgcctgagatgggggcacactgtgtgatctgtttgtcgcgttcctggagaaacagtgattctagctatgagggatgctcgacggagaagagaccggatgatcggtgaacaaccagaggttgaagaaaagggtagaaaagacattcccccaccttgaactctaataatcggtgcgatgtgttatggcaaatatacactcattcataagggtactaggcatatttcaacattggcggtgtggattggccaattccattgaagtcggatgtcctgcagcaaaatttgcctaacagtatgacatatttctagctatcatgtcattacttgagctgtctggagaaaagtacaattacctagggctgtctgactaggtgctactgtggtaggcatagcctgaacacctccctagcaccaattgctttatgaaacatttacttaactactgtttttctgagaatgaggtcaaaatggaaagtacaactaatagttaataatttgtaaatgagtagtactgctatacagcggaatcacacctatgcggcgccatggtttttctctagcctaactcctgtttgaacactgttgaggacatgggaccagaaaaaaaatcagaacagaactacagaagcactggagccggaagtcatataggagcgatgttaggcagctctccctttgtttgtaaatgtacgatgatactgtagaaagtgtgcagtgaagcctcctaacttcgaccactcatttcaggaaatcatttgaatcgatcacatgaagacatcaccattcaatttattgtggaaaagtatttttcatattgatctcatatatgaagttgtggtcaaaattttcatgttgagaatcgtctcaaagtaaaaaatgccatacacttaccaatagagaataattgcaattcggatcaacatagccttttattgcaattcggatactgtatctattagtttgatggaataaaataaagtcatttgccttttattgtggtgagttgcaacactcttctactgtttctcactttcacgcattttatggttacatggcatagctctcagttttaggctgtagttgtttaagttgctgggatggcagtggatgctaggtagtgagcattgggattgcttactgggaaagggaaatgtttgttggcacttagttttgaccttttttttggggacaacagttctacacgttcgatgttaagtacgtttcatatgaacattcgatgactatgtctgtgtgatagactgtgctggcagttgtgacatcatttgtgccttttaattgttttcatggctggaagcctggcaataggtagactttagtaataattgtccttttaattccaggaaagtataattgggccgttaatcattattccttatattgggtttactgatgaaattgtagttgtgaacagtatcacacatttctcagagggattaaggaaaaaaatgcctgcttatggcttatcatgcaatgggcaactgagcatgccccagtgtgttctaccactgcatgcggttttagtgctgtagtttctattcagtcagtttcctagtgcaataggctgtcataatgccacctgccagtggatggtaatatttaatgcttcatatttatctgcccgttcttgcctcctctaaacaggcgaatgtttggtgtgaggaagttatgggatgttaaagacaatcaagcttgggtgcatgacagatttgaggagatgaacttgcatgatgatttctatgaagaccagcggatgtcaagaggtcgtggtggtcgaggtaaagcaagaggtggtggccgtggtttttccagaggtggaaagcagcgtaattaccatgaagatagcaacaacacccaaaatcgcaccccaaaggtagtgagagggcgaggacctcgacgttatgaagctgctgcaaggaacaacagagaggttgttggatcccaacgaaaacaagcagctagatttcgagaatctgctccaaatgctgtagcagccagagattccgggcaagtttcacatgcacagccagaggctgcccctcccaaaaggaatgtcatgagttcaagcctaaattctgcgtccccacctttttatccctccagtgcatctactcaagattttccggtagcagctcaaacgagggacatacaagcaggaggttctaataagatccctccatcttccatgaagatggatgataactcaaagctacaatctggttcaatggttagagggagaatagccatggattatggtgggcgtgataagttacttgctgatggtcctattaggtcatcccaaggaagggcaccaacggcgtcactgaattcaggattcacatcatcatctgttaatcctggccaatcccctattgcgagggcttcagggggcaattcaaacatcggaatatcttcaaataatcagccacaaagtcatggatcagtgatgcaccaaaagttagggcaagtgcagaatcagtctgcaacaagaatcccaactcagcaattgagtcatcggactagtaatttgtcaccagtggctcagcatctacctggtaaatcaggagaaagtggcgagaatggttcataccctactctgaatgattcaaagacagcttctgcggtggtaaaagtcaatagccaggaaactgggatgagttcatttatgtatggtggcacccaggttattggggctgcgggcctttcccagggcgatcaaaattttcctggcactccagctctgctgccagtgatgcaatttgggagtcagcatcctggtggtcttggagttcctactgttggtatggccctccctggctatgtagctcaacagcagatgggaatgggaaacaacgaaatgacatggttgccattattggctggtgcagcaggtgcttttggaggatcatatccaccctatatagcccttgatccgagcttttactctagatcttcaggacagacatcatcatcagttccatccagggaacctagtactaatagagggtcaaaatatcctcaaaatgatattgggaatgaggagcttgatgagcgccagaacaagcctagaagatactcagagatgaacttcagccagtgaagcatcttgtaaggtgaactgcatctgaataagctggttatggccctatttaggccctttgtgatctccagttctgatctggagcactttgggtggctttgatacccttaattatgttaggtcttatgcctgttcgtggagtgttatctgatgggtcacttcacagcagagcagggggtggaattcgttacttgaattatagtattgctcggttgtgctgcgtctggaaatgtcaaatttgttgctgcgtctgaagacgtggacggttgctgaagagagcttgaaaataatggtttgcgttggttgataaagtttaagagttttttttttaaagtacatcctgttagtgactccagttggtggcagtgtactctgatgtatcgggtccgcatatagtggctgctaagaccaagcggcttcattgccgaagcttgtatattttggaatccgttgagtgcggtttgtgacaattttcagcttgcatgagcgtgtccaacatggattttttttttgaaaagccaacaagaggaatccgcccgtctttttatccccgggtgatagaaatttctatttcatggtgaaaagctacgattgtcatattctgtaattgtggaatgaaccgcatgccatcttactgaagctagaaatgagtagttttaactataaaacct

SEQ ID NO: 73827 - DNA, 2312 bp, Zea Mays
attgatctcatatatgaagttgtggtcaaaattttcatgttgagaatcgtctcaaagtaaaaaatgccatacacttaccaatagagaataattgcaattcggatcaacatagccttttattgcaattcggatactgtatctattagtttgatggaataaaataaagtcatttgccttttattgtggcgaatgtttggtgtgaggaagttatgggatgttaaagacaatcaagcttgggtgcatgacagatttgaggagatgaacttgcatgatgatttctatgaagaccagcggatgtcaagaggtcgtggtggtcgaggtaaagcaagaggtggtggccgtggtttttccagaggtggaaagcagcgtaattaccatgaagatagcaacaacacccaaaatcgcaccccaaaggtagtgagagggcgaggacctcgacgttatgaagctgctgcaaggaacaacagagaggttgttggatcccaacgaaaacaagcagctagatttcgagaatctgctccaaatgctgtagcagccagagattccgggcaagtttcacatgcacagccagaggctgcccctcccaaaaggaatgtcatgagttcaagcctaaattctgcgtccccacctttttatccctccagtgcatctactcaagattttccggtagcagctcaaacgagggacatacaagcaggaggttctaataagatccctccatcttccatgaagatggatgataactcaaagctacaatctggttcaatggttagagggagaatagccatggattatggtgggcgtgataagttacttgctgatggtcctattaggtcatcccaaggaagggcaccaacggcgtcactgaattcaggattcacatcatcatctgttaatcctggccaatcccctattgcgagggcttcagggggcaattcaaacatcggaatatcttcaaataatcagccacaaagtcatggatcagtgatgcaccaaaagttagggcaagtgcagaatcagtctgcaacaagaatcccaactcagcaattgagtcatcggactagtaatttgtcaccagtggctcagcatctacctggtaaatcaggagaaagtggcgagaatggttcataccctactctgaatgattcaaagacagcttctgcggtggtaaaagtcaatagccaggaaactgggatgagttcatttatgtatggtggcacccaggttattggggctgcgggcctttcccagggcgatcaaaattttcctggcactccagctctgctgccagtgatgcaatttgggagtcagcatcctggtggtcttggagttcctactgttggtatggccctccctggctatgtagctcaacagcagatgggaatgggaaacaacgaaatgacatggttgccattattggctggtgcagcaggtgcttttggaggatcatatccaccctatatagcccttgatccgagcttttactctagatcttcaggacagacatcatcatcagttccatccagggaacctagtactaatagagggtcaaaatatcctcaaaatgatattgggaatgaggagcttgatgagcgccagaacaagcctagaagatactcagagatgaacttcagccagtgaagcatcttgtaaggtgaactgcatctgaataagctggttatggccctatttaggccctttgtgatctccagttctgatctggagcactttgggtggctttgatacccttaattatgttaggtcttatgcctgttcgtggagtgttatctgatgggtcacttcacagcagagcagggggtggaattcgttacttgaattatagtattgctcggttgtgctgcgtctggaaatgtcaaatttgttgctgcgtctgaagacgtggacggttgctgaagagagcttgaaaataatggtttgcgttggttgataaagtttaagagttttttttttaaagtacatcctgttagtgactccagttggtggcagtgtactctgatgtatcgggtccgcatatagtggctgctaagaccaagcggcttcattgccgaagcttgtatattttggaatccgttgagtgcggtttgtgacaattttcagcttgcatgagcgtgtccaacatggattttttttttgaaaagccaacaagaggaatccgcccgtctttttatccccgggtgatagaaatttctatttcatggtgaaaagctacgattgtcatattctgtaattgtggaatgaaccgcatgccatcttactgaagctagaaatgagtagttttaactataaaacct

SEQ ID NO: 73828 - DNA, 2277 bp, Zea Mays
ctcatatatgaagttgtggtcaaaattttcatgttgagaatcgtctcaaagtaaaaaatgccatacacttaccaatagagaataattgcaattcggatcaacatagccttttattgcaattcggatactgtatctattagtttgatggaataaaataaagtcatttgccttttattgtggcgaatgtttggtgtgaggaagttatgggatgttaaagacaatcaagcttgggtgcatgacagatttgaggagatgaacttgcatgatgatttctatgaagaccagcggatgtcaagaggtcgtggtggtcgaggtaaagcaagaggtggtggccgtggtttttccagaggtggaaagcagcgtaattaccatgaagatagcaacaacacccaaaatcgcaccccaaaggtagtgagagggcgaggacctcgacgttatgaagctgctgcaaggaacaacagagaggttgttggatcccaacgaaaacaagcagctagatttcgagaatctgctccaaatgctgtagcagccagagattccgggcaagtttcacatgcacagccagaggctgcccctcccaaaaggaatgtcatgagttcaagcctaaattctgcgtccccacctttttatccctccagtgcatctactcaagattttccggtagcagctcaaacgagggacatacaagcaggaggttctaataagatccctccatcttccatgaagatggatgataactcaaagctacaatctggttcaatggttagagggagaatagccatggattatggtgggcgtgataagttacttgctgatggtcctattaggtcatcccaaggaagggcaccaacggcgtcactgaattcaggattcacatcatcatctgttaatcctggccaatcccctattgcgagggcttcagggggcaattcaaacatcggaatatcttcaaataatcagccacaaagtcatggatcagtgatgcaccaaaagttagggcaagtgcagaatcagtctgcaacaagaatcccaactcagcaattgagtcatcggactagtaatttgtcaccagtggctcagcatctacctggtaaatcaggagaaagtggcgagaatggttcataccctactctgaatgattcaaagacagcttctgcggtggtaaaagtcaatagccaggaaactgggatgagttcatttatgtatggtggcacccaggttattggggctgcgggcctttcccagggcgatcaaaattttcctggcactccagctctgctgccagtgatgcaatttgggagtcagcatcctggtggtcttggagttcctactgttggtatggccctccctggctatgtagctcaacagcagatgggaatgggaaacaacgaaatgacatggttgccattattggctggtgcagcaggtgcttttggaggatcatatccaccctatatagcccttgatccgagcttttactctagatcttcaggacagacatcatcatcagttccatccagggaacctagtactaatagagggtcaaaatatcctcaaaatgatattgggaatgaggagcttgatgagcgccagaacaagcctagaagatactcagagatgaacttcagccagtgaagcatcttgtaaggccctatttaggccctttgtgatctccagttctgatctggagcactttgggtggctttgatacccttaattatgttaggtcttatgcctgttcgtggagtgttatctgatgggtcacttcacagcagagcagggggtggaattcgttacttgaattatagtattgctcggttgtgctgcgtctggaaatgtcaaatttgttgctgcgtctgaagacgtggacggttgctgaagagagcttgaaaataatggtttgcgttggttgataaagtttaagagttttttttttaaagtacatcctgttagtgactccagttggtggcagtgtactctgatgtatcgggtccgcatatagtggctgctaagaccaagcggcttcattgccgaagcttgtatattttggaatccgttgagtgcggtttgtgacaattttcagcttgcatgagcgtgtccaacatggattttttttttgaaaagccaacaagaggaatccgcccgtctttttatccccgggtgatagaaatttctatttcatggtgaaaagctacgattgtcatattctgtaattgtggaatgaaccgcatgccatcttactgaagctagaaatgagtagttttaactataaaacct

SEQ ID NO: 73829 - DNA, 684 bp, Zea Mays
ctccccatgcatccccaacaagtacggctctgagccccggaagaggagacgcatcatcatcctcatggctgcaaggggtttccagctgaggctttcgcgctggtttcagcgatcccatgcaagtgtttcccagtcccaggacgaagacgaccgcggcggcgagaggaacggcttgctgaggagccacttggaccagatcgtgccagtcacggatttcgccggcacgtccaactccaaggcgttagctgttcgtgtggaaccaaagaccgtggcgctgaaggtgtccatgcactgctatggctgcgcaaggaaggtcgagaagcaagtgaagaagctgcaaggagtggtgtccatcagagtggagctggagagcaagaggctgaccgtcgtcggagacgttagccccacggacgtcctggagtgcgtgtgtaaggtgacgaagcatgcggagatcttgcaggctccctagccatgcatcggctttccagtccagtccagttatgatgatgatgcagctgtggtggatgtgcagtacatattgatgtggaggttaatttggtagcacaaaaaatatttatagtacgtgattctccttgcaagatcaggaataaatcctagatctcagtatatagtaaggccttgttcggttacaagagaataaattccaccatggatttaatccga

SEQ ID NO: 73830 - DNA, 1235 bp, Zea Mays
cagggagcaccgccacccacagcccacagccacagaccagaccacagagcaaagttggccgaagatccaaactcaagctctgtttgacccttcgccgctcacgtggatttggaaatcgtaatagctaggatcagatcatttcaacttcccgactctcgcatcccggattgttccgccgcccgcacacgtctctcctcttccgttgctctcctgcctccagctctccacggtctctgacccgcacaactgaacccgcgatggcgcgccgcctcctcgtcgccctcctcgccgcgtcgctcctgctcccgctcgcccgcccggactcctcctcgtccccgcccgccgccaccgcgtacgacgagctccgcctccggggcttcccgcgcggcctgctcccggccaacgtgcgggcctacacgctcgactccggctccggggacttcgccgtcgacctccgctccagctgccggatcgtgctgcccgcggggagctacctcgccgccttcagcgaccgactcacgggccgcctcgacgaccgccgcatctcgggcctcgacggcatccgcgtcagggccttcttccgctggtggtccatcacggggatccgcgccgatggggaccagctcgtcttcgaggtcggctccgtctccgccaagttccccgcgcgggacttcaacgccagcctcgactgccccgcccaggcggcgtcctaagtcaaggagctgtccaaaagcaaatatatatgcactggcacttcattcttggaatggttgaaattacaactgatggaagtgtcagtcaggcagtcaggctgaagcatcaagttagctcggaccaaatgtgtaaaagagtccggtatcctgtcgcatgttccatgacatgtgacattctaaaggggcagttggaagccaagcacatcaatgtttttaatttcatctgtctttattgtaattgtataagtttacaatagatgcatagaacagactggatcgataaaagcgccttcacagaccaaaaacccggtatcacggtagtggttcgtgcatttcgttagaaatgccctacgtcttattttgaaaagttgtgcttgtatatcttacttattgacaatagctgtacttataagactacttgcataaagaagaaaagtgaggtgcaaggccgaaaggcccctatgcgctaaatacaaatgcctttgtgaatagaagactttttttttgttatcatgaactttg

SEQ ID NO: 73831 - DNA, 2047 bp, Zea Mays
aatcgtaatagctaggatcagatcatttcaacttcccgactctcgcatcccggattgttccgccgcccgcacacgtctctcctcttccgttgctctcctgcctccagctctccacggtctctgacccgcacaactgaacccgcgatggcgcgccgcctcctcgtcgccctcctcgccgcgtcgctcctgctcccgctcgcccgcccggactcctcctcgtccccgcccgccgccaccgcgtacgacgagctccgcctccggggcttcccgcgcggcctgctcccggccaacgtgcgggcctacacgctcgactccggctccggggacttcgccgtcgacctccgctccagctgccggatcgtgctgcccgcggggagctacctcgccgccttcagcgaccgactcacgggccgcctcgacgaccgccgcatctcgggcctcgacggcatccgcgtcagggccttcttccgctggtggtccatcacggggatccgcgccgatggggaccagctcgtcttcgaggtcggctccgtctccgccaagttccccgcgcgggacttcaacgccagcctcgactgccccgcccaggcggcgtcctaagtcaaggaggtattaaatactacgtacgggtgctcagcgcctcagctcagtactttgggtttctaggcttagttttttattgccactgtctgcttggtttcatccacggaacctcagaaccatcggaacttttgtgcacagtgttgttgttttcacggtttactagggaaaattcgcaaggctaatcgtttagtaaacatgatacctaagctagctaacaatcgtttagtaaataggatactcattcataataccaattagcatctatcagttatactagcttcgcaatataacttgcaaggattgttggattacttacctgtttagttgtagctcaacatttcatcactttttttttgtttcagcactgtactgctgctatttttgttagatccatactgcacttgtgatggttgcagatgttttgtgtttcaaagagcaattgcttgctttctcagtttttaatagaagttaagtagcttgctctcttaggtgtcgatctttgttatcctgcatttagttgttgacaagcaaggtggcagcttatgttcctagtgcaaaaaactgcttaatgcccaatcatcatacagtatctcgctccttttggaatactaaatttgccagacctgatcgcttctgagaaaatttgctactggagataacaaatttcagttttatttcgcatttaaagatgcctattgttatagtatctgaggcagtaggacaggacatataacatacaacttccccaaccattcatgatacaatccatgaataacttgagttatctgttaggcaataagttactgctcaactaaaagaaatgaactatcaaatgcaaatgctacttaagtaccttgtacctatgctagatcctatgtcaatgacgaattgcacagtggaattgtggaataataaagatcatgtggtacagctgtccaaaagcaaatatatatgcactggcacttcattcttggaatggttgaaattacaactgatggaagtgtcagtcaggcagtcaggctgaagcatcaagttagctcggaccaaatgtgtaaaagagtccggtatcctgtcgcatgttccatgacatgtgacattctaaaggggcagttggaagccaagcacatcaatgtttttaatttcatctgtctttattgtaattgtataagtttacaatagatgcatagaacagactggatcgataaaagcgccttcacagaccaaaaacccggtatcacggtagtggttcgtgcatttcgttagaaatgccctacgtcttattttgaaaagttgtgcttgtatatcttacttattgacaatagctgtacttataagactacttgcataaagaagaaaagtgaggtgcaaggccgaaaggcccctatgcgctaaatacaaatgcctttgtgaatagaagactttttttttgttatcatgaactttg

SEQ ID NO: 73832 - DNA, 2078 bp, Zea Mays
cggagttcctcatttgatttcgctcagaaaagtagaaaacgccagccgaacacaccggtccgccgcccacgccagcgctgagctcaccaggaaaccgtcttcttccactggcgcgggctaggagcgtcgccgccgcgtcgcggttatgggtacggcggctgtcgtggaggacacgatacgcgtcgtcctcacctgcctccctgatccgcccttccgcaccaccggttcctcccgtccctaccagagtcccagcggcggcggcggcggcggggaccgcatcagccgcctctcagacgcggtgctctctaacatcgtggcgcgtctccccgccaaggacgcagcgcgcactaccgcgctctccaggcgctggcgccgcgtctgggcctccactccactcgtcctcgacgactccgacctcctcgtcttccacgacgacggcggctgctctacgcccaactgtactggctccgggtcctcgctgcggggggagtcgaggatctcgtcctcgtcaaccgcccattacccacctccgtgggcctccccatcgacgtcctccacctcgcctccctccgcaccctctacctcggtttctggtgcttcccggacaccgccaccctcccgcgaggccgcgccaccgtgttcccctgcctccaggagattggactctgcgctaccgtcatccacgccagggacatcgaccacctgctcgcctgcagccccgtgctcgagaagttcgccagcatcaccagcatctacttcacagaccctgtccggatccgcagctgcagcctccggtgccttgtcttctgggagtccctggccaatgagctcgacttggtcgtcgccccgcgcctccagcgcctaatcctgtggcagtcgcgccaatggatgatcggctccgtccatttccgcagcaggatcaggattggctccgccaccgaactcaaggtgctcggctacctggagccaagcatccaccagctcgagattggcggcaccataattgatagtggaacaaagatgaccccatctaacatggttccaagtgtcaagatcttggccttgaagatgcagttcagaatccgcaaggaagtcaagatgctgcccaccttcctgagatgctttcccaatgtggagacattgcatgttctgtcacatgaaactgatgagcaaaatggcaagttcaatttgaagttctgggaggaggttggctccatcagctgcctagagacacgcatcaccaaggtggtgtttgacaaattcagaggagagcgttgtgagctcgcgttcctcaagttcgtcctagagagggcagaatcgctgctgaagcttgtggttgtattggccaatggagatcaagcctcagtggatgagatgcttgctaagttgaagtctctgaccacggtgaaacgagccagcgatttccctactctgttggcagttgcccgtgagggtgacagcgcctggtactttgagagagcatccgatctttctgttactgaccccttcgatttgtgaagctcaaggcgatgacatattccatgaccaattctattgttctcctgagccaatcagttgttctttgtcattcagggtatacttgctaggcattccctagaatcttgtctcgtcttgtgttgactgtaaatgtgagtacagttctgagtgaatcaggagaggtatatagtttatggaaagcgctgcttgacatttcgctattgaaaatataggttctgcatagctgctcttgagttgactacctccaaatgctgtcactggctagtttctcagttgtgatgtactgcatactgggcatagttggaactggaaaatatcgtattggtaaccccagattctgtgtatcgttgatatgattctggtttatgtaatttcttgagcctgacgtttgattctactcggttaatttccattgcttgtattgaagattgtacctgcacagtgaagaaagatatgtatgtgctcgctgagaagtcagaaagtcgccgatttttttttgaagacccggaacaccgcgggcatttggattttaggctgagatggtcacagggatgatgaac

SEQ ID NO: 73833 - DNA, 2160 bp, Zea Mays
gctcagaaaagtagaaaacgccagccgaacacaccggtccgccgcccacgccagcgctgagctcaccaggaaaccgtcttcttccactggcgcgggctaggagcgtcgccgccgcgtcgcggttatgggtacggcggctgtcgtggaggacacgatacgcgtcgtcctcacctgcctccctgatccgcccttccgcaccaccggttcctcccgtccctaccagagtcccagcggcggcggcggcggcggggaccgcatcagccgcctctcagacgcggtgctctctaacatcgtggcgcgtctccccgccaaggacgcagcgcgcactaccgcgctctccaggcgctggcgccgcgtctgggcctccactccactcgtcctcgacgactccgacctcctcgtcttccacgacgacggcggctgctctacgcccaactggttagccgtcacagacaccgtgtcccacgtcctctcctcccacagggggcccatccgctttgtgcgcctcacctgctgctacatggcgctggcctcgcacaacggcgcgctccagtactggctccgggtcctcgctgcggggggagtcgaggatctcgtcctcgtcaaccgcccattacccacctccgtgggcctccccatcgacgtcctccacctcgcctccctccgcaccctctacctcggtttctggtgcttcccggacaccgccaccctcccgcgaggccgcgccaccgtgttcccctgcctccaggagattggactctgcgctaccgtcatccacgccagggacatcgaccacctgctcgcctgcagccccgtgctcgagaagttcgccagcatcaccagcatctacttcacagaccctgtccggatccgcagctgcagcctccggtgccttgtcttctgggagtccctggccaatgagctcgacttggtcgtcgccccgcgcctccagcgcctaatcctgtggcagtcgcgccaatggatgatcggctccgtccatttccgcagcaggatcaggattggctccgccaccgaactcaaggtgctcggctacctggagccaagcatccaccagctcgagattggcggcaccataattgatatgaccccatctaacatggttccaagtgtcaagatcttggccttgaagatgcagttcagaatccgcaaggaagtcaagatgctgcccaccttcctgagatgctttcccaatgtggagacattgcatgttctgtcacatgaaactgatgagcaaaatggcaagttcaatttgaagttctgggaggaggttggctccatcagctgcctagagacacgcatcaccaaggtggtgtttgacaaattcagaggagagcgttgtgagctcgcgttcctcaagttcgtcctagagagggcagaatcgctgctgaagcttgtggttgtattggccaatggagatcaagcctcagtggatgagatgcttgctaagttgaagtctctgaccacggtgaaacgagccagcgatttccctactctgttggcagttgcccgtgagggtgacagcgcctggtactttgagagagcatccgatctttctgttactgaccccttcgatttgtgaagctcaaggcgatgacatattccatgaccaattctattgttctcctgagccaatcagttgttctttgtcattcagggtatacttgctaggcattccctagaatcttgtctcgtcttgtgttgactgtaaatgtgagtacagttctgagtgaatcaggagaggtatatagtttatggaaagcgctgcttgacatttcgctattgaaaatataggttctgcatagctgctcttgagttgactacctccaaatgctgtcactggctagtttctcagttgtgatgtactgcatactgggcatagttggaactggaaaatatcgtattggtaaccccagattctgtgtatcgttgatatgattctggtttatgtaatttcttgagcctgacgtttgattctactcggttaatttccattgcttgtattgaagattgtacctgcacagtgaagaaagatatgtatgtgctcgctgagaagtcagaaagtcgccgatttttttttgaagacccggaacaccgcgggcatttggattttaggctgagatggtcacagggatgatgaac

SEQ ID NO: 73834 - DNA, 2046 bp, Zea Mays
atgggtacggcggctgtcgtggaggacacgatacgcgtcgtcctcacctgcctccctgatccgcccttccgcaccaccggttcctcccgtccctaccagagtcccagcggcggcggcggcggcggggaccgcatcagccgcctctcagacgcggtgctctctaacatcgtggcgcgtctccccgccaaggacgcagcgcgcactaccgcgctctccaggcgctggcgccgcgtctgggcctccactccactcgtcctcgacgactccgacctcctcgtcttccacgacgacggcggctgctctacgcccaactggttagccgtcacagacaccgtgtcccacgtcctctcctcccacagggggcccatccgctttgtgcgcctcacctgctgctacatggcgctggcctcgcacaacggcgcgctccagtactggctccgggtcctcgctgcggggggagtcgaggatctcgtcctcgtcaaccgcccattacccacctccgtgggcctccccatcgacgtcctccacctcgcctccctccgcaccctctacctcggtttctggtgcttcccggacaccgccaccctcccgcgaggccgcgccaccgtgttcccctgcctccaggagattggactctgcgctaccgtcatccacgccagggacatcgaccacctgctcgcctgcagccccgtgctcgagaagttcgccagcatcaccagcatctacttcacagaccctgtccggatccgcagctgcagcctccggtgccttgtcttctgggagtccctggccaatgagctcgacttggtcgtcgccccgcgcctccagcgcctaatcctgtggcagtcgcgccaatggatgatcggctccgtccatttccgcagcaggatcaggattggctccgccaccgaactcaaggtgctcggctacctggagccaagcatccaccagctcgagattggcggcaccataattgattggaacaaagatgaccccatctaacatggttccaagtgtcaagatcttggccttgaagatgcagttcagaatccgcaaggaagtcaagatgctgcccaccttcctgagatgctttcccaatgtggagacattgcatgttctgtcacatgaaactgatgagcaaaatggcaagttcaatttgaagttctgggaggaggttggctccatcagctgcctagagacacgcatcaccaaggtggtgtttgacaaattcagaggagagcgttgtgagctcgcgttcctcaagttcgtcctagagagggcagaatcgctgctgaagcttgtggttgtattggccaatggagatcaagcctcagtggatgagatgcttgctaagttgaagtctctgaccacggtgaaacgagccagcgatttccctactctgttggcagttgcccgtgagggtgacagcgcctggtactttgagagagcatccgatctttctgttactgaccccttcgatttgtgaagctcaaggcgatgacatattccatgaccaattctattgttctcctgagccaatcagttgttctttgtcattcagggtatacttgctaggcattccctagaatcttgtctcgtcttgtgttgactgtaaatgtgagtacagttctgagtgaatcaggagaggtatatagtttatggaaagcgctgcttgacatttcgctattgaaaatataggttctgcatagctgctcttgagttgactacctccaaatgctgtcactggctagtttctcagttgtgatgtactgcatactgggcatagttggaactggaaaatatcgtattggtaaccccagattctgtgtatcgttgatatgattctggtttatgtaatttcttgagcctgacgtttgattctactcggttaatttccattgcttgtattgaagattgtacctgcacagtgaagaaagatatgtatgtgctcgctgagaagtcagaaagtcgccgatttttttttgaagacccggaacaccgcgggcatttggattttaggctgagatggtcacagggatgatgaac

SEQ ID NO: 73835 - DNA, 314 bp, Zea Mays
ttttgtttttgacacgaaatgagtctgcacgcagggactgcagcacatgcaactgacaaagaattacatgcatcaaaatcaagaattgcgcgggcaaattattgaggcaatgttgcaaccatgtgcccgtctttgctggcattcagcactaggtagactcttacaagaaacaaaattgtgaaggaaggcaggtatcatcgtcgtttcgacaagcatcagctaaagtgtcgatttataaagcaggtcttaaatcactggaaatcaactagaccttatagccggttaaggtgaaacctctgccaacaatctcgcct

SEQ ID NO: 73836 - DNA, 2245 bp, Zea Mays
cgcggctgccctgccccaccaccgccccctccccctccccttcccggcctcccccatcttgctccctccctctctccatctctcattggccattccgcccgcatgaagccccaaaccctcttcggcatcgccttcgccgcagcagcgcccgcgtagcccgcccctctcgcccccgcccgctcgcccgctcctcgatcccgcccgctctgcagccgatcccgccgggagcacgaccgattacgatgaacggcgccgcggcaccggagcgctcgccctcaccctcgcccccgcctccggcccaggcccaggcccaggcgccgccgtcgccctctccggctcagccgctcgagtggaggttctcccaggtgttcggtgagcgcagcgccggggaggaagtccaggaagttgacatcatctcagcaatagagttcaataaatcaggacatcatcttgccactggagacagagcaggcatcctgaatttcgctacaaaactgagtttcaaagccacgaaccagagtttgattatcttaagagcttggaaattgaagagaagattaaccaaataaaatggtgtcaagcagcaaatggtgcattgtatcttctatccacaaatgacaaaacgataaagttttggaaggtccaagaaaagaaggtaaaaaagctatctgagatgaatttggaccgttcagctgctcctgcaaatggtagtcctggtggcgtgggatatctgagcccatctctctcaaatggttacaagccaagaaacaagtcttgccacaagttgccgaagagtatatgctcatgcacatgactaccatataaattcgatatcaaataacagtgatggtgagacatttatatcagctgatgatttgcggataaatctatggaatttggaaatcagcaatcaaagtttcaatattattgatgttaagcctacaaacatggaagatctcaccgaggtgataacatctgctgaattccatcctacccactgcaatacgttggcatatagtagctctaagggatccattcgacttgttgatctgcgccaatcagccctttgcgacactcattatcaaatctttgagcagcatgaggccccaggctcaagatcatttttcactgagattatagcctcaatttcggacataaagttttcgaaggatgggaggcatcttctcagtcgcgactacatgactctgaagctttgggatgttaagatgaattccggtccagttgcaacattccaggttcatgagtatctaaggcctaagttatgtgatttatatgaaaatgactcaatttttgacaaatttgagtgttgtcaaagtggtgatggattaagagtagcaactggttcctacagcaacattttccgtgtgtttggttgtggtactggtaacagtgaggcgacaacacttgaagcaacccgaaaccctacaaggaggcagctccagaatcccactagagctaccagatccctaagttctctgacaagggcagttagacgaggtggagaaagcactggaatagatgtcaatggaaattcttatgatctgagcacaaagttgcttcatttggcttggcacccatctgaaaatctaattgcatgtgctgcagccaatagcttgtacatgtactatgcataaacaagccaaatgaacagagcgacagtatttttggtggttgctcccggtgagaaagacacttttagctcctggtggatttgaagccaggagttgctggggagatggtgtatcttgtgccagtcagatgcagttcttttcggtgccatatagagctgtccagagtccaagaggaagtgactcgatcattcccgggaagcagctttgattctgatttatttttttgtggggaaaggcttgtctttcccccataggtccatttagatttaaagataaggccctagtttggcaatttgtagtagatgttaagaggatgacgatgatccaccgttgtattcatgttgggcatgggtttgtaacttcagggtggccgttgaagctttcgataattttatcttacatacggatcaaccttttttttttctatcttatgtgaggaaccttattttcgaggaataccaggaccttcgccatgtttaatgcgaaccctagaataggtaatatgctgtgtcattttattgtacgtacattttaaaatagctgcaagtggttctactgtttagttattataagtatattcttttagcggacgg

SEQ ID NO: 73837 - DNA, 2153 bp, Zea Mays
ttctgtgctccggagctcggtcggaggctaggggccgttaatgggcggctgctgttgtgttggttggaggatcctgcttagatcggcccaggaattagtggtggcttcggatgggatgcgttaaatctccatgatgcggaatttactgccttccagatcagtgcaaatatagtcttgactgttgacatcatctcagcaatagagttcaataaatcaggacatcatcttgccactggagacagaggtggacgagttgttttatttgaaaggaccgatgtcaaagatcatgcttgtagaaaagatgctgagaaagctgatcattctatcagcaggcatcctgaatttcgctacaaaactgagtttcaaagccacgaaccagagtttgattatcttaagagcttggaaattgaagagaagattaaccaaataaaatggtgtcaagcagcaaatggtgcattgtatcttctatccacaaatgacaaaacgataaagttttggaaggtccaagaaaagaaggtaaaaaagctatctgagatgaatttggaccgttcagctgctcctgcaaatggtagtcctggtggcgtgggatatctgagcccatctctctcaaatggcaatgctctaaaacctggcaggcttcctttgcttcgcctgcctgtggttacaagccaagaaacaagtcttgccacaagttgccgaagagtatatgctcatgcacatgactaccatataaattcgatatcaaataacagtgatggtgagacatttatatcagctgatgatttgcggataaatctatggaatttggaaatcagcaatcaaagtttcaatattattgatgttaagcctacaaacatggaagatctcaccgaggtgataacatctgctgaattccatcctacccactgcaatacgttggcatatagtagctctaagggatccattcgacttgttgatctgcgccaatcagccctttgcgacactcattatcaaatctttgagcagcatgaggccccaggctcaagatcatttttcactgagattatagcctcaatttcggacataaagttttcgaaggatgggaggcatcttctcagtcgcgactacatgactctgaagctttgggatgttaagatgaattccggtccagttgcaacattccaggttcatgagtatctaaggcctaagttatgtgatttatatgaaaatgactcaatttttgacaaatttgagtgttgtcaaagtggtgatggattaagagtagcaactggttcctacagcaacattttccgtgtgtttggttgtggtactggtaacagtgaggcgacaacacttgaagcaacccgaaaccctacaaggaggcagctccagaatcccactagagctaccagatccctaagttctctgacaagggcagttagacgaggtggagaaagcactggaatagatgtcaatggaaattcttatgatctgagcacaaagttgcttcatttggcttggcacccatctgaaaatctaattgcatgtgctgcagccaatagcttgtacatgtactatgcataaacaagccaaatgaacagagcgacagtatttttggtggttgctcccggtgagaaagacacttttagctcctggtggatttgaagccaggagttgctggggagatggtgtatcttgtgccagtcagatgcagttcttttcggtgccatatagagctgtccagagtccaagaggaagtgactcgatcattcccgggaagcagctttgattctgatttatttttttgtggggaaaggcttgtctttcccccataggtccatttagatttaaagataaggccctagtttggcaatttgtagtagatgttaagaggatgacgatgatccaccgttgtattcatgttgggcatgggtttgtaacttcagggtggccgttgaagctttcgataattttatcttacatacggatcaaccttttttttttctatcttatgtgaggaaccttattttcgaggaataccaggaccttcgccatgtttaatgcgaaccctagaataggtaatatgctgtgtcattttattgtacgtacattttaaaatagctgcaagtggttctactgtttagttattataagtatattcttttagcggacgg

SEQ ID NO: 73838 - DNA, 1386 bp, Zea Mays
ccatttccttgcaagtgaataacatattgttgaacgaagttaattcttttttgttgaaatggttgtcatgaatgaatgaagtcggttcaaacatggggtttcagaggtgataacatctgctgaattccatcctacccactgcaatacgttggcatatagtagctctaagggatccattcgacttgttgatctgcgccaatcagccctttgcgacactcattatcaaatctttgagcagcatgaggccccaggctcaagatcatttttcactgagattatagcctcaatttcggacataaagttttcgaaggatgggaggcatcttctcagtcgcgactacatgactctgaagctttgggatgttaagatgaattccggtccagttgcaacattccaggttcatgagtatctaaggcctaagttatgtgatttatatgaaaatgactcaatttttgacaaatttgagtgttgtcaaagtggtgatggattaagagtagcaactggttcctacagcaacattttccgtgtgtttggttgtggtactggtaacagtgaggcgacaacacttgaagcaacccgaaaccctacaaggaggcagctccagaatcccactagagctaccagatccctaagttctctgacaagggcagttagacgaggtggagaaagcactggaatagatgtcaatggaaattcttatgatctgagcacaaagttgcttcatttggcttggcacccatctgaaaatctaattgcatgtgctgcagccaatagcttgtacatgtactatgcataaacaagccaaatgaacagagcgacagtatttttggtggttgctcccggtgagaaagacacttttagctcctggtggatttgaagccaggagttgctggggagatggtgtatcttgtgccagtcagatgcagttcttttcggtgccatatagagctgtccagagtccaagaggaagtgactcgatcattcccgggaagcagctttgattctgatttatttttttgtggggaaaggcttgtctttcccccataggtccatttagatttaaagataaggccctagtttggcaatttgtagtagatgttaagaggatgacgatgatccaccgttgtattcatgttgggcatgggtttgtaacttcagggtggccgttgaagctttcgataattttatcttacatacggatcaaccttttttttttctatcttatgtgaggaaccttattttcgaggaataccaggaccttcgccatgtttaatgcgaaccctagaataggtaatatgctgtgtcattttattgtacgtacattttaaaatagctgcaagtggttctactgtttagttattataagtatattcttttagcggacgg

SEQ ID NO: 73839 - DNA, 2703 bp, Zea Mays
cagaatctcccgcccgctaactgaccatgcggctccattggtcagtgtctccccgcccgcctctcccatcttcaaaaaccacccacggcccgtcccctcgacctccccgaaaccccacttctcggatcgagactagggttagggtttcgtcactcccgccccgattcgaaccaatccgcctaggcccccgccgcgccatggccgccggttccattgtggtggacttcccctccatgggcgccgccctctgcttccccaacctcgaatcactcctccgagactccgcctcgggtttcctctccgccgtctccgccgccccggcccccggcgccgccgacctcaccaacttccaccgcgtcttctcgcgcgtcctcagcacctactcagacccgccgctcgaggtcgtctggttcttctccgcgctctccttccacgaccgccctgacgacctccgctcactgctccagctcctctccgccttcgccgcttcctcgcccggggccgccaagccgctcgccctcctcgcccccgtcgtctccgagcttttccactcagataagccgcgcagggagaccgaggccgtcgtcgaggctgtcctcagctacatcagcatctgcagcagtcgccccgccccctcttcgactgaaggcaccaccgccgacgctgtgaggctgctgccggctttcggcgatcttgtcaaggtgtggagcgtgcggcactcgagggagaggtgcccgttccaggtgctgttcccgctcgctggtgacgaggccaggcgggagctcatgaaggaaggctgcagcgttgactacctcgctggggtggtgctggttgaggcgttccttctcaggctctgcctcaaggtgcagaatgcaacaggggtgcctcgctctgagctgcagaaggagctcaagatctgggcagtcagctccatcccggtcttccagagccaccaattcttcggggtcctgctgaacatgctcttgaactctccgctgcctgtttactctctagtggtatgtgtttcctgactaatgagcaatttgagagcatgacacaacaagctagtattattatggattcactgcttattaacaaaattataagagtattaattaagcattcacaaggcatgtggtagttgtatggaccataaaaatattaacaaacatggcaaatagcttataaactcatttcatgaattaagaaacatgagtcatgatcatgctttttcattacctgttctgtaaactagttatttacctttgtgaaataagaaatgtgcaacttgttgccttgttcttcaactgtgcttggaatcaggaatctttcctaatttgtggaaactaaagaggagaacagaacggtatatgactattgtgtatcgcaaagctggtgttactatagcattttgctgtcatcatctgcaaggagcatgatttaagatggagttgtgtctcatctttgtgatatgcaaacagagcgctgatgatgaaatcttggtgagggatgttctatatgattctcttatcctggtggattattcattcattaacaatggtgctggagttgatctcttgcctgtatatgtgtcgagattgattatcactcttgatgctgtcaatgatgccaggaggaaaggtgatcaaggtagagcagtgtcatttattaatgccttctcaacctcaaatattcccaattttctcatcaagtgggctacttgtcaagctggctctggtgcactcagcaaaccaatttgcaatacgccccaagctattctcaagtggcttattgaccttgaagataaggggctcaaagtgtttggagattacagttcttgggttatgaggaggtttgtttgcaatgaggtcaagaatgggtatgggaacatggttcagtcagatgcagaccttttctttgttgataaacagagtggtagggaacttatggacaccaaaggcagcgaggatgatgaagctgttgaggagatggagactgcaggtaatgcttttatggctgctgcccagtcaatgaagggggtaactaacggcataaggaagaggaagagctgcggaaacgaagatgcagctgctgtgaagtttgtgaagtacaaggtagaagacagctcagtgaagggctacctgttagcagctaatggcatgagcagtggcagtgaggtagagaacccacagtcggatgatgagatggaagaatccgactgatgcatagaaaatgacagcacccactaatgcttactttggggagagttgctttgaagagtttcttggacaaccgcctttttggagtctggaccagccttgtttcagatgccgcttcttaatgatgtcgtgcagtaccctgttctaggccaataatctgcaggagggcccctctccagctaggctttttttcggatatagtggtaaccgttagctgaccctacttgacaaggagcatgtgatgtctgctatgagctgtatcgtgttctttgttattataatgctatatagtagagacctcaatgtagtcttgcttcattttgcttttgtaatagatgggtacgttgttgttatcccacggaaccagttggaactaatgaactgttaacctttcctgtgtatagcgcctttctgtgcttacttgtgtatggtgtcttttttgtgctgacgaggaagtcctgtcgatttgaagtcggtttcctct

SEQ ID NO: 73840 - DNA, 2152 bp, Zea Mays
tccattggtcagtgtctccccgcccgcctctcccatcttcaaaaaccacccacggcccgtcccctcgacctccccgaaaccccacttctcggatcgagactagggttagggtttcgtcactcccgccccgattcgaaccaatccgcctaggcccccgccgcgccatggccgccggttccattgtggtggacttcccctccatgggcgccgccctctgcttccccaacctcgaatcactcctccgagactccgcctcgggtttcctctccgccgtctccgccgccccggcccccggcgccgccgacctcaccaacttccaccgcgtcttctcgcgcgtcctcagcacctactcagacccgccgctcgaggtcgtctggttcttctccgcgctctccttccacgaccgccctgacgacctccgctcactgctccagctcctctccgccttcgccgcttcctcgcccggggccgccaagccgctcgccctcctcgcccccgtcgtctccgagcttttccactcagataagccgcgcagggagaccgaggccgtcgtcgaggctgtcctcagctacatcagcatctgcagcagtcgccccgccccctcttcgactgaaggcaccaccgccgacgctgtgaggctgctgccggctttcggcgatcttgtcaaggtgtggagcgtgcggcactcgagggagaggtgcccgttccaggtgctgttcccgctcgctggtgacgaggccaggcgggagctcatgaaggaaggctgcagcgttgactacctcgctggggtggtgctggttgaggcgttccttctcaggctctgcctcaaggtgcagaatgcaacaggggtgcctcgctctgagctgcagaaggagctcaagatctgggcagtcagctccatcccggtcttccagagccaccaattcttcgagcgctgatgatgaaatcttggtgagggatgttctatatgattctcttatcctggtggattattcattcattaacaatggtgctggagttgatctcttgcctgtatatgtgtcgagattgattatcactcttgatgctgtcaatgatgccaggaggaaaggtgatcaaggtagagcagtgtcatttattaatgccttctcaacctcaaatattcccaattttctcatcaagtgggctacttgtcaagctggctctggtgcactcagcaaaccaatttgcaatacgccccaagctattctcaagtggcttattgaccttgaagataaggggctcaaagtgtttggagattacagttcttgggttatgaggaggtttgtttgcaatgaggtcaagaatgggtatgggaacatggttcagtcagatgcagaccttttctttgttgataaacagagtggtagggaacttatggacaccaaaggcagcgaggatgatgaagctgttgaggagatggagactgcaggtaatgcttttatggctgctgcccagtcaatgaagggggtaactaacggcataaggaagaggaagagctgcggaaacgaagatgcagctgctgtgaagtttgtgaagtacaaggtagaagacagctcagtgaagggctacctgttagcagctaatggcatgagcagtggcagtgaggtagagaacccacagtcggatgatgagatggaagaatccgactgatgcatagaaaatgacagcacccactaatgcttactttggggagagttgctttgaagagtttcttggacaaccgcctttttggagtctggaccagccttgtttcagatgccgcttcttaatgatgtcgtgcagtaccctgttctaggccaataatctgcaggagggcccctctccagctaggctttttttcggatatagtggtaaccgttagctgaccctacttgacaaggagcatgtgatgtctgctatgagctgtatcgtgttctttgttattataatgctatatagtagagacctcaatgtagtcttgcttcattttgcttttgtaatagatgggtacgttgttgttatcccacggaaccagttggaactaatgaactgttaacctttcctgtgtatagcgcctttctgtgcttacttgtgtatggtgtcttttttgtgctgacgaggaagtcctgtcgatttgaagtcggtttcctct

SEQ ID NO: 73841 - DNA, 2148 bp, Zea Mays
tccattggtcagtgtctccccgcccgcctctcccatcttcaaaaaccacccacggcccgtcccctcgacctccccgaaaccccacttctcggatcgagactagggttagggtttcgtcactcccgccccgattcgaaccaatccgcctaggcccccgccgcgccatggccgccggttccattgtggtggacttcccctccatgggcgccgccctctgcttccccaacctcgaatcactcctccgagactccgcctcgggtttcctctccgccgtctccgccgccccggcccccggcgccgccgacctcaccaacttccaccgcgtcttctcgcgcgtcctcagcacctactcagacccgccgctcgaggtcgtctggttcttctccgcgctctccttccacgaccgccctgacgacctccgctcactgctccagctcctctccgccttcgccgcttcctcgcccggggccgccaagccgctcgccctcctcgcccccgtcgtctccgagcttttccactcagataagccgcgcagggagaccgaggccgtcgtcgaggctgtcctcagctacatcagcatctgcagcagtcgccccgccccctcttcgactgaaggcaccaccgccgacgctgtgaggctgctgccggctttcggcgatcttgtcaaggtgtggagcgtgcggcactcgagggagaggtgcccgttccaggtgctgttcccgctcgctggtgacgaggccaggcgggagctcatgaaggaaggctgcagcgttgactacctcgctggggtggtgctggttgaggcgttccttctcaggctctgcctcaaggtgcagaatgcaacaggggtgcctcgctctgagctgcagaaggagctcaagatctgggcagtcagctccatcccggtcttccagagccaccaattcttcggggtcctgctgaacatgctcttgaactctccgctgcctgtttactctctagtggaggaaaggtgatcaaggtagagcagtgtcatttattaatgccttctcaacctcaaatattcccaattttctcatcaagtgggctacttgtcaagctggctctggtgcactcagcaaaccaatttgcaatacgccccaagctattctcagtatgtgcaaatatggaacaacatcattggttttcatttatcatgtcttgtggactgtttactcaagcagaaatgtatatgttttcttttcacagagtggcttattgaccttgaagataaggggctcaaagtgtttggagattacagttcttgggttatgaggaggtttgtttgcaatgaggtcaagaatgggtatgggaacatggttcagtcagatgcagaccttttctttgttgataaacagagtggtagggaacttatggacaccaaaggcagcgaggatgatgaagctgttgaggagatggagactgcaggtaatgcttttatggctgctgcccagtcaatgaagggggtaactaacggcataaggaagaggaagagctgcggaaacgaagatgcagctgctgtgaagtttgtgaagtacaaggtagaagacagctcagtgaagggctacctgttagcagctaatggcatgagcagtggcagtgaggtagagaacccacagtcggatgatgagatggaagaatccgactgatgcatagaaaatgacagcacccactaatgcttactttggggagagttgctttgaagagtttcttggacaaccgcctttttggagtctggaccagccttgtttcagatgccgcttcttaatgatgtcgtgcagtaccctgttctaggccaataatctgcaggagggcccctctccagctaggctttttttcggatatagtggtaaccgttagctgaccctacttgacaaggagcatgtgatgtctgctatgagctgtatcgtgttctttgttattataatgctatatagtagagacctcaatgtagtcttgcttcattttgcttttgtaatagatgggtacgttgttgttatcccacggaaccagttggaactaatgaactgttaacctttcctgtgtatagcgcctttctgtgcttacttgtgtatggtgtcttttttgtgctgacgaggaagtcctgtcgatttgaagtcggtttcctct

SEQ ID NO: 73842 - DNA, 2688 bp, Zea Mays
tccattggtcagtgtctccccgcccgcctctcccatcttcaaaaaccacccacggcccgtcccctcgacctccccgaaaccccacttctcggatcgagactagggttagggtttcgtcactcccgccccgattcgaaccaatccgcctaggcccccgccgcgccatggccgccggttccattgtggtggacttcccctccatgggcgccgccctctgcttccccaacctcgaatcactcctccgagactccgcctcgggtttcctctccgccgtctccgccgccccggcccccggcgccgccgacctcaccaacttccaccgcgtcttctcgcgcgtcctcagcacctactcagacccgccgctcgaggtcgtctggttcttctccgcgctctccttccacgaccgccctgacgacctccgctcactgctccagctcctctccgccttcgccgcttcctcgcccggggccgccaagccgctcgccctcctcgcccccgtcgtctccgagcttttccactcagataagccgcgcagggagaccgaggccgtcgtcgaggctgtcctcagctacatcagcatctgcagcagtcgccccgccccctcttcgactgaaggcaccaccgccgacgctgtgaggctgctgccggctttcggcgatcttgtcaaggtgtggagcgtgcggcactcgagggagaggtgcccgttccaggtgctgttcccgctcgctggtgacgaggccaggcgggagctcatgaaggaaggctgcagcgttgactacctcgctggggtggtgctggttgaggcgttccttctcaggctctgcctcaaggtgcagaatgcaacaggggtgcctcgctctgagctgcagaaggagctcaagatctgggcagtcagctccatcccggtcttccagagccaccaattcttcggggtcctgctgaacatgctcttgaactctccgctgcctgtttactctctagtggtatgtgtttcctgactaatgagcaatttgagagcatgacacaacaagctagtattattatggattcactgcttattaacaaaattataagagtattaattaagcattcacaaggcatgtggtagttgtatggaccataaaaatattaacaaacatggcaaatagcttataaactcatttcatgaattaagaaacatgagtcatgatcatgctttttcattacctgttctgtaaactagttatttacctttgtgaaataagaaatgtgcaacttgttgccttgttcttcaactgtgcttggaatcaggaatctttcctaatttgtggaaactaaagaggagaacagaacggtatatgactattgtgtatcgcaaagctggtgttactatagcattttgctgtcatcatctgcaaggagcatgatttaagatggagttgtgtctcatctttgtgatatgcaaacaggttgaagcctgaactgtgagcgctgatgatgaaatcttggtgagggatgttctatatgattctcttatcctggtggattattcattcattaacaatggtgctggagttgatctcttgcctgtatatgtgtcgagattgattatcactcttgatgctgtcaatgatgccaggaggaaaggtgatcaaggtagagcagtgtcatttattaatgccttctcaacctcaaatattcccaattttctcatcaagtgggctacttgtcaagctggctctggtgcactcagcaaaccaatttgcaatacgccccaagctattctcaagtggcttattgaccttgaagataaggggctcaaagtgtttggagattacagttcttgggttatgaggaggtttgtttgcaatgaggtcaagaatgggtatgggaacatggttcagtcagatgcagaccttttctttgttgataaacagagtggtagggaacttatggacaccaaaggcagcgaggatgatgaagctgttgaggagatggagactgcaggtaatgcttttatggctgctgcccagtcaatgaagggggtaactaacggcataaggaagaggaagagctgcggaaacgaagatgcagctgctgtgaagtttgtgaagtacaaggtagaagacagctcagtgaagggctacctgttagcagctaatggcatgagcagtggcagtgaggtagagaacccacagtcggatgatgagatggaagaatccgactgatgcatagaaaatgacagcacccactaatgcttactttggggagagttgctttgaagagtttcttggacaaccgcctttttggagtctggaccagccttgtttcagatgccgcttcttaatgatgtcgtgcagtaccctgttctaggccaataatctgcaggagggcccctctccagctaggctttttttcggatatagtggtaaccgttagctgaccctacttgacaaggagcatgtgatgtctgctatgagctgtatcgtgttctttgttattataatgctatatagtagagacctcaatgtagtcttgcttcattttgcttttgtaatagatgggtacgttgttgttatcccacggaaccagttggaactaatgaactgttaacctttcctgtgtatagcgcctttctgtgcttacttgtgtatggtgtcttttttgtgctgacgaggaagtcctgtcgatttgaagtcggtttcctct

SEQ ID NO: 73843 - DNA, 2685 bp, Zea Mays
tccattggtcagtgtctccccgcccgcctctcccatcttcaaaaaccacccacggcccgtcccctcgacctccccgaaaccccacttctcggatcgagactagggttagggtttcgtcactcccgccccgattcgaaccaatccgcctaggcccccgccgcgccatggccgccggttccattgtggtggacttcccctccatgggcgccgccctctgcttccccaacctcgaatcactcctccgagactccgcctcgggtttcctctccgccgtctccgccgccccggcccccggcgccgccgacctcaccaacttccaccgcgtcttctcgcgcgtcctcagcacctactcagacccgccgctcgaggtcgtctggttcttctccgcgctctccttccacgaccgccctgacgacctccgctcactgctccagctcctctccgccttcgccgcttcctcgcccggggccgccaagccgctcgccctcctcgcccccgtcgtctccgagcttttccactcagataagccgcgcagggagaccgaggccgtcgtcgaggctgtcctcagctacatcagcatctgcagcagtcgccccgccccctcttcgactgaaggcaccaccgccgacgctgtgaggctgctgccggctttcggcgatcttgtcaaggtgtggagcgtgcggcactcgagggagaggtgcccgttccaggtgctgttcccgctcgctggtgacgaggccaggcgggagctcatgaaggaaggctgcagcgttgactacctcgctggggtggtgctggttgaggcgttccttctcaggctctgcctcaaggtgcagaatgcaacaggggtgcctcgctctgagctgcagaaggagctcaagatctgggcagtcagctccatcccggtcttccagagccaccaattcttcggggtcctgctgaacatgctcttgaactctccgctgcctgtttactctctagtggaatctttcctaatttgtggaaactaaagaggagaacagaacggtatatgactattgtgtatcgcaaagctggtgttactatagcattttgctgtcatcatctgcaaggagcatgatttaagatggagttgtgtctcatctttgtgatatgcaaacaggttgaagcctgaactgtggtttgtcctagtatacccttttgtttcggatcatgattatgccttttttatgcggaaatggcaaaataggggtttatgtacaattttacttggttacgtatttgatcactcctataaagttgccagactggttgatttttccgagtagatggctacttcaattttcactgtttagaatctaaaagtatcatatgtcagataccagaccaggagtaacgcctttattgactgagttttgtcagtggcagtttcagttttcttgactcatgtaatttgtgttgtgtttggtttcttggtgactcagagcgctgatgatgaaatcttggtgagggatgttctatatgattctcttatcctggtggattattcattcattaacaatggtgctggagttgatctcttgcctgtatatgtgtcgagattgattatcactcttgatgctgtcaatgatgccaggaggaaaggtgatcaaggtagagcagtgtcatttattaatgccttctcaacctcaaatattcccaattttctcatcaagtgggctacttgtcaagctggctctggtgcactcagcaaaccaatttgcaatacgccccaagctattctcaagtggcttattgaccttgaagataaggggctcaaagtgtttggagattacagttcttgggttatgaggaggtttgtttgcaatgaggtcaagaatgggtatgggaacatggttcagtcagatgcagaccttttctttgttgataaacagagtggtagggaacttatggacaccaaaggcagcgaggatgatgaagctgttgaggagatggagactgcaggtaatgcttttatggctgctgcccagtcaatgaagggggtaactaacggcataaggaagaggaagagctgcggaaacgaagatgcagctgctgtgaagtttgtgaagtacaaggtagaagacagctcagtgaagggctacctgttagcagctaatggcatgagcagtggcagtgaggtagagaacccacagtcggatgatgagatggaagaatccgactgatgcatagaaaatgacagcacccactaatgcttactttggggagagttgctttgaagagtttcttggacaaccgcctttttggagtctggaccagccttgtttcagatgccgcttcttaatgatgtcgtgcagtaccctgttctaggccaataatctgcaggagggcccctctccagctaggctttttttcggatatagtggtaaccgttagctgaccctacttgacaaggagcatgtgatgtctgctatgagctgtatcgtgttctttgttattataatgctatatagtagagacctcaatgtagtcttgcttcattttgcttttgtaatagatgggtacgttgttgttatcccacggaaccagttggaactaatgaactgttaacctttcctgtgtatagcgcctttctgtgcttacttgtgtatggtgtcttttttgtgctgacgaggaagtcctgtcgatttgaagtcggtttcctct

SEQ ID NO: 73844 - DNA, 976 bp, Zea Mays
cccatgtcgatccgcgccaacgcccacgcgactactccgaggggttccgccgccggccctgcaagtctgcgctacctgtgccgcgcgccgccacttgcgtgcgggctgtagccggagccggagaaattccttcaccgatcaccgcttcacgacacgacgcactgctcggcatttgcttcgagtgcggccgggccgcctggccgacgaccgggaggcgtttgatggaatgccgcacggggacgtgttcgcacggaccgccgtgatgtaaggcctgtacggtggtggtgttggacctggagtcatcatgtcttcacgagtcaggtgcatcgtctcgtgtgttaagcctgcagcagcgttttgggtgacccatgtatgccttggctcgtcccgaatgctgtagggacttgtgaagtggacactgatgaaagaacgactgccagccgttgccaacagatgcatgcagtgatgcatcatggaatgcccctgctcaatgtcaatggggctggaagtggaaactgggaaaaactgacgctgacgggagttagatgcttgattgaagcacatcatggtcatggtaatgtcacgctggaagtggaaggaggcggttaacgcatcattttcatgttcgttttcactttgcatgtggaatccggtgaagcaaagacgtgctggagtccgccgcttttgcaataagttcttcgatgcgaaatttggtgccgtccaagccttcaagtgatgtcggtaccagacttctgaaatatatctgctagatcatgggggtaaagaaggaactatttgttcagctggattgagactaacggtcagaccagaagaaagctccagatatatgggtagtcttgtgtaccggtgagaaaagagcaaagattgaggacatatcatgttgaatggggggctctatgaaaattatcaggcagttatgctgtattgcgacagagttgatcagtaatcagtgtgc

SEQ ID NO: 73845 - DNA, 1446 bp, Zea Mays
cccatgtcgatccgcgccaacgcccacgcgactactccgaggggttccgccgccggccctgcaagtctgcgctacctgtgccgcgcgccgccacttgcgtgcgggctgtagccggagccggagaaattccttcaccgatcaccgcttcacgacacgacgcactgctcggcatttgcttcgagtgcggccgggccgcctggccgacgaccgggaggcgtttgatggaatgccgcacggggacgtgttcgcacggaccgccgtgatgtaaggcctgtacggtggtggtgttggacctggagtcatcatgtcttcacgagtcaggtgcatcgtctcgtgtgttaagcctgcagcagcgttttgggtgacccatgtatgccttggctcgtcccgaatgctgtagggacttgtgaagtggacactgatgaaagaacgactgccagccgttgccaacagatgcatgcagtgatgcatcatggaatgcccctgctcaatgtcaatggggctggaagtggaaactgggaaaaactgacgctgacgggagttagatgcttgattgaagcacatcatggtcatggtaatgtcacgctggaagtggaaggaggcggttaacgcatcattttcatgttcgttttcactttgcatgtggaatccggtgaagcaaagacgtgctggagtccgccgcttttgcaataagttcttcgatgcgaaatttggtgccgtccaagccttcaaggtgcaacattcttcatcttacgcagaccgacattcccacactttatgttggaagatactgtgaggaaggcttcaagagttttcaactttcaagcagcctatttctgtatccaacaaatcatagacaccagggaagaaacccagtaggatatcttctataggttttctttcagcttgtagtcgtgtagactactctatgaatgaactactttatacagttattactagtagtgtcttatggaattacctagttgatgttctgatgaaggctggaaaacttgtttaggctgaacctatgatcaggtgtcattgattccagatgcatatggatcacaattcttggggcttgcagggtacatggaaacattgagataactgagagagcagcaagcaaattgtttgcgctagttcatgcagcgtaatttcttgcaaatcgctgtcacacttatttgctgattttacaagatgcagtgatgtcggtaccagacttctgaaatatatctgctagatcatgggggtaaagaaggaactatttgttcagctggattgagactaacggtcagaccagaagaaagctccagatatatgggtagtcttgtgtaccggtgagaaaagagcaaagattgaggacatatcatgttgaatggggggctctatgaaaattatcaggcagttatgctgtattgcgacagagttgatcagtaatcagtgtgc

SEQ ID NO: 73846 - DNA, 975 bp, Zea Mays
aagcagctgctgtgttctgttaatggcacagccatcacacgcacgcatacacagcacagagtgaggtaagcatccgaaaaaagctgtgatctgatcgacatggccgccgccaccatggctctcacctcccgcgcgctcgtcggcaagccggcgaccagcaccagggacgtcttcggcgaggggcgcatcaccatgcgcaagactgctggcaagcccaagccagcggcgtccggcagcccctggtacggggccgaccgcgtcctgtacctgggcccgctgtccggccagcccccaagctacctgaccggcgagttccccggcgactacggctgggacaccgcggggctgtccgccgacccggagactttcgccaagaaccgcgagctggaggtgatccactgccgctgggccatgctgggcgcgctcgggtgcgtgttcccggagctgctcgcccgcaacggcgtcaagttcggcgaggccgtgtggttcaaggccgggtcccagatcttcagcgagggcgggcttgactacctcggcaacccgagcctgatccacgcgcagagcatcctggccatctgggcgtgccaggtggtgctcatgggcgccgtcgaggggtaccgcatcgccggtggcccgctcggggaggtggtcgacccgctgtaccccggcggcagcgttcgcggagctcaaggtcaaggagatcaagaacggccgcctcgccatgttctccatgttcggcttcttcgtgcaggccatcgtcaccggcaagggtcccgttgagaacctcgccgaccacctcgctgaccctgtcaacaacaacgcctgggcctacgctaccaacttcgtccccggcaagtgagcgagggcatatacatacttgtatgcgtgtaccgggcgttttaaaattttgcattcttcattggtttttctttgcccaacacacacttttcttttacccttctcccaatatttctc

SEQ ID NO: 73847 - DNA, 2139 bp, Zea Mays
ggtaattcttcggttgaaagggtcgaaggcgatcggggctgcggttgaaggtcgtggaagtcaggaagtgggaagtagtagctgagggagccagaggttcgcgcggagcaatggagctctttaatagcttcggcgcattcaccgctttaatggccacttcttccaacgcctctgtcccggcttccacgcgttctcagtgagggctagggtttgcccgcgccgcgtcgctcggcaaggaggaggacagggtgcgctgccgtcggcggcggaggcgcggagctcgttcgtcgccgtcgcgcccccctggcatcgctggttgtctagaggaagaagatgattgtgggctcttcccagcagcagctgctgctgcagaggaaggggaagcccgtggctggcaagggagcggcctccatgaccgtgaaggcagagaaggtggtggtcgcggtaagggcagccacgagggagatctccaagacagccgtcatctgggcgctcacgcatgtcgtgcagcccggcggaagcatcatactcctcgtcgtcatcccggcacagagctctggcagaaaattctggggttttccactgtttgccggagactgtgcaagtggccataagtctatggtggatcagaaatgtgatttatcagagttgtgttctcaaatgttgaagaaattggatgtgtatgatattgacatgataaatgtaatgtataagcttgtttccggctctccttctggtgttgttgctgctgagtgtaagcaagcacaagcaagctgggttgtgctagacaaggatttgaagcacgaggagaagcgttgtgtggaggagcttcagtgcaacattgttgttatgaagcgttctcagcctaaagtccttcggcttaatcttgtgggatctcctgataaagagtctaaagcaacatgtgcagttccacctgtgttagattgttctagtggtaaaactgcaactgatgttaaggaggcacgaagttcaattcgaggacctgctgtaaccccaaatagcagcccagacctggatacacctttcagaagtactgaagcgggaacttcctctgtctcaagttcagaccctggggcatctccattttctgcttctgaaataaatggttctctgaagaaagaggtactagcaacaaaggataaaattcagcattcagatgtcaatatttctgattcggacagtgaaacattgagccctccagcaaatttctcttttcagccatggatgtctgatattctacagggatcagcatcctcaaggtcgcttggaaaagttccacggaaaactcgtactgcaactgcagatgttttgttggaaaagatttccaagctggatctcctgaatgaaattagtgctatgagaagcaggtcagacttaaacttccgcggagatgtcagggatgctgtctcattggcaaggaatgcacctcctggaccacctccactttgttcaatatgtcagcacaaggcacctgttttcggaaagccacctcggtggtttagttatgctgaactggagcttgcaactggtggtttctcccaagcaaatttcttagctgaaggtggatttggttctgttcatcaaggtgtccttcctgatgggcaggctatcgctgttaagcaacacaagcttgctagttctcagggtgatgttgaattctgctcagaggtggaagttcttagttgtgcacaacatcgaaatgttgtaatgctgattggtttttgtgttgaggacagaaggcgtttattggtttacgagtacatctgcaatagatctttggactcacatctctatggtcgtaatagagaaacattggagtggactgcacggcataagattgcagttggtgctgctcgtgggctgcggtacctccacgaggaatgtagggttggctgcataatccatcgtgacatgagaccaaacaacatccttgtcacacatgatttcgagccactggtacagtcctactttgctgattgtggtgtaaagttgactatttgttcttgtgcatttgacattaggcacctttccatataggttaaagtttttgtatctgatgcaatcatgaggcaattattcttcgtatttgactggtagtagactaatgttgcaataaac

SEQ ID NO: 73848 - DNA, 1955 bp, Zea Mays
ggtggaaaaggctgcctccttttctaactcaatcatctttacctgtcgtgttgctcgcctttttggttcaactccgcctgccaagcaggttcggcgtccaactctagtggcaactaccagtggcatcgctggttgtctagaggaagaagatgattgtgggctcttcccagcagcagctgctgctgcagaggaaggggaagcccgtggctggcaagggagcggcctccatgaccgtgaaggcagagaaggtggtggtcgcggtaagggcagccacgagggagatctccaagacagccgtcatctgggcgctcacgcatgtcgtgcagcccggcggaagcatcatactcctcgtcgtcatcccggcacagagctctggcagaaaattctggggttttccactgtttgccggagactgtgcaagtggccataagtctatggtggatcagaaatgtgatttatcagagttgtgttctcaaatgttgaagaaattggatgtgtatgatattgacatgataaatgtaatgtataagcttgtttccggctctccttctggtgttgttgctgctgagtgtaagcaagcacaagcaagctgggttgtgctagacaaggatttgaagcacgaggagaagcgttgtgtggaggagcttcagtgcaacattgttgttatgaagcgttctcagcctaaagtccttcggcttaatcttgtgggatctcctgataaagagtctaaagcaacatgtgcagttccacctgtgttagattgttctagtggtaaaactgcaactgatgttaaggaggcacgaagttcaattcgaggacctgctgtaaccccaaatagcagcccagacctggatacacctttcagaagtactgaagcgggaacttcctctgtctcaagttcagaccctggggcatctccattttctgcttctgaaataaatggttctctgaagaaagaggtactagcaacaaaggataaaattcagcattcagatgtcaatatttctgattcggacagtgaaacattgagccctccagcaaatttctcttttcagccatggatgtctgatattctacagggatcagcatcctcaaggtcgcttggaaaagttccacggaaaactcgtactgcaactgcagatgttttgttggaaaagatttccaagctggatctcctgaatgaaattagtgctatgagaagcaggtcagacttaaacttccgcggagatgtcagggatgctgtctcattggcaaggaatgcacctcctggaccacctccactttgttcaatatgtcagcacaaggcacctgttttcggaaagccacctcggtggtttagttatgctgaactggagcttgcaactggtggtttctcccaagcaaatttcttagctgaaggtggatttggttctgttcatcaaggtgtccttcctgatgggcaggctatcgctgttaagcaacacaagcttgctagttctcagggtgatgttgaattctgctcagaggtggaagttcttagttgtgcacaacatcgaaatgttgtaatgctgattggtttttgtgttgaggacagaaggcgtttattggtttacgagtacatctgcaatagatctttggactcacatctctatggtcgtaatagagaaacattggagtggactgcacggcataagattgcagttggtgctgctcgtgggctgcggtacctccacgaggaatgtagggttggctgcataatccatcgtgacatgagaccaaacaacatccttgtcacacatgatttcgagccactggtacagtcctactttgctgattgtggtgtaaagttgactatttgttcttgtgcatttgacattaggcacctttccatataggttaaagtttttgtatctgatgcaatcatgaggcaattattcttcgtatttgactggtagtagactaatgttgcaataaac

SEQ ID NO: 73849 - DNA, 2166 bp, Zea Mays
ggtggaaaaggctgcctccttttctaactcaatcatctttacctgtcgtgttgctcgcctttttggttcaactccgcctgccaagcaggttcggcgtccaactctagtggcaactaccagtggcatcgctggttgtctagaggaagaagatgattgtgggctcttcccagcagcagctgctgctgcagaggaaggggaagcccgtggctggcaagggagcggcctccatgaccgtgaaggcagagaaggtggtggtcgcggtaagggcagccacgagggagatctccaagacagccgtcatctgggcgctcacgcatgtcgtgcagcccggcggaagcatcatactcctcgtcgtcatcccggcacagagctctggcagaaaattctggggttttccactgtttgccggagactgtgcaagtggccataagtctatggtggatcagaaatgtgatttatcagagttgtgttctcaaatgttgaagaaattggatgtgtatgatattgacatgataaatgtaatgtataagcttgtttccggctctccttctggtgttgttgctgctgagtgtaagcaagcacaagcaagctgggttgtgctagacaaggatttgaagcacgaggagaagcgttgtgtggaggagcttcagtgcaacattgttgttatgaagcgttctcagcctaaagtccttcggcttaatcttgtgggatctcctgataaagagtctaaagcaacatgtgcagttccacctgtgttagattgttctagtggtaaaactgcaactgatgttaaggaggcacgaagttcaattcgaggacctgctgtaaccccaaatagcagcccagacctggatacacctttcagaagtactgaagcgggaacttcctctgtctcaagttcagaccctggggcatctccattttctgcttctgaaataaatggttctctgaagaaagaggtactagcaacaaaggataaaattcagcattcagatgtcaatatttctgattcggacagtgaaacattgagccctccagcaaatttctcttttcagccatggatgtctgatattctacagggatcagcatcctcaaggtcgcttggaaaagttccacggaaaactcgtactgcaactgcagatgttttgttggaaaagatttccaagctggatctcctgaatgaaattagtgctatgagaagcaggtcagacttaaacttccgcggagatgtcagggatgctgtctcattggcaaggaatgcacctcctggaccacctccactttgttcaatatgtcagcacaaggcacctgttttcggaaagccacctcggtggtttagttatgctgaactggagcttgcaactggtggtttctcccaagcaaatttcttagctgaaggtggatttggttctgttcatcaaggtgtccttcctgatgggcaggctatcgctgttaagcaacacaagcttgctagttctcagggtgatgttgaattctgctcagaggtggaagttcttagttgtgcacaacatcgaaatgttgtaatgctgattggtttttgtgttgaggacagaaggcgtttattggtttacgagtacatctgcaatagatctttggactcacatctctatggtaagattgttttctcggtagcacttttgtacatgaaaccattagtttggttgtggtacttgctgtctccaagttcatgatgcacctaacttttgtgtttctgattcttctcccctctctgtttcactttttttttgtgctaagagtcctgcaagcctagtgatgttgacatatatttgtcttgtaaagctattcttgaaatatcattcaggtcgtaatagagaaacattggagtggactgcacggcataagattgcagttggtgctgctcgtgggctgcggtacctccacgaggaatgtagggttggctgcataatccatcgtgacatgagaccaaacaacatccttgtcacacatgatttcgagccactggtacagtcctactttgctgattgtggtgtaaagttgactatttgttcttgtgcatttgacattaggcacctttccatataggttaaagtttttgtatctgatgcaatcatgaggcaattattcttcgtatttgactggtagtagactaatgttgcaataaac

SEQ ID NO: 73850 - DNA, 1018 bp, Zea Mays
gcaagagatcgctcaaatcctgcatggcgctctacccaagttccgcgctgtaataaaaacagcaggcctgaagcgcgtctggctgacaggcggcaggcaggcccaggcagagggcctctgtctgtgcacctgctgctgcaaacggcgagaagatgctggcgcttgcgttgggcccggtccgagagcccgatggacgacgggacggcgacggcgacggctgctgctccggccggctgtttctgctagagcgctcgccccgccgcaagccctcgcgcgacacgtccagcccggcgtccgcgtcgcgtggacacgtcctgatgcatgtcagcggctgccagagcagcgctcatcattgcatgcgttcctgtgcgtgcgtacaatggcccgggggccaccgtacgtacgccggcttgtagcaactagcaactcgtggagttctccggccagctactgtggctggcgactggcaaggctgcgactgcgagcaagatgccactgtgctgcggcatggtggtccgttcacggtggcgcaggcaggcaggcaagcaagggcaatcatcgttttcccggttcacggaggagcagggtttaccataccagggctgtctgttgacactgtgctcgcaaagccacaactggccggaccgtggtccacccgtacgtccccggctcctcgcccgtggtggggatgtgctactgctgtggctgtgataactgataagacgacgcaacgcaatgcaagaaggtagaaccgtagaagtaggactgaccaagtctcctctattggatgaggccgctgatcatagtaccaacgattttttgtactactgatgccatgtttggtttcaattagtcctaggactaaattttagtcctaggactaaactttagtccctacatgtttggttctagggactaaacatattctaaagtcattaggtaggtgcccgtgcgttgcgacggcatacaaaatattaaataaaatagtaatgtacaactaaattagttcaaaaagata

SEQ ID NO: 73851 - DNA, 1138 bp, Zea Mays
atgttaataggattacaagtatattgacctgcaacgtatggatgtttctggaaaagtagtgcagacatcctggtggcatctccacgctgttcttggcagtcgtggtgtttgcattcgttgcgctacaggcaaacgtagctggcatggcgctctacccaagttccgcgctgtaataaaaacagcaggcctgaagcgcgtctggctgacaggcggcaggcaggcccaggcagagggcctctgtctgtgcacctgctgctgcaaacggcgagaagatgctggcgcttgcgttgggcccggtccgagagcccgatggacgacgggacggcgacggcgacggctgctgctccggccggctgtttctgctagagcgctcgccccgccgcaagccctcgcgcgacacgtccagcccggcgtccgcgtcgcgtggacacgtcctgatgcatgtcagcggctgccagagcagcgctcatcattgcatgcgttcctgtgcgtgcgtacaatggcccgggggccaccgtacgtacgccggcttgtagcaactagcaactcgtggagttctccggccagctactgtggctggcgactggcaaggctgcgactgcgagcaagatgccactgtgctgcggcatggtggtccgttcacggtggcgcaggcaggcaggcaagcaagggcaatcatcgttttcccggttcacggaggagcagggtttaccataccagggctgtctgttgacactgtgctcgcaaagccacaactggccggaccgtggtccacccgtacgtccccggctcctcgcccgtggtggggatgtgctactgctgtggctgtgataactgataagacgacgcaacgcaatgcaagaaggtagaaccgtagaagtaggactgaccaagtctcctctattggatgaggccgctgatcatagtaccaacgattttttgtactactgatgccatgtttggtttcaattagtcctaggactaaattttagtcctaggactaaactttagtccctacatgtttggttctagggactaaacatattctaaagtcattaggtaggtgcccgtgcgttgcgacggcatacaaaatattaaataaaatagtaatgtacaactaaattagttcaaaaagata

SEQ ID NO: 73852 - DNA, 1908 bp, Zea Mays
gcatcatgacacatagaagcatatttatagtgggctctcccgtaagtttcattgcctgaccctgaagctgggtagctcctgctcctatcccggctgctggcgcgccgtggttttgtgctcttgtggacacactggcctccacccatccctctcacgtctctggccatccgcagccaaggcgcgcggcccatcgtcgatttatagccacaccatggccaggaagtgctcccactgtggcaactacggccacaactccaggacctgcggactaggactaggactaggacacagagaaataatgctctgcgaaggtggcgacgacaataatggccgcagcggcctaaggctcttcggagtgcaggtccgtatcggcggcggcggtggcgcagggtcggcgtccatgaagaagagctacagcatggactgcctgcagctcgcggctcctcatgcttgttcgtccctcgtctcgtccccgtcgtcgtcgtcgttgtgctcgtcctcgtccccgtcgtcgctgctgctgtcgattgatgatgggttgcagagaggggcggccgatggatacctgtctgatggacctcatggcagagctgtgcaggagaggaagaaaggtacgtcaagaaatttttttcccttcctgatgaaaagacaaaagaggaagatttgttctttggaaattcagaaacttcaccttacacgaatttcttttcttattggtaatacgtactgtccatcagtcgtctgacctaaaaaaaaagttgcattatgctctacttttttttggcctaaaaaaagagagtaatatagctttatcttccactgatgctgcaacccttcaactgcaagtaacaatgaagcagctgagactgagagatactagtgcttccctgcacattattgagtccttgttgggttggtcggtagcagctgatgtttctaaacaaaaacaatactctggatatataccgacgacgccaggagttccatggagcgaggaggagcacaggcagttccttgccggcctggacaagctgggcaagggcgactggcgaggcatcgccaggagctacgtgccgacgaggaccccgacgcaggtcgccagccacgcgcagaagttcttcctccggcagagcagcatggggaagaagaagcgccggtccagcctcttcgacatggtgccgatctgcgagaacagtgcgagcatctccgatccgctggacgtggcacgccatggcgtcgcctcggcagactccgagagggcggccgtggacgtggacctgatgaattcgacgacggagggtgacgacggcaggagcagggacgtcgtgtcgtcggcgtcaggtgcagggaccgcactgcggttcccggcagcggcagctcagacggagccgctgcatccttcgtcatcgcatggccatgggcgcggccaccactgctctccgttggacctggagctgggcatgtccctgcccgccccatccgtcggaacgtgatggagatgaggcgaggccgaggccgtgcgtgactgctgtctccctcagctgtgtgtgtcagccagatggagatgatgcgctagccaatacagtactgttcgtgatcgtgaaaacggtgtgcaaacactagcacagcggcactaaactaggatgtcgctcctcgcaccatattgtgtactgtaaccacgttgatccacatcatctctatctcttcaccaccgttggatcataggctgtcagtttcatctatccgtccatgtgtcatactcattcacgatgcggtggcttaatgatccagcagtaatttttcttctttcgtgacttaagggtatatacggtggtatttaatgtagaggcttttgatgtatttaaaggggtatttgcaaaaaaattatggagccgtctctgcatgaag

SEQ ID NO: 73853 - DNA, 1486 bp, Zea Mays
ctgaagctgggtagctcctgctcctatcccggctgctggcgcgccgtggttttgtgctcttgtggacacactggcctccacccatccctctcacgtctctggccatccgcagccaaggcgcgcggcccatcgtcgatttatagccacaccatggccaggaagtgctcccactgtggcaactacggccacaactccaggacctgcggactaggactaggactaggacacagagaaataatgctctgcgaaggtggcgacgacaataatggccgcagcggcctaaggctcttcggagtgcaggtccgtatcggcggcggcggtggcgcagggtcggcgtccatgaagaagagctacagcatggactgcctgcagctcgcggctcctcatgcttgttcgtccctcgtctcgtccccgtcgtcgtcgtcgttgtgctcgtcctcgtccccgtcgtcgctgctgctgtcgattgatgatgggttgcagagaggggcggccgatggatacctgtctgatggacctcatggcagagctgtgcaggagaggaagaaaggagttccatggagcgaggaggagcacaggcagttccttgccggcctggacaagctgggcaagggcgactggcgaggcatcgccaggagctacgtgccgacgaggaccccgacgcaggtcgccagccacgcgcagaagttcttcctccggcagagcagcatggggaagaagaagcgccggtccagcctcttcgacatgcggcaggtgccgatctgcgagaacagtgcgagcatctccgatccgctggacgtggcacgccatggcgtcgcctcggcagactccgagagggcggccgtggacgtggacctgatgaattcgacgacggagggtgacgacggcaggagcagggacgtcgtgtcgtcggcgtcaggtgcagggaccgcactgcggttcccggcagcggcagctcagacggagccgctgcatccttcgtcatcgcatggccatgggcgcggccaccactgctctccgttggacctggagctgggcatgtccctgcccgccccatccgtcggaacgtgatggagatgaggcgaggccgaggccgtgcgtgactgctgtctccctcagctgtgtgtgtcagccagatggagatgatgcgctagccaatacagtactgttcgtgatcgtgaaaacggtgtgcaaacactagcacagcggcactaaactaggatgtcgctcctcgcaccatattgtgtactgtaaccacgttgatccacatcatctctatctcttcaccaccgttggatcataggctgtcagtttcatctatccgtccatgtgtcatactcattcacgatgcggtggcttaatgatccagcagtaatttttcttctttcgtgacttaagggtatatacggtggtatttaatgtagaggcttttgatgtatttaaaggggtatttgcaaaaaaattatggagccgtctctgcatgaag

SEQ ID NO: 73854 - DNA, 2377 bp, Zea Mays
agagcccaagagtccaagaccaggtggtacgttaaccgtttgtctggcccaggtgcggcccttttcctgagtgtaatggcaggcagcattgagctgcaactgcaacagcttggaagcagtaagcacgcatcgccgccccccatctcccccgcaccgcgcacctctatggccgccggcgaaggcggaggtggggacatcggcgccgactcggagcggcgcctgcaaaaggctatggataagctctaccacttccccaagcccaagtcgagtagcaccggtggctccaagccctcttcgtcgacctcggctccaagctccgggagagcggtggggaaggcagcggcggaggcagcgaggaggttcggggtggtgcgcgggtcgcgactcccgcatcagatgttggccatggcagcgatctcgccgccaccgccgtgccgcccctgggaccgcgccgacctcatgcgtcgtctcgggtcattcaaagccatgacctggttcgccaagcccaaggttattagtcccgttaactgtgcaagaagaggatggactaacattgagccggatgttataacatgtgaagcttgtggggcacgactcctgttctccactccttcctcatggacaacacagcaagttgaaaaggctgctgctgttttcagcctgaagctggactctggacataaactactttgcccgtggattgataacatatgtgatgaatcacttgctttatttccaccaacacctcctcctgttttagttgggaactactatgagcttttgtcctctctgctgcgacttttagcactcccaagaatttcctgctcttctcttgagaccatgaaaaagaggaatccacagctagagcagttcctatcagaaccattctcttcatcagttgttctcaaagggggacttatgcttactgaggactctacaattaaggatttggatgatgcttttcaagatgctgacacatattatcaggcacttaagataataagtttgtgtggatgggaacccagactacttccttatgctgttgactgtggaactgagtttcactccgatgcaaactctacctctaaattggctcaaccagagcaatcaagttccatgaaacgtaaaagaagcacagatgagcctcatttgttggaaggtgatgccgatgatgttgatacatccaccataggggcaaatcatgaccagccaggagaaaattctgaaaagagcatatcaaacttagtagtgagcactgaacagaaacaagatggttcacattccaatgcagctaaggatactgaattggatgaagcttccaatgaaacacaaccagaaacaggttctccattaagaaaaagtataacaagcacatatgcagatgctgatcaacatggattggaacctagattttgctcagtccagggtacgaatgaagaaccttctggtggagtgaccctgacagagatgcatgcaaacaattccaggtcaactgaggtcagcacaatcacagaatcattagttaacagggaaaaagaaaaacaagggctgtatgacagaatgaatgagtttgatcctatcaagcagcaccggacgttctgcccttggacttcccctgattacggcgaacccttgcctggatggaggcttactctctcggcattacttgctggggacaagagatctgatggggacttgcaagtggatattcagaccagccttctcgatgaggaggatgaccctcttacctctgttaggaagcttttcatgacaccacctccgaaaaggcggaggatacagcaatctgaaaagagctgagaagcgaactggatccacatgttgggaaagctggggtcaaactcatacggttggacaatatcatggggcagatccagaatgccatatgaattgaatattggaactggaaatgtttacgctgcacatctgtgcgatgtacaaattcttgaggcagcagctgggaaaatgatttatgacatggttaattgttccaggacgatactgctgctgtagaagccattgttgtggtggttaaggaatgtagaagttgggttacctcttccccatttgaaaccacctgagcatatacaccgtgatttcgtagcttagtaatgttgtcaacttgttatattgcattctttatattgctgtacgatcacctgttaactgttaaaccctcggggaattttgattggcaagagcgaattcgtttgacgcctttgctggctgacttacctgtaataactgcttaaagatctgatcggcttgaaacgataggttctgccattcaatagcctacaatgaatcatttttgtaaacaggtctaccgtgcgtgtcttccagaaaaaaaaggataaac

SEQ ID NO: 73855 - DNA, 1816 bp, Zea Mays
gtccaagaccaggtggtacgttaaccgtttgtctggcccaggtgcggcccttttcctgagtgtaatggcaggcagcattgagctgcaactgcaacagcttggaagcagtaagcacgcatcgccgccccccatctcccccgcaccgcgcacctctatggccgccggcgaaggcggaggtggggacatcggcgccgactcggagcggcgcctgcaaaaggctatggataagctctaccacttccccaagcccaagtcgagtagcaccggtggctccaagccctcttcgtcgacctcggctccaagctccgggagagcggtggggaaggcagcggcggaggcagcgaggaggttcggggtggtgcgcgggtcgcgactcccgcatcagatgttggccatggcagcgatctcgccgccaccgccgtgccgcccctgggaccgcgccgacctcatgcgtcgtctcgggtcattcaaagccatgacctggttcgccaagcccaaggttattagtcccgttaactgtgcaagaagaggatggactaacattgagccggatgttataacatgtgaagcttgtggggcacgactcctgttctccactccttcctcatggacaacacagcaagttgaaaaggctgctgctgttttcagcctgaagctggactctggacataaactactttgcccgtggattgataacatatgtgatgaatcacttgctttatttccaccaacacctcctcctgttttagttgggaactactatgagcttttgtcctctctgctgcgacttttagcactcccaagaatttcctgctcttctcttgagaccatgaaaaagaggaatccacagctagagcagttcctatcagaaccattctcttcatcagttgttctcaaagggggacttatgcttactgaggactctacaattaaggatttggatgatgcttttcaagatgctgacacatattatcagaaaaacaagggctgtatgacagaatgaatgagtttgatcctatcaagcagcaccggacgttctgcccttggacttcccctgattacggcgaacccttgcctggatggaggcttactctctcggcattacttgctggggacaagagatctgatggggacttgcaagtggatattcagaccagccttctcgatgaggaggatgaccctcttacctctgttaggaagcttttcatgacaccacctccgaaaaggcggaggatacagcaatctgaaaagagctgagaagcgaactggatccacatgttgggaaagctggggtcaaactcatacggttggacaatatcatggggcagatccagaatgccatatgaattgaatattggaactggaaatgtttacgctgcacatctgtgcgatgtacaaattcttgaggcagcagctgggaaaatgatttatgacatggttaattgttccaggacgatactgctgctgtagaagccattgttgtggtggttaaggaatgtagaagttgggttacctcttccccatttgaaaccacctgagcatatacaccgtgatttcgtagcttagtaatgttgtcaacttgttatattgcattctttatattgctgtacgatcacctgttaactgttaaaccctcggggaattttgattggcaagagcgaattcgtttgacgcctttgctggctgacttacctgtaataactgcttaaagatctgatcggcttgaaacgataggttctgccattcaatagcctacaatgaatcatttttgtaaacaggtctaccgtgcgtgtcttccagaaaaaaaaggataaac

SEQ ID NO: 73856 - DNA, 2317 bp, Zea Mays
aggcagcattgagctgcaactgcaacagcttggaagcagtaagcacgcatcgccgccccccatctcccccgcaccgcgcacctctatggccgccggcgaaggcggaggtggggacatcggcgccgactcggagcggcgcctgcaaaaggctatggataagctctaccacttccccaagcccaagtcgagtagcaccggtggctccaagccctcttcgtcgacctcggctccaagctccgggagagcggtggggaaggcagcggcggaggcagcgaggaggttcggggtggtgcgcgggtcgcgactcccgcatcagatgttggccatggcagcgatctcgccgccaccgccgtgccgcccctgggaccgcgccgacctcatgcgtcgtctcgggtcattcaaagccatgacctggttcgccaagcccaaggttattagtcccgttaactgtgcaagaagaggatggactaacattgagccggatgttataacatgtgaagcttgtggggcacgactcctgttctccactccttcctcatggacaacacagcaagttgaaaaggctgctgctgttttcagcctgaagctggactctggacataaactactttgcccgtggattgataacatatgtgatgaatcacttgctttatttccaccaacacctcctcctgttttagttgggaactactatgagcttttgtcctctctgctgcgacttttagcactcccaagaatttcctgctcttctcttgagaccatgaaaaagaggaatccacagctagagcagttcctatcagaaccattctcttcatcagttgttctcaaagggggacttatgcttactgaggactctacaattaaggatttggatgatgcttttcaagatgctgacacatattatcaggcacttaagataataagtttgtgtggatgggaacccagactacttccttatgctgttgactgtggaactgagtttcactccgatgcaaactctacctctaaattggctcaaccagagcaatcaagtaagacaatggaggatcgggttccatgaaacgtaaaagaagcacagatgagcctcatttgttggaaggtgatgccgatgatgttgatacatccaccataggggcaaatcatgaccagccaggagaaaattctgaaaagagcatatcaaacttagtagtgagcactgaacagaaacaagatggttcacattccaatgcagctaaggatactgaattggatgaagcttccaatgaaacacaaccagaaacaggttctccattaagaaaaagtataacaagcacatatgcagatgctgatcaacatggattggaacctagattttgctcagtccagggtacgaatgaagaaccttctggtggagtgaccctgacagagatgcatgcaaacaattccaggtcaactgaggtcagcacaatcacagaatcattagttaacagggaaaaagaaaaacaagggctgtatgacagaatgaatgagtttgatcctatcaagcagcaccggacgttctgcccttggacttcccctgattacggcgaacccttgcctggatggaggcttactctctcggcattacttgctggggacaagagatctgatggggacttgcaagtggatattcagaccagccttctcgatgaggaggatgaccctcttacctctgttaggaagcttttcatgacaccacctccgaaaaggcggaggatacagcaatctgaaaagagctgagaagcgaactggatccacatgttgggaaagctggggtcaaactcatacggttggacaatatcatggggcagatccagaatgccatatgaattgaatattggaactggaaatgtttacgctgcacatctgtgcgatgtacaaattcttgaggcagcagctgggaaaatgatttatgacatggttaattgttccaggacgatactgctgctgtagaagccattgttgtggtggttaaggaatgtagaagttgggttacctcttccccatttgaaaccacctgagcatatacaccgtgatttcgtagcttagtaatgttgtcaacttgttatattgcattctttatattgctgtacgatcacctgttaactgttaaaccctcggggaattttgattggcaagagcgaattcgtttgacgcctttgctggctgacttacctgtaataactgcttaaagatctgatcggcttgaaacgataggttctgccattcaatagcctacaatgaatcatttttgtaaacaggtctaccgtgcgtgtcttccagaaaaaaaaggataaac

SEQ ID NO: 73857 - DNA, 2173 bp, Zea Mays
aggcagcattgagctgcaactgcaacagcttggaagcagtaagcacgcatcgccgccccccatctcccccgcaccgcgcacctctatggccgccggcgaaggcggaggtggggacatcggcgccgactcggagcggcgcctgcaaaaggctatggataagctctaccacttccccaagcccaagtcgagtagcaccggtggctccaagccctcttcgtcgacctcggctccaagctccgggagagcggtggggaaggcagcggcggaggcagcgaggaggttcggggtggtgcgcgggtcgcgactcccgcatcagatgttggccatggcagcgatctcgccgccaccgccgtgccgcccctgggaccgcgccgacctcatgcgtcgtctcgggtcattcaaagccatgacctggttcgccaagcccaaggttattagtcccgttaactgtgcaagaagaggatggactaacattgagccggatgttataacatgtgaagcttgtggggcacgactcctgttctccactccttcctcatggacaacacagcaagttgaaaaggctgctgctgttttcagcctgaagctggactctggacataaactactttgcccgtggattgataacatatgtgatgaatcacttgctttatttccaccaacacctcctcctgttttagttgggaactactatgagcttttgtcctctctgctgcgacttttagcactcccaagaatttcctgctcttctcttgagaccatgaaaaagaggaatccacagctagagcagttcctatcagaaccattctcttcatcagttgttctcaaagggggacttatgcttactgaggactctacaattaaggatttggatgatgcttttcaagatgctgacacatattatcaggttccatgaaacgtaaaagaagcacagatgagcctcatttgttggaaggtgatgccgatgatgttgatacatccaccataggggcaaatcatgaccagccaggagaaaattctgaaaagagcatatcaaacttagtagtgagcactgaacagaaacaagatggttcacattccaatgcagctaaggatactgaattggatgaagcttccaatgaaacacaaccagaaacaggttctccattaagaaaaagtataacaagcacatatgcagatgctgatcaacatggattggaacctagattttgctcagtccagggtacgaatgaagaaccttctggtggagtgaccctgacagagatgcatgcaaacaattccaggtcaactgaggtcagcacaatcacagaatcattagttaacagggaaaaagaaaaacaagggctgtatgacagaatgaatgagtttgatcctatcaagcagcaccggacgttctgcccttggacttcccctgattacggcgaacccttgcctggatggaggcttactctctcggcattacttgctggggacaagagatctgatggggacttgcaagtggatattcagaccagccttctcgatgaggaggatgaccctcttacctctgttaggaagcttttcatgacaccacctccgaaaaggcggaggatacagcaatctgaaaagagctgagaagcgaactggatccacatgttgggaaagctggggtcaaactcatacggttggacaatatcatggggcagatccagaatgccatatgaattgaatattggaactggaaatgtttacgctgcacatctgtgcgatgtacaaattcttgaggcagcagctgggaaaatgatttatgacatggttaattgttccaggacgatactgctgctgtagaagccattgttgtggtggttaaggaatgtagaagttgggttacctcttccccatttgaaaccacctgagcatatacaccgtgatttcgtagcttagtaatgttgtcaacttgttatattgcattctttatattgctgtacgatcacctgttaactgttaaaccctcggggaattttgattggcaagagcgaattcgtttgacgcctttgctggctgacttacctgtaataactgcttaaagatctgatcggcttgaaacgataggttctgccattcaatagcctacaatgaatcatttttgtaaacaggtctaccgtgcgtgtcttccagaaaaaaaaggataaac

SEQ ID NO: 73858 - DNA, 5068 bp, Zea Mays
catttcgttgctgtcatccctccaaaacggtaacccttgccgtcgccgggcgttctcgctctcggcctccagccggcgcgccgcgtctcccagcgctcctccctccacattcctcggccaccgcacgaacctcaaaactatggcctcgtgccctctgttcctccttgtcccgcggccccctccttcccttgtcggcgccgaccgctgcccaggctccgcgggctgctcagatctcccaactagctgccgtcctcatcctggacgccggcatggttacccatttcgttgcaactcgtcttcttcctcgtccgcgcctcgcgagcgcccgcccaggcagcgccccggtggccgtggcgacgccatcgaccccgtaggcttcctcaccaagctcggcgtctcggaccgcgccttcgcccagttcctccgcgaccggcacaaggccttgaaggaccgtagatgggagctgtgttctcggtttattgatctgaaagaggcatcttctgggtttgagttattgggcatgcaccgacatcgacaacaccgcatcgatttcatggaatgggctccaggtgctcggtattgttctttgattggtgattttaatcagtggtcgccaactgaaaactgtgccagggaaggtcatttaggacatgatgattttggatattggtttatcatacttgaagataagctcagagaagggcaagaacaagatgaatatttcttccaggaatacaattatgtggatgactatgataaaggtgacaatggcattgatgctgatgaaataatgcgtaggatgaaagaagagtattgggaacctggagaaatcaggtcccgtcagtctcagttagagatggttgttaagctatatgagcaaatgtttggcccaaacggtccacaaacagaggaggagctaggtgaaattcctgatgcccaaacaagatacaatgagttcaaagcatcgcagaaggctgactcttccagccagccttcctatgatatcattgacaatgggcaggagttcgacattttcagtgttgtaactgatcgtgcatcatttgaaaagtttcaagcaaaaaaacctccccttgcttactgggttgaaatgaggaaaggtcgaatagcatggcttgagaaatatgttccaacaatttctcataaagacaagtacagggtttattttaatactcctgatggtgctttagaacgtattcctgcttgggctgcatatgttcttccagatgctgaggggaagcaatcctatgcagtacattgggaaccacctcctgaagaaatttacaaatggagatttggacgtccaaaggtgaagggttcacttagaatatatgaatgtcatgttggaataagtggttcagagcaaaaggtttcatcatttcaggagttcacatccaaagtcctaccgcatataaaaaaagctggatataatgctgttcagctgattggtgttgtggagcacaaggattactcctccattggctataaggtcactaattattttgcagtcagcagcagatttggcaccccagatgacttcaagaaattagtcgatgaagcgcatggccttggattagtagtgcttctggatattatccactcctatgcatccgcagatgaactggttggcttatcactttttgatggctctaatgactgttacttccacagtggaaaaagagggcatcacaagtactggggcaccaggatgtttaaatatgatgatgtggatgttctgcacttcttgttgtccaatttgaattggtgggtcactgagtaccggattgatggattccagttccattccttgtcttctatgttatatactcataatgggttttctacttttactggtgccatggaagagtattgcaatcagtatgttgacaaggatgcactgatatatctaattctagcaaatgaaatgttacatcgtcttcatccagatattgtaacaattgctgaagatgcaacattttatcctggattatgtgagccaattactcaaggcggattgggattcaactactgggtcaatctttctataccagaaatgtggttgtggcatcttgaaaatgtccctgaacaagaatggagcatgaataagattattaaagtattagtaagcagtaaccagaatatgctatcatatgttgaaaatcataaccagtccatatctggacgcaagtcttttgctgagataattcttaattcaagagagtgctctgttggttctgttgacgacaatttgattagagcttcttctttgttgaaattgatgaaactaattactttcacgacaagcggaggcgcttatctcaacttcatgggcaatgaatttgcacatccagaaaaagttgaatttcctatgccaagcaatgactattccttcgagttagctaatcggcaatgggaactattggacaaagtttttcataaacatatatttaactttgacaaggatgttatgagcttggatgaaaatgaaaggataatttctagaggtccacccaacattcttcactgtgatgacacaagcatggtcatatctttcacaagagggcctttatttttcatatttaattttaatcctcaagtctcccatcagtcgtatcgtgttggtgtggatgaagctggggaataccaactcatcttcaacacagatgaaactaaatatggtggatgtgaaaccctcaagagtagtcagtatatgcggaggacctctgataaaagagctgatggttgtcgcaactccttggaattggcattgccatctagaagtgctcagatttacaagttagttagaattttgagaatttagcatgtcagcaatataggtattgtaatggaatcatgcaactgcgtagaagatggggctttgtggtccttgtggtttttgttgataagatgaaaaaacaaagggatcgatagcttcgggacatctgttgacgttgaggaccctgcagttttgccctttgcggcaatgcaacttctctaaaatttatacatgctgtgactactgaggctcatctataaaaggctagacagtttactacaacttttgcccttttttattgctacgttgtttactgaaattccactgtttcgttcgtccagtttatggtcgggagaaagatctgtctgtccattcttagctctgacatgccttttcatttctacctgtcctcctggtttctgagtctatgaatcatgtcgtcccctcccctatcaattgccctcgacagatcctcttctccaacgacggtggcatggatgcccacgtcccaacattgtaggtgcaattcccaggtcatactcatcctctccgatggtgcagggtgcggcacatgtgtcgcccccatccacttcatctattgactattccatcatgttcacatcctccctaactcccctctcccatggctccacctcatcgtcttctcacctaccagggcttatcctctccctgctatgaattccgaaccctaacccatttatgttgttatagatcctgattccttttgttttgatcggttcagaacttcagatttggctcatgagttctaaacccaatcaagatattttctatactgtgaatttgttagactactttgttcagggacaaggagtattagagtaatatctttggaaatctacataattctatatctgagtgtgaatattatctgttctttaactgtatgctttagtagcatgcatatgtacatgtctctgttataggatataaattaccgttccctttattttacatggcatggctacacagatataaattatattgtagtaagtataattggtgtctgattgtgattgtatgcttttatgaatccttgctatttcttccgaaaatatatagcatgtccctgcctgtataaagttctataaaagaatgatgaaacacatgttccattggttatttcatacctagctaaacatggtttatggtttccaaaattgctgtggtaactggaccttgtatcgcagaatttcagtattagttgtttgattcttgccatatagtttttgttgcttctatgtttggcacttggtattagtttcctatgttttctctgccttcttgctcagctcatggttagtgattcatacttgccgttttgttcaacctggcgtcatgaagagcttcagctctttctaaagaacgtcggtctgaagctcttcgtgatgttagtttgttaattgatgaagcctgcatattatgccatgtggtgatttccccaatgaattccaatcatctttcagatggtcttgccgcaatgtttatttggtcagccagccgcaaatgcatctgctggtgatgccagtccattacctaacgaatcttacataccatgccatcgaaatttggccactgaatgaactccatcagcatccgaagcatcctgtgtggtgccaccgtttttatctgttcaatgtttcaatctgctgtggacctggtgtgctctactcactatacatgcttcctgtattaggtgcctctcaccttaccttccatgcttgaactactgcagcgagacactattatttctatccaatcatgttgaaaccatggaaacctctatattggacacctgaacagctcctaagaaggtatctcactgcatgccgagtagaagcgtgtcacttggacctcggttcaggcaaagattctggtcactgggaagttaactgtcaacgattaaggtcctgtttagaatcaacccagtttttatcttttagctagtagagattagcttcttggtttttaaaaaattaagaatctaatttctataaactgagtcataaactgatatgttgtgaaccacatcaatttctataaaccagtttcttaaaaactgagtgtttcaaacatgacctaacattgcaaaacggggcctacgtactattttcatgtgtgtctgccataatgtttggaaagaggaaaacaggagggtcattgacagacagctagaccctgtcgccctctcaggcagctactactctagcaaaggacagagaccttaagaatcag

SEQ ID NO: 73859 - DNA, 1585 bp, Zea Mays
cttgctcccagccaaatcattcacgtatccatcttcaagccagccgtctccttatccctacgacgccgctcacctgtgctcatcttccagccgccctctccgcccagcagcagagcacaccatcctctccactcggatccccaagccctcgcctccagctttgccacgacatccgtcccctgctcggacctccacccggccgcgtcctcgccggtggccagcgccgctgcatcgccattcctagcgtcggccttggcaccgcttccccgagcgccccagtcgagctcgcccatcctctgctctagccctttctccacgccgtagctgatctcgcccctctcctcagccatggacacgacgacctgcagcccttcttggtggccaagcccatcttcctgctcgcgccccctctttttccacctctgcgcgtatcagctcgtccaacccccatggtgtttcctccctctcggctcccttgctccctccccatggcgttccccctagatgctcgtgatctgttccccacggtgcaggcaaatgttctttccctccctgcagcagcaccttggtggttgtcgagcagcacgtcgcgcttgcgcagcctcggtcacgacgttgttcaccccgctaaccattggtgtcatacctcacgtgtcatgtgttcgccgaaatgcctaaacatgtagtctgtcgtcgttgtatccacagtcaattttagtcatggtacgctaatgatcgagatgcgaaggccagggtctaggttgaccccaagtggtgcaaaggatggcctacttcgagaggcgatgtcagcggaccaatctagaagattgatgatctctacataaaaacatgattacattgattcaactctgatctggttgtggaaactgagatcattgtaactcaaatgagagcttggcacttagcatatagatgccactagaaccaatctggaaatactgtgagatatagagtgataaaaggcattaatgtaagtactacataaatgtactacttgtattttttaataatcaatgcttcaaaagtctatatagatgctgactggtgtcagggttttcccattattgtaagtttgttacaagcaagtgctttccctcacacaacttcaccttttctttacatgtttattacttttgtttgctggttttgacttacagtgaattgtgtatgcaactattgtggtatatcaatgaccttccgagaagatacaatggcgttcttagtagtaacgctgcttgatttctatagttggagtcatcacacagctaacatttgcactttaactgtttggtgaaatgcttgggagaaagaggccagcaagaatggagtcatggaacatcggcaggaggagtgcagcagcggcaaccgatgtatcccttgaacaatctggttttgacaagatgcaaatcaatctagtgtacattgtattccacacttgcaaagattgtttggctaattacaagattatttcagtgttttggtttggattaagagtacacttatgtatgaaatattgattggtactcatttatattatttttattatatcattattaaatatata

SEQ ID NO: 73860 - DNA, 1034 bp, Zea Mays
agccaaatcattcacgtatccatcttcaagccagccgtctccttatccctacgacgccgctcacctgtgctcatcttccagccgccctctccgcccagcagcagagcacaccatcctctccactcggatccccaagccctcgcctccagctttgccacgacatccgtcccctgctcggacctccacccggccgcgtcctcgccggtggccagcgccgctgcatcgccattcctagcgtcggccttggcaccgcttccccgagcgccccagtcgagctcgcccatcctctgctctagccctttctccacgccgtagctgatctcgcccctctcctcagccatggacacgacgacctgcagcccttcttggtggccaagcccatcttcctgctcgcgccccctctttttccacctctgcgcgtatcagctcgtccaacccccatggcaaatgttctttccctccctgcagcagcaccttggtggttgtcgagcagcacgtcgcgcttgcgcagcctcggtcacgacgttgttcaccccggtacgctaatgatcgagatgcgaaggccagggtctaggttgaccccaagtggtgcaaaggatggcctacttcgagaggcgatgtcagcggaccaatctagaagattgatgatctctacataaaaacatgattacattgattcaactctgatctggttgtggaaactgagatcattgtaactcaaatgagagcttggcacttagcatatagatgccactagaaccaatctggaaatactgtgagaggccagcaagaatggagtcatggaacatcggcaggaggagtgcagcagcggcaaccgatgtatcccttgaacaatctggttttgacaagatgcaaatcaatctagtgtacattgtattccacacttgcaaagattgtttggctaattacaagattatttcagtgttttggtttggattaagagtacacttatgtatgaaatattgattggtactcatttatattatttttattatatcattattaaatatata

SEQ ID NO: 73861 - DNA, 1463 bp, Zea Mays
agccaaatcattcacgtatccatcttcaagccagccgtctccttatccctacgacgccgctcacctgtgctcatcttccagccgccctctccgcccagcagcagagcacaccatcctctccactcggatccccaagccctcgcctccagctttgccacgacatccgtcccctgctcggacctccacccggccgcgtcctcgccggtggccagcgccgctgcatcgccattcctagcgtcggccttggcaccgcttccccgagcgccccagtcgagctcgcccatcctctgctctagccctttctccacgccgtagctgatctcgcccctctcctcagccatggacacgacgacctgcagcccttcttggtggccaagcccatcttcctgctcgcgccccctctttttccacctctgcgcgtatcagctcgtccaacccccatggtgtttcctccctctcggctcccttgctccctccccatggcgttccccctagatgctcgtgatctgttccccacggtgcaggcaaatgttctttccctccctgcagcagcaccttggtggttgtcgagcagcacgtcgcgcttgcgcagcctcggtcacgacgttgttcaccccggtacgctaatgatcgagatgcgaaggccagggtctaggttgaccccaagtggtgcaaaggatggcctacttcgagaggcgatgtcagcggaccaatctagaagattgatgatctctacataaaaacatgattacattgattcaactctgatctggtgtttggcatttgtttttcctctacattagtttctcattattatatttgtatagatttgtattcttgagactaacctaatcaacattctttacataataatattataaggaggattaatttcatatacaatactatatataatgagatgaatcatttggccttacgatatgtgtaagaaataatgctttgataattggcagcctatcaagagtttcattagtgtagaacaattgttttgttgttaacatagtgtataacatttgatgtcgtaatttgttttggaagaaaatttaatctcaacatagaattttttactgacaggtttatggtcttttaatatctacaggttgtggaaactgagatcattgtaactcaaatgagagcttggcacttagcatatagatgccactagaaccaatctggaaatactgtgagaggccagcaagaatggagtcatggaacatcggcaggaggagtgcagcagcggcaaccgatgtatcccttgaacaatctggttttgacaagatgcaaatcaatctagtgtacattgtattccacacttgcaaagattgtttggctaattacaagattatttcagtgttttggtttggattaagagtacacttatgtatgaaatattgattggtactcatttatattatttttattatatcattattaaatatata

SEQ ID NO: 73862 - DNA, 1364 bp, Zea Mays
agccaaatcattcacgtatccatcttcaagccagccgtctccttatccctacgacgccgctcacctgtgctcatcttccagccgccctctccgcccagcagcagagcacaccatcctctccactcggatccccaagccctcgcctccagctttgccacgacatccgtcccctgctcggacctccacccggccgcgtcctcgccggtggccagcgccgctgcatcgccattcctagcgtcggccttggcaccgcttccccgagcgccccagtcgagctcgcccatcctctgctctagccctttctccacgccgtagctgatctcgcccctctcctcagccatggacacgacgacctgcagcccttcttggtggccaagcccatcttcctgctcgcgccccctctttttccacctctgcgcgtatcagctcgtccaacccccatggtgtttcctccctctcggctcccttgctccctccccatggcgttccccctagatgctcgtgatctgttccccacggtgcaggcaaatgttctttccctccctgcagcagcaccttggtggttgtcgagcagcacgtcgcgcttgcgcagcctcggtcacgacgttgttcaccccgctaaccattggtgtcatacctcacgtgtcatgtgttcgccgaaatgcctaaacatgtagtctgtcgtcgttgtatccacagtcaattttagtcatggtacgctaatgatcgagatgcgaaggccagggtctaggttgaccccaagtggtgcaaaggatggcctacttcgagaggcgatgtcagcggaccaatctagaagattgatgatctctacataaaaacatgattacattgattcaactctgatctggttgtggaaactgagatcattgtaactcaaatgagagcttggcacttagcatatagatgccactagaaccaatctggaaatactgtgagtgaattgtgtatgcaactattgtggtatatcaatgaccttccgagaagatacaatggcgttcttagtagtaacgctgcttgatttctatagttggagtcatcacacagctaacatttgcactttaactgtttggtgaaatgcttgggagaaagaggccagcaagaatggagtcatggaacatcggcaggaggagtgcagcagcggcaaccgatgtatcccttgaacaatctggttttgacaagatgcaaatcaatctagtgtacattgtattccacacttgcaaagattgtttggctaattacaagattatttcagtgttttggtttggattaagagtacacttatgtatgaaatattgattggtactcatttatattatttttattatatcattattaaatatata

SEQ ID NO: 73863 - DNA, 1211 bp, Zea Mays
agccaaatcattcacgtatccatcttcaagccagccgtctccttatccctacgacgccgctcacctgtgctcatcttccagccgccctctccgcccagcagcagagcacaccatcctctccactcggatccccaagccctcgcctccagctttgccacgacatccgtcccctgctcggacctccacccggccgcgtcctcgccggtggccagcgccgctgcatcgccattcctagcgtcggccttggcaccgcttccccgagcgccccagtcgagctcgcccatcctctgctctagccctttctccacgccgtagctgatctcgcccctctcctcagccatggacacgacgacctgcagcccttcttggtggccaagcccatcttcctgctcgcgccccctctttttccacctctgcgcgtatcagctcgtccaacccccatggtgtttcctccctctcggctcccttgctccctccccatggcgttccccctagatgctcgtgatctgttccccacggtgcaggcaaatgttctttccctccctgcagcagcaccttggtggttgtcgagcagcacgtcgcgcttgcgcagcctcggtcacgacgttgttcaccccgctaaccattggtgtcatacctcacgtgtcatgtgttcgccgaaatgcctaaacatgtagtctgtcgtcgttgtatccacagtcaattttagtcatggtacgctaatgatcgagatgcgaaggccagggtctaggttgaccccaagtggtgcaaaggatggcctacttcgagaggcgatgtcagcggaccaatctagaagattgatgatctctacataaaaacatgattacattgattcaactctgatctggttgtggaaactgagatcattgtaactcaaatgagagcttggcacttagcatatagatgccactagaaccaatctggaaatactgtgagaggccagcaagaatggagtcatggaacatcggcaggaggagtgcagcagcggcaaccgatgtatcccttgaacaatctggttttgacaagatgcaaatcaatctagtgtacattgtattccacacttgcaaagattgtttggctaattacaagattatttcagtgttttggtttggattaagagtacacttatgtatgaaatattgattggtactcatttatattatttttattatatcattattaaatatata

SEQ ID NO: 73864 - DNA, 1560 bp, Zea Mays
agccaaatcattcacgtatccatcttcaagccagccgtctccttatccctacgacgccgctcacctgtgctcatcttccagccgccctctccgcccagcagcagagcacaccatcctctccactcggatccccaagccctcgcctccagctttgccacgacatccgtcccctgctcggacctccacccggccgcgtcctcgccggtggccagcgccgctgcatcgccattcctagcgtcggccttggcaccgcttccccgagcgccccagtcgagctcgcccatcctctgctctagccctttctccacgccgtagctgatctcgcccctctcctcagccatggacacgacgacctgcagcccttcttggtggccaagcccatcttcctgctcgcgccccctctttttccacctctgcgcgtatcagctcgtccaacccccatggcaaatgttctttccctccctgcagcagcaccttggtggttgtcgagcagcacgtcgcgcttgcgcagcctcggtcacgacgttgttcaccccggtacgctaatgatcgagatgcgaaggccagggtctaggttgaccccaagtggtgcaaaggatggcctacttcgagaggcgatgtcagcggaccaatctagaagattgatgatctctacataaaaacatgattacattgattcaactctgatctggtgtttggcatttgtttttcctctacattagtttctcattattatatttgtatagatttgtattcttgagactaacctaatcaacattctttacataataatattataaggaggattaatttcatatacaatactatatataatgagatgaatcatttggccttacgatatgtgtaagaaataatgctttgataattggcagcctatcaagagtttcattagtgtagaacaattgttttgttgttaacatagtgtataacatttgatgtcgtaatttgttttggaagaaaatttaatctcaacatagaattttttactgacaggtttatggtcttttaatatctacaggttgtggaaactgagatcattgtaactcaaatgagagcttggcacttagcatatagatgccactagaaccaatctggaaatactgtgagatatagagtgataaaaggcattaattgaattgtgtatgcaactattgtggtatatcaatgaccttccgagaagatacaatggcgttcttagtagtaacgctgcttgatttctatagttggagtcatcacacagctaacatttgcactttaactgtttggtgaaatgcttgggagaaagaggccagcaagaatggagtcatggaacatcggcaggaggagtgcagcagcggcaaccgatgtatcccttgaacaatctggttttgacaagatgcaaatcaatctagtgtacattgtattccacacttgcaaagattgtttggctaattacaagattatttcagtgttttggtttggattaagagtacacttatgtatgaaatattgattggtactcatttatattatttttattatatcattattaaatatata

SEQ ID NO: 73865 - DNA, 1752 bp, Zea Mays
agccaaatcattcacgtatccatcttcaagccagccgtctccttatccctacgacgccgctcacctgtgctcatcttccagccgccctctccgcccagcagcagagcacaccatcctctccactcggatccccaagccctcgcctccagctttgccacgacatccgtcccctgctcggacctccacccggccgcgtcctcgccggtggccagcgccgctgcatcgccattcctagcgtcggccttggcaccgcttccccgagcgccccagtcgagctcgcccatcctctgctctagccctttctccacgccgtagctgatctcgcccctctcctcagccatggacacgacgacctgcagcccttcttggtggccaagcccatcttcctgctcgcgccccctctttttccacctctgcgcgtatcagctcgtccaacccccatggcaaatgttctttccctccctgcagcagcaccttggtggttgtcgagcagcacgtcgcgcttgcgcagcctcggtcacgacgttgttcaccccgctaaccattggtgtcatacctcacgtgtcatgtgttcgccgaaatgcctaaacatgtagtctgtcgtcgttgtatccacagtcaattttagtcatggtacgctaatgatcgagatgcgaaggccagggtctaggttgaccccaagtggtgcaaaggatggcctacttcgagaggcgatgtcagcggaccaatctagaagattgatgatctctacataaaaacatgattacattgattcaactctgatctggtgtttggcatttgtttttcctctacattagtttctcattattatatttgtatagatttgtattcttgagactaacctaatcaacattctttacataataatattataaggaggattaatttcatatacaatactatatataatgagatgaatcatttggccttacgatatgtgtaagaaataatgctttgataattggcagcctatcaagagtttcattagtgtagaacaattgttttgttgttaacatagtgtataacatttgatgtcgtaatttgttttggaagaaaatttaatctcaacatagaattttttactgacaggtttatggtcttttaatatctacaggttgtggaaactgagatcattgtaactcaaatgagagcttggcacttagcatatagatgccactagaaccaatctggaaatactgtgagatatagagtgataaaaggcattaatgtaagtactacataaatgtactacttgtattttttaataatcaatgcttcaaaagtctatatagatgctgactggtgtcagggttttcccattatttgaattgtgtatgcaactattgtggtatatcaatgaccttccgagaagatacaatggcgttcttagtagtaacgctgcttgatttctatagttggagtcatcacacagctaacatttgcactttaactgtttggtgaaatgcttgggagaaagaggccagcaagaatggagtcatggaacatcggcaggaggagtgcagcagcggcaaccgatgtatcccttgaacaatctggttttgacaagatgcaaatcaatctagtgtacattgtattccacacttgcaaagattgtttggctaattacaagattatttcagtgttttggtttggattaagagtacacttatgtatgaaatattgattggtactcatttatattatttttattatatcattattaaatatata

SEQ ID NO: 73866 - DNA, 1559 bp, Zea Mays
agccaaatcattcacgtatccatcttcaagccagccgtctccttatccctacgacgccgctcacctgtgctcatcttccagccgccctctccgcccagcagcagagcacaccatcctctccactcggatccccaagccctcgcctccagctttgccacgacatccgtcccctgctcggacctccacccggccgcgtcctcgccggtggccagcgccgctgcatcgccattcctagcgtcggccttggcaccgcttccccgagcgccccagtcgagctcgcccatcctctgctctagccctttctccacgccgtagctgatctcgcccctctcctcagccatggacacgacgacctgcagcccttcttggtggccaagcccatcttcctgctcgcgccccctctttttccacctctgcgcgtatcagctcgtccaacccccatggtgtttcctccctctcggctcccttgctccctccccatggcgttccccctagatgctcgtgatctgttccccacggtgcaggcaaatgttctttccctccctgcagcagcaccttggtggttgtcgagcagcacgtcgcgcttgcgcagcctcggtcacgacgttgttcaccccgctaaccattggtgtcatacctcacgtgtcatgtgttcgccgaaatgcctaaacatgtagtctgtcgtcgttgtatccacagtcaattttagtcatggtacgctaatgatcgagatgcgaaggccagggtctaggttgaccccaagtggtgcaaaggatggcctacttcgagaggcgatgtcagcggaccaatctagaagattgatgatctctacataaaaacatgattacattgattcaactctgatctggtgtttggcatttgtttttcctctacattagtttctcattattatatttgtatagatttgtattcttgagactaacctaatcaacattctttacataataatattataaggaggattaatttcatatacaatactatatataatgagatgaatcatttggccttacgatatgtgtaagaaataatgctttgataattggcagcctatcaagagtttcattagtgtagaacaattgttttgttgttaacatagtgtataacatttgatgtcgtaatttgttttggaagaaaatttaatctcaacatagaattttttactgacaggtttatggtcttttaatatctacaggttgtggaaactgagatcattgtaactcaaatgagagcttggcacttagcatatagatgccactagaaccaatctggaaatactgtgagaggccagcaagaatggagtcatggaacatcggcaggaggagtgcagcagcggcaaccgatgtatcccttgaacaatctggttttgacaagatgcaaatcaatctagtgtacattgtattccacacttgcaaagattgtttggctaattacaagattatttcagtgttttggtttggattaagagtacacttatgtatgaaatattgattggtactcatttatattatttttattatatcattattaaatatata

SEQ ID NO: 73867 - DNA, 1268 bp, Zea Mays
agccaaatcattcacgtatccatcttcaagccagccgtctccttatccctacgacgccgctcacctgtgctcatcttccagccgccctctccgcccagcagcagagcacaccatcctctccactcggatccccaagccctcgcctccagctttgccacgacatccgtcccctgctcggacctccacccggccgcgtcctcgccggtggccagcgccgctgcatcgccattcctagcgtcggccttggcaccgcttccccgagcgccccagtcgagctcgcccatcctctgctctagccctttctccacgccgtagctgatctcgcccctctcctcagccatggacacgacgacctgcagcccttcttggtggccaagcccatcttcctgctcgcgccccctctttttccacctctgcgcgtatcagctcgtccaacccccatggtgtttcctccctctcggctcccttgctccctccccatggcgttccccctagatgctcgtgatctgttccccacggtgcaggcaaatgttctttccctccctgcagcagcaccttggtggttgtcgagcagcacgtcgcgcttgcgcagcctcggtcacgacgttgttcaccccggtacgctaatgatcgagatgcgaaggccagggtctaggttgaccccaagtggtgcaaaggatggcctacttcgagaggcgatgtcagcggaccaatctagaagattgatgatctctacataaaaacatgattacattgattcaactctgatctggttgtggaaactgagatcattgtaactcaaatgagagcttggcacttagcatatagatgccactagaaccaatctggaaatactgtgagtgaattgtgtatgcaactattgtggtatatcaatgaccttccgagaagatacaatggcgttcttagtagtaacgctgcttgatttctatagttggagtcatcacacagctaacatttgcactttaactgtttggtgaaatgcttgggagaaagaggccagcaagaatggagtcatggaacatcggcaggaggagtgcagcagcggcaaccgatgtatcccttgaacaatctggttttgacaagatgcaaatcaatctagtgtacattgtattccacacttgcaaagattgtttggctaattacaagattatttcagtgttttggtttggattaagagtacacttatgtatgaaatattgattggtactcatttatattatttttattatatcattattaaatatata

SEQ ID NO: 73868 - DNA, 1737 bp, Zea Mays
agccaaatcattcacgtatccatcttcaagccagccgtctccttatccctacgacgccgctcacctgtgctcatcttccagccgccctctccgcccagcagcagagcacaccatcctctccactcggatccccaagccctcgcctccagctttgccacgacatccgtcccctgctcggacctccacccggccgcgtcctcgccggtggccagcgccgctgcatcgccattcctagcgtcggccttggcaccgcttccccgagcgccccagtcgagctcgcccatcctctgctctagccctttctccacgccgtagctgatctcgcccctctcctcagccatggacacgacgacctgcagcccttcttggtggccaagcccatcttcctgctcgcgccccctctttttccacctctgcgcgtatcagctcgtccaacccccatggtgtttcctccctctcggctcccttgctccctccccatggcgttccccctagatgctcgtgatctgttccccacggtgcaggcaaatgttctttccctccctgcagcagcaccttggtggttgtcgagcagcacgtcgcgcttgcgcagcctcggtcacgacgttgttcaccccggtacgctaatgatcgagatgcgaaggccagggtctaggttgaccccaagtggtgcaaaggatggcctacttcgagaggcgatgtcagcggaccaatctagaagattgatgatctctacataaaaacatgattacattgattcaactctgatctggtgtttggcatttgtttttcctctacattagtttctcattattatatttgtatagatttgtattcttgagactaacctaatcaacattctttacataataatattataaggaggattaatttcatatacaatactatatataatgagatgaatcatttggccttacgatatgtgtaagaaataatgctttgataattggcagcctatcaagagtttcattagtgtagaacaattgttttgttgttaacatagtgtataacatttgatgtcgtaatttgttttggaagaaaatttaatctcaacatagaattttttactgacaggtttatggtcttttaatatctacaggttgtggaaactgagatcattgtaactcaaatgagagcttggcacttagcatatagatgccactagaaccaatctggaaatactgtgagatatagagtgataaaaggcattaatgtaagtactacataaatgtactacttgtattttttaataatcaatgcttcaaaagtctatatagatgctgactggtgtcagggttttcccattatttgaattgtgtatgcaactattgtggtatatcaatgaccttccgagaagatacaatggcgttcttagtagtaacgctgcttgatttctatagttggagtcatcacacagctaacatttgcactttaactgtttggtgaaatgcttgggagaaagaggccagcaagaatggagtcatggaacatcggcaggaggagtgcagcagcggcaaccgatgtatcccttgaacaatctggttttgacaagatgcaaatcaatctagtgtacattgtattccacacttgcaaagattgtttggctaattacaagattatttcagtgttttggtttggattaagagtacacttatgtatgaaatattgattggtactcatttatattatttttattatatcattattaaatatata

SEQ ID NO: 73869 - DNA, 1446 bp, Zea Mays
agccaaatcattcacgtatccatcttcaagccagccgtctccttatccctacgacgccgctcacctgtgctcatcttccagccgccctctccgcccagcagcagagcacaccatcctctccactcggatccccaagccctcgcctccagctttgccacgacatccgtcccctgctcggacctccacccggccgcgtcctcgccggtggccagcgccgctgcatcgccattcctagcgtcggccttggcaccgcttccccgagcgccccagtcgagctcgcccatcctctgctctagccctttctccacgccgtagctgatctcgcccctctcctcagccatggacacgacgacctgcagcccttcttggtggccaagcccatcttcctgctcgcgccccctctttttccacctctgcgcgtatcagctcgtccaacccccatggtgtttcctccctctcggctcccttgctccctccccatggcgttccccctagatgctcgtgatctgttccccacggtgcaggcaaatgttctttccctccctgcagcagcaccttggtggttgtcgagcagcacgtcgcgcttgcgcagcctcggtcacgacgttgttcaccccggttgtggaaactgagatcattgtaactcaaatgagagcttggcacttagcatatagatgccactagaaccaatctggaaatactgtgaggtaattttatatcttgttctgtaagttggagaattaatagctagcatatgcttccttaatgatgttttctttttccatgcatcttcatattaccaaaccctcttcttgccggaaaaacagatatagagtgataaaaggcattaatgtaagtactacataaatgtactacttgtattttttaataatcaatgcttcaaaagtctatatagatgctgactggtgtcagggttttcccattattgtaagtttgttacaagcaagtgctttccctcacacaacttcaccttttctttacatgtttattacttttgtttgctggttttgacttacagtgaattgtgtatgcaactattgtggtatatcaatgaccttccgagaagatacaatggcgttcttagtagtaacgctgcttgatttctatagttggagtcatcacacagctaacatttgcactttaactgtttggtgaaatgcttgggagaaagaggccagcaagaatggagtcatggaacatcggcaggaggagtgcagcagcggcaaccgatgtatcccttgaacaatctggttttgacaagatgcaaatcaatctagtgtacattgtattccacacttgcaaagattgtttggctaattacaagattatttcagtgttttggtttggattaagagtacacttatgtatgaaatattgattggtactcatttatattatttttattatatcattattaaatatata

SEQ ID NO: 73870 - DNA, 1453 bp, Zea Mays
ctcaaagtcaataaagcggctacacgtttcgcccaagttcaaatcccatccagagattatcgaagcaacgagcgccgctccccttcacccctccgcctccctccaaaactcaaattgacctagcgagaagcagaagaggcgaagagtgataacgaacctctcccacatcgatttccccaaatcgcctggcgcgatgaccacggcaggagaggtggattcggcagcaggaggtgaggacctggagccgctcttcgactacaagcgagtgcagcccaggatgacgttctgctttgacgacagcgacttggaggtggccgacatcttcaaatactgcaacaagcgcccaaaggtccacacctccacggaggagggtaagcctgacgaggaggtcgccgctgccaaggtggtggtcctcgatgaggaggattggttgcagccaccgccacccaaggccgcattcagggcaacggcagaggaagatagtgcgtttcgggaactgaggttgaagaaacaagagtgggcaaaattcgctgaatcagctgaggatatattgcaaaagctggatgaaatcacgaacaaagaagttggtcccaaggaaccacctgaacagataattctagatgaggagtctgaacctcaagtcgagaaagccagggaaaagatagtcatatcaatccaggacaaggatgggcagcaacagatgcgtgtatacaaggacgaaaagttcgacaagcttctcaaggtgtacgccaagaaggaccttgatctggaggacgaagacatgattgaggtgcgtcgtaagcagagttgaggtcatcctcgatatatgctggtttagacaaactcagccttttcgctgtcttcttttgcttccaacaaaggcttatttgtctatatatcatataacaaagacgttgaggccatccttgatatatgcgtgaaaccctcgagatatattgcagctgtaccgtgtacgtgggggtttggttggcaaaagccatctgcagaaatgccagagcagcctctgttattggatgtcagtatacaagacgccagtcagctagcaatgccaacagaagtgactaaggatggcgccaactgtagctaataatcttcttagttttggttactttctaaaaataacatattgattttcaaagttacgtgctggtttctaggcctcaagtcgtctcgcaagacatagtttgtattaaaattattaaagcatgtccaatagttcctcaaaaactctttaaatagggtgttagtaataaaaaccattctataacagttctttaaatgaggtttctaaataaactaaattcttaaatatccctatttagttctcaaactttaggagttgttttgcactttcaataacttgttttgcttatcaatcataccataaaatcacttgtctgctattgagtttgcacatgtgtacagtgatgta

SEQ ID NO: 73871 - DNA, 1551 bp, Zea Mays
ctcaaagtcaataaagcggctacacgtttcgcccaagttcaaatcccatccagagattatcgaagcaacgagcgccgctccccttcacccctccgcctccctccaaaactcaaattgacctagcgagaagcagaagaggcgaagagtgataacgaacctctcccacatcgatttccccaaatcgcctggcgcgatgaccacggcaggagaggtggattcggcagcaggaggtgaggacctggagccgctcttcgactacaagcgagtgcagcccaggatgacgttctgctttgacggatttgctggtttcgatgtgcagacagcgacttggaggtggccgacatcttcaaatactgcaacaagcgcccaaaggtccacacctccacggaggaggagggtaagcctgacgaggaggtcgccgctgccaaggtggtggtcctcgatgaggaggattggttgcagccaccgccacccaaggccgcattcagggcaacggcagaggaagatagtgcgtttcgggaactgaggttgaagaaacaagagtgggcaaaattcgctgaatcagctgaggatatattgcaaaagctggatgaaatcacgaacaaagaagttggtcccaaggaaccacctgaacagataattctagatgaggagtctgaacctcaagtcgagaaagccagggaaaagatagtcatatcaatccaggacaaggatgggcagcaacagatgcgtgtatacaaggacgaaaagttcgacaagcttctcaaggtgtacgccaagaaggcaaagctcaacccatctgatctgtcttttgtgtttgatggtgagaagattaatccatcatctacacctcaggaccttgatctggaggacgaagacatgattgaggtgcgtcgtaagcagagttgaggtcatcctcgatatatgctggtttagacaaactcagccttttcgctgtcttcttttgcttccaacaaaggcttatttgtctatatatcatataacaaagacgttgaggccatccttgatatatgcgtgaaaccctcgagatatattgcagctgtaccgtgtacgtgggggtttggttggcaaaagccatctgcagaaatgccagagcagcctctgttattggatgtcagtatacaagacgccagtcagctagcaatgccaacagaagtgactaaggatggcgccaactgtagctaataatcttcttagttttggttactttctaaaaataacatattgattttcaaagttacgtgctggtttctaggcctcaagtcgtctcgcaagacatagtttgtattaaaattattaaagcatgtccaatagttcctcaaaaactctttaaatagggtgttagtaataaaaaccattctataacagttctttaaatgaggtttctaaataaactaaattcttaaatatccctatttagttctcaaactttaggagttgttttgcactttcaataacttgttttgcttatcaatcataccataaaatcacttgtctgctattgagtttgcacatgtgtacagtgatgta

SEQ ID NO: 73872 - DNA, 1468 bp, Zea Mays
ctcaaagtcaataaagcggctacacgtttcgcccaagttcaaatcccatccagagattatcgaagcaacgagcgccgctccccttcacccctccgcctccctccaaaactcaaattgacctagcgagaagcagaagaggcgaagagtgataacgaacctctcccacatcgatttccccaaatcgcctggcgcgatgaccacggcaggagaggtggattcggcagcaggaggtgaggacctggagccgctcttcgactacaagcgagtgcagcccaggatgacgttctgctttgacgacagcgacttggaggtggccgacatcttcaaatactgcaacaagcgcccaaaggtccacacctccacggaggaggagggtaagcctgacgaggaggtcgccgcattcagggcaacggcagaggaagatagtgcgtttcgggaactgaggttgaagaaacaagagtgggcaaaattcgctgaatcagctgaggatatattgcaaaagctggatgaaatcacgaacaaagaagttggtcccaaggaaccacctgaacagataattctagatgaggagtctgaacctcaagtcgagaaagccagggaaaagatagtcatatcaatccaggacaaggatgggcagcaacagatgcgtgtatacaaggacgaaaagttcgacaagcttctcaaggtgtacgccaagaaggcaaagctcaacccatctgatctgtcttttgtgtttgatggtgagaagattaatccatcatctacacctcaggaccttgatctggaggacgaagacatgattgaggtgcgtcgtaagcagagttgaggtcatcctcgatatatgctggtttagacaaactcagccttttcgctgtcttcttttgcttccaacaaaggcttatttgtctatatatcatataacaaagacgttgaggccatccttgatatatgcgtgaaaccctcgagatatattgcagctgtaccgtgtacgtgggggtttggttggcaaaagccatctgcagaaatgccagagcagcctctgttattggatgtcagtatacaagacgccagtcagctagcaatgccaacagaagtgactaaggatggcgccaactgtagctaataatcttcttagttttggttactttctaaaaataacatattgattttcaaagttacgtgctggtttctaggcctcaagtcgtctcgcaagacatagtttgtattaaaattattaaagcatgtccaatagttcctcaaaaactctttaaatagggtgttagtaataaaaaccattctataacagttctttaaatgaggtttctaaataaactaaattcttaaatatccctatttagttctcaaactttaggagttgttttgcactttcaataacttgttttgcttatcaatcataccataaaatcacttgtctgctattgagtttgcacatgtgtacagtgatgta

SEQ ID NO: 73873 - DNA, 1447 bp, Zea Mays
gcggctacacgtttcgcccaagttcaaatcccatccagagattatcgaagcaacgagcgccgctccccttcacccctccgcctccctccaaaactcaaattgacctagcgagaagcagaagaggcgaagagtgataacgaacctctcccacatcgatttccccaaatcgcctggcgcgatgaccacggcaggagaggtggattcggcagcaggagacagcgacttggaggtggccgacatcttcaaatactgcaacaagcgcccaaaggtccacacctccacggaggaggagggtaagcctgacgaggaggtcgccgctgccaaggtggtggtcctcgatgaggaggattggttgcagccaccgccacccaaggccgcattcagggcaacggcagaggaagatagtgcgtttcgggaactgaggttgaagaaacaagagtgggcaaaattcgctgaatcagctgaggatatattgcaaaagctggatgaaatcacgaacaaagaagttggtcccaaggaaccacctgaacagataattctagatgaggagtctgaacctcaagtcgagaaagccagggaaaagatagtcatatcaatccaggacaaggatgggcagcaacagatgcgtgtatacaaggacgaaaagttcgacaagcttctcaaggtgtacgccaagaaggcaaagctcaacccatctgatctgtcttttgtgtttgatggtgagaagattaatccatcatctacacctcaggaccttgatctggaggacgaagacatgattgaggtgcgtcgtaagcagagttgaggtcatcctcgatatatgctggtttagacaaactcagccttttcgctgtcttcttttgcttccaacaaaggcttatttgtctatatatcatataacaaagacgttgaggccatccttgatatatgcgtgaaaccctcgagatatattgcagctgtaccgtgtacgtgggggtttggttggcaaaagccatctgcagaaatgccagagcagcctctgttattggatgtcagtatacaagacgccagtcagctagcaatgccaacagaagtgactaaggatggcgccaactgtagctaataatcttcttagttttggttactttctaaaaataacatattgattttcaaagttacgtgctggtttctaggcctcaagtcgtctcgcaagacatagtttgtattaaaattattaaagcatgtccaatagttcctcaaaaactctttaaatagggtgttagtaataaaaaccattctataacagttctttaaatgaggtttctaaataaactaaattcttaaatatccctatttagttctcaaactttaggagttgttttgcactttcaataacttgttttgcttatcaatcataccataaaatcacttgtctgctattgagtttgcacatgtgtacagtgatgta

SEQ ID NO: 73874 - DNA, 1439 bp, Zea Mays
gcggctacacgtttcgcccaagttcaaatcccatccagagattatcgaagcaacgagcgccgctccccttcacccctccgcctccctccaaaactcaaattgacctagcgagaagcagaagaggcgaagagtgataacgaacctctcccacatcgatttccccaaatcgcctggcgcgatgaccacggcaggagaggtggattcggcagcaggaggtgaggacctggagccgctcttcgactacaagcgagtgcagcccaggatgacgttctgctttgacgacagcgacttggaggtggccgacatcttcaaatactgcaacaagcgcccaaaggtccacacctccacggaggagggtaagcctgacgaggaggtcgccgctgccaaggtggtggtcctcgatgaggaggattggttgcagccaccgccacccaaggccgcattcagggcaacggcagaggaagatagtgcgtttcgggaactgaggttgaagaaacaagagtgggcaaaattcgctgaatcagctgaggatatattgcaaaagctggatgaaatcacgaacaaagaagttggtcccaaggaaccacctgaacagataattctagatgaggagtctgaacctcaagtcgagaaagccagggaaaagatagtcatatcaatccaggacaaggatgggcagcaacagatgcgtgtatacaaggacgaaaagttcgacaagcttctcaaggtgtacgccaagaagggaccttgatctggaggacgaagacatgattgaggtgcgtcgtaagcagagttgaggtcatcctcgatatatgctggtttagacaaactcagccttttcgctgtcttcttttgcttccaacaaaggcttatttgtctatatatcatataacaaagacgttgaggccatccttgatatatgcgtgaaaccctcgagatatattgcagctgtaccgtgtacgtgggggtttggttggcaaaagccatctgcagaaatgccagagcagcctctgttattggatgtcagtatacaagacgccagtcagctagcaatgccaacagaagtgactaaggatggcgccaactgtagctaataatcttcttagttttggttactttctaaaaataacatattgattttcaaagttacgtgctggtttctaggcctcaagtcgtctcgcaagacatagtttgtattaaaattattaaagcatgtccaatagttcctcaaaaactctttaaatagggtgttagtaataaaaaccattctataacagttctttaaatgaggtttctaaataaactaaattcttaaatatccctatttagttctcaaactttaggagttgttttgcactttcaataacttgttttgcttatcaatcataccataaaatcacttgtctgctattgagtttgcacatgtgtacagtgatgta

SEQ ID NO: 73875 - DNA, 1186 bp, Zea Mays
aaatcccatccagagattatcgaagcaacgagcgccgctccccttcacccctccgcctccctccaaaactcaaattgacctagcgagaagcagaagaggcgaagagtgataacgaacctctcccacatcgatttccccaaatcgcctggcgcgatgaccacggttgaagaaacaagagtgggcaaaattcgctgaatcagctgaggatatattgcaaaagctggatgaaatcacgaacaaagaagttggtcccaaggaaccacctgaacagataattctagatgaggagtctgaacctcaagtcgagaaagccagggaaaagatagtcatatcaatccaggacaaggatgggcagcaacagatgcgtgtatacaaggacgaaaagttcgacaagcttctcaaggtgtacgccaagaaggcaaagctcaacccatctgatctgtcttttgtgtttgatggtgagaagattaatccatcatctacacctcaggaccttgatctggaggacgaagacatgattgaggtgcgtcgtaagcagagttgaggtcatcctcgatatatgctggtttagacaaactcagccttttcgctgtcttcttttgcttccaacaaaggcttatttgtctatatatcatataacaaagacgttgaggccatccttgatatatgcgtgaaaccctcgagatatattgcagctgtaccgtgtacgtgggggtttggttggcaaaagccatctgcagaaatgccagagcagcctctgttattggatgtcagtatacaagacgccagtcagctagcaatgccaacagaagtgactaaggatggcgccaactgtagctaataatcttcttagttttggttactttctaaaaataacatattgattttcaaagttacgtgctggtttctaggcctcaagtcgtctcgcaagacatagtttgtattaaaattattaaagcatgtccaatagttcctcaaaaactctttaaatagggtgttagtaataaaaaccattctataacagttctttaaatgaggtttctaaataaactaaattcttaaatatccctatttagttctcaaactttaggagttgttttgcactttcaataacttgttttgcttatcaatcataccataaaatcacttgtctgctattgagtttgcacatgtgtacagtgatgta

SEQ ID NO: 73876 - DNA, 1405 bp, Zea Mays
ctcctccgtctccgtcgatcatatcgggcgaggttagggagacggtttgtctggcgaagctacggaggtagattgtcaggcaggagaggtggattcggcagcaggaggtgaggacctggagccgctcttcgactacaagcgagtgcagcccaggatgacgttctgctttgacgacagcgacttggaggtggccgacatcttcaaatactgcaacaagcgcccaaaggtccacacctccacggaggaggagggtaagcctgacgaggaggtcgccgctgccaaggtggtggtcctcgatgaggaggattggttgcagccaccgccacccaaggccgcattcagggcaacggcagaggaagatagtgcgtttcgggaactgaggttgaagaaacaagagtgggcaaaattcgctgaatcagctgaggatatattgcaaaagctggatgaaatcacgaacaaagaagttggtcccaaggaaccacctgaacagataattctagatgaggagtctgaacctcaagtcgagaaagccagggaaaagatagtcatatcaatccaggacaaggatgggcagcaacagatgcgtgtatacaaggacgaaaagttcgacaagcttctcaaggtgtacgccaagaaggcaaagctcaacccatctgatctgtcttttgtgtttgatggtgagaagattaatccatcatctacacctcaggaccttgatctggaggacgaagacatgattgaggtgcgtcgtaagcagagttgaggtcatcctcgatatatgctggtttagacaaactcagccttttcgctgtcttcttttgcttccaacaaaggcttatttgtctatatatcatataacaaagacgttgaggccatccttgatatatgcgtgaaaccctcgagatatattgcagctgtaccgtgtacgtgggggtttggttggcaaaagccatctgcagaaatgccagagcagcctctgttattggatgtcagtatacaagacgccagtcagctagcaatgccaacagaagtgactaaggatggcgccaactgtagctaataatcttcttagttttggttactttctaaaaataacatattgattttcaaagttacgtgctggtttctaggcctcaagtcgtctcgcaagacatagtttgtattaaaattattaaagcatgtccaatagttcctcaaaaactctttaaatagggtgttagtaataaaaaccattctataacagttctttaaatgaggtttctaaataaactaaattcttaaatatccctatttagttctcaaactttaggagttgttttgcactttcaataacttgttttgcttatcaatcataccataaaatcacttgtctgctattgagtttgcacatgtgtacagtgatgta

SEQ ID NO: 73877 - DNA, 1392 bp, Zea Mays
atcacgacttgatgatttagcgcggcgacaggagacggcagcggatccagctgcggggggacaagggcaggagaggtggattcggcagcaggaggtgaggacctggagccgctcttcgactacaagcgagtgcagcccaggatgacgttctgctttgacgacagcgacttggaggtggccgacatcttcaaatactgcaacaagcgcccaaaggtccacacctccacggaggaggagggtaagcctgacgaggaggtcgccgctgccaaggtggtggtcctcgatgaggaggattggttgcagccaccgccacccaaggccgcattcagggcaacggcagaggaagatagtgcgtttcgggaactgaggttgaagaaacaagagtgggcaaaattcgctgaatcagctgaggatatattgcaaaagctggatgaaatcacgaacaaagaagttggtcccaaggaaccacctgaacagataattctagatgaggagtctgaacctcaagtcgagaaagccagggaaaagatagtcatatcaatccaggacaaggatgggcagcaacagatgcgtgtatacaaggacgaaaagttcgacaagcttctcaaggtgtacgccaagaaggcaaagctcaacccatctgatctgtcttttgtgtttgatggtgagaagattaatccatcatctacacctcaggaccttgatctggaggacgaagacatgattgaggtgcgtcgtaagcagagttgaggtcatcctcgatatatgctggtttagacaaactcagccttttcgctgtcttcttttgcttccaacaaaggcttatttgtctatatatcatataacaaagacgttgaggccatccttgatatatgcgtgaaaccctcgagatatattgcagctgtaccgtgtacgtgggggtttggttggcaaaagccatctgcagaaatgccagagcagcctctgttattggatgtcagtatacaagacgccagtcagctagcaatgccaacagaagtgactaaggatggcgccaactgtagctaataatcttcttagttttggttactttctaaaaataacatattgattttcaaagttacgtgctggtttctaggcctcaagtcgtctcgcaagacatagtttgtattaaaattattaaagcatgtccaatagttcctcaaaaactctttaaatagggtgttagtaataaaaaccattctataacagttctttaaatgaggtttctaaataaactaaattcttaaatatccctatttagttctcaaactttaggagttgttttgcactttcaataacttgttttgcttatcaatcataccataaaatcacttgtctgctattgagtttgcacatgtgtacagtgatgta

SEQ ID NO: 73878 - DNA, 1308 bp, Zea Mays
ccagcaccgccttcccggcgcggggccgccgccgccgccgccgccggagggcgggctgggcccgccgggcgacggcgctgggggaaagaacgggctgctgcagggcggcagcgggtccccgcagagctggaggttcccggcgaaggattcccgcgggaagcgcgagagcgatttgggaatggagccgttgaggttgttgtcggagacgtcgaaggagccgaggcccgcgatgctgatgctgggaatgctcccggagaggcggttgccgtcgagcctgagcacgcgcagcgcggtgaggctgttgagcgcgaaggggatggggcccgacaggaacagcgccttgaggaccggcagctggagcacgtcgtcggggatggtcccgaggacgcggttggagcggagcgagagcgcgcggaggttggtgagccggccgagcgtgcccggcgggatggcgccgacgaggccgacgcccgggagccgcacctcgacgacggtggcgttggcgttgtcgcacgtgaccccgacccagccgcacgccggggtggaggcgttccacccgaggcggcgctcgtgcggggtcgcggtcaggaacgccagcagcgccgaccgctccctcggcggcggctccgcgacggcgcagcgtgtgaaggccgcggcagcagcgagcaggaccgccagcgccgctacggatgcgccggggccggccattgcgacgcgcggtggagctgcgacgcggcttacgggtgaggcattggggggagggccgagggggggagctggagctggagcttttcttctcactggctggcgctgccgcttttctttgttgtctgcaggcggtggctttttgcttctcgggggtgagaaatttggggaggaagaggtgggaacgtgcgcgtgggcgtggtggtagtaggctgttttttgcgcgcgggtacagtggcagtggcgggtgtgggatcgagacgagacggacagtggcggcggcacccgtgacggcgtcttgtagtcagtgtgccctgcagccggccagaggggagccagccagcagcaggcggcttcgatagctgcctcggaccggcgcgtgtttccgtccgccgcctgcgcgcttggcgcgctcgttgagctggcgctgcctggcttgcacgcgtgtgaaccgtgaactggacgctggcacgctgctctgtgcatgcattgtgctccccaccgcggtcgctggatgtgcttgtcatcgaggcatcaagctggaagtggcccgttggcatgcaaacatggcgtactcggtacccttttttatatacaaaaaat

SEQ ID NO: 73879 - DNA, 1517 bp, Zea Mays
ccgcgacggccgcggccgacccggacgcgccgcctccgaggtcctccttggacgaggacgtcaagccgccggacgccggcgggggctgccccctggccgccgcggatgtcgcggccttgggcccgtcgcgggcgccggcgccacgacgtctggacaccacgcagagcacggtggcgatgaggatgaggagccccaccaccacggcgcccacgacgatgcccgcgattgcggccccggagagctttcgcttcttggatgagcccggcgcggggccgccgccgccgccgccgccggagggcgggctgggcccgccgggcgacggcgctgggggaaagaacgggctgctgcagggcggcagcgggtccccgcagagctggaggttcccggcgaaggattcccgcgggaagcgcgagagcgatttgggaatggagccgttgaggttgttgtcggagacgtcgaaggagccgaggcccgcgatgctgatgctgggaatgctcccggagaggcggttgccgtcgagcctgagcacgcgcagcgcggaacagcgccttgaggaccggcagctggagcacgtcgtcggggatggtcccgaggacgcggttggagcggagcgagagcgcgcggaggttggtgagccggccgagcgtgcccggcgggatggcgccgacgaggccgacgcccgggagccgcacctcgacgacggtggcgttggcgttgtcgcacgtgaccccgacccagccgcacgccggggtggaggcgttccacccgaggcggcgctcgtgcggggtcgcggtcaggaacgccagcagcgccgaccgctccctcggcggcggctccgcgacggcgcagcgtgtgaaggccgcggcagcagcgagcaggaccgccagcgccgctacggatgcgccggggccggccattgcgacgcgcggtggagctgcgacgcggcttacgggtgaggcattggggggagggccgagggggggagctggagctggagcttttcttctcactggctggcgctgccgcttttctttgttgtctgcaggcggtggctttttgcttctcgggggtgagaaatttggggaggaagaggtgggaacgtgcgcgtgggcgtggtggtagtaggctgttttttgcgcgcgggtacagtggcagtggcgggtgtgggatcgagacgagacggacagtggcggcggcacccgtgacggcgtcttgtagtcagtgtgccctgcagccggccagaggggagccagccagcagcaggcggcttcgatagctgcctcggaccggcgcgtgtttccgtccgccgcctgcgcgcttggcgcgctcgttgagctggcgctgcctggcttgcacgcgtgtgaaccgtgaactggacgctggcacgctgctctgtgcatgcattgtgctccccaccgcggtcgctggatgtgcttgtcatcgaggcatcaagctggaagtggcccgttggcatgcaaacatggcgtactcggtacccttttttatatacaaaaaat

SEQ ID NO: 73880 - DNA, 918 bp, Zea Mays
atttaacattatgaaacacacggggacggcttcgacgaaatggaggctaaggggagggattcgccgttataaaaaggctggtcaaagccaacactctaaaatggacatgaatactccattacaaggtttagagcagtattaatctagttgacaccgggttccgtccccaagcgccgtcgccgtgagttctccatcgcgagatctcctccatcgccgtcgcattctccttcgcgcggaagccgggcgccgctgcctcagaccaagagccgccgattgaagctggccccctacgcgcaggccaacctgacgtgggcgcagcacgccttcaacgagaaggtggcggaggtctggcgcgtcgccgtggacgccttcgaacgcctcaagggccggtgggcgtgcctgcagaagcgcacggaggtgaagctgcaggacctcccggtggtgctgggcgcctgctgcgtgctgcacaacatctgcgagtcgcgcggggagggcatggaccccgcgctccgatgcgacatcgacgacgacgagacggtgccggagaaccccgtgcggtcggacggcgccaccaaggctagggacgacatcgcgcacaacctgctccacagcggacgagccggcaccaaattcttctgaattctctcagtcgggtttggttgcgcgtggaaggcagcaagagcgagcagcggcctctcgaatattcctggtaacggaaaaataacggcgtgagtatgagtgaatatctatcgttattacctattcatatccattttaaagtgttggctttgcaaagcctttttataacgacaaatttttttcgttaacctccatcttgtcgaagccaccccgtggtgtttcataatgacaaatttctcctgattggggagagcctgaaaaaatacaacagcgtataat

SEQ ID NO: 73881 - DNA, 734 bp, Zea Mays
cgtgagttctccatcgcgagatctcctccatcgccgtcgcattctccttcgcgcggaagccgggcgccgctgcctcagaccaagagccgccgattgaagctggccccctacgcgcaggccaacctgacgtgggcgcagcacgccttcaacgagaaggtggcggaggtctggcgcgtcgccgtggacgccttcgaacgcctcaagggccggtgggcgtgcctgcagaagcgcacggaggtgaagctgcaggacctcccggtggtgctgggcgcctgctgcgtgctgcacaacatctgcgagtcgcgcggggagggcatggaccccgcgctccgatgcgacatcgacgacgacgagacggtgccggagaaccccgtgcggtcggacggcgccaccaaggctagggacgacatcgcgcacaacctgctccacagcggacgagccggcaccaaattcttctgaattctctcaggtttggttgcgcgtggaaggcagcaagagcgagcagcggcctctcgaatattcctggtaacggaaaaataacggcgtgagtatgagtgaatatctatcgttattacctattcatatccattttaaagtgttggctttgcaaagcctttttataacgacaaatttttttcgttaacctccatcttgtcgaagccaccccgtggtgtttcataatgacaaatttctcctgattggggagagcctgaaaaaatacaacagcgtataat

SEQ ID NO: 73882 - DNA, 1522 bp, Zea Mays
cgccggcccacagtgaagttggttcacgcgaggcggcaccgtcgccgacaaggaccacggggagccgagccggagccgcctagacgagggactagcgaatggagaactctagccaaccacgtcaccgtccacgtcacgcccacctataaactggagcgagcccgagccaccacccaacctgacccttcgtcccgcatcgtttcctcctcctttttccccgttcgtcccctggattggcgtctacccggcgcgacccggaccgaatcctaagtccgcctgccgccgccgccgccggctcccgttggaaacggagctcccgcgtttcctctcacgagagccgccgggctcgtgcctccccatacttgtcagcgtctcatggacagagcagttcttcacgccggtcacaagagtctcctgcggccgcggcagcgaagcaagctgcagagtgggaggatgttcggtgctcggtctgcatggaccacccgcacaacgctgtcctgctggtctgctcgtcgcacgagaagggctgccgccccttcatgtgcgacaccagctcgcggcactccaattgctatgaccagtaccggaaggcctccaaggactcctccaaggattcagggacagagtgcagcgagtgccagcagcaggtccagctctcgtgcccgctgtgccgtgggccagtcagcgactgcatcaaggactacgacgcacggaggtacatgaacaccaaggtccggtcctgcaccatggagtcgtgcgagttcaggggtgcctaccaggagctgaggaagcatgctagggtggagcacccagcggcgaggccgatggaggtagaccctgaacggcagcgggattggcgccggatggagcagcagcgggaccttggagacttgatgagcatgctgcgttcagggttcaacgccaacgttgaggacaacagcggcgaacttggagccaccgaagaaggggaagaggaagccgcaaggactccggcctccataacaatggtcttcatcatgccgtctagaggctcaatcatgcagtacttaacagaacgtagcagggcgatcattctggtcagccggaggcgagcaagcagtggcagtggtgatgctgaggccacagcaccagacagcgaggaaggtgatgaccctatgttgccatcggcagaggcgtctgctggttcgcagcgttcttccgaagaagaggctgacggtgaccacgcccaatgacagaagtcagctagcaggaggtgtgccatggcccatggcatcttcttggcctgaagatcccgacctgcttggtatgtgatgctgtatgctgggaagaaaacatggatgcaggtgccatcaagcaatggaaaggaaaaaaaaacaattgagtggttgcatctatcttgtctgaatggatttctttttccatgcgttgtaattctctctcatatattatcatatgaaatagattcggccgtatttgcactgcataatataatctttatatggcggctaggagtgaccgtact

SEQ ID NO: 73883 - DNA, 2598 bp, Zea Mays
atgcaggtcttagacggtggagtcaatggcatagcagccaagcacgtggatgaaagacgcaaacctctcaatctcctagatggcctcgtggacgcgcgggaccgtgtcgcagagccagccatgcgcgacgtccgtccctcactctcttcgattctggactgctcgcgcctctcgcctccgtgttcacatcgccctacccgccgtaccacatgccagacgctggccaccggctccgccgccgcagcgactacatcgggggtgtgcagcctcccatcagactcccgccagcgccaaacccttcgactcggcgatggccacaccggagaagaagtcatacccacctgccatggtcgcggaggaggtgagggtgtgaggctgactggcgattggacccgtccccccattccacccgccgtcgccgacgtgtctgtccaagcttggcatctggaaactggttcgtcccttcttatatgaggccagctattttcaactcaactctgaatgaagtttcagaggcaggaacacaagcacaaactactgtccagattgacgaggagccaggttctgatgaagacgacgatcttccaccacttgaagcaaacaccaacatgaatagaccatatgaactaatttctcaacggaacaactaattgaattttttgtccagtgcaaggccagcggcagacgcgctgcctgcctcccctggcttgctcctggccatctagcgtctgtcatgtgttctgcctgatgggttttctccttttttgcatatgccatatgttctgcccatctgttaattgccgccgctgttttcaggaaggtttagcgattgaggctgagtttgggcagacctcatcattgttagtttgtttgttatagagtaagctagcccaggggaaaaatagtgaacctggcagatgatggtatggagtaacctgttgttccattcaataggacaatctgagattgtagagatgtggtttctgcacttaatttttgggcgacaatttcaagggagtaacgtggtagtgatttctctccctttattatgatgaagttgtggcttgtatcaatgtcgtatctgcaatttgaaatatgtatatatgccatgtccgattagcaacacaagacattgggatctccaaatttcacggcattgattcaggatataattctctggccagtagactggcctactaacttcatttatggacaaaaatcaagggtgtacatcatccttatggcttatctggaaatggattgccatgtttctcaattctctcccagctactacaacctacccttcacgctttcctcaagcccaccgtgtgccagcccacgcatgcttgtttaaaacgcgcggcgggtgtgcgcgttagtcgttggtttcttgtgcgctgtgctgccgcgcttgcatatgctcagacttgcaggcaatctgtcgtgtgcgcggctgggctggaccttcaaatgcagatgcacagcagacggagtgtacaggtaagtgtatatgctgtgggcaggtggtgactactgacatcgtgcacagggtttcgtcgagtcggaacggacctgccgggtttcgtttcttccaagcttgggcatctcaagcatgcatggatgctgagctgtctgacgctttaaaatcgcctgcgggtaggagatgatgggaatgggagcagcaaagcaaagaacgatcaggcggcgggccattgcttaaacttggttgcttcggacgatatgatgcgcgacgagtctacatgcaagatcggttggcactgtggctcaaattaaaggctggtttaaagcatgcatcattggtgttagatacagaaaggaaaagaaaaaactggcacggcaggcgcgatacatatacactgcgcccgtctcttcggtggacactgaagaggagctggtgaatggacgggaaaaaaagaattctatgcatacggaatgcaaatctattggacagaaaaagattctatacataccaaatacaaacatattatgagttacattgcaggcccacacgaacaaaaattacatctctttagactttttgtagcttctgtccgtaagggtctgtaggttataaatgtgagaggctgcaacagaacgagtttgcatccggtatgctgtcgatcagagcccgaccaaacactcaggagtcgagaggcacgctacaccacacccgtgttcggaaccgcgcgataaccatcttgtcgaactatggaaatgttgctaagcaacaacgatctctaataccatgcagagatacaaatgcaattacatgatatgattatactttcatgaacaaattgtatgattggaagagtatatagacttggtaaagaacccataatggaaccccatagagaaaaacttctagaagattagacatggaaagaaccttgactggataatagataaacttgtaaacatagagttggactcatacacgacttggtaaccaacttggtacctgtcataaactttataacgagtcgttgttttccatgtaaacggcccctcaggatacaaaaggttataccgactgcaaataagtcgttgtagccaggttgtggtatagtgaggaag

SEQ ID NO: 73884 - DNA, 2697 bp, Zea Mays
atgcaggtcttagacggtggagtcaatggcatagcagccaagcacgtggatgaaagacgcaaacctctcaatctcctagatggcctcgtggacgcgcgggaccgtgtcgcagagccagccatgcgcgacgtccgtccctcactctcttcgattctggactgctcgcgcctctcgcctccgtgttcacatcgccctacccgccgtaccacatgccagacgctggccaccggctccgccgccgcagcgactacatcgggggtgtgcagcctcccatcagactcccgccagcgccaaacccttcgactcggcgatggccacaccggagaagaagtcatacccacctgccatggtcgcggaggaggtgagggtgtgaggctgactggcgattggacccgtccccccattccacccgccgtcgccgacgtgtctgtccaagtttcagaggcaggaacacaagcacaaactactgtccagattgacgaggagccaggttctgatgaagacgacgatcttccaccacttgaagcaaacaccaacatgaatagaccatatgaactaatttctcaacggaacaactaattgaattttttgtccagtgcaaggtgccagcggcagacgcgctgcctgcctcccctggcttgctcctggccatctagcgtctgtcatgtgttctgcctgatgggttttctccttttttgcatatgccatatgttctgcccatctgttaattgccgccgctgttttcaggaaggtttagcgattgaggctgagtttgggcagacctcatcattgttagtttgtttgttatagagtaagctagcccaggggaaaaatagtgaacctggcagatgatggtatggagtaacctgttgttccattcaataggacaatctgagattgtagagatgtggtttctgcacttaatttttgggcgacaatttcaagggagtaacgtggtagtgatttctctccctttattatgatgaagttgtggcttgtatcaatgtcgtatctgcaatttgaaatatgtatatatgccatgtccgattagcaacacaagacattgggatctccaaatttcacggcattgattcaggatataattctctggccagtagactggcctactaacttcatttatggacaaaaatcaagggtgtacatcatccttatggcttatctggaaatggattgccatgtttctcaattctctcccagctactacaacctacccttcacgctttcctcaaggtatgaatctgcttcaggacctcctatttatgtgccattggttaattagagttcttatgttgttttagatggctggttctgctttcctgtttacgaattatgcgtcgtcgatagggcgtccgtaagggcgcctctgaccacctactgtgtgcttcgctacattttcagcccaccgtgtgccagcccacgcatgcttgtttaaaacgcgcggcgggtgtgcgcgttagtcgttggtttcttgtgcgctgtgctgccgcgcttgcatatgctcagacttgcaggcaatctgtcgtgtgcgcggctgggctggaccttcaaatgcagatgcacagcagacggagtgtacaggtaagtgtatatgctgtgggcaggtggtgactactgacatcgtgcacagggtttcgtcgagtcggaacggacctgccgggtttcgtttcttccaagcttgggcatctcaagcatgcatggatgctgagctgtctgacgctttaaaatcgcctgcgggtaggagatgatgggaatgggagcagcaaagcaaagaacgatcaggcggcgggccattgcttaaacttggttgcttcggacgatatgatgcgcgacgagtctacatgcaagatcggttggcactgtggctcaaattaaaggctggtttaaagcatgcatcattggtgttagatacagaaaggaaaagaaaaaactggcacggcaggcgcgatacatatacactgcgcccgtctcttcggtggacactgaagaggagctggtgaatggacgggaaaaaaagaattctatgcatacggaatgcaaatctattggacagaaaaagattctatacataccaaatacaaacatattatgagttacattgcaggcccacacgaacaaaaattacatctctttagactttttgtagcttctgtccgtaagggtctgtaggttataaatgtgagaggctgcaacagaacgagtttgcatccggtatgctgtcgatcagagcccgaccaaacactcaggagtcgagaggcacgctacaccacacccgtgttcggaaccgcgcgataaccatcttgtcgaactatggaaatgttgctaagcaacaacgatctctaataccatgcagagatacaaatgcaattacatgatatgattatactttcatgaacaaattgtatgattggaagagtatatagacttggtaaagaacccataatggaaccccatagagaaaaacttctagaagattagacatggaaagaaccttgactggataatagataaacttgtaaacatagagttggactcatacacgacttggtaaccaacttggtacctgtcataaactttataacgagtcgttgttttccatgtaaacggcccctcaggatacaaaaggttataccgactgcaaataagtcgttgtagccaggttgtggtatagtgaggaag

SEQ ID NO: 73885 - DNA, 2446 bp, Zea Mays
atgcaggtcttagacggtggagtcaatggcatagcagccaagcacgtggatgaaagacgcaaacctctcaatctcctagatggcctcgtggacgcgcgggaccgtgtcgcagagccagccatgcgcgacgtccgtccctcactctcttcgattctggactgctcgcgcctctcgcctccgtgttcacatcgccctacccgccgtaccacatgccagacgctggccaccggctccgccgccgcagcgactacatcgggggtgtgcagcctcccatcagactcccgccagcgccaaacccttcgactcggcgatggccacaccggagaagaagtcatacccacctgccatggtcgcggaggaggtgagggtgtgaggctgactggcgattggacccgtccccccattccacccgccgtcgccgacgtgtctgtccaagaggcaggaacacaagcacaaactactgtccagattgacgaggagccaggttctgatgaagacgacgatcttccaccacttgaagcaaacaccaacatgaatagaccatatgaactaatttctcaacggaacaactaattgaattttttgtccagtgcaaggtattagttgtgtaacaaattgttaaattctcacatgtcagatagtggtgcattccatggcttgatctgtctctttttactctaggccagcggcagacgcgctgcctgcctcccctggcttgctcctggccatctagcgtctgtcatgtgttctgcctgatgggttttctccttttttgcatatgccatatgttctgcccatctgttaattgccgccgctgttttcaggaaggtttagcgattgaggctgagtttgggcagacctcatcattgttagtttgtttgttatagagtaagctagcccaggggaaaaatagtgaacctggcagatgatggtatggagtaacctgttgttccattcaataggacaatctgagattgtagagatgtggtttctgcacttaatttttgggcgacaatttcaagggagtaacgtggtagtgatttctctccctttattatgatgaagttgtggcttgtatcaatgtcgtatctgcaatttgaaatatgtatatatgccatgtccgattagcaacacaagacattgggatctccaaatttcacggcattgattcaggtgtgtgcacttcttttcttgttccgtgcttgttttataccttctttttgaattgatgatttttcataggatataattctctggccagtagactggcctactaacttcatttatggacaaaaatcaagggtgtacatcatccttatggcttatctggaaatggattgccatgtttctcaattctctcccagctactacaacctacccttcacgctttcctcaagggtttcgtcgagtcggaacggacctgccgggtttcgtttcttccaagcttgggcatctcaagcatgcatggatgctgagctgtctgacgctttaaaatcgcctgcgggtaggagatgatgggaatgggagcagcaaagcaaagaacgatcaggcggcgggccattgcttaaacttggttgcttcggacgatatgatgcgcgacgagtctacatgcaagatcggttggcactgtggctcaaattaaaggctggtttaaagcatgcatcattggtgttagatacagaaaggaaaagaaaaaactggcacggcaggcgcgatacatatacactgcgcccgtctcttcggtggacactgaagaggagctggtgaatggacgggaaaaaaagaattctatgcatacggaatgcaaatctattggacagaaaaagattctatacataccaaatacaaacatattatgagttacattgcaggcccacacgaacaaaaattacatctctttagactttttgtagcttctgtccgtaagggtctgtaggttataaatgtgagaggctgcaacagaacgagtttgcatccggtatgctgtcgatcagagcccgaccaaacactcaggagtcgagaggcacgctacaccacacccgtgttcggaaccgcgcgataaccatcttgtcgaactatggaaatgttgctaagcaacaacgatctctaataccatgcagagatacaaatgcaattacatgatatgattatactttcatgaacaaattgtatgattggaagagtatatagacttggtaaagaacccataatggaaccccatagagaaaaacttctagaagattagacatggaaagaaccttgactggataatagataaacttgtaaacatagagttggactcatacacgacttggtaaccaacttggtacctgtcataaactttataacgagtcgttgttttccatgtaaacggcccctcaggatacaaaaggttataccgactgcaaataagtcgttgtagccaggttgtggtatagtgaggaag

SEQ ID NO: 73886 - DNA, 2768 bp, Zea Mays
atgcaggtcttagacggtggagtcaatggcatagcagccaagcacgtggatgaaagacgcaaacctctcaatctcctagatggcctcgtggacgcgcgggaccgtgtcgcagagccagccatgcgcgacgtccgtccctcactctcttcgattctggactgctcgcgcctctcgcctccgtgttcacatcgccctacccgccgtaccacatgccagacgctggccaccggctccgccgccgcagcgactacatcgggggtgtgcagcctcccatcagactcccgccagcgccaaacccttcgactcggcgatggccacaccggagaagaagtcatacccacctgccatggtcgcggaggaggtgagggtgtgaggctgactggcgattggacccgtccccccattccacccgccgtcgccgacgtgtctgtccaaggaacacaagcacaaactactgtccagattgacgaggagccaggttctgatgaagacgacgatcttccaccacttgaagcaaacaccaacatgaatagaccatatgaactaatttctcaacggaacaactaattgaattttttgtccagtgcaaggtattagttgtgtaacaaattgttaaattctcacatgtcagatagtggtgcattccatggcttgatctgtctctttttactctaggccagcggcagacgcgctgcctgcctcccctggcttgctcctggccatctagcgtctgtcatgtgttctgcctgatgggttttctccttttttgcatatgccatatgttctgcccatctgttaattgccgccgctgttttcaggaaggtttagcgattgaggctgagtttgggcagacctcatcattgttagtttgtttgttatagagtaagctagcccaggggaaaaatagtgaacctggcagatgatggtatggagtaacctgttgttccattcaataggacaatctgagattgtagagatgtggtttctgcacttaatttttgggcgacaatttcaagggagtaacgtggtagtgatttctctccctttattatgatgaagttgtggcttgtatcaatgtcgtatctgcaatttgaaatatgtatatatgccatgtccgattagcaacacaagacattgggatctccaaatttcacggcattgattcaggatataattctctggccagtagactggcctactaacttcatttatggacaaaaatcaagggtgtacatcatccttatggcttatctggaaatggattgccatgtttctcaattctctcccagctactacaacctacccttcacgctttcctcaaggtatgaatctgcttcaggacctcctatttatgtgccattggttaattagagttcttatgttgttttagatggctggttctgctttcctgtttacgaattatgcgtcgtcgatagggcgtccgtaagggcgcctctgaccacctactgtgtgcttcgctacattttcagcccaccgtgtgccagcccacgcatgcttgtttaaaacgcgcggcgggtgtgcgcgttagtcgttggtttcttgtgcgctgtgctgccgcgcttgcatatgctcagacttgcaggcaatctgtcgtgtgcgcggctgggctggaccttcaaatgcagatgcacagcagacggagtgtacaggtaagtgtatatgctgtgggcaggtggtgactactgacatcgtgcacagggtttcgtcgagtcggaacggacctgccgggtttcgtttcttccaagcttgggcatctcaagcatgcatggatgctgagctgtctgacgctttaaaatcgcctgcgggtaggagatgatgggaatgggagcagcaaagcaaagaacgatcaggcggcgggccattgcttaaacttggttgcttcggacgatatgatgcgcgacgagtctacatgcaagatcggttggcactgtggctcaaattaaaggctggtttaaagcatgcatcattggtgttagatacagaaaggaaaagaaaaaactggcacggcaggcgcgatacatatacactgcgcccgtctcttcggtggacactgaagaggagctggtgaatggacgggaaaaaaagaattctatgcatacggaatgcaaatctattggacagaaaaagattctatacataccaaatacaaacatattatgagttacattgcaggcccacacgaacaaaaattacatctctttagactttttgtagcttctgtccgtaagggtctgtaggttataaatgtgagaggctgcaacagaacgagtttgcatccggtatgctgtcgatcagagcccgaccaaacactcaggagtcgagaggcacgctacaccacacccgtgttcggaaccgcgcgataaccatcttgtcgaactatggaaatgttgctaagcaacaacgatctctaataccatgcagagatacaaatgcaattacatgatatgattatactttcatgaacaaattgtatgattggaagagtatatagacttggtaaagaacccataatggaaccccatagagaaaaacttctagaagattagacatggaaagaaccttgactggataatagataaacttgtaaacatagagttggactcatacacgacttggtaaccaacttggtacctgtcataaactttataacgagtcgttgttttccatgtaaacggcccctcaggatacaaaaggttataccgactgcaaataagtcgttgtagccaggttgtggtatagtgaggaag

SEQ ID NO: 73887 - DNA, 2843 bp, Zea Mays
atgcaggtcttagacggtggagtcaatggcatagcagccaagcacgtggatgaaagacgcaaacctctcaatctcctagatggcctcgtggacgcgcgggaccgtgtcgcagagccagccatgcgcgacgtccgtccctcactctcttcgattctggactgctcgcgcctctcgcctccgtgttcacatcgccctacccgccgtaccacatgccagacgctggccaccggctccgccgccgcagcgactacatcgggggtgtgcagcctcccatcagactcccgccagcgccaaacccttcgactcggcgatggccacaccggagaagaagtcatacccacctgccatggtcgcggaggaggtgagggtgtgaggctgactggcgattggacccgtccccccattccacccgccgtcgccgacgtgtctgtccaagaggcaggaacacaagcacaaactactgtccagattgacgaggagccaggttctgatgaagacgacgatcttccaccacttgaagcaaacaccaacatgaatagaccatatgaactaatttctcaacggaacaactaattgaattttttgtccagtgcaaggtattagttgtgtaacaaattgttaaattctcacatgtcagatagtggtgcattccatggcttgatctgtctctttttactctaggccagcggcagacgcgctgcctgcctcccctggcttgctcctggccatctagcgtctgtcatgtgttctgcctgatgggttttctccttttttgcatatgccatatgttctgcccatctgttaattgccgccgctgttttcaggaaggtttagcgattgaggctgagtttgggcagacctcatcattgttagtttgtttgttatagagtaagctagcccaggggaaaaatagtgaacctggcagatgatggtatggagtaacctgttgttccattcaataggacaatctgagattgtagagatgtggtttctgcacttaatttttgggcgacaatttcaagggagtaacgtggtagtgatttctctccctttattatgatgaagttgtggcttgtatcaatgtcgtatctgcaatttgaaatatgtatatatgccatgtccgattagcaacacaagacattgggatctccaaatttcacggcattgattcaggtgtgtgcacttcttttcttgttccgtgcttgttttataccttctttttgaattgatgatttttcataggatataattctctggccagtagactggcctactaacttcatttatggacaaaaatcaagggtgtacatcatccttatggcttatctggaaatggattgccatgtttctcaattctctcccagctactacaacctacccttcacgctttcctcaaggtatgaatctgcttcaggacctcctatttatgtgccattggttaattagagttcttatgttgttttagatggctggttctgctttcctgtttacgaattatgcgtcgtcgatagggcgtccgtaagggcgcctctgaccacctactgtgtgcttcgctacattttcagcccaccgtgtgccagcccacgcatgcttgtttaaaacgcgcggcgggtgtgcgcgttagtcgttggtttcttgtgcgctgtgctgccgcgcttgcatatgctcagacttgcaggcaatctgtcgtgtgcgcggctgggctggaccttcaaatgcagatgcacagcagacggagtgtacaggtaagtgtatatgctgtgggcaggtggtgactactgacatcgtgcacagggtttcgtcgagtcggaacggacctgccgggtttcgtttcttccaagcttgggcatctcaagcatgcatggatgctgagctgtctgacgctttaaaatcgcctgcgggtaggagatgatgggaatgggagcagcaaagcaaagaacgatcaggcggcgggccattgcttaaacttggttgcttcggacgatatgatgcgcgacgagtctacatgcaagatcggttggcactgtggctcaaattaaaggctggtttaaagcatgcatcattggtgttagatacagaaaggaaaagaaaaaactggcacggcaggcgcgatacatatacactgcgcccgtctcttcggtggacactgaagaggagctggtgaatggacgggaaaaaaagaattctatgcatacggaatgcaaatctattggacagaaaaagattctatacataccaaatacaaacatattatgagttacattgcaggcccacacgaacaaaaattacatctctttagactttttgtagcttctgtccgtaagggtctgtaggttataaatgtgagaggctgcaacagaacgagtttgcatccggtatgctgtcgatcagagcccgaccaaacactcaggagtcgagaggcacgctacaccacacccgtgttcggaaccgcgcgataaccatcttgtcgaactatggaaatgttgctaagcaacaacgatctctaataccatgcagagatacaaatgcaattacatgatatgattatactttcatgaacaaattgtatgattggaagagtatatagacttggtaaagaacccataatggaaccccatagagaaaaacttctagaagattagacatggaaagaaccttgactggataatagataaacttgtaaacatagagttggactcatacacgacttggtaaccaacttggtacctgtcataaactttataacgagtcgttgttttccatgtaaacggcccctcaggatacaaaaggttataccgactgcaaataagtcgttgtagccaggttgtggtatagtgaggaag

SEQ ID NO: 73888 - DNA, 3381 bp, Zea Mays
ggacgcgttcctcgacctcgtccgcgccgacgcggcgcggctcgtgcgcctgcgccacccgggcgtgctgcacgtcgtgcaggcgctcgacgagaccaaggccgccatggccatggccactgagcccgtcttcgcctccgtagctaacgcgctcgggtgccttgacaatgttggcaaggtgcccaaggaggtcaagggcatggaaatggggctacttgagattaaacatgggctgctacaagttgcagagacgttggattttcttcataacaatgctcatcttgcccatcgagctatatcgcctgagacggtatttataacttctaacgggtcttggaagcttggtgggtttggttttgctctttcggttgatcaagcagcagttggtttgagtttgacttcatcacaactatttcattattcggactatgatgtcgaggatacagctttacctcttcaaccatcgttgaactatactgcaccagaattggtccaaagtagagattctaaagttggctctgcttgtgatatgtttagctttggatgtttggcttacaatctggttgctcgtagaccacttctggactgccataacaatgttaaaatgtacatgaatgccttgacatatttaacaagtgaagccttttctaatattccttctgatttggtattggatttgcaaaggatgctatcgatggatgcactatcacgtcctagtgctatggcctttacaggttcttctttcttccgggatgatacgaggttgcgcgctcttcgtttccttgaccatttgcttgtatgtatttattattcccctggataagttaaaagttgtacctgtcaactcagcagcaagagtcttgcctgtttgactagacaatgaaacgacacaatttagtacctgacaatggccctaaattttaaggcaccattcctttcaggagagagataatatgcagaagacagagtttttgaaggcattatcagatatgtggaaggattttgattcccgagttcttcgatataaagtgcttcctcctctttgtgctgagttacgcaacatggttatgcagccaatgattttgcctatggttctaactatagcagaatctcaggataaaggggattttgaactcgcaacactgcctgcgcttgttccagtgtttgcttcagcgtcaggtgaaactctacttttgcttgtgaagcatgcagatctcatcattaacaaggccactcaggaacatttgatatcacatgttcttccaatgctggtccgggcttatgatgacaatgatccccggttacaggaagaagttctgcgtcgaacagtaccactgtctcgtcaacttgacaccaagctagtcaataaagctgtgcttcctcgtgtacatggattagctctaaagacaacagttgctgcggtgcgtgtgaatgcgttgcgctgtttaggagatcttgtgccatccttggacaaagaaggaataatgggtatcttggagactgttcggcgttgcacagctgttgaccatactgcgccaactcttatgtgcacacttggtgttgctaatgcaatctataaacaacacatcaactgaatgtacaacaatttgccaagtatatgctatttgtcaaggacattacaagcaagattgaagagaagcgtggtgtgactgttacagataatgggaacacagaggtaaaatcatcaccttcattggcaaacgggatccattctgaacctatgtcaggacaaataccagttgcaaagagcagccctgcatgggatgaagactggggtcctactaagaaatccggtgttccatctctttcagttgattctagtgcacaaacaaagcaaccctcagtagacccttttgacttcggtactcaaacaaagcaatccacaacactcccctttgatttgagcacccaggcaaagcagccaccatcagtttctcatgttacagcagctacaatcccacctgcgcaaccacaaccatcactacaatctcttgcggctagttcaggacctaaaatttctggctcatgtgtccctgtcgacattgagtggcctcctcgaagaagctcgtcatccaacttcaatgcacccttgtctattagcaaggataatggttctggaaggctgtctagcgatggagttgatgatattgatccttttgctgattggcccccaatacctagcaatgttaatagcatttcagcaaccgagcattggccaagcataaatcaaaatatttcgggatttagctcaggcaacatagtttttggtggcagcgggaattctgtagggcaaacgaaaagcaaccaaatgagctggtcaaacacgtctaatctaatgggcacaaactcaactggcagctatttgaatcagggcagtgcagctctaggtttcggaaatccaaatggaggattgagcacaggtctctccaatccaagtagttccagtacaggcctgagcatgatgctaccaaaatctgattctggatcattgtcgacgtcggtcaacaatgccgcacatgggctactaagacttgcccctcctccatccacatcggttggaagagggcgcggtagaaatcaaggacagtccgcactctcccgagcatcaaggcctcatgccaactcggcatcaggacaacaacctatcctggatttactctagtaagagatggtcgcctctgttcttcgcgttcggattgtcaatgtgtacatcctcaaacctttgtaagggttttgaattgggcatcgaggccatcttcatactggtgacagaagaaatgttttgtgtatatttctgtccaaactcggctgtagctttcagagtttgtgaatagttgacatgtttatatgggctgtgaagttttgaaatgtttaatgggccttacaggactgggggttcaactgcagtggtgctgtgagccgtgcatgcgatggacaactctcctatcgagcattttcatcaattcgctacacggccctacatccctgtgcctgtgtgtgtaccactagcttgcattgcattgcatgcagagtgtactattgatgggtgatgcattggatggggcatgcacagcaggaatatttgcagttgatgagcggcaggaatcagtggctcagggaaaattgaatggcgatctggccttcactccacatgagtacgtacctatacgtacgcatgtatcatcagacggagtcaggaggatgcgggtagtgtccctgtgttgtctaccattttgtctcaccaatgtggtcccaaagtacatgatgtttttttacttttacacactttaaaccgaccgtaatatttaattcttctgtaaatacttattttattttatcattaaatatattttttaatta

SEQ ID NO: 73889 - DNA, 3280 bp, Zea Mays
ggacgcgttcctcgacctcgtccgcgccgacgcggcgcggctcgtgcgcctgcgccacccgggcgtgctgcacgtcgtgcaggcgctcgacgagaccaaggccgccatggccatggccactgagcccgtcttcgcctccgtagctaacgcgctcgggtgccttgacaatgttggcaaggtgcccaaggaggtcaagggcatggaaatggggctacttgagattaaacatgggctgctacaagttgcagagacgttggattttcttcataacaatgctcatcttgcccatcgagctatatcgcctgagacggtatttataacttctaacgggtcttggaagcttggtgggtttggttttgctctttcggttgatcaagcagcagttggtttgagtttgacttcatcacaactatttcattattcggactatgatgtcgaggatacagctttacctcttcaaccatcgttgaactatactgcaccagaattggtccaaagtagagattctaaagttggctctgcttgtgatatgtttagctttggatgtttggcttacaatctggttgctcgtagaccacttctggactgccataacaatgttaaaatgtacatgaatgccttgacatatttaacaagtgaagccttttctaatattccttctgatttggtattggatttgcaaaggatgctatcgatggatgcactatcacgtcctagtgctatggcctttacaggttcttctttcttccgggatgatacgaggttgcgcgctcttcgtttccttgaccatttgcttgtatgtatttattattcccctggataagttaaaaggagagagataatatgcagaagacagagtttttgaaggcattatcagatatgtggaaggattttgattcccgagttcttcgatataaagtgcttcctcctctttgtgctgagttacgcaacatggttatgcagccaatgattttgcctatggttctaactatagcagaatctcaggataaaggggattttgaactcgcaacactgcctgcgcttgttccagtgtttgcttcagcgtcaggtgaaactctacttttgcttgtgaagcatgcagatctcatcattaacaaggccactcaggaacatttgatatcacatgttcttccaatgctggtccgggcttatgatgacaatgatccccggttacaggaagaagttctgcgtcgaacagtaccactgtctcgtcaacttgacaccaagctagtcaataaagctgtgcttcctcgtgtacatggattagctctaaagacaacagttgctgcggtgcgtgtgaatgcgttgcgctgtttaggagatcttgtgccatccttggacaaagaaggaataatgggtatcttggagactgttcggcgttgcacagctgttgaccatactgcgccaactcttatgtgcacacttggtgttgctaatgcaatctataaacaacacatcaactgaatgtacaacaatttgccaagtatatgctatttgtcaaggacattacaagcaagattgaagagaagcgtggtgtgactgttacagataatgggaacacagaggtaaaatcatcaccttcattggcaaacgggatccattctgaacctatgtcaggacaaataccagttgcaaagagcagccctgcatgggatgaagactggggtcctactaagaaatccggtgttccatctctttcagttgattctagtgcacaaacaaagcaaccctcagtagacccttttgacttcggtactcaaacaaagcaatccacaacactcccctttgatttgagcacccaggcaaagcagccaccatcagtttctcatgttacagcagctacaatcccacctgcgcaaccacaaccatcactacaatctcttgcggctagttcaggacctaaaatttctggctcatgtgtccctgtcgacattgagtggcctcctcgaagaagctcgtcatccaacttcaatgcacccttgtctattagcaaggataatggttctggaaggctgtctagcgatggagttgatgatattgatccttttgctgattggcccccaatacctagcaatgttaatagcatttcagcaaccgagcattggccaagcataaatcaaaatatttcgggatttagctcaggcaacatagtttttggtggcagcgggaattctgtagggcaaacgaaaagcaaccaaatgagctggtcaaacacgtctaatctaatgggcacaaactcaactggcagctatttgaatcagggcagtgcagctctaggtttcggaaatccaaatggaggattgagcacaggtctctccaatccaagtagttccagtacaggcctgagcatgatgctaccaaaatctgattctggatcattgtcgacgtcggtcaacaatgccgcacatgggctactaagacttgcccctcctccatccacatcggttggaagagggcgcggtagaaatcaaggacagtccgcactctcccgagcatcaaggcctcatgccaactcggcatcaggacaacaacctatcctggatttactctagtaagagatggtcgcctctgttcttcgcgttcggattgtcaatgtgtacatcctcaaacctttgtaagaggtttaccttttctcatgctcccgtgcttagggttttgaattgggcatcgaggccatcttcatactggtgacagaagaaatgttttgtgtgtgtaccttttctcatgtactccgcgcaaaattgtacaacaatgtttaatgggccttataggtggacctttctcatgactgggggttcaactgcagtggtgctgtgagccgtgcatgcgatggacaactctcctatcgagcattttcatcaattcgctacacggccctacatccctgtgcctgtgtgtgtaccactagcttgcattgcattgcatgcagagtgtactattgatgggtgatgcattggatggggcatgcacagcaggaatatttgcagttgatgagcggcaggaatcagtggctcagggaaaattgaatggcgatctggccttcactccacatgagtacgtacctatacgtacgcatgtatcatcagacggagtcaggaggatgcgggtagtgtccctgtgttgtctaccattttgtctcaccaatgtggtcccaaagtacatgatgtttttttacttttacacactttaaaccgaccgtaatatttaattcttctgtaaatacttattttattttatcattaaatatattttttaatta

SEQ ID NO: 73890 - DNA, 3671 bp, Zea Mays
ggacgcgttcctcgacctcgtccgcgccgacgcggcgcggctcgtgcgcctgcgccacccgggcgtgctgcacgtcgtgcaggcgctcgacgagaccaaggccgccatggccatggccactgagcccgtcttcgcctccgtagctaacgcgctcgggtgccttgacaatgttggcaaggtgcccaaggaggtcaagggcatggaaatggggctacttgagattaaacatgggctgctacaagttgcagagacgttggattttcttcataacaatgctcatcttgcccatcgagctatatcgcctgagacggtatttataacttctaacgggtcttggaagcttggtgggtttggttttgctctttcggttgatcaagcagcagttggtttgagtttgacttcatcacaactatttcattattcggactatgatgtcgaggatacagctttacctcttcaaccatcgttgaactatactgcaccagaattggtccaaagtagagattctaaagttggctctgcttgtgatatgtttagctttggatgtttggcttacaatctggttgctcgtagaccacttctggactgccataacaatgttaaaatgtacatgaatgccttgacatatttaacaagtgaagccttttctaatattccttctgatttggtattggatttgcaaaggatgctatcgatggatgcactatcacgtcctagtgctatggcctttacaggttcttctttcttccgggatgatacgaggttgcgcgctcttcgtttccttgaccatttgcttgtatgtatttattattcccctggataagttaaaaggttgcaatctcttgtttttgtatcagtctttcttctttgctgtctgagaatcacctttgactagaattgttttcagttgtacctgtcaactcagcagcaagagtcttgcctgtttgactagacaatgaaacgacacaatttagtacctgacaatggccctaaattttaaggcaccattcctttcaggagagagataatatgcagaagacagagtttttgaaggcattatcagatatgtggaaggattttgattcccgagttcttcgatataaagaaaaataacagacgtatatttatttgatccattggttattccaaagctgactctctttgcaaccaggtgcttcctcctctttgtgctgagttacgcaacatggttatgcagccaatgattttgcctatggttctaactatagcagaatctcaggataaaggggattttgaactcgcaacactgcctgcgcttgttccagtgtttgcttcagcgtcaggtgaaactctacttttgcttgtgaagcatgcagatctcatcattaacaaggccactcaggaacatttgatatcacatgttcttccaatgctggtccgggcttatgatgacaatgatccccggttacaggaagaagttctgcgtcgaacagtaccactgtctcgtcaacttgacaccaagctagtcaataaagctgtgcttcctcgtgtacatggattagctctaaagacaacagttgctgcggtgcgtgtgaatgcgttgcgctgtttaggagatcttgtgccatccttggacaaagaaggaataatgggtatcttggagactgttcggcgttgcacagctgttgaccatactgcgccaactcttatgtgcacacttggtgttgctaatgcaatctataaacaacacatcaactgaatgtacaacaatttgccaagtatatgctatttgtcaaggacattacaagattgaagagaagcgtggtgtgactgttacagataatgggaacacagaggtaaaatcatcaccttcattggcaaacgggatccattctgaacctatgtcaggacaaataccagttgcaaagagcagccctgcatgggatgaagactggggtcctactaagaaatccggtgttccatctctttcagttgattctagtgcacaaacaaagcaaccctcagtagacccttttgacttcggtactcaaacaaagcaatccacaacactcccctttgatttgagcacccaggcaaagcagccaccatcagtttctcatgttacagcagctacaatcccacctgcgcaaccacaaccatcactacaatctcttgcggctagttcaggacctaaaatttctggctcatgtgtccctgtcgacattgagtggcctcctcgaagaagctcgtcatccaacttcaatgcacccttgtctattagcaaggataatggttctggaaggctgtctagcgatggagttgatgatattgatccttttgctgattggcccccaatacctagcaatgttaatagcatttcagcaaccgagcattggccaagcataaatcaaaatatttcgggatttagctcaggcaacatagtttttggtggcagcgggaattctgtagggcaaacgaaaagcaaccaaatgagctggtcaaacacgtctaatctaatgggcacaaactcaactggcagctatttgaatcagggcagtgcagctctaggtttcggaaatccaaatggaggattgagcacaggtctctccaatccaagtagttccagtacaggcctgagcatgatgctaccaaaatctgattctggatcattgtcgacgtcggtcaacaatgccgcacatgggctactaagacttgcccctcctccatccacatcggttggaagagggcgcggtagaaatcaaggacagtccgcactctcccgagcatcaaggcctcatgccaactcggcatcaggacaacaacctatcctggatttactctagtaagagatggtcgcctctgttcttcgcgttcggattgtcaatgtgtacatcctcaaacctttgtaaggtgagcatcatactgttcttttggacatgcatgtggcgaaagcagttctttttgttcattttgaagctgggtggccttggtttatagtctgaagggattctacttcggggatcttgcagaggtttaccttttctcatgctcccgtgcttagggttttgaattgggcatcgaggccatcttcatactggtgacagaagaaatgttttgtgtatatttctgtccaaactcggctgtagctttcagagtttgtgaatagttgacatgtttatatgggctgtgaagttttgaaatgtttaatgggccttacaggactgggggttcaactgcagtggtgctgtgagccgtgcatgcgatggacaactctcctatcgagcattttcatcaattcgctacacggccctacatccctgtgcctgtgtgtgtaccactagcttgcattgcattgcatgcagagtgtactattgatgggtgatgcattggatggggcatgcacagcaggaatatttgcagttgatgagcggcaggaatcagtggctcagggaaaattgaatggcgatctggccttcactccacatgagtacgtacctatacgtacgcatgtatcatcagacggagtcaggaggatgcgggtagtgtccctgtgttgtctaccattttgtctcaccaatgtggtcccaaagtacatgatgtttttttacttttacacactttaaaccgaccgtaatatttaattcttctgtaaatacttattttattttatcattaaatatattttttaatta

SEQ ID NO: 73891 - DNA, 4039 bp, Zea Mays
ggacgcgttcctcgacctcgtccgcgccgacgcggcgcggctcgtgcgcctgcgccacccgggcgtgctgcacgtcgtgcaggcgctcgacgagaccaaggccgccatggccatggccactgagcccgtcttcgcctccgtagctaacgcgctcgggtgccttgacaatgttggcaaggtgcccaaggaggtcaagggcatggaaatggggctacttgagattaaacatgggctgctacaagttgcagagacgttggattttcttcataacaatgctcatcttgcccatcgagctatatcgcctgagacggtatttataacttctaacgggtcttggaagcttggtgggtttggttttgctctttcggttgatcaagcagcagttggtttgagtttgacttcatcacaactatttcattattcggactatgatgtcgaggatacagctttacctcttcaaccatcgttgaactatactgcaccagaattggtccaaagtagagattctaaagttggctctgcttgtgatatgtttagctttggatgtttggcttacaatctggttgctcgtagaccacttctggactgccataacaatgttaaaatgtacatgaatgccttgacatatttaacaagtgaagccttttctaatattccttctgatttggtattggatttgcaaaggatgctatcgatggatgcactatcacgtcctagtgctatggcctttacaggttcttctttcttccgggatgatacgaggttgcgcgctcttcgtttccttgaccatttgcttgtatgtatttattattcccctggataagttaaaaggagagagataatatgcagaagacagagtttttgaaggcattatcagatatgtggaaggattttgattcccgagttcttcgatataaagtatgttcaatactgtgatccattatatcttcttctgatcaaggcaccattcttttatttatttgagcatcattttgttttactacatatcatatcattgaagctattggaacctgcatatgttcaattaaaccgacacatctacccagatcccataatgtttggttgctatcagcatgtggcacttcctgtatggaaagttggaaataaataaaagaatatctaaaccttgatttctagatttgaacttgtcacagtacgaatcaattctctggttgacccattcttacgatgtgattccgttttttctgtctgtgcctttcaaactgttttgtccaggaaaaataacagacgtatatttatttgatccattggttattccaaagctgactctctttgcaaccaggtgcttcctcctctttgtgctgagttacgcaacatggttatgcagccaatgattttgcctatggttctaactatagcagaatctcaggataaaggggattttgaactcgcaacactgcctgcgcttgttccagtgtttgcttcagcgtcaggtgaaactctacttttgcttgtgaagcatgcagatctcatcattaacaaggccactcaggaacatttgatatcacatgttcttccaatgctggtccgggcttatgatgacaatgatccccggttacaggaagaagttctgcgtcgaacagtaccactgtctcgtcaacttgacaccaagctagtcaataaagctgtgcttcctcgtgtacatggattagctctaaagacaacagttgctgcggtgcgtgtgaatgcgttgcgctgtttaggagatcttgtgccatccttggacaaagaaggaataatgggtatcttggagactgttcggcgttgcacagctgttgaccatactgcgccaactcttatgtgcacacttggtgttgctaatgcaatctataaacaacacatcaactgaatgtacaacaatttgccaagtatatgctatttgtcaaggacattacaagattgaagagaagcgtggtgtgactgttacagataatgggaacacagaggtaaaatcatcaccttcattggcaaacgggatccattctgaacctatgtcaggacaaataccagttgcaaagagcagccctgcatgggatgaagactggggtcctactaagaaatccggtgttccatctctttcagttgattctagtgcacaaacaaagcaaccctcagtagacccttttgacttcggtactcaaacaaagcaatccacaacactcccctttgatttgagcacccaggcaaagcagccaccatcagtttctcatgttacagcagctacaatcccacctgcgcaaccacaaccatcactacaatctcttgcggctagttcaggacctaaaatttctggctcatgtgtccctgtcgacattgagtggcctcctcgaagaagctcgtcatccaacttcaatgcacccttgtctattagcaaggataatggttctggaaggctgtctagcgatggagttgatgatattgatccttttgctgattggcccccaatacctagcaatgttaatagcatttcagcaaccgagcattggccaagcataaatcaaaatatttcgggatttagctcaggcaacatagtttttggtggcagcgggaattctgtagggcaaacgaaaagcaaccaaatgagctggtcaaacacgtctaatctaatgggcacaaactcaactggcagctatttgaatcagggcagtgcagctctaggtttcggaaatccaaatggaggattgagcacaggtctctccaatccaagtagttccagtacaggcctgagcatgatgctaccaaaatctgattctggatcattgtcgacgtcggtcaacaatgccgcacatgggctactaagacttgcccctcctccatccacatcggttggaagagggcgcggtagaaatcaaggacagtccgcactctcccgagcatcaaggcctcatgccaactcggcatcaggacaacaacctatcctggatttactctagtaagagatggtcgcctctgttcttcgcgttcggattgtcaatgtgtacatcctcaaacctttgtaaggtgagcatcatactgttcttttggacatgcatgtggcgaaagcagttctttttgttcattttgaagctgggtggccttggtttatagtctgaagggattctacttcggggatcttgcagaggtttaccttttctcatgctcccgtgcttagggttttgaattgggcatcgaggccatcttcatactggtgacagaagaaatgttttgtgtatatttctgtccaaactcggctgtagctttcagagtttgtgaatagttgacatgtttatatgggctgtgaagttttgaaatgtttaatgggccttacaggtgtgtaccttttctcatgtactccgcgcaaaattgtacaacaatgtttaatgggccttataggtggacctttctcatgtactccacgctccaccaacaatgtttggccttatatatatttggtgactcggtgttatagacaaaagccagatgttatactcgctatccttggttggattcttgtgtcccaaatctctgacgttgaccttgtacaggactgggggttcaactgcagtggtgctgtgagccgtgcatgcgatggacaactctcctatcgagcattttcatcaattcgctacacggccctacatccctgtgcctgtgtgtgtaccactagcttgcattgcattgcatgcagagtgtactattgatgggtgatgcattggatggggcatgcacagcaggaatatttgcagttgatgagcggcaggaatcagtggctcagggaaaattgaatggcgatctggccttcactccacatgagtacgtacctatacgtacgcatgtatcatcagacggagtcaggaggatgcgggtagtgtccctgtgttgtctaccattttgtctcaccaatgtggtcccaaagtacatgatgtttttttacttttacacactttaaaccgaccgtaatatttaattcttctgtaaatacttattttattttatcattaaatatattttttaatta

SEQ ID NO: 73892 - DNA, 1208 bp, Zea Mays
ggcgcggctcgtgcgcctgcgccacccgggcgtgctgcacgtcgtgcaggcgctcgacgagaccaaggccgccatggccatggccactgagcccgtcttcgcctccgtagctaacgcgctcgggtgccttgacaatgttggcaaggtgcccaaggaggtcaagggcatggaaatggggctacttgagattaaacatgggctgctacaagttgcagagacgttggattttcttcataacaatgctcatcttgcccatcgagctatatcgcctgagacggtatttataacttctaacgggtcttggaagcttggtgggtttggttttgctctttcggttgatcaagcagcagttggtttgagtttgacttcatcacaactatttcattattcggactatgatgtcgaggatacagctttacctcttcaaccatcgttgaactatactgcaccagaattggtccaaagtagagattctaaagttggctctgcttgtgatatgtttagctttggatgtttggcttacaatctggttgctcgtagaccacttctggactgccataacaatgttaaaatggttcttctttcttccgggatgatacgaggttgcgcgctcttcgtttccttgaccatttgcttgtatgtatttattattcccctggataagttaaaaggttgcaatctcttgtttttgtatcagtctttcttctttgctgtctgagaatcacctttgactagaattgttttcagttgtacctgtcaactcagcagcaagagtcttgcctgtttgactagacaatgaaacgacacaatttagtacctgacaatggccctaaattttaaggcaccattcctttcaggagagagataatatgcagaagacagagtttttgaaggcattatcagatatgtggaaggattttgattcccgagttcttcgatataaagtatgttcaatactgtgatccattatatcttcttctgatcaaggcaccattcttttatttatttgagcatcattttgttttactacatatcatatcattgaagctattggaacctgcatatgttcaattaaaccgacacatctacccagatcccataatgtttggttgctatcagcatgtggcacttcctgtatggaaagttggaaataaataaaagaatatctaaaccttgatttctagatttgaacttgtcacagtacgaat

SEQ ID NO: 73893 - DNA, 591 bp, Zea Mays
gctcgtgcgcctgcgccacccgggcgtgctgcacgtcgtgcaggcgctcgacgagaccaaggccgccatggccatggccactgagcccgtcttcgcctccgtagctaacgcgctcgggtgccttgacaatgttggcaaggtgcccaaggaggtcaagggcatggaaatggggctacttgagattaaacatgggctgctacaagttgcagagacgttggattttcttcataacaatgctcatcttgcccatcgagctatatcgcctgagacggtatttataacttctaacgggtcttggaagcttggtgggtttggttttgctctttcggttgatcaagcagcagttggtttgagtttgacttcatcacaactatttcattattcggactatgatgtcgaggatacagctttacctcttcaaccatcgttgaactatactgcaccagaattggtccaaagtagagattctaaagttggctctgcttgtgatatgtttagctttggatgtttggcttacaatctggttgctcgtagaccacttctggactgccataacaatgttaaaatgttttgcaagtagaccatcttgtt

SEQ ID NO: 73894 - DNA, 2280 bp, Zea Mays
caatgattttgcctatggttctaactatagcagaatctcaggataaaggggattttgaactcgcaacactgcctgcgcttgttccagtgtttgcttcagcgtcaggtgaaactctacttttgcttgtgaagcatgcagatctcatcattaacaaggccactcaggaacatttgatatcacatgttcttccaatgctggtccgggcttatgatgacaatgatccccggttacaggaagaagttctgcgtcgaacagtaccactgtctcgtcaacttgacaccaagtcaataaagctgtgcttcctcgtgtacatggattagctctaaagacaacagttgctgcggtgcgtgtgaatgcgttgcgctgtttaggagatcttgtgccatccttggacaaagaaggaataatgggtatcttggagactgttcggcgttgcacagctgttgaccatactgcgccaactcttatgtgcacacttggtgttgctaatgcaatctataaacaacacatcaactgaatgtacaacaatttgccaagtatatgctatttgtcaaggacattacaagcaagattgaagagaagcgtggtgtgactgttacagataatgggaacacagaggtaaaatcatcaccttcattggcaaacgggatccattctgaacctatgtcaggacaaataccagttgcaaagagcagccctgcatgggatgaagactggggtcctactaagaaatccggtgttccatctctttcagttgattctagtgcacaaacaaagcaaccctcagtagacccttttgacttcggtactcaaacaaagcaatccacaacactcccctttgatttgagcacccaggcaaagcagccaccatcagtttctcatgttacagcagctacaatcccacctgcgcaaccacaaccatcactacaatctcttgcggctagttcaggacctaaaatttctggctcatgtgtccctgtcgacattgagtggcctcctcgaagaagctcgtcatccaacttcaatgcacccttgtctattagcaaggataatggttctggaaggctgtctagcgatggagttgatgatattgatccttttgctgattggcccccaatacctagcaatgttaatagcatttcagcaaccgagcattggccaagcataaatcaaaatatttcgggatttagctcaggcaacatagtttttggtggcagcgggaattctgtagggcaaacgaaaagcaaccaaatgagctggtcaaacacgtctaatctaatgggcacaaactcaactggcagctatttgaatcagggcagtgcagctctaggtttcggaaatccaaatggaggattgagcacaggtctctccaatccaagtagttccagtacaggcctgagcatgatgctaccaaaatctgattctggatcattgtcgacgtcggtcaacaatgccgcacatgggctactaagacttgcccctcctccatccacatcggttggaagagggcgcggtagaaatcaaggacagtccgcactctcccgagcatcaaggcctcatgccaactcggcatcaggacaacaacctatcctggatttactctagtaagagatggtcgcctctgttcttcgcgttcggattgtcaatgtgtacatcctcaaacctttgtaagggttttgaattgggcatcgaggccatcttcatactggtgacagaagaaatgttttgtgtgtgtaccttttctcatgtactccgcgcaaaattgtacaacaatgtttaatgggccttataggtggacctttctcatgactgggggttcaactgcagtggtgctgtgagccgtgcatgcgatggacaactctcctatcgagcattttcatcaattcgctacacggccctacatccctgtgcctgtgtgtgtaccactagcttgcattgcattgcatgcagagtgtactattgatgggtgatgcattggatggggcatgcacagcaggaatatttgcagttgatgagcggcaggaatcagtggctcagggaaaattgaatggcgatctggccttcactccacatgagtacgtacctatacgtacgcatgtatcatcagacggagtcaggaggatgcgggtagtgtccctgtgttgtctaccattttgtctcaccaatgtggtcccaaagtacatgatgtttttttacttttacacactttaaaccgaccgtaatatttaattcttctgtaaatacttattttattttatcattaaatatattttttaatta

SEQ ID NO: 73895 - DNA, 2238 bp, Zea Mays
ccagtgtttgcttcagcgtcaggccactcaggaacatttgatatcacatgttcttccaatgctggtccgggcttatgatgacaatgatccccggttacaggaagaagttctgcgtcgaacagtaccactgtctcgtcaacttgacaccaagctagtcaataaagctgtgcttcctcgtgtacatggattagctctaaagacaacagttgctgcggtgcgtgtgaatgcgttgcgctgtttaggagatcttgtgccatccttggacaaagaaggaataatgggtatcttggagactgttcggcgttgcacagctgttgaccatactgcgccaactcttatgtgcacacttggtgttgctaatgcaatctataaacaacacatcaactgaatgtacaacaatttgccaagtatatgctatttgtcaaggacattacaagcaagattgaagagaagcgtggtgtgactgttacagataatgggaacacagaggtaaaatcatcaccttcattggcaaacgggatccattctgaacctatgtcaggacaaataccagttgcaaagagcagccctgcatgggatgaagactggggtcctactaagaaatccggtgttccatctctttcagttgattctagtgcacaaacaaagcaaccctcagtagacccttttgacttcggtactcaaacaaagcaatccacaacactcccctttgatttgagcacccaggcaaagcagccaccatcagtttctcatgttacagcagctacaatcccacctgcgcaaccacaaccatcactacaatctcttgcggctagttcaggacctaaaatttctggctcatgtgtccctgtcgacattgagtggcctcctcgaagaagctcgtcatccaacttcaatgcacccttgtctattagcaaggataatggttctggaaggctgtctagcgatggagttgatgatattgatccttttgctgattggcccccaatacctagcaatgttaatagcatttcagcaaccgagcattggccaagcataaatcaaaatatttcgggatttagctcaggcaacatagtttttggtggcagcgggaattctgtagggcaaacgaaaagcaaccaaatgagctggtcaaacacgtctaatctaatgggcacaaactcaactggcagctatttgaatcagggcagtgcagctctaggtttcggaaatccaaatggaggattgagcacaggtctctccaatccaagtagttccagtacaggcctgagcatgatgctaccaaaatctgattctggatcattgtcgacgtcggtcaacaatgccgcacatgggctactaagacttgcccctcctccatccacatcggttggaagagggcgcggtagaaatcaaggacagtccgcactctcccgagcatcaaggcctcatgccaactcggcatcaggacaacaacctatcctggatttactctagtaagagatggtcgcctctgttcttcgcgttcggattgtcaatgtgtacatcctcaaacctttgtaagtctgaagggattctacttcggggatcttgcagaggtttaccttttctcatgctcccgtgcttagggttttgaattgggcatcgaggccatcttcatactggtgacagaagaaatgttttgtgtatatttctgtccaaactcggctgtagctttcagagtttgtgaatagttgacatgtttatatgggctgtgaagttttgaaatgtttaatgggccttacaggactgggggttcaactgcagtggtgctgtgagccgtgcatgcgatggacaactctcctatcgagcattttcatcaattcgctacacggccctacatccctgtgcctgtgtgtgtaccactagcttgcattgcattgcatgcagagtgtactattgatgggtgatgcattggatggggcatgcacagcaggaatatttgcagttgatgagcggcaggaatcagtggctcagggaaaattgaatggcgatctggccttcactccacatgagtacgtacctatacgtacgcatgtatcatcagacggagtcaggaggatgcgggtagtgtccctgtgttgtctaccattttgtctcaccaatgtggtcccaaagtacatgatgtttttttacttttacacactttaaaccgaccgtaatatttaattcttctgtaaatacttattttattttatcattaaatatattttttaatta

SEQ ID NO: 73896 - DNA, 1669 bp, Zea Mays
gattcctctcatcttcccattgctcacagcacatcaactgaatgtacaacaatttgccaagtatatgctatttgtcaaggacattacaagcaagattgaagagaagcgtggtgtgactgttacagataatgggaacacagaggtaaaatcatcaccttcattggcaaacgggatccattctgaacctatgtcaggacaaataccagttgcaaagagcagccctgcatgggatgaagactggggtcctactaagaaatccggtgttccatctctttcagttgattctagtgcacaaacaaagcaaccctcagtagacccttttgacttcggtactcaaacaaagcaatccacaacactcccctttgatttgagcacccaggcaaagcagccaccatcagtttctcatgttacagcagctacaatcccacctgcgcaaccacaaccatcactacaatctcttgcggctagttcaggacctaaaatttctggctcatgtgtccctgtcgacattgagtggcctcctcgaagaagctcgtcatccaacttcaatgcacccttgtctattagcaaggataatggttctggaaggctgtctagcgatggagttgatgatattgatccttttgctgattggcccccaatacctagcaatgttaatagcatttcagcaaccgagcattggccaagcataaatcaaaatatttcgggatttagctcaggcaacatagtttttggtggcagcgggaattctgtagggcaaacgaaaagcaaccaaatgagctggtcaaacacgtctaatctaatgggcacaaactcaactggcagctatttgaatcagggcagtgcagctctaggtttcggaaatccaaatggaggattgagcacaggtctctccaatccaagtagttccagtacaggcctgagcatgatgctaccaaaatctgattctggatcattgtcgacgtcggtcaacaatgccgcacatgggctactaagacttgcccctcctccatccacatcggttggaagagggcgcggtagaaatcaaggacagtccgcactctcccgagcatcaaggcctcatgccaactcggcatcaggacaacaacctatcctggatttactctagtaagagatggtcgcctctgttcttcgcgttcggattgtcaatgtgtacatcctcaaacctttgtaaggactgggggttcaactgcagtggtgctgtgagccgtgcatgcgatggacaactctcctatcgagcattttcatcaattcgctacacggccctacatccctgtgcctgtgtgtgtaccactagcttgcattgcattgcatgcagagtgtactattgatgggtgatgcattggatggggcatgcacagcaggaatatttgcagttgatgagcggcaggaatcagtggctcagggaaaattgaatggcgatctggccttcactccacatgagtacgtacctatacgtacgcatgtatcatcagacggagtcaggaggatgcgggtagtgtccctgtgttgtctaccattttgtctcaccaatgtggtcccaaagtacatgatgtttttttacttttacacactttaaaccgaccgtaatatttaattcttctgtaaatacttattttattttatcattaaatatattttttaatta

SEQ ID NO: 73897 - DNA, 1851 bp, Zea Mays
ctcatcttcccattgctcacagcacatcaactgaatgtacaacaatttgccaagtatatgctatttgtcaaggacattacaagcaagattgaagagaagcgtggtgtgactgttacagataatgggaacacagaggtaaaatcatcaccttcattggcaaacgggatccattctgaacctatgtcaggacaaataccagttgcaaagagcagccctgcatgggatgaagactggggtcctactaagaaatccggtgttccatctctttcagttgattctagtgcacaaacaaagcaaccctcagtagacccttttgacttcggtactcaaacaaagcaatccacaacactcccctttgatttgagcacccaggcaaagcagccaccatcagtttctcatgttacagcagctacaatcccacctgcgcaaccacaaccatcactacaatctcttgcggctagttcaggacctaaaatttctggctcatgtgtccctgtcgacattgagtggcctcctcgaagaagctcgtcatccaacttcaatgcacccttgtctattagcaaggataatggttctggaaggctgtctagcgatggagttgatgatattgatccttttgctgattggcccccaatacctagcaatgttaatagcatttcagcaaccgagcattggccaagcataaatcaaaatatttcgggatttagctcaggcaacatagtttttggtggcagcgggaattctgtagggcaaacgaaaagcaaccaaatgagctggtcaaacacgtctaatctaatgggcacaaactcaactggcagctatttgaatcagggcagtgcagctctaggtttcggaaatccaaatggaggattgagcacaggtctctccaatccaagtagttccagtacaggcctgagcatgatgctaccaaaatctgattctggatcattgtcgacgtcggtcaacaatgccgcacatgggctactaagacttgcccctcctccatccacatcggttggaagagggcgcggtagaaatcaaggacagtccgcactctcccgagcatcaaggcctcatgccaactcggcatcaggacaacaacctatcctggatttactctagtaagagatggtcgcctctgttcttcgcgttcggattgtcaatgtgtacatcctcaaacctttgtaagggtttaccttttctcatgctcccgtgcttagggttttgaattgggcatcgaggccatcttcatactggtgacagaagaaatgttttgtgtatatttctgtccaaactcggctgtagctttcagagtttgtgaatagttgacatgtttatatgggctgtgaagttttgaaatgtttaatgggccttacaggactgggggttcaactgcagtggtgctgtgagccgtgcatgcgatggacaactctcctatcgagcattttcatcaattcgctacacggccctacatccctgtgcctgtgtgtgtaccactagcttgcattgcattgcatgcagagtgtactattgatgggtgatgcattggatggggcatgcacagcaggaatatttgcagttgatgagcggcaggaatcagtggctcagggaaaattgaatggcgatctggccttcactccacatgagtacgtacctatacgtacgcatgtatcatcagacggagtcaggaggatgcgggtagtgtccctgtgttgtctaccattttgtctcaccaatgtggtcccaaagtacatgatgtttttttacttttacacactttaaaccgaccgtaatatttaattcttctgtaaatacttattttattttatcattaaatatattttttaatta

SEQ ID NO: 73898 - DNA, 1872 bp, Zea Mays
cttcccattgctcacagcacatcaactgaatgtacaacaatttgccaagtatatgctatttgtcaaggacattacaagcaagattgaagagaagcgtggtgtgactgttacagataatgggaacacagaggtaaaatcatcaccttcattggcaaacgggatccattctgaacctatgtcaggacaaataccagttgcaaagagcagccctgcatgggatgaagactggggtcctactaagaaatccggtgttccatctctttcagttgattctagtgcacaaacaaagcaaccctcagtagacccttttgacttcggtactcaaacaaagcaatccacaacactcccctttgatttgagcacccaggcaaagcagccaccatcagtttctcatgttacagcagctacaatcccacctgcgcaaccacaaccatcactacaatctcttgcggctagttcaggacctaaaatttctggctcatgtgtccctgtcgacattgagtggcctcctcgaagaagctcgtcatccaacttcaatgcacccttgtctattagcaaggataatggttctggaaggctgtctagcgatggagttgatgatattgatccttttgctgattggcccccaatacctagcaatgttaatagcatttcagcaaccgagcattggccaagcataaatcaaaatatttcgggatttagctcaggcaacatagtttttggtggcagcgggaattctgtagggcaaacgaaaagcaaccaaatgagctggtcaaacacgtctaatctaatgggcacaaactcaactggcagctatttgaatcagggcagtgcagctctaggtttcggaaatccaaatggaggattgagcacaggtctctccaatccaagtagttccagtacaggcctgagcatgatgctaccaaaatctgattctggatcattgtcgacgtcggtcaacaatgccgcacatgggctactaagacttgcccctcctccatccacatcggttggaagagggcgcggtagaaatcaaggacagtccgcactctcccgagcatcaaggcctcatgccaactcggcatcaggacaacaacctatcctggatttactctagtaagagatggtcgcctctgttcttcgcgttcggattgtcaatgtgtacatcctcaaacctttgtaaggtgtgtaccttttctcatgtactccgcgcaaaattgtacaacaatgtttaatgggccttataggtggacctttctcatgtactccacgctccaccaacaatgtttggccttatatatatttggtgactcggtgttatagacaaaagccagatgttatactcgctatccttggttggattcttgtgtcccaaatctctgacgttgaccttgtacaggactgggggttcaactgcagtggtgctgtgagccgtgcatgcgatggacaactctcctatcgagcattttcatcaattcgctacacggccctacatccctgtgcctgtgtgtgtaccactagcttgcattgcattgcatgcagagtgtactattgatgggtgatgcattggatggggcatgcacagcaggaatatttgcagttgatgagcggcaggaatcagtggctcagggaaaattgaatggcgatctggccttcactccacatgagtacgtacctatacgtacgcatgtatcatcagacggagtcaggaggatgcgggtagtgtccctgtgttgtctaccattttgtctcaccaatgtggtcccaaagtacatgatgtttttttacttttacacactttaaaccgaccgtaatatttaattcttctgtaaatacttattttattttatcattaaatatattttttaatta

SEQ ID NO: 73899 - DNA, 1622 bp, Zea Mays
cttcccattgctcacagcacatcaactgaatgtacaacaatttgccaagtatatgctatttgtcaaggacattacaagataatgggaacacagaggtaaaatcatcaccttcattggcaaacgggatccattctgaacctatgtcaggacaaataccagttgcaaagagcagccctgcatgggatgaagactggggtcctactaagaaatccggtgttccatctctttcagttgattctagtgcacaaacaaagcaaccctcagtagacccttttgacttcggtactcaaacaaagcaatccacaacactcccctttgatttgagcacccaggcaaagcagccaccatcagtttctcatgttacagcagctacaatcccacctgcgcaaccacaaccatcactacaatctcttgcggctagttcaggacctaaaatttctggctcatgtgtccctgtcgacattgagtggcctcctcgaagaagctcgtcatccaacttcaatgcacccttgtctattagcaaggataatggttctggaaggctgtctagcgatggagttgatgatattgatccttttgctgattggcccccaatacctagcaatgttaatagcatttcagcaaccgagcattggccaagcataaatcaaaatatttcgggatttagctcaggcaacatagtttttggtggcagcgggaattctgtagggcaaacgaaaagcaaccaaatgagctggtcaaacacgtctaatctaatgggcacaaactcaactggcagctatttgaatcagggcagtgcagctctaggtttcggaaatccaaatggaggattgagcacaggtctctccaatccaagtagttccagtacaggcctgagcatgatgctaccaaaatctgattctggatcattgtcgacgtcggtcaacaatgccgcacatgggctactaagacttgcccctcctccatccacatcggttggaagagggcgcggtagaaatcaaggacagtccgcactctcccgagcatcaaggcctcatgccaactcggcatcaggacaacaacctatcctggatttactctagtaagagatggtcgcctctgttcttcgcgttcggattgtcaatgtgtacatcctcaaacctttgtaaggactgggggttcaactgcagtggtgctgtgagccgtgcatgcgatggacaactctcctatcgagcattttcatcaattcgctacacggccctacatccctgtgcctgtgtgtgtaccactagcttgcattgcattgcatgcagagtgtactattgatgggtgatgcattggatggggcatgcacagcaggaatatttgcagttgatgagcggcaggaatcagtggctcagggaaaattgaatggcgatctggccttcactccacatgagtacgtacctatacgtacgcatgtatcatcagacggagtcaggaggatgcgggtagtgtccctgtgttgtctaccattttgtctcaccaatgtggtcccaaagtacatgatgtttttttacttttacacactttaaaccgaccgtaatatttaattcttctgtaaatacttattttattttatcattaaatatattttttaatta

SEQ ID NO: 73900 - DNA, 2013 bp, Zea Mays
tgtagattgtcctgactctcccctggaattagactggggatgattgacaaggcgcggaggcatttcacccaggcgggtcatcttcagcattcagaccctgccgagtggcataagctgcaggaggtggaggtccatctgggaagatgcacagatgcaaggaaaattggggattggaagagcgctctgagggaggctgatgccgccattgctgctggcgccgactcctctcagttgcttcttgccttgaggtcagaagcacttctccgccttcacaagctggaggaggccgagtcgactcttgcaagcttgctgaaactggacagtgcattgccctcatcattgacagcagcaaaactctcggggatgcttgctgagtcatacatacatattgttcaagcgcaggttgacatggcatttgggaggtttgatactgctgttgctgcagctgagaaggctagagatcttgatcctgggaacgcagaaatcgggatggttttgaataatgtgagactagtcgcaaaagcccgagagcaaggaaatgatctctttaaagctgccaagtttttagatgcgtccatagcctatggggaagggctcaagtatgatcccttaaattcagtgctccactgcaatcgagctgcttgctggtcaaagctagaaaagtggggaaaagctgtcgacgactgcaacgaggcactaagaatacagccaaactatacaaaggctctcttacggcgagctgcgtcgtatgctaagcttgagcgttgggtggactgtgtgcgggactatgaggtgcttcggaaggagtttcccagtgacaaggaggttgctgaggcattgttccatgcccaaattgccttgaaggcgactcgtggtgaggatgtatcaaatatgaagtttggaggagaggtggagatggtttccaatgtagagcaactcaatgctgccataagttcgcctggggtaactgttgtctacttcatgtcgacaatgaatcagcaatgcacacaaattacaccatcgatcaacattctatgcactgaatgcccctcagtgaattttctcaaggttaacgtcaacagcagcccaatggtagcaaggacagagaacgtgcggatagtcccgacgttcaagatatacaaaggaggggtgaaagtgaaggaaatgatctgcccgagcttgcatgttctgcgctactccgtgcgacactattctgtatccagttcttgagaagctttaggtacccgtaccccaatttcccattttccctaatgcatagagcagagcacccggtcaaacttgcagcatcaccaggcaccaggcaccagcctccagagcattttcaccacctgcgtagctactccccattgagcatgagcataaggaagactgtcaggtggaagagcccctcattccccatctcctgtcgttttcgcctcttcaccgttcatataccgacccattaaattcaatagcttttccatgtttggggctctccacctcattttgtatttgatacttcattttcgttcaccccatcatagtccatatgccagcaccctgtgtctcaagaaaaaatggaaatgtttgtaatgtcgtctaggtttagcatatactctctatactttagggagggagaggagggggggccgggccctgggggttgcagttttcgttacatgtacataccttataggaaaaacatgagagaaatccattggaagattggttccctggcgaaaagagagatggtggcatcagattgagctgagatttcggcggttggggtcaggtacagggctagtagttgttctgagtttccactggagtctttatctatctatctttagaggggggagagacagcgagaggtgttaagttaactgatgatgcagagatggttggtgtccattgaagacgatgacatgtcgttttgctgcttctgttgggtttcatggcgctgataccatatatgctaccgtttccatgaataaaacattgcaacactcgttc

SEQ ID NO: 73901 - DNA, 322 bp, Zea Mays
ctccttgttcgattccgcatcggcgttattttcatatgattaattgtgtatgtgtgctgttttgtttttctttgtgggaggaaccccgtgtttgcgtggaggagaaggcaagtcgttcaacgctcgtcgatgtcatagcgatgcacaaatcggaatcaccgtcgttcttgcaaacgctgattgggtttgtttatggaccgtgagatgatgattgagccagtgatgtggtgccacccacaagatgcagatggtggacgtactgaaggatggtggacttaaccagtggatactcgccgagcgagtaccctcccccagcaaacac

SEQ ID NO: 73902 - DNA, 1540 bp, Zea Mays
ggtgcctgtggctgtgtacgcggtcgtctccatccgacccatcaatcatccaaaaactaaaccaaatcttccccatcgatcccaacttccagtcgatctcctcgctcggctgttgcctcccaaagccgtgccttacaacgagattcctcccctcctctctccaataaccctagcctcctccgccgccggcgacgaatccggtaagcgtcctcgcttctgctagatccaccgcctccagatcggtgcggcccgcgactagggagagggtcggtcgcgatccgccgttcctctgccttaggtcatcgcggcgttttgagtttctgttgccagcgtagccatgtccatgttcaataggatcttcgggaagcccaaggagcaggccaactccaatgccttggccactctggacaagttaaatgagactcttgatatgctggagaagaaagaaaaggtgctggagaaaaaagcagccgctgagcttgagagagccaaggagttctcaaaagctaagaataaaagagcggctatccaatccttgaagaggaaaaaactttatgagcaacaaattgagcagcttggaaattttcagttgagaatccatgatcagatgatcatgttagaagcagctaaagctacaacagagactgttgatgcattgagaactggagctgcagctatgaaagcaatgcaaaaagcaacaaacattgatgatgtagacaagaccatggatgaaattaatgaacagactgaaaatatgaaacaaattcaggatgctttgtcagctcctctcggagcttctgctgatttcgatgaggatgaactggaagccgaacttgaagaactggagggagcagagttggaatctcagcttctggagcctgttgcagctcctccggtgcatccagtgcatgccccagccaacaagcaaccagcgcgccctgctccacagaaagctacagctgaagatgatgagcttgctgcactgcaagctgaaatggcattgtgatcaggtttccaatgaagaggtggaatgtgtatatgaatggcgttatgctaccaagatgaaagttgagtcaggatttattatatttgccatgtgtataatcttgggggatatttggcaagcagaaaaaaagctgctccaggcagtgtttgtttcagtgattttgggctctgttttccacaaacagtttaatgtcgcccggttagctctaagctaactattcaggtcaccaacgtgcattgtttgtcacagtatttttcatttacccatattgtctggagccatgtaagagtgttggaacgtataaagcctcagggtacacatttgatgtgccggtttgcagctatttcgacctcagtcagcatgtttcatcgttgcaactgaattaccagtattgtttttgtaccgagcagtgtgtttcgcctgagaatgacggtcgaacatgtaggcatgaacactgaaagcattaggctctagtcttggtttctatgattcataacaataagattattgtaattaatgtgtttggaagggttc

SEQ ID NO: 73903 - DNA, 2610 bp, Zea Mays
gtcactcactcgggagtcactctcccgtcctgatgccccgtttcaatttttgaactcccgatctggcaatccccacccacgctcccgagcaactttctactcactccggcgtcgcttcgaatcccagcgcggcggcgtgacgcgtgaatgcgtgatcgacgcgcggcgctgctcctccgggaaaccgcatggacgccgccgaccctctctgcgccatcacctcgcctgcgcggctccttccgcggacccttggccccaccccctcgaaggtccgcggtgcgctcctcgaggccatcgcactcgcccggtcgcggaaagggtctgaggagctggttaagcaggctgcaatggtgctgaaggagcacggggacatccagactctctaccatgatgatgcaatgaaagccatgccccccacaaatgtcagcaaagggcaacagggaagaagggcagcactggatcgcaaacgggctcggttcactatgaaggacactggaagcaaagcggtgcctgttgtggatcgatctaagttattgaatatttcggatccagtcgcattcttcatggccttggatcggcttgaagaagctgaggatgagatcaaacggctaaatggagaggcagaaaagcgcatattgatttttgatcctttagacgaacccattagacagcctggtttgcgtggtttcaaagtaactgaggatgctactactcaagatcccattgaggtactggcttcccaaacagcaactatgacaggatctcagttctcacaggatgttatgcatgctgttgctgacaaaaatgaacagtctgttccttcacgatctggtgaagctatttcagatgtttcaggaaaagaagattcattagctgagaaggatggccgtgatgatttggcttatttactgacctcgatccaagatttggatgaatctgaagaggaagcatttatccggaagaccttagggcttaaagaaataaggaagggaagagttagtctctgtaactccattcctggagtcaggtccttaagaagcgatactgaacaaaaaggttcaatgaaggttcgccctccagaaagtcatttgcctcagactcgccaagatcgaatttcagagttggagaaacatttatttcctggaggtgcagcaaatgctaaatgcacagatgatgaatctgaagggtcaccagatattgtgatgggtgaaccatcattagtgcatgattcttccgaggttctgatgaccaatgagaactctactggaagtgaaattgacaggaggaccccaaatctgtgtgccagagcagcagaccacgctcttgatcctgaaccaaacttgcctgatcatgcatacgaaaggcaaaccagaggctcctcacttggtttgtgcaaaaacacagaagttgccaatgaacacgaggaagatgatgtacacatagaatatccaactactggcgggtctacttatcaaacagaagtttcttctcatgatttggagggcagcttgacagaagaattggtcagtgaaccaggtaggcatgcggctccagatgatatctataggacttcacatgcagctgaggatagcattcaacatctagaagtggtcaaacagggtggtgttctacaagacaagtcaagccagtcgttggagatgcctctggaagatattgatccactatatcggcctcagatgcatggtggaagcactaagaaatcgacacctgttctgtgcaatgcactgtccccgatcgaacagaagcaacaagcagctcaagaagggaaaaggaagcaacaggcaaagagggtaaaaaaagtgtctgatgaatctagccatgcactggaaatatcccaagcaaatttcgaaccggagaatgaacctcataatgttgacgtgaacatggagcaaccgacagttatgagtagcgccaaggggcaaaagggagctcaaaggagaaacaagaccaaaaaattgaatcaaagaaaaatccttggagatgttgaccttgcgcggcagtctggagtgagaagaagctcaagaatacgctcgaggcctttggagtattggcttggtgaaagattactatatgggccgatacaggacactttgcctgcagttattggcatcaaagcatactctcctggccaggatggcaagaaaacattgaaagtgaaatctttcgtgtctgaacagtattcagatcttgtcgctcaatttgcgaagtactaaacaagacaccatttttctaagaggatcacgccttgtgacttgttgctttgtcacctgactttatgatgttacatgtgttggtggaaccatagtactgcacaatgaaaaggcacacgtcctaccgaatggttgccagtatctatcttgtttggatgccatttcggctattcgatcggtggagtgtagcgtatgtgcagcggtatcacattagggatcgattcggataggcatggaatccaatagacataacattatttatcatattttaattcgaatttagatacgaatgtagattttatcgttatggatgcaaaatgaatgccccaaatttggattgacattcgtatatctattagatcttaaagattccatatat

SEQ ID NO: 73904 - DNA, 2257 bp, Zea Mays
gtcactcactcgggagtcactctcccgtcctgatgccccgtttcaatttttgaactcccgatctggcaatccccacccacgctcccgagcaactttctactcactccggcgtcgcttcgaatcccagcgcggcggcgtgacgcgtgaatgcgtgatcgacgcgcggcgctgctcctccgggaaaccgcatggacgccgccgaccctctctgcgccatcacctcgcctgcgcggctccttccgcggacccttggccccaccccctcgaaggtccgcggtgcgctcctcgaggccatcgcactcgcccggtcgcgggagaaaatcattccgcagtttcaaagtaactgaggatgctactactcaagatcccattgaggtactggcttcccaaacagcaactatgacaggatctcagttctcacaggatgttatgcatgctgttgctgacaaaaatgaacagtctgttccttcacgatctggtgaagctatttcagatgtttcaggaaaagaagattcattagctgagaaggatggccgtgatgatttggcttatttactgacctcgatccaagatttggatgaatctgaagaggaagcatttatccggaagaccttagggcttaaagaaataaggaagggaagagttagtctctgtaactccattcctggagtcaggtccttaagaagcgatactgaacaaaaaggttcaatgaaggttcgccctccagaaagtcatttgcctcagactcgccaagatcgaatttcagagttggagaaacatttatttcctggaggtgcagcaaatgctaaatgcacagatgatgaatctgaagggtcaccagatattgtgatgggtgaaccatcattagtgcatgattcttccgaggttctgatgaccaatgagaactctactggaagtgaaattgacaggaggaccccaaatctgtgtgccagagcagcagaccacgctcttgatcctgaaccaaacttgcctgatcatgcatacgaaaggcaaaccagaggctcctcacttggtttgtgcaaaaacacagaagttgccaatgaacacgaggaagatgatgtacacatagaatatccaactactggcgggtctacttatcaaacagaagtttcttctcatgatttggagggcagcttgacagaagaattggtcagtgaaccaggtaggcatgcggctccagatgatatctataggacttcacatgcagctgaggatagcattcaacatctagaagtggtcaaacagggtggtgttctacaagacaagtcaagccagtcgttggagatgcctctggaagatattgatccactatatcggcctcagatgcatggtggaagcactaagaaatcgacacctgttctgtgcaatgcactgtccccgatcgaacagaagcaacaagcagctcaagaagggaaaaggaagcaacaggcaaagagggtaaaaaaagtgtctgatgaatctagccatgcactggaaatatcccaagcaaatttcgaaccggagaatgaacctcataatgttgacgtgaacatggagcaaccgacagttatgagtagcgccaaggggcaaaagggagctcaaaggagaaacaagaccaaaaaattgaatcaaagaaaaatccttggagatgttgaccttgcgcggcagtctggagtgagaagaagctcaagaatacgctcgaggcctttggagtattggcttggtgaaagattactatatgggccgatacaggacactttgcctgcagttattggcatcaaagcatactctcctggccaggatggcaagaaaacattgaaagtgaaatctttcgtgtctgaacagtattcagatcttgtcgctcaatttgcgaagtactaaacaagacaccatttttctaagaggatcacgccttgtgacttgttgctttgtcacctgactttatgatgttacatgtgttggtggaaccatagtactgcacaatgaaaaggcacacgtcctaccgaatggttgccagtatctatcttgtttggatgccatttcggctattcgatcggtggagtgtagcgtatgtgcagcggtatcacattagggatcgattcggataggcatggaatccaatagacataacattatttatcatattttaattcgaatttagatacgaatgtagattttatcgttatggatgcaaaatgaatgccccaaatttggattgacattcgtatatctattagatcttaaagattccatatat

SEQ ID NO: 73905 - DNA, 1032 bp, Zea Mays
caataaccttaatggctcaccgtggaagatccatagccatggctgaatataacatagacaagtcaagccagtcgttggagatgcctctggaagatattgatccactatatcggcctcagatgcatggtggaagcactaagaaatcgacacctgttctgtgcaatgcactgtccccgatcgaacagaagcaacaagcagctcaagaagggaaaaggaagcaacaggcaaagagggtaaaaaaagtgtctgatgaatctagccatgcactggaaatatcccaagcaaatttcgaaccggagaatgaacctcataatgttgacgtgaacatggagcaaccgacagttatgagtagcgccaaggggcaaaagggagctcaaaggagaaacaagaccaaaaaattgaatcaaagaaaaatccttggagatgttgaccttgcgcggcagtctggagtgagaagaagctcaagaatacgctcgaggcctttggagtattggcttggtgaaagattactatatgggccgatacaggacactttgcctgcagttattggcatcaaagcatactctcctggccaggatggcaagaaaacattgaaagtgaaatctttcgtgtctgaacagtattcagatcttgtcgctcaatttgcgaagtactaaacaagacaccatttttctaagaggatcacgccttgtgacttgttgctttgtcacctgactttatgatgttacatgtgttggtggaaccatagtactgcacaatgaaaaggcacacgtcctaccgaatggttgccagtatctatcttgtttggatgccatttcggctattcgatcggtggagtgtagcgtatgtgcagcggtatcacattagggatcgattcggataggcatggaatccaatagacataacattatttatcatattttaattcgaatttagatacgaatgtagattttatcgttatggatgcaaaatgaatgccccaaatttggattgacattcgtatatctattagatcttaaagattccatatat

SEQ ID NO: 73906 - DNA, 1561 bp, Zea Mays
tagaactagaagtcccataggagtataggacacccgcatcactgacagctgagcctcggttacatggtcccactggtcatcgaagtcaactgtccgttgcaattgcaaaccaaaccagattcctctccatcgcactccgcctccctccgcctcccttggatcacctccccgtccccaacccaacgaggcaacgagtccccaacgccacccaaagtccagttcacccacacgcgcgctcaccggccgcctagcgcgctctgccccccacggaaatctgcagcgaatagaaaggatttccatcctttccaatcccttccaattctttacggcgtccctcaatccccctataggatccagctgtccagagggcgaatgccagggtgagggaagcgggggaggcgaccctcgtggcagcgcttgcggcggcccaaaaggagagcgagagggagaacgaggtggtggccgatgtatgcggcgggtggaagagtgaggatggaagtttaaattgtggatactcaagcattagaggcagaagggtaaacatggaagacttctatgacataaaatcttctagagttgatgataagcaaataaatttttttggagtatttgatggtcatggaggtacccatgctgctgggtatttgaaacaacacttgtttgaaaacctcctaaaacatccagcattcattggtgatactaagtctgcaatgagtcagtcctataaaaaaactgacgcagatttcttggatactgaaggcaatattcatgttggggttgggtcgactgcatcaacagcagttttgattggcaaccatctgtatgtggccaatgttggtgattcaagggctgtactatcaaaggcaggcaaagctattgcactctctgatgaccataaaccaaacagaagtgatgagcagaaacggattgaggatgctggaggagttgttgtttggtctggaacatggagagtaggtggtatacttgcaatgtctagggcatttggcaatcgtttgttgaagcagttcgttgttgcagaccctgagattcaggatctagaaatagatggtgatacggagtttcttattttggccagtgatgggctctgggatgtggtgccaaatgagcatgctgttgcatttgtgaaggacgaggatagccctgaggctgcagcccggaagcttacggagatcgccttcaggcgtgggagcaccgacaacatcacatgcattgttgtagaattttgccacgataagatggttgatggttctcccccgtcaaccaataagagttgacttcatcattcgtgttttaattatcccagatttgctaccatgatgctgcgcctctcgaagtatggtctcatcattggttgtctattatgttcgtttatagtcctgccatgctgattttgtttgcttcggcgcccccaattggttagcctgttgtttggatgcccagcactgtttcgtgcacgctggaccctgactccctgagcacccaggtcaatattatacttcattttcgattttggctgatattacttcatttttgatcttcc

SEQ ID NO: 73907 - DNA, 1718 bp, Zea Mays
catcgaagtcaactgtccgttgcaattgcaaaccaaaccagattcctctccatcgcactccgcctccctccgcctcccttggatcacctccccgtccccaacccaacgaggcaacgagtccccaacgccacccaaagtccagttcacccacacgcgcgctcaccggccgcctagcgcgctctgccccccacggaaatctgcagcgaatagaaaggatttccatcctttccaatcccttccaattctttacggcgtccctcaatccccctataggatccaggttgacccgcattgcccgagccagtcggtttccgtttttggaatttttgtttccacgtgctgccgccgccgctcctaggttcttgttacaagcgtggaagacggcgagctatatggcgtgcaatcgcggcgtgaaggagcaggaggaccccagcgcggcgtctgcagccccagctccggcggctgtggctagggcgagggcggcgcggcctccgaggccaaggagccgcaaggggctcggcgtgcggcacctgctgaagccctgccgattccttgcagctgtccagagggcgaatgccagggtgagggaagcgggggaggcgaccctcgtggcagcgcttgcggcggcccaaaaggagagcgagagggagaacgaggtggtggccgatgtatgcggcgggtggaagagtgaggatggaagtttaaattgtggatactcaagcattagaggcagaagggtaaacatggaagacttctatgacataaaatcttctagagttgatgataagcaaataaatttttttggagtatttgatggtcatggaggtacccatgctgctgggtatttgaaacaacacttgtttgaaaacctcctaaaacatccagcattcattggtgatactaagtctgcaatgagtcagtcctataaaaaaactgacgcagatttcttggatactgaaggcaatattcatgttggggttgggtcgactgcatcaacagcagttttgattggcaaccatctgtatgtggccaatgttggtgattcaagggctgtactatcaaaggcaggcaaagctattgcactctctgatgaccataaaccaaacagaagtgatgagcagaaacggattgaggatgctggaggagttgttgtttggtctggaacatggagagtaggtggtatacttgcaatgtctagggcatttggcaatcgtttgttgaagcagttcgttgttgcagaccctgagattcagtgatgggctctgggatgtggtgccaaatgagcatgctgttgcatttgtgaaggacgaggatagccctgaggctgcagcccggaagcttacggagatcgccttcaggcgtgggagcaccgacaacatcacatgcattgttgtagaattttgccacgataagatggttgatggttctcccccgtcaaccaataagagttgacttcatcattcgtgttttaattatcccagatttgctaccatgatgctgcgcctctcgaagtatggtctcatcattggttgtctattatgttcgtttatagtcctgccatgctgattttgtttgcttcggcgcccccaattggttagcctgttgtttggatgcccagcactgtttcgtgcacgctggaccctgactccctgagcacccaggtcaatattatacttcattttcgattttggctgatattacttcatttttgatcttcc

SEQ ID NO: 73908 - DNA, 1477 bp, Zea Mays
catcgaagtcaactgtccgttgcaattgcaaaccaaaccagattcctctccatcgcactccgcctccctccgcctcccttggatcacctccccgtccccaacccaacgaggcaacgagtccccaacgccacccaaagtccagttcacccacacgcgcgctcaccggccgcctagcgcgctctgccccccacggaaatctgcagcgaatagaaaggatttccatcctttccaatcccttccaattctttacggcgtccctcaatccccctataggatccagctgtccagagggcgaatgccagggtgagggaagcgggggaggcgaccctcgtggcagcgcttgcggcggcccaaaaggagagcgagagggagaacgaggtggtggccgatgtatgcggcgggtggaagagtgaggatggaagtttaaattgtggatactcaagcattagaggcagaagggtaaacatggaagacttctatgacataaaatcttctagagttgatgataagcaaataaatttttttggagtatttgatggtcatggaggtacccatgctgctgggtatttgaaacaacacttgtttgaaaacctcctaaaacatccagcattcattggtgatactaagtctgcaatgagtcagtcctataaaaaaactgacgcagatttcttggatactgaaggcaatattcatgttggggttgggtcgactgcatcaacagcagttttgattggcaaccatctgtatgtggccaatgttggtgattcaagggctgtactatcaaaggcaggcaaagctattgcactctctgatgaccataaaccaaacagaagtgatgagcagaaacggattgaggatgctggaggagttgttgtttggtctggaacatggagagtaggtggtatacttgcaatgtctagggcatttggcaatcgtttgttgaagcagttcgttgttgcagaccctgagattcagaaatagatggtgatacggagtttcttattttggccagtgatgggctctgggatgtggtgccaaatgagcatgctgttgcatttgtgaaggacgaggatagccctgaggctgcagcccggaagcttacggagatcgccttcaggcgtgggagcaccgacaacatcacatgcattgttgtagaattttgccacgataagatggttgatggttctcccccgtcaaccaataagagttgacttcatcattcgtgttttaattatcccagatttgctaccatgatgctgcgcctctcgaagtatggtctcatcattggttgtctattatgttcgtttatagtcctgccatgctgattttgtttgcttcggcgcccccaattggttagcctgttgtttggatgcccagcactgtttcgtgcacgctggaccctgactccctgagcacccaggtcaatattatacttcattttcgattttggctgatattacttcatttttgatcttcc

SEQ ID NO: 73909 - DNA, 1673 bp, Zea Mays
catcgaagtcaactgtccgttgcaattgcaaaccaaaccagattcctctccatcgcactccgcctccctccgcctcccttggatcacctccccgtccccaacccaacgaggcaacgagtccccaacgccacccaaagtccagttcacccacacgcgcgctcaccggccgcctagcgcgctctgccccccacggaaatctgcagcgaatagaaaggatttccatcctttccaatcccttccaattctttacggcgtccctcaatccccctataggatccaggttgacccgcattgcccgagccagtcggtttccgtttttggaatttttgtttccacgtgctgccgccgccgctcctaggttcttgttacaagcgtggaagacggcgagctatatggcgtgcaatcgcggcgtgaaggagcaggaggaccccagcgcggcgtctgcagccccagctccggcggctgtggctagggcgagggcggcgcggcctccgaggccaaggagccgcaaggggctcggcgtgcggcacctgctgaagccctgccgattccttgcagctgtccagagggcgaatgccagggtgagggaagcgggggaggcgaccctcgtggcagcgcttgcggcggcccaaaaggagagcgagagggagaacgaggtggtggccgatgtatgcggcgggtggaagagtgaggatggaagtttaaattgtggatactcaagcattagaggcagaagggtaaacatggaagacttctatgacataaaatcttctagagttgatgataagcaaataaatttttttggagtatttgatggtcatggaggtacccatgctgctgggtatttgaaacaacacttgtttgaaaacctcctaaaacatccagcattcattggtgatactaagtctgcaatgagcaatattcatgttggggttgggtcgactgcatcaacagcagttttgattggcaaccatctgtatgtggccaatgttggtgattcaagggctgtactatcaaaggcaggcaaagctattgcactctctgatgaccataaaccaaacagaagtgatgagcagaaacggattgaggatgctggaggagttgttgtttggtctggaacatggagagtaggtggtatacttgcaatgtctagggcatttggcaatcgtttgttgaagcagttcgttgttgcagaccctgagattcagtgatgggctctgggatgtggtgccaaatgagcatgctgttgcatttgtgaaggacgaggatagccctgaggctgcagcccggaagcttacggagatcgccttcaggcgtgggagcaccgacaacatcacatgcattgttgtagaattttgccacgataagatggttgatggttctcccccgtcaaccaataagagttgacttcatcattcgtgttttaattatcccagatttgctaccatgatgctgcgcctctcgaagtatggtctcatcattggttgtctattatgttcgtttatagtcctgccatgctgattttgtttgcttcggcgcccccaattggttagcctgttgtttggatgcccagcactgtttcgtgcacgctggaccctgactccctgagcacccaggtcaatattatacttcattttcgattttggctgatattacttcatttttgatcttcc

SEQ ID NO: 73910 - DNA, 1354 bp, Zea Mays
catcgaagtcaactgtccgttgcaattgcaaaccaaaccagattcctctccatcgcactccgcctccctccgcctcccttggatcacctccccgtccccaacccaacgaggcaacgagtccccaacgccacccaaagtccagttcacccacacgcgcgctcaccggccgcctagcgcgctctgccccccacggaaatctgcagcgaatagaaaggatttccatcctttccaatcccttccaattctttacggcgtccctcaatccccctataggatccagtgaggatggaagtttaaattgtggatactcaagcattagaggcagaagggtaaacatggaagacttctatgacataaaatcttctagagttgatgataagcaaataaatttttttggagtatttgatggtcatggaggtacccatgctgctgggtatttgaaacaacacttgtttgaaaacctcctaaaacatccagcattcattggtgatactaagtctgcaatgagtcagtcctataaaaaaactgacgcagatttcttggatactgaaggcaatattcatgttggggttgggtcgactgcatcaacagcagttttgattggcaaccatctgtatgtggccaatgttggtgattcaagggctgtactatcaaaggcaggcaaagctattgcactctctgatgaccataaaccaaacagaagtgatgagcagaaacggattgaggatgctggaggagttgttgtttggtctggaacatggagagtaggtggtatacttgcaatgtctagggcatttggcaatcgtttgttgaagcagttcgttgttgcagaccctgagattcaggatctagaaatagatggtgatacggagtttcttattttggccagtgatgggctctgggatgtggtgccaaatgagcatgctgttgcatttgtgaaggacgaggatagccctgaggctgcagcccggaagcttacggagatcgccttcaggcgtgggagcaccgacaacatcacatgcattgttgtagaattttgccacgataagatggttgatggttctcccccgtcaaccaataagagttgacttcatcattcgtgttttaattatcccagatttgctaccatgatgctgcgcctctcgaagtatggtctcatcattggttgtctattatgttcgtttatagtcctgccatgctgattttgtttgcttcggcgcccccaattggttagcctgttgtttggatgcccagcactgtttcgtgcacgctggaccctgactccctgagcacccaggtcaatattatacttcattttcgattttggctgatattacttcatttttgatcttcc

SEQ ID NO: 73911 - DNA, 1675 bp, Zea Mays
catcgaagtcaactgtccgttgcaattgcaaaccaaaccagattcctctccatcgcactccgcctccctccgcctcccttggatcacctccccgtccccaacccaacgaggcaacgagtccccaacgccacccaaagtccagttcacccacacgcgcgctcaccggccgcctagcgcgctctgccccccacggaaatctgcagcgaatagaaaggatttccatcctttccaatcccttccaattctttacggcgtccctcaatccccctataggatccaggttgacccgcattgcccgagccagtcggtttccgtttttggaatttttgtttccacgtgctgccgccgccgctcctaggttcttgttacaagcgtggaagacggcgagctatatggcgtgcaatcgcggcgtgaaggagcaggaggaccccagcgcggcgtctgcagccccagctccggcggctgtggctagggcgagggcggcgcggcctccgaggccaaggagccgcaaggggctcggcgtgcggcacctgctgaagccctgccgattccttgcagctgtccagagggcgaatgccagggtgagggaagcgggggaggcgaccctcgtggcagcgcttgcggcggcccaaaaggagagcgagagggagaacgaggtggtggccgatgtatgcggcgggtggaagagtgaggatggaagtttaaattgtggatactcaagcattagaggcagaagggtaaacatggaagacttctatgacataaaatcttctagagttgatgataagcaaataaatttttttggagtatttgatggtcatggaggtacccatgctgctgggtatttgaaacaacacttgtttgaaaacctcctaaaacatccagcattcattggtgatactaagtctgcaatgagtcagtcctataaaaaaactgacgcagatttcttggatactgaaggcaatattcatgttggggttgggtcgactgcatcaacagcagttttgattggcaaccatctgtatgtggccaatgttggtgattcaagggctgtactatcaaaggcaggcaaagctattgcactctctgatgaccataaaccaaacagaagtgatgagcagaaacggattgaggatgctggaggagttgttgtttggtctggaacatggagagtaggtggtatacttgcaatgtctagggcatttggcaatcgtttgttgaagcagttcgttgttgcagaccctgagattcaggatctagaaatagatggtgatacggagtttcttattttggccagtgatgggctctgggatgtggtgccaaatgagcatgctgttgcatttgtgaaggacgaggatagccctgaggctgcagcccggaagcttacggagatcgccttcaggcgtgggagcaccgacaacatcacatgcattgttgtagaattttgccacgataagatggttgatggttctcccccgtcaaccaataagagttgacttcatcattcgtgttttaattatcccagatttgctaccatgatgctgcgcctctcgaacctgttgtttggatgcccagcactgtttcgtgcacgctggaccctgactccctgagcacccaggtcaatattatacttcattttcgattttggctgatattacttcatttttgatcttcc

SEQ ID NO: 73912 - DNA, 1978 bp, Zea Mays
atctggccgctcgtcctgcgcagggaaggagatcctcgcgactacaggctgggactggcctggtggtccatggggacacccactggcactcatattttttgtaagaatttttagtggggcttacccggaggaaccgccattaatggctgacaccttggctttaaaactcgccttgcagcagccccattgctgctcgctcgaaacgatggcctccgatctgtcctgtcgcacacatattaggtgcaacacccgtgtaattgaccgagccccaccaagaacaacttgcgcgcccaatgtctcctactattaatacttgtcgaggagctgaagaagcactacgggttgcggttcgtgacgtcgtctctggagaagaaggcggaggccggcatcataagcgccaagctggacgcggactccacgcggccgcgcaccgcgccggcgtacgaggtggcctccggcccgcagccgcgccggcccatacgaccgcacctggcctacgaggtggccgcgtcggccgcgaactacgtccgcgcgcgcgcccgcggcctgctctcgttcggaacgccgcaggcgcagctgcaggccggccacggcaggctgtacaactcgggcgtggccgcgtacatggccgcgtcgacggtgacggcggtggtggccgccgaggacgaggcgcgccaggaggcggcgcgcgacctgcgctcgccgctgtcgtcgccgtgcgagtggttcgtgtgcgacgaggcggacgcgcggacgcggtgcctcgtcatccagggctccgactcgctggcgtcgtggcaggccaacctcctgttcgagcccaccgagttcgagggcacgggcgtgctggtgcaccggggcatctacgaggcggccaagggcatctacgagcaggtggtgccggaggtcgaggcgcacctgcggagggcgcgcgcggggcgcgcgccgcggctgcggctcacgggccactcgctcggcggcagcctcgcggtgctggtcagcctgatgctgctggcgcgcggcgtggtgacgcccgaggcgctgcacccggtggtcaccttcggggcgccgtccgtgttctgcggcgggaaccgcgtcctggaggcgctgggcgtcggcgaggcgcacgtccggtccgtggccatgcaccgtgacatcgtgcccagggccttctcgtgccgctacccgggccaggccatcgcgctgctcaagcgcctcaacggcgtgctccgcgcccacccgtgcctcaacacgcacaggtcgctgtacatgcccatgggcgccacgtacatccttcagcccgacagcagcgtgtcgccgcgccacccgttcctccccgagggcgcggcgctgttccgcctggactcggagcgctcgccgacggccctggtagccagcgcgctgcgcgcgttcctctactcgccgcacccgctcgagacactgagcgacctgtcggcctacggcgcggggggcgccatactccgggaccacgagtccagcaactacttcagggctctcagtgcgctggccagggcgccaccgcggcgccggaagcaaccggagatcgtgtggcagttgcccggcgtcgagcggctgcagcagtattggtggccggggatcgccggcaccgtcatccccgcaccggtggccgtcctcagcaacaaggagctggtgtccgaggcataggacttcacgctgcgttccttgggtttgctcgcttgagcaatgtaacattatttggttctttggttggttccgcacgaggtacatagagaatgcacagcttcttttggtgtttgcgttcgtgtaaaaactgtaataatcatgcatagcgtaggacggtaggagcgtgtctggtttggtgtcctgatccgcggctgctcaataagacaatgggctttgtcttgggttcctgcgaaggaacggatgagttaacatgtaaacttgtttcaatgaagccttagaattcttaacaacc

SEQ ID NO: 73913 - DNA, 1714 bp, Zea Mays
tggatccaagtcgatgatttaggttgatgaggcggcttgcgcggggggcatcgtgcaatggcgcggcggtgcccgtgcaggctgctgctagccgtggcggcggcggccgtgctcgtggccgcggcagcgcaggcgcaggagacgtgctcggggaccgtccccgcgccgccgcgccgcggggcgcgggtgtccgtggccagcttcggcggcgcgggcgacggacggacgctcaacacggcggcgttcgcgcgcgccgtcgccagcatcgagcgccgcgccgcgccgggcggggcggagctctacgtgccgcccggggtgtggctcacggggcccttcaacctcacctcgcgcatgacgctcttcctcgcgcgcggcgccgtcatccgcgccacgcaggacacatcaagctggcctctgattgaaccgctgccctcatacgggagaggacgtgagctgcccggcggaagatacacaagtttaatccatggcaatgggcttcaggatgttgtcatcacaggaaaccgcattgtgtgcaggcgagaatggaactattgatggtcaaggcagcgcgtggtgggatatgtggaagaacaggacactgctctacacaaggcctcaccttcttgagctgatgagctcttctgatatcattgtctccaatgtcgtctttcaggattcgccattctggaacatccatcctgtttattgcagcaatgttgtgatcagaaacgtgactatcctagctccacatgactcccccaacacggatggaattgatccagattccagcagcaacatctgcatcgaggattgctacatttctactggtgacgattccatcgccatcaagagtggctgggatgagtatggaatcgcctatggccgcgccagttctggcatcaccgtgcggcggatcacaggctcctccccgtttgctggcttcgcggtcggaagcgagacatcaggtggcgtggagaacgtccttgcagagcacttgaacttcttcaactcagggtttgggatccatgtcaagaccaacacaggcaggggcggcttcatcaggaacatcactgtctcggatgtgacgctggataacgtccggtacggcctgcggatcgttggcgatgtcggcaatcaccccgacgacagctacaaccggagtgcgctcccgatcgtcgacgcccttacggtaaagaatgtccagggccagaacgtcagggaggctgggctgatcaagggcatccccaactcggccttctcccggatctgcctgtcgaacgtcaagttcactggtggcgcacctgtccggccgtggaagtgcgaggctgtcagcggtggcgctctcgacgtgcagccgtcaccatgcacagaactgacttcaacgtctgggacgagcttctgtacaaattcgctttgatgctttgccagctagctgagctgctgctatgcttctgtatctacgagtatgtatactggtgctttaaagcttgggcacccaagtatttatcttcccgaaaattaatttggttttactaatttatttgaacctctctatacgaagagaataattcttgactcgtataggactgaacaaaaaagtgtcactggttttcttatttacctgactcaatgttttattcacaaagtacttgtttctaagcatgtcctacccacatcctctccttattacatagctcgaacttgaagagctatc

SEQ ID NO: 73914 - DNA, 1348 bp, Zea Mays
cgatatttaaatgataaaaatgttaaaattatacacaaatcaggttcaacctatagttgttagctccaaaattatattcacaattatttagttaataaaaaacatgtctttgcattttaaacactgtacttagtaaatggaaaccgtagcaacagcaacgtacgatcactttgatagtgataattttacgttccactcatggcaaaaaaaaatatacatttccaaatctaacagcctcgtcgccgctgccggagaaatgccgccgaggaggcgagatcgccggagactccgcgacccgtcgccgccgtcctccgatgcaagagcaccaccctccgccttaggcttgcgtctcaccctcctcgttcccctccttatcctggttctcgtcctcgccgcccttggcttctccggcctcctctcccattcccctccccactcccaaacgctacagacaaccgcccactccgtctacgagcgcggtctggtcaagcgcgacgtctccgcacgagagatcctctctgagcacacaagggtttccgagaaccggtcgcagcggaacttcgcgaaccccgtcctcgcctatgtgaccccctggaactccaaaggttatgacatggcaaagttgttcatcacaaagcttactcatgtatcaccagtgtggtacgatttgaagaggctagttctggaaggagaacacaattttgatgccaaatgggtctctgaacttcaaaccaatgggtctctggtagtgccgagaattgtcttggaagcacttcctgctgttttactattcgaaaagaagcaaaaggcaaaagctattgatataatagtgagtgaatgcagggataagggctatgacggtattgtgctcgagtcctggtcaagatgggctatttatggcgtgctggatgatcaagagctacgttacatggcacttgaatttgttaagcagctgggagaggctttgcattcagtcaattccaaatcaagtagccaccatttggaactaatttatgttattccggctccaagaatgcaaaagctcaataatcaggactttggacccaaagatctcatgcatctggctgacactgtagatggtttttctcttatgacatacgacttctcaggacctcagaatcctggtcccagtgcacctctgaagtggatacatcattctctagcagcacttctttcagcaaaaggttcctctcatagcaattcacattcacggatgatattccttggcatcaacttttatgggaatgattttctactgtctggaggctggtagccgggaggataacggagccatcattgctctgatctacctgtgccttctctgttc

SEQ ID NO: 73915 - DNA, 1822 bp, Zea Mays
cgatatttaaatgataaaaatgttaaaattatacacaaatcaggttcaacctatagttgttagctccaaaattatattcacaattatttagttaataaaaaacatgtctttgcattttaaacactgtacttagtaaatggaaaccgtagcaacagcaacgtacgatcactttgatagtgataattttacgttccactcatggcaaaaaaaaatatacatttccaaatctaacagcctcgtcgccgctgccggagaaatgccgccgaggaggcgagatcgccggagactccgcgacccgtcgccgccgtcctccgatgcaagagcaccaccctccgccttaggcttgcgtctcaccctcctcgttcccctccttatcctggttctcgtcctcgccgcccttggcttctccggcctcctctcccattcccctccccactcccaaacgctacagacaaccgcccactccgtctacgagcgcggtctggtcaagcgcgacgtctccgcacgagagatcctctctgagcacacaagggtttccgagaaccggtcgcagcggaacttcgcgaaccccgtcctcgcctatgtgaccccctggaactccaaaggttatgacatggcaaagttgttcatcacaaagcttactcatgtatcaccagtgtggtacgatttgaagagtgataggaacaggctagttctggaaggagaacacaattttgatgccaaatgggtctctgaacttcaaaccaatgggtctctggtagtgccgagaattgtcttggaagcacttcctgctgttttactattcgaaaagaagcaaaaggcaaaagctattgatataatagtgagtgaatgcagttaatagggataagggctatgacggtattgtgctcgagtcctggtcaagatgggctatttatggcgtgctggatgatcaagagctacgttacatggcacttgaatttgttaagcagctgggagaggctttgcattcagtcaattccaaatcaagtagccaccatttggaactaatttatgttattccggctccaagaatgcaaaagctcaataatcaggactttggacccaaagatctcatgcatctggctgacactgtagatggtttttctcttatgacatacgacttctcaggacctcagaatcctggtcccagtgcacctctgaagtggatacatcattctctagcagcacttctttcagcaaaaggttcctctcatagcaattcacattcacggatgatattccttggcatcaacttttatgggaatgattttctactgtctggagtgggatggaaaaagtttggagcacttctttatctattcagatgaaggcgtgaagcatgctgtattttatccaacgctgatgtcactctctgtacgtctggatgaagcccgaaattggggaacaggcctttcaatttgggagatcggacaaggtttagactacttctttgatattttataggaatgtctcaatatgtcttttggtactgtgtggagttgtgtccactaatctagtatgtgaattacgcattttggtactgtatgcaccgtgggcattgttcttttcagcattgtaatatcagctggcaacagctcacattaaccgtgagaaactgcttcactgaatatttctgccggctgggtacacactagtgtagtaagaggcatctgtattcatctttgcttatggcatatgtgctgttatacatcttctaaaacgtactggtattttctggtgttttgtacatttccttactgtgcttttgcaaaagaacggagataatatgttatactttgcc

SEQ ID NO: 73916 - DNA, 3838 bp, Zea Mays
tttcaggcttcaaaatgggactctaacagggttcaggagagccgaaagccaatcatatcggccagagtttcaagaatcatgagcacatatatacatataaatgttaggggaagcatagctctaccaataaattacaagccgacaattgctcatacatctaacagtatgtctgtgcctgtgatggggcaatgtactgataaagacgacacatttgaggaatataacatgtacaggcagagcagtgaagttaagaactgcctggcaggctagagtcactagcaaacgtcgcttccattgaagtgatgaaattagcaggagggatactataatcggtggttaagtcactggaccacattatcttggctcgcagagccccagtccaattcagagaaacctgcgatttatcacaatcgcaggatttaacatcacaatcgcagaaatcgttggtttggcaccccatggtcagccttgtggagtggataattggcaaagccaatattcagcactagaaccagcttatctgaactcttcagggacgtgcatgccaaaaccacgcttcaacttctcaatcctattcaataacaagtaggtgaccatattgtaataaccaaacctagaaaagcatgaatgcgccggaagttaaatagtaagatgcatgccctcagaaaaatgatggcacaaccgcttcatggtcctgggctggtcacagctacatggcgcacagatgctagaccaatagactaatagagatagaaagatattggctttgaagaacaggccacttgcgtgaaaattggcaaagtagggcagatgcacatctacagttgatttgatatttcacttgttgtgtcgactttggtaatttgtaaattcgatatttcacatctacattggttgttttttgaggaaggggggggggcatggtttaaatatgaatcagcatgccctttgtggtccaacaattctaacctgcaaagaattgttttaagggcggtcgaagactggaaggataggttaagtggattgtttttctagcgatgttgaaatggagattgaagtattgaacatggaagcttatggaagggtaacattgggagcttgttactagatctgacaattctaggttagagtgcaacaccaaaattagaacataatttttgaaacagcatgcataaaatgtaaagaaacttacgtaggagcaagttttccaagactgcgcagttttttcccagttgcttcatcgattacattgcctgacatctcaatagaatatgacatgccagatgtccgtggtagtcctcttcctacaagtaaatctaaatctctttgatgcagttctctgccattgacaaaaacacctgtatccccaccggcacaatttttggccatcggataattaaattctctaataaatggctggacaatgccaatacattcccgtcccatgacaccccaaaaaccagcatgaaacacttaccaatatgtacctgggtcaacaggaccagctttcttctctgccttcttaagggctttttcagagattggatgaccattaattgaaaccttaacattgtccatggacttatttaataaagaaaggtccttaaaacccttcttcagaaaaccagcaaaaaatgatgaatccccactcttaccggtagaggactgatcttcatccaacccagcctctgatgaaccacgagaaaacccagaatttgtccgctcattaactgatgaaccactccctgtttgagaattggcatcttcaataaatggctgctgcaatttctcattatcttcttcgattttcagcccatcatgtctctcacttatgcttccagtttccatgacatctgcattattttcatcacagttttttctaatgctctcagctccaagaacataattttcatctctttttacctttgactcatatttattgcatgtgtcctcgcctccggggctgctatcttcatctttaatattcatacactggtacttttcacttccatttactagactactagtgtcatcttctccactattctgctcatatgttttgctactatcttcaatgttgcatgagttatcttccttgctcttctgttcataacttctgcatgagatttcatcttcagtggcatctttgtcatcttcattgctctcctgtttgcttcttgtactaatgcccccatcatactgatcattaacatcatattctcctttgcaagttaggtctgatttgtaagccatggccatgccttgatcatcctcgtcgttacatttttcttgggcacacaatgggtcaacaagtttgtcctctaaagctggagaccgtgggctaactggaccacctacagaaggctccaccttgcagtctgtgtccctctcgcacaatatatcctttgggcttccattgtctacagacctacttggagagaaagggagatcctcagcttttgactgaatgcttctagttgaaccacaatctttgccaatcctgtcattactcatggtcgaagaaagtgaattatcatcagtggaatccatgttgttttgcatgttgctatgatcatttgaattgtagaacatagaattaaaatcctcatgatgttgatggacagtatctcgcctcatctggtcacttgagctttgctctgtttcaggcgcatataaggataatgacggtgcaaagggaataccattttcttcatcatgcttcagactaactatctgacaacaagacccgcattgaaatcggttctgcttccgccctatgcatttttctgtaggcatctgcagtagtttataacatgaactgcacacagagaaaggtgcagcaccatccactggacggcagatatgttccgccttcttcctgaagtactctgctctcctcttcgatacagaccggtgcgagtaaagtgatgacgccacagacctccgatcataatcggatgaaacagatggtgacctctcgaaccggtacgattcatgctgcctggcgaagtacctcgccatcgggatgttctcctcttgcggcgaagtcctctgcccatgcagacagtgtggacaggcacacccgtagtgatggaagctcccaggccccatcccaccgttctcccactgcctcccagggtactggcggtagtgcccgctagactgcctcacatacctttccccatgttcagggcgcggcggtgcgtatgggcctggaggcggcaagcccggcccaaaccgcccgccatggcgggagcggtggtaccccggcagaggcggtggctcctccagatgctcggcggggagcatggagaccgcgcggcggctggccctgcggggctcccgccgctgggcgacgacgttgcaggagcgcgcgatctggtccctcagctcgtccagcttgcgcagcagctcgacggggtcctgctgcagcgcggcccagcccgcgccgcccctccggtcgctgcattgcggccgctcctccgccccgatcctccgcctgtacttcatctccttgagatcactccccatggcgggggcggcgaggccgctccgcgctcccgctttctcccaccggatcggcaagcactggcgttatccttgagacggagctcgctgcggcgcgggggcgtggcggcggctccggttctccattagggtttcgtcccgcagctcgaggagtacgccatgagagagagagagagagagagagagagagagagagagagagagagagcagagtaggagtagagagtaaactctgggagcggcggcagtgtctgcgttgccacggacacgacgagggagccaagtgaaagaacatttttatatagctgcg

SEQ ID NO: 73917 - DNA, 2535 bp, Zea Mays
cctgggtcaacaggaccagctttcttctctgccttcttaagggctttttcagagattggatgaccattaattgaaaccttaacattgtccatggacttatttaataaagaaaggtccttaaaacccttcttcagaaaaccagcaaaaaatgatgaatccccactcttaccggtagaggactgatcttcatccaacccagcctctgatgaaccacgagaaaacccagaatttgtccgctcattaactgatgaaccactccctgtttgagaattggcatcttcaataaatggctgctgcaatttctcattatcttcttcgattttcagcccatcatgtctctcacttatgcttccagtttccatgacatctgcattattttcatcacagttttttctaatgctctcagctccaagaacataattttcatctctttttacctttgactcatatttattgcatgtgtcctcgcctccggggctgctatcttcatctttaatattcatacactggtacttttcacttccatttactagactactagtgtcatcttctccactattctgctcatatgttttgctactatcttcaatgttgcatgagttatcttccttgctcttctgttcataacttctgcatgagatttcatcttcagtggcatctttgtcatcttcattgctctcctgtttgcttcttgtactaatgcccccatcatactgatcattaacatcatattctcctttgcaagttaggtctgatttgtaagccatggccatgccttgatcatcctcgtcgttacatttttcttgggcacacaatgggtcaacaagtttgtcctctaaagctggagaccgtgggctaactggaccacctacagaaggctccaccttgcagtctgtgtccctctcgcacaatatatcctttgggcttccattgtctacagacctacttggagagaaagggagatcctcagcttttgactgaatgcttctagttgaaccacaatctttgccaatcctgtcattactcatggtcgaagaaagtgaattatcatcagtggaatccatgttgttttgcatgttgctatgatcatttgaattgtagaacatagaattaaaatcctcatgatgttgatggacagtatctcgcctcatctggtcacttgagctttgctctgtttcaggcgcatataaggataatgacggtgcaaagggaataccattttcttcatcatgcttcagactaactatctgacaacaagacccgcattgaaatcggttctgcttccgccctatgcatttttctgtaggcatctgcagtagtttataacatgaactgcacacagagaaaggtgcagcaccatccactggacggcagatatgttccgccttcttcctgaagtactctgctctcctcttcgatacagaccggtgcgagtaaagtgatgacgccacagacctccgatcataatcggatgaaacagatggtgacctctcgaaccggtacgattcatgctgcctggcgaagtacctcgccatcgggatgttctcctcttgcggcgaagtcctctgcccatgcagacagtgtggacaggcacacccgtagtgatggaagctcccaggccccatcccaccgttctcccactgcctcccagggtactggcggtagtgcccgctagactgcctcacatacctttccccatgttcagggcgcggcggtgcgtatgggcctggaggcggcaagcccggcccaaaccgcccgccatggcgggagcggtggtaccccggcagaggcggtggctcctccagatgctcggcggggagcatggagaccgcgcggcggctggccctgcggggctcccgccgctgggcgacgacgttgcaggagcgcgcgatctggtccctcagctcgtccagcttgcgcagcagctcgacggggtcctgctgcagcgcggcccagcccgcgccgcccctccggtcgctgcattgcggccgctcctccgccccgatcctccgcctgtacttcatctccttgagatcactccccatggcgggggcggcgaggccgctccgcgctcccgctttctcccaccggatcggcaagcactggcgttatcctgcacggagttgcgcgacgcggagccaaagttttaggggaggtggagcggtgaacgagcagatcagaggggtcccgagggggcggtggggaatggagtaagatctgtcggtttcctacgggagagagagagagagagagagagagagagagagagaggcggggggtgcggaacggcgcttaccttgagacggagctcgctgcggcgcgggggcgtggcggcggctccggttctccattagggtttcgtcccgcagctcgaggagtacgccatgagagagagagagagagagagagagagagagagagagagagagagagcagagtaggagtagagagtaaactctgggagcggcggcagtgtctgcgttgccacggacacgacgagggagccaagtgaaagaacatttttatatagctgcg

SEQ ID NO: 73918 - DNA, 2256 bp, Zea Mays
ggacgcgtcggagggcggaggcgggattgagggcccgcagcggcctcgtcatgtgggaggcgggcatggcgtcccagttccagccgaccaggctgagggagaaatgggcgagtgagcggagggaggaggccaagagcttggcggagctcgggacgcccgtaacgaggctcggggcacggaagccgcggcttgccatggtgtttggtgacctgtatcccagcgcaatgcagcttcagatggtcagcgtcgcttcggttctggaggccatgggctacgaaatgaaggttttctcacttgaggatggcccatgtggaaatatctggagagccattggagtaccagtgagcatactacctgaggacacaaacttacctatttcagtagattggttagactatgatggcatacttgttaattctattgaggcaagaccagtattctcaaggtgatgtatgctgcatttgattctggtaactatttcgtgattccaggccccccctcagaagcatttagttaccatgaagatgtgaggatcagtttgggcttgagtcccaaagattttttgattgctattgttggtactccgttttcatatggtgataatttgatggaagaggcacttgtcttgcaagcagtaagtcctttgttacggagatatcactctgagaatagcgcacaatctgaattgaaagtaaagatcttcactgggaacataactgagaagcataggatggcccttgagtctgttgctctaagtgttggcttcccaagaggtgcagcggagcatgttgctgctgaagataaggacatcctccttcgtacagctgaccttgttatatattattcttgtcttgaggagcaattattccccagtgtgctagtcgaagctatgagtcttgagaagctggttatagctccagaccttggaattattagaaaacatatcgatgatggagtaaacggacttctttttccaagaaagaatgttggcatgttagctcaagttcttcttcaagcagtgtcgaacggtaaagtgtctatttcagggcaaaaaattgcttcagctgggaaggcccatgccaagaatcttatggcttctgagaccattgaaggctatgctgtgctattggaaaatgttgtcaagttccccactgatgcattacaccctttaactgttgatgagatacctttagctctgaaaaaggagtggaaatggcacctatttgaggatgtgaagcatttacaccatatgaatacgagtttgtctagctacaagatactcaagaaactagagcaggagtggcatagaaaccaaatggagaactcttctttgagtacaacaaagatcagtgacacattctctgcaattgcctgggaagaacagagagcaaatgaggttatggacatcaaaagaaaaatggaggaagacgagttgaaggacaggaatgaccaacctcatggaacatgggaggaggtgtacagaaatgtgaaaagggtagataggttaaaaaatgaattgcatgaaagagatgacaaggagcttgagcggacaggtcagccactttgtatatatgagccttttttcggggaggggacctggccatttctgcaccagagctctctttatcgtggagttggcctgtcttcaaaaggtcgaagaccaggagcagatgatattgatgcttcttctcgtcttccacttctcaacaatgtttactacagagatattcttggtgaatttggagctttctttgctcttgccaacagaattgaccgaatacacaaaaattcttggatagggtttcagtcctggagaggtacagcaagaaaggcaaacttatcaaacaatgccgaatttgcaatcttagaagctgttcaatctcaaaagcatggagattccttctatttttgggttcggatggatcaagatccaagaaaccacacatataaagatttttggtccttctgtgatgcgatcaatgctgggaactgcaggttagctgttttggaggccttccaaaggatgtatggtgtacaccttgatcatgacctggattctctgttacatatgcctaatgatggagacacatggtctgtgatgcaaagttgggttttgcctacacggtcattcctagaatttgttatgttttcaagaatgtttgttgatgcactggatgcacaaatgtacgacaaacaccatcaaactgggcattgcatcttgagtcttcacaagttgttcctttgacattttcttat

SEQ ID NO: 73919 - DNA, 2986 bp, Zea Mays
ggacgcgtcggagggcggaggcgggattgagggcccgcagcggcctcgtcatgtgggaggcgggcatggcgtcccagttccagccgaccaggctgagggagaaatgggcgagtgagcggagggaggaggccaagagcttggcggagctcgggacgcccgtaacgaggctcggggcacggaagccgcggcttgccatggtgtttggtgacctgtatcccagcgcaatgcagcttcagatggtcagcgtcgcttcggttctggaggccatgggctacgaaatgaaggttttctcacttgaggatggcccatgtggaaatatctggagagccattggagtaccagtgagcatactacctgaggacacaaacttacctatttcagtagattggttagactatgatggcatacttgttaattctattgaggcaagaccagtattctcaaggccccccctcagaagcatttagttaccatgaagatgtgaggatcagtttgggcttgagtcccaaagattttttgattgctattgttggtactccgttttcatatggtgataatttgatggaagaggcacttgtcttgcaagcagtaagtcctttgttacggagatatcactctgagaatagcgcacaatctgaattgaaagtaaagatcttcactgggaacataactgagaagcataggatggcccttgagtctgttgctctaagtgttggcttcccaagaggtgcagcggagcatgttgctgctgaagataaggacatcctccttcgtacagctgaccttgttatatattattcttgtcttgaggagcaattattccccagtgtgctagtcgaagctatgagtcttgagaagctggttatagctccagaccttggaattattagaaaacatatcgatgatggagtaaacggacttctttttccaagaaagaatgttggcatgttagctcaagttcttcttcaagcagtgtcgaacggtaaagtgtctatttcagggcaaaaaattgcttcagctgggaaggcccatgccaagaatcttatggcttctgagaccattgaaggctatgctgtgctattggaaaatgttgtcaagttccccactgatgcattacaccctttaactgttgatgagatacctttagctctgaaaaaggagtggaaatggcacctatttgaggatgtgaagcatttacaccatatgaatacgagtttgtctagctacaagatactcaagaaactagagcaggagtggcatagaaaccaaatggagaactcttctttgagtacaacaaagatcagtgacacattctctgcaattgcctgggaagaacagagagcaaatgaggttatggacatcaaaagaaaaatggaggaagacgagttgaaggacaggaatgaccaacctcatggaacatgggaggaggtgtacagaaatgtgaaaagggtagataggttaaaaaatgaattgcatgaaagagatgacaaggagcttgagcggacaggtcagccactttgtatatatgagccttttttcggggaggggacctggccatttctgcaccagagctctctttatcgtggagttggcctgtcttcaaaaggtcgaagaccaggagcagatgatattgatgcttcttctcgtcttccacttctcaacaatgtttactacagagatattcttggtgaatttggagctttctttgctcttgccaacagaattgaccgaatacacaaaaattcttggatagggtttcagtcctggagaggtacagcaagaaaggcaaacttatcaaacaatgccgaatttgcaatcttagaagctgttcaatctcaaaagcatggagattccttctatttttgggttcggatggatcaagatccaagaaaccacacatataaagatttttggtccttctgtgatgcgatcaatgctgggaactgcaggttagctgttttggaggccttccaaaggatgtatggtgtacaccttgatcatgacctggattctctgttacatatgcctaatgatggagacacatggtctgtgatgcaaagttgggttttgcctacacggtcattcctagaatttgttatgttttcaagaatgtttgttgatgcactggatgcacaaatgtacgacaaacaccatcaaactgggcattgcatcttgagtcttcacaaggaccggcactgctactctcgtgtcctggagttgattgtgaatgtttgggcattccacagtgcacgacggatggtctatgttaatcctcagactggtgcaatgcaggagcagcaccatctcagtggcaggagaggtcaaatgtcagtgcagtttttctcctacaccactctgaagagcatggacgaggagcttgcagaagagtttgacttggatcatccggacaggaggtggctctggccacaaactggagaggtcttctggcagggtctctatcagagggagcggatcatgcggcagcaggagaaggagcggcggaagcagcagagcagagagaagatccagagaatcaagaatagagctcggcaaaagacgctgggaaagtatataaagccaccgcctgatgatacaggtggctcgaacgatacaacatcagtagatttgtagcattttgaccatgatgattcttaccgtggggaatttggttcattatttgtaacggctgtccttggtcctcactgagaacccccggacggttgtgaatattttgtcagttttgtcgtgccctctggtgtctgggtgctttacaggcgattttgtaacatatctaggccattgagttgtgaagctgccatcttaggtgtaaatttgggtttccgtagggttgtttttgtccatttcgcttatgagcttctctataacagacagttaacacttaacagctgctccgcatttgcagtctccttggtacaaaatgagtcgactgatggtatcaatctgtcaagatatatttgggtgaacc

SEQ ID NO: 73920 - DNA, 3095 bp, Zea Mays
ggacgcgtcggagggcggaggcgggattgagggcccgcagcggcctcgtcatgtgggaggcgggcatggcgtcccagttccagccgaccaggctgagggagaaatgggcgagtgagcggagggaggaggccaagagcttggcggagctcgggacgcccgtaacgaggctcggggcacggaagccgcggcttgccatggtgtttggtgacctgtatcccagcgcaatgcagcttcagatggtcagcgtcgcttcggttctggaggccatgggctacgaaatgaaggttttctcacttgaggatggcccatgtggaaatatctggagagccattggagtaccagtgagcatactacctgaggacacaaacttacctatttcagtagattggttagactatgatggcatacttgttaattctattgaggcaagaccagtattctcaagtcttctgcacgagcctttcaaatccatacctgtaatttggactgttcatgaacattctcttgcccatcgtgctaaagaatataatgcaagtggaatgattcagctcataaatgcttggaaagatgtattcagcagggcaaatgttatagttttcccaaactatatattaccggtgatgtatgctgcatttgattctggtaactatttcgtgattccaggccccccctcagaagcatttagttaccatgaagattaagtcctttgttacggagatatcactctgagaatagcgcacaatctgaattgaaagtaaagatcttcactgggaacataactgagaagcataggatggcccttgagtctgttgctctaagtgttggcttcccaagaggtgcagcggagcatgttgctgctgaagataaggacatcctccttcgtacagctgaccttgttatatattattcttgtcttgaggagcaattattccccagtgtgctagtcgaagctatgagtcttgagaagctggttatagctccagaccttggaattattagaaaacatatcgatgatggagtaaacggacttctttttccaagaaagaatgttggcatgttagctcaagttcttcttcaagcagtgtcgaacggtaaagtgtctatttcagggcaaaaaattgcttcagctgggaaggcccatgccaagaatcttatggcttctgagaccattgaaggctatgctgtgctattggaaaatgttgtcaagttccccactgatgcattacaccctttaactgttgatgagatacctttagctctgaaaaaggagtggaaatggcacctatttgaggatgtgaagcatttacaccatatgaatacgagtttgtctagctacaagatactcaagaaactagagcaggagtggcatagaaaccaaatggagaactcttctttgagtacaacaaagatcagtgacacattctctgcaattgcctgggaagaacagagagcaaatgaggttatggacatcaaaagaaaaatggaggaagacgagttgaaggacaggaatgaccaacctcatggaacatgggaggaggtgtacagaaatgtgaaaagggtagataggttaaaaaatgaattgcatgaaagagatgacaaggagcttgagcggacaggtcagccactttgtatatatgagccttttttcggggaggggacctggccatttctgcaccagagctctctttatcgtggagttggcctgtcttcaaaaggtcgaagaccaggagcagatgatattgatgcttcttctcgtcttccacttctcaacaatgtttactacagagatattcttggtgaatttggagctttctttgctcttgccaacagaattgaccgaatacacaaaaattcttggatagggtttcagtcctggagaggtacagcaagaaaggcaaacttatcaaacaatgccgaatttgcaatcttagaagctgttcaatctcaaaagcatggagattccttctatttttgggttcggatggatcaagatccaagaaaccacacatataaagatttttggtccttctgtgatgcgatcaatgctgggaactgcaggttagctgttttggaggccttccaaaggatgtatggtgtacaccttgatcatgacctggattctctgttacatatgcctaatgatggagacacatggtctgtgatgcaaagttgggttttgcctacacggtcattcctagaatttgttatgttttcaagaatgtttgttgatgcactggatgcacaaatgtacgacaaacaccatcaaactgggcattgcatcttgagtcttcacaaggaccggcactgctactctcgtgtcctggagttgattgtgaatgtttgggcattccacagtgcacgacggatggtctatgttaatcctcagactggtgcaatgcaggagcagcaccatctcagtggcaggagaggtcaaatgtcagtgcagtttttctcctacaccactctgaagagcatggacgaggagcttgcagaagagtttgacttggatcatccggacaggaggtggctctggccacaaactggagaggtcttctggcagggtctctatcagagggagcggatcatgcggcagcaggagaaggagcggcggaagcagcagagcagagagaagatccagagaatcaagaatagagctcggcaaaagacgctgggaaagtatataaagccaccgcctgatgatacaggtggctcgaacgatacaacatcagtagatttgtagcattttgaccatgatgattcttaccgtggggaatttggttcattatttgtaacggctgtccttggtcctcactgagaacccccggacggttgtgaatattttgtcagttttgtcgtgccctctggtgtctgggtgctttacaggcgattttgtaacatatctaggccattgagttgtgaagctgccatcttaggtgtaaatttgggtttccgtagggttgtttttgtccatttcgcttatgagcttctctataacagacagttaacacttaacagctgctccgcatttgcagtctccttggtacaaaatgagtcgactgatggtatcaatctgtcaagatatatttgggtgaacc

SEQ ID NO: 73921 - DNA, 2618 bp, Zea Mays
agagtttatttgcattatttctgcagctatgatggcatacttgttaattctattgaggcaagaccagtattctcaaggccccccctcagaagcatttagttaccatgaagatgtgaggatcagtttgggcttgagtcccaaagattttttgattgctattgttggtactccgttttcatatggtgataatttgatggaagaggcacttgtcttgcaagcagtaagtcctttgttacggagatatcactctgagaatagcgcacaatctgaattgaaagtaaagatcttcactgggaacataactgagaagcataggatggcccttgagtctgttgctctaagtgttggcttcccaagaggtgcagcggagcatgttgctgctgaagataaggacatcctccttcgtacagctgaccttgttatatattattcttgtcttgaggagcaattattccccagtgtgctagtcgaagctatgagtcttgagaagctggttatagctccagaccttggaattattagaaaacatatcgatgatggagtaaacggacttctttttccaagaaagaatgttggcatgttagctcaagttcttcttcaagcagtgtcgaacggtaaagtgtctatttcagggcaaaaaattgcttcagctgggaaggcccatgccaagaatcttatggcttctgagaccattgaaggctatgctgtgctattggaaaatgttgtcaagttccccactgatgcattacaccctttaactgttgatgagatacctttagctctgaaaaaggagtggaaatggcacctatttgaggatgtgaagcatttacaccatatgaatacgagtttgtctagctacaagatactcaagaaactagagcaggagtggcatagaaaccaaatggagaactcttctttgagtacaacaaagatcagtgacacattctctgcaattgcctgggaagaacagagagcaaatgaggttatggacatcaaaagaaaaatggaggaagacgagttgaaggacaggaatgaccaacctcatggaacatgggaggaggtgtacagaaatgtgaaaagggtagataggttaaaaaatgaattgcatgaaagagatgacaaggagcttgagcggacaggtcagccactttgtatatatgagccttttttcggggaggggacctggccatttctgcaccagagctctctttatcgtggagttggcctgtcttcaaaaggtcgaagaccaggagcagatgatattgatgcttcttctcgtcttccacttctcaacaatgtttactacagagatattcttggtgaatttggagctttctttgctcttgccaacagaattgaccgaatacacaaaaattcttggatagggtttcagtcctggagaggtacagcaagaaaggcaaacttatcaaacaatgccgaatttgcaatcttagaagctgttcaatctcaaaagcatggagattccttctatttttgggttcggatggatcaagatccaagaaaccacacatataaagatttttggtccttctgtgatgcgatcaatgctgggaactgcaggttagctgttttggaggccttccaaaggatgtatggtgtacaccttgatcatgacctggattctctgttacatatgcctaatgatggagacacatggtctgtgatgcaaagttgggttttgcctacacggtcattcctagaatttgttatgttttcaagaatgtttgttgatgcactggatgcacaaatgtacgacaaacaccatcaaactgggcattgcatcttgagtcttcacaaggaccggcactgctactctcgtgtcctggagttgattgtgaatgtttgggcattccacagtgcacgacggatggtctatgttaatcctcagactggtgcaatgcaggagcagcaccatctcagtggcaggagaggtcaaatgtcagtgcagtttttctcctacaccactctgaagagcatggacgaggagcttgcagaagagtttgacttggatcatccggacaggaggtggctctggccacaaactggagaggtcttctggcagggtctctatcagagggagcggatcatgcggcagcaggagaaggagcggcggaagcagcagagcagagagaagatccagagaatcaagaatagagctcggcaaaagacgctgggaaagtatataaagccaccgcctgatgatacaggtggctcgaacgatacaacatcagtagatttgtagcattttgaccatgatgattcttaccgtggggaatttggttcattatttgtaacggctgtccttggtcctcactgagaacccccggacggttgtgaatattttgtcagttttgtcgtgccctctggtgtctgggtgctttacaggcgattttgtaacatatctaggccattgagttgtgaagctgccatcttaggtgtaaatttgggtttccgtagggttgtttttgtccatttcgcttatgagcttctctataacagacagttaacacttaacagctgctccgcatttgcagtctccttggtacaaaatgagtcgactgatggtatcaatctgtcaagatatatttgggtgaacc

SEQ ID NO: 73922 - DNA, 2786 bp, Zea Mays
ttattgttgaatggtacctggagtattgtccttttacagttttctcacttgaggatggcccatgtggaaatatctggagagccattggagtaccagtgagcatactacctgaggacacaaacttacctatttcagtagattggttagactatgatggcatacttgttaattctattgaggcaagaccagtattctcaaggtgatgtatgctgcatttgattctggtaactatttcgtgattccaggccccccctcagaagcatttagttaccatgaagatgtgaggatcagtttgggcttgagtcccaaagattttttgattgctattgttggtactccgttttcatatggtgataatttgatggaagaggcacttgtcttgcaagcagtaagtcctttgttacggagatatcactctgagaatagcgcacaatctgaattgaaagtaaagatcttcactgggaacataactgagaagcataggatggcccttgagtctgttgctctaagtgttggcttcccaagaggtgcagcggagcatgttgctgctgaagataaggacatcctccttcgtacagctgaccttgttatatattattcttgtcttgaggagcaattattccccagtgtgctagtcgaagctatgagtcttgagaagctggttatagctccagaccttggaattattagaaaacatatcgatgatggagtaaacggacttctttttccaagaaagaatgttggcatgttagctcaagttcttcttcaagcagtgtcgaacggtaaagtgtctatttcagggcaaaaaattgcttcagctgggaaggcccatgccaagaatcttatggcttctgagaccattgaaggctatgctgtgctattggaaaatgttgtcaagttccccactgatgcattacaccctttaactgttgatgagatacctttagctctgaaaaaggagtggaaatggcacctatttgaggatgtgaagcatttacaccatatgaatacgagtttgtctagctacaagatactcaagaaactagagcaggagtggcatagaaaccaaatggagaactcttctttgagtacaacaaagatcagtgacacattctctgcaattgcctgggaagaacagagagcaaatgaggttatggacatcaaaagaaaaatggaggaagacgagttgaaggacaggaatgaccaacctcatggaacatgggaggaggtgtacagaaatgtgaaaagggtagataggttaaaaaatgaattgcatgaaagagatgacaaggagcttgagcggacaggtcagccactttgtatatatgagccttttttcggggaggggacctggccatttctgcaccagagctctctttatcgtggagttggcctgtcttcaaaaggtcgaagaccaggagcagatgatattgatgcttcttctcgtcttccacttctcaacaatgtttactacagagatattcttggtgaatttggagctttctttgctcttgccaacagaattgaccgaatacacaaaaattcttggatagggtttcagtcctggagaggtacagcaagaaaggcaaacttatcaaacaatgccgaatttgcaatcttagaagctgttcaatctcaaaagcatggagattccttctatttttgggttcggatggatcaagatccaagaaaccacacatataaagatttttggtccttctgtgatgcgatcaatgctgggaactgcaggttagctgttttggaggccttccaaaggatgtatggtgtacaccttgatcatgacctggattctctgttacatatgcctaatgatggagacacatggtctgtgatgcaaagttgggttttgcctacacggtcattcctagaatttgttatgttttcaagaatgtttgttgatgcactggatgcacaaatgtacgacaaacaccatcaaactgggcattgcatcttgagtcttcacaaggaccggcactgctactctcgtgtcctggagttgattgtgaatgtttgggcattccacagtgcacgacggatggtctatgttaatcctcagactggtgcaatgcaggagcagcaccatctcagtggcaggagaggtcaaatgtcagtgcagtttttctcctacaccactctgaagagcatggacgaggagcttgcagaagagtttgacttggatcatccggacaggaggtggctctggccacaaactggagaggtcttctggcagggtctctatcagagggagcggatcatgcggcagcaggagaaggagcggcggaagcagcagagcagagagaagatccagagaatcaagaatagagctcggcaaaagacgctgggaaagtatataaagccaccgcctgatgatacaggtggctcgaacgatacaacatcagtagatttgtagcattttgaccatgatgattcttaccgtggggaatttggttcattatttgtaacggctgtccttggtcctcactgagaacccccggacggttgtgaatattttgtcagttttgtcgtgccctctggtgtctgggtgctttacaggcgattttgtaacatatctaggccattgagttgtgaagctgccatcttaggtgtaaatttgggtttccgtagggttgtttttgtccatttcgcttatgagcttctctataacagacagttaacacttaacagctgctccgcatttgcagtctccttggtacaaaatgagtcgactgatggtatcaatctgtcaagatatatttgggtgaacc

SEQ ID NO: 73923 - DNA, 1474 bp, Zea Mays
ccactttgtatatatgagccttttttcggggaggggacctggccatttctgcaccagagctctctttatcgtggagttggcctgtcttcaaaaggtcgaagaccaggagcagatgatattgatgcttcttctcgtcttccacttctcaacaatgtttactacagagatattcttggtgaatttggagctttctttgctcttgccaacagaattgaccgaatacacaaaaattcttggatagggtttcagtcctggagaggtacagcaagaaaggcaaacttatcaaacaatgccgaatttgcaatcttagaagctgttcaatctcaaaagcatggagattccttctatttttgggttcggatggatcaagatccaagaaaccacacatataaagatttttggtccttctgtgatgcgatcaatgctgggaactgcaggttagctgttttggaggccttccaaaggatgtatggtgtacaccttgatcatgacctggattctctgttacatatgcctaatgatggagacacatggtctgtgatgcaaagttgggttttgcctacacggtcattcctagaatttgttatgttttcaagaatgtttgttgatgcactggatgcacaaatgtacgacaaacaccatcaaactgggcattgcatcttgagtcttcacaaggaccggcactgctactctcgtgtcctggagttgattgtgaatgtttgggcattccacagtgcacgacggatggtctatgttaatcctcagactggtgcaatgcaggagcagcaccatctcagtggcaggagaggtcaaatgtcagtgcagtttttctcctacaccactctgaagagcatggacgaggagcttgcagaagagtttgacttggatcatccggacaggaggtggctctggccacaaactggagaggtcttctggcagggtctctatcagagggagcggatcatgcggcagcaggagaaggagcggcggaagcagcagagcagagagaagatccagagaatcaagaatagagctcggcaaaagacgctgggaaagtatataaagccaccgcctgatgatacaggtggctcgaacgatacaacatcagtagatttgtagcattttgaccatgatgattcttaccgtggggaatttggttcattatttgtaacggctgtccttggtcctcactgagaacccccggacggttgtgaatattttgtcagttttgtcgtgccctctggtgtctgggtgctttacaggcgattttgtaacatatctaggccattgagttgtgaagctgccatcttaggtgtaaatttgggtttccgtagggttgtttttgtccatttcgcttatgagcttctctataacagacagttaacacttaacagctgctccgcatttgcagtctccttggtacaaaatgagtcgactgatggtatcaatctgtcaagatatatttgggtgaacc

SEQ ID NO: 73924 - DNA, 994 bp, Zea Mays
agaaaccacacatataaagatttttggtccttctgtgatgcgatcaatgctgggaactgcaggttagctgttttggaggccttccaaaggatgtatggtgtacaccttgatcatgacctggattctctgttacatatgcctaatgatggagacacatggtctgtgatgcaaagttgggttttgcctacacggtcattcctagaatttgttatgttttcaagaatgtttgttgatgcactggatgcacaaatgtacgacaaacaccatcaaactgggcattgcatcttgagtcttcacaaggagcagcaccatctcagtggcaggagaggtcaaatgtcagtgcagtttttctcctacaccactctgaagagcatggacgaggagcttgcagaagagtttgacttggatcatccggacaggaggtggctctggccacaaactggagaggtcttctggcagggtctctatcagagggagcggatcatgcggcagcaggagaaggagcggcggaagcagcagagcagagagaagatccagagaatcaagaatagagctcggcaaaagacgctgggaaagtatataaagccaccgcctgatgatacaggtggctcgaacgatacaacatcagtagatttgtagcattttgaccatgatgattcttaccgtggggaatttggttcattatttgtaacggctgtccttggtcctcactgagaacccccggacggttgtgaatattttgtcagttttgtcgtgccctctggtgtctgggtgctttacaggcgattttgtaacatatctaggccattgagttgtgaagctgccatcttaggtgtaaatttgggtttccgtagggttgtttttgtccatttcgcttatgagcttctctataacagacagttaacacttaacagctgctccgcatttgcagtctccttggtacaaaatgagtcgactgatggtatcaatctgtcaagatatatttgggtgaacc

SEQ ID NO: 73925 - DNA, 744 bp, Zea Mays
tttcctctatcctctagattgatggaaaagctgctttgctaggatttgtgggggccccatggacaattgcaacttacattgttgaaggggggatgaccaacacgtacacaaatataaagagcatgtgccatacagctccagatgtcttgaagggtcttctctctcaccttgcacaagccatatctgactatatcatttaccaagttaactcgggggcccagtgtatacagatatttgattcatggggtggacagcttccacctcatgtgtgggagcagtggtcaaaaccatatatcaaacagattgtgagtaggattaagaaagagtgccctaatgtaccccttgtgttgtatataaatggaaatggaggtttacttgagcgcatgaagaacacaggagttgatgttattgggcttgactggacagtggacatgactgatggaaggaggcgccttggtaatggcattagtgtacaagggaatgtggatccagcatttttgttctcaccattaccagtactgactgatgaaattcatagatacggtgcactgggcaagacactcatagaggcttcaaatacttgtactcggttttcaaagactcggtattcaaagatgatgtaaattatcggatatgtttggtgcaccattggacaggttatcaaacatgttatttagagaggtttgtaattatactacttatcgatgtatttggtatgcacattggatactacgtacagtaatg

SEQ ID NO: 73926 - DNA, 2576 bp, Zea Mays
acttcagttgcggatgcggccaccttctcccctttcctcagaccccaggccccagcccggcaagcagacatgggcaaccgtgcgtcgcgccaccaccgccaagccgccgagcagcaaccggcgacgccgaccctgccgaagccccagccccagatccagccgccgcctccgcctccgccgacgcagacgcagcagtaccagcaggcgccgccgcagtcgcagcagaagccgaagccggcggcggacgtgggggcggtggggcgcgtgctggggcggcccatggaggacgtgcgcgcgacctacactttcggccgcgagctcgggcggggccagttcggggtcacctacctcgtcacgcactcggagaccgggcagcgcttcgcctgcaagtccatcgccacgcggaagctcgtccaccgcgacgacattgaggacgtgcgccgggaggtgcagatcatgcaccacctcacgggccaccgcaacatcgtcgagctccggggagcatacgaggacaggcactcggtcaaccttgttatggagctctgcgagggcggggagctcttcgaccgcatcatagccaagggccactacaccgagcgagccgccgcctcgctctgccgcgagatcgtcgccgtcgtccacagctgccactccatgggggtcttccatcgggatctcaagcccgagaacttcctgttcctcaataacaaggaggactccccgctcaaggccacggacttcggtctctccgtcttcttcaagcacggggagacgtttaaggatcttgtgggaagtgcatattatgttgctcctgaggtactgaaacggaaatatggggcagaggctgacatatggagtgctggggtcattctttacatccttctgtctggtgttcctcctttttgggcagagaatgaggatggcatatttgatgctgtcttgcgcggtcacatcgatttctcttctgacccttggccttcaatatccaatggtgcaaaggatttggttaagaagatgctgcgacaagacccaaaagaacgcctgactgctgctgaaattttgagtaagacaactgtgcttctattgctttgcatgctagttgtggaatcacattttatagtattctcatgtgtagagaataaacactcatgtagtaaatttgtatcaaatgggagcaatcattcctcctaatttattccaaattttgtgccttttgatgatctctccagttgaaaatacatgttgttttagaattcctcatggtcaaacttcttttaactttgaccgttaatatataaagatgtgagctagatgtcattaggtttaccagggaaagtccttcaaagtatttatcatctttattcgaaatttcatattttatagaaattgtagaccaaagtttcacctaaatgacatgtagtttgcatcagagagtacaagagtgctaaagcactataacagttacataattccagaaagaaactgctgatttctctatctttatttcaatacatgtctgctttctctttctctctctttctaaaaaaggaacctatcttctttccacatgaactgagtattcattcacaaatgttgtttatcagtctaatattgtgagcatacagaccacccatggattagagaggatggagaggccccagataagccacttgacattactgtcattggtagaatgaaacagttcagggcaatgaacaagctcaagaaagttgcattgaaggttgtggctgagaacttatcagatgaagagattatgggcctaaaagaaatgttcagatccctggatacagataacagtgggacaattactcttgaagagctaagatctggtttaccaaaacttggtacaaaaatttctgaatcagaaattaaacaattgatggaggcggctgatgttgatggaaatggtaccattgattatgcggagtttatatcagccacaatgcatttgaatagattggagaaggaagaccacatactcaaagcttttgaatatttcgataaggatcacagcggatacataaccgtagatgagttggaagaagctttgaagaagtatgatatgggagatgacaaaactataaaagaaatcattgctgaagtagatacagatcatgatggaagaattaattaccaggagtttgttgccatgatgaggaacaacagccctgagattgttccaaatcggaggcgcatgttctaactgtcatggacaatcacattgaatactttcaagaacaatctgcccttagacataatctttgtcccattttctttttggaacagccgttaagaagactccttaatttgagatccatgtctctgctgcccggacctgtttgtcccaaaatagggtggtgttatagtgattcgtacttgatgctttgagcttcatggactcttgcgtggcaatgtttatccccattgtacgtcaattaaataaaaaaagacaaaaaaccgatatccgaataagtatccgaacctcaccttttattctagtttgtcgaagtgttggcacttgtgaattgttatcatgtgctcgcactcgttttttt

SEQ ID NO: 73927 - DNA, 1114 bp, Zea Mays
ggcctaatttttggcttcattcaaccgtacaaatgttcacatgacatatttcacaaatttacatatccaatgaccaaaattgtggcagacaaattccaattcataggtcacaatacatctagcaagaagcaacattgttcaacaaaacttaaggctactagtaacaaaaatcaacaaacttggagccactaagtcctacttgtgaaaaactaacaaccaactattgataaaacaacccgacatagttcaaccaacaaccaattttcaaaaaagaaacatactacaataattcactgttgggggcttaaaaactttatggccttggattgtgctggccctggttgaagtttagcggttaacaaaggaggacgtgcatttcttgtgatgtcatctttacaacttctatttcctcataatgttttacccttgaagtttctgattccgtcttcaagttatccaacacttgtcaaagttttgttttttcttgcttctccttctcaagctcaacctgaacatcctgaacctataaataagcataacttatttacttcatatgtaaccatgcacacacagccaaacaagaacaaaaacatagttaaaaatatgtatacaaatacataatcagacattaaagcatcaaatggtctacatatatggttaatttgggaacaaatgacttatgcttttatagaaaaaatgttgcatgctgctacagtacatgtgcttttactgaatttaaagcataattatatattcaaatcaatattgatacttcattagtatgaacataaactcagaaaattagacataaaccaagtaatcttttatttacatatcttttgtgctgctagttgtgtctagaatgtaatatgatctggttgtggtacctagatatgtaatttctatgtttgtgcatggacaatctgttaatgtggatatcatcttattaatctatggattgcatccatttatatattgtgcatttagctattagtgggcaatgtattaatttctcggctatatgttgaatattaacaacaatcttttctctatggagtttttagttgggtttataaacatatcatgagctcaagaaaaatggcctcaagagtag

SEQ ID NO: 73928 - DNA, 939 bp, Zea Mays
cccaacggcagctcgctttgtactatataggggtcaggaatgctccttgatagataataatataaccacagaaatccatcgacgaacaactgagaagagctgcgcctgcgcctgcgcctgcgggaaagggagaacatggtggggaagaagaggggtgttatctccccgctggaccatctcgctgggctgctggaggtgcgcgtggtgaggggagtggacctcgccatccgcgacctccgatccagcgacccctacgtcgtccttcgcatcggcaaggcgcagaagtgaagacgcgagtggtcaagaagagcatcaatccggaatggaacgaaaaactcaccctctctattgaagaccctgccgttcctattagactggaagtatttgacaaggacactttcgttgatgatgcaatgggtaacgcggagctggacatccgcccgttagtcgagattgtgaagatgaagctccagggtgtcgctgacaaaacggtggtaaagaagctggtgcccaacagacagaactgcctagccgaggagagctccatatacatatcggaggggaaggtgaagcaagacctggtcgtacggctaaggaacgtagagtgtggcgaaatcgagctccaacttcagtgggtccacctccctggctctaagggtgtatgagaagagttatgagcgctgcctagcttgcactgctcaggttcttcgcttcacattaaagtaatctatttgaactgtagttgtaatctatagagataaaagcagtgtaaaaatagtagaaatcgttatggattaaagacagtcgacccagctcttgctagttgaaaagaacccagctcttgccatttgacatgttgatcatgtagcggtagccgaagaggatgcaatcctaaatggcccatgtgcattatagttctatcaaatagttatatttttt

SEQ ID NO: 73929 - DNA, 1533 bp, Zea Mays
taataatataaccacagaaatccatcgacgaacaactgagaagagctgcgcctgcgcctgcgcctgcgggaaagggagaacatggtggggaagaagaggggtgttatctccccgctggaccatctcgctgggctgctggaggtgcgcgtggtgaggggagtggacctcgccatccgcgacctccgatccagcgacccctacgtcgtccttcgcatcggcaaggcgcagaaagtgaagacgcgagtggtcaagaagagcatcaatccggaatggaacgaaaaactcaccctctctattgaagaccctgccgttcctattagactggtacgccttcgcttccacctttccttcccgaactctacaagtattctgagcaaacgagtaacagaggaaataatttactgctagctagtagtaccaatctattactcgtcttccttgatatgtgcaggtgtagctgttagttgttatatgtacaatcaattgaacgaaacattcgtgagccatatatgtttcgtactacagtttttttaaaaaagattaaagttgttctgtacggtgagaaaatcacgtctctcctgatgtaatattagtgattatatatgctaactcagcatgcggtcactaccgaatgacttccatattatggaaattaactttgtctattcttacatgcacacttgtaatttgcctatgccagccaatacagttcagattaagccatatttacggtgttttaagcttttacgttgcacgcatcagtttcgtgagcctgcctgtggttttgatatttgagttgagtcccaagaactttcctagctcaaaaacactgattccaagtcctttcagaagactattttatagcctagcgattacacacccgtgacttcattttccaactctcttaaagagacagacgctcatgctgagtattgacaagtaataactctttctcatttttattttttcaggaagtatttgacaaggacactttcgttgatgatgcaatgggtaacgcggagctggacatccgcccgttagtcgagattgtgaagatgaagctccagggtgtcgctgacaaaacggtggtaaagaagctggtgcccaacagacagaactgcctagccgaggagagctccatatacatatcggaggggaaggtgaagcaagacctggtcgtacggctaaggaacgtagagtgtggcgaaatcgagctccaacttcagtgggtccacctccctggctctaagggtgtatgagaagagttatgagcgctgcctagcttgcactgctcaggttcttcgcttcacattaaagtaatctatttgaactgtagttgtaatctatagagataaaagcagtgtaaaaatagtagaaatcgttatggattaaagacagtcgacccagctcttgctagttgaaaagaacccagctcttgccatttgacatgttgatcatgtagcggtagccgaagaggatgcaatcctaaatggcccatgtgcattatagttctatcaaatagttatatttttt

SEQ ID NO: 73930 - DNA, 790 bp, Zea Mays
taataatataaccacagaaatccatcgacgaacaactgagaagagctgcgcctgcgcctgcgcctgcgggaaagggagaacatggtggggaagaagaggggtgttatctccccgctggaccatctcgctgggctgctggaggtgcgcgtggtgaggggagtggacctcgccatccgcgacctccgatccagcgacccctacgtcgtccttcgcatcggcaaggcgcaggaagtatttgacaaggacactttcgttgatgatgcaatgggtaacgcggagctggacatccgcccgttagtcgagattgtgaagatgaagctccagggtgtcgctgacaaaacggtggtaaagaagctggtgcccaacagacagaactgcctagccgaggagagctccatatacatatcggaggggaaggtgaagcaagacctggtcgtacggctaaggaacgtagagtgtggcgaaatcgagctccaacttcagtgggtccacctccctggctctaagggtgtatgagaagagttatgagcgctgcctagcttgcactgctcaggttcttcgcttcacattaaagtaatctatttgaactgtagttgtaatctatagagataaaagcagtgtaaaaatagtagaaatcgttatggattaaagacagtcgacccagctcttgctagttgaaaagaacccagctcttgccatttgacatgttgatcatgtagcggtagccgaagaggatgcaatcctaaatggcccatgtgcattatagttctatcaaatagttatatttttt

SEQ ID NO: 73931 - DNA, 1478 bp, Zea Mays
aactctctagaacctcgcgggccattcaaaaggctgcgccgttaaccccatcccttcgcctgccctgcccacgtggccacgtacgagtgacctcgattattctgtttgctctcgttcaagtcatcgtctggtcgcgtcggcagcagacgcccagagccggagggagcgccatggccgcgtcggatctggagagcaaagccaaggaggccttcgtcgacgacgacttcgagctggccgccgaactctacacgcaggccatcgacgccgggcccgccactgccgatctctacgccgaccgcgcccaggcgcacatcaagctcggcaactacactgaggctgtggcagatgctaacaaagcaattggtcttgatcctacaatgcataaagcctactaccggaaaggtgctgcatgcattaagcttgaagaataccaaactgcaaaggctgctcttgagttaggttcttcctatgcaccaggcgattcaaggtttacccgtctattgaaggaatgtgatgagtgcattgctggcatgactactacaacagtgccacagaagtggtcctcacaatatatgctaagggtgttcctgctgatagtgtagtcattgattttggtgatcagatgttgagtgtatccattgaagtacctggtgaagaaccgtaccattttcagccccgtctgttttctaagattatccctgagaaatgcaagtatcaagttttatccaccaaggtcgaaatacgccttgcaaaagctgagcaggtgacatggacaaccctggattatagtggaagaccaaaggctattccccagaagataagcacgccagctgaaacagccccaagaccttcatacccatcttcaaagtcaaaaaaggactgggataaactggaagctgaagtaaaaaaggaggagaaggaagaaaaacttgaaggtgatgctgcattgaacaagttcttccgtgatatctacaaggatgctgatgaagatatgcggagggccatggacaagtcattcagggaatctaatggtaccgttctctcaaccaattggaaagatgttggatcaaagacggtggaagcgagccctcctgatggtatggagctcaagaagtgggaaatttgaagtttggactgcccctcttgtaaatccaggtcttggaagttatgacctagttctgtccacccatttggtgtcgtaagtttggttaagtgtgtgtgtgtttttggttcagctgtcgttcgaggaaaagctattgtaagttgtggactgtgtaaaagctgcaatagattgtgggttgtgaaaaaggtgtatgctgtttaatttaaacaagcataaaacttacacgtgtctctattttttcattttcttgaaacctgcaattgttctctagtttcatttcgctattttagaaagtagaaaaccaacaaaaaacaggatctgcaataactaaaagtagctgcttctgacaagcagc

SEQ ID NO: 73932 - DNA, 1283 bp, Zea Mays
aactctctagaacctcgcgggccattcaaaaggctgcgccgttaaccccatcccttcgcctgccctgcccacgtggccacgtacgagtgacctcgattattctgtttgctctcgttcaagtcatcgtctggtcgcgtcggcagcagacgcccagagccggagggagcgccatggccgcgtcggatctggagagcaaagccaaggaggccttcgtcgacgacgacttcgagctggccgccgaactctacacgcaggccatcgacgccgggcccgccactgccgatctctacgccgaccgcgcccaggcgcacatcaagctcggcaactacactggcatgactactacaacagtgccacagaagtggtcctcacaatatatgctaagggtgttcctgctgatagtgtagtcattgattttggtgatcagatgttgagtgtatccattgaagtacctggtgaagaaccgtaccattttcagccccgtctgttttctaagattatccctgagaaatgcaagtatcaagttttatccaccaaggtcgaaatacgccttgcaaaagctgagcaggtgacatggacaaccctggattatagtggaagaccaaaggctattccccagaagataagcacgccagctgaaacagccccaagaccttcatacccatcttcaaagtcaaaaaaggactgggataaactggaagctgaagtaaaaaaggaggagaaggaagaaaaacttgaaggtgatgctgcattgaacaagttcttccgtgatatctacaaggatgctgatgaagatatgcggagggccatggacaagtcattcagggaatctaatggtaccgttctctcaaccaattggaaagatgttggatcaaagacggtggaagcgagccctcctgatggtatggagctcaagaagtgggaaatttgaagtttggactgcccctcttgtaaatccaggtcttggaagttatgacctagttctgtccacccatttggtgtcgtaagtttggttaagtgtgtgtgtgtttttggttcagctgtcgttcgaggaaaagctattgtaagttgtggactgtgtaaaagctgcaatagattgtgggttgtgaaaaaggtgtatgctgtttaatttaaacaagcataaaacttacacgtgtctctattttttcattttcttgaaacctgcaattgttctctagtttcatttcgctattttagaaagtagaaaaccaacaaaaaacaggatctgcaataactaaaagtagctgcttctgacaagcagc

SEQ ID NO: 73933 - DNA, 1740 bp, Zea Mays
aactctctagaacctcgcgggccattcaaaaggctgcgccgttaaccccatcccttcgcctgccctgcccacgtggccacgtacgagtgacctcgattattctgtttgctctcgttcaagtcatcgtctggtcgcgtcggcagcagacgcccagagccggagggagcgccatggccgcgtcggatctggagagcaaagccaaggaggccttcgtcgacgacgacttcgagctggccgccgaactctacacgcaggccatcgacgccgggcccgccactgccgatctctacgccgaccgcgcccaggcgcacatcaagctcggcaactacactgaggctgtggcagatgctaacaaagcaattggtcttgatcctacaatgcataaagcctactaccggaaaggtgctgcatgcattaagcttgaagaataccaaactgcaaaggctgctcttgagttaggttcttcctatgcaccaggcgattcaaggtttacccgtctattgaaggaatgtgatgagtgcattgctgaggaatctagccaggcaccagcaaagaatgtcgaggctcctgtagctgctactgttgaggacaaggaggatgtcgcaaatatggataatacaccgccagtggtagaacccccaagcaaacctaaatatagatctgtttactgataagcatattcttgtttgtggagccatacaaggaggaaagaaaaatgcttctctcttactgaaattaatgtcaagcatgagttgctagctttttgctaaagttttctcctaaataatttgtgatgcaggcatgactactacaacagtgccacagaagtggtcctcacaatatatgctaagggtgttcctgctgatagtgtagtcattgattttggtgatcagatgttgagtgtatccattgaagtacctggtgaagaaccgtaccattttcagccccgtctgttttctaagattatccctgagaaatgcaagtatcaagttttatccaccaaggtcgaaatacgccttgcaaaagctgagcaggtgacatggacaaccctggattatagtggaagaccaaaggctattccccagaagataagcacgccagccccaagaccttcatacccatcttcaaagtcaaaaaaggactgggataaactggaagctgaagtaaaaaaggaggagaaggaagaaaaacttgaaggtgatgctgcattgaacaagttcttccgtgatatctacaaggatgctgatgaagatatgcggagggccatggacaagtcattcagggaatctaatggtaccgttctctcaaccaattggaaagatgttggatcaaagacggtggaagcgagccctcctgatggtatggagctcaagaagtgggaaatttgaagtttggactgcccctcttgtaaatccaggtcttggaagttatgacctagttctgtccacccatttggtgtcgtaagtttggttaagtgtgtgtgtgtttttggttcagctgtcgttcgaggaaaagctattgtaagttgtggactgtgtaaaagctgcaatagattgtgggttgtgaaaaaggtgtatgctgtttaatttaaacaagcataaaacttacacgtgtctctattttttcattttcttgaaacctgcaattgttctctagtttcatttcgctattttagaaagtagaaaaccaacaaaaaacaggatctgcaataactaaaagtagctgcttctgacaagcagc

SEQ ID NO: 73934 - DNA, 1488 bp, Zea Mays
gccggatcgaggacgattgaaactagggaccaaatgttctagacacaccgcctgcgcgtggaggttggcgatgacaacaacctcataagtcacgtgggactctaccagctagtactccaaggtgggtctgcactagagggaccacccaattagccctgaacatctgcaagcaaacgggcgagggcatcagcagcaacacactcctgctttcagaggctgtggcagatgctaacaaagcaattggtcttgatcctacaatgcataaagcctactaccggaaaggtgctgcatgcattaagcttgaagaataccaaactgcaaaggctgctcttgagttaggttcttcctatgcaccaggcgattcaaggtttacccgtctattgaaggaatgtgatgagtgcattgctgaggaatctagccaggcaccagcaaagaatgtcgaggctcctgtagctgctactgttgaggacaaggaggatgtcgcaaatatggataatacaccgccagtggtagaacccccaagcaaacctaaatataggcatgactactacaacagtgccacagaagtggtcctcacaatatatgctaagggtgttcctgctgatagtgtagtcattgattttggtgatcagatgttgagtgtatccattgaagtacctggtgaagaaccgtaccattttcagccccgtctgttttctaagattatccctgagaaatgcaagtatcaagttttatccaccaaggtcgaaatacgccttgcaaaagctgagcaggtgacatggacaaccctggattatagtggaagaccaaaggctattccccagaagataagcacgccagctgaaacagccccaagaccttcatacccatcttcaaagtcaaaaaaggactgggataaactggaagctgaagtaaaaaaggaggagaaggaagaaaaacttgaaggtgatgctgcattgaacaagttcttccgtgatatctacaaggatgctgatgaagatatgcggagggccatggacaagtcattcagggaatctaatggtaccgttctctcaaccaattggaaagatgttggatcaaagacggtggaagcgagccctcctgatggtatggagctcaagaagtgggaaatttgaagtttggactgcccctcttgtaaatccaggtcttggaagttatgacctagttctgtccacccatttggtgtcgtaagtttggttaagtgtgtgtgtgtttttggttcagctgtcgttcgaggaaaagctattgtaagttgtggactgtgtaaaagctgcaatagattgtgggttgtgaaaaaggtgtatgctgtttaatttaaacaagcataaaacttacacgtgtctctattttttcattttcttgaaacctgcaattgttctctagtttcatttcgctattttagaaagtagaaaaccaacaaaaaacaggatctgcaataactaaaagtagctgcttctgacaagcagc

SEQ ID NO: 73935 - DNA, 825 bp, Zea Mays
tctaaggcgccacaatgtggctaacttttctacctaagattatccctgagaaatgcaagtatcaagttttatccaccaaggtcgaaatacgccttgcaaaagctgagcaggtgacatggacaaccctggattatagtggaagaccaaaggctattccccagaagataagcacgccagctgaaacagccccaagaccttcatacccatcttcaaagtcaaaaaaggactgggataaactggaagctgaagtaaaaaaggaggagaaggaagaaaaacttgaaggtgatgctgcattgaacaagttcttccgtgatatctacaaggatgctgatgaagatatgcggagggccatggacaagtcattcagggaatctaatggtaccgttctctcaaccaattggaaagatgttggatcaaagacggtggaagcgagccctcctgatggtatggagctcaagaagtgggaaatttgaagtttggactgcccctcttgtaaatccaggtcttggaagttatgacctagttctgtccacccatttggtgtcgtaagtttggttaagtgtgtgtgtgtttttggttcagctgtcgttcgaggaaaagctattgtaagttgtggactgtgtaaaagctgcaatagattgtgggttgtgaaaaaggtgtatgctgtttaatttaaacaagcataaaacttacacgtgtctctattttttcattttcttgaaacctgcaattgttctctagtttcatttcgctattttagaaagtagaaaaccaacaaaaaacaggatctgcaataactaaaagtagctgcttctgacaagcagc

SEQ ID NO: 73936 - DNA, 2669 bp, Zea Mays
gtcgacgcaccgtctcgcaaatcccagggtgcaacctgcaaaatcatcccctctctggctcccggaaacagaggtcttttttactctagcccactagcggccgctcctccgcctcccgttgtcccctccatcagtcccctcgtccttctcccctctccacacggcgtcgcggctcccctcattcgccggcgtcgacgatgaacggaggcagccggcggcagcggtactcctcagagcagctcctcttcgacgtccccgccaatgccggtgccggccggtgggcgcagcagcgtggcggggtgcgtcgcggggacggggagatcttcgtgtcggtggagcccgcgacgccggcgcggctgtgcggaggggacgccgcggccggggactcgccgggacagaggcagcagctcagtcccgggttgctcgacctccatgcgttcgacaccgagcttattcccgattttcaagtaccaggaatctatgatggtgcccaaaagtttggctatggaggaggtctagatgaatctgatatgagattcacatcaaacaagatgatgagcaagtctactatttttcctgatggtaactatctgaaggccttcactgagaaagaaaaggcagcacctgtcgcgaaaatcaaagtggtggtgcgcaaaagaccacttaacaaaaaggaagtatcaaagaaggaagaagatattgtagacattgaacaaagatcaaactctttgactgtccatgaaactaaacttaaggttgaccttactgaatacgtcgaaaagcatgagtttgtattcgatgctgtcttagatgaagatgtttcaaatgatgaggtttatcgtgaaacagtggagcctgtagttcctgcaatttttaatcgaactaaggcaacttgttttgcttatggacaaaccggcttcccaagatgtcttgaggttaatgcaccatacctatcgaaaccagggatttcagttgtatgttagcttctttgagatatatggtggcaaattatttgaccttctcaacgataggagcaaactttgcatgagagaggatggaaagcaaaaggtttgtattgttggtttgcaagagtatagagtgtccgatatagagactatcaaggagttgattgaaaaaggcagtgctaccagaagtactggcacaaccggtgcaaatgaagagtcctcaaggtctcatgccattcttcagcttgccattaaacgccgtgtggatggcaatgactcgaaaccacccagaccagtcggcaagttgtcatttattgaccttgctggcagcgagcgtggtgctgatacaactgacaatgataaacaaacaagaatcgagggtgctgagatcaataaaagtttgcttgccctaaaggaatgcattagagcgcttgataatgatcagactcacatacctttccgaggtagcaaattaactgaagtgctgcgtgactcattcattggagactcacgcactgtcatgatatcctgcatttctcctagttctggctcttgcgagcatactctgaacacattgagatatgctgacagagtgaagagtttgtcaaaaggaagcaacgccaagaaagacgtgtctttggcagtgcctttaagagagtcgaactcttccccactgccttcagttgtaccctcattctctgcatctgaggtgatgaacgatatcaccgggagaagcaatttcggttggcccaagcagcagtatgttaaagaacagcctgctccaacatttgttgaacgaatgcccaaggcaaaggatgcggtggagttcacatcatcaaatatagctgaagtaccagatataatgtaccagctgggaaggcagccatcaaggaaagatgtcactttggcgaacaatatgagaaattccgttgcttacccaactagaagggttgaaccagatgatgatgatgagcatctaaataatcttctccaggaagaggaagaattggttagtgctcataggaagcaggttgaggagactctggacatcctgaaagaggaaatgaacatattaggcgacgcggatcagcctggcttccaactcgatgactacatcacaagactaagcagtatgctctcgcagaaggcggctgtgatcgtggacctacaggctcgtctggagcagtttcagaggcttttgaacgagaacaatgtgctgctatatgctcagagcccttgaccgtagctccgtcggattcatctgttgccctgttgccaccggaaaaggtgggcactggtgatgagtctcgggcggcaacctgtgcgttgttgctgtggccatggtgctgctactgtaatccgtcggtgccagtgaaacgcggaactagatggctagttcacagcatgttgccatgcttctttggcatggccggcccggcaacctattttgtactagagttgctgcatccttgtgttcctgcgccccatccaatgtgtatatctcatatttgtccgtgtcacatgaatgctctgttatttgtagctcaacagatacgtttttctccccctttctgaattctgatgtatgaagttttccagagtgtatggtatcatcccgttatacacagcttttcttggatctttattagaaggaattctatgccacaagggattgttcagcttggtaaatatcgttgctatccg

SEQ ID NO: 73937 - DNA, 2593 bp, Zea Mays
gcctcccgttgtcccctccatcagtcccctcgtccttctcccctctccacacggcgtcgcggctcccctcattcgccggcgtcgacgatgaacggaggcagccggcggcagcggtactcctcagagcagctcctcttcgacgtccccgccaatgccggtgccggccggtgggcgcagcagcgtggcggggtgcgtcgcggggacggggagatcttcgtgtcggtggagcccgcgacgccggcgcggctgtgcggaggggacgccgcggccggggactcgccgggacagaggcagcagctcagtcccgggttgctcgacctccatgcgttcgacaccgagcttattcccgattttcaagtaccaggaatctatgatggtgcccaaaagtttggctatggaggaggtctagatgaatctgatatgagattcacatcaaacaagatgatgagcaagtctactatttttcctgatggtaactatctgaaggccttcactgagaaagaaaaggcagcacctgtcgcgaaaatcaaagtggtggtgcgcaaaagaccacttaacaaaaaggaagtatcaaagaaggaagaagatattgtagacattgaacaaagatcaaactctttgactgtccatgaaactaaacttaaggttgaccttactgaatacgtcgaaaagcatgagtttgtattcgatgctgtcttagatgaagatgtttcaaatgatgaggtttatcgtgaaacagtggagcctgtagttcctgcaatttttaatcgaactaaggcaacttgttttgcttatggacaaaccggtagtggaaagacttataccatgcgcccccttcctcttaaggcttcccaagatgtcttgaggttaatgcaccatacctatcgaaaccagggatttcagttgtatgttagcttctttgagatatatggtggcaaattatttgaccttctcaacgataggagcaaactttgcatgagagaggatggaaagcaaaaggtttgtattgttggtttgcaagagtatagagtgtccgatatagagactatcaaggagttgattgaaaaaggcagtgctaccagaagtactggcacaaccggtgcaaatgaagagtcctcaaggtctcatgccattcttcagcttgccattaaacgccgtgtggatggcaatgactcgaaaccacccagaccagtcggcaagttgtcatttattgaccttgctggcagcgagcgtggtgctgatacaactgacaatgataaacaaacaagaatcgagggtgctgagatcaataaaagtttgcttgccctaaaggaatgcattagagcgcttgataatgatcagactcacatacctttccgaggtagcaaattaactgaagtgctgcgtgactcattcattggagactcacgcactgtcatgatatcctgcatttctcctagttctggctcttgcgagcatactctgaacacattgagatatgctgacagagtttgtcaaaaggaagcaacgccaagaaagacgtgtctttggcagtgcctttaagagagtcgaactcttccccactgccttcagttgtaccctcattctctgcatctgaggtgatgaacgatatcaccgggagaagcaatttcggttggcccaagcagcagtatgttaaagaacagcctgctccaacatttgttgaacgaatgcccaaggcaaaggatgcggtggagttcacatcatcaaatatagctgaagtaccagatataatgtaccagctgggaaggcagccatcaaggaaagatgtcactttggcgaacaatatgagaaattccgttgcttacccaactagaagggttgaaccagatgatgatgatgagcatctaaataatcttctccaggaagaggaagaattggttagtgctcataggaagcaggttgaggagactctggacatcctgaaagaggaaatgaacatattaggcgacgcggatcagcctggcttccaactcgatgactacatcacaagactaagcagtatgctctcgcagaaggcggctgtgatcgtggacctacaggctcgtctggagcagtttcagaggcttttgaacgagaacaatgtgctgctatatgctcagagcccttgaccgtagctccgtcggattcatctgttgccctgttgccaccggaaaaggtgggcactggtgatgagtctcgggcggcaacctgtgcgttgttgctgtggccatggtgctgctactgtaatccgtcggtgccagtgaaacgcggaactagatggctagttcacagcatgttgccatgcttctttggcatggccggcccggcaacctattttgtactagagttgctgcatccttgtgttcctgcgccccatccaatgtgtatatctcatatttgtccgtgtcacatgaatgctctgttatttgtagctcaacagatacgtttttctccccctttctgaattctgatgtatgaagttttccagagtgtatggtatcatcccgttatacacagcttttcttggatctttattagaaggaattctatgccacaagggattgttcagcttggtaaatatcgttgctatccg

SEQ ID NO: 73938 - DNA, 3072 bp, Zea Mays
cacagtcccaattcccaaactcagatccaagcaaagcaaacatcacggctcgtcgcagtcgtcttcctccccacgcgaggccagatccaacctgcctcggccgaccaccgccatggctcccacggtcccttcggcggcgaagtctgcctctccttcccaaccttccgggaagagcgaggtggcagatctgaagcagcagctgcggcagctggcggggagccgcgctcccgatgcggacgaccagcgccgtgatgtcttcaagagggtgatctcctgcatgacggccggcatcgacgtgtcggccgcgttcggggagatggtgctctgctccgccacctccgacgtagtaaccaagaagatgtgctatctctatgtaggctcccacgcgcgcgcgcacccggacctagcactcctgaccatcaacttcctccagcgggactgccgtgatcaggaccccaccattcgcggcctcgcgctccgcagcctctgctccctccgtgtccccaaccttgtcgagtatctcgttacgccactcacgaccgggctgaaggatcctagcgcctacgtccggacgatcgctgctgttggtgctgccaagttgtatcacatatctgccacagcttgcattgatgctgaccttccggcttcgctcaaggcgctcatgctctccgatccagacgcacaggtagttgccaattgcctacatgcattgcaggagatctggaccctagaagctgctaactcagaggcagcagcaagagagattgagacattgtatagcaagccagtggtattttacctgttaaacaagatcaaagagttcagtgaatgggcacagtgtattgttcttgagttggcatcaaagttccttccatctgataataacgaaatatttgacataatgaatctgctggaggatagacttcagcatgcaaatggagctgttgttttggcaacgattaaagtttttctccatttgacaatgtctatgactgatgtccatcaacaggtttatgaacgtattaaagcacccttgcttactctggtgggtgctggcagtcctgaacagtcatactctgtgctatgccatctacatcttctggtgatgcgtgctccaatgttattttcctcggactataaaagcttctactgccaatttagtgatccttcatatgtgaagaagttgaaacttgagatgttgactgctatagcaaatgaaagcaacacatatgagattgtcactgaactatgtgaatatgctggaaatgttgatgtaccaattgcaagagagtctatccgggcagttggaaaaatagcactgcagcagtatgatgttaatgccattgtggacaggcttctacaatttcttgaaatggataaggattatgtgactgctgaaactctagtcttggtgaaagatcttctcagaaaatatcctcaatggagtcatgattgtatagcagttgtgggaaatatcagcagcaaaaacattcaggagccaaaaggaaaagcagctctcatatggatgttgggagaatattcacaggacatgcatgatgctccatacatccttgaaagtcttgttgaaaactgggatgaagagcactctcctgagtgatgaaatgtttctttaaaagacccccagagacacagaaggcactaggggatacattagcagctggtctatctgacacccatcaggatgttcatgacagagcacttttttactacaggcttttgcaatacagtcctaatgtagcagaacgtgtagtaaaccctcccaagcaagctgtctctgtatttgcagacacacagagcagtgaaatcaaagatcggatattcgatgagttcaacagtctatcagttgtatatcagaagccatcgtacatgtttacagataaggagcatcgcggaccatttgagtactcagaggatcttacaggcttgactgaggatccagaaaatgtaatttctgcccaaagatatcaagaaaatgataatgatcttttgctaagtacttcagataaagaggacaatggtacaagagccagcaatggttcttccacctctacatacaatgctccttccgatttgattagtccttcattgataagctcgcaagcaccagctgaaacttcactagtaaatactggtgggacatattcctcacaatcaaacttcagtctcgatgaccttcttggccttagcgttactgaagctcctgctttaccacaaccaacactggcccttaactcaaagcctgtgctagatcctggtacgttccagaggaaatggggccagctagcattggcactgtctcaggaatgttctttgagtccacaaggggcagtagctttgatgaatccccaatcactcatccgtcatatgcaaagcaatcacatccaatgtattgcttcaggcggtcagcctccgaactacaagttctttttctatgctcaaaaagatggggctgctgctttcttccttgttgaatgtattgtcaacacagcatcagcgaaggcacagctcaaaatcaaggctgatgatggaactgctgctgaggcattctcgagtttgtttcagtcagccttgtccaaatttgggctttcttgatcctgagtaatttgtctgagcgattcaccggtccacagttttttatgggtttcacagtttgccccaactccactgtcttggcttgtccagtacttgtgatcatattattggagaatcagagtagaaggtgcaaaagggtactggagttttgcggagctaaaaatcctatttgtactatttgggtgaactgtgcatttgtacatgactacatgtcacccagataaatagctgggttatttaggactgtactgtttgatgttctgggttatttaggattgtgatagtttgatgccttgatctcttctgaagggtttcgtttccttgaaggatgtagaaacaacacgcaacaacccctttcatgtatgctatttaccatttcttgcacagatgatcaataagatgtttcgtcttccattttgattcgtattatttagtactattttgacatttcattgagac

SEQ ID NO: 73939 - DNA, 2982 bp, Zea Mays
cacagtcccaattcccaaactcagatccaagcaaagcaaacatcacggctcgtcgcagtcgtcttcctccccacgcgaggccagatccaacctgcctcggccgaccaccgccatggctcccacggtcccttcggcggcgaagtctgcctctccttcccaaccttccgggaagagcgaggtggcagatctgaagcagcagctgcggcagctggcggggagccgcgctcccgatgcggacgaccagcgccgtgatgtcttcaagagggtgatctcctgcatgacggccggcatcgacgtgtcggccgcgttcggggagatggtgctctgctccgccacctccgacgtagtaaccaagaagatgtgctatctctatgtaggctcccacgcgcgcgcgcacccggacctagcactcctgaccatcaacttcctccagcgggactgccgtgatcaggaccccaccattcgcggcctcgcgctccgcagcctctgctccctccgtgtccccaaccttgtcgagtatctcgttacgccactcacgaccgggctgaaggatcctagcgcctacgtccggacgatcgctgctgttggtgctgccaagttgtatcacatatctgccacagcttgcattgatgctgaccttccggcttcgctcaaggcgctcatgctctccgatccagacgcacaggtagttgccaattgcctacatgcattgcaggagatctggaccctagaagctgctaactcagaggcagcagcaagagagattgagacattgtatagcaagccagtggtattttacctgttaaacaagatcaaagagttcagtgaatgggcacagtgtattgttcttgagttggcatcaaagttccttccatctgataataacgaaatatttgacataatgaatctgctggaggatagacttcagcatgcaaatggagctgttgttttggcaacgattaaagtttttctccatttgacaatgtctatgactgatgtccatcaacaggtttatgaacgtattaaagcacccttgcttactctggtgggtgctggcagtcctgaacagtcatactctgtgctatgccatctacatcttctggtgatgcgtgctccaatgttattttcctcggactataaaagcttctactgccaatttagtgatccttcatatgtgaagaagttgaaacttgagatgttgactgctatagcaaatgaaagcaacacatatgagattggcttctacaatttcttgaaatggataaggattatgtgactgctgaaactctagtcttggtgaaagatcttctcagaaaatatcctcaatggagtcatgattgtatagcagttgtgggaaatatcagcagcaaaaacattcaggagccaaaaggaaaagcagctctcatatggatgttgggagaatattcacaggacatgcatgatgctccatacatccttgaaagtcttgttgaaaactgggatgaagagcactctcctgaggttcgcttgcatctcctgacagcagtgatgaaatgtttctttaaaagacccccagagacacagaaggcactaggggatacattagcagctggtctatctgacacccatcaggatgttcatgacagagcacttttttactacaggcttttgcaatacagtcctaatgtagcagaacgtgtagtaaaccctcccaagcaagctgtctctgtatttgcagacacacagagcagtgaaatcaaagatcggatattcgatgagttcaacagtctatcagttgtatatcagaagccatcgtacatgtttacagataaggagcatcgcggaccatttgagtactcagaggatcttacaggcttgactgaggatccagaaaatgtaatttctgcccaaagatatcaagaaaatgataatgatcttttgctaagtacttcagataaagaggacaatggtacaagagccagcaatggttcttccacctctacatacaatgctccttccgatttgattagtccttcattgataagctcgcaagcaccagctgaaacttcactagtaaatactggtgggacatattcctcacaatcaaacttcagtctcgatgaccttcttggccttagcgttactgaagctcctgctttaccacaaccaacactggcccttaactcaaagcctgtgctagatcctggtacgttccagaggaaatggggccagctagcattggcactgtctcaggaatgttctttgagtccacaaggggcagtagctttgatgaatccccaatcactcatccgtcatatgcaaagcaatcacatccaatgtattgcttcaggcggtcagcctccgaactacaagttctttttctatgctcaaaaagatggggctgctgctttcttccttgttgaatgtattgtcaacacagcatcagcgaaggcacagctcaaaatcaaggctgatgatggaactgctgctgaggcattctcgagtttgtttcagtcagccttgtccaaatttgggctttcttgatcctgagtaatttgtctgagcgattcaccggtccacagttttttatgggtttcacagtttgccccaactccactgtcttggcttgtccagtacttgtgatcatattattggagaatcagagtagaaggtgcaaaagggtactggagttttgcggagctaaaaatcctatttgtactatttgggtgaactgtgcatttgtacatgactacatgtcacccagataaatagctgggttatttaggactgtactgtttgatgttctgggttatttaggattgtgatagtttgatgccttgatctcttctgaagggtttcgtttccttgaaggatgtagaaacaacacgcaacaacccctttcatgtatgctatttaccatttcttgcacagatgatcaataagatgtttcgtcttccattttgattcgtattatttagtactattttgacatttcattgagac

SEQ ID NO: 73940 - DNA, 2984 bp, Zea Mays
ccaattcccaaactcagatccaagcaaagcaaacatcacggctcgtcgcagtcgtcttcctccccacgcgaggccagatccaacctgcctcggccgaccaccgccatggctcccacggtcccttcggcggcgaagtctgcctctccttcccaaccttccgggaagagcgaggtggcagatctgaagcagcagctgcggcagctggcggggagccgcgctcccgatgcggacgaccagcgccgtgatgtcttcaagagggtgatctcctgcatgacggccggcatcgacgtgtcggccgcgttcggggagatggtgctctgctccgccacctccgacgtagtaaccaagaagatgtgctatctctatgtaggctcccacgcgcgcgcgcacccggacctagcactcctgaccatcaacttcctccagcgggactgccgtgatcaggaccccaccattcgcggcctcgcgctccgcagcctctgctccctccgtgtccccaaccttgtcgagtatctcgttacgccactcacgaccgggctgaaggatcctagcgcctacgtccggacgatcgctgctgttggtgctgccaagttgtatcacatatctgccacagcttgcattgatgctgaccttccggcttcgctcaaggcgctcatgctctccgatccagacgcacaggtagttgccaattgcctacatgcattgcaggagatctggaccctagaagctgctaactcagaggcagcagcaagagagattgagacattgtatagcaagccagtggtattttacctgttaaacaagatcaaagagttcagtgaatgggcacagtgtattgttcttgagttggcatcaaagttccttccatctgataataacgaaatatttgacataatgaatctgctggaggatagacttcagcatgcaaatggagctgttgttttggcaacgattaaagtttttctccatttgacaatgtctatgactgatgtccatcaacaggtttatgaacgtattaaagcacccttgcttactctggtgggtgctggcagtcctgaacagtcatactctgtgctatgccatctacatcttctggtgatgcgtgctccaatgttattttcctcggactataaaagcttctactgccaatttagtgatccttcatatgtgaagaagttgaaacttgagatgttgactgctatagcaaatgaaagcaacacatatgagattgtcactgaactatgtgaatatgctggaaatgttgatgtaccaattgcaagagagtctatccgggcagttggaaaaatagcactgcagcagtatgatgttaatgccattgtggacaggcttctacaatttcttgaaatggataaggattatgtgactgctgaaactctagtcttggtgaaagatcttctcagaaaatatcctcaatggagtcatgattgtatagcagttgtgggaaatatcagcagcaaaaacattcaggagccaaaaggaaaagcagctctcatatggatgttgggagaatattcacaggacatgcatgatgctccatacatccttgaaagtcttgttgaaaactgggatgaagagcactctcctgaggttcgcttgcatctcctgacagcagtgatgaaatgtttctttaaaagacccccagagacacagaaggcactaggggatacattagcagctggtctatctgacacccatcagacacacagagcagtgaaatcaaagatcggatattcgatgagttcaacagtctatcagttgtatatcagaagccatcgtacatgtttacagataaggagcatcgcggaccatttgagtactcagaggatcttacaggcttgactgaggatccagaaaatgtaatttctgcccaaagatatcaagaaaatgataatgatcttttgctaagtacttcagataaagaggacaatggtacaagagccagcaatggttcttccacctctacatacaatgctccttccgatttgattagtccttcattgataagctcgcaagcaccagctgaaacttcactagtaaatactggtgggacatattcctcacaatcaaacttcagtctcgatgaccttcttggccttagcgttactgaagctcctgctttaccacaaccaacactggcccttaactcaaagcctgtgctagatcctggtacgttccagaggaaatggggccagctagcattggcactgtctcaggaatgttctttgagtccacaaggggcagtagctttgatgaatccccaatcactcatccgtcatatgcaaagcaatcacatccaatgtattgcttcaggcggtcagcctccgaactacaagttctttttctatgctcaaaaagatggggctgctgctttcttccttgttgaatgtattgtcaacacagcatcagcgaaggcacagctcaaaatcaaggctgatgatggaactgctgctgaggcattctcgagtttgtttcagtcagccttgtccaaatttgggctttcttgatcctgagtaatttgtctgagcgattcaccggtccacagttttttatgggtttcacagtttgccccaactccactgtcttggcttgtccagtacttgtgatcatattattggagaatcagagtagaaggtgcaaaagggtactggagttttgcggagctaaaaatcctatttgtactatttgggtgaactgtgcatttgtacatgactacatgtcacccagataaatagctgggttatttaggactgtactgtttgatgttctgggttatttaggattgtgatagtttgatgccttgatctcttctgaagggtttcgtttccttgaaggatgtagaaacaacacgcaacaacccctttcatgtatgctatttaccatttcttgcacagatgatcaataagatgtttcgtcttccattttgattcgtattatttagtactattttgacatttcattgagac

SEQ ID NO: 73941 - DNA, 3062 bp, Zea Mays
cccaaactcagatccaagcaaagcaaacatcacggctcgtcgcagtcgtcttcctccccacgcgaggccagatccaacctgcctcggccgaccaccgccatggctcccacggtcccttcggcggcgaagtctgcctctccttcccaaccttccgggaagagcgaggtggcagatctgaagcagcagctgcggcagctggcggggagccgcgctcccgatgcggacgaccagcgccgtgatgtcttcaagagggtgatctcctgcatgacggccggcatcgacgtgtcggccgcgttcggggagatggtgctctgctccgccacctccgacgtagtaaccaagaagatgtgctatctctatgtaggctcccacgcgcgcgcgcacccggacctagcactcctgaccatcaacttcctccagcgggactgccgtgatcaggaccccaccattcgcggcctcgcgctccgcagcctctgctccctccgtgtccccaaccttgtcgagtatctcgttacgccactcacgaccgggctgaaggatcctagcgcctacgtccggacgatcgctgctgttggtgctgccaagttgtatcacatatctgccacagcttgcattgatgctgaccttccggcttcgctcaaggcgctcatgctctccgatccagacgcacaggtagttgccaattgcctacatgcattgcaggagatctggaccctagaagctgctaactcagaggcagcagcaagagagattgagacattgtatagcaagccagtggtattttacctgttaaacaagatcaaagagttcagtgaatgggcacagtgtattgttcttgagttggcatcaaagttccttccatctgataataacgaaatatttgacataatgaatctgctggaggatagacttcagcatgcaaatggagctgttgttttggcaacgattaaagtttttctccatttgacaatgtctatgactgatgtccatcaacaggtttatgaacgtattaaagcacccttgcttactctggtgggtgctggcagtcctgaacagtcatactctgtgctatgccatctacatcttctggtgatgcgtgctccaatgttattttcctcggactataaaagcttctactgccaatttagtgatccttcatatgtgaagaagttgaaacttgagatgttgactgctatagcaaatgaaagcaacacatatgagattgtcactgaactatgtgaatatgctggaaatgttgatgtaccaattgcaagagagtctatccgggcagttggaaaaatagcactgcagcagtatgatgttaatgccattgtggacaggcttctacaatttcttgaaatggataaggattatgtgactgctgaaactctagtcttggtgaaagatcttctcagaaaatatcctcaatggagtcatgattgtatagcagttgtgggaaatatcagcagcaaaaacattcaggagccaaaaggaaaagcagctctcatatggatgttgggagaatattcacaggacatgcatgatgctccatacatccttgaaagtcttgttgaaaactgggatgaagagcactctcctgagcagtgatgaaatgtttctttaaaagacccccagagacacagaaggcactaggggatacattagcagctggtctatctgacacccatcaggatgttcatgacagagcacttttttactacaggcttttgcaatacagtcctaatgtagcagaacgtgtagtaaaccctcccaagcaagctgtctctgtatttgcagacacacagagcagtgaaatcaaagatcggatattcgatgagttcaacagtctatcagttgtatatcagaagccatcgtacatgtttacagataaggagcatcgcggaccatttgagtactcagaggatcttacaggcttgactgaggatccagaaaatgtaatttctgcccaaagatatcaagaaaatgataatgatcttttgctaagtacttcagataaagaggacaatggtacaagagccagcaatggttcttccacctctacatacaatgctccttccgatttgattagtccttcattgataagctcgcaagcaccagctgaaacttcactagtaaatactggtgggacatattcctcacaatcaaacttcagtctcgatgaccttcttggccttagcgttactgaagctcctgctttaccacaaccaacactggcccttaactcaaagcctgtgctagatcctggtacgttccagaggaaatggggccagctagcattggcactgtctcaggaatgttctttgagtccacaaggggcagtagctttgatgaatccccaatcactcatccgtcatatgcaaagcaatcacatccaatgtattgcttcaggcggtcagcctccgaactacaagttctttttctatgctcaaaaagatggggctgctgctttcttccttgttgaatgtattgtcaacacagcatcagcgaaggcacagctcaaaatcaaggctgatgatggaactgctgctgaggcattctcgagtttgtttcagtcagccttgtccaaatttgggctttcttgatcctgagtaatttgtctgagcgattcaccggtccacagttttttatgggtttcacagtttgccccaactccactgtcttggcttgtccagtacttgtgatcatattattggagaatcagagtagaaggtgcaaaagggtactggagttttgcggagctaaaaatcctatttgtactatttgggtgaactgtgcatttgtacatgactacatgtcacccagataaatagctgggttatttaggactgtactgtttgatgttctgggttatttaggattgtgatagtttgatgccttgatctcttctgaagggtttcgtttccttgaaggatgtagaaacaacacgcaacaacccctttcatgtatgctatttaccatttcttgcacagatgatcaataagatgtttcgtcttccattttgattcgtattatttagtactattttgacatttcattgagac

SEQ ID NO: 73942 - DNA, 2694 bp, Zea Mays
ctgcctcggccgaccaccgccatggctcccacggtcccttcggcggcgaagtctgcctctccttcccaaccttccgggaagagcgaggtggcagatctgaagcagcagctgcggcagctggcggggagccgcgctcccgatgcggacgaccagcgccgtgatgtcttcaagagggtgatctcctgcatgacggccggcatcgacgtgtcggccgcgttcggggagatggtgctctgctccgccacctccgacgtagtaaccaagaagatgtgctatctctatgtagttgccaattgcctacatgcattgcaggagatctggaccctagaagctgctaactcagaggcagcagcaagagagattgagacattgtatagcaagccagtggtattttacctgttaaacaagatcaaagagttcagtgaatgggcacagtgtattgttcttgagttggcatcaaagttccttccatctgataataacgaaatatttgacataatgaatctgctggaggatagacttcagcatgcaaatggagctgttgttttggcaacgattaaagtttttctccatttgacaatgtctatgactgatgtccatcaacaggtttatgaacgtattaaagcacccttgcttactctggtgggtgctggcagtcctgaacagtcatactctgtgctatgccatctacatcttctggtgatgcgtgctccaatgttattttcctcggactataaaagcttctactgccaatttagtgatccttcatatgtgaagaagttgaaacttgagatgttgactgctatagcaaatgaaagcaacacatatgagattgtcactgaactatgtgaatatgctggaaatgttgatgtaccaattgcaagagagtctatccgggcagttggaaaaatagcactgcagcagtatgatgttaatgccattgtggacaggcttctacaatttcttgaaatggataaggattatgtgactgctgaaactctagtcttggtgaaagatcttctcagaaaatatcctcaatggagtcatgattgtatagcagttgtgggaaatatcagcagcaaaaacattcaggagccaaaaggaaaagcagctctcatatggatgttgggagaatattcacaggacatgcatgatgctccatacatccttgaaagtcttgttgaaaactgggatgaagagcactctcctgaggttcgcttgcatctcctgacagcagtgatgaaatgtttctttaaaagacccccagagacacagaaggcactaggggatacattagcagctggtctatctgacacccatcaggatgttcatgacagagcacttttttactacaggcttttgcaatacagtcctaatgtagcagaacgtgtagtaaaccctcccaagcaagctgtctctgtatttgcagacacacagagcagtgaaatcaaagatcggatattcgatgagttcaacagtctatcagttgtatatcagaagccatcgtacatgtttacagataaggagcatcgcggaccatttgagtactcagaggatcttacaggcttgactgaggatccagaaaatgtaatttctgcccaaagatatcaagaaaatgataatgatcttttgctaagtacttcagataaagaggacaatggtacaagagccagcaatggttcttccacctctacatacaatgctccttccgatttgattagtccttcattgataagctcgcaagcaccagctgaaacttcactagtaaatactggtgggacatattcctcacaatcaaacttcagtctcgatgaccttcttggccttagcgttactgaagctcctgctttaccacaaccaacactggcccttaactcaaagcctgtgctagatcctggtacgttccagaggaaatggggccagctagcattggcactgtctcaggaatgttctttgagtccacaaggggcagtagctttgatgaatccccaatcactcatccgtcatatgcaaagcaatcacatccaatgtattgcttcaggcggtcagcctccgaactacaagttctttttctatgctcaaaaagatggggctgctgctttcttccttgttgaatgtattgtcaacacagcatcagcgaaggcacagctcaaaatcaaggctgatgatggaactgctgctgaggcattctcgagtttgtttcagtcagccttgtccaaatttgggctttcttgatcctgagtaatttgtctgagcgattcaccggtccacagttttttatgggtttcacagtttgccccaactccactgtcttggcttgtccagtacttgtgatcatattattggagaatcagagtagaaggtgcaaaagggtactggagttttgcggagctaaaaatcctatttgtactatttgggtgaactgtgcatttgtacatgactacatgtcacccagataaatagctgggttatttaggactgtactgtttgatgttctgggttatttaggattgtgatagtttgatgccttgatctcttctgaagggtttcgtttccttgaaggatgtagaaacaacacgcaacaacccctttcatgtatgctatttaccatttcttgcacagatgatcaataagatgtttcgtcttccattttgattcgtattatttagtactattttgacatttcattgagac

SEQ ID NO: 73943 - DNA, 2550 bp, Zea Mays
ttcctgatcagcatcaagtttacaaatccatcgttattcatttctggaacatcaaaactcagtagctgaaatgatcttatgtagttgtgtttgtcgtgtggcttcggttaaaaggcatttcagctatgaaccagcgaggtagttgccaattgcctacatgcattgcaggagatctggaccctagaagctgctaactcagaggcagcagcaagagagattgagacattgtatagcaagccagtggtattttacctgttaaacaagatcaaagagttcagtgaatgggcacagtgtattgttcttgagttggcatcaaagttccttccatctgataataacgaaatatttgacataatgaatctgctggaggatagacttcagcatgcaaatggagctgttgttttggcaacgattaaagtttttctccatttgacaatgtctatgactgatgtccatcaacaggtttatgaacgtattaaagcacccttgcttactctggtgggtgctggcagtcctgaacagtcatactctgtgctatgccatctacatcttctggtgatgcgtgctccaatgttattttcctcggactataaaagcttctactgccaatttagtgatccttcatatgtgaagaagttgaaacttgagatgttgactgctatagcaaatgaaagcaacacatatgagattgtcactgaactatgtgaatatgctggaaatgttgatgtaccaattgcaagagagtctatccgggcagttggaaaaatagcactgcagcagtatgatgttaatgccattgtggacaggcttctacaatttcttgaaatggataaggattatgtgactgctgaaactctagtcttggtgaaagatcttctcagaaaatatcctcaatggagtcatgattgtatagcagttgtgggaaatatcagcagcaaaaacattcaggagccaaaaggaaaagcagctctcatatggatgttgggagaatattcacaggacatgcatgatgctccatacatccttgaaagtcttgttgaaaactgggatgaagagcactctcctgaggttcgcttgcatctcctgacagcagtgatgaaatgtttctttaaaagacccccagagacacagaaggcactaggggatacattagcagctggtctatctgacacccatcaggatgttcatgacagagcacttttttactacaggcttttgcaatacagtcctaatgtagcagaacgtgtagtaaaccctcccaagcaagctgtctctgtatttgcagacacacagagcagtgaaatcaaagatcggatattcgatgagttcaacagtctatcagttgtatatcagaagccatcgtacatgtttacagataaggagcatcgcggaccatttgagtactcagaggatcttacaggcttgactgaggatccagaaaatgtaatttctgcccaaagatatcaagaaaatgataatgatcttttgctaagtacttcagataaagaggacaatggtacaagagccagcaatggttcttccacctctacatacaatgctccttccgatttgattagtccttcattgataagctcgcaagcaccagctgaaacttcactagtaaatactggtgggacatattcctcacaatcaaacttcagtctcgatgaccttcttggccttagcgttactgaagctcctgctttaccacaaccaacactggcccttaactcaaagcctgtgctagatcctggtacgttccagaggaaatggggccagctagcattggcactgtctcaggaatgttctttgagtccacaaggggcagtagctttgatgaatccccaatcactcatccgtcatatgcaaagcaatcacatccaatgtattgcttcaggcggtcagcctccgaactacaagttctttttctatgctcaaaaagatggggctgctgctttcttccttgttgaatgtattgtcaacacagcatcagcgaaggcacagctcaaaatcaaggctgatgatggaactgctgctgaggcattctcgagtttgtttcagtcagccttgtccaaatttgggctttcttgatcctgagtaatttgtctgagcgattcaccggtccacagttttttatgggtttcacagtttgccccaactccactgtcttggcttgtccagtacttgtgatcatattattggagaatcagagtagaaggtgcaaaagggtactggagttttgcggagctaaaaatcctatttgtactatttgggtgaactgtgcatttgtacatgactacatgtcacccagataaatagctgggttatttaggactgtactgtttgatgttctgggttatttaggattgtgatagtttgatgccttgatctcttctgaagggtttcgtttccttgaaggatgtagaaacaacacgcaacaacccctttcatgtatgctatttaccatttcttgcacagatgatcaataagatgtttcgtcttccattttgattcgtattatttagtactattttgacatttcattgagac

SEQ ID NO: 73944 - DNA, 2346 bp, Zea Mays
ctcagtagctgaaatgatcttatgtagttgtgtttgtcgtgtggcttcggttaaaaggcatttcagctatgaaccagcgaggtagttgccaattgcctacatgcattgcaggagatctggaccctagaagctgctaactcagaggcagcagcaagagagattgagacattgtatagcaagccagtggtattttacctgttaaacaagatcaaagagttcagtgaatgggcacagtgtattgttcttgagttggcatcaaagttccttccatctgataataacgaaatatttgacataatgaatctgctggaggatagacttcagcatgcaaatggagctgttgttttggcaacgattaaagtttttctccatttgacaatgtctatgactgatgtccatcaacaggtttatgaacgtattaaagcacccttgcttactctggtgggtgctggcagtcctgaacagtcatactctgtgctatgccatctacatcttctggtgatgcgtgctccaatgttattttcctcggactataaaagcttctactgccaatttagtgatccttcatatgtgaagaagttgaaacttgagatgttgactgctatagcaaatgaaagcaacacatatgagattggcttctacaatttcttgaaatggataaggattatgtgactgctgaaactctagtcttggtgaaagatcttctcagaaaatatcctcaatggagtcatgattgtatagcagttgtgggaaatatcagcagcaaaaacattcaggagccaaaaggaaaagcagctctcatatggatgttgggagaatattcacaggacatgcatgatgctccatacatccttgaaagtcttgttgaaaactgggatgaagagcactctcctgaggttcgcttgcatctcctgacagcagtgatgaaatgtttctttaaaagacccccagagacacagaaggcactaggggatacattagcagctggtctatctgacacccatcaggcttttgcaatacagtcctaatgtagcagaacgtgtagtaaaccctcccaagcaagctgtctctgtatttgcagacacacagagcagtgaaatcaaagatcggatattcgatgagttcaacagtctatcagttgtatatcagaagccatcgtacatgtttacagataaggagcatcgcggaccatttgagtactcagaggatcttacaggcttgactgaggatccagaaaatgtaatttctgcccaaagatatcaagaaaatgataatgatcttttgctaagtacttcagataaagaggacaatggtacaagagccagcaatggttcttccacctctacatacaatgctccttccgatttgattagtccttcattgataagctcgcaagcaccagctgaaacttcactagtaaatactggtgggacatattcctcacaatcaaacttcagtctcgatgaccttcttggccttagcgttactgaagctcctgctttaccacaaccaacactggcccttaactcaaagcctgtgctagatcctggtacgttccagaggaaatggggccagctagcattggcactgtctcaggaatgttctttgagtccacaaggggcagtagctttgatgaatccccaatcactcatccgtcatatgcaaagcaatcacatccaatgtattgcttcaggcggtcagcctccgaactacaagttctttttctatgctcaaaaagatggggctgctgctttcttccttgttgaatgtattgtcaacacagcatcagcgaaggcacagctcaaaatcaaggctgatgatggaactgctgctgaggcattctcgagtttgtttcagtcagccttgtccaaatttgggctttcttgatcctgagtaatttgtctgagcgattcaccggtccacagttttttatgggtttcacagtttgccccaactccactgtcttggcttgtccagtacttgtgatcatattattggagaatcagagtagaaggtgcaaaagggtactggagttttgcggagctaaaaatcctatttgtactatttgggtgaactgtgcatttgtacatgactacatgtcacccagataaatagctgggttatttaggactgtactgtttgatgttctgggttatttaggattgtgatagtttgatgccttgatctcttctgaagggtttcgtttccttgaaggatgtagaaacaacacgcaacaacccctttcatgtatgctatttaccatttcttgcacagatgatcaataagatgtttcgtcttccattttgattcgtattatttagtactattttgacatttcattgagac

SEQ ID NO: 73945 - DNA, 2121 bp, Zea Mays
ggaaccccaaccgagaaaggtcacgaaagctgcccccgtgcaacatgagggtccgccccctataggtttatgaacgtattaaagcacccttgcttactctggtgggtgctggcagtcctgaacagtcatactctgtgctatgccatctacatcttctggtgatgcgtgctccaatgttattttcctcggactataaaagcttctactgccaatttagtgatccttcatatgtgaagaagttgaaacttgagatgttgactgctatagcaaatgaaagcaacacatatgagattgtcactgaactatgtgaatatgctggaaatgttgatgtaccaattgcaagagagtctatccgggcagttggaaaaatagcactgcagcagtatgatgttaatgccattgtggacaggcttctacaatttcttgaaatggataaggattatgtgactgctgaaactctagtcttggtgaaagatcttctcagaaaatatcctcaatggagtcatgattgtatagcagttgtgggaaatatcagcagcaaaaacattcaggagccaaaaggaaaagcagctctcatatggatgttgggagaatattcacaggacatgcatgatgctccatacatccttgaaagtcttgttgaaaactgggatgaagagcactctcctgaggttcgcttgcatctcctgacagcagtgatgaaatgtttctttaaaagacccccagagacacagaaggcactaggggatacattagcagctggtctatctgacacccatcaggcttttgcaatacagtcctaatgtagcagaacgtgtagtaaaccctcccaagcaagctgtctctgtatttgcagacacacagagcagtgaaatcaaagatcggatattcgatgagttcaacagtctatcagttgtatatcagaagccatcgtacatgtttacagataaggagcatcgcggaccatttgagtactcagaggatcttacaggcttgactgaggatccagaaaatgtaatttctgcccaaagatatcaagaaaatgataatgatcttttgctaagtacttcagataaagaggacaatggtacaagagccagcaatggttcttccacctctacatacaatgctccttccgatttgattagtccttcattgataagctcgcaagcaccagctgaaacttcactagtaaatactggtgggacatattcctcacaatcaaacttcagtctcgatgaccttcttggccttagcgttactgaagctcctgctttaccacaaccaacactggcccttaactcaaagcctgtgctagatcctggtacgttccagaggaaatggggccagctagcattggcactgtctcaggaatgttctttgagtccacaaggggcagtagctttgatgaatccccaatcactcatccgtcatatgcaaagcaatcacatccaatgtattgcttcaggcggtcagcctccgaactacaagttctttttctatgctcaaaaagatggggctgctgctttcttccttgttgaatgtattgtcaacacagcatcagcgaaggcacagctcaaaatcaaggctgatgatggaactgctgctgaggcattctcgagtttgtttcagtcagccttgtccaaatttgggctttcttgatcctgagtaatttgtctgagcgattcaccggtccacagttttttatgggtttcacagtttgccccaactccactgtcttggcttgtccagtacttgtgatcatattattggagaatcagagtagaaggtgcaaaagggtactggagttttgcggagctaaaaatcctatttgtactatttgggtgaactgtgcatttgtacatgactacatgtcacccagataaatagctgggttatttaggactgtactgtttgatgttctgggttatttaggattgtgatagtttgatgccttgatctcttctgaagggtttcgtttccttgaaggatgtagaaacaacacgcaacaacccctttcatgtatgctatttaccatttcttgcacagatgatcaataagatgtttcgtcttccattttgattcgtattatttagtactattttgacatttcattgagac

SEQ ID NO: 73946 - DNA, 2145 bp, Zea Mays
cgcttttgcaccccaataaaaaaacaaaacatgaataaatcaaaagggagctgctgattgcgactgggagcttgagacccaccgctgaaaagctcaatcctctccgccctttccacactaaactcccagcagactcccccactccccatgtcttctggagtaagaagtggcggcggaggagatcaccatggcgtccaccaccagcatggccacggccacctcgccggagccgacgacggcgccgagtacgcgttctacagcaacgacatggagagcttcttcttcaatcagccggcgtcggcggacgtcaataatggaggcagcagaactggcgccgacgagctcaccatgccgccgtactccagcgtcacggactacctacaggggttcatggacatggacccctctgggctagctcggcacctcgacgcgccgtgcctgctggcggaggacgccccgctcaagcatgagctgtccgtcgatgtgagctacgacagccagggcaccagcggcgcgcccggagatggggcggcggcgatgcacacgccgaactcgtcggtgtctctctcgtcgagcgaccgggagggggagggccagcttcgtcggtgcaggaagggcaggccgaaggcggaggatgatgcggagggggatgagaaagatcaagaagacggggagaattccaccaaagcgaacagatccaagaagaaggccgagaagaggcagccccgcgttgccttcctcaccaagagcgaggtggatcaccttgaggacggctaccggtggcgcaagtacggccagaaggcggtcaagaacagtccttacccaaggtctccacagtttcacttgttcgttccccacatccatggccattataattgcatgctatgcatcacacaacacacatctagctatcttatcgtatacatgctaattaattaagagcacacaagtaaccaatgcacccaaatacccaatgcatagtacaacttgtatgtaaattctatcccaccaagagcacataaatggccaaacgcatgcaggagctactaccggtgcacggcgcccaagtgcggcgtgaagaagcgcgtggagcggtcgtaccaggacccgtcgacggtggtcaccacgtacgagggacagcacacgcaccacagccccgccagcttccgcgccggcggcgcgcacctcttcatgcccaacgcgcacgcgctgccgccgcagcacctgatgctgccgtccagcttccgcccggcggacctgatgggcatggtgcaccccgtcagcatgggcgcaaaccttagcatgttcctgccaactatgcctcctcatatgccatcgccggcgtctcgtgctcatcctcttcagcagcagcagcaccagttcactgactacgcgctcttgcaagaccttttcccttccacaatgcccaacaacccataactaactgctacacaattagctagcctagctagaatcgacatgagagatgctgtccaagtactctgcgccatatgtgatcacctgatggccttgcgctttgggcttggtctaatggggagggaactgcagttattattgattgattaatctgctagctttcatcttaaacattggtttacagttcttacccttccatttgtcaactctccgctgcgcggattgcatgggaggtactagagatggaaccgagtactttttatagctatcactataacggcaactaatttatgtacggcgcctctagacttcttgtacgtgtacatatcatgtgttcctcattgaatcatttgggagaaaaaaactggaagaggagtatttcatttcattctctacttgccgtttggaattcaaaaataagttttctcttacgccccgtttggatcattaaaattaaattccattctaaaaatagtaatttagacatatatcaattaagttaattcgattctatacaaaatatatttgtatactattattataagtcggagatatttatgtgctacatttttactatagaggagtgagtcgaagagcgtcatctaagttacagagtagaaacaaattctactaatatatatatactaggtgagtgcccgtgcgttgccacggaagttaaaaattagtataaagcataggtacaatacg

SEQ ID NO: 73947 - DNA, 2124 bp, Zea Mays
ttcactacatgccaaatctggaggcaagagaaccgggagagggcgtgttgggttgctcgtcgtgatcccggacggcaatacctgcccttgcctacttgccactgcttgcgtacactgatgtccttattcaatcccctctagaaagtagaaacattgcttaattggcttggctattgctgttagctccacacaaaagagagaaccggcggcgagctaggagctagccatggacggacacggcgcggtctcgccgtggagcgtgctaggcggggcggcggctgtgctgttcctgtggttggcgtcgcaggtgctggagtgggcctggtgggcgccccggcgcgtgaaccgtgcgctgagggcgcagggcctgaggggcacccggtaccgcctcctctgcggcgacctcatcgaggagcagcgtctccgcgcggcggccctggcaaggcccgtccccgtggatcggccacacgacttcctccctcgcgtcgcgcctttccttcaccgcgtcctccaagagcacggcaagctctcgtttacatggtttgggccgaccccaagagttctaatcaccgatcccgagcttgcccgggaagtgctgtcgaataagtgtggcgacttcgtgaagtcgctgctctctcccctgtcaacgctgctggttgctgggctcgtcgtccttgacggtgaaaagtgggtcaaacatcgaaggattctgaatccggcattccacgcggagaagctgaagggaatgctgccggcgttcttagcatgttgcaacgaactggttgacagatgggagaaacagatctctgcttccgctgaaccaactgagctggatgtctggccagagttccaaaacttatcgggagatgtgatttcaagagctgcgttcggtgttagctatgaagaaggcagaagaattttcctacttcaggcggagcaagctgaacgccttgttcaatctttcaagacaaattacatccctggcttctcggaggtgaagacgatcctgaggggcataatagagaagagacagaaggcagccaagaacggtgaagcaaccaaggacgacgacctgctgggcttgctactggagtcgaacatgaattacagcgactcggacggcaaatccagcaaggggattacggtggaggaggtgatcggcgagtgcaaggtgttctacttcgcagggatggagaccaccgccgtgctgctcacttggacagtggccgtgctaagcatgcacccggagtggcaggaccgtgccagggaggaggtcctgcaggtctttggtgaaaacaagccggacttcaatggtgtggcacgcctaaaagtggtcaccatggtgctctacgaggtgctgcgcctgtaccctccggtggcggccatcaaccgccggacacgccagccgacaaagctcggaggcgtcacgtacccggcgggggtcatgcttacgacgcccgtcatgttcatccaccgggaccctgccctgtgggggtccgacgccgacgagttcaacccggggaggttcgccgacggcgtgtccaaggcgtgcagggaccccggcgccttcgcccccttcagctggggcccgcgcgtctgcatcggccagaacttcgctctcctggaggccaagctggccgtcagcatgatcctgcagcgcttcgcgttcgaggtgtcgccggcgtacgtccacgcgccctacaccgtgctgacgctgcacccgcagcacggcgctccggtcaggctgcgcaggctatgaatacacgatcggtgcttccgttaagcaatctctctccaatacccgaagactctgtttattcatttcaaagttacgactacaaaacataatgcaaaatctcaaacctatatataccagagcatgtaaaagctagcaaaagctatattgtgataacgaaccaacaatatattactcctatatataacaacaagtcaaatcttgctttcaaacacaataactttaagaattatattatatataaagaaagtcaaggatcaaacgactgaacttgagcatataaatatagagcaaatgtttgttgatctgttcatcgcaagtcttttacccaacgtgttcagacaacatgtagccaacatatgtttaat

SEQ ID NO: 73948 - DNA, 2143 bp, Zea Mays
caaatctggaggcaagagaaccgggagagggcgtgttgggttgctcgtcgtgatcccggacggcaatacctgcccttgcctacttgccactgcttgcgtacactgatgtccttattcaatcccctctagaaagtagaaacattgcttaattggcttggctattgctgttagctccacacaaaagagagaaccggcggcgagctaggagctagccatggacggacacggcgcggtctcgccgtggagcgtgctaggcggggcggcggctgtgctgttcctgtggttggcgtcgcaggtgctggagtgggcctggtgggcgccccggcgcgtgaaccgtgcgctgagggcgcagggcctgaggggcacccggtaccgcctcctctgcggcgacctcatcgaggagcagcgtctccgcgcggcggccctggcaaggcccgtccccgtggatcggccacacgacttcctccctcgcgtcgcgcctttccttcaccgcgtcctccaagagcacggcaagctctcgtttacatggtttgggccgaccccaagagttctaatcaccgatcccgagcttgcccgggaagtgctgtcgaataagtgtggcgacttcgtgaagtcgctgctctctcccctgtcaacgctgctggttgctgggctcgtcgtccttgacggtgaaaagtgggtcaaacatcgaaggattctgaatccggcattccacgcggagaagctgaagggaatgctgccggcgttcttagcatgttgcaacgaactggttgacagatgggagaaacagatctctgcttccgctgaaccaactgagctggatgtctggccagagttccaaaacttatcgggagatgtgatttcaagagctgcgttcggtgttagctatgaagaaggcagaagaattttcctacttcaggcggagcaagctgaacgccttgttcaatctttcaagacaaattacatccctggcttctcaaaacaacagaaggatgaatgaaatcgacagggaggtgaagacgatcctgaggggcataatagagaagagacagaaggcagccaagaacggtgaagcaaccaaggacgacgacctgctgggcttgctactggagtcgaacatgaattacagcgactcggacggcaaatccagcaaggggattacggtggaggaggtgatcggcgagtgcaaggtgttctacttcgcagggatggagaccaccgccgtgctgctcacttggacagtggccgtgctaagcatgcacccggagtggcaggaccgtgccagggaggaggtcctgcaggtctttggtgaaaacaagccggacttcaatggtgtggcacgcctaaaagtggtcaccatggtgctctacgaggtgctgcgcctgtaccctccggtggcggccatcaaccgccggacacgccagccgacaaagctcggaggcgtcacgtacccggcgggggtcatgcttacgacgcccgtcatgttcatccaccgggaccctgccctgtgggggtccgacgccgacgagttcaacccggggaggttcgccgacggcgtgtccaaggcgtgcagggaccccggcgccttcgcccccttcagctggggcccgcgcgtctgcatcggccagaacttcgctctcctggaggccaagctggccgtcagcatgatcctgcagcgcttcgcgttcgaggtgtcgccggcgtacgtccacgcgccctacaccgtgctgacgctgcacccgcagcacggcgctccggtcaggctgcgcaggctatgaatacacgatcggtgcttccgttaagcaatctctctccaatacccgaagactctgtttattcatttcaaagttacgactacaaaacataatgcaaaatctcaaacctatatataccagagcatgtaaaagctagcaaaagctatattgtgataacgaaccaacaatatattactcctatatataacaacaagtcaaatcttgctttcaaacacaataactttaagaattatattatatataaagaaagtcaaggatcaaacgactgaacttgagcatataaatatagagcaaatgtttgttgatctgttcatcgcaagtcttttacccaacgtgttcagacaacatgtagccaacatatgtttaat

SEQ ID NO: 73949 - DNA, 436 bp, Zea Mays
ggtagaataccttggactcggtgtcattggttgaatggaagctatggaacaacaaaatcacaatggaacacatgcatactgagccacatccattgaaaaatgaacgggggagaaatggcaagaaggatgatgacctgaaaaatgaagcattaccttttggtgatttctcttgtgggactatctctgcaagttcagactttataggagaggcagctccaaggctttgcaaagagcacaccgccgatgctgaaagtatatggaaccgttcagttgcgagtgtcataggttaaagagcacaatctatccaaaaaacaccgaaaaagaactctaaaaaaggaaacaaaacacacaagaaccgaagccatggtccgaagcacaaaaaaaggaatgtcaaatggcacgaagaaattgaggagtatcttgtggagatatcgtg

SEQ ID NO: 73950 - DNA, 285 bp, Zea Mays
tggaacaaagaacaatcaaggataggcaagctgaagccaaaaaaagtagtggcattgaaaaagatagaacaaacaggccaagcatgttgccatcactaagtaatcaggtgtgcaatttgcttcttaacatttttaagctaataaaaaaaattcaaaatctgagtgcaaatggcttgatgtacatgcttagccaaaaataattccaaagagaatcataagttttttttaaaaaacagtacatatcctacctgtctgcgcccaaaatagaaaacagtaatggatcaa

SEQ ID NO: 73951 - DNA, 1966 bp, Zea Mays
actcaccttaattaacaaatgggcacaagagactagtgcagccaaagtgaaagtggcacctctatttaacctggcgccgtagccgtaccgtacccatctcaagtcaactccactcgcaccagcagacaattgccgtcaaagcaatggtagtcctcgaagtgtcgtttgccgctgcagcctcatcagtagtgcgatggatcctcatgctcgggggcctgatggcggcggcggcgctcctgtggcaggccgggcgtctgctgcgcctgctgtggtggcagccccggcggctggagcgggcgctgcgcgcgcagggcgtccgcggcacgtcgtaccgcttccccgccggcgacctcaaggagtacggccggctggcgaaggaggcctggtcgaagcccctgccgctgcggtgccacgacaccgcgccgcgagtcgcgccgttcctgcaccggctggtcctggagcacgggaggacgagcatgtcctggttcggccccagccccaaggtgaccatcgtcgacccggagctggccaaggacgtgctgtccaacaagttcggccacttcgagaagctcaaggtcccggcgctgtccaagatgctgggctccggcgtggccagccacgagggcgagaagtgggtcaagcacaggaggatcctcaaccctgcgttccatctcgagaagctcaggctcatgctgcctacgttctctgcatgctgcgaagagcttgtcggcagatgggcggcgcggtgcctgggtcccgacggcggctcgtgcgagctggacgtctggccggagctccaggccctcacgggggatgtcatctcccgcaccgcgttcggcagcagctacctcgaaggaagaaggatcttcgagctccagtccgagcaagccgagcgcttcgtgggtgccattcagaagatcgtgatcccaggctacatgtacttgccgacaaaaaacaacagaaggatgcggcagatcaacaaggaggtgaactcgattctgcgaggggtggtcgggaagaggatgcgggctatggctatgagagaaggcggcgaaagcaccaccggcgccgacgatctcctgggcctgctgctggagtccaacaacacgaggcacgaaggcgagaccggccacggccagcagtccgcccttgggatgacgatcgaagatgtcatcgaggagtgcaagctgttctacttcgcagggatggagacaacgtcggtgctgctgacatgggccatggtcctgctgagcatgcaccgcgagtggcaggaccgtgcgagggaggaagtgactggcctgttcgggagagacgacaacaagccagagtacgagggactgagccgcctcaaaacagtgagtttgttgttcttctcgatcgctagatgtaccaggcaggcaggcaccaactgttttgtgctctatatatatccatgtgtttccaggtgaatatgatcctctacgagactctccggctatacccgccggccgtggtgttcagccggaaggcctacaaggagatgaaggtcggaggcgtgacgttgccggccggcgcgatcattgagatccccgtcctgttcatccaccacgaccccgacacctggggagacgacgcgcacgagttcaagccggagaggttcgccgagggggtctccagggcgtgcaacggcgcctcgggcgcgttcatcccgttcggctggggccctcgcacgtgcatcggccagagcttcgcgcttctcgaggccaagatggcgctgtgcgtcatccttcagcggtttgagatggagctcgcgccgtcgtatacccacgcgccgcataccgtcatgacgctgcatccgatgcacggtgcgcagatcaagctcacggcgatctgatcatacatacgatcgatgcgactgccgtatacttgtttatattattactaagctataccagttgttggccgggtcttggaaataaatacgtac

SEQ ID NO: 73952 - DNA, 1665 bp, Zea Mays
gcgagccatcgagctgtcccctccctgtgctctactgctcttgcgccttgctagcttgcttgcttccctgctccctccctcctcctcctcgtcgcctcttctctggttcttcctggtgtttgccggagcgaggctaggcgcaaggggagggagctgcgctcagccagagctcatcggcgctacgcaagcgcgctgcctggtgtgctgcattgccgaactatcaggggaaaacactgaaataatggaaatcagcttattgcataatgaatctgatgcaggaagcaccagtttgctaccgctgccattgttgtcatatggtccaagatcaatggttccaatacaagtaccaccatcatcagactttgagagtatcctgtcaccagagccaatctacagtgatcttcagttgaaagagatgaactacaatgcagcagcaatggatgaaagcactgagttccttcacttgattcttagtggcaatgatgaaggatacaatagcacaactgaattacaagtttgggatgttgtggacttctatgtctcagaaaacttttctgctctccaatttgatagtttgatgggttttacaaatgaagttagtacttcctacaatgattgtatgaatttagttgatatggtagagcggcccgtggctcgtctgtctctagatgatacaccaaaacccagtaacagtgatgatgcggttccggcagacaatgtcacaatggaccctgatgaaacatccttataccttcagacaaaaccaacagattcagaaacagaaagtagttctgccgcaggagatgttgaaactgaatatctagatctaaagctactttctagatgtatgcctgatttaatggatgttgactcgcccaattgcttatcgaaaacaccagtgaaaaaaaagcatgtgactcttgtgcttgatttggacgagactctggtacattcaacattggatcactgcgacaatgctgattttaccctagaagttttctttaatatgaaaaatcacacagtgtatgtgagaaaaaggccttacctgaaaatgtttcttgagaaggttgctcagatgtttgaggttgtcattttcacagctagtcagagagtctatgctgagcaacttatagataaacttgaccctgatggaaaatatatctcacggcgtatttatcgtgaatcttgtgtattctctgacggttgctatacaaaggacctgacaattctggggatcgacttggcaaaagttgcaatagttgacaatactccacagatcaggaactgatcgagttgctcccgttcttggagagcctcgtggattcagaggacgtgaggccaataatttcaaagacctttcatgacaaacttgagcagaattagtttgaggcgacagatgtatcatccagtgaacctgtcgctgaagttagcttcgctccacatggtgcaggccatcattcttgggaagttagatataggatgaaaaatcacaatttctgttatgttagctgttacaaatagcaagcataaactgcggtcgttgtctcgtcgatgaaaatggcttgtatatgtatgtccctttgggcttccgtgtcacggatcattgtacagagacgaacattagtgctgaataaagtgatctgagtgcaattttgctcatgagga

SEQ ID NO: 73953 - DNA, 1997 bp, Zea Mays
gcgagccatcgagctgtcccctccctgtgctctactgctcttgcgccttgctagcttgcttgcttccctgctccctccctcctcctcctcgtcgcctcttctctggttcttcctggtgtttgccggagcgaggctaggcgcaaggggagggagctgcgctcagccagagctcatcggcgctacgcaagcgcgctgcctggtgtgctgcattgccgaactatcaggggaaaacactgaaataatggaaatcagcttattgcataatgaatctgatgcaggaagcaccagtttgctaccgctgccattgttgtcatatggtccaagatcaatggttccaatacaagtaccaccatcatcagactttgagagtatcctgtcaccagagccaatctacagtgatcttcagttgaaagagatgaactacaatgcagcagcaatggatgaaagcactgagttccttcacttgattcttagtggcaatgatgaaggatacaatagcacaactgaattacaagtttgggatgttgtggacttctatgtctcagaaaacttttctgctctccaatttgatagtttgatgggttttacaaatgaagttagtacttcctacaatgattgtatgaatttagttgatatggtagagcggcccgtggctcgtctgtctctagatgatacaccaaaacccagtaacagtgatgatgcggttccggcagacaatgtcacaatggaccctgatgaaacatccttataccttcagacaaaaccaacagattcagaaacagaaagtagttctgccgcaggagatgttgaaactgaatatctagatctaaagctactttctagatgtatgcctgatttaatggatgttgactcgcccaattgcttatcgaaaacaccagtgaaaaaaaagcatgtgactcttgtgcttgatttggacgagactctggtacattcaacattggatcactgcgacaatgctgattttaccctagaagttttctttaatatgaaaaatcacacagtgtatgtgagaaaaaggccttacctgaaaatgtttcttgagaaggttgctcagatgtttgaggttgtcattttcacagctagtcagagagtctatgctgagcaacttatagataaacttgaccctgatggaaaatatatctcacggcgtatttatcgtgaatcttgtgtattctctgacggttgctatacaaaggacctgacaattctggggatcgacttggcaaaagttgcaatagttgacaatactccacaggtacaatccctttccaatatgtaaaaactattctgatggacgcatttcccttgtcacttttatcttgatctctggtaagtctagtactctagtctagcactatatactgtgatatcttggccttcaggcatgtagctatttccttctgaactagaaggtggcaagacctgaagtaccttttcatcgtagccttttttgccatcttaaattatttacatactatatatattcattattttttgttaattagttgaagcatttctttatctaggttttccagttgcaagtggataacggcataccgattaagagctggtttgatgacccctcagatcaggaactgatcgagttgctcccgttcttggagagcctcgtggattcagaggacgtgaggccaataatttcaaagacctttcatgacaaacttgagcagaattagtttgaggcgacagatgtatcatccagtgaacctgtcgctgaagttagcttcgctccacatggtgcaggccatcattcttgggaagttagatataggatgaaaaatcacaatttctgttatgttagctgttacaaatagcaagcataaactgcggtcgttgtctcgtcgatgaaaatggcttgtatatgtatgtccctttgggcttccgtgtcacggatcattgtacagagacgaacattagtgctgaataaagtgatctgagtgcaattttgctcatgagga

SEQ ID NO: 73954 - DNA, 1215 bp, Zea Mays
atcgagctgtcccctccctgtgctctactgctcttgcgccttgctagcttgcttgcttccctgctccctccctcctcctcctcgtcgcctcttctctggttcttcctggtgtttgccggagcgaggctaggcgcaaggggagggagctgcgctcagccagagctcatcggcgctacgcaagcgcgctgcctggtgtgctgcattgccgaactatcaggggaaaacactgaaataatggaaatcagcttattgcataatgaatctgatgcaggaagcaccagtttgctaccgctgccattgttgtcatatggtccaagatcaatggttccaatacaagtaccaccatcatcagactttgagagtatcctgtcaccagagccaatctacagtgatcttcagttgaaagagatgaactacaatgcagcagagactctggtacattcaacattggatcactgcgacaatgctgattttaccctagaagttttctttaatatgaaaaatcacacagtgtatgtgagaaaaaggccttacctgaaaatgtttcttgagaaggttgctcagatgtttgaggttgtcattttcacagctagtcagagagtctatgctgagcaacttatagataaacttgaccctgatggaaaatatatctcacggcgtatttatcgtgaatcttgtgtattctctgacggttgctatacaaaggacctgacaattctggggatcgacttggcaaaagttgcaatagttgacaatactccacaggttttccagttgcaagtggataacggcataccgattaagagctggtttgatgacccctcagatcaggaactgatcgagttgctcccgttcttggagagcctcgtggattcagaggacgtgaggccaataatttcaaagacctttcatgacaaacttgagcagaattagtttgaggcgacagatgtatcatccagtgaacctgtcgctgaagttagcttcgctccacatggtgcaggccatcattcttgggaagttagatataggatgaaaaatcacaatttctgttatgttagctgttacaaatagcaagcataaactgcggtcgttgtctcgtcgatgaaaatggcttgtatatgtatgtccctttgggcttccgtgtcacggatcattgtacagagacgaacattagtgctgaataaagtgatctgagtgcaattttgctcatgagga

SEQ ID NO: 73955 - DNA, 1694 bp, Zea Mays
atcgagctgtcccctccctgtgctctactgctcttgcgccttgctagcttgcttgcttccctgctccctccctcctcctcctcgtcgcctcttctctggttcttcctggtgtttgccggagcgaggctaggcgcaaggggagggagctgcgctcagccagagctcatcggcgctacgcaagcgcgctgcctggaagagagaaatgtccatttacagttgagaattgacccatttgtggcttgtaaaggtagaactggaagcatatttattgtgtcaaagtggaaaagggaatgttctagttaatgtgttcaaatgatgtgtgctgcattgccgaactatcaggggaaaacactgaaataatggaaatcagcttattgcataatgaatctgatgcaggaagcaccagtttgctaccgctgccattgttgtcatatggtccaagatcaatggttccaatacaagtaccaccatcatcagactttgagagtatcctgtcaccagagccaatctacagtgatcttcagttgaaagagatgaactacaatgcagcagcaatggatgaaagcactgagttccttcacttgattcttagtggcaatgatgaaggatacaatagcacaactgaattacaagtttgggatgttgtggacttctatgtctcagaaaacttttctgctctccaatttgatagtttgatgggttttacaaatgaagttagtacttcctacaatgattgtatgaatttagttgatatggtagagcggcccgtggctcgtctgtctctagatgatacaccaaaacccagtaacagtgatgatgcggttccggcagacaatgtcacaatggaccctgatgaaacatccttataccttcagacaaaaccaacagattcagaaacagaaagtagttctgccgcaggagatgttgaaactgaatatctagatctaaagctactttctagatgtatgcctgatttaatggatgttgactcgcccaattgcttatcgaaaacaccagtgaaaaaaaagcatgtgactcttgtgcttgatttggacgagactctggtacattcaacattggatcactgcgacaatgctgattttaccctagaagttttctttaatatgaaaaatcacacagtgtatgtgagaaaaaggccttacctgaaaatgtttcttgagaaggacctgacaattctggggatcgacttggcaaaagttgcaatagttgacaatactccacaggttttccagttgcaagtggataacggcataccgattaagagctggtttgatgacccctcagatcaggaactgatcgagttgctcccgttcttggagagcctcgtggattcagaggacgtgaggccaataatttcaaagacctttcatgacaaacttgagcagaattagtttgaggcgacagatgtatcatccagtgaacctgtcgctgaagttagcttcgctccacatggtgcaggccatcattcttgggaagttagatataggatgaaaaatcacaatttctgttatgttagctgttacaaatagcaagcataaactgcggtcgttgtctcgtcgatgaaaatggcttgtatatgtatgtccctttgggcttccgtgtcacggatcattgtacagagacgaacattagtgctgaataaagtgatctgagtgcaattttgctcatgagga

SEQ ID NO: 73956 - DNA, 5530 bp, Zea Mays
agaaaacacaaacaccttagaatcggcgattcagtcccccttgagtccccgactccccactcctgtctcgactctttacctaagcttctgctcggccccatccccgtgcgtctcctcccggctttcgtctcgctctgagctcgcctctaccatggcgactagggtttagtagcgccgcagcctccatcactgccatcctcaactccgtaccggatccggaagaggcgtcggttcgtcctcaacgtcgccaacctccgctccccgtcgtcctcaccccctctatctcgtcaaggcttgatatttaacgggctctgggcagagtttaacaagtttcagcaatggggtttgataatgaatgtatcttgaatattcaatcccttcctggtgaatatttctgccctgtttgccggacacttgtgtatcccaatgaggccctacaaactcaatgcacacatctctactgcaaatcctgcttggcatatgtagtggcaaccacacaagcttgtccttatgatggataccttgtaacagaagctgattcgaagcctcttatggaatcaaataaaactcttgctgagactattggcaaagttgcggtctattgcctgtataataagagtggctgccaatggcatggagagctatccgcctgtaccacacatggtactacttgtgcatatgggaactctcctgttgtttgcaatcgttgtgggacacaaattgtgcatcgtcaagtacaagaacatgctcaactctgccatggcttacaatctcaaacccaacaagctgatggtagtcaggtgcagctagcggcggcaacaactcagccagtcacccaagacccatcacttgcttcagctggatctgctgcacctgcagttacaaccctaccaaagccatctttaactacagccacagctgtaacaagttctgcaacagcaacaggaggggcagctggtgcaaccacagcagcagtgccttcttcagccgcatctatttctgcttcccaaactccaacagctgagcaatggtaccagcagcagcagcagctccaatactcacaatattatcagcagcagcatcctggatccaacccttacatgcagcaatatcaacagtataaccaataccagcaggcgtatcagcattacatgcaaccttcaatgcaagtaccatcccaaaatgtggtgcaaggatctgcacaacctgcttcttatgttcagcctcaagtgcaatcctcccaactgatgatgcaagctcaaagtcaaccccaggtccatccattgacaagtcaaccgcagcttcagcagcatccagttcaacctcatccccaaagtcaccctcatctttcccatgttcaactacctgcagatcagtcacagcttcatcaatcaattcagtcagcccaagttccacagttccaaccaagtcatgttcctctccaaccatctggtctccaagtacaacctgcagcacatccatctgctcttactcaagttggtaaccagcaagttgctactcaagcaacggctcatcaggtgcagccacatgtacgagttcaacctccgcagcagcaacatattgttgcacagcaacaacatccacatctgcaagctttacctccacatcaaaatattcaacctcagatgcagttaaactctcaagttcagctgcagcctccacatgcccagcagcaagcttacccacaaccacaggcctatcctcaacaaacacatcatatgcacccccagaatgcttcatatacacagcagcaaacacaaggtgctcttttgcaacctgtacctgtgtcccatcaacaagcacatgtttctcatcatcctgcaccaatgcgtcctccgttgccaagtcaacagccagctttgcagccttttcagggaattcaacgtacaacacaacatggaaaacatattggatttcatgctcagtggccaccaatgggttccaacatttcttcccaggcaccaccacagggattccctgcaaactcatctgtttcttcacaatcagttcaaccataccagcaaggaatgtcttcatcacaacaggtgcattcccaacctggtcagccttatacacagcatcatgttactggcaatactggacatgttcaaacttcagctggcagatctatgactcatcttgcaccaacacagcagtttcagcaccaacaatcagcagtgcttagaactgagtcacctgctgctgcgcaccctattgggcagggttctttagatcttgaaaaacatacttcaaaatcagggaagtcagaaaatgcaattaatgctgctgtcagtgaaaataaaattagcggtgctgactcagctgccatgagacctacaaagcctcaatcaggtgaggaaaacatgaacagtgaacaaaatggttttgttggtgttagaaaagatgcagtgcaaactggcattgtatcacacggtttagatggttcaattaggagggatgggaatactgaccaggcaggtaattcacatggtctagttgtgcagggaggcaaagaccataaggcttcagatgttactaatcgtgagaaagaacaatcatttcagcaggcatcactgcaaaatgcaggggcactgggctcttatgtgcccccaggtgtggtaccacaacatccatctggaccagataaaatgcttcctcagcatattatgaatcctggtcataagcatggttcctctgaaaatatccgtcctccgttgcaacaaccatatggtttgtttcattctggaaagatatcaaggccatttggagagaaccagattcagatgcctatgtcacagcctgggggtatcagacctggtgatggtatgatccgacctcctgtggttggcccattacctggacatcatggtgcagtgttgtctccttttgatcttgaacatttgggccagccacattctctcggaatgttgaacagcaatgactttggtggtgaggggttcaatacttcaaggggtgctgcatatcccggaagacatgataatatcgaagacgatcggaaacattttccagcaccagcccttctggatggtcaaggcttgcaaagggaccctagacattttgagagagctttagttagacctgatggtttccttgattcagtacctggaaggcctccttttccaaaccatagaagtgtaggtttgcatgagggttttccaagaaaacaaaacacaactgccagtcaccctgacgtcctgtcacatggagcagaatttgatcatcacagggctattggaatgcctaatttcagaaatccaggcccatttgctcaagggacaagtggtggtcctggtgcgccccctaaaaaccagcttggctctggtaaccttcctggaaacatacaacatgcttttgcaggcccagacatccctccagctccttttaaccttggtgacatgcatccaggtgaccctcatcttgttgctgactattctcagcatggatttcctaaaactgcagcacactttggtttgggtggattctcgagaaatgggaattctggttggtgccgaatatgcatgtttaactgtgggaccgcagagaatctggatctgcatgtacaaacaagggaacatcagcaatgtgcaatggacattatcctgaaaatgaagcaagatgttgcaaagaggaaaaaactgaattatggaggccccaagtcggtcaacaacaaaaaggtttctgggaagggccattttcgtgggaataggcgctagtgttacctgattcagcttgatgtgaatttgaaggttgctactggtgcttttggacgtttcataggcaattgagagttgagatctcttcagacatcatgttcacgcggttcagagtatttgaagtggaacttgtaatgttcccaaacttttgttgccatgttgatctgcagagttcacatggctatgtttactttacgtatttttgctgaagttctgggattgcttaacatgctagtacccttcttctgtatgcgatgatttatgactactgtttgtttcaactaggctcatgctttgtctaatgcgacctaataatagaccacactgaaacttttacaaagagacatgtaattgtgtcatcagacatccagaacatggtaattttttgttggaatcttttggtaaggggctgatgggaacatgtaaaaggtactttcagtgcctgaaaattatgctagtttttcatagtttaattcaaaaaaaaaaatctaagggtgtggtgtctaaatagagttcctttacaccactaagcccaatttgcttaatgatatattttaaaattattgaatgctgattccatgatatgttcccattcaaaacaagggaggacaaaagtgctgcattctggaataaacacatgggctagagttgttgacatatcattgcatgacaacaacaaagccatccaaatcaacaaaaataatctcattaaagtggtgcctattttgtgcctgagggatccattagtgttaaagggaggtttggaagcctggaaggaaacacaaaagtatgaagaggtttgaattgggacatgtactttgaatgttagcatgagatgggagggaattgatggtaaaccttgtttggaaccaaagtatgtaggttgtgctcaaatatagaagaaaaagaaagatatcttgattttcatatgaatactagtacgtgcatcatgtatgcagagctttttgatactgatactggagttttattattcacttctagttagttagttagttattcgaggtagtgatggttttattatcatgggtttgatgttcagaataggacatcattgaaccctacaagcactaaatgttgtgggtaaaatacctaagtttctaattcactgctgctgggcagatggcttgttcagttatgtttgatatgatttttcgcatgtgatatattttgctgatggtggtgtttctctagatgtctgttttaaatcatctgtatttgctgtttgtttgctaagcagaaactggaaagtgtaggataatttccagcagagggctcctgtcatacttgcttgtttccctaacgatgatggtggatgtgcctgggtgccgactactgtttgaacgaactgatcgtgccttgctcattttctaccggcatcggatgtttttgaccgactccagggcacctcatatctaccgttgctgaggtttaaattgtaaaattcccgtcctgtagttctttaattacaactaatgcaccaggcgaacgaaaattcttgtaatgtattcacaaatatttctagagaagtttgcagtgtaaatataacaatgttcgtttcaatggagtgcacctactaattaatgtaccttttaaagtctatttaatataggagtgttagtgtaagaaaccgattttccattcagtggtgtatgactaattaacctacctcccggtgtatgtaaattattgtaatatatttttaagggcactgatgaagttccttgtgtttaaacatttctatatgaaaaattcta

SEQ ID NO: 73957 - DNA, 5557 bp, Zea Mays
agaaaacacaaacaccttagaatcggcgattcagtcccccttgagtccccgactccccactcctgtctcgactctttacctaagcttctgctcggccccatccccgtgcgtctcctcccggctttcgtctcgctctgagctcgcctctaccatggcgactagggtttagtagcgccgcagcctccatcactgccatcctcaactccgtaccggatccggaagaggcgtcggttcgtcctcaacgtcgccaacctccgctccccgtcgtcctcaccccctctatctcgtcaaggcttgatatttaacgggctctgggcagagtttaacaagtttcagcaatggggtttgataatgaatgtatcttgaatattcaatcccttcctggtgaatatttctgccctgtttgccggacacttgtgtatcccaatgaggccctacaaactcaatgcacacatctctactgcaaatcctgcttggcatatgtagtggcaaccacacaagcttgtccttatgatggataccttgtaacagaagctgattcgaagcctcttatggaatcaaataaaactcttgctgagactattggcaaagttgcggtctattgcctgtataataagagtggctgccaatggcatggagagctatccgcctgtaccacacatggtactacttgtgcatatgggaactctcctgttgtttgcaatcgttgtgggacacaaattgtgcatcgtcaagtacaagaacatgctcaactctgccatggcttacaatctcaaacccaacaagctgatggtagtcaggtgcagctagcggcggcaacaactcagccagtcacccaagacccatcacttgcttcagctggatctgctgcacctgcagttacaaccctaccaaagccatctttaactacagccacagctgtaacaagttctgcaacagcaacaggaggggcagctggtgcaaccacagcagcagtgccttcttcagccgcatctatttctgcttcccaaactccaacagctgagcaatggtaccagcagcagcagcagctccaatactcacaatattatcagcagcagcatcctggatccaacccttacatgcagcaatatcaacagtataaccaataccagcaggcgtatcagcattacatgcaaccttcaatgcaagtaccatcccaaaatgtggtgcaaggatctgcacaacctgcttcttatgttcagcctcaagtgcaatcctcccaactgatgatgcaagctcaaagtcaaccccaggtccatccattgacaagtcaaccgcagcttcagcagcatccagttcaacctcatccccaaagtcaccctcatctttcccatgttcaactacctgcagatcagtcacagcttcatcaatcaattcagtcagcccaagttccacagttccaaccaagtcatgttcctctccaaccatctggtctccaagtacaacctgcagcacatccatctgctcttactcaagttggtaaccagcaagttgctactcaagcaacggctcatcaggtgcagccacatgtacgagttcaacctccgcagcagcaacatattgttgcacagcaacaacatccacatctgcaagctttacctccacatcaaaatattcaacctcagatgcagttaaactctcaagttcagctgcagcctccacatgcccagcagcaagcttacccacaaccacaggcctatcctcaacaaacacatcatatgcacccccagaatgcttcatatacacagcagcaaacacaaggtgctcttttgcaacctgtacctgtgtcccatcaacaagcacatgtttctcatcatcctgcaccaatgcgtcctccgttgccaagtcaacagccagctttgcagccttttcagggaattcaacgtacaacacaacatggaaaacatattggatttcatgctcagtggccaccaatgggttccaacatttcttcccaggcaccaccacagggattccctgcaaactcatctgtttcttcacaatcagttcaaccataccagcaaggaatgtcttcatcacaacaggtgcattcccaacctggtcagccttatacacagcatcatgttactggcaatactggacatgttcaaacttcagctggcagatctatgactcatcttgcaccaacacagcagtttcagcaccaacaatcagcagtgcttagaactgagtcacctgctgctgcgcaccctattgggcagggttctttagatcttgaaaaacatacttcaaaatcagggaagtcagaaaatgcaattaatgctgctgtcagtgaaaataaaattagcggtgctgactcagctgccatgagacctacaaagcctcaatcaggtgaggaaaacatgaacagtgaacaaaatggttttgttggtgttagaaaagatgcagtgcaaactggcattgtatcacacggtttagatggttcaattaggagggatgggaatactgaccaggcaggtaattcacatggtctagttgtgcagggaggcaaagaccataaggcttcagatgttactaatcgtgagaaagaacaatcatttcagcaggcatcactgcaaaatgcaggggcactgggctcttatgtgcccccaggtgtggtaccacaacatccatctggaccagataaaatgcttcctcagcatattatgaatcctggtcataagcatggttcctctgaaaatatccgtcctccgttgcaacaaccatatggtttgtttcattctggaaagatatcaaggccatttggagagaaccagattcagatgcctatgtcacagcctgggggtatcagacctggtgatggtatgatccgacctcctgtggttggcccattacctggacatcatggtgcagtgttgtctccttttgatcttgaacatttgggccagccacattctctcggaatgttgaacagcaatgactttggtggtgaggggttcaatacttcaaggggtgctgcatatcccggaagacatgataatatcgaagacgatcggaaacattttccagcaccagcccttctggatggtcaaggcttgcaaagggaccctagacattttgagagagctttagttagacctgatggtttccttgattcagtacctggaaggcctccttttccaaaccatagaagtgtaggtttgcatgagggttttccaagaaaacaaaacacaactgccagtcaccctgacgtcctgtcacatggagcagaatttgatcatcacagggctattggaatgcctaatttcagaaatccaggcccatttgctcaagggacaagtggtggtcctggtgcgccccctaaaaaccagcttggctctggtaaccttcctggaaacatacaacatgcttttgcaggcccagacatccctccagctccttttaaccttggtgacatgcatccaggtgaccctcatcttgttgctgactattctcagcatggatttcctaaaactgcagcacactttggtttgggtggattctcgagaaatgggaattctggttggtgccgaatatgcatgtttaactgtgggaccgcagagaatctggatctgcatgtacaaacaagggaacatcagcaatgtgcaatggacattatcctgaaaatgaagcaagatgttgcaaagaggaaaaaactgaattatggaggccccaagtcggtcaacaacaaaaaggtttctgggaagggccattttcgtgggaataggcgctagtgttacctgattcagcttgatgtgaatttgaaggttgctactggtgcttttggacgtttcataggcaattgagagttgagatctcttcagacatcatgttcacgcggttcagagtatttgaagtggaacttgtaatgttcccaaacttttgttgccatgttgatctgcagagttcacatggctatgtttactttacgtatttttgctgaagttctgggattgcttaacatgctagtacccttcttctgtatgcgatgatttatgactactgtttgtttcaactaggctcatgctttgtctaatgcgacctaataatagaccacactgaaacttttacaaagagacatgtaattgtgtcatcagacatccagaacatggtaattttttgttggaatcttttggtaaggggctgatgggaacatgtaaaaggtactttcagtgcctgaaaattatgctagtttttcatagtttaattcaaaaaaaaaaatctaagggtgtggtgtctaaatagagttcctttacaccactaagcccaatttgcttaatgatatattttaaaattattgaatgctgattccatgatatgttcccattcaaaacaagggaggacaaaagtgctgcattctggaataaacacatgggctagagttgttgacatatcattgcatgacaacaacaaagccatccaaatcaacaaaaataatctcattaaagtggtgcctattttgtgcctgagggatccattagtgttaaagggaggtttggaagcctggaaggaaacacaaaagtatgaagaggtttgaattgggacatgtactttgaatgttagcatgagatgggagggaattgatggtaaaccttgtttggaaccaaagtatgtaggttgtgctcaaatatagaagaaaaagaaagatatcttgattttcatatgaatactagtacgtgcatcatgtatgcagagctttttgatactgatactggagttttattattcacttctagttagttagttagttattcgaggtagtgatggttttattatcatgggtttgatgttcagaataggacatcattgaaccctacaagcactaaatgttgtgggtaaaatacctaagtttctaattcactgctgctgggcagatggcttgttcagttatgtttgatatgatttttcgcatgtgatatattttgctgatggtggtgtttctctagatgtctgttttaaatcatctgtatttgctgtttgtttgctaagcagaaactggaaagtgtaggataatttccagcagagggctcctgtcatacttgcttgtttccctaacgatggtaaggatgacatgctttgatatgctgatggtggatgtgcctgggtgccgactactgtttgaacgaactgatcgtgccttgctcattttctaccggcatcggatgtttttgaccgactccagggcacctcatatctaccgttgctgaggtttaaattgtaaaattcccgtcctgtagttctttaattacaactaatgcaccaggcgaacgaaaattcttgtaatgtattcacaaatatttctagagaagtttgcagtgtaaatataacaatgttcgtttcaatggagtgcacctactaattaatgtaccttttaaagtctatttaatataggagtgttagtgtaagaaaccgattttccattcagtggtgtatgactaattaacctacctcccggtgtatgtaaattattgtaatatatttttaagggcactgatgaagttccttgtgtttaaacatttctatatgaaaaattcta

SEQ ID NO: 73958 - DNA, 6461 bp, Zea Mays
agaaaacacaaacaccttagaatcggcgattcagtcccccttgagtccccgactccccactcctgtctcgactctttacctaagcttctgctcggccccatccccgtgcgtctcctcccggctttcgtctcgctctgagctcgcctctaccatggcgactagggtttagtagcgccgcagcctccatcactgccatcctcaactccgtaccggatccggaagaggcgtcggttcgtcctcaacgtcgccaacctccgctccccgtcgtcctcaccccctctatctcgtcaaggcttgatatttaacgggctctgggcagagtttaacaagtttcagcaatggggtttgataatgaatgtatcttgaatattcaatcccttcctggtgaatatttctgccctgtttgccggacacttgtgtatcccaatgaggccctacaaactcaatgcacacatctctactgcaaatcctgcttggcatatgtagtggcaaccacacaagcttgtccttatgatggataccttgtaacagaagctgattcgaagcctcttatggaatcaaataaaactcttgctgagactattggcaaagttgcggtctattgcctgtataataagagtggctgccaatggcatggagagctatccgcctgtaccacacatggtactacttgtgcatatgggaactctcctgttgtttgcaatcgttgtgggacacaaattgtgcatcgtcaagtacaagaacatgctcaactctgccatggcttacaatctcaaacccaacaagctgatggtagtcaggtgcagctagcggcggcaacaactcagccagtcacccaagacccatcacttgcttcagctggatctgctgcacctgcagttacaaccctaccaaagccatctttaactacagccacagctgtaacaagttctgcaacagcaacaggaggggcagctggtgcaaccacagcagcagtgccttcttcagccgcatctatttctgcttcccaaactccaacagctgagcaatggtaccagcagcagcagcagctccaatactcacaatattatcagcagcagcatcctggatccaacccttacatgcagcaatatcaacagtataaccaataccagcaggcgtatcagcattacatgcaaccttcaatgcaagtaccatcccaaaatgtggtgcaaggatctgcacaacctgcttcttatgttcagcctcaagtgcaatcctcccaactgatgatgcaagctcaaagtcaaccccaggtccatccattgacaagtcaaccgcagcttcagcagcatccagttcaacctcatccccaaagtcaccctcatctttcccatgttcaactacctgcagatcagtcacagcttcatcaatcaattcagtcagcccaagttccacagttccaaccaagtcatgttcctctccaaccatctggtctccaagtacaacctgcagcacatccatctgctcttactcaagttggtaaccagcaagttgctactcaagcaacggctcatcaggtgcagccacatgtacgagttcaacctccgcagcagcaacatattgttgcacagcaacaacatccacatctgcaagctttacctccacatcaaaatattcaacctcagatgcagttaaactctcaagttcagctgcagcctccacatgcccagcagcaagcttacccacaaccacaggcctatcctcaacaaacacatcatatgcacccccagaatgcttcatatacacagcagcaaacacaaggtgctcttttgcaacctgtacctgtgtcccatcaacaagcacatgtttctcatcatcctgcaccaatgcgtcctccgttgccaagtcaacagccagctttgcagccttttcagggaattcaacgtacaacacaacatggaaaacatattggatttcatgctcagtggccaccaatgggttccaacatttcttcccaggcaccaccacagggattccctgcaaactcatctgtttcttcacaatcagttcaaccataccagcaaggaatgtcttcatcacaacaggtgcattcccaacctggtcagccttatacacagcatcatgttactggcaatactggacatgttcaaacttcagctggcagatctatgactcatcttgcaccaacacagcagtttcagcaccaacaatcagcagtgcttagaactgagtcacctgctgctgcgcaccctattgggcagggttctttagatcttgaaaaacatacttcaaaatcagggaagtcagaaaatgcaattaatgctgctgtcagtgaaaataaaattagcggtgctgactcagctgccatgagacctacaaagcctcaatcaggtgaggaaaacatgaacagtgaacaaaatggttttgttggtgttagaaaagatgcagtgcaaactggcattgtatcacacggtttagatggttcaattaggagggatgggaatactgaccaggcaggtaattcacatggtctagttgtgcagggaggcaaagaccataaggcttcagatgttactaatcgtgagaaagaacaatcatttcagcaggcatcactgcaaaatgcaggggcactgggctcttatgtgcccccaggtgtggtaccacaacatccatctggaccagataaaatgcttcctcagcatattatgaatcctggtcataagcatggttcctctgaaaatatccgtcctccgttgcaacaaccatatggtttgtttcattctggaaagatatcaaggccatttggagagaaccagattcagatgcctatgtcacagcctgggggtatcagacctggtgatggtatgatccgacctcctgtggttggcccattacctggacatcatggtgcagtgttgtctccttttgatcttgaacatttgggccagccacattctctcggaatgttgaacagcaatgactttggtggtgaggggttcaatacttcaaggggtgctgcatatcccggaagacatgataatatcgaagacgatcggaaacattttccagcaccagcccttctggatggtcaaggcttgcaaagggaccctagacattttgagagagctttagttagacctgatggtttccttgattcagtacctggaaggcctccttttccaaaccatagaagtgtaggtttgcatgagggttttccaagaaaacaaaacacaactgccagtcaccctgacgtcctgtcacatggagcagaatttgatcatcacagggctattggaatgcctaatttcagaaatccaggcccatttgctcaagggacaagtggtggtcctggtgcgccccctaaaaaccagcttggctctggtaaccttcctggaaacatacaacatgcttttgcaggcccagacatccctccagctccttttaaccttggtgacatgcatccaggtgaccctcatcttgttgctgactattctcagcatggatttcctaaaactgcagcacactttggtttgggtggattctcgagaaatgggaattctggttggtgccgaatatgcatgtttaactgtgggaccgcagagaatctggatctgcatgtacaaacaagggaacatcagcaatgtgcaatggacattatcctgaaaatgaagcaagatgttgcaaagaggaaaaaactgaattatggaggccccaagtcggtcaacaacaaaaaggtttctgggaagggccattttcgtgggaataggcgctagtgttacctgattcagcttgatgtgaatttgaaggttgctactggtgcttttggacgtttcataggcaattgagagttgagatctcttcagacatcatgttcacgcggttcagagtatttgaagtggaacttgtaatgttcccaaacttttgttgccatgttgatctgcagagttcacatggctatgtttactttacgtatttttgctgaagttctgggattgcttaacatgctagtacccttcttctgtatgcgatgatttatgactactgtttgtttcaactaggctcatgctttgtctaatgcgacctaataatagaccacactgaaacttttacaaagagacatgtaattgtgtcatcagacatccagaacatggtaattttttgttggaatcttttggtaaggggctgatgggaacatgtaaaaggtactttcagtgcctgaaaattatgctagtttttcatagtttaattcaaaaaaaaaaatctaagggtgtggtgtctaaatagagttcctttacaccactaagcccaatttgcttaatgatatattttaaaattattgaatgctgattccatgatatgttcccattcaaaacaagggaggacaaaagtgctgcattctggaataaacacatgggctagagttgttgacatatcattgcatgacaacaacaaagccatccaaatcaacaaaaataatctcattaaagtggtgcctattttgtgcctgagggatccattagtgttaaagggaggtttggaagcctggaaggaaacacaaaagtatgaagaggtttgaattgggacatgtactttgaatgttagcatgagatgggagggaattgatggtaaaccttgtttggaaccaaagtatgtaggttgtgctcaaatatagaagaaaaagaaagatatcttgattttcatatgaatactagtacgtgcatcatgtatgcagagctttttgatactgatactggagttttattattcacttctagttagttagttagttattcgaggtagtgatggttttattatcatgggtttgatgttcagaataggacatcattgaaccctacaagcactaaatgttgtgggtaaaatacctaagtttctaattcactgctgctgggcagatggcttgttcagttatgtttgatatgatttttcgcatgtgatatattttgctgatggtggtgtttctctagatgtctgttttaaatcatctgtatttgctgtttgtttgctaagcagaaactggaaagtgtaggataatttccagcagagggctcctgtcatacttgcttgtttccctaacgatggttgtttggggttagacttgttacatacattcttcacctgctcatggattttgtccaaactactcatagggttatcgttcacatgtgtaacttattcagcacactactgtgatttttttatagaactaggtaggatggttatttagcaagatgatggtatgattcaaaacaacttggtgctttctgctactacccttgacttgtagcccgctattagtttggatataaccaatcaattaaaaggcaccctttggatgtaagcacaattcggttggctgcttccaattgatttggctacagatcaaatcctcttcaaaattgcatggtgtattttgcgttgctcaaagacaagaaatcattcaagatgcttacactgcccctatttattttctctgactggaacggggttggctaccatgacgacttagcaattggaatgccaaactctaggttcatcaatggttttgtaattttgaggtcaccagtgatttgttatacagaattgtgggtgaaaatgaaaacatctctggcaagttccagtcagtttctgaccagtttttgacacagactggtctgatgttgattgtcacatttttgtagcacatactcttaaggatcgggccaaaaagtctgttttcttgaatggttccttcctatttaggtttgaattgtagaatcactggtgctggtgcccctttgtcactcgtgtcaaatagtaaaaggaaatgtgccgttatcgatcggaattgtagaatcacattactgtacgattatcgatcgaattactgttacaatagtaacttgcagtgcagtatattcaatttggtagtaattagcaacttggtgacattgttgttcgtgcttggcataatgtagacgatctatgtttcttctgtctcttttcttttgtgtttctttgggattcttgtagatggtggatgtgcctgggtgccgactactgtttgaacgaactgatcgtgccttgctcattttctaccggcatcggatgtttttgaccgactccagggcacctcatatctaccgttgctgaggtttaaattgtaaaattcccgtcctgtagttctttaattacaactaatgcaccaggcgaacgaaaattcttgtaatgtattcacaaatatttctagagaagtttgcagtgtaaatataacaatgttcgtttcaatggagtgcacctactaattaatgtaccttttaaagtctatttaatataggagtgttagtgtaagaaaccgattttccattcagtggtgtatgactaattaacctacctcccggtgtatgtaaattattgtaatatatttttaagggcactgatgaagttccttgtgtttaaacatttctatatgaaaaattcta

SEQ ID NO: 73959 - DNA, 6001 bp, Zea Mays
aacacaaacaccttagaatcggcgattcagtcccccttgagtccccgactccccactcctgtctcgactctttacctaagcttctgctcggccccatccccgtgcgtctcctcccggctttcgtctcgctctgagctcgcctctaccatggcgactagggtttagtagcgccgcagcctccatcactgccatcctcaactccgtaccggatccggaagaggcgtcggttcgtcctcaacgtcgccaacctccgctccccgtcgtcctcaccccctctatctcgtcaaggcttgatatttaacgggctctgggcagagtttaacaagtttcagcaatggggtttgataatgaatgtatcttgaatattcaatcccttcctggtgaatatttctgccctgtttgccggacacttgtgtatcccaatgaggccctacaaactcaatgcacacatctctactgcaaatcctgcttggcatatgtagtggcaaccacacaagcttgtccttatgatggataccttgtaacagaagctgattcgaagcctcttatggaatcaaataaaactcttgctgagactattggcaaagttgcggtctattgcctgtataataagagtggctgccaatggcatggagagctatccgcctgtaccacacatggtactacttgtgcatatgggaactctcctgttgtttgcaatcgttgtgggacacaaattgtgcatcgtcaagtacaagaacatgctcaactctgccatggcttacaatctcaaacccaacaagctgatggtagtcaggtgcagctagcggcggcaacaactcagccagtcacccaagacccatcacttgcttcagctggatctgctgcacctgcagttacaaccctaccaaagccatctttaactacagccacagctgtaacaagttctgcaacagcaacaggaggggcagctggtgcaaccacagcagcagtgccttcttcagccgcatctatttctgcttcccaaactccaacagctgagcaatggtaccagcagcagcagcagctccaatactcacaatattatcagcagcagcatcctggatccaacccttacatgcagcaatatcaacagtataaccaataccagcaggcgtatcagcattacatgcaaccttcaatgcaagtaccatcccaaaatgtggtgcaaggatctgcacaacctgcttcttatgttcagcctcaagtgcaatcctcccaactgatgatgcaagctcaaagtcaaccccaggtccatccattgacaagtcaaccgcagcttcagcagcatccagttcaacctcatccccaaagtcaccctcatctttcccatgttcaactacctgcagatcagtcacagcttcatcaatcaattcagtcagcccaagttccacagttccaaccaagtcatgttcctctccaaccatctggtctccaagtacaacctgcagcacatccatctgctcttactcaagttggtaaccagcaagttgctactcaagcaacggctcatcaggtgcagccacatgtacgagttcaacctccgcagcagcaacatattgttgcacagcaacaacatccacatctgcaagctttacctccacatcaaaatattcaacctcagatgcagttaaactctcaagttcagctgcagcctccacatgcccagcagcaagcttacccacaaccacaggcctatcctcaacaaacacatcatatgcacccccagaatgcttcatatacacagcagcaaacacaaggtgctcttttgcaacctgtacctgtgtcccatcaacaagcacatgtttctcatcatcctgcaccaatgcgtcctccgttgccaagtcaacagccagctttgcagccttttcagggaattcaacgtacaacacaacatggaaaacatattggatttcatgctcagtggccaccaatgggttccaacatttcttcccaggcaccaccacagggattccctgcaaactcatctgtttcttcacaatcagttcaaccataccagcaaggaatgtcttcatcacaacaggtgcattcccaacctggtcagccttatacacagcatcatgttactggcaatactggacatgttcaaacttcagctggcagatctatgactcatcttgcaccaacacagcagtttcagcaccaacaatcagcagtgcttagaactgagtcacctgctgctgcgcaccctattgggcagggttctttagatcttgaaaaacatacttcaaaatcagggaagtcagaaaatgcaattaatgctgctgtcagtgaaaataaaattagcggtgctgactcagctgccatgagacctacaaagcctcaatcaggtgaggaaaacatgaacagtgaacaaaatggttttgttggtgttagaaaagatgcagtgcaaactggcattgtatcacacggtttagatggttcaattaggagggatgggaatactgaccaggcaggtaattcacatggtctagttgtgcagggaggcaaagaccataaggcttcagatgttactaatcgtgagaaagaacaatcatttcagcaggcatcactgcaaaatgcaggggcactgggctcttatgtgcccccaggtgtggtaccacaacatccatctggaccagataaaatgcttcctcagcatattatgaatcctggtcataagcatggttcctctgaaaatatccgtcctccgttgcaacaaccatatggtttgtttcattctggaaagatatcaaggccatttggagagaaccagattcagatgcctatgtcacagcctgggggtatcagacctggtgatggtatgatccgacctcctgtggttggcccattacctggacatcatggtgcagtgttgtctccttttgatcttgaacatttgggccagccacattctctcggaatgttgaacagcaatgactttggtggtgaggggttcaatacttcaaggggtgctgcatatcccggaagacatgataatatcgaagacgatcggaaacattttccagcaccagcccttctggatggtcaaggcttgcaaagggaccctagacattttgagagagctttagttagacctgatggtttccttgattcagtacctggaaggcctccttttccaaaccatagaagtgtaggtttgcatgagggttttccaagaaaacaaaacacaactgccagtcaccctgacgtcctgtcacatggagcagaatttgatcatcacagggctattggaatgcctaatttcagaaatccaggcccatttgctcaagggacaagtggtggtcctggtgcgccccctaaaaaccagcttggctctggtaaccttcctggaaacatacaacatgcttttgcaggcccagacatccctccagctccttttaaccttggtgacatgcatccaggtgaccctcatcttgttgctgactattctcagcatggatttcctaaaactgcagcacactttggtttgggtggattctcgagaaatgggaattctggttggtgccgaatatgcatgtttaactgtgggaccgcagagaatctggatctgcatgtacaaacaagggaacatcagcaatgtgcaatggacattatcctgaaaatgaagcaagatgttgcaaagaggaaaaaactgaattatggaggccccaagtcggtcaacaacaaaaaggtttctgggaagggccattttcgtgggaataggcgctagtgttacctgattcagcttgatgtgaatttgaaggttgctactggtgcttttggacgtttcataggcaattgagagttgagatctcttcagacatcatgttcacgcggttcagagtatttgaagtggaacttaaactggaaagtgtaggataatttccagcagagggctcctgtcatacttgcttgtttccctaacgatggtaaggatgacatgctttgatatgctgtgctgaaggccgaagccaatctgtgacctgtcaattacttggacactaatgacctgtttggttcgctgcctaacttaccacagtttgccacacataaggttaggcaagtttgatcaacttaggcgcgtgtttggtttgtagtcacagttgtggcaagatttgtctcttgctgcgttggtcccactcatcaatgacttataaaagtgtagcatgattctcttaggcattgccaaaatgcggcaaagaatttgagcgcctaacctttggcatgtgtggcagaaaatatatggcaatttatgacaccttagccgtacaaccaaacagacgctaaaggtcccagtttgtataattgtgaggccatcatgaactgctatgcttttgttcgtaggaaacaacataagatatatttatgtgtaaattaatagattgttcatatctatgttcattcggggtaaggagtgacattacaatgtcttggttgaactcaatttatgtgatcgccaagtggttcaagtgtgccccaatgttatgtttgttcactttccagtgcttagtttgccggatgctgttgcccacagaagatgcccccccaaacaaacaaaattggttgggcatcacttgtaatatatttctcccaaatgcaggttgtttggggttagacttgttacatacattcttcacctgctcatggattttgtccaaactactcatagggttatcgttcacatgtgtaacttattcagcacactactgtgatttttttatagaactaggtaggatggttatttagcaagatgatggtatgattcaaaacaacttggtgctttctgctactacccttgacttgtagcccgctattagtttggatataaccaatcaattaaaaggcaccctttggatgtaagcacaattcggttggctgcttccaattgatttggctacagatcaaatcctcttcaaaattgcatggtgtattttgcgttgctcaaagacaagaaatcattcaagatgcttacactgcccctatttattttctctgactggaacggggttggctaccatgacgacttagcaattggaatgccaaactctaggttcatcaatggttttgtaattttgaggtcaccagtgatttgttatacagaattgtgggtgaaaatgaaaacatctctggcaagttccagtcagtttctgaccagtttttgacacagactggtctgatgttgattgtcacatttttgtagcacatactcttaaggatcgggccaaaaagtctgttttcttgaatggttccttcctatttaggtttgaattgtagaatcactggtgctggtgcccctttgtcactcgtgtcaaatagtaaaaggaaatgtgccgttatcgatcggaattgtagaatcacattactgtacgattatcgatcgaattactgttacaatagtaacttgcagtgcagtatattcaatttggtagtaattagcaacttggtgacattgttgttcgtgcttggcataatgtagacgatctatgtttcttctgtctcttttcttttgtgtttctttgggattcttgtagatggtggatgtgcctgggtgccgactactgtttgaacgaactgatcgtgccttgctcattttctaccggcatcggatgtttttgaccgactccagggcacctcatatctaccgttgctgaggtttaaattgtaaaattcccgtcctgtagttctttaattacaactaatgcaccaggcgaacgaaaattcttgtaatgtattcacaaatatttctagagaagtttgcagtgtaaatataacaatgttcgtttcaatggagtgcacctactaattaatgtaccttttaaagtctatttaatataggagtgttagtgtaagaaaccgattttccattcagtggtgtatgactaattaacctacctcccggtgtatgtaaattattgtaatatatttttaagggcactgatgaagttccttgtgtttaaacatttctatatgaaaaattcta

SEQ ID NO: 73960 - DNA, 5370 bp, Zea Mays
caaacaccttagaatcggcgattcagtcccccttgagtccccgactccccactcctgtctcgactctttacctaagcttctgctcggccccatccccgtgcgtctcctcccggctttcgtctcgctctgagctcgcctctaccatggcgactagggtttagtagcgccgcagcctccatcactgccatcctcaactccgtaccggatccggaagaggcgtcggttcgtcctcaacgtcgccaacctccgctccccgtcgtcctcaccccctctatctcgtcaaggcttgatatttaacgggctctgggcagagtttaacaagtttcagcaatggggtttgataatgaatgtatcttgaatattcaatcccttcctggtgaatatttctgccctgtttgccggacacttgtgtatcccaatgaggccctacaaactcaatgcacacatctctactgcaaatcctgcttggcatatgtagtggcaaccacacaagcttgtccttatgatggataccttgtaacagaagctgattcgaagcctcttatggaatcaaataaaactcttgctgagactattggcaaagttgcggtctattgcctgtataataagagtggctgccaatggcatggagagctatccgcctgtaccacacatggtactacttgtgcatatgggaactctcctgttgtttgcaatcgttgtgggacacaaattgtgcatcgtcaagtacaagaacatgctcaactctgccatggcttacaatctcaaacccaacaagctgatggtagtcaggtgcagctagcggcggcaacaactcagccagtcacccaagacccatcacttgcttcagctggatctgctgcacctgcagttacaaccctaccaaagccatctttaactacagccacagctgtaacaagttctgcaacagcaacaggaggggcagctggtgcaaccacagcagcagtgccttcttcagccgcatctatttctgcttcccaaactccaacagctgagcaatggtaccagcagcagcagcagctccaatactcacaatattatcagcagcagcatcctggatccaacccttacatgcagcaatatcaacagtataaccaataccagcaggcgtatcagcattacatgcaaccttcaatgcaagtaccatcccaaaatgtggtgcaaggatctgcacaacctgcttcttatgttcagcctcaagtgcaatcctcccaactgatgatgcaagctcaaagtcaaccccaggtccatccattgacaagtcaaccgcagcttcagcagcatccagttcaacctcatccccaaagtcaccctcatctttcccatgttcaactacctgcagatcagtcacagcttcatcaatcaattcagtcagcccaagttccacagttccaaccaagtcatgttcctctccaaccatctggtctccaagtacaacctgcagcacatccatctgctcttactcaagttggtaaccagcaagttgctactcaagcaacggctcatcaggtgcagccacatgtacgagttcaacctccgcagcagcaacatattgttgcacagcaacaacatccacatctgcaagctttacctccacatcaaaatattcaacctcagatgcagttaaactctcaagttcagctgcagcctccacatgcccagcagcaagcttacccacaaccacaggcctatcctcaacaaacacatcatatgcacccccagaatgcttcatatacacagcagcaaacacaaggtgctcttttgcaacctgtacctgtgtcccatcaacaagcacatgtttctcatcatcctgcaccaatgcgtcctccgttgccaagtcaacagccagctttgcagccttttcagggaattcaacgtacaacacaacatggaaaacatattggatttcatgctcagtggccaccaatgggttccaacatttcttcccaggcaccaccacagggattccctgcaaactcatctgtttcttcacaatcagttcaaccataccagcaaggaatgtcttcatcacaacaggtgcattcccaacctggtcagccttatacacagcatcatgttactggcaatactggacatgttcaaacttcagctggcagatctatgactcatcttgcaccaacacagcagtttcagcaccaacaatcagcagtgcttagaactgagtcacctgctgctgcgcaccctattgggcagggttctttagatcttgaaaaacatacttcaaaatcagggaagtcagaaaatgcaattaatgctgctgtcagtgaaaataaaattagcggtgctgactcagctgccatgagacctacaaagcctcaatcaggtgaggaaaacatgaacagtgaacaaaatggttttgttggtgttagaaaagatgcagtgcaaactggcattgtatcacacggtttagatggttcaattaggagggatgggaatactgaccaggcaggtaattcacatggtctagttgtgcagggaggcaaagaccataaggcttcagatgttactaatcgtgagaaagaacaatcatttcagcaggcatcactgcaaaatgcaggggcactgggctcttatgtgcccccaggtgtggtaccacaacatccatctggaccagataaaatgcttcctcagcatattatgaatcctggtcataagcatggttcctctgaaaatatccgtcctccgttgcaacaaccatatggtttgtttcattctggaaagatatcaaggccatttggagagaaccagattcagatgcctatgtcacagcctgggggtatcagacctggtgatggtatgatccgacctcctgtggttggcccattacctggacatcatggtgcagtgttgtctccttttgatcttgaacatttgggccagccacattctctcggtaatactgtggattgtaggcaaattcttcctgtttttttgttgtttcaagtatgctgacctaactttcattccatttatttaggaatgttgaacagcaatgactttggtggtgaggggttcaatacttcaaggggtgctgcatatcccggaagacatgataatatcgaagacgatcggaaacattttccagcaccagcccttctggatggtcaaggcttgcaaagggaccctagacattttgagagagctttagttagacctgatggtttccttgattcagtacctggaaggcctccttttccaaaccatagaagtgtaggtttgcatgagggttttccaagaaaacaaaacacaactgccagtcaccctgacgtcctgtcacatggagcagaatttgatcatcacagggctattggaatgcctaatttcagaaatccaggcccatttgctcaagggacaagtggtggtcctggtgcgccccctaaaaaccagcttggctctggtaaccttcctggaaacatacaacatgcttttgcaggcccagacatccctccagctccttttaaccttggtgacatgcatccaggtgaccctcatcttgttgctgactattctcagcatggatttcctaaaactgcagcacactttggtttgggtggattctcgagaaatgggaattctggttggtgccgaatatgcatgtttaactgtgggaccgcagagaatctggatctgcatgtacaaacaagggaacatcagcaatgtgcaatggacattatcctgaaaatgaagcaagatgttgcaaagaggaaaaaactgaattatggaggccccaagtcggtcaacaacaaaaaggtttctgggaagggccattttcgtgggaataggcgctagtgttacctgattcagcttgatgtgaatttgaaggttgctactggtgcttttggacgtttcataggcaattgagagttgagatctcttcagacatcatgttcacgcggttcagagtatttgaagtggaacttgaggagattcacgagctgctgctgagctttgcggaggctggtgccaatgttgtgcgcttgaaaggtggcgatcctctggtttttggaaggggtggagaagagatggatttcttacagcaacagggaatcaaagttgaaattatcccaggaattacctctgcttcaggaattgcagcagaactaggcattccgctaacccatcgaggtgttgctaccagtgtcagatttttaactggacactccagaaatggtgggacagacccactatatgtagctggaaatgcagccgatcctgacactactttggttgtgtacatgggtttgtcaacacttgcatcacttgcaccaaagttaatgaagcacggcctgccaccagatacccctgctgttgcagtagagcgcgggactacacctcaacaacgaatggtgtttgcgttgttaaaggatcttgtggatgaagtcaagtcagctgatcttgtttctccaactctaataattatcgggaaagtggtatccttgtcaccattttgggttgagtcatctgaacatgatgccctgaaaattgagagctcgtatgcaagtgaagccagatgataatacgttttcatgattttagtgattggacaatacatacttgagtaacgcaatatcccagatatgagcagttccagttgggatccatttaggacatgcgagcacaggttcgacctggtgtacacaacatttcaggaagcatggattctgaatgacggatgatagcttaagcccataacagcctttggggtttgggcagaagcgcacttgggagttgatgagggcatgtctggaggcttcagcttcagtaaatttacggctttcaattcggtgtcttcttcgtcaaagaagactcggtagatgtatggttttcaattcaatagcacctgcaaactcctttctgactggaggtccattcggagtgcagggattttacagaaattagacaaaaaaagttctgttttttggggggaattagaaaaatctctgcttcccaagcgtagataactgtaagatttttgttgtcatctttaaaataattgtattgtttttatgtgttatattcatctttaaaaactcttggtaaaacagagcctgaagaatgaacctttaagctgaattagtgtttggtgtttggttctagagtctatgaacggcgcaactctattccagattctggggatagaatgacttcataactatttttttttgtttcatagtgaggcataacggaacggatttattctgtgtttggtctagagtgtagcaaaatagagcggcttcatcatgtgcaaatatataattttctaaccatgatccactcatacaactatttgttatggtttgccacgacactagtaaatgtagaacatga

SEQ ID NO: 73961 - DNA, 4488 bp, Zea Mays
cgattcagtcccccttgagtccccgactccccactcctgtctcgactctttacctaagcttctgctcggccccatccccgtgcgtctcctcccggctttcgtctcgctctgagctcgcctctaccatggcgactagggtttagtagcgccgcagcctccatcactgccatcctcaactccgtaccggatccggaagaggcgtcggttcgtcctcaacgtcgccaacctccgctccccgtcgtcctcaccccctctatctcgtcaaggcttgatatttaacgggctctgggcagagtttaacaagtttcagcaatggggtttgataatgaatgtatcttgaatattcaatcccttcctggtgaatatttctgccctgtttgccggacacttgtgtatcccaatgaggccctacaaactcaatgcacacatctctactgcaaatcctgcttggcatatgtagtggcaaccacacaagcttgtccttatgatggataccttgtaacagaagctgattcgaagcctcttatggaatcaaataaaactcttgctgagactattggcaaagttgcggtctattgcctgtataataagagtggctgccaatggcatggagagctatccgcctgtaccacacatggtactacttgtgcatatgggaactctcctgttgtttgcaatcgttgtgggacacaaattgtgcatcgtcaagtacaagaacatgctcaactctgccatggcttacaatctcaaacccaacaagctgatggtagtcaggtgcagctagcggcggcaacaactcagccagtcacccaagacccatcacttgcttcagctggatctgctgcacctgcagttacaaccctaccaaagccatctttaactacagccacagctgtaacaagttctgcaacagcaacaggaggggcagctggtgcaaccacagcagcagtgccttcttcagccgcatctatttctgcttcccaaactccaacagctgagcaatggtaccagcagcagcagcagctccaatactcacaatattatcagcagcagcatcctggatccaacccttacatgcagcaatatcaacagtataaccaataccagcaggcgtatcagcattacatgcaaccttcaatgcaagtaccatcccaaaatgtggtgcaaggatctgcacaacctgcttcttatgttcagcctcaagtgcaatcctcccaactgatgatgcaagctcaaagtcaaccccaggtccatccattgacaagtcaaccgcagcttcagcagcatccagttcaacctcatccccaaagtcaccctcatctttcccatgttcaactacctgcagatcagtcacagcttcatcaatcaattcagtcagcccaagttccacagttccaaccaagtcatgttcctctccaaccatctggtctccaagtacaacctgcagcacatccatctgctcttactcaagttggtaaccagcaagttgctactcaagcaacggctcatcaggtgcagccacatgtacgagttcaacctccgcagcagcaacatattgttgcacagcaacaacatccacatctgcaagctttacctccacatcaaaatattcaacctcagatgcagttaaactctcaagttcagctgcagcctccacatgcccagcagcaagcttacccacaaccacaggcctatcctcaacaaacacatcatatgcacccccagaatgcttcatatacacagcagcaaacacaaggtgctcttttgcaacctgtacctgtgtcccatcaacaagcacatgtttctcatcatcctgcaccaatgcgtcctccgttgccaagtcaacagccagctttgcagccttttcagggaattcaacgtacaacacaacatggaaaacatattggatttcatgctcagtggccaccaatgggttccaacatttcttcccaggcaccaccacagggattccctgcaaactcatctgtttcttcacaatcagttcaaccataccagcaaggaatgtcttcatcacaacaggtgcattcccaacctggtcagccttatacacagcatcatgttactggcaatactggacatgttcaaacttcagctggcagatctatgactcatcttgcaccaacacagcagtttcagcaccaacaatcagcagtgcttagaactgagtcacctgctgctgcgcaccctattgggcagggttctttagatcttgaaaaacatacttcaaaatcagggaagtcagaaaatgcaattaatgctgctgtcagtgaaaataaaattagcggtgctgactcagctgccatgagacctacaaagcctcaatcaggtgaggaaaacatgaacagtgaacaaaatggttttgttggtgttagaaaagatgcagtgcaaactggcattgtatcacacggtttagatggttcaattaggagggatgggaatactgaccaggcaggtaattcacatggtctagttgtgcagggaggcaaagaccataaggcttcagatgttactaatcgtgagaaagaacaatcatttcagcaggcatcactgcaaaatgcaggggcactgggctcttatgtgcccccaggtgtggtaccacaacatccatctggaccagataaaatgcttcctcagcatattatgaatcctggtcataagcatggttcctctgaaaatatccgtcctccgttgcaacaaccatatggtttgtttcattctggaaagatatcaaggccatttggagagaaccagattcagatgcctatgtcacagcctgggggtatcagacctggtgatggtatgatccgacctcctgtggttggcccattacctggacatcatggtgcagtgttgtctccttttgatcttgaacatttgggccagccacattctctcggtaatactgtggattgtaggcaaattcttcctgtttttttgttgtttcaagtatgctgacctaactttcattccatttatttaggaatgttgaacagcaatgactttggtggtgaggggttcaatacttcaaggggtgctgcatatcccggaagacatgataatatcgaagacgatcggaaacattttccagcaccagcccttctggatggtcaaggcttgcaaagggaccctagacattttgagagagctttagttagacctgatggtttccttgattcagtacctggaaggcctccttttccaaaccatagaagtgtaggtttgcatgagggttttccaagaaaacaaaacacaactgccagtcaccctgacgtcctgtcacatggagcagaatttgatcatcacagggctattggaatgcctaatttcagaaatccaggcccatttgctcaagggacaagtggtggtcctggtgcgccccctaaaaaccagcttggctctggtaaccttcctggaaacatacaacatgcttttgcaggcccagacatccctccagctccttttaaccttggtgacatgcatccaggtgaccctcatcttgttgctgactattctcagcatggatttcctaaaactgcagcacactttggtttgggtggattctcgagaaatgggaattctggttggtgccgaatatgcatgtttaactgtgggaccgcagagaatctggatctgcatgtacaaacaagggaacatcagcaatgtgcaatggacattatcctgaaaatgaagcaagatgttgcaaagaggaaaaaactgaattatggaggccccaagtcggtcaacaacaaaaaggtttctgggaagggccattttcgtgggaataggcgctagtgttacctgattcagcttgatgtgaatttgaaggttgctactggtgcttttggacgtttcataggcaattgagagttgagatctcttcagacatcatgttcacgcggttcagagtatttgaagtggaacttaaactggaaagtgtaggataatttccagcagagggctcctgtcatacttgcttgtttccctaacgatggtaaggatgacatgctttgatatgctgatggtggatgtgcctgggtgccgactactgtttgaacgaactgatcgtgccttgctcattttctaccggcatcggatgtttttgaccgactccagggcacctcatatctaccgttgctgaggtttaaattgtaaaattcccgtcctgtagttctttaattacaactaatgcaccaggcgaacgaaaattcttgtaatgtattcacaaatatttctagagaagtttgcagtgtaaatataacaatgttcgtttcaatggagtgcacctactaattaatgtaccttttaaagtctatttaatataggagtgttagtgtaagaaaccgattttccattcagtggtgtatgactaattaacctacctcccggtgtatgtaaattattgtaatatatttttaagggcactgatgaagttccttgtgtttaaacatttctatatgaaaaattcta

SEQ ID NO: 73962 - DNA, 4459 bp, Zea Mays
attcagtcccccttgagtccccgactccccactcctgtctcgactctttacctaagcttctgctcggccccatccccgtgcgtctcctcccggctttcgtctcgctctgagctcgcctctaccatggcgactagggtttagtagcgccgcagcctccatcactgccatcctcaactccgtaccggatccggaagaggcgtcggttcgtcctcaacgtcgccaacctccgctccccgtcgtcctcaccccctctatctcgtcaaggcttgatatttaacgggctctgggcagagtttaacaagtttcagcaatggggtttgataatgaatgtatcttgaatattcaatcccttcctggtgaatatttctgccctgtttgccggacacttgtgtatcccaatgaggccctacaaactcaatgcacacatctctactgcaaatcctgcttggcatatgtagtggcaaccacacaagcttgtccttatgatggataccttgtaacagaagctgattcgaagcctcttatggaatcaaataaaactcttgctgagactattggcaaagttgcggtctattgcctgtataataagagtggctgccaatggcatggagagctatccgcctgtaccacacatggtactacttgtgcatatgggaactctcctgttgtttgcaatcgttgtgggacacaaattgtgcatcgtcaagtacaagaacatgctcaactctgccatggcttacaatctcaaacccaacaagctgatggtagtcaggtgcagctagcggcggcaacaactcagccagtcacccaagacccatcacttgcttcagctggatctgctgcacctgcagttacaaccctaccaaagccatctttaactacagccacagctgtaacaagttctgcaacagcaacaggaggggcagctggtgcaaccacagcagcagtgccttcttcagccgcatctatttctgcttcccaaactccaacagctgagcaatggtaccagcagcagcagcagctccaatactcacaatattatcagcagcagcatcctggatccaacccttacatgcagcaatatcaacagtataaccaataccagcaggcgtatcagcattacatgcaaccttcaatgcaagtaccatcccaaaatgtggtgcaaggatctgcacaacctgcttcttatgttcagcctcaagtgcaatcctcccaactgatgatgcaagctcaaagtcaaccccaggtccatccattgacaagtcaaccgcagcttcagcagcatccagttcaacctcatccccaaagtcaccctcatctttcccatgttcaactacctgcagatcagtcacagcttcatcaatcaattcagtcagcccaagttccacagttccaaccaagtcatgttcctctccaaccatctggtctccaagtacaacctgcagcacatccatctgctcttactcaagttggtaaccagcaagttgctactcaagcaacggctcatcaggtgcagccacatgtacgagttcaacctccgcagcagcaacatattgttgcacagcaacaacatccacatctgcaagctttacctccacatcaaaatattcaacctcagatgcagttaaactctcaagttcagctgcagcctccacatgcccagcagcaagcttacccacaaccacaggcctatcctcaacaaacacatcatatgcacccccagaatgcttcatatacacagcagcaaacacaaggtgctcttttgcaacctgtacctgtgtcccatcaacaagcacatgtttctcatcatcctgcaccaatgcgtcctccgttgccaagtcaacagccagctttgcagccttttcagggaattcaacgtacaacacaacatggaaaacatattggatttcatgctcagtggccaccaatgggttccaacatttcttcccaggcaccaccacagggattccctgcaaactcatctgtttcttcacaatcagttcaaccataccagcaaggaatgtcttcatcacaacaggtgcattcccaacctggtcagccttatacacagcatcatgttactggcaatactggacatgttcaaacttcagctggcagatctatgactcatcttgcaccaacacagcagtttcagcaccaacaatcagcagtgcttagaactgagtcacctgctgctgcgcaccctattgggcagggttctttagatcttgaaaaacatacttcaaaatcagggaagtcagaaaatgcaattaatgctgctgtcagtgaaaataaaattagcggtgctgactcagctgccatgagacctacaaagcctcaatcaggtgaggaaaacatgaacagtgaacaaaatggttttgttggtgttagaaaagatgcagtgcaaactggcattgtatcacacggtttagatggttcaattaggagggatgggaatactgaccaggcaggtaattcacatggtctagttgtgcagggaggcaaagaccataaggcttcagatgttactaatcgtgagaaagaacaatcatttcagcaggcatcactgcaaaatgcaggggcactgggctcttatgtgcccccaggtgtggtaccacaacatccatctggaccagataaaatgcttcctcagcatattatgaatcctggtcataagcatggttcctctgaaaatatccgtcctccgttgcaacaaccatatggtttgtttcattctggaaagatatcaaggccatttggagagaaccagattcagatgcctatgtcacagcctgggggtatcagacctggtgatggtatgatccgacctcctgtggttggcccattacctggacatcatggtgcagtgttgtctccttttgatcttgaacatttgggccagccacattctctcggtaatactgtggattgtaggcaaattcttcctgtttttttgttgtttcaagtatgctgacctaactttcattccatttatttaggaatgttgaacagcaatgactttggtggtgaggggttcaatacttcaaggggtgctgcatatcccggaagacatgataatatcgaagacgatcggaaacattttccagcaccagcccttctggatggtcaaggcttgcaaagggaccctagacattttgagagagctttagttagacctgatggtttccttgattcagtacctggaaggcctccttttccaaaccatagaagtgtaggtttgcatgagggttttccaagaaaacaaaacacaactgccagtcaccctgacgtcctgtcacatggagcagaatttgatcatcacagggctattggaatgcctaatttcagaaatccaggcccatttgctcaagggacaagtggtggtcctggtgcgccccctaaaaaccagcttggctctggtaaccttcctggaaacatacaacatgcttttgcaggcccagacatccctccagctccttttaaccttggtgacatgcatccaggtgaccctcatcttgttgctgactattctcagcatggatttcctaaaactgcagcacactttggtttgggtggattctcgagaaatgggaattctggttggtgccgaatatgcatgtttaactgtgggaccgcagagaatctggatctgcatgtacaaacaagggaacatcagcaatgtgcaatggacattatcctgaaaatgaagcaagatgttgcaaagaggaaaaaactgaattatggaggccccaagtcggtcaacaacaaaaaggtttctgggaagggccattttcgtgggaataggcgctagtgttacctgattcagcttgatgtgaatttgaaggttgctactggtgcttttggacgtttcataggcaattgagagttgagatctcttcagacatcatgttcacgcggttcagagtatttgaagtggaacttaaactggaaagtgtaggataatttccagcagagggctcctgtcatacttgcttgtttccctaacgatgatggtggatgtgcctgggtgccgactactgtttgaacgaactgatcgtgccttgctcattttctaccggcatcggatgtttttgaccgactccagggcacctcatatctaccgttgctgaggtttaaattgtaaaattcccgtcctgtagttctttaattacaactaatgcaccaggcgaacgaaaattcttgtaatgtattcacaaatatttctagagaagtttgcagtgtaaatataacaatgttcgtttcaatggagtgcacctactaattaatgtaccttttaaagtctatttaatataggagtgttagtgtaagaaaccgattttccattcagtggtgtatgactaattaacctacctcccggtgtatgtaaattattgtaatatatttttaagggcactgatgaagttccttgtgtttaaacatttctatatgaaaaattcta

SEQ ID NO: 73963 - DNA, 4380 bp, Zea Mays
cttgagtccccgactccccactcctgtctcgactctttacctaagcttctgctcggccccatccccgtgcgtctcctcccggctttcgtctcgctctgagctcgcctctaccatggcgactagggtttagtagcgccgcagcctccatcactgccatcctcaactccgtaccggatccggaagaggcgtcggttcgtcctcaacgtcgccaacctccgctccccgtcgtcctcaccccctctatctcgtcaaggcttgatatttaacgggctctgggcagagtttaacaagtttcagcaatggggtttgataatgaatgtatcttgaatattcaatcccttcctggtgaatatttctgccctgtttgccggacacttgtgtatcccaatgaggccctacaaactcaatgcacacatctctactgcaaatcctgcttggcatatgtagtggcaaccacacaagcttgtccttatgatggataccttgtaacagaagctgattcgaagcctcttatggaatcaaataaaactcttgctgagactattggcaaagttgcggtctattgcctgtataataagagtggctgccaatggcatggagagctatccgcctgtaccacacatggtactacttgtgcatatgggaactctcctgttgtttgcaatcgttgtgggacacaaattgtgcatcgtcaagtacaagaacatgctcaactctgccatggcttacaatctcaaacccaacaagctgatggtagtcaggtgcagctagcggcggcaacaactcagccagtcacccaagacccatcacttgcttcagctggatctgctgcacctgcagttacaaccctaccaaagccatctttaactacagccacagctgtaacaagttctgcaacagcaacaggaggggcagctggtgcaaccacagcagcagtgccttcttcagccgcatctatttctgcttcccaaactccaacagctgagcaatggtaccagcagcagcagcagctccaatactcacaatattatcagcagcagcatcctggatccaacccttacatgcagcaatatcaacagtataaccaataccagcaggcgtatcagcattacatgcaaccttcaatgcaagtaccatcccaaaatgtggtgcaaggatctgcacaacctgcttcttatgttcagcctcaagtgcaatcctcccaactgatgatgcaagctcaaagtcaaccccaggtccatccattgacaagtcaaccgcagcttcagcagcatccagttcaacctcatccccaaagtcaccctcatctttcccatgttcaactacctgcagatcagtcacagcttcatcaatcaattcagtcagcccaagttccacagttccaaccaagtcatgttcctctccaaccatctggtctccaagtacaacctgcagcacatccatctgctcttactcaagttggtaaccagcaagttgctactcaagcaacggctcatcaggtgcagccacatgtacgagttcaacctccgcagcagcaacatattgttgcacagcaacaacatccacatctgcaagctttacctccacatcaaaatattcaacctcagatgcagttaaactctcaagttcagctgcagcctccacatgcccagcagcaagcttacccacaaccacaggcctatcctcaacaaacacatcatatgcacccccagaatgcttcatatacacagcagcaaacacaaggtgctcttttgcaacctgtacctgtgtcccatcaacaagcacatgtttctcatcatcctgcaccaatgcgtcctccgttgccaagtcaacagccagctttgcagccttttcagggaattcaacgtacaacacaacatggaaaacatattggatttcatgctcagtggccaccaatgggttccaacatttcttcccaggcaccaccacagggattccctgcaaactcatctgtttcttcacaatcagttcaaccataccagcaaggaatgtcttcatcacaacaggtgcattcccaacctggtcagccttatacacagcatcatgttactggcaatactggacatgttcaaacttcagctggcagatctatgactcatcttgcaccaacacagcagtttcagcaccaacaatcagcagtgcttagaactgagtcacctgctgctgcgcaccctattgggcagggttctttagatcttgaaaaacatacttcaaaatcagggaagtcagaaaatgcaattaatgctgctgtcagtgaaaataaaattagcggtgctgactcagctgccatgagacctacaaagcctcaatcaggtgaggaaaacatgaacagtgaacaaaatggttttgttggtgttagaaaagatgcagtgcaaactggcattgtatcacacggtttagatggttcaattaggagggatgggaatactgaccaggcaggtaattcacatggtctagttgtgcagggaggcaaagaccataaggcttcagatgttactaatcgtgagaaagaacaatcatttcagcaggcatcactgcaaaatgcaggggcactgggctcttatgtgcccccaggtgtggtaccacaacatccatctggaccagataaaatgcttcctcagcatattatgaatcctggtcataagcatggttcctctgaaaatatccgtcctccgttgcaacaaccatatggtttgtttcattctggaaagatatcaaggccatttggagagaaccagattcagatgcctatgtcacagcctgggggtatcagacctggtgatggtatgatccgacctcctgtggttggcccattacctggacatcatggtgcagtgttgtctccttttgatcttgaacatttgggccagccacattctctcggtaatactgtggattgtaggcaaattcttcctgtttttttgttgtttcaagtatgctgacctaactttcattccatttatttaggaatgttgaacagcaatgactttggtggtgaggggttcaatacttcaaggggtgctgcatatcccggaagacatgataatatcgaagacgatcggaaacattttccagcaccagcccttctggatggtcaaggcttgcaaagggaccctagacattttgagagagctttagttagacctgatggtttccttgattcagtacctggaaggcctccttttccaaaccatagaagtgtaggtttgcatgagggttttccaagaaaacaaaacacaactgccagtcaccctgacgtcctgtcacatggagcagaatttgatcatcacagggctattggaatgcctaatttcagaaatccaggcccatttgctcaagggacaagtggtggtcctggtgcgccccctaaaaaccagcttggctctggtaaccttcctggaaacatacaacatgcttttgcaggcccagacatccctccagctccttttaaccttggtgacatgcatccaggtgaccctcatcttgttgctgactattctcagcatggatttcctaaaactgcagcacactttggtttgggtggattctcgagaaatgggaattctggttggtgccgaatatgcatgtttaactgtgggaccgcagagaatctggatctgcatgtacaaacaagggaacatcagcaatgtgcaatggacattatcctgaaaatgaagcaagatgttgcaaagaggaaaaaactgaattatggaggccccaagtcggtcaacaacaaaaaggtttctgggaagggccattttcgtgggaataggcgctagtgttacctgattcagcttgatgtgaatttgaaggttgctactggtgcttttggacgtttcataggcaattgagagttgagatctcttcagacatcatgttcacgcggttcagagtatttgaagtggaacttaaactggaaagtgtaggataatttccagcagagggctcctgtcatacttgcttgtttccctaacgatggtaaggatgacatgctttgatatgctgggcacctcatatctaccgttgctgaggtttaaattgtaaaattcccgtcctgtagttctttaattacaactaatgcaccaggcgaacgaaaattcttgtaatgtattcacaaatatttctagagaagtttgcagtgtaaatataacaatgttcgtttcaatggagtgcacctactaattaatgtaccttttaaagtctatttaatataggagtgttagtgtaagaaaccgattttccattcagtggtgtatgactaattaacctacctcccggtgtatgtaaattattgtaatatatttttaagggcactgatgaagttccttgtgtttaaacatttctatatgaaaaattcta

SEQ ID NO: 73964 - DNA, 5350 bp, Zea Mays
cgactctttacctaagcttctgctcggccccatccccgtgcgtctcctcccggctttcgtctcgctctgagctcgcctctaccatggcgactagggtttagtagcgccgcagcctccatcactgccatcctcaactccgtaccggatccggaagaggcgtcggttcgtcctcaacgtcgccaacctccgctccccgtcgtcctcaccccctctatctcgtcaaggcttgatatttaacgggctctgggcagagtttaacaagtttcagcaatggggtttgataatgaatgtatcttgaatattcaatcccttcctggtgaatatttctgccctgtttgccggacacttgtgtatcccaatgaggccctacaaactcaatgcacacatctctactgcaaatcctgcttggcatatgtagtggcaaccacacaagcttgtccttatgatggataccttgtaacagaagctgattcgaagcctcttatggaatcaaataaaactcttgctgagactattggcaaagttgcggtctattgcctgtataataagagtggctgccaatggcatggagagctatccgcctgtaccacacatggtactacttgtgcatatgggaactctcctgttgtttgcaatcgttgtgggacacaaattgtgcatcgtcaagtacaagaacatgctcaactctgccatggcttacaatctcaaacccaacaagctgatggtagtcaggtgcagctagcggcggcaacaactcagccagtcacccaagacccatcacttgcttcagctggatctgctgcacctgcagttacaaccctaccaaagccatctttaactacagccacagctgtaacaagttctgcaacagcaacaggaggggcagctggtgcaaccacagcagcagtgccttcttcagccgcatctatttctgcttcccaaactccaacagctgagcaatggtaccagcagcagcagcagctccaatactcacaatattatcagcagcagcatcctggatccaacccttacatgcagcaatatcaacagtataaccaataccagcaggcgtatcagcattacatgcaaccttcaatgcaagtaccatcccaaaatgtggtgcaaggatctgcacaacctgcttcttatgttcagcctcaagtgcaatcctcccaactgatgatgcaagctcaaagtcaaccccaggtccatccattgacaagtcaaccgcagcttcagcagcatccagttcaacctcatccccaaagtcaccctcatctttcccatgttcaactacctgcagatcagtcacagcttcatcaatcaattcagtcagcccaagttccacagttccaaccaagtcatgttcctctccaaccatctggtctccaagtacaacctgcagcacatccatctgctcttactcaagttggtaaccagcaagttgctactcaagcaacggctcatcaggtgcagccacatgtacgagttcaacctccgcagcagcaacatattgttgcacagcaacaacatccacatctgcaagctttacctccacatcaaaatattcaacctcagatgcagttaaactctcaagttcagctgcagcctccacatgcccagcagcaagcttacccacaaccacaggcctatcctcaacaaacacatcatatgcacccccagaatgcttcatatacacagcagcaaacacaaggtgctcttttgcaacctgtacctgtgtcccatcaacaagcacatgtttctcatcatcctgcaccaatgcgtcctccgttgccaagtcaacagccagctttgcagccttttcagggaattcaacgtacaacacaacatggaaaacatattggatttcatgctcagtggccaccaatgggttccaacatttcttcccaggcaccaccacagggattccctgcaaactcatctgtttcttcacaatcagttcaaccataccagcaaggaatgtcttcatcacaacaggtgcattcccaacctggtcagccttatacacagcatcatgttactggcaatactggacatgttcaaacttcagctggcagatctatgactcatcttgcaccaacacagcagtttcagcaccaacaatcagcagtgcttagaactgagtcacctgctgctgcgcaccctattgggcagggttctttagatcttgaaaaacatacttcaaaatcagggaagtcagaaaatgcaattaatgctgctgtcagtgaaaataaaattagcggtgctgactcagctgccatgagacctacaaagcctcaatcaggtgaggaaaacatgaacagtgaacaaaatggttttgttggtgttagaaaagatgcagtgcaaactggcattgtatcacacggtttagatggttcaattaggagggatgggaatactgaccaggcaggtaattcacatggtctagttgtgcagggaggcaaagaccataaggcttcagatgttactaatcgtgagaaagaacaatcatttcagcaggcatcactgcaaaatgcaggggcactgggctcttatgtgcccccaggtgtggtaccacaacatccatctggaccagataaaatgcttcctcagcatattatgaatcctggtcataagcatggttcctctgaaaatatccgtcctccgttgcaacaaccatatggtttgtttcattctggaaagatatcaaggccatttggagagaaccagattcagatgcctatgtcacagcctgggggtatcagacctggtgatggtatgatccgacctcctgtggttggcccattacctggacatcatggtgcagtgttgtctccttttgatcttgaacatttgggccagccacattctctcggtaatactgtggattgtaggcaaattcttcctgtttttttgttgtttcaagtatgctgacctaactttcattccatttatttaggaatgttgaacagcaatgactttggtggtgaggggttcaatacttcaaggggtgctgcatatcccggaagacatgataatatcgaagacgatcggaaacattttccagcaccagcccttctggatggtcaaggcttgcaaagggaccctagacattttgagagagctttagttagacctgatggtttccttgattcagtacctggaaggcctccttttccaaaccatagaagtgtaggtttgcatgagggttttccaagaaaacaaaacacaactgccagtcaccctgacgtcctgtcacatggagcagaatttgatcatcacagggctattggaatgcctaatttcagaaatccaggcccatttgctcaagggacaagtggtggtcctggtgcgccccctaaaaaccagcttggctctggtaaccttcctggaaacatacaacatgcttttgcaggcccagacatccctccagctccttttaaccttggtgacatgcatccaggtgaccctcatcttgttgctgactattctcagcatggatttcctaaaactgcagcacactttggtttgggtggattctcgagaaatgggaattctggttggtgccgaatatgcatgtttaactgtgggaccgcagagaatctggatctgcatgtacaaacaagggaacatcagcaatgtgcaatggacattatcctgaaaatgaagcaagatgttgcaaagaggaaaaaactgaattatggaggccccaagtcggtcaacaacaaaaaggtttctgggaagggccattttcgtgggaataggcgctagtgttacctgattcagcttgatgtgaatttgaaggttgctactggtgcttttggacgtttcataggcaattgagagttgagatctcttcagacatcatgttcacgcggttcagagtatttgaagtggaacttaaactggaaagtgtaggataatttccagcagagggctcctgtcatacttgcttgtttccctaacgatggttgtttggggttagacttgttacatacattcttcacctgctcatggattttgtccaaactactcatagggttatcgttcacatgtgtaacttattcagcacactactgtgatttttttatagaactaggtaggatggttatttagcaagatgatggtatgattcaaaacaacttggtgctttctgctactacccttgacttgtagcccgctattagtttggatataaccaatcaattaaaaggcaccctttggatgtaagcacaattcggttggctgcttccaattgatttggctacagatcaaatcctcttcaaaattgcatggtgtattttgcgttgctcaaagacaagaaatcattcaagatgcttacactgcccctatttattttctctgactggaacggggttggctaccatgacgacttagcaattggaatgccaaactctaggttcatcaatggttttgtaattttgaggtcaccagtgatttgttatacagaattgtgggtgaaaatgaaaacatctctggcaagttccagtcagtttctgaccagtttttgacacagactggtctgatgttgattgtcacatttttgtagcacatactcttaaggatcgggccaaaaagtctgttttcttgaatggttccttcctatttaggtttgaattgtagaatcactggtgctggtgcccctttgtcactcgtgtcaaatagtaaaaggaaatgtgccgttatcgatcggaattgtagaatcacattactgtacgattatcgatcgaattactgttacaatagtaacttgcagtgcagtatattcaatttggtagtaattagcaacttggtgacattgttgttcgtgcttggcataatgtagacgatctatgtttcttctgtctcttttcttttgtgtttctttgggattcttgtagatggtggatgtgcctgggtgccgactactgtttgaacgaactgatcgtgccttgctcattttctaccggcatcggatgtttttgaccgactccagggcacctcatatctaccgttgctgaggtttaaattgtaaaattcccgtcctgtagttctttaattacaactaatgcaccaggcgaacgaaaattcttgtaatgtattcacaaatatttctagagaagtttgcagtgtaaatataacaatgttcgtttcaatggagtgcacctactaattaatgtaccttttaaagtctatttaatataggagtgttagtgtaagaaaccgattttccattcagtggtgtatgactaattaacctacctcccggtgtatgtaaattattgtaatatatttttaagggcactgatgaagttccttgtgtttaaacatttctatatgaaaaattcta

SEQ ID NO: 73965 - DNA, 2334 bp, Zea Mays
gttaagctgaatccgatgattggtcatctctttctaaaggattggctgacaactgcggtggcgtcatgagaactgagaatccgccgctgtgccgccgacgcgtcgccacctgtgacctgtgtccgtagagcccgtgcggacagctgggaccggaggcagactcccactcgaacttgcccacctcgacggttgttctacggtttggttcattgaacctggcctggcccttcaacactccccaaggccagccaagccaaggccgccaaggggcgtccggactccggcgtctcctccttgcttctgcccagccacagcaagccctgcctcccgtcccgccctccgctctccgcctacaccttctcccgtccaagaccacacgcgcacagaaaaaagtacagctggtcagtggtcctggtcagctgctcccgtacaaaaagcgcaccacaagcggcggccaagccgtccgctgccccccgcatcgccatggctctcgccgtgcgcacgccccgcttccagcctcgaccggcctccatttctgcgcccgcaacacccgcctcgaattccctcgccgccgccgccgccgcgaacgcgaggccccgcacctgcgccggcgccgccgtccgcgcttcgcccttcaccgaggccacctcctcctcgcgctacctccgtgacgcctggtcctacgccaccgattgctcctccaactccgcatcccgttcctccgatgccgccgctgcggcggcggcgctgggccgccgggacgacgagatcgcactgcagctgccggagctgcagaggctcctggacgcgctgagggcgtccagaaggaggggcgcagagggcggcggcggcggcggccgcggacccgggagggtggcactggtgggtacagggcccggggaccccgagctgctcacgctcaaggcggtccgggctatcgaggcggcggacctggtgctctacgacaggctggtgtctaacgacgtgttggacttggtcggggagggctccaggcttctctatgtcggcaagaccgcgggataccacagccgcacccaggaggagattcacgagctgctgctgagctttgcggaggctggtgccaatgttgtgcgcttgaaaggtggcgatcctctggtttttggaaggggtggagaagagatggatttcttacagcaacagggaatcaaagttgaaattatcccaggaattacctctgcttcaggaattgcagcagaactaggcattccgctaacccatcgaggtgttgctaccagttaatgaagcacggcctgccaccagatacccctgctgttgcagtagagcgcgggactacacctcaacaacgaatggtgtttgcgttgttaaaggatcttgtggatgaagtcaagtcagctgatcttgtttctccaactctaataattatcgggaaagtggtatccttgtcaccattttgggttgagtcatctgaacatgatgccctgaaaattgagagctcgtatgcaagtgaagccagatgataatacgttttcatgattttagtgattggacaatacatacttgagtaacgcaatatcccagatatgagcagttccagttgggatccatttaggacatgcgagcacaggttcgacctggtgtacacaacatttcaggaagcatggattctgaatgacggatgatagcttaagcccataacagcctttggggtttgggcagaagcgcacttgggagttgatgagggcatgtctggaggcttcagcttcagtaaatttacggctttcaattcggtgtcttcttcgtcaaagaagactcggtagatgtatggttttcaattcaatagcacctgcaaactcctttctgactggaggtccattcggagtgcagggattttacagaaattagacaaaaaaagttctgttttttggggggaattagaaaaatctctgcttcccaagcgtagataactgtaagatttttgttgtcatctttaaaataattgtattgtttttatgtgttatattcatctttaaaaactcttggtaaaacagagcctgaagaatgaacctttaagctgaattagtgtttggtgtttggttctagagtctatgaacggcgcaactctattccagattctggggatagaatgacttcataactatttttttttgtttcatagtgaggcataacggaacggatttattctgtgtttggtctagagtgtagcaaaatagagcggcttcatcatgtgcaaatatataattttctaaccatgatccactcatacaactatttgttatggtttgccacgacactagtaaatgtagaacatga

SEQ ID NO: 73966 - DNA, 2927 bp, Zea Mays
gtcatctctttctaaaggattggctgacaactgcggtggcgtcatgagaactgagaatccgccgctgtgccgccgacgcgtcgccacctgtgacctgtgtccgtagagcccgtgcggacagctgggaccggaggcagactcccactcgaacttgcccacctcgacggttgttctacggtttggttcattgaacctggcctggcccttcaacactccccaaggccagccaagccaaggccgccaaggggcgtccggactccggcgtctcctccttgcttctgcccagccacagcaagccctgcctcccgtcccgccctccgctctccgcctacaccttctcccgtccaagaccacacgcgcacagaaaaaagtacagctggtcagtggtcctggtcagctgctcccgtacaaaaagcgcaccacaagcggcggccaagccgtccgctgccccccgcatcgccatggctctcgccgtgcgcacgccccgcttccagcctcgaccggcctccatttctgcgcccgcaacacccgcctcgaattccctcgccgccgccgccgccgcgaacgcgaggccccgcacctgcgccggcgccgccgtccgcgcttcgcccttcaccgaggccacctcctcctcgcgctacctccgtgacgcctggtcctacgccaccgattgctcctccaactccgcatcccgttcctccgatgccgccgctgcggcggcggcgctgggccgccgggacgacgagatcgcactgcagctgccggagctgcagaggctcctggacgcgctgagggcgtccagaaggaggggcgcagagggcggcggcggcggcggccgcggacccgggagggtggcactggtgggtacagggcccggggaccccgagctgctcacgctcaaggcggtccgggctatcgaggcggcggacctggtgctctacgacaggctggtgtctaacgacgtgttggacttggtcggggagggctccaggcttctctatgtcggcaagaccgcgggataccacagccgcacccaggaggagattcacgagctgctgctgagctttgcggaggctggtgccaatgttgtgcgcttgaaaggtggcgatcctctggtttttggaaggggtggagaagagatggatttcttacagcaacagggaatcaaagttgaaattatcccaggaattacctctgcttcaggaattgcagcagaactaggcattccgctaacccatcgaggtgttgctaccaggtaagattagccttctgtaattttattctacctaactagtaactacgcaaaaaagatttcccctttaatatgcaatgcattttctaaatggattttccacaagattcaccatttcctatcaggtttttgtttaggatctgcaatactctctcgaatgcagcaattagcatgcctgcttgtggattttgtgagtatttgctgtagagttgaggctttaaatgtactagttacttgctgtaactcttaatggttcctgtttttgaccatacatgtctcattgcgtagtgaaagttcttggtattattttctgatgtcctgatgtgctatggctaatggagtagcaaatgtttttaataataaaacgctcttgcattgttaaatgagcagaaaggcgctagtttgtctctgataccttagtgtagagagataatcattcttgatgcttactagaataaatagttgagatataatcttctcttcagtgtcagatttttaactggacactccagaaatggtgggacagacccactatatgtagctggaaatgcagccgatcctgacactactttggttgtgtacatgggtttgtcaacacttgcatcacttgcaccaaagttaatgaagcacggcctgccaccagatacccctgctgttgcagtagagcgcgggactacacctcaacaacgaatggtgtttgcgttgttaaaggatcttgtggatgaagtcaagtcagctgatcttgtttctccaactctaataattatcgggaaagtggtatccttgtcaccattttgggttgagtcatctgaacatgatgccctgaaaattgagagctcgtatgcaagtgaagccagatgataatacgttttcatgattttagtgattggacaatacatacttgagtaacgcaatatcccagatatgagcagttccagttgggatccatttaggacatgcgagcacaggttcgacctggtgtacacaacatttcaggaagcatggattctgaatgacggatgatagcttaagcccataacagcctttggggtttgggcagaagcgcacttgggagttgatgagggcatgtctggaggcttcagcttcagtaaatttacggctttcaattcggtgtcttcttcgtcaaagaagactcggtagatgtatggttttcaattcaatagcacctgcaaactcctttctgactggaggtccattcggagtgcagggattttacagaaattagacaaaaaaagttctgttttttggggggaattagaaaaatctctgcttcccaagcgtagataactgtaagatttttgttgtcatctttaaaataattgtattgtttttatgtgttatattcatctttaaaaactcttggtaaaacagagcctgaagaatgaacctttaagctgaattagtgtttggtgtttggttctagagtctatgaacggcgcaactctattccagattctggggatagaatgacttcataactatttttttttgtttcatagtgaggcataacggaacggatttattctgtgtttggtctagagtgtagcaaaatagagcggcttcatcatgtgcaaatatataattttctaaccatgatccactcatacaactatttgttatggtttgccacgacactagtaaatgtagaacatga

SEQ ID NO: 73967 - DNA, 2609 bp, Zea Mays
tgccgccgacgcgtcgccacctgtgacctgtgtccgtagagcccgtgcggacagctgggaccggaggcagactcccactcgaacttgcccacctcgacggttgttctacggtttggttcattgaacctggcctggcccttcaacactccccaaggccagccaagccaaggccgccaaggggcgtccggactccggcgtctcctccttgcttctgcccagccacagcaagccctgcctcccgtcccgccctccgctctccgcctacaccttctcccgtccaagaccacacgcgcacagaaaaaagtacagctggtcagtggtcctggtcagctgctcccgtacaaaaagcgcaccacaagcggcggccaagccgtccgctgccccccgcatcgccatggctctcgccgtgcgcacgccccgcttccagcctcgaccggcctccatttctgcgcccgcaacacccgcctcgaattccctcgccgccgccgccgccgcgaacgcgaggccccgcacctgcgccggcgccgccgtccgcgcttcgcccttcaccgaggccacctcctcctcgcgctacctccgtgacgcctggtcctacgccaccgattgctcctccaactccgcatcccgttcctccgatgccgccgctgcggcggcggcgctgggccgccgggacgacgagatcgcactgcagctgccggagctgcagaggctcctggacgcgctgagggcgtccagaaggaggggcgcagagggcggcggcggcggcggccgcggacccgggagggtggcactggtgggtacagggcccggggaccccgagctgctcacgctcaaggcggtccgggctatcgaggcggcggacctggtgctctacgacaggctggtgtctaacgacgtgttggacttggtcggggagggctccaggcttctctatgtcggcaagaccgcgggataccacagccgcacccaggtgtgggagcactgttccttcgtttcaatttggaagtttacacgcgattggaaatgctagttgggcgggcattctgcaataacgatttcaagtaggtactttttcttgagcacgtgtgagacaacatccatgaagaacagagaattgaggcgacctcagcttaggacgttgtacctttccttccgctttcttggtcatttgtatgtttgatgactggttgatgcaatgtaggaggagattcacgagctgctgctgagctttgcggaggctggtgccaatgttgtgcgcttgaaaggtggcgatcctctggtttttggaaggggtggagaagagatggatttcttacagcaacagggaatcaaagttgaaattatcccaggaattacctctgcttcaggaattgcagcagaactaggcattccgctaacccatcgaggtgttgctaccagtgtcagatttttaactggacactccagaaatggtgggacagacccactatatgtagctggaaatgcagccgatcctgacactactttggttgtgtacatgggtttgtcaacacttgcatcacttgcaccaaagttaatgaagcacggcctgccaccagatacccctgctgttgcagtagagcgcgggactacacctcaacaacgaatggtgtttgcgttgttaaaggatcttgtggatgaagtcaagtcagctgatcttgtttctccaactctaataattatcgggaaagtggtatccttgtcaccattttgggttgagtcatctgaacatgatgccctgaaaattgagagctcgtatgcaagtgaagccagatgataatacgttttcatgattttagtgattggacaatacatacttgagtaacgcaatatcccagatatgagcagttccagttgggatccatttaggacatgcgagcacaggttcgacctggtgtacacaacatttcaggaagcatggattctgaatgacggatgatagcttaagcccataacagcctttggggtttgggcagaagcgcacttgggagttgatgagggcatgtctggaggcttcagcttcagtaaatttacggctttcaattcggtgtcttcttcgtcaaagaagactcggtagatgtatggttttcaattcaatagcacctgcaaactcctttctgactggaggtccattcggagtgcagggattttacagaaattagacaaaaaaagttctgttttttggggggaattagaaaaatctctgcttcccaagcgtagataactgtaagatttttgttgtcatctttaaaataattgtattgtttttatgtgttatattcatctttaaaaactcttggtaaaacagagcctgaagaatgaacctttaagctgaattagtgtttggtgtttggttctagagtctatgaacggcgcaactctattccagattctggggatagaatgacttcataactatttttttttgtttcatagtgaggcataacggaacggatttattctgtgtttggtctagagtgtagcaaaatagagcggcttcatcatgtgcaaatatataattttctaaccatgatccactcatacaactatttgttatggtttgccacgacactagtaaatgtagaacatga

SEQ ID NO: 73968 - DNA, 3729 bp, Zea Mays
tgccgccgacgcgtcgccacctgtgacctgtgtccgtagagcccgtgcggacagctgggaccggaggcagactcccactcgaacttgcccacctcgacggttgttctacggtttggttcattgaacctggcctggcccttcaacactccccaaggccagccaagccaaggccgccaaggggcgtccggactccggcgtctcctccttgcttctgcccagccacagcaagccctgcctcccgtcccgccctccgctctccgcctacaccttctcccgtccaagaccacacgcgcacagaaaaaagtacagctggtcagtggtcctggtcagctgctcccgtacaaaaagcgcaccacaagcggcggccaagccgtccgctgccccccgcatcgccatggctctcgccgtgcgcacgccccgcttccagcctcgaccggcctccatttctgcgcccgcaacacccgcctcgaattccctcgccgccgccgccgccgcgaacgcgaggccccgcacctgcgccggcgccgccgtccgcgcttcgcccttcaccgaggccacctcctcctcgcgctacctccgtgacgcctggtcctacgccaccgattgctcctccaactccgcatcccgttcctccgatgccgccgctgcggcggcggcgctgggccgccgggacgacgagatcgcactgcagctgccggagctgcagaggctcctggacgcgctgagggcgtccagaaggaggggcgcagagggcggcggcggcggcggccgcggacccgggagggtggcactggtgggtacagggcccggggaccccgagctgctcacgctcaaggcggtccgggctatcgaggcggcggacctggtgctctacgacaggctggtgtctaacgacgtgttggacttggtcggggagggctccaggcttctctatgtcggcaagaccgcgggataccacagccgcacccaggaggagattcacgagctgctgctgagctttgcggaggctggtgccaatgttgtgcgcttgaaaggtggcgatcctctggtaatttgctgttgcttgcaaaactacttagtactaaaggattattgtggcacttccatttgttacccaagctcaatcaacaacgtcagacatttttttgctagtggtagtgtcataaacattgtggactaactttttcaaatgatgattcattcttggtgttgcttaagtcattttcaaatggtggattcatagaactgattgtctgatactgactagtactgttatgacttatgaccgatatgtcatggctgtcacatctgactcaccaaagcagcaggtcataaaagaacaaaagcaaactctcaggctactgtttgcctttgttacatgtggttcttgtacttggaaggaaatattattggtaggatgaaaaagatcaatcatttttaagctgttgtgtttgaagagcagtttaggtgatggatcatgtcttcatttaatctgttcagtcatcgcagaaatacttctaaactcgtaagtgtgaaagccttgcattaaccaagaaaacaaagccacttaaatcttaggaagccctgtactcctttgttttatctgtatagtagcaactgattctaaactattgtattttccattcatatttcctcaaaaggattcccaatttcccattcttattggttatttggttatgccgtctcatgtaaattccatgtggatgtatcattttagagatcccagagccatagggttgcagttgcaccttttctaataaaagatagaggcaaagaaagtagtaccaacgttgcaatttttatcactttgagcatagacagtgtttcattccacatataactctctggaattgcacttctatctgtaggcgataaatttgcttgtgttcctttcaggtttttggaaggggtggagaagagatggatttcttacagcaacagggaatcaaagttgaaattatcccaggaattacctctgcttcaggaattgcagcagaactaggcattccgctaacccatcgaggtgttgctaccaggtaagattagccttctgtaattttattctacctaactagtaactacgcaaaaaagatttcccctttaatatgcaatgcattttctaaatggattttccacaagattcaccatttcctatcaggtttttgtttaggatctgcaatactctctcgaatgcagcaattagcatgcctgcttgtggattttgtgagtatttgctgtagagttgaggctttaaatgtactagttacttgctgtaactcttaatggttcctgtttttgaccatacatgtctcattgcgtagtgaaagttcttggtattattttctgatgtcctgatgtgctatggctaatggagtagcaaatgtttttaataataaaacgctcttgcattgttaaatgagcagaaaggcgctagtttgtctctgataccttagtgtagagagataatcattcttgatgcttactagaataaatagttgagatataatcttctcttcagtgtcagatttttaactggacactccagaaatggtgggacagacccactatatgtagctggaaatgcagccgatcctgacactactttggttgtgtacatgggtttgtcaacacttgcatcacttgcaccaaagttaatgaagcacggcctgccaccagatacccctgctgttgcagtagagcgcgggactacacctcaacaacgaatggtgtttgcgttgttaaaggatcttgtggatgaagtcaagtcagctgatcttgtttctccaactctaataattatcgggaaagtggtatccttgtcaccattttgggttgagtcatctgaacatgatgccctgaaaattgagagctcgtatgcaagtgaagccagatgataatacgttttcatgattttagtgattggacaatacatacttgagtaacgcaatatcccagatatgagcagttccagttgggatccatttaggacatgcgagcacaggttcgacctggtgtacacaacatttcaggaagcatggattctgaatgacggatgatagcttaagcccataacagcctttggggtttgggcagaagcgcacttgggagttgatgagggcatgtctggaggcttcagcttcagtaaatttacggctttcaattcggtgtcttcttcgtcaaagaagactcggtagatgtatggttttcaattcaatagcacctgcaaactcctttctgactggaggtccattcggagtgcagggattttacagaaattagacaaaaaaagttctgttttttggggggaattagaaaaatctctgcttcccaagcgtagataactgtaagatttttgttgtcatctttaaaataattgtattgtttttatgtgttatattcatctttaaaaactcttggtaaaacagagcctgaagaatgaacctttaagctgaattagtgtttggtgtttggttctagagtctatgaacggcgcaactctattccagattctggggatagaatgacttcataactatttttttttgtttcatagtgaggcataacggaacggatttattctgtgtttggtctagagtgtagcaaaatagagcggcttcatcatgtgcaaatatataattttctaaccatgatccactcatacaactatttgttatggtttgccacgacactagtaaatgtagaacatga

SEQ ID NO: 73969 - DNA, 2476 bp, Zea Mays
tgccgccgacgcgtcgccacctgtgacctgtgtccgtagagcccgtgcggacagctgggaccggaggcagactcccactcgaacttgcccacctcgacggttgttctacggtttggttcattgaacctggcctggcccttcaacactccccaaggccagccaagccaaggccgccaaggggcgtccggactccggcgtctcctccttgcttctgcccagccacagcaagccctgcctcccgtcccgccctccgctctccgcctacaccttctcccgtccaagaccacacgcgcacagaaaaaagtacagctggtcagtggtcctggtcagctgctcccgtacaaaaagcgcaccacaagcggcggccaagccgtccgctgccccccgcatcgccatggctctcgccgtgcgcacgccccgcttccagcctcgaccggcctccatttctgcgcccgcaacacccgcctcgaattccctcgccgccgccgccgccgcgaacgcgaggccccgcacctgcgccggcgccgccgtccgcgcttcgcccttcaccgaggccacctcctcctcgcgctacctccgtgacgcctggtcctacgccaccgattgctcctccaactccgcatcccgttcctccgatgccgccgctgcggcggcggcgctgggccgccgggacgacgagatcgcactgcagctgccggagctgcagaggctcctggacgcgctgagggcgtccagaaggaggggcgcagagggcggcggcggcggcggccgcggacccgggagggtggcactggtgggtacagggcccggggaccccgagctgctcacgctcaaggcggtccgggctatcgaggcggcggacctggtgctctacgacaggctggtgtctaacgacgtgttggacttggtcggggagggctccaggcttctctatgtcggcaagaccgcgggataccacagccgcacccaggtgtgggagcactgttccttcgtttcaatttggaagtttacacgcgattggaaatgctagttgggcgggcattctgcaataacgatttcaagtaggtactttttcttgagcacgtgtgagacaacatccatgaagaacagagaattgaggcgacctcagcttaggacgttgtacctttccttccgctttcttggtcatttgtatgtttgatgactggttgatgcaatgtaggaggagattcacgagctgctgctgagctttgcggaggctggtgccaatgttgtgcgcttgaaaggtggcgatcctctggtttttggaaggggtggagaagagatggatttcttacagcaacagggaatcaaagttgaaattatcccaggaattacctctgcttcaggaattgcagcagaactaggcattccgctaacccatcgaggtgttgctaccagttaatgaagcacggcctgccaccagatacccctgctgttgcagtagagcgcgggactacacctcaacaacgaatggtgtttgcgttgttaaaggatcttgtggatgaagtcaagtcagctgatcttgtttctccaactctaataattatcgggaaagtggtatccttgtcaccattttgggttgagtcatctgaacatgatgccctgaaaattgagagctcgtatgcaagtgaagccagatgataatacgttttcatgattttagtgattggacaatacatacttgagtaacgcaatatcccagatatgagcagttccagttgggatccatttaggacatgcgagcacaggttcgacctggtgtacacaacatttcaggaagcatggattctgaatgacggatgatagcttaagcccataacagcctttggggtttgggcagaagcgcacttgggagttgatgagggcatgtctggaggcttcagcttcagtaaatttacggctttcaattcggtgtcttcttcgtcaaagaagactcggtagatgtatggttttcaattcaatagcacctgcaaactcctttctgactggaggtccattcggagtgcagggattttacagaaattagacaaaaaaagttctgttttttggggggaattagaaaaatctctgcttcccaagcgtagataactgtaagatttttgttgtcatctttaaaataattgtattgtttttatgtgttatattcatctttaaaaactcttggtaaaacagagcctgaagaatgaacctttaagctgaattagtgtttggtgtttggttctagagtctatgaacggcgcaactctattccagattctggggatagaatgacttcataactatttttttttgtttcatagtgaggcataacggaacggatttattctgtgtttggtctagagtgtagcaaaatagagcggcttcatcatgtgcaaatatataattttctaaccatgatccactcatacaactatttgttatggtttgccacgacactagtaaatgtagaacatga

SEQ ID NO: 73970 - DNA, 2145 bp, Zea Mays
atgattcattcttggtgttgcttaagtcattttcaaatggtggattcatagaactgattgtctgatactgactagtactgttatgacttatgaccgatatgtcatggctgtcacatctgactcaccaaagcagcaggtcataaaagaacaaaagcaaactctcaggctactgtttgcctttgttacatgtggttcttgtacttggaaggaaatattattggtaggatgaaaaagatcaatcatttttaagctgttgtgtttgaagagcagtttaggtgatggatcatgtcttcatttaatctgttcagtcatcgcagaaatacttctaaactcgtttttggaaggggtggagaagagatggatttcttacagcaacagggaatcaaagttgaaattatcccaggaattacctctgcttcaggaattgcagcagaactaggcattccgctaacccatcgaggtgttgctaccaggtaagattagccttctgtaattttattctacctaactagtaactacgcaaaaaagatttcccctttaatatgcaatgcattttctaaatggattttccacaagattcaccatttcctatcaggtttttgtttaggatctgcaatactctctcgaatgcagcaattagcatgcctgcttgtggattttgtgagtatttgctgtagagttgaggctttaaatgtactagttacttgctgtaactcttaatggttcctgtttttgaccatacatgtctcattgcgtagtgaaagttcttggtattattttctgatgtcctgatgtgctatggctaatggagtagcaaatgtttttaataataaaacgctcttgcattgttaaatgagcagaaaggcgctagtttgtctctgataccttagtgtagagagataatcattcttgatgcttactagaataaatagttgagatataatcttctcttcagtgtcagatttttaactggacactccagaaatggtgggacagacccactatatgtagctggaaatgcagccgatcctgacactactttggttgtgtacatgggtttgtcaacacttgcatcacttgcaccaaagttaatgaagcacggcctgccaccagatacccctgctgttgcagtagagcgcgggactacacctcaacaacgaatggtgtttgcgttgttaaaggatcttgtggatgaagtcaagtcagctgatcttgtttctccaactctaataattatcgggaaagtggtatccttgtcaccattttgggttgagtcatctgaacatgatgccctgaaaattgagagctcgtatgcaagtgaagccagatgataatacgttttcatgattttagtgattggacaatacatacttgagtaacgcaatatcccagatatgagcagttccagttgggatccatttaggacatgcgagcacaggttcgacctggtgtacacaacatttcaggaagcatggattctgaatgacggatgatagcttaagcccataacagcctttggggtttgggcagaagcgcacttgggagttgatgagggcatgtctggaggcttcagcttcagtaaatttacggctttcaattcggtgtcttcttcgtcaaagaagactcggtagatgtatggttttcaattcaatagcacctgcaaactcctttctgactggaggtccattcggagtgcagggattttacagaaattagacaaaaaaagttctgttttttggggggaattagaaaaatctctgcttcccaagcgtagataactgtaagatttttgttgtcatctttaaaataattgtattgtttttatgtgttatattcatctttaaaaactcttggtaaaacagagcctgaagaatgaacctttaagctgaattagtgtttggtgtttggttctagagtctatgaacggcgcaactctattccagattctggggatagaatgacttcataactatttttttttgtttcatagtgaggcataacggaacggatttattctgtgtttggtctagagtgtagcaaaatagagcggcttcatcatgtgcaaatatataattttctaaccatgatccactcatacaactatttgttatggtttgccacgacactagtaaatgtagaacatga

SEQ ID NO: 73971 - DNA, 1388 bp, Zea Mays
aaagaacaaaagcaaactctcaggctactgtttgcctttgttacatgtggttcttgtacttggaaggaaatattattggtaggatgaaaaagatcaatcatttttaagctgttgtgtttgaagagcagtttaggtgatggatcatgtcttcatttaatctgttcagtcatcgcagaaatacttctaaactcgtttttggaaggggtggagaagagatggatttcttacagcaacagggaatcaaagttgaaattatcccaggaattacctctgcttcaggaattgcagcagaactaggcattccgctaacccatcgaggtgttgctaccagttaatgaagcacggcctgccaccagatacccctgctgttgcagtagagcgcgggactacacctcaacaacgaatggtgtttgcgttgttaaaggatcttgtggatgaagtcaagtcagctgatcttgtttctccaactctaataattatcgggaaagtggtatccttgtcaccattttgggttgagtcatctgaacatgatgccctgaaaattgagagctcgtatgcaagtgaagccagatgataatacgttttcatgattttagtgattggacaatacatacttgagtaacgcaatatcccagatatgagcagttccagttgggatccatttaggacatgcgagcacaggttcgacctggtgtacacaacatttcaggaagcatggattctgaatgacggatgatagcttaagcccataacagcctttggggtttgggcagaagcgcacttgggagttgatgagggcatgtctggaggcttcagcttcagtaaatttacggctttcaattcggtgtcttcttcgtcaaagaagactcggtagatgtatggttttcaattcaatagcacctgcaaactcctttctgactggaggtccattcggagtgcagggattttacagaaattagacaaaaaaagttctgttttttggggggaattagaaaaatctctgcttcccaagcgtagataactgtaagatttttgttgtcatctttaaaataattgtattgtttttatgtgttatattcatctttaaaaactcttggtaaaacagagcctgaagaatgaacctttaagctgaattagtgtttggtgtttggttctagagtctatgaacggcgcaactctattccagattctggggatagaatgacttcataactatttttttttgtttcatagtgaggcataacggaacggatttattctgtgtttggtctagagtgtagcaaaatagagcggcttcatcatgtgcaaatatataattttctaaccatgatccactcatacaactatttgttatggtttgccacgacactagtaaatgtagaacatga

SEQ ID NO: 73972 - DNA, 2602 bp, Zea Mays
aaatagtggagtagtggaccctggttggcctaatctggcaggtgactgatggatggcttgggaccaaacccaacatgtgcgcagattcctagacatctatccagtcaggcagtcacccacgtcgaggcatcgaatcgccgaccgcagaggatccgcggaagcccgggggaattcgatgagcggcgacagctgtgacccggcttgcaaccaagaaccatccgacctggccaattaaaaaaattgcggaagacaacaacgaaaccagccgcagcgcagaattgctgagacgaggcgaagcgggttggccgaggtcgaggccgggaatggtggcgggtggcggcgtggcaaaagctactgctctgctctgctcgctgcccgctcccagagtctgatccaaacgcctcgctggtgtcatgctgatgcgccctcccctcagttaactattctactcttctgctctgtcagcagaccacgagacgcgcgcgcgaaactcttctctctcctttgcgcacctctttcgtcgtcgtcgtcgtcgatcttcctccgggagaagacttcatctgcacgtgctgctgatgtgcattagaggatccgtgctgataatatacagctgacacccacaagatcgactggataagttcgagcctgacggcatcatgggttccggcgatttgagctcggagatggagaggacggttcttggcctgacgctgtgggtctggattgccatcggcgtggtcgcgcttctcgtggcaatcctgctgatgatctgcatttgggtggcgtcccgcctgaggaccaagagaaccatggacagcctgaggcagacgcagatccccatctactccaaggagatccccatcgaccgggtcggcgggcgcagcctggcacagacaatgcatgagcgcgagcagccgagcttgccgccgccggacaagtacgcgaaccgggagccggccggggcggctgtggggcacctggcactcagcaagtcctcggatcatgacaacatgagccaggggagctcggtttgcaatgctgaccgtgctggcactggcagcatgcactccggtgaggatgggagctcaggacctcggaggaaacccaactctcctgcggcgttcgtgtcagcttcgcccttggttggccttccggagttctcgcatcttggttggggtcactggtttactcagcgtgaccttgaacttgctaccaaccgcttctctaaggagaatgtgctcggggagggtggttatggagttgtgtaccgtggacgtctggtgaatggaactgaagtcgcaataaaaaagatctttaacaacatggggcaggcagaaaaagaattcagagtggaagttgaggctattggccatgtccgacataagaatttggttcggctgttgggatattgtgttgagggcgtaaacaggatgctagtatatgagttcgtgaacaatggtaatttagagcagtggcttcatggagctatgcatcagcgtggtgtttttagctgggaaaatcgcatgaaggttgtaacaggcactgcaaaagcgcttgcttaccttcatgaagctattgagccaaaagttgtacatcgagatataaaatcaagcaacatattgattgatgatgaatttaatggcaaagtatctgactttggattggctaaacttttgggatcagacaaaagccacattactactagagtgatgggaacatttggatatgttgcacctgaatatgctaatactggaatgttaaatgaaaagagtgacgtttacagttttggcgttctcttgttagaaactgtgacaggaaggaatcctgttgactacagccgatcttccaatgaggtcaatcttgttgaatggcttaaaacaatggtggccaatcggagggcagaggaagtggctgatccaagcttagaggctagacccagtatccgggctctcaagcgggctcttttggtggcactgaggtgtgttgatcctgactctgaaaagagacctaagatgggccaggttgttaggatgcttgagtcagaagaagtaccataccgggaggatcggagaaatcgtagaagtcgcactggaagcatggatattgagtccattgcagagggttccaactctgcggagtttggaaagaaggtagaaaggactggaagctctatatctgacagatctcaaccatgaggcctggaaatctaagctatatcaggaactgtctcagaaacgatgttaatcaccaaggtgattgctgtcctgataggggatgctggtaggtgacagaggcaaggcaggcccaggtattactgcctaagtattaggctttagttttcaggtgcagtagaagcattcttggatgaggaacctcctggtctcctcttatttgtataggtatatgttggtgcctgaggaattcctcttggtttgggtgtttaacatttgttcggttcttttatttcttgcattgttgccttcttaaatcagtttcacttctccctgatgaaatgctgaacatgaggttgtggacttgtggtcttagcgatactgcttgtcattgtttttcatatgtttacctgcggcctgctctaccttat

SEQ ID NO: 73973 - DNA, 2509 bp, Zea Mays
aggatccgcggaagcccgggggaattcgatgagcggcgacagctgtgacccggcttgcaaccaagaaccatccgacctggccaattaaaaaaattgcggaagacaacaacgaaaccagccgcagcgcagaattgctgagacgaggcgaagcgggttggccgaggtcgaggccgggaatggtggcgggtggcggcgtggcaaaagctactgctctgctctgctcgctgcccgctcccagagtctgatccaaacgcctcgctggtgtcatgctgatgcgccctcccctcagttaactattctactcttctgctctgtcagcagaccacgagacgcgcgcgcgaaactcttctctctcctttgcgcacctctttcgtcgtcgtcgtcgtcgatcttcctccggttctttgcttgtgggatgagtggaaggaaggccggtcctcgctgcagaaagagggagaagacttcatctgcacgtgctgctgatgtgcattagaggatccgtgctgataatatacagctgacacccacaagatcgactggataagttcgagcctgacggcatcatgggttccggcgatttgagctcggagatggagaggacggttcttggcctgacgctgtgggtctggattgccatcggcgtggtcgcgcttctcgtggcaatcctgctgatgatctgcatttgggtggcgtcccgcctgaggaccaagagaaccatggacagcctgaggcagacgcagatccccatctactccaaggagatccccatcgaccgggtcggcgggcgcagcctggcacagacaatgcatgagcgcgagcagccgagcttgccgccgccggacaagtacgcgaaccgggagccggccggggcggctgtggggcacctggcactcagcaagtcctcggatcatgacaacatgagccaggggagctcggtttgcaatgctgaccgtgctggcactggcagcatgcactccggtgaggatgggagctcaggacctcggaggaaacccaactctcctgcggcgttcgtgtcagcttcgcccttggttggccttccggagttctcgcatcttggttggggtcactggtttactcagcgtgaccttgaacttgctaccaaccgcttctctaaggagaatgtgctcggggagggtggttatggagttgtgtaccgtggacgtctggtgaatggaactgaagtcgcaataaaaaagatctttaacaacatggggcaggcagaaaaagaattcagagtggaagttgaggctattggccatgtccgacataagaatttggttcggctgttgggatattgtgttgagggcgtaaacaggatgctagtatatgagttcgtgaacaatggtaatttagagcagtggcttcatggagctatgcatcagcgtggtgtttttagctgggaaaatcgcatgaaggttgtaacaggcactgcaaaagcgcttgcttaccttcatgaagctattgagccaaaagttgtacatcgagatataaaatcaagcaacatattgattgatgatgaatttaatggcaaagtatctgactttggattggctaaacttttgggatcagacaaaagccacattactactagagtgatgggaacatttggatatgttgcacctgaatatgctaatactggaatgttaaatgaaaagagtgacgtttacagttttggcgttctcttgttagaaactgtgacaggaaggaatcctgttgactacagccgatcttccaatgaggtcaatcttgttgaatggcttaaaacaatggtggccaatcggagggcagaggaagtggctgatccaagcttagaggctagacccagtatccgggctctcaagcgggctcttttggtggcactgaggtgtgttgatcctgactctgaaaagagacctaagatgggccaggttgttaggatgcttgagtcagaagaagtaccataccgggaggatcggagaaatcgtagaagtcgcactggaagcatggatattgagtccattgcagagggttccaactctgcggagtttggaaagaaggtagaaaggactggaagctctatatctgacagatctcaaccatgaggcctggaaatctaagctatatcaggaactgtctcagaaacgatgttaatcaccaaggtgattgctgtcctgataggggatgctggtaggtgacagaggcaaggcaggcccaggtattactgcctaagtattaggctttagttttcaggtgcagtagaagcattcttggatgaggaacctcctggtctcctcttatttgtataggtatatgttggtgcctgaggaattcctcttggtttgggtgtttaacatttgttcggttcttttatttcttgcattgttgccttcttaaatcagtttcacttctccctgatgaaatgctgaacatgaggttgtggacttgtggtcttagcgatactgcttgtcattgtttttcatatgtttacctgcggcctgctctaccttat

SEQ ID NO: 73974 - DNA, 2416 bp, Zea Mays
ggaagacaacaacgaaaccagccgcagcgcagaattgctgagacgaggcgaagcgggttggccgaggtcgaggccgggaatggtggcgggtggcggcgtggcaaaagctactgctctgctctgctcgctgcccgctcccagagtctgatccaaacgcctcgctggtgtcatgctgatgcgccctcccctcagttaactattctactcttctgctctgtcagcagaccacgagacgcgcgcgcgaaactcttctctctcctttgcgcacctctttcgtcgtcgtcgtcgtcgatcttcctccgtcaggttctttgcttgtgggatgagtggaaggaaggccggtcctcgctgcagaaagagggagaagacttcatctgcacgtgctgctgatgtgcattagaggatccgtgctgataatatacagctgacacccacaagatcgactggataagttcgagcctgacggcatcatgggttccggcgatttgagctcggagatggagaggacggttcttggcctgacgctgtgggtctggattgccatcggcgtggtcgcgcttctcgtggcaatcctgctgatgatctgcatttgggtggcgtcccgcctgaggaccaagagaaccatggacagcctgaggcagacgcagatccccatctactccaaggagatccccatcgaccgggtcggcgggcgcagcctggcacagacaatgcatgagcgcgagcagccgagcttgccgccgccggacaagtacgcgaaccgggagccggccggggcggctgtggggcacctggcactcagcaagtcctcggatcatgacaacatgagccaggggagctcggtttgcaatgctgaccgtgctggcactggcagcatgcactccggtgaggatgggagctcaggacctcggaggaaacccaactctcctgcggcgttcgtgtcagcttcgcccttggttggccttccggagttctcgcatcttggttggggtcactggtttactcagcgtgaccttgaacttgctaccaaccgcttctctaaggagaatgtgctcggggagggtggttatggagttgtgtaccgtggacgtctggtgaatggaactgaagtcgcaataaaaaagatctttaacaacatggggcaggcagaaaaagaattcagagtggaagttgaggctattggccatgtccgacataagaatttggttcggctgttgggatattgtgttgagggcgtaaacaggatgctagtatatgagttcgtgaacaatggtaatttagagcagtggcttcatggagctatgcatcagcgtggtgtttttagctgggaaaatcgcatgaaggttgtaacaggcactgcaaaagcgcttgcttaccttcatgaagctattgagccaaaagttgtacatcgagatataaaatcaagcaacatattgattgatgatgaatttaatggcaaagtatctgactttggattggctaaacttttgggatcagacaaaagccacattactactagagtgatgggaacatttggatatgttgcacctgaatatgctaatactggaatgttaaatgaaaagagtgacgtttacagttttggcgttctcttgttagaaactgtgacaggaaggaatcctgttgactacagccgatcttccaatgaggtcaatcttgttgaatggcttaaaacaatggtggccaatcggagggcagaggaagtggctgatccaagcttagaggctagacccagtatccgggctctcaagcgggctcttttggtggcactgaggtgtgttgatcctgactctgaaaagagacctaagatgggccaggttgttaggatgcttgagtcagaagaagtaccataccgggaggatcggagaaatcgtagaagtcgcactggaagcatggatattgagtccattgcagagggttccaactctgcggagtttggaaagaaggtagaaaggactggaagctctatatctgacagatctcaaccatgaggcctggaaatctaagctatatcaggaactgtctcagaaacgatgttaatcaccaaggtgattgctgtcctgataggggatgctggtaggtgacagaggcaaggcaggcccaggtattactgcctaagtattaggctttagttttcaggtgcagtagaagcattcttggatgaggaacctcctggtctcctcttatttgtataggtatatgttggtgcctgaggaattcctcttggtttgggtgtttaacatttgttcggttcttttatttcttgcattgttgccttcttaaatcagtttcacttctccctgatgaaatgctgaacatgaggttgtggacttgtggtcttagcgatactgcttgtcattgtttttcatatgtttacctgcggcctgctctaccttat

SEQ ID NO: 73975 - DNA, 2556 bp, Zea Mays
cgaaaccagccgcagcgcagaattgctgagacgaggcgaagcgggttggccgaggtcgaggccgggaatggtggcgggtggcggcgtggcaaaagctactgctctgctctgctcgctgcccgctcccagagtctgatccaaacgcctcgctggtgtcatgctgatgcgccctcccctcagttaactattctactcttctgctctgtcagcagaccacgagacgcgcgcgcgaaactcttctctctcctttgcgcacctctttcgtcgtcgtcgtcgtcgatcttcctccgccattaatgccaccacctgctatacatcactaccttcctcttccctcccgcagtctccgacctctctctctcctctctctttctttttctctctctccctcgctttttctgctgtctatccccgcgccgcgcgaggttgctgccttggccttgctggttctttgcttgtgggatgagtggaaggaaggccggtcctcgctgcagaaagagggagaagacttcatctgcacgtgctgctgatgtgcattagaggatccgtgctgataatatacagctgacacccacaagatcgactggataagttcgagcctgacggcatcatgggttccggcgatttgagctcggagatggagaggacggttcttggcctgacgctgtgggtctggattgccatcggcgtggtcgcgcttctcgtggcaatcctgctgatgatctgcatttgggtggcgtcccgcctgaggaccaagagaaccatggacagcctgaggcagacgcagatccccatctactccaaggagatccccatcgaccgggtcggcgggcgcagcctggcacagacaatgcatgagcgcgagcagccgagcttgccgccgccggacaagtacgcgaaccgggagccggccggggcggctgtggggcacctggcactcagcaagtcctcggatcatgacaacatgagccaggggagctcggtttgcaatgctgaccgtgctggcactggcagcatgcactccggtgaggatgggagctcaggacctcggaggaaacccaactctcctgcggcgttcgtgtcagcttcgcccttggttggccttccggagttctcgcatcttggttggggtcactggtttactcagcgtgaccttgaacttgctaccaaccgcttctctaaggagaatgtgctcggggagggtggttatggagttgtgtaccgtggacgtctggtgaatggaactgaagtcgcaataaaaaagatctttaacaacatggggcaggcagaaaaagaattcagagtggaagttgaggctattggccatgtccgacataagaatttggttcggctgttgggatattgtgttgagggcgtaaacaggatgctagtatatgagttcgtgaacaatggtaatttagagcagtggcttcatggagctatgcatcagcgtggtgtttttagctgggaaaatcgcatgaaggttgtaacaggcactgcaaaagcgcttgcttaccttcatgaagctattgagccaaaagttgtacatcgagatataaaatcaagcaacatattgattgatgatgaatttaatggcaaagtatctgactttggattggctaaacttttgggatcagacaaaagccacattactactagagtgatgggaacatttggatatgttgcacctgaatatgctaatactggaatgttaaatgaaaagagtgacgtttacagttttggcgttctcttgttagaaactgtgacaggaaggaatcctgttgactacagccgatcttccaatgaggtcaatcttgttgaatggcttaaaacaatggtggccaatcggagggcagaggaagtggctgatccaagcttagaggctagacccagtatccgggctctcaagcgggctcttttggtggcactgaggtgtgttgatcctgactctgaaaagagacctaagatgggccaggttgttaggatgcttgagtcagaagaagtaccataccgggaggatcggagaaatcgtagaagtcgcactggaagcatggatattgagtccattgcagagggttccaactctgcggagtttggaaagaaggtagaaaggactggaagctctatatctgacagatctcaaccatgaggcctggaaatctaagctatatcaggaactgtctcagaaacgatgttaatcaccaaggtgattgctgtcctgataggggatgctggtaggtgacagaggcaaggcaggcccaggtattactgcctaagtattaggctttagttttcaggtgcagtagaagcattcttggatgaggaacctcctggtctcctcttatttgtataggtatatgttggtgcctgaggaattcctcttggtttgggtgtttaacatttgttcggttcttttatttcttgcattgttgccttcttaaatcagtttcacttctccctgatgaaatgctgaacatgaggttgtggacttgtggtcttagcgatactgcttgtcattgtttttcatatgtttacctgcggcctgctctaccttat

SEQ ID NO: 73976 - DNA, 226 bp, Zea Mays
gggggattcatgcatgcaaggtgaagaaggaaagacgagcgggcgaaaggcaaaacttgttcatttaacaaagcaccgcgagcagcctcggctcactgcctggtggtggtaccggtggtggctgcgttgctcgctcacttcacagccaccgcagcgccggcgatcgccgtgccgtcttccccgccggcgtcgtcggcggtacgggcgatcagcgactcctcgcggt

SEQ ID NO: 73977 - DNA, 3321 bp, Zea Mays
cttgcgcgcacgtgagttggggccacaaatcccaatcactttccatctcgttttcgcctaaaatcctgacaaacagtagcgtggccggctctggagtttgctatttaaacccgtttcctctcttccccctcctcacaatcacaggcctcccggcctcccgtgcgctattctctatcagcttacccagcacacagtacacactctaatctccacacgacccaatagatatacggggctgaaggatgaagcttagagcaaaagggatcggcctcctgcttctccttgtcttgcttgctctttgctccaccattgaagtcggcgaggcaagaagaggcaagcattggaggtcgtcgaggagctcaccgggctcatcccagctcaagaaaggcaagggaaagaagagcagctcccaccggcagtacggcgccaaccggccaggtccgaagccaccggtcagctcgacaccaagctctggcgctggcaagggaaatcatcagaatccgtaccaaccaagcccaagtccaagcccgaatgcccctgacatccctcctatgccaagccctgccaatggcagcaggcattccactcccgagccgccggctccaagctgtgggaagggtcagcagcagccatcacagccgccgccagcgacctcgcagggtgcagtattcaatgtggttgattttggagccaagggtgacggagttacagacgatactaaggcttttgaaggagcgtgggctgctgcctgcaaaaagggggcatgtacagttctcgtaccaccagaactagagttcctagttgggccaatctcgttctctgggccttactgcaaatcgaatattgtctttcagctggaaggaacaatcctagctccaaccagtgctaaatcctggggttcaggcttgctccagtggctcgagttcaccaaactaaatggaatggttattcaagggaacggcattataaatggcagagggcaacaatggtggacctactcagacacagaagacgaggatgatgatgacacgtacgatgtggagtttgaaagaatgccacagattaaacctacagcattgaggttttatggtagtttcaacgttgtagtggctggtatcactattgtcaacagctcacagtgtcatcttaagtttgacaactgtcaaggagtgatggtccatgacttgactatatcctcccctgagaacagtctcaacactgacggaatacaccttgttcaggaatctctcttaccggtgtgcaactcagaccagtgcaagtaccccactaccacctgaataacccattctgctggcaagcttttggggagctctacactccaactgtccctcctatagcttgcttgcagattggaaaacctgctggcaataacttacagtcatatgatgacatatgctgaaacactcaaagtgcctttgtttgttgattggtgcttatccatgagtggtcgttgtgatagatgcgaccccatttgcaccattgcttgctgatgagcacatatacagttattttgaggtcatcttattacaacattgtagcttttttcatcaaagtaaacataaatatattcatttgaaatggtcatacagcaacagtatgtacttgagttctccaaaaatgagtaaacataatgacaattgtttatttaaataagtgtaaacagggctatggcaaagggtccaactataaattgataaacaacatgggcgtacatttacaactataatgatagctaatcctgaagaatgagattaataattagaagtcaatgtctaagggtaagatctcttggatcaaatacggaaagaaaatgattgctcggaaaaactagacaatgtttagaaaaatgagtaagcataatagtcagtttctagttaacaaatatgacatattgcactgcacgaatatgattaccatagagataacacttaggaaaggggctattgatgtgtttagctgaaataattatgaaaaatggcaataaaaatgttctgtaaatatgcagaaagaggaaataactaatcaaaagaacatgatatttagaaatcaattccaatgtaaacaacatccatatgcatattttttttttgctttgttttctagaacctcagctaaataataaaacaaagcagcataaaaatagtaaatatgtaaggtcctgcaatcggttactaacttcatattcgttaacacattatgaggaagaaggaaactgaaagcaagatttagaattgtgaaagatattgtaccagttagaaaaagataaaacatagcatatctttttttctgtgcctttcttaattttttcaactaaacatagtatacctatgtgtcgccagctgtctattatcaagaaaaagtatgaattggtcaagaattttccctctaccattcatcttattgtctccactcacactggttgccaaaattcttgaagctctaatccatcaatcaatatttaaaacttacataatcgtaggtagaagggtagacctggtaggctggtacagtggtgagagatatctcactaagtcagcagtttgcggtttcaaagcagcctctctgcattagcgaagggaaagcttgcctcggtttatcccttccccagatccgacttatgtggggggcctttggcactcggtctgccatgcccttagataatcgtaggtctagtgccatggaactggaagtcttcctaacttcctattgattaatctaaggtcacatatgttacatacttacacggaagttcaatataacttaaacactgatggccataattcgaaagttttgggaagatggtgatgtccaattgttagtggactacgtcatctgcagtccatactgccattgcacgcttgtccaacagtcgaccagccaacaaaatcgatgtggcatatgaaggttatatcatacaaacaaaaaactgatcaagtacaaaaatgcaagctctcaccatgaattggaacatgaaaataaaccacatccattaactctgatttggggatactagcaatgccaatttgacaaagaacatcacccactgtttgcgtcccataaatcaaacaggtgataaatctttatattttgatcccagggagggggtgatttacccaataaaagatgcagcctaactaatcctgtcactgaaacatgatgcatttgcatgttgtaagggccagctacagatttatctcattgttactttgttagaaattttgtgtctcagtggtacgtttattaagactgagacaaagaacacacaaaattttttgaaaaggagaaaacaggcagtacaat

SEQ ID NO: 73978 - DNA, 4473 bp, Zea Mays
cttgcgcgcacgtgagttggggccacaaatcccaatcactttccatctcgttttcgcctaaaatcctgacaaacagtagcgtggccggctctggagtttgctatttaaacccgtttcctctcttccccctcctcacaatcacaggcctcccggcctcccgtgcgctattctctatcagcttacccagcacacagtacacactctaatctccacacgacccaatagatatacggggctgaaggatgaagcttagagcaaaagggatcggcctcctgcttctccttgtcttgcttgctctttgctccaccattgaagtcggcgaggcaagaagaggcaagcattggaggtcgtcgaggagctcaccgggctcatcccagctcaagaaaggcaagggaaagaagagcagctcccaccggcagtacggcgccaaccggccaggtccgaagccaccggtcagctcgacaccaagctctggcgctggcaagggaaatcatcagaatccgtaccaaccaagcccaagtccaagcccgaatgcccctgacatccctcctatgccaagccctgccaatggcagcaggcattccactcccgagccgccggctccaagctgtgggaagggtcagcagcagccatcacagccgccgccagcgacctcgcagggtgcagtattcaatgtggttgattttggagccaagggtgacggagttacagacgatactaaggcttttgaaggagcgtgggctgctgcctgcaaaaagggggcatgtacagttctcgtaccaccagaactagagttcctagttgggccaatctcgttctctgggccttactgcaaatcgaatattgtctttcagctggaaggaacaatcctagctccaaccagtgctaaatcctggggttcaggcttgctccagtggctcgagttcaccaaactaaatggaatggttattcaagggaacggcattataaatggcagagggcaacaatggtggacctactcagacacagaagacgaggatgatgatgacacgtacgatgtggagtttgaaagaatgccacagattaaacctacagcattgaggttttatggtagtttcaacgttgtagtggctggtatcactattgtcaacagctcacagtgtcatcttaagtttgacaactgtcaaggagtgatggtccatgacttgactatatcctcccctgagaacagtctcaacactgacggaatacacctgcagaactccaaagatgtcagcattcatcatacaaacctggcttgtggtaattccttaatccttactgtatgtctaagggggtgtttgaatgcactagagctaatatttagtggctaaaattagttgagacatccaaacatcatagctaataattcaactattagctatttttggtaaattggttaatagttgggtagttaattgttagctagataattccactaacaatttttaaccaactaactattatttctagtgcattcaaacactaactattagctcaaaagtttgtttcgcaaagctttacaacaaagacccatttccataaagaacaccaaataaataagacattatccacacaaaaaattacaaataaatatgtagggtcaaccaaaagcctgcatctcagttctgttacgcatgtatactctgcacttcaaaggacatgtttcagagttaagactacactgaaaaactgctgtggagtatcataacatcgttttgtcctattcgatgcaggtgacgattgcatctccatccagacaggatgcagcaacataaatatacataacgtgaattgtggaccaggccatggaatcagcataggtggactaggccgagacaacacaaaagcatgcgtatcaaatgttacagtaagagatgtcaacatgttcagaaccatgaatggtgtcagaatcaagacctggcaggtaagcttgagaacataagtacaaataaaattctaattctaattcaacatccggcattagtacataatagttaataatgtcacaaaagaaaatctgaaaaaggaaagaaaacgtacatgtcatcgtttgctatctatacaagcaataaccttgaaaagttcaaagaagaaaaatgatgtcacccaaaacaattcctagtgtctaaacaaagtgaactctcatttctcgcagggtggtgtaggattggttcaagacataaggttctcaaatatacaagtctcagaggttcaaacacccatcatcatagatcagttttattgtgacagaagcacttgcagaaatcaaacatcagcagtggcagtatcaggggttcaatatgagaatatcagaggaacatttacaatcaaacctgtccattttgcatgcagtgacagcttaccttgttcaggaatctctcttaccggtgtgcaactcagaccagtgcaagtaccccactaccacctgaataacccattctgctggcaagcttttggggagctctacactccaactgtccctcctatagcttgcttgcagattggaaaacctgctggcaataacttacagtcatatgatgacatatgctgaaacactcaaagtgcctttgtttgttgattggtgcttatccatgagtggtcgttgtgatagatgcgaccccatttgcaccattgcttgctgatgagcacatatacagttattttgaggtcatcttattacaacattgtagcttttttcatcaaagtaaacataaatatattcatttgaaatggtcatacagcaacagtatgtacttgagttctccaaaaatgagtaaacataatgacaattgtttatttaaataagtgtaaacagggctatggcaaagggtccaactataaattgataaacaacatgggcgtacatttacaactataatgatagctaatcctgaagaatgagattaataattagaagtcaatgtctaagggtaagatctcttggatcaaatacggaaagaaaatgattgctcggaaaaactagacaatgtttagaaaaatgagtaagcataatagtcagtttctagttaacaaatatgacatattgcactgcacgaatatgattaccatagagataacacttaggaaaggggctattgatgtgtttagctgaaataattatgaaaaatggcaataaaaatgttctgtaaatatgcagaaagaggaaataactaatcaaaagaacatgatatttagaaatcaattccaatgtaaacaacatccatatgcatattttttttttgctttgttttctagaacctcagctaaataataaaacaaagcagcataaaaatagtaaatatgtaaggtcctgcaatcggttactaacttcatattcgttaacacattatgaggaagaaggaaactgaaagcaagatttagaattgtgaaagatattgtaccagttagaaaaagataaaacatagcatatctttttttctgtgcctttcttaattttttcaactaaacatagtatacctatgtgtcgccagctgtctattatcaagaaaaagtatgaattggtcaagaattttccctctaccattcatcttattgtctccactcacactggttgccaaaattcttgaagctctaatccatcaatcaatatttaaaacttacataatcgtaggtagaagggtagacctggtaggctggtacagtggtgagagatatctcactaagtcagcagtttgcggtttcaaagcagcctctctgcattagcgaagggaaagcttgcctcggtttatcccttccccagatccgacttatgtggggggcctttggcactcggtctgccatgcccttagataatcgtaggtctagtgccatggaactggaagtcttcctaacttcctattgattaatctaaggtcacatatgttacatacttacacggaagttcaatataacttaaacactgatggccataattcgaaagttttgggaagatggtgatgtccaattgttagtggactacgtcatctgcagtccatactgccattgcacgcttgtccaacagtcgaccagccaacaaaatcgatgtggcatatgaaggttatatcatacaaacaaaaaactgatcaagtacaaaaatgcaagctctcaccatgaattggaacatgaaaataaaccacatccattaactctgatttggggatactagcaatgccaatttgacaaagaacatcacccactgtttgcgtcccataaatcaaacaggtgataaatctttatattttgatcccagggagggggtgatttacccaataaaagatgcagcctaactaatcctgtcactgaaacatgatgcatttgcatgttgtaagggccagctacagatttatctcattgttactttgttagaaattttgtgtctcagtggtacgtttattaagactgagacaaagaacacacaaaattttttgaaaaggagaaaacaggcagtacaat

SEQ ID NO: 73979 - DNA, 3769 bp, Zea Mays
cttgcgcgcacgtgagttggggccacaaatcccaatcactttccatctcgttttcgcctaaaatcctgacaaacagtagcgtggccggctctggagtttgctatttaaacccgtttcctctcttccccctcctcacaatcacaggcctcccggcctcccgtgcgctattctctatcagcttacccagcacacagtacacactctaatctccacacgacccaatagatatacggggctgaaggatgaagcttagagcaaaagggatcggcctcctgcttctccttgtcttgcttgctctttgctccaccattgaagtcggcgaggcaagaagaggcaagcattggaggtcgtcgaggagctcaccgggctcatcccagctcaagaaaggcaagggaaagaagagcagctcccaccggcagtacggcgccaaccggccaggtccgaagccaccggtcagctcgacaccaagctctggcgctggcaagggaaatcatcagaatccgtaccaaccaagcccaagtccaagcccgaatgcccctgacatccctcctatgccaagccctgccaatggcagcaggcattccactcccgagccgccggctccaagctgtgggaagggtcagcagcagccatcacagccgccgccagcgacctcgcagggtgcagtattcaatgtggttgattttggagccaagggtgacggagttacagacgatactaaggcttttgaaggagcgtgggctgctgcctgcaaaaagggggcatgtacagttctcgtaccaccagaactagagttcctagttgggccaatctcgttctctgggccttactgcaaatcgaatattgtctttcagctggaaggaacaatcctagctccaaccagtgctaaatcctggggttcaggcttgctccagtggctcgagttcaccaaactaaatggaatggttattcaagggaacggcattataaatggcagagggcaacaatggtggacctactcagacacagaagacgaggatgatgatgacacgtacgatgtggagtttgaaagaatgccacagattaaacctacagcattgaggttttatggtagtttcaacgttgtagtggctggtatcactattgtcaacagctcacagtgtcatcttaagtttgacaactgtcaaggagtgatggtccatgacttgactatatcctcccctgagaacagtctcaacactgacggaatacacctgcagaactccaaagatgtcagcattcatcatacaaacctggcttgtggtgacgattgcatctccatccagacaggatgcagcaacataaatatacataacgtgaattgtggaccaggccatggaatcagcataggtggactaggccgagacaacacaaaagcatgcgtatcaaatgttacagtaagagatgtcaacatgttcagaaccatgaatggtgtcagaatcaagacctggcagggtggtgtaggattggttcaagacataaggttctcaaatatacaagtctcagaggttcaaacacccatcatcatagatcagttttattgtgacagaagcacttgcagaaatcaaacatcagcagtggcagtatcaggggttcaatatgagaatatcagaggaacatttacaatcaaacctgtccattttgcatgcagtgacagcttaccttgttcaggaatctctcttaccggtgtgcaactcagaccagtgcaagtaccccactaccacctgaataacccattctgctggcaagcttttggggagctctacactccaactgtccctcctatagcttgcttgcagattggaaaacctgctggcaataacttacagtcatatgatgacatatgctgaaacactcaaagtgcctttgtttgttgattggtgcttatccatgagtggtcgttgtgatagatgcgaccccatttgcaccattgcttgctgatgagcacatatacagttattttgaggtcatcttattacaacattgtagcttttttcatcaaagtaaacataaatatattcatttgaaatggtcatacagcaacagtatgtacttgagttctccaaaaatgagtaaacataatgacaattgtttatttaaataagtgtaaacagggctatggcaaagggtccaactataaattgataaacaacatgggcgtacatttacaactataatgatagctaatcctgaagaatgagattaataattagaagtcaatgtctaagggtaagatctcttggatcaaatacggaaagaaaatgattgctcggaaaaactagacaatgtttagaaaaatgagtaagcataatagtcagtttctagttaacaaatatgacatattgcactgcacgaatatgattaccatagagataacacttaggaaaggggctattgatgtgtttagctgaaataattatgaaaaatggcaataaaaatgttctgtaaatatgcagaaagaggaaataactaatcaaaagaacatgatatttagaaatcaattccaatgtaaacaacatccatatgcatattttttttttgctttgttttctagaacctcagctaaataataaaacaaagcagcataaaaatagtaaatatgtaaggtcctgcaatcggttactaacttcatattcgttaacacattatgaggaagaaggaaactgaaagcaagatttagaattgtgaaagatattgtaccagttagaaaaagataaaacatagcatatctttttttctgtgcctttcttaattttttcaactaaacatagtatacctatgtgtcgccagctgtctattatcaagaaaaagtatgaattggtcaagaattttccctctaccattcatcttattgtctccactcacactggttgccaaaattcttgaagctctaatccatcaatcaatatttaaaacttacataatcgtaggtagaagggtagacctggtaggctggtacagtggtgagagatatctcactaagtcagcagtttgcggtttcaaagcagcctctctgcattagcgaagggaaagcttgcctcggtttatcccttccccagatccgacttatgtggggggcctttggcactcggtctgccatgcccttagataatcgtaggtctagtgccatggaactggaagtcttcctaacttcctattgattaatctaaggtcacatatgttacatacttacacggaagttcaatataacttaaacactgatggccataattcgaaagttttgggaagatggtgatgtccaattgttagtggactacgtcatctgcagtccatactgccattgcacgcttgtccaacagtcgaccagccaacaaaatcgatgtggcatatgaaggttatatcatacaaacaaaaaactgatcaagtacaaaaatgcaagctctcaccatgaattggaacatgaaaataaaccacatccattaactctgatttggggatactagcaatgccaatttgacaaagaacatcacccactgtttgcgtcccataaatcaaacaggtgataaatctttatattttgatcccagggagggggtgatttacccaataaaagatgcagcctaactaatcctgtcactgaaacatgatgcatttgcatgttgtaagggccagctacagatttatctcattgttactttgttagaaattttgtgtctcagtggtacgtttattaagactgagacaaagaacacacaaaattttttgaaaaggagaaaacaggcagtacaat

SEQ ID NO: 73980 - DNA, 7688 bp, Zea Mays
cctgaccgcccacccctgatcggggcccctcgccggagctctccacctgccagcgccggtgctcgagcgtgcgggcgagagagagagatagacggcgctcactcgttctgggggattttcccttcgagacagggccaaagggtaccggttaccaaacgaaaccgctccgtcctgtccgtcgcccctcggtccctctcccttcggttcgaccaaagtcaccaaacgtatcgcaaacaagctcctcgacccgagttcgagctcaactcggcggagatctccactcttcagcaaggcgcgggatgccggcgatggcaccggaggacgatgaagcactgtacgagatccaccggcacgcgtcgggatcccacgtgatccctcatcaagaagaataccaaggtgctgcgacaagttgtggtagctcagatgctggaggaggaggtgtcctctcctatctctccttgcaaggtgtgagcaaacttaaggaaaagtgggataggtacagggtgctggggaagagtaggcagaggaagaagggggatggcgtcgcactgtttgtctcaccaaatgcagaatatgtgtctgtaactgttgggaatcacatcatcatcttgaggaaagccgatggctatgcatcaccttgtggtgtttacacaaataatgaccgaatagcatttttcacaaatggggcttggctggaggctcaaggcgtttttggtgtggtggatgacctaagcacactttacttgatcaaagaaaatggggagttactagcaaggaggacatgtgatcagttgaagctatcttcttccattattgatctggttttgcaggatggtacaagcttacttaggccaggtttctacatttttacaagtgactgcttggttcatagatttgattacactgaagaacctgaggcatgtttatgcgaagttcccatatcaactaaagatgcaatgtcagctaggactatccagttacctcgaagtttatcgtgcattgattaccatcaacgtcactcgctatttgtcctagttggagattccaatgtttcatttagctccaatagttattctgttggaaggggtattttgtcccctgaaggatcaaagaacctttgtttcatccccgaaaatcaggatctcgcctcagggaaagtatattgctacgttggatttgactggttttgtaaactttttttcacttgatggtgacttgcgcactgttccacttcaaactcttggaaaggctagacacctaattgatgttaaggacatcagttggtggacagataatgttcttatgttggtaagaaaagatggtagcattagcatgtacagcatcactgaagacaagatagtttccaatgatgacccggttttatctacaccaatattggagaaggcaaaggctactgaaggacatgcttttgttttgcaatctaggagatatggaacaaacactccagttaataagcggatggatagtgactcggaaccttgtctgctgagtggttctggggagcaccaacaaacagaaggggatgaaatgtcctggagtctgatatcattctccaaagttacagtagcagaaatgtactctgttctgataagagagaaacgatacaaggacgctttagattttgcttctagatacaatctagataaggatgaagttcttaaagcatgctggttgcactctgatgccaatactcatgagatagactcgtacttagcaaaaattaaagaccaagtatttgtattatcagaatgtgtaaacaaagttgggcctacagaagcagatttaagggctctactttcttttggactttgtataactgattgttacagattttctgagttagataacagcagtaagggctcaacatgggacagtcgcaccattaggcttcgtttattgcggcacatagacatgttagagacattcttgggcattaatatgggaaggtatgcagcaggagaatatagcaaattccgttcaatgccattggtggaaacagccatagcattagccgaaagtggcaaaattggggctttaaatcttatattcaagcgtcatccatatactgtctcttcagatattttacgtgttttgtctgctatcccagaaacccttgctgttcagacttatagtcagttgctgccagggaaatcccttcccagtgttgtcatattaagagctggtgattgggttgaatgtgaacagatggcttcatatataaacaattgccctgccgagttggacaaggtcgaagagatcaaaacggaaatacttgtaaagcactcaaaaggcttttcatggccttcagttgctgaactttgtgagtggtataagaacagagcaagggacattgactgcttaagtggacagctggaaaactctctggccatgatagagcttgcatgtcagaagggcattgtagagttgcagccattctttgatgatattaaatgcctctaccaggttgtatattctaatgaattgaatgagtttacaatgaatcttttgacatgggaagatctgcctgattatgaaaagttcaaaatcattctcaaaggagtcaaagaagatacagttgttcaacggctagaagaaaatgctatccgttttatgaagaaattatatgaacacaaacaagaatcctaccttgttagttggctgaaagaggtagctgctaaaaatgagcttttgatttgcttagctgtcattgaaaatggttgtggggaatcaccaatatatggtctcttcaaggatcttgctgagatgatagaaacctctgttcactgcatttatatgtgcagtgcaactaaccagtggaataccatgtcatcaatattatcaaagtcactctataaaacaaagagggagaaatcgttagtggctagtgaagaagactgcaatctgaaagatgctaagcatgctcttggttcttctatggtttcttatgaggagatgcaatgtgtctgtgctgatatcttatctggtctgggcaatgctccagaagatttttatcactatgattcagtacctgacaaacctaatgatgtcaaatatcttgatatattggagaagaggctaaaagttgctgaaggccatgtagaagtaggacggctctttgcttattatcaggtcccaaaatcaatgcatttcttccttagtgctcacttagatgagaagaatgtaaggcaaattatacggctgcttttatcgaaatttggcagacgtcaacctgttcgatcagacaatgagtgggctaacatgtggcgtgatttaaaactcttccaagaaaaggcatttccttttcttgattcagaatatatgctggccgaatttatcagagggctattgaaagctggtaaattttcgctagccaggaattatcttggaggaaccagtgcagtttctttatccacagagaaggctgaaaatcttgtgatacaagctgcaagggagtatttcttctcggcttcaactttatctgggaatgaaatttggaaagccagggaatgcctaaatttgttacctaatagcaaaaatgttcaagcagaaactgatataattgatgctcttactgttagacttccttatctaggggtgactatccttcctcttcagttcaggcaggtaaaggatcctatggatatcatccgcatggtgataacatgtcaagcaggtgcataccttcattttgaagagatcattgatgtcgctaaacttctgggattaagaagtgaagaggaagtagcggatgtggaggaggctattgccagagaagctgtggtaaatggtgatcttcaacttgcccttgatatctgtttaaatttaacaaaaaagagtcatggtgcagtgtgggatttatgtgctgcaattgctagaggccctccacttgacaatttggatactggtacccgtgaaaagctattgggtttcgctctcagccattgtgatgacgattctgttggggaattgttgaatgcttggaaggagcttcatgctcagggtacttttgagaaattaatgattacaaccgcaacaaatcctcccaatttcttgattgatggatcttcaatcacaccacttcctgtacaaagtgtgcaagacatacttgacctgagagatgacaatggccatgatagacgtagcgaccttgtgggaattgttaaagacatgctgtcaaaagtttgcttggacttttctaatggagacacacataattgggagtctatgttggaagaaaaccggaaattgttgtgctttggagcactggtattaccatggcttttgaaattgttcagtaatgaagcatgtgatggtgaaataatggatcatctcactaggagatgtcgattttcaacaaaagtaaaagcagcaaccagtatcatatattggttagttataaatggtttggcccccaatgataatataatcatgattcttgcaaagtctataatggagcctcccattgatgaagagtttgatgtacttggctgctcggttcttttgaatctcatggaccctttcaatggagtgaaaataatagaggaagagctaaaaagacgagaatcttatcaagaaattagcagcataatgagtgtaggaatgttatatagttccctcaataattctaagaaagagtgctccactcctgaacagaggagaaacctgttgcttcacaaatttcatgagaagttcacctcagccgataccgatgatttagaccaggttgatatggcaaatacaaccttctggagagaatggaaatcaaagttagaagaggataaacaactggctgatcaagcgcggatgctcaagcagatattacctgatatagacacatctcgattcttgtctggtgatgttaattatatcaaaatagtagtttactcctttgttaattctgtaaagatggagaaaaaacacatactcaaggaagcagtgcggatagctgaggcatatgggttgcaacgaactgaggtgcttttacgatttctcgcctgcagtcttgtgtctgaatactgggataacaatgatattctgaacgaaatttctgaattccgggaggatattgtcagctcagctaagggtgtgatcgatatgatatattcagatgtctatctggagatagatgggtataataaacaacgtctttcttacatttacggcattctttcagcatgtcattcatatctgaagaggaccaatgagatagaattgagatacccagtgcatgtgcatacccataagcttgaaccatttcagtactataaggtacttgaggaagagtgcaagaaagtctgcttcattgatggcttgaactttaaaaacattgctggactggataatctgaactttgagcatttcaatgacgaagtatgcaagaatatccatgcctccaccgtcactgctatagccgatatggtacagtctcttgtgagtatgtatgttgatgtactggccaagggactcatatcacaacaaggtgtttacaagcactatgttctggggttgctggcatcacttgaaggccgcagtgaagcacaatcgaacaacacagattatgaaaagttgcaggcttccctatgcgaatttgagttgaactatgatagttgcagggagtacatccaagctcttccagccacagatatttcatatattgtaagaaggtattgcaccctttgctttccatctaacttagcacgaagccatccacaggaaccttcatggaggaaacctcttgccacgctactagaattttggtctaaagttgttgatgacataccgggggattcaattgatgcttgctcatatggaagaacagactacttaaattcaaataggttatctctgtgcatgagagctttcaggcagctattaataattgatgagatagcactgcaccaaggttgggatgccatttccatgtatgtaaaagattgccttagaaatggaaagatgatggaaacaccatgcttttgtcgagctatgattctatcaggctgcagttttgaatctgtagttgaagtatactttggaggacaaggacagttagggagtgagaatgcagatccaagcaattatttggacctcttagaactttataatgctgctacagaaaagtgtttgtcggatttgagtgaggaatcttgcgaatatcgaatattgcttcataatttgctgtcatctttgagccggtcaacgggaaaacatgctggtgctctagaaatggtcagatctggtgtttgggggaagttaatccgctattcggaagacatgcagctagagagccaattacgagtctatgcactacagctgatgcaatgtatcacaggaagaaaccttaaatctcttccaaatgaaatggtgtgtcaggttgagccatgggaatcatggtatgagcatggagcgggtgctgccatagctgatgagagtatcaactcctctagcagcatcacagggactcttgtcgcacttagatctactcagatggtcgctgcagttctgcctgacgctaatatcactccagaaaacctagcaactcttgactctgcagtatcttgttttttaaaattgtcagaacgtgcttctggtgtgagcgttgctgtttttgaagcagtgctagaagagtgggagcaattgttctcccccaaagaagagcatgttgcacctcatgaatcaccaaaagaaacaagtgactggagtgatggatgggatgatggctgggaggcgctaccggaagagttggagagtccaaagaataaacaagagggtgtgttgttatctgtgcatcccctccacagttgctggatggagattatcagaaaacgtgttgaacttggtgagctgcacaaggtacttgaacttctagaccgagcatctttgaaacacagcgtgttcctagaggaagaagaagcacacagcttggttgaacttgtatctgctctggactgcttcatggcccttaaaactgtgttgctactcccatatgaatctctgagactgcagtgcctgcagatggtggaggtgaaaatgagggaaggaatcgtgtccacctcatcaaatgctgatgatcaggagctccttgccttggttctttcctctggaactatgcagaagatcatcacagaagaggcatactctaaatttttctcttacatatgccatcttgtcgggcaccttgcaaggtcattccagactgatctcctcgtacaatggaacgaagcaacatctaagatcaacagatctttactgttcgctagagttctgtttccatgttttgtatctgaactggtcctcggagggcagtatcttctggctgggttcgtcatctcgagatggatgcacacacatccatctctgggcctgatggatatcaccgagaccagtgtgcgatgcttccttcaaggccaggttgcccaacttgatgaggtgggagggagcgatgctgctctcactgacggtgaagtttgtgtaaggcacacaatctccaccctacagccgaaacttgtttctcttctgcagtctgcattagctctttcgaacaaagagttgtaggcaaagtcctgtgtagttaacttttacactcttgctgtactaccggtgtacctgtaacataaaatgtttttttagataatggtaaaagtgaatggtggaagatttcatattgttat

SEQ ID NO: 73981 - DNA, 7754 bp, Zea Mays
cctgaccgcccacccctgatcggggcccctcgccggagctctccacctgccagcgccggtgctcgagcgtgcgggcgagagagagagatagacggcgctcactcgttctgggggattttcccttcgagacagggccaaagggtaccggttaccaaacgaaaccgctccgtcctgtccgtcgcccctcggtccctctcccttcggttcgaccaaagtcaccaaacgtatcgcaaacaagctcctcgacccgagttcgagctcaactcggcggagatctccactcttcagcaaggcgcgggatgccggcgatggcaccggaggacgatgaagcactgtacgagatccaccggcacgcgtcgggatcccacgtgatccctcatcaagaagaataccaaggtgctgcgacaagttgtggtagctcagatgctggaggaggaggtgtcctctcctatctctccttgcaaggtgtgagcaaacttaaggaaaagtgggataggtacagggtgctggggaagagtaggcagaggaagaagggggatggcgtcgcactgtttgtctcaccaaatgcagaatatgtgtctgtaactgttgggaatcacatcatcatcttgaggaaagccgatggctatgcatcaccttgtggtgtttacacaaataatgaccgaatagcatttttcacaaatggggcttggctggaggctcaaggcgtttttggtgtggtggatgacctaagcacactttacttgatcaaagaaaatggggagttactagcaaggaggacatgtgatcagttgaagctatcttcttccattattgatctggttttgcaggatggtacaagcttacttaggtttctacatttttacaagtgactgcttggttcatagatttgattacactgaagaacctgaggcatgtttatgcgaagttcccatatcaactaaagatgcaatgtcagctaggactatccagttacctcgaagtttatcgtgcattgattaccatcaacgtcactcgctatttgtcctagttggagattccaatgtttcatttagctccaatagttattctggaacctattttatgtatctattacacttcaacaaaaatctggaacttagtctttcatttaaaagcatgcagttggaaggggtattttgtcccctgaaggatcaaagaacctttgtttcatccccgaaaatcaggatctcgcctcagggaaagtatattgctacgttggatttgactggttttgtaaactttttttcacttgatggtgacttgcgcactgttccacttcaaactcttggaaaggctagacacctaattgatgttaaggacatcagttggtggacagataatgttcttatgttggtaagaaaagatggtagcattagcatgtacagcatcactgaagacaagatagtttccaatgatgacccggttttatctacaccaatattggagaaggcaaaggctactgaaggacatgcttttgttttgcaatctaggagatatggaacaaacactccagttaataagcggatggatagtgactcggaaccttgtctgctgagtggttctggggagcaccaacaaacagaaggggatgaaatgtcctggagtctgatatcattctccaaagttacagtagcagaaatgtactctgttctgataagagagaaacgatacaaggacgctttagattttgcttctagatacaatctagataaggatgaagttcttaaagcatgctggttgcactctgatgccaatactcatgagatagactcgtacttagcaaaaattaaagaccaagtatttgtattatcagaatgtgtaaacaaagttgggcctacagaagcagatttaagggctctactttcttttggactttgtataactgattgttacagattttctgagttagataacagcagtaagggctcaacatgggacagtcgcaccattaggcttcgtttattgcggcacatagacatgttagagacattcttgggcattaatatgggaaggtatgcagcaggagaatatagcaaattccgttcaatgccattggtggaaacagccatagcattagccgaaagtggcaaaattggggctttaaatcttatattcaagcgtcatccatatactgtctcttcagatattttacgtgttttgtctgctatcccagaaacccttgctgttcagacttatagtcagttgctgccagggaaatcccttcccagtgttgtcatattaagagctggtgattgggttgaatgtgaacagatggcttcatatataaacaattgccctgccgagttggacaaggtcgaagagatcaaaacggaaatacttgtaaagcactcaaaaggcttttcatggccttcagttgctgaactttgtgagtggtataagaacagagcaagggacattgactgcttaagtggacagctggaaaactctctggccatgatagagcttgcatgtcagaagggcattgtagagttgcagccattctttgatgatattaaatgcctctaccaggttgtatattctaatgaattgaatgagtttacaatgaatcttttgacatgggaagatctgcctgattatgaaaagttcaaaatcattctcaaaggagtcaaagaagatacagttgttcaacggctagaagaaaatgctatccgttttatgaagaaattatatgaacacaaacaagaatcctaccttgttagttggctgaaagaggtagctgctaaaaatgagcttttgatttgcttagctgtcattgaaaatggttgtggggaatcaccaatatatggtctcttcaaggatcttgctgagatgatagaaacctctgttcactgcatttatatgtgcagtgcaactaaccagtggaataccatgtcatcaatattatcaaagtcactctataaaacaaagagggagaaatcgttagtggctagtgaagaagactgcaatctgaaagatgctaagcatgctcttggttcttctatggtttcttatgaggagatgcaatgtgtctgtgctgatatcttatctggtctgggcaatgctccagaagatttttatcactatgattcagtacctgacaaacctaatgatgtcaaatatcttgatatattggagaagaggctaaaagttgctgaaggccatgtagaagtaggacggctctttgcttattatcaggtcccaaaatcaatgcatttcttccttagtgctcacttagatgagaagaatgtaaggcaaattatacggctgcttttatcgaaatttggcagacgtcaacctgttcgatcagacaatgagtgggctaacatgtggcgtgatttaaaactcttccaagaaaaggcatttccttttcttgattcagaatatatgctggccgaatttatcagagggctattgaaagctggtaaattttcgctagccaggaattatcttggaggaaccagtgcagtttctttatccacagagaaggctgaaaatcttgtgatacaagctgcaagggagtatttcttctcggcttcaactttatctgggaatgaaatttggaaagccagggaatgcctaaatttgttacctaatagcaaaaatgttcaagcagaaactgatataattgatgctcttactgttagacttccttatctaggggtgactatccttcctcttcagttcaggcaggtaaaggatcctatggatatcatccgcatggtgataacatgtcaagcaggtgcataccttcattttgaagagatcattgatgtcgctaaacttctgggattaagaagtgaagaggaagtagcggatgtggaggaggctattgccagagaagctgtggtaaatggtgatcttcaacttgcccttgatatctgtttaaatttaacaaaaaagagtcatggtgcagtgtgggatttatgtgctgcaattgctagaggccctccacttgacaatttggatactggtacccgtgaaaagctattgggtttcgctctcagccattgtgatgacgattctgttggggaattgttgaatgcttggaaggagcttcatgctcagggtacttttgagaaattaatgattacaaccgcaacaaatcctcccaatttcttgattgatggatcttcaatcacaccacttcctgtacaaagtgtgcaagacatacttgacctgagagatgacaatggccatgatagacgtagcgaccttgtgggaattgttaaagacatgctgtcaaaagtttgcttggacttttctaatggagacacacataattgggagtctatgttggaagaaaaccggaaattgttgtgctttggagcactggtattaccatggcttttgaaattgttcagtaatgaagcatgtgatggtgaaataatggatcatctcactaggagatgtcgattttcaacaaaagtaaaagcagcaaccagtatcatatattggttagttataaatggtttggcccccaatgataatataatcatgattcttgcaaagtctataatggagcctcccattgatgaagagtttgatgtacttggctgctcggttcttttgaatctcatggaccctttcaatggagtgaaaataatagaggaagagctaaaaagacgagaatcttatcaagaaattagcagcataatgagtgtaggaatgttatatagttccctcaataattctaagaaagagtgctccactcctgaacagaggagaaacctgttgcttcacaaatttcatgagaagttcacctcagccgataccgatgatttagaccaggttgatatggcaaatacaaccttctggagagaatggaaatcaaagttagaagaggataaacaactggctgatcaagcgcggatgctcaagcagatattacctgatatagacacatctcgattcttgtctggtgatgttaattatatcaaaatagtagtttactcctttgttaattctgtaaagatggagaaaaaacacatactcaaggaagcagtgcggatagctgaggcatatgggttgcaacgaactgaggtgcttttacgatttctcgcctgcagtcttgtgtctgaatactgggataacaatgatattctgaacgaaatttctgaattccgggaggatattgtcagctcagctaagggtgtgatcgatatgatatattcagatgtctatctggagatagatgggtataataaacaacgtctttcttacatttacggcattctttcagcatgtcattcatatctgaagaggaccaatgagatagaattgagatacccagtgcatgtgcatacccataagcttgaaccatttcagtactataaggtacttgaggaagagtgcaagaaagtctgcttcattgatggcttgaactttaaaaacattgctggactggataatctgaactttgagcatttcaatgacgaagtatgcaagaatatccatgcctccaccgtcactgctatagccgatatggtacagtctcttgtgagtatgtatgttgatgtactggccaagggactcatatcacaacaaggtgtttacaagcactatgttctggggttgctggcatcacttgaaggccgcagtgaagcacaatcgaacaacacagattatgaaaagttgcaggcttccctatgcgaatttgagttgaactatgatagttgcagggagtacatccaagctcttccagccacagatatttcatatattgtaagaaggtattgcaccctttgctttccatctaacttagcacgaagccatccacaggaaccttcatggaggaaacctcttgccacgctactagaattttggtctaaagttgttgatgacataccgggggattcaattgatgcttgctcatatggaagaacagactacttaaattcaaataggttatctctgtgcatgagagctttcaggcagctattaataattgatgagatagcactgcaccaaggttgggatgccatttccatgtatgtaaaagattgccttagaaatggaaagatgatggaaacaccatgcttttgtcgagctatgattctatcaggctgcagttttgaatctgtagttgaagtatactttggaggacaaggacagttagggagtgagaatgcagatccaagcaattatttggacctcttagaactttataatgctgctacagaaaagtgtttgtcggatttgagtgaggaatcttgcgaatatcgaatattgcttcataatttgctgtcatctttgagccggtcaacgggaaaacatgctggtgctctagaaatggtcagatctggtgtttgggggaagttaatccgctattcggaagacatgcagctagagagccaattacgagtctatgcactacagctgatgcaatgtatcacaggaagaaaccttaaatctcttccaaatgaaatggtgtgtcaggttgagccatgggaatcatggtatgagcatggagcgggtgctgccatagctgatgagagtatcaactcctctagcagcatcacagggactcttgtcgcacttagatctactcagatggtcgctgcagttctgcctgacgctaatatcactccagaaaacctagcaactcttgactctgcagtatcttgttttttaaaattgtcagaacgtgcttctggtgtgagcgttgctgtttttgaagcagtgctagaagagtgggagcaattgttctcccccaaagaagagcatgttgcacctcatgaatcaccaaaagaaacaagtgactggagtgatggatgggatgatggctgggaggcgctaccggaagagttggagagtccaaagaataaacaagagggtgtgttgttatctgtgcatcccctccacagttgctggatggagattatcagaaaacgtgttgaacttggtgagctgcacaaggtacttgaacttctagaccgagcatctttgaaacacagcgtgttcctagaggaagaagaagcacacagcttggttgaacttgtatctgctctggactgcttcatggcccttaaaactgtgttgctactcccatatgaatctctgagactgcagtgcctgcagatggtggaggtgaaaatgagggaaggaatcgtgtccacctcatcaaatgctgatgatcaggagctccttgccttggttctttcctctggaactatgcagaagatcatcacagaagaggcatactctaaatttttctcttacatatgccatcttgtcgggcaccttgcaaggtcattccagactgatctcctcgtacaatggaacgaagcaacatctaagatcaacagatctttactgttcgctagagttctgtttccatgttttgtatctgaactggtcctcggagggcagtatcttctggctgggttcgtcatctcgagatggatgcacacacatccatctctgggcctgatggatatcaccgagaccagtgtgcgatgcttccttcaaggccaggttgcccaacttgatgaggtgggagggagcgatgctgctctcactgacggtgaagtttgtgtaaggcacacaatctccaccctacagccgaaacttgtttctcttctgcagtctgcattagctctttcgaacaaagagttgtaggcaaagtcctgtgtagttaacttttacactcttgctgtactaccggtgtacctgtaacataaaatgtttttttagataatggtaaaagtgaatggtggaagatttcatattgttat

SEQ ID NO: 73982 - DNA, 7563 bp, Zea Mays
cctgaccgcccacccctgatcggggcccctcgccggagctctccacctgccagcgccggtgctcgagcgtgcgggcgagagagagagatagacggcgctcactcgttctgggggattttcccttcgagacagggccaaagggtaccggttaccaaacgaaaccgctccgtcctgtccgtcgcccctcggtccctctcccttcggttcgaccaaagtcaccaaacgtatcgcaaacaagctcctcgacccgagttcgagctcaactcggcggagatctccactcttcagcaaggcgcgggatgccggcgatggcaccggaggacgatgaagcactgtacgagatccaccggcacgcgtcgggatcccacgtgatccctcatcaagaagaataccaaggtgctgcgacaagttgtggtagctcagatgctggaggaggaggtgtcctctcctatctctccttgcaaggtgtgagcaaacttaaggaaaagtgggataggtacagggtgctggggaagagtaggcagaggaagaagggggatggcgtcgcactgtttgtctcaccaaatgcagaatatgtgtctgtaactgttgggaatcacatcatcatcttgaggaaagccgatggctatgcatcaccttgtggtgtttacacaagccaggtttctacatttttacaagtgactgcttggttcatagatttgattacactgaagaacctgaggcatgtttatgcgaagttcccatatcaactaaagatgcaatgtcagctaggactatccagttacctcgaagtttatcgtgcattgattaccatcaacgtcactcgctatttgtcctagttggagattccaatgtttcatttagctccaatagttattctggaacctattttatgtatctattacacttcaacaaaaatctggaacttagtctttcatttaaaagcatgcagttggaaggggtattttgtcccctgaaggatcaaagaacctttgtttcatccccgaaaatcaggatctcgcctcagggaaagtatattgctacgttggatttgactggttttgtaaactttttttcacttgatggtgacttgcgcactgttccacttcaaactcttggaaaggctagacacctaattgatgttaaggacatcagttggtggacagataatgttcttatgttggtaagaaaagatggtagcattagcatgtacagcatcactgaagacaagatagtttccaatgatgacccggttttatctacaccaatattggagaaggcaaaggctactgaaggacatgcttttgttttgcaatctaggagatatggaacaaacactccagttaataagcggatggatagtgactcggaaccttgtctgctgagtggttctggggagcaccaacaaacagaaggggatgaaatgtcctggagtctgatatcattctccaaagttacagtagcagaaatgtactctgttctgataagagagaaacgatacaaggacgctttagattttgcttctagatacaatctagataaggatgaagttcttaaagcatgctggttgcactctgatgccaatactcatgagatagactcgtacttagcaaaaattaaagaccaagtatttgtattatcagaatgtgtaaacaaagttgggcctacagaagcagatttaagggctctactttcttttggactttgtataactgattgttacagattttctgagttagataacagcagtaagggctcaacatgggacagtcgcaccattaggcttcgtttattgcggcacatagacatgttagagacattcttgggcattaatatgggaaggtatgcagcaggagaatatagcaaattccgttcaatgccattggtggaaacagccatagcattagccgaaagtggcaaaattggggctttaaatcttatattcaagcgtcatccatatactgtctcttcagatattttacgtgttttgtctgctatcccagaaacccttgctgttcagacttatagtcagttgctgccagggaaatcccttcccagtgttgtcatattaagagctggtgattgggttgaatgtgaacagatggcttcatatataaacaattgccctgccgagttggacaaggtcgaagagatcaaaacggaaatacttgtaaagcactcaaaaggcttttcatggccttcagttgctgaactttgtgagtggtataagaacagagcaagggacattgactgcttaagtggacagctggaaaactctctggccatgatagagcttgcatgtcagaagggcattgtagagttgcagccattctttgatgatattaaatgcctctaccaggttgtatattctaatgaattgaatgagtttacaatgaatcttttgacatgggaagatctgcctgattatgaaaagttcaaaatcattctcaaaggagtcaaagaagatacagttgttcaacggctagaagaaaatgctatccgttttatgaagaaattatatgaacacaaacaagaatcctaccttgttagttggctgaaagaggtagctgctaaaaatgagcttttgatttgcttagctgtcattgaaaatggttgtggggaatcaccaatatatggtctcttcaaggatcttgctgagatgatagaaacctctgttcactgcatttatatgtgcagtgcaactaaccagtggaataccatgtcatcaatattatcaaagtcactctataaaacaaagagggagaaatcgttagtggctagtgaagaagactgcaatctgaaagatgctaagcatgctcttggttcttctatggtttcttatgaggagatgcaatgtgtctgtgctgatatcttatctggtctgggcaatgctccagaagatttttatcactatgattcagtacctgacaaacctaatgatgtcaaatatcttgatatattggagaagaggctaaaagttgctgaaggccatgtagaagtaggacggctctttgcttattatcaggtcccaaaatcaatgcatttcttccttagtgctcacttagatgagaagaatgtaaggcaaattatacggctgcttttatcgaaatttggcagacgtcaacctgttcgatcagacaatgagtgggctaacatgtggcgtgatttaaaactcttccaagaaaaggcatttccttttcttgattcagaatatatgctggccgaatttatcagagggctattgaaagctggtaaattttcgctagccaggaattatcttggaggaaccagtgcagtttctttatccacagagaaggctgaaaatcttgtgatacaagctgcaagggagtatttcttctcggcttcaactttatctgggaatgaaatttggaaagccagggaatgcctaaatttgttacctaatagcaaaaatgttcaagcagaaactgatataattgatgctcttactgttagacttccttatctaggggtgactatccttcctcttcagttcaggcaggtaaaggatcctatggatatcatccgcatggtgataacatgtcaagcaggtgcataccttcattttgaagagatcattgatgtcgctaaacttctgggattaagaagtgaagaggaagtagcggatgtggaggaggctattgccagagaagctgtggtaaatggtgatcttcaacttgcccttgatatctgtttaaatttaacaaaaaagagtcatggtgcagtgtgggatttatgtgctgcaattgctagaggccctccacttgacaatttggatactggtacccgtgaaaagctattgggtttcgctctcagccattgtgatgacgattctgttggggaattgttgaatgcttggaaggagcttcatgctcagggtacttttgagaaattaatgattacaaccgcaacaaatcctcccaatttcttgattgatggatcttcaatcacaccacttcctgtacaaagtgtgcaagacatacttgacctgagagatgacaatggccatgatagacgtagcgaccttgtgggaattgttaaagacatgctgtcaaaagtttgcttggacttttctaatggagacacacataattgggagtctatgttggaagaaaaccggaaattgttgtgctttggagcactggtattaccatggcttttgaaattgttcagtaatgaagcatgtgatggtgaaataatggatcatctcactaggagatgtcgattttcaacaaaagtaaaagcagcaaccagtatcatatattggttagttataaatggtttggcccccaatgataatataatcatgattcttgcaaagtctataatggagcctcccattgatgaagagtttgatgtacttggctgctcggttcttttgaatctcatggaccctttcaatggagtgaaaataatagaggaagagctaaaaagacgagaatcttatcaagaaattagcagcataatgagtgtaggaatgttatatagttccctcaataattctaagaaagagtgctccactcctgaacagaggagaaacctgttgcttcacaaatttcatgagaagttcacctcagccgataccgatgatttagaccaggttgatatggcaaatacaaccttctggagagaatggaaatcaaagttagaagaggataaacaactggctgatcaagcgcggatgctcaagcagatattacctgatatagacacatctcgattcttgtctggtgatgttaattatatcaaaatagtagtttactcctttgttaattctgtaaagatggagaaaaaacacatactcaaggaagcagtgcggatagctgaggcatatgggttgcaacgaactgaggtgcttttacgatttctcgcctgcagtcttgtgtctgaatactgggataacaatgatattctgaacgaaatttctgaattccgggaggatattgtcagctcagctaagggtgtgatcgatatgatatattcagatgtctatctggagatagatgggtataataaacaacgtctttcttacatttacggcattctttcagcatgtcattcatatctgaagaggaccaatgagatagaattgagatacccagtgcatgtgcatacccataagcttgaaccatttcagtactataaggtacttgaggaagagtgcaagaaagtctgcttcattgatggcttgaactttaaaaacattgctggactggataatctgaactttgagcatttcaatgacgaagtatgcaagaatatccatgcctccaccgtcactgctatagccgatatggtacagtctcttgtgagtatgtatgttgatgtactggccaagggactcatatcacaacaaggtgtttacaagcactatgttctggggttgctggcatcacttgaaggccgcagtgaagcacaatcgaacaacacagattatgaaaagttgcaggcttccctatgcgaatttgagttgaactatgatagttgcagggagtacatccaagctcttccagccacagatatttcatatattgtaagaaggtattgcaccctttgctttccatctaacttagcacgaagccatccacaggaaccttcatggaggaaacctcttgccacgctactagaattttggtctaaagttgttgatgacataccgggggattcaattgatgcttgctcatatggaagaacagactacttaaattcaaataggttatctctgtgcatgagagctttcaggcagctattaataattgatgagatagcactgcaccaaggttgggatgccatttccatgtatgtaaaagattgccttagaaatggaaagatgatggaaacaccatgcttttgtcgagctatgattctatcaggctgcagttttgaatctgtagttgaagtatactttggaggacaaggacagttagggagtgagaatgcagatccaagcaattatttggacctcttagaactttataatgctgctacagaaaagtgtttgtcggatttgagtgaggaatcttgcgaatatcgaatattgcttcataatttgctgtcatctttgagccggtcaacgggaaaacatgctggtgctctagaaatggtcagatctggtgtttgggggaagttaatccgctattcggaagacatgcagctagagagccaattacgagtctatgcactacagctgatgcaatgtatcacaggaagaaaccttaaatctcttccaaatgaaatggtgtgtcaggttgagccatgggaatcatggtatgagcatggagcgggtgctgccatagctgatgagagtatcaactcctctagcagcatcacagggactcttgtcgcacttagatctactcagatggtcgctgcagttctgcctgacgctaatatcactccagaaaacctagcaactcttgactctgcagtatcttgttttttaaaattgtcagaacgtgcttctggtgtgagcgttgctgtttttgaagcagtgctagaagagtgggagcaattgttctcccccaaagaagagcatgttgcacctcatgaatcaccaaaagaaacaagtgactggagtgatggatgggatgatggctgggaggcgctaccggaagagttggagagtccaaagaataaacaagagggtgtgttgttatctgtgcatcccctccacagttgctggatggagattatcagaaaacgtgttgaacttggtgagctgcacaaggtacttgaacttctagaccgagcatctttgaaacacagcgtgttcctagaggaagaagaagcacacagcttggttgaacttgtatctgctctggactgcttcatggcccttaaaactgtgttgctactcccatatgaatctctgagactgcagtgcctgcagatggtggaggtgaaaatgagggaaggaatcgtgtccacctcatcaaatgctgatgatcaggagctccttgccttggttctttcctctggaactatgcagaagatcatcacagaagaggcatactctaaatttttctcttacatatgccatcttgtcgggcaccttgcaaggtcattccagactgatctcctcgtacaatggaacgaagcaacatctaagatcaacagatctttactgttcgctagagttctgtttccatgttttgtatctgaactggtcctcggagggcagtatcttctggctgggttcgtcatctcgagatggatgcacacacatccatctctgggcctgatggatatcaccgagaccagtgtgcgatgcttccttcaaggccaggttgcccaacttgatgaggtgggagggagcgatgctgctctcactgacggtgaagtttgtgtaaggcacacaatctccaccctacagccgaaacttgtttctcttctgcagtctgcattagctctttcgaacaaagagttgtaggcaaagtcctgtgtagttaacttttacactcttgctgtactaccggtgtacctgtaacataaaatgtttttttagataatggtaaaagtgaatggtggaagatttcatattgttat

SEQ ID NO: 73983 - DNA, 7742 bp, Zea Mays
cctgaccgcccacccctgatcggggcccctcgccggagctctccacctgccagcgccggtgctcgagcgtgcgggcgagagagagagatagacggcgctcactcgttctgggggattttcccttcgagacagggccaaagggtaccggttaccaaacgaaaccgctccgtcctgtccgtcgcccctcggtccctctcccttcggttcgaccaaagtcaccaaacgtatcgcaaacaagctcctcgacccgagttcgagctcaactcggcggagatctccactcttcagcaaggcgcgggatgccggcgatggcaccggaggacgatgaagcactgtacgagatccaccggcacgcgtcgggatcccaccaagaagaataccaaggtgctgcgacaagttgtggtagctcagatgctggaggaggaggtgtcctctcctatctctccttgcaaggtgtgagcaaacttaaggaaaagtgggataggtacagggtgctggggaagagtaggcagaggaagaagggggatggcgtcgcactgtttgtctcaccaaatgcagaatatgtgtctgtaactgttgggaatcacatcatcatcttgaggaaagccgatggctatgcatcaccttgtggtgtttacacaaataatgaccgaatagcatttttcacaaatggggcttggctggaggctcaaggcgtttttggtgtggtggatgacctaagcacactttacttgatcaaagaaaatggggagttactagcaaggaggacatgtgatcagttgaagctatcttcttccattattgatctggttttgcaggatggtacaagcttacttaggtttctacatttttacaagtgactgcttggttcatagatttgattacactgaagaacctgaggcatgtttatgcgaagttcccatatcaactaaagatgcaatgtcagctaggactatccagttacctcgaagtttatcgtgcattgattaccatcaacgtcactcgctatttgtcctagttggagattccaatgtttcatttagctccaatagttattctggaacctattttatgtatctattacacttcaacaaaaatctggaacttagtctttcatttaaaagcatgcagttggaaggggtattttgtcccctgaaggatcaaagaacctttgtttcatccccgaaaatcaggatctcgcctcagggaaagtatattgctacgttggatttgactggttttgtaaactttttttcacttgatggtgacttgcgcactgttccacttcaaactcttggaaaggctagacacctaattgatgttaaggacatcagttggtggacagataatgttcttatgttggtaagaaaagatggtagcattagcatgtacagcatcactgaagacaagatagtttccaatgatgacccggttttatctacaccaatattggagaaggcaaaggctactgaaggacatgcttttgttttgcaatctaggagatatggaacaaacactccagttaataagcggatggatagtgactcggaaccttgtctgctgagtggttctggggagcaccaacaaacagaaggggatgaaatgtcctggagtctgatatcattctccaaagttacagtagcagaaatgtactctgttctgataagagagaaacgatacaaggacgctttagattttgcttctagatacaatctagataaggatgaagttcttaaagcatgctggttgcactctgatgccaatactcatgagatagactcgtacttagcaaaaattaaagaccaagtatttgtattatcagaatgtgtaaacaaagttgggcctacagaagcagatttaagggctctactttcttttggactttgtataactgattgttacagattttctgagttagataacagcagtaagggctcaacatgggacagtcgcaccattaggcttcgtttattgcggcacatagacatgttagagacattcttgggcattaatatgggaaggtatgcagcaggagaatatagcaaattccgttcaatgccattggtggaaacagccatagcattagccgaaagtggcaaaattggggctttaaatcttatattcaagcgtcatccatatactgtctcttcagatattttacgtgttttgtctgctatcccagaaacccttgctgttcagacttatagtcagttgctgccagggaaatcccttcccagtgttgtcatattaagagctggtgattgggttgaatgtgaacagatggcttcatatataaacaattgccctgccgagttggacaaggtcgaagagatcaaaacggaaatacttgtaaagcactcaaaaggcttttcatggccttcagttgctgaactttgtgagtggtataagaacagagcaagggacattgactgcttaagtggacagctggaaaactctctggccatgatagagcttgcatgtcagaagggcattgtagagttgcagccattctttgatgatattaaatgcctctaccaggttgtatattctaatgaattgaatgagtttacaatgaatcttttgacatgggaagatctgcctgattatgaaaagttcaaaatcattctcaaaggagtcaaagaagatacagttgttcaacggctagaagaaaatgctatccgttttatgaagaaattatatgaacacaaacaagaatcctaccttgttagttggctgaaagaggtagctgctaaaaatgagcttttgatttgcttagctgtcattgaaaatggttgtggggaatcaccaatatatggtctcttcaaggatcttgctgagatgatagaaacctctgttcactgcatttatatgtgcagtgcaactaaccagtggaataccatgtcatcaatattatcaaagtcactctataaaacaaagagggagaaatcgttagtggctagtgaagaagactgcaatctgaaagatgctaagcatgctcttggttcttctatggtttcttatgaggagatgcaatgtgtctgtgctgatatcttatctggtctgggcaatgctccagaagatttttatcactatgattcagtacctgacaaacctaatgatgtcaaatatcttgatatattggagaagaggctaaaagttgctgaaggccatgtagaagtaggacggctctttgcttattatcaggtcccaaaatcaatgcatttcttccttagtgctcacttagatgagaagaatgtaaggcaaattatacggctgcttttatcgaaatttggcagacgtcaacctgttcgatcagacaatgagtgggctaacatgtggcgtgatttaaaactcttccaagaaaaggcatttccttttcttgattcagaatatatgctggccgaatttatcagagggctattgaaagctggtaaattttcgctagccaggaattatcttggaggaaccagtgcagtttctttatccacagagaaggctgaaaatcttgtgatacaagctgcaagggagtatttcttctcggcttcaactttatctgggaatgaaatttggaaagccagggaatgcctaaatttgttacctaatagcaaaaatgttcaagcagaaactgatataattgatgctcttactgttagacttccttatctaggggtgactatccttcctcttcagttcaggcaggtaaaggatcctatggatatcatccgcatggtgataacatgtcaagcaggtgcataccttcattttgaagagatcattgatgtcgctaaacttctgggattaagaagtgaagaggaagtagcggatgtggaggaggctattgccagagaagctgtggtaaatggtgatcttcaacttgcccttgatatctgtttaaatttaacaaaaaagagtcatggtgcagtgtgggatttatgtgctgcaattgctagaggccctccacttgacaatttggatactggtacccgtgaaaagctattgggtttcgctctcagccattgtgatgacgattctgttggggaattgttgaatgcttggaaggagcttcatgctcagggtacttttgagaaattaatgattacaaccgcaacaaatcctcccaatttcttgattgatggatcttcaatcacaccacttcctgtacaaagtgtgcaagacatacttgacctgagagatgacaatggccatgatagacgtagcgaccttgtgggaattgttaaagacatgctgtcaaaagtttgcttggacttttctaatggagacacacataattgggagtctatgttggaagaaaaccggaaattgttgtgctttggagcactggtattaccatggcttttgaaattgttcagtaatgaagcatgtgatggtgaaataatggatcatctcactaggagatgtcgattttcaacaaaagtaaaagcagcaaccagtatcatatattggttagttataaatggtttggcccccaatgataatataatcatgattcttgcaaagtctataatggagcctcccattgatgaagagtttgatgtacttggctgctcggttcttttgaatctcatggaccctttcaatggagtgaaaataatagaggaagagctaaaaagacgagaatcttatcaagaaattagcagcataatgagtgtaggaatgttatatagttccctcaataattctaagaaagagtgctccactcctgaacagaggagaaacctgttgcttcacaaatttcatgagaagttcacctcagccgataccgatgatttagaccaggttgatatggcaaatacaaccttctggagagaatggaaatcaaagttagaagaggataaacaactggctgatcaagcgcggatgctcaagcagatattacctgatatagacacatctcgattcttgtctggtgatgttaattatatcaaaatagtagtttactcctttgttaattctgtaaagatggagaaaaaacacatactcaaggaagcagtgcggatagctgaggcatatgggttgcaacgaactgaggtgcttttacgatttctcgcctgcagtcttgtgtctgaatactgggataacaatgatattctgaacgaaatttctgaattccgggaggatattgtcagctcagctaagggtgtgatcgatatgatatattcagatgtctatctggagatagatgggtataataaacaacgtctttcttacatttacggcattctttcagcatgtcattcatatctgaagaggaccaatgagatagaattgagatacccagtgcatgtgcatacccataagcttgaaccatttcagtactataaggtacttgaggaagagtgcaagaaagtctgcttcattgatggcttgaactttaaaaacattgctggactggataatctgaactttgagcatttcaatgacgaagtatgcaagaatatccatgcctccaccgtcactgctatagccgatatggtacagtctcttgtgagtatgtatgttgatgtactggccaagggactcatatcacaacaaggtgtttacaagcactatgttctggggttgctggcatcacttgaaggccgcagtgaagcacaatcgaacaacacagattatgaaaagttgcaggcttccctatgcgaatttgagttgaactatgatagttgcagggagtacatccaagctcttccagccacagatatttcatatattgtaagaaggtattgcaccctttgctttccatctaacttagcacgaagccatccacaggaaccttcatggaggaaacctcttgccacgctactagaattttggtctaaagttgttgatgacataccgggggattcaattgatgcttgctcatatggaagaacagactacttaaattcaaataggttatctctgtgcatgagagctttcaggcagctattaataattgatgagatagcactgcaccaaggttgggatgccatttccatgtatgtaaaagattgccttagaaatggaaagatgatggaaacaccatgcttttgtcgagctatgattctatcaggctgcagttttgaatctgtagttgaagtatactttggaggacaaggacagttagggagtgagaatgcagatccaagcaattatttggacctcttagaactttataatgctgctacagaaaagtgtttgtcggatttgagtgaggaatcttgcgaatatcgaatattgcttcataatttgctgtcatctttgagccggtcaacgggaaaacatgctggtgctctagaaatggtcagatctggtgtttgggggaagttaatccgctattcggaagacatgcagctagagagccaattacgagtctatgcactacagctgatgcaatgtatcacaggaagaaaccttaaatctcttccaaatgaaatggtgtgtcaggttgagccatgggaatcatggtatgagcatggagcgggtgctgccatagctgatgagagtatcaactcctctagcagcatcacagggactcttgtcgcacttagatctactcagatggtcgctgcagttctgcctgacgctaatatcactccagaaaacctagcaactcttgactctgcagtatcttgttttttaaaattgtcagaacgtgcttctggtgtgagcgttgctgtttttgaagcagtgctagaagagtgggagcaattgttctcccccaaagaagagcatgttgcacctcatgaatcaccaaaagaaacaagtgactggagtgatggatgggatgatggctgggaggcgctaccggaagagttggagagtccaaagaataaacaagagggtgtgttgttatctgtgcatcccctccacagttgctggatggagattatcagaaaacgtgttgaacttggtgagctgcacaaggtacttgaacttctagaccgagcatctttgaaacacagcgtgttcctagaggaagaagaagcacacagcttggttgaacttgtatctgctctggactgcttcatggcccttaaaactgtgttgctactcccatatgaatctctgagactgcagtgcctgcagatggtggaggtgaaaatgagggaaggaatcgtgtccacctcatcaaatgctgatgatcaggagctccttgccttggttctttcctctggaactatgcagaagatcatcacagaagaggcatactctaaatttttctcttacatatgccatcttgtcgggcaccttgcaaggtcattccagactgatctcctcgtacaatggaacgaagcaacatctaagatcaacagatctttactgttcgctagagttctgtttccatgttttgtatctgaactggtcctcggagggcagtatcttctggctgggttcgtcatctcgagatggatgcacacacatccatctctgggcctgatggatatcaccgagaccagtgtgcgatgcttccttcaaggccaggttgcccaacttgatgaggtgggagggagcgatgctgctctcactgacggtgaagtttgtgtaaggcacacaatctccaccctacagccgaaacttgtttctcttctgcagtctgcattagctctttcgaacaaagagttgtaggcaaagtcctgtgtagttaacttttacactcttgctgtactaccggtgtacctgtaacataaaatgtttttttagataatggtaaaagtgaatggtggaagatttcatattgttat

SEQ ID NO: 73984 - DNA, 1697 bp, Zea Mays
cttctctctgtgctttatgttaatgatatttctctttataactttttattcctatagggaataactagtttatggtaacaattaccctcttgtgacacaaaaatattgtgccatttgacgaccaagattaaagcaactgatttatatgttacagatatgtttctcagtttgttgatatttttgaactatgcagctgagttgttgacaaacaacaagttatctgagttggcatgtttggcattatatctcatgtatgagaaaaagcaaggaaaggattcattttggtacccctacattaaggaacttgaccgacatcgaggaagggggcagctagctgttgaatcaccacttctatggactgaaagtgaactggactaccttagtggaagccccttgaaggatgaagttgttgctagagatgaggcaataaggagagagtataatgagcttgacacattgtggtttatggcaggttcactatttcagcaatatccttttgacatacctactgaggcttttccgtttgaaatattcaagcaggcttttgttgcagtacagtcttgtgttgttcatttgcagaaagttagtcttgctcgaaggttcgcactagttcccttggggccgccactattgacttacaagagcaactgcaaagcgatgttgacagttgatggtgagtctgttcgattggtggtggatcggccatataaagctggagaaccaataatcatctggtgtggaccccaaacaaactccaggcttgttctgaactatggttttgttgatgaaaacaatccctttgatcgcatatcaattgaggcatctttaaatacagaagatcctcaataccaagaaaagagaatggttgctcagaggaatggaaagcatgctatccaaaattttaatgtctatgtaggcaaagagaaacaaactgttgcagaaatgcttccttatttgagattaggatacatttcagatccagacgaaatgcagtctatactctcttctgaaggagatacatgtccagttagtccatgtacagagcgagctgtacttgatcagcttggtggttacctggaatctcggttggctggttatccaacaacattgaatgaagatgaagctatgttggcagatggcagtttggaaccaaagcaggaagttgctactaggcttgtgaggttggagaagaagatgctccatgcctgtctccaggccacaaatgagtttataactgacttgccagaccacacagtatcaccttgccctgctcaatatgcccctgaaatgaaatgaggttgcatgttgttttctttcccaaatggtcatatcattaagaatgtcacaatttgatcaatgtgcatatctttttgaagaccatatatgctgcaaggtggatataatatttgaaagaatttgctccttgttttctttagagattacgtaaacgcaattgcttgctagaaggaaatcacatctcttgatgttccaagttataagggtatcagtggtcttcagcgggatatggtaatggtctccaacgggatgtggccatgttgtagttattagttgcaatgcaccaaagtagtggcggacttaggatttgaacctcgggtattctaagacataaaaaatggtatgtaataccatatacagttcagtaacacatatatataatggtaggcgtttcggagatg

SEQ ID NO: 73985 - DNA, 571 bp, Zea Mays
taacaattaccctcttgtgacacaaaaatattgtgccatttgacgaccaagattaaagcaactgatttatatgttacagatatgtttctcagtttgttgatatttttgaactatgcagctgagttgttgacaaacaacaagttatctgagttggcatgtttggcattatatctcatgtatgagaaaaagcaaggaaaggattcattttggtacccctacattaaggaacttgaccgacatcgaggaagggggcagctagctgttgaatcaccacttctatggactgaaagtgaactggactaccttagtggaagccccttgaaggatgaagttgttgctagagatgaggcaataaggagagagtataatgagcttgacacattgtggtttatggcaggttcactatttcagcaatatccttttgacatacctactgaggcttttccgtttgaaatattcaagcaggcttttgttgcagtacagtcttgtgttgttcatttgcagtgtctgataggaagatgtaagctgatgcactgctgccactgcaaaaggtagaacgacctatatgtgg

SEQ ID NO: 73986 - DNA, 1547 bp, Zea Mays
gatatttttgaactatgcagctgagttgttgacaaacaacaagttatctgagttggcatgtttggcattatatctcatgtatgagaaaaagcaaggaaaggattcattttggtacccctacattaaggaacttgaccgacatcgaggaagggggcagctagctgttgaatcaccacttctatggactgaaagtgaactggactaccttagtggaagccccttgaaggatgaagttgttgctagagatgaggcaataaggagagagtataatgagcttgacacattgtggtttatggcaggttcactatttcagcaatatccttttgacatacctactgaggcttttccgtttgaaatattcaagcaggcttttgttgcagtacagtcttgtgttgttcatttgcagttatgcttcttatccaagagcagaaagttagtcttgctcgaaggttcgcactagttcccttggggccgccactattgacttacaagagcaactgcaaagcgatgttgacagttgatggtgagtctgttcgattggtggtggatcggccatataaagctggagaaccaataatcatctggtgtggaccccaaacaaactccaggcttgttctgaactatggttttgttgatgaaaacaatccctttgatcgcatatcaattgaggcatctttaaatacagaagatcctcaataccaagaaaagagaatggttgctcagaggaatggaaagcatgctatccaaaattttaatgtctatgtaggcaaagagaaacaaactgttgcagaaatgcttccttatttgagattaggatacatttcagatccagacgaaatgcagtctatactctcttctgaaggagatacatgtccagttagtccatgtacagagcgagctgtacttgatcagcttggtggttacctggaatctcggttggctggttatccaacaacattgaatgaagatgaagctatgttggcagatggcagtttggaaccaaagcaggaagttgctactaggcttgtgaggttggagaagaagatgctccatgcctgtctccaggccacaaatgagtttataactgacttgccagaccacacagtatcaccttgccctgctcaatatgcccctgaaatgaaatgaggttgcatgttgttttctttcccaaatggtcatatcattaagaatgtcacaatttgatcaatgtgcatatctttttgaagaccatatatgctgcaaggtggatataatatttgaaagaatttgctccttgttttctttagagattacgtaaacgcaattgcttgctagaaggaaatcacatctcttgatgttccaagttataagggtatcagtggtcttcagcgggatatggtaatggtctccaacgggatgtggccatgttgtagttattagttgcaatgcaccaaagtagtggcggacttaggatttgaacctcgggtattctaagacataaaaaatggtatgtaataccatatacagttcagtaacacatatatataatggtaggcgtttcggagatg

SEQ ID NO: 73987 - DNA, 1701 bp, Zea Mays
gctgagttgttgacaaacaacaagttatctgagttggcatgtttggcattatatctcatgtatgagaaaaagcaaggaaaggattcattttggtacccctacattaaggaacttgaccgacatcgaggaagggggcagctagctgttgaatcaccacttctatggactgaaagtgaactggactaccttagtggaagccccttgaaggatgaagttgttgctagagatgaggcaataaggagagagtataatgagcttgacacattgtggtttatggcaggttcactatttcagcaatatccttttgacatacctactgaggcttttccgtttgaaatattcaagcaggcttttgttgcagtacagtcttgtgttgttcatttgcagaaagttagtcttgctcgaaggttcgcactagttcccttggggccgccactattgacttacaagagcaactgcaaagcgatgttgacagttgatggtgagtctgttcgattggtggtggatcggccatataaagctggagaaccaataatcatctgattatacaggtgtggaccccaaacaaactccaggcttgttctgaactatggttttgttgatgaaaacaatccctttgatcgcatatcaattgaggcatctttaaatacagaagatcctcaataccaagaaaagagaatggttgctcagaggaatggaaagcatgctatccaaaattttaatgtgggaacttttttcctttttttagtgaaattgtaaatgttatatgttgatatgcctcgttgaatcaggtctatgtaggcaaagagaaacaaactgttgcagaaatgcttccttatttgagattaggatacatttcagatccagacgaaatgcagtctatactctcttctgaaggagatacatgtccagttagtccatgtacagagcgagctgtacttgatcagcttggtggttacctggaatctcggttggctggttatccaacaacattgaatgaagatgaagctatgttggcagatggcagtttggaaccaaagcaggaagttgctactaggcttgtgaggttggagaagaagatgctccatgcctgtctccaggccacaaatgagtttataactgacttgccagaccacacagtatcaccttgccctgctcaatatgcccctgaaatgaaatgaggttgcatgttgttttctttcccaaatggtcatatcattaagaatgtcacaatttgatcaatgtgcatatctttttgaagaccatatatgctgcaaggtggatataatatttgaaagaatttgctccttgttttctttagagattacgtaaacgcaattgcttgctagaaggtaaatgaggctgaccgaagttgtgttacattgtttcatgccaaaaagcgcgatacgtaatacaaatgtattgttcattgatacgaacgctgcttatggttacagcttgcgtgttccaggaaatcacatctcttgatgttccaagttataagggtatcagtggtcttcagcgggatatggtaatggtctccaacgggatgtggccatgttgtagttattagttgcaatgcaccaaagtagtggcggacttaggatttgaacctcgggtattctaagacataaaaaatggtatgtaataccatatacagttcagtaacacatatatataatggtaggcgtttcggagatg

SEQ ID NO: 73988 - DNA, 1541 bp, Zea Mays
ctgagttgttgacaaacaacaagttatctgagttggcatgtttggcattatatctcatgtatgagaaaaagcaaggaaaggattcattttggtacccctacattaaggaacttgaccgacatcgaggaagggggcagctagctgttgaatcaccacttctatggactgaaagtgaactggactaccttagtggaagccccttgaaggatgaagttgttgctagagatgaggcaataaggagagagtataatgagcttgacacattgtggtttatggcaggttcactatttcagcaatatccttttgacatacctactgaggcttttccgtttgaaatattcaagcaggcttttgttgcagtacagtcttgtgttgttcatttgcagttatgcttcttatccaagagcagaaagttagtcttgctcgaaggttcgcactagttcccttggggccgccactattgacttacaagagcaactgcaaagcgatgttgacagttgatggtgagtctgttcgattggtggtggatcggccatataaagctggagaaccaataatcatctggtgtggaccccaaacaaactccaggcttgttctgaactatggttttgttgatgaaaacaatccctttgatcgcatatcaattgaggcatctttaaatacagaagatcctcaataccaagaaaagagaatggttgctcagaggaatggaaagcatgctatccaaaattttaatgtctatgtaggcaaagagaaacaaactgttgcagaaatgcttccttatttgagattaggatacatttcagatccagacgaaatgcagtctatactctcttctgaaggagatacatgtccagttagtccatgtacagagcgagctgtacttgatcagcttggtggttacctggaatctcggttggctggttatccaacaacattgaatgaagatgaagctatgttggcagatggcagtttggaaccaaagcaggaagttgctactaggcttgtgaggttggagaagaagatgctccatgcctgtctccaggccacaaatgagtttataactgacttgccagaccacacagtatcaccttgccctgctcaatatgcccctgaaatgaaatgaggttgcatgttgttttctttcccaaatggtcatatcattaagaatgtcacaatttgatcaatgtgcatatctttttgaagaccatatatgctgcaaggtggatataatatttgaaagaatttgctccttgttttctttagagattacgtaaacgcaattgcttgctagaagcttgcgtgttccaggaaatcacatctcttgatgttccaagttataagggtatcagtggtcttcagcgggatatggtaatggtctccaacgggatgtggccatgttgtagttattagttgcaatgcaccaaagtagtggcggacttaggatttgaacctcgggtattctaagacataaaaaatggtatgtaataccatatacagttcagtaacacatatatataatggtaggcgtttcggagatg

SEQ ID NO: 73989 - DNA, 1613 bp, Zea Mays
ctgagttgttgacaaacaacaagttatctgagttggcatgtttggcattatatctcatgtatgagaaaaagcaaggaaaggattcattttggtacccctacattaaggaacttgaccgacatcgaggaagggggcagctagctgttgaatcaccacttctatggactgaaagtgaactggactaccttagtggaagccccttgaaggatgaagttgttgctagagatgaggcaataaggagagagtataatgagcttgacacattgtggtttatggcaggttcactatttcagcaatatccttttgacatacctactgaggcttttccgtttgaaatattcaagcaggcttttgttgcagtacagtcttgtgttgttcatttgcagaaagttagtcttgctcgaaggttcgcactagttcccttggggccgccactattgacttacaagagcaactgcaaagcgatgttgacagttgatggtgagtctgttcgattggtggtggatcggccatataaagctggagaaccaataatcatctggtgtggaccccaaacaaactccaggcttgttctgaactatggttttgttgatgaaaacaatccctttgatcgcatatcaattgaggcatctttaaatacagaagatcctcaataccaagaaaagagaatggttgctcagaggaatggaaagcatgctatccaaaattttaatgcaaagagaaacaaactgttgcagaaatgcttccttatttgagattaggatacatttcagatccagacgaaatgcagtctatactctcttctgaaggagatacatgtccagttagtccatgtacagagcgagctgtacttgatcagcttggtggttacctggaatctcggttggctggttatccaacaacattgaatgaagatgaagctatgttggcagatggcagtttggaaccaaagcaggaagttgctactaggcttgtgaggttggagaagaagatgctccatgcctgtctccaggccacaaatgagtttataactgacttgccagaccacacagtatcaccttgccctgctcaatatgcccctgaaatgaaatgaggttgcatgttgttttctttcccaaatggtcatatcattaagaatgtcacaatttgatcaatgtgcatatctttttgaagaccatatatgctgcaaggtggatataatatttgaaagaatttgctccttgttttctttagagattacgtaaacgcaattgcttgctagaaggtaaatgaggctgaccgaagttgtgttacattgtttcatgccaaaaagcgcgatacgtaatacaaatgtattgttcattgatacgaacgctgcttatggttacagcttgcgtgttccaggaaatcacatctcttgatgttccaagttataagggtatcagtggtcttcagcgggatatggtaatggtctccaacgggatgtggccatgttgtagttattagttgcaatgcaccaaagtagtggcggacttaggatttgaacctcgggtattctaagacataaaaaatggtatgtaataccatatacagttcagtaacacatatatataatggtaggcgtttcggagatg

SEQ ID NO: 73990 - DNA, 1196 bp, Zea Mays
gtttatggcaggttcactatttcaggcttttgttgcagtacagtcttgtgttgttcatttgcagaaagttagtcttgctcgaaggttcgcactagttcccttggggccgccactattgacttacaagagcaactgcaaagcgatgttgacagttgatggtgagtctgttcgattggtggtggatcggccatataaagctggagaaccaataatcatctggtgtggaccccaaacaaactccaggcttgttctgaactatggttttgttgatgaaaacaatccctttgatcgcatatcaattgaggcatctttaaatacagaagatcctcaataccaagaaaagagaatggttgctcagaggaatggaaagcatgctatccaaaattttaatgtctatgtaggcaaagagaaacaaactgttgcagaaatgcttccttatttgagattaggatacatttcagatccagacgaaatgcagtctatactctcttctgaaggagatacatgtccagttagtccatgtacagagcgagctgtacttgatcagcttggtggttacctggaatctcggttggctggttatccaacaacattgaatgaagatgaagctatgttggcagatggcagtttggaaccaaagcaggaagttgctactaggcttgtgaggttggagaagaagatgctccatgcctgtctccaggccacaaatgagtttataactgacttgccagaccacacagtatcaccttgccctgctcaatatgcccctgaaatgaaatgaggttgcatgttgttttctttcccaaatggtcatatcattaagaatgtcacaatttgatcaatgtgcatatctttttgaagaccatatatgctgcaaggtggatataatatttgaaagaatttgctccttgttttctttagagattacgtaaacgcaattgcttgctagaagcttgcgtgttccaggaaatcacatctcttgatgttccaagttataagggtatcagtggtcttcagcgggatatggtaatggtctccaacgggatgtggccatgttgtagttattagttgcaatgcaccaaagtagtggcggacttaggatttgaacctcgggtattctaagacataaaaaatggtatgtaataccatatacagttcagtaacacatatatataatggtaggcgtttcggagatg

SEQ ID NO: 73991 - DNA, 654 bp, Zea Mays
agaacagagcacaaacgcgcgcgcttgtagaatgcccgcctttcccgtccgcgcctccgcttcgtccagcgtcgtcggtagcctcaccggtacccgccgccccaggctcatcaagaacaccaccgtcatcttcgccaccgccccctccaccctcgtggccatgggcgacgccgtggagcacctcaagagcgggttccagaagttcaagaccgaggtgtatgacaagaagccggagctgttcgagcctctcaaggccggtcaggcccccaagtacatggtgttcgcctgctccgactcccgcgtgtgcccgtcggtgaccctgggcctgcagcccggcgaggccttcaccgtgcgcaacatcgccgccatggtcccggcctacgacaagaccaagtacaccggcatcgggtccgccatcgagtacgccgtgtgcgccctcaaggtggaggtcctcgtggtcatcggccacagctgctgcggtggcatccgggcgctgctctccctccaggacggtgcacccgacaacttccacttcgtcgagaactgggtcaagatcggcttccctgccaaggtcaaggtgaagaaagagcacgcctccgtgcccttcgatgaccagtgctccatcctggagaagagaggacgatcgaccttgtg

SEQ ID NO: 73992 - DNA, 624 bp, Zea Mays
atgggaggagggaggggggcagcgaagccatccatccatccatagatccctcacctcactcactcgtgaagaaccagagaacccacccaccctccttcatctcctacatccacatctatccaagaaggccatgggcgacgccgtggagcacctcaagagcgggttccagaagttcaagaccgaggtgtatgacaagaagccggagctgttcgagcctctcaaggccggtcaggcccccaagtacatggtgttcgcctgctccgactcccgcgtgtgcccgtcggtgaccctgggcctgcagcccggcgaggccttcaccgtgcgcaacatcgccgccatggtcccggcctacgacaagaccaagtacaccggcatcgggtccgccatcgagtacgccgtgtgcgccctcaaggtggaggtcctcgtggtcatcggccacagctgctgcggtggcatccgggcgctgctctccctccaggacggtgcacccgacaacttccacttcgtcgagaactgggtcaagatcggcttccctgccaaggtcaaggtgaagaaagagcacgcctccgtgcccttcgatgaccagtgctccatcctggagaagagaggacgatcgaccttgtg

SEQ ID NO: 73993 - DNA, 1592 bp, Zea Mays
cgcacccgtcccgtgtatacttcggcaacccgctgtcccatgcgctcacatggaatggaagctcccgcacgaactcgaaccaccttcgcctcgccacctcttcctcttccccagtagccgccgtcacccacccactgcggcagccaaaccacgtgaggccttccacccagctcaagcccacagcatccactgacactgccaccgccgctcacctccccggcgttcccggctccaccaactactgcaagcatgaggcagcccaccagcgcgggcggcgacgctgggttcgtgcgcgcggaccagatcgacctcaagagcctggacgagcagctcgagcgccacctcggacgccgggcggagcggggagtcggcctaccctccgggacggggagccgcggcggcgagtccgcgaggctgggcccggaggagctgacgccgctgcggcggtgccgtgaagactgggagatcgaccccaccaagctcgttatcaagggcgtcatcgcgcgcggcacctttggcaccgtccaccgcggcgtctacgacggccaggacgtcgctgtaaaattgcttgactggggtgaggatggtcatagatcagaacaagaaattgctgcactgcgagcagcttttgcacaagaagttgttgtctggcataagcttgaacatccgaacgttactaagaacaggagaaggaagcttgcctttaaagttgtggtccaaatagctcttgacattgccaggggattatgctatctccactcagagaagatagtgcatcgtgatgtcaagactgaaaatatgcttctggacaaaacgagaactgtaaaaattgctgattttggtgttgcccgagttgaggcttcaaaccctagcgatatgacgggcgaaacagggacacttggttacatggctccagaggaagtgtgacgtgtacagctttgggatctgcctgtgggaggtatactgctgtgacatgccgtaccccgaccttagcttttctgaagtcacctctgccgtggttcgccagaacctgaggcctgagataccgcgctgctgcccgagctcgctagcgaacgtgatgaagcgatgctgggacgcgaacccggacaagcgtcccgagatggcggaggtggtgtccatgctggaggtgatcgacacgtccaagggtggcggcatgatccccaaggaccagacgcagggctggctctcgtgtttccgccggtaccgaggcccctaacgcagagttgcttttacccggcgaaatgatgatattggtctccacgactcagtgtaatctaatcgcagaactggctataattgagagttttctcgttgtcctgggcgtaaatgcatggatgggccggcagttgacgattgatgtccgttcaaatgcttgctgtaagttaattcaggtgtagagggagttgctgtggccgtttgctcacatcgtttaatttcatggccgtgacgtgaagcaggtcatttttagaaaaaaaatatgtattaatatttcagtctctatcgattgacacatatagttgtccaaagttacatctaacaaatagctaaagttcttttagggctagtttgag

SEQ ID NO: 73994 - DNA, 2001 bp, Zea Mays
gtatacttcggcaacccgctgtcccatgcgctcacatggaatggaagctcccgcacgaactcgaaccaccttcgcctcgccacctcttcctcttccccagtagccgccgtcacccacccactgcggcagccaaaccacgtgaggccttccacccagctcaagcccacagcatccactgacactgccaccgccgctcacctccccggcgttcccggctccaccaactactgcaagcatgaggcagcccaccagcgcgggcggcgacgctgggttcgtgcgcgcggaccagatcgacctcaagagcctggacgagcagctcgagcgccacctcggacgccgggcggagcggggagtcggcctaccctccgggacggggagccgcggcggcgagtccgcgaggctgggcccggaggagctgacgccgctgcggcggtgccgtgaagactgggagatcgaccccaccaagctcgttatcaagggcgtcatcgcgcgcggcacctttggcaccgtccaccgcggcgtctacgacggccaggacgtcgctgtaaaattgcttgactggggtgaggatggtcatagatcagaacaagaaattgctgcactgcgagcagcttttgcacaagaagttgttgtctggcataagcttgaacatccgaacgttactaagtttattggtgctataatgggtgcaagagatttaaatatacagacagaacatggacatcttggcatgcccagtaatatttgctgcgttgttgttgagtacctccctggaggtgcactgaaaagttttctgataaagaacaggagaaggaagcttgcctttaaagttgtggtccaaatagctcttgacattgccaggggattatgctatctccactcagagaagatagtgcatcgtgatgtcaagactgaaaatatgcttctggacaaaacgagaactgtaaaaattgctgattttggtgttgcccgagttgaggcttcaaaccctagcgatatgacgggcgaaacagggacacttggttacatggctccagaggtatttggttttaaccatccgtctgttcctaattctaaacatgcacatttggagaagttatcctttatatatcaatagatattcttttctcgaggctgcgtctatatccattgtttttcacaccgttgtatcatctgcaaggcagcatgattttcccactgacctgagatttgttttggttcctttctctgcgcttgcatttttatttcctatttcttcaaagagtggacccgcggtttgctttgctggcatatggttgcaggttctcaacggccatgcttacaacaggaagtgtgacgtgtacagctttgggatctgcctgtgggaggtatactgctgtgacatgccgtaccccgaccttagcttttctgaagtcacctctgccgtggttcgccagaacctgaggcctgagataccgcgctgctgcccgagctcgctagcgaacgtgatgaagcgatgctgggacgcgaacccggacaagcgtcccgagatggcggaggtggtgtccatgctggaggtgatcgacacgtccaagggtggcggcatgatccccaaggaccagacgcagggctggctctcgtgtttccgccggtaccgaggcccctaacgcagagttgcttttacccggcgaaatgatgatattggtctccacgactcagtgtaatctaatcgcagaactggctataattgagagttttctcgttgtcctgggcgtaaatgcatggatgggccggcagttgacgattgatgtccgttcaaatgcttgctgtaagttaattcaggtgtagagggagttgctgtggccgtttgctcacatcgtttaatttcatggccgtgacgtgaagcaggtcatttttagaaaaaaaatatgtattaatatttcagtctctatcgattgacacatatagttgtccaaagttacatctaacaaatagctaaagttcttttagggctagtttgag

SEQ ID NO: 73995 - DNA, 1863 bp, Zea Mays
tacttcggcaacccgctgtcccatgcgctcacatggaatggaagctcccgcacgaactcgaaccaccttcgcctcgccacctcttcctcttccccagtagccgccgtcacccacccactgcggcagccaaaccacgtgaggccttccacccagctcaagcccacagcatccactgacactgccaccgccgctcacctccccggcgttcccggctccaccaactactgcaagcatgaggcagcccaccagcgcgggcggcgacgctgggttcgtgcgcgcggaccagatcgacctcaagagcctggacgagcagctcgagcgccacctcggacgccgggcggagcggggagtcggcctaccctccgggacggggagccgcggcggcgagtccgcgaggctgggcccggaggagctgacgccgctgcggcggtgccgtgaagactgggagatcgaccccaccaagctcgttatcaagggcgtcatcgcgcgcggcacctttggcaccgtccaccgcggcgtctacgacggccaggacgtcgctgtaaaattgcttgactggggtgaggatggtcatagatcagaacaagaaattgctgcactgcgagcagcttttgcacaagaagttgttgtctggcataagcttgaacatccgaacgttactaagaacaggagaaggaagcttgcctttaaagttgtggtccaaatagctcttgacattgccaggggattatgctatctccactcagagaagatagtgcatcgtgatgtcaagactgaaaatatgcttctggacaaaacgagaactgtaaaaattgctgattttggtgttgcccgagttgaggcttcaaaccctagcgatatgacgggcgaaacagggacacttggttacatggctccagaggtatttggttttaaccatccgtctgttcctaattctaaacatgcacatttggagaagttatcctttatatatcaatagatattcttttctcgaggctgcgtctatatccattgtttttcacaccgttgtatcatctgcaaggcagcatgattttcccactgacctgagatttgttttggttcctttctctgcgcttgcatttttatttcctatttcttcaaagagtggacccgcggtttgctttgctggcatatggttgcaggttctcaacggccatgcttacaacaggaagtgtgacgtgtacagctttgggatctgcctgtgggaggtatactgctgtgacatgccgtaccccgaccttagcttttctgaagtcacctctgccgtggttcgccagaacctgaggcctgagataccgcgctgctgcccgagctcgctagcgaacgtgatgaagcgatgctgggacgcgaacccggacaagcgtcccgagatggcggaggtggtgtccatgctggaggtgatcgacacgtccaagggtggcggcatgatccccaaggaccagacgcagggctggctctcgtgtttccgccggtaccgaggcccctaacgcagagttgcttttacccggcgaaatgatgatattggtctccacgactcagtgtaatctaatcgcagaactggctataattgagagttttctcgttgtcctgggcgtaaatgcatggatgggccggcagttgacgattgatgtccgttcaaatgcttgctgtaagttaattcaggtgtagagggagttgctgtggccgtttgctcacatcgtttaatttcatggccgtgacgtgaagcaggtcatttttagaaaaaaaatatgtattaatatttcagtctctatcgattgacacatatagttgtccaaagttacatctaacaaatagctaaagttcttttagggctagtttgag

SEQ ID NO: 73996 - DNA, 1858 bp, Zea Mays
tacttcggcaacccgctgtcccatgcgctcacatggaatggaagctcccgcacgaactcgaaccaccttcgcctcgccacctcttcctcttccccagtagccgccgtcacccacccactgcggcagccaaaccacgtgaggccttccacccagctcaagcccacagcatccactgacactgccaccgccgctcacctccccggcgttcccggctccaccaactactgcaagcatgaggcagcccaccagcgcgggcggcgacgctgggttcgtgcgcgcggaccagatcgacctcaagagcctggacgagcagctcgagcgccacctcggacgccgggcggagcggggagtcggcctaccctccgggacggggagccgcggcggcgagtccgcgaggctgggcccggaggagctgacgccgctgcggcggtgccgtgaagactgggagatcgaccccaccaagctcgttatcaagggcgtcatcgcgcgcggcacctttggcaccgtccaccgcggcgtctacgacggccaggacgtcgctgtaaaattgcttgactggggtgaggatggtcatagatcagaacaagaaattgctgcactgcgagcagcttttgcacaagaagttgttgtctggcataagcttgaacatccgaacgttactaaggagaaggaagcttgcctttaaagttgtggtccaaatagctcttgacattgccaggggattatgctatctccactcagagaagatagtgcatcgtgatgtcaagactgaaaatatgcttctggacaaaacgagaactgtaaaaattgctgattttggtgttgcccgagttgaggcttcaaaccctagcgatatgacgggcgaaacagggacacttggttacatggctccagaggtatttggttttaaccatccgtctgttcctaattctaaacatgcacatttggagaagttatcctttatatatcaatagatattcttttctcgaggctgcgtctatatccattgtttttcacaccgttgtatcatctgcaaggcagcatgattttcccactgacctgagatttgttttggttcctttctctgcgcttgcatttttatttcctatttcttcaaagagtggacccgcggtttgctttgctggcatatggttgcaggttctcaacggccatgcttacaacaggaagtgtgacgtgtacagctttgggatctgcctgtgggaggtatactgctgtgacatgccgtaccccgaccttagcttttctgaagtcacctctgccgtggttcgccagaacctgaggcctgagataccgcgctgctgcccgagctcgctagcgaacgtgatgaagcgatgctgggacgcgaacccggacaagcgtcccgagatggcggaggtggtgtccatgctggaggtgatcgacacgtccaagggtggcggcatgatccccaaggaccagacgcagggctggctctcgtgtttccgccggtaccgaggcccctaacgcagagttgcttttacccggcgaaatgatgatattggtctccacgactcagtgtaatctaatcgcagaactggctataattgagagttttctcgttgtcctgggcgtaaatgcatggatgggccggcagttgacgattgatgtccgttcaaatgcttgctgtaagttaattcaggtgtagagggagttgctgtggccgtttgctcacatcgtttaatttcatggccgtgacgtgaagcaggtcatttttagaaaaaaaatatgtattaatatttcagtctctatcgattgacacatatagttgtccaaagttacatctaacaaatagctaaagttcttttagggctagtttgag

SEQ ID NO: 73997 - DNA, 1997 bp, Zea Mays
tacttcggcaacccgctgtcccatgcgctcacatggaatggaagctcccgcacgaactcgaaccaccttcgcctcgccacctcttcctcttccccagtagccgccgtcacccacccactgcggcagccaaaccacgtgaggccttccacccagctcaagcccacagcatccactgacactgccaccgccgctcacctccccggcgttcccggctccaccaactactgcaagcatgaggcagcccaccagcgcgggcggcgacgctgggttcgtgcgcgcggaccagatcgacctcaagagcctggacgagcagctcgagcgccacctcggacgccgggcggagcggggagtcggcctaccctccgggacggggagccgcggcggcgagtccgcgaggctgggcccggaggagctgacgccgctgcggcggtgccgtgaagactgggagatcgaccccaccaagctcgttatcaagggcgtcatcgcgcgcggcacctttggcaccgtccaccgcggcgtctacgacggccaggacgtcgctgtaaaattgcttgactggggtgaggatggtcatagatcagaacaagaaattgctgcactgcgagcagcttttgcacaagaagttgttgtctggcataagcttgaacatccgaacgttactaagttattggtgctataatgggtgcaagagatttaaatatacagacagaacatggacatcttggcatgcccagtaatatttgctgcgttgttgttgagtacctccctggaggtgcactgaaaagttttctgataaagaacaggagaaggaagcttgcctttaaagttgtggtccaaatagctcttgacattgccaggggattatgctatctccactcagagaagatagtgcatcgtgatgtcaagactgaaaatatgcttctggacaaaacgagaactgtaaaaattgctgattttggtgttgcccgagttgaggcttcaaaccctagcgatatgacgggcgaaacagggacacttggttacatggctccagaggtatttggttttaaccatccgtctgttcctaattctaaacatgcacatttggagaagttatcctttatatatcaatagatattcttttctcgaggctgcgtctatatccattgtttttcacaccgttgtatcatctgcaaggcagcatgattttcccactgacctgagatttgttttggttcctttctctgcgcttgcatttttatttcctatttcttcaaagagtggacccgcggtttgctttgctggcatatggttgcaggttctcaacggccatgcttacaacaggaagtgtgacgtgtacagctttgggatctgcctgtgggaggtatactgctgtgacatgccgtaccccgaccttagcttttctgaagtcacctctgccgtggttcgccagaacctgaggcctgagataccgcgctgctgcccgagctcgctagcgaacgtgatgaagcgatgctgggacgcgaacccggacaagcgtcccgagatggcggaggtggtgtccatgctggaggtgatcgacacgtccaagggtggcggcatgatccccaaggaccagacgcagggctggctctcgtgtttccgccggtaccgaggcccctaacgcagagttgcttttacccggcgaaatgatgatattggtctccacgactcagtgtaatctaatcgcagaactggctataattgagagttttctcgttgtcctgggcgtaaatgcatggatgggccggcagttgacgattgatgtccgttcaaatgcttgctgtaagttaattcaggtgtagagggagttgctgtggccgtttgctcacatcgtttaatttcatggccgtgacgtgaagcaggtcatttttagaaaaaaaatatgtattaatatttcagtctctatcgattgacacatatagttgtccaaagttacatctaacaaatagctaaagttcttttagggctagtttgag

SEQ ID NO: 73998 - DNA, 2565 bp, Zea Mays
acctactcctccctcccctgctttcactccattcgcgtctcggggtttggaccagccacccggcggcggcgggcaaacacagacagggccgcagggccgagcgaccggagcgccgccgccaccggcaaagccacggcacggcacccatggagtcgcgcgccctcctgcacgcccggcctgccgccctccctgcccgcgccggcctgcgcctccctccccagctcccgcgcccgcgggcagtctccttctcccccgccgccaagcccgcgctccggtccccgctcctcgcgtcgaggggccccttcctcccgcggcacgacgcgcttctggggaacgggttcctgaagcagagagcggtcagcgttggcggtgacgtgtccttccgcgcccaggcggcggcggcggcggtgccggcgccgcagccggaggagtccgctaaaaagttcctcggcatcgacgtgaagacgctcaggaagatcgtgccgctggggctcatgttcttctgcatcctcttcaactacaccatcctgcgggacaccaaggacgtgctggtggtcaccgccaaggggagcagcgccgagatcatccctttcctcaagacctgggttaacctgcccatggccatcggattcatgctcctctacaccaagctttcaaacgttctctcgcgggaggcgctcttctacaccgtcatcttcccgttcatcgccttcttcggcgccttcgcctttgtgctctacccgctcaggaacgtcatccatcccaccgcgctcgcggacaagctgctcgccgcgctcggcccgagcttccttgggcccgtggcgatactgaggatttggagcttctgcctgttctatgttatggctgagctctggggcagcgtcgtcatctccgtgctcttctgggggttcgctaatcagttgatgaagctaaggaattctacccgttatttggccttggggctaatattgcccttatcttttctgggcgcactgtgaagtatttctcaaatttgcgcaagacattgggtcctggaattgatggctgggaagtatctttgaaaggaatgatgagcatagtcgtacttcttggacttgtcataacttccatctattggggagtaaacaaatttgttttgaatgatccttcacttccaaagtctgatcgtaagaagaaaaaggaaaagcctaaacttggcatgaaagagagtctgaaggttctgctctcctcgaggtatgtgagggatctagctaccctagtggttgcttatggcattagtatcaatcttgtcgaagtcacatggaaatcaaaactcaaggcacagttccctagtccaaatgaatactcatctttcatgggtgatttctcaaccgcaactggaattgcaactttcacgatgatgctgttaggacgtattatactacggaaatttggctggggtgtggccgcaatgatcacccccaccgttctgttgctaactggtgttggattcttctctctgattttgtttggacagccgctgactcctatgcttgccactatgggtatgacccccctactggcagccgtttatgtgggcgccatgcagaatatatttagcaagagtgcaaagtacagtttatttgacccatgcaaggagatggcttatattcctttggatgaagatatgaaggtaaaaggaaaggcagccattgatgttgtttgcaacccactgggcaagtccggcggtgcacttatccaacaattcatgatcctgacgttcggatccctggcgaattcaactccataccttgggggcatactgctggtcatcgttctcgcgtggctaggcgcggcgagctcattggacaagcagttctcgagcttggctaaggaggacctgaagaaggataaggctgcccgagagaaagtagaaccctcgctgctcaaggcgcctgcagagggcagtgatgatgtactggcggagcagacaaatggatctgtgacgccccaagcaaccggaacggagagctcgccgtcgaactcatcccccattcaataatagctccagcatcataagttgtactagctaggagagttattacagcgagcagaaataattggtactccctccggttttttttatatatttggcgttggttagtgtaagggggtgtttggtttctagggactaatgtttagtccctagattttattccattttagttccaaaattgccaaatatagaaactaaaactttattttattttctatatttagcaatttatacactaaaaaggaataaaatgaagggactaaacattagtccctagaaaccaaacacccactaaatttgactagctagcgtcaaataaaaaaatggaaatggaggtaatattaaaataactcatggttttcaagtctgtaacggcgtgcagcttcaggctgctagtgatttttgtttgtaacatgagcaaattttgacggccggcggcgaacgtcgttctgggaatggccccgcccctttgtgccgatgtcaaatgcataaactgtgtgttttgagccgatatgaagcatggttctctc

SEQ ID NO: 73999 - DNA, 1218 bp, Zea Mays
gttctcgatcaggcagcaggagcgtagcactactacgtcatgctcttcgccggtttgcctatatattggcctatacgtactctcgcagcatatctcaatcagaactcagaacacaggtcaagttcaccagaacgcggcgggttctcgatcaggcagcaggagcgcagtcgtagtcgtcgtcgtcatcgtcgccgtcggtctctgccatccttccccgtgcgctgcagcacccatcgcaaggcgcggcgtaaaccgcacccgaggaggaggtaatgctgccgccttggacgaggtagtagctagccgccgccaccgacactactgctggtgccatcctagttagtttaagactttaagtgtgcgagcgaattgcaagctgacagcgggaagaagcaaagctctcgcttggtcagttggtccaagatagctagctctagaggagtctagctaggtagtggaagctgctatactgtggctgatggaagctgtggacgcggtatgctggtgcaagctacctgtgtgggtgttcctggtgtctggtgtctggtccgatttgcacggagagggagtggccgcgtgtggtccgggctttatagcgcaccgccggcgcgggcagcgtggctgcacgcggcgcggcgccgctgggagcgtgcgtcggctagggcgttgcgtgcatggcgccccgcggcacggggctccgccgctccgggcgagcacagtcagcaatcggcagccgcgcggcccccgctcccccagccacgcgccgctggcgggtgggcgccgggggccctatggcagtgcccgcagcagcctcgcgctcttgtgccgccgagcgtgcgccgcgacgtggacatgctggaatcgcagtcctcgcgcctccgcggtacggtggggtcttggactcttgggagcgaggccggaccacagcccttctttgcgacgctgatgcagcagaaaagcagagggaaggtagtggcggcccagaggccagagggccggtctctttccggtggcatcttgacgaggaagatgatatctggtgatcttcttgagatttattcgacagcaaagtgggattcgcgacgctgcaggttatctgggcgaggcgtaatgggcgcatgcgccaccagagcagtggagtggcatggtttaggagaggcggagtctgggagaactatgctatacattgacctatattttttttaaaaaaaaagctat

SEQ ID NO: 74000 - DNA, 3075 bp, Zea Mays
cgcgtagccgctgggcggcggcaaggcggtgggggagcaatggcagggtgcgcaccctccagggtggcgtcgtgcgggccgtggggcggcagagcggcgctagagagtgagctgtcgtgggacggcagccactacagcatctccagcggcatcctgccgtcgctcggcgcgcggagcaaccgccgcgtcaagctcaggcccttcatcgtgtcgccctacgaccgccgatacagatgctgggagacttttctcataatccttgtggtatactctgcatgggtttccccatttgagtttggcttcattcagaaaccaacgggcgccctagctgcagtggacaatgtcgtgaatgcgttcttcgcagtggacatcatcctgaccttctttgtagcttacttggatagaatgacatacttgcttgaagatgatccaaaaagaatagcttggaggtatactaccagttggtttgttcttgacgtggcctccaccatcccgagtgaatttgctcggaagatactaccaccagacctcaggtcatatggatttttcaacatgcttcgtctatggcgtctccgtagagtcagctctctctttgctagattggagaaagatagacatttcaattacttctgggttcgatgcgcaaagctcatatgtgtcacactttttgcggtccactgttcggcatgcttctactatcttctcgctgatatgtatcctaccccaacagatacgtggattggtaattcaatgccagattttcatcagcggggtttgtggattcgctatgtagtgtcagtatattggtcaatcactacgcttaccactgtgggttatggtgatttgcacgcggagaacacaagggaaatgatattcaacattttctacatgttattcaaccttggattgactgcctatttgattggtaacatgaccaatctggttgtccatggcaccagccgtactcgaaaatatagagatacaattcaggcagcgaccagctttgcactaaggaatcaattaccaagtcggctccaagatcagatgatctcacatctttgcttgaagttcaggacagattcagaaggtcttcaacaacaagaaacgctcgatgtcctccctaaggctataagatccagcatttctcagtatctatttttcaatcttgtccaaaaggtttacttgtttgaaggggtgtccaatgacctcatttttcaactggtttctgagatgaaagctgaatattttccacctagggaagacgtgattttgcagaatgaagcacccacagacttttatattttagttactggtagcgcgatggttggagtggctaaggcaggagatgttgttggagaaattggggttctttgctataggcctcaactattcacagttcgaacaaaatcattatgccaacttctgcgtatgaatcgcactgcctttctcagccttgttcaatccaatgttgcagatggaacaataataatgaacaaccttattcggttattaaagcagcagaatgacaacagtgtaatgatgggtgttctgaaggagatcgagaacatgctagctcggggtcgtctggatttgccagttactctctgttttgcagtaaacaaaggagatgattttatgctacaccaacttttgaagcgtggtttggatccaaatgaatcggataacaatgggcatacagcactgcatatagctgcttccaaaggagacgaacaatgtgtcaagcttcttctagagcacggagctgatccaaatgctagagactccgaaggaaaggtgcctctttgggaggctttatgtgaaaagcagaatccagtggtagagctgctagtacagagcggtgcggggctatcatccggagacgtggccttgtacgcttgcgtcgctgtagaggaaaatgaccctgagctgcttgagaacattatccgttacggcggcaacgtaaacagctcaatgaaagacggaaccacgccgctgcaccgcgcggtctgtgacgggaacgtccagatggttgagttgttgctggaacacggagctgacatcgacaagcaggacaacaatggctggtcggcgagagctctagctgaccagcaaggccatgacgacatccagtctctctttcgatcgcggaaagcacataggcagcagcatgcctcgaagggcagagtggcacctgtgccgatatggaggttcaacagcgaacccacgatgccaaagatgaaacatgaagaagacgctgagctacgcggcaaagttgttccgcagaagctcctcagaaagagggtcagcttccagaattctcttttcggtgtcatctcttcgtcccacgcccgccaggacactggtcgtctgctctcgaaaggccttgctggaacaggtagtccaggttgcagccacggctccctcgtcagggtgacaatcggctgtcctgagaaggggaacgctgcagggaagctcgtgctcttaccacggtcgatgactgagcttctcgaactaggcgcgaggaagtttggcttcaagcctaccaaggtcctgacgactgggggtgctgagattgatgaggtggagcttatcagagacggtgatcatgttgttctcgtcagtgatgactgggcgccagatgttgcacaattaagaccgaacgacaagtgagccagccgtagtgctcttattgcaatttcacgcaacatggggaaaatatgcccctttgtgacccaagctgggttagtacatgatactccctccgtttctttttatttgtcgctggatagtgtaaaattgcactatccagcgacaaataaaaagaaacggagagagcaatgattaagccaccaatgaagttcttcattccacattgaagaattggcgagggtgtgcatgcccgccatgtaaattgaagtctagccgtgatagttttgaagctgtaggatgtatccagcttggaaatgaatttgtagtgagctggtccagtagactgtagtttcgccttctctttccaagagaatgggtccacaaaatgtaattacatgatttctttttttctgtatttgatatcaa

SEQ ID NO: 74001 - DNA, 2983 bp, Zea Mays
cacccttgcatgagcaggacgattttgctgatgctgggagacttttctcataatccttgtggtatactctgcatgggtttccccatttgagtttggcttcattcagaaaccaacgggcgccctagctgcagtggacaatgtcgtgaatgcgttcttcgcagtggacatcatcctgaccttctttgtagcttacttggatagaatgacatacttgcttgaagatgatccaaaaagaatagcttggaggtatactaccagttggtttgttcttgacgtggcctccaccatcccgagtgaatttgctcggaagatactaccaccagacctcaggtcatatggatttttcaacatgcttcgtctatggcgtctccgtagagtcagctctctctttgctagattggagaaagatagacatttcaattacttctgggttcgatgcgcaaagctcatatgtgtcacactttttgcggtccactgttcggcatgcttctactatcttctcgctgatatgtatcctaccccaacagatacgtggattggtaattcaatgccagattttcatcagcggggtttgtggattcgctatgtagtgtcagtatattggtcaatcactacgcttaccactgtgggttatggtgatttgcacgcggagaacacaagggaaatgatattcaacattttctacatgttattcaaccttggattgactgcctatttgattggtaacatgaccaatctggttgtccatggcaccagccgtactcgaaaatatgtgagccgtttttcacctttttgtttagtcttggctgataccaacctttataagggtcatattgaagttgcacctaatactttacttttcctgttatgttttggacgaaagagagatacaattcaggcagcgaccagctttgcactaaggaatcaattaccaagtcggctccaagatcagatgatctcacatctttgcttgaagttcaggacagattcagaaggtcttcaacaacaagaaacgctcgatgtcctccctaaggctataagatccagcatttctcagtatctatttttcaatcttgtccaaaaggtttacttgtttgaaggggtgtccaatgacctcatttttcaactggtttctgagatgaaagctgaatattttccacctagggaagacgtgattttgcagaatgaagcacccacagacttttatattttagttactggtagcgcgatggttggagtggctaaggcaggagatgttgttggagaaattggggttctttgctataggcctcaactattcacagttcgaacaaaatcattatgccaacttctgcgtatgaatcgcactgcctttctcagccttgttcaatccaatgttgcagatggaacaataataatgaacaaccttattcggttattaaagcagcagaatgacaacagtgtaatgatgggtgttctgaaggagatcgagaacatgctagctcggggtcgtctggatttgccagttactctctgttttgcagtaaacaaaggagatgattttatgctacaccaacttttgaagcgtggtttggatccaaatgaatcggataacaatgggcatacagcactgcatatagctgcttccaaaggagacgaacaatgtgtcaagcttcttctagagcacggagctgatccaaatgctagagactccgaaggaaaggtgcctctttgggaggctttatgtgaaaagcagaatccagtggtagagctgctagtacagagcggtgcggggctatcatccggagacgtggccttgtacgcttgcgtcgctgtagaggaaaatgaccctgagctgcttgagaacattatccgttacggcggcaacgtaaacagctcaatgaaagacggaaccacgccgctgcaccgcgcggtctgtgacgggaacgtccagatggttgagttgttgctggaacacggagctgacatcgacaagcaggacaacaatggctggtcggcgagagctctagctgaccagcaaggccatgacgacatccagtctctctttcgatcgcggaaagcacataggcagcagcatgcctcgaagggcagagtggcacctgtgccgatatggaggttcaacagcgaacccacgatgccaaagatgaaacatgaagaagacgctgagctacgcggcaaagttgttccgcagaagctcctcagaaagagggtcagcttccagaattctcttttcggtgtcatctcttcgtcccacgcccgccaggacactggtcgtctgctctcgaaaggccttgctggaacaggtagtccaggttgcagccacggctccctcgtcagggtgacaatcggctgtcctgagaaggggaacgctgcagggaagctcgtgctcttaccacggtcgatgactgagcttctcgaactaggcgcgaggaagtttggcttcaagcctaccaaggtcctgacgactgggggtgctgagattgatgaggtggagcttatcagagacggtgatcatgttgttctcgtcagtgatgactgggcgccagatgttgcacaattaagaccgaacgacaagtgagccagccgtagtgctcttattgcaatttcacgcaacatggggaaaatatgcccctttgtgacccaagctgggttagtacatgatactccctccgtttctttttatttgtcgctggatagtgtaaaattgcactatccagcgacaaataaaaagaaacggagagagcaatgattaagccaccaatgaagttcttcattccacattgaagaattggcgagggtgtgcatgcccgccatgtaaattgaagtctagccgtgatagttttgaagctgtaggatgtatccagcttggaaatgaatttgtagtgagctggtccagtagactgtagtttcgccttctctttccaagagaatgggtccacaaaatgtaattacatgatttctttttttctgtatttgatatcaa

SEQ ID NO: 74002 - DNA, 1108 bp, Zea Mays
ccgttcgcacgcaggccgaaagaagggcccaacgggcccagttatctcgcgtgggcggaaagctaggtcatccccacgatccgctcctcacctcggggaatccaacggcacccggttcctgcgtccatccaaagctaatacacacgggccgcactagcaccgctcacccctcaacagaaagcaaaagagaaacgtcacttctcctcgtataaaagcatccgcctcaacccacctcagcggactgctccaccagttgcagagtccagagtccagacgccagacgccctctacttctcttctctctagttatacatttcaaactcttggccgccgcagcggtctctgttcgccgcgccccgccgcagaaatggcgctgccgaatcagcaggttgtggattaccccagcttcaagctcgtcatcgttggcgacggtggaactggcaaaaccacatttgtgaagaggcatcttactggcgagtttgagaagaaatatgagcccaccattggtgttgaagttcaccctctggattttagcactaactgtggcaaaattcgcttctattgctgggacactgctgggcaagaaaagttcggtggcctcagggatggctactacattcatggtcagtgtgccatcattatgtttgatgtcacttcgaggctgacatacaagaatgttccaacatggcacagggacctgtgcagggtgtgtgagaacatccccatcgttctctgcggaaacaaggttgatgtaaagaacaggcaggtcaaagccaagcaagttacattccacaggaagaagaacttgcagtactatgagatttctgccaagagcaattacaactttgagaagcccttcctttacctcgcaaggaagctggcaggggatcagaaccttcactttgtcgaagccgttgctctgaagccaccggaagtgcagattgatatggccatgcagcagcagcatgaagctgagcttgcagctgccgctgcgcaacccctccctgatgacgatgatgacctgatcgaatagatgttccatggcccttatctctttcttcattctccatttccctcccgtcggcttctgtccgttgctctgacggga

SEQ ID NO: 74003 - DNA, 1970 bp, Zea Mays
cgaatcgccttctcccagatctccagactccagatctctgctcctgcccccgcctgcctcttgccagcgacaaccccgccgcagcacgcggcggccgcggggagatgctccgcctacgggcgttccggccgacgagcgacaaagtcgtgaagatccagctccaccccactcacccctggctcgtcaccgcggacgccaacgaccgcgtctctgtctggaactgggagcaccgccaggtgatctatgagctgaaggcaggtggcgttgatgagcgtcgcttggttggagcgaagcttgagaaactcgctgagggagatgattcaaaaggaaagcccaccgaggctattcgagggggaagtgtaaagcaggtttccttttatgatgatgatgttcgcttttggcaacattggcgcaattgttctgctgctgctgaggccccaactgcagtcaatcagcaatcttccatgttcagtgcacctgcaccttcgacacgaggaagacactttgttgtcatttgttgtgagaacaaagtcatatttttggatttggtgactatgcggggccgcgatgttcctaagcaggagcttgacaataggtcacttctttgtatggagttcctatctagatcatcttctagcgatgctcctcttgttgcctttgggtcatctgatggcgtcatcagagttctttcgatgttgacatggaagcttgtgcggaggtatacaggtggacataaaggagcaatagcttgcttaatgacatacatgtctgcagctggtgaggtacatttagtttctggtggcaatgatggcctgctgatattatggagtgctgatcatatccatgactcacgcgagcttgtgcctaagattagcatgaaggcccatgatggaggtgtagttgcagttgaactttcaagggtgatggggagtgctccacagctcattacaataggggctgataaaactttagccatatgggatactgttactttcaaggaaataaggcgcattaagccagtgcctaaacttgcttgtcatagtgttgcatcgtggtgtcatccccgtgcaccaaaccttgatattctaacttgtgtcaaggactcccatatttgggccatagaacacccaacttattctgctttaacaagaccgctctgcgaactgtcatcacttgttcctccacaggttcttgcacagcataagaaactgagggtttactgcatggtggcacaccccttgcagccacatcttgttgctactggaactaatattggtgtcatattaagcgagtttgatccaagagcacttccagctattgctcctttaccaacaccaacaggcagcaaggaacattctgctgtttacatagttgaaagagaacttaagttactgaatttccaattgtcgaacacagcaaatccatcccttgggaatgctggtgttgcatctgatgcaggaagatcaaggaatgattcattggaacaactgatagtaaaccagagcaagaagcatatcagcactcctgctcctcacgattcctattcggtcctttctgtcagcagttctgggaagtatgttgcaattgtatggccagatattccctcttttgctgtgtgcaaagcaagtgattggtcagttgttgattcaggcacagggaagctttttgcctgggacacctgtcgagacagatatgctttagtagagagtgcattggccccaagaatgccacttgttgtgaaaggtggttcttctaaaaaggcaaaagaagcagcagcagctgcagctcaagcagcagctgctgcagctagtgctgcttctgccgccacagtgcaagtgcgtatcttattagatgatggaacagcacatgttctgcagagatcgattgatggtcgtagtgaaccgataccctaatattgtgtccgaaatatgctgcagtaatagtttgtgatgggaatttttcagattaag

SEQ ID NO: 74004 - DNA, 2112 bp, Zea Mays
  misc_feature (2111)..(2112): n is a, c, g, or t
cgaatcgccttctcccagatctccagactccagatctctgctcctgcccccgcctgcctcttgccagcgacaaccccgccgcagcacgcggcggccgcggggagatgctccgcctacgggcgttccggccgacgagcgacaaagtcgtgaagatccagctccaccccactcacccctggctcgtcaccgcggacgccaacgaccgcgtctctgtctggaactgggagcaccgccaggtgatctatgagctgaaggcaggtggcgttgatgagcgtcgcttggttggagcgaagcttgagaaactcgctgagggagatgattcaaaaggaaagcccaccgaggctattcgagggggaaggtttccttttatgatgatgatgttcgcttttggcaacattggcgcaattgttctgctgctgctgaggccccaactgcagtcaatcagcaatcttccatgttcagtgcacctgcaccttcgacacgaggaagacactttgttgtcatttgttgtgagaacaaagtcatatttttggatttggtgactatgcggggccgcgatgttcctaagcaggagcttgacaataggtcacttctttgtatggagttcctatctagatcatcttctagcgatgctcctcttgttgcctttgggtcatctgatggcgtcatcagagttctttcgatgttgacatggaagcttgtgcggaggtatacaggtggacataaaggagcaatagcttgcttaatgacatacatgtctgcagctggtgaggtacatttagtttctggtggcaatgatggcctgctgatattatggagtgctgatcatatccatgactcacgcgagcttgtgcctaagattagcatgaaggcccatgatggaggtgtagttgcagttgaactttcaagggtgatggggagtgctccacagctcattacaataggggctgataaaactttagccatatgggatactgttactttcaaggaaataaggcgcattaagccagtgcctaaacttgcttgtcatagtgttgcatcgtggtgtcatccccgtgcaccaaaccttgatattctaacttgtgtcaaggactcccatatttgggccatagaacacccaacttattctgctttaacaagaccgctctgcgaactgtcatcacttgttcctccacaggttcttgcacagcataagaaactgagggtttactgcatggtggcacaccccttgcagccacatcttgttgctactggaactaatattggtgtcatattaagcgagtttgatccaagagcacttccagctattgctcctttaccaacaccaacaggcagcaaggaacattctgctgtttacatagttgaaagagaacttaagttactgaatttccaattgtcgaacacagcaaatccatcccttgggaatgctggtgttgcatctgatgcaggaagatcaaggaatgattcattggaacaactgatagtaaaccagagcaagaagcatatcagcactcctgctcctcacgattcctattcggtcctttctgtcagcagttctgggaagtaagttgcaattgtatggccagatattccctcttttgctgtgtgcaaagcaagtgattggtcagttgttgattcaggcacagggaagctttttgcctgggacacctgtcgagacagatatgctttagtagagagtgcattggccccaagaatgccacttgttgtgaaaggtggttcttctaaaaaggcaaaagaagcagcagcagctgcagctcaagcagcagctgctgcagctagtgctgcttctgccgccacagtgcaagtgcgtatcttattagatgatggaacagcacatgttctgcagagatcgattgatggtcgtagtgaaccggttattggactgcatggtggtgctttacttggtgtcacataccgcacatctcgtagaatcagtcctttgacagcaacagctatatcaactgttcaatcgatgcccttatcaggttttggtggaagtggatcatcttttgcatccgatgatccgttttcttctaaggaagggcctccacaaaatttccaattgtacagctgggagacctatcagcctnn

SEQ ID NO: 74005 - DNA, 1954 bp, Zea Mays
atggagacaataacgagtggtcagaagtacagagattgcagacaaggtcattatatgagccatcaaattgcgatgacagttgccacaaatccagtttcatatgaaggttgcatccaaggttattcaattggatcagttaaggttgatgatactgaagtcatcagttttttgctgcaaactgaaataattcctctgtgcttacgaaccatggagatgggtagtgagctatccaaaactgagtttggggatcaaggagaggactccaatatcttgtcatcgcggctgaaggagattagtactcctgaccgccccgctaccctccgtttcctaggtacacgcataacagccattgatatgtacacactcaaacaggaagttgatgtcataaggggtgttcttggaactcaaacatacttgcatcaaatgttatcttttgaagtacaagatacaggtatagaaccagttgtatcaggttggcatggaataaccactaacgccagtgtatttgcccagggtttggtaagcaatttgatcacagctggccatggacgcgaagcagcctttgctgctgcagttttgggagataatgctctaatggagaaagcatggcaggacacaggaatgttggctgaggctgttttacatgctcaagtaagttcttttgaattttctcatgctcaatcctacttcatgagctgcaaaccattatggttttgcgtaataacactttttttggtcttcccatttccttccatcctttgctgttattgtattatccgcttctttatttatttcactgaaattatctacaccttgtatgactttgatgtcctcacgggcctaatgaactctctaggcccatggtcgtccatcattaaggaacttggttataacgtggaacaagatgctacagaaggaactggatcacacaccaactgtaaaaaccgatgcggccgcagcattcttggcttctcttgaggatccaaagctcacaagcttgggggaaactgagaaaaagcctcccattgaaatacttcctcccgggatgcctcccctatctgcacctccaatcgtgattaaaaagtctggaacaaaacctggcctccccaatgcagtaaaagcctcaaatgggcctataggtgctccgatggttcagggtgctcccatggctcaaggtactcctggggcacaaggaatccccatgaatcaagttactccatcacagggcagcgacgaggcaaagccattagaagctacagtggttgatgcagctcccaccacttcagaaggcactgcagctcccgcagctgcagaaggcacagcagctcccagcagtgaggaagctaaagcagcacctgggagtgagggaggcacatcgcatccaatcaacgaggaagccacagcagttgcagtttcagatgcaccaggcagccctgatgctgcggctgcggctgctcttgctcctgcagctgataccagtagctcggatgcacctgctgttactcccagtgaagtaaccgtctctcccccttcaaccgacgcacccgagttgaccgataagccatcaccaacagaggcatcgttgccgcctccacctagtgtttctggtgtatagaacatttcagattatttttgcagtgtgccatttttttttgtatgctgccgcgttcgttccactgtaatttttaacccatacatactggtataggcatttgctgccccatggttcaggtatcgcagacgccaggcagtatgtgagtagccctgtacatctgctgtctgcgtctcgcgagaacttgctgccattgtgtcagttgtgtgggcatagcttatgttgtttgtgatcaatccgtaggaccacagtttaattttttgcttgatcagctgcatcaccgatatcacttcttgccttgtacgacagtttcctattttgccgatttaaagcaagtgctga

SEQ ID NO: 74006 - DNA, 2506 bp, Zea Mays
caacaaccagcaccttgaagacaactgaggttctatttaaccccctcgtctcccccgctcattccagcctaaaaacttgcccagagcgcctgaacctgcctccgctccactcttgccccccccctggcaccacactagcctagtgagtagtgcagcagtcttgctcggttgctcctacctgtcctgcacagcacaggagcagagcccaggaccgtcggcaaaaggggagcggccatgaagtacgtgctggtgaccggaggggtggtgagcggcctcggcaagggcgtgacggccagcagcatcggcgtcgtgctcaaggcctgcggcctccgcgtcaccaccatcaagatcgatccatacctcaacactgatgctggaaccatgtctccattcgagcatggagaggtgtttgttttggacgatggtggagaggtggatttggaccttggaaattatgagcgttttctggatatcaaattgacccgtgacaataatataaccacaggaaagatctatcaggctgtcattaacaaagaaaggagaggtgactacctaggaaaaaccgtccaggtagtgccacatattacagacgaaatacaagattggattgaacgcgtcgcagtgattccagtcgacggcaaagaaggacctcctgatgtttgtgtcattgaacttgggggcactatagggggcaaaatcttttcgccgaataacgccagtggcattcttggtgcaggggatatcgagtcaatgcctttcattgaagcattaggtcaattttcataccgtgttggacctggaaacttctgtctcgttcatgtcagtcttgttccggttataaatgtagtcggtgaacagaaaactaagcctacacaacatagtgttcgagggcttagaggacttgggctagcaccggatgttttagcatgtcgcagtactgagccactggaggaacatgtgaagatcaagctttcacaattttgtcatgttccgatctcaaatatagtgaacctccatgacgtgacaaacatttggcacatccccttgctgctaagggaccagaagacccatgaagctattctgaaagttttagatcttcagtatgatggaaaagtacctcgggaacctgagttagggatgtggactaaaagagccaccaagttggacaaattgaagacttcggtcaagattgccatggttggtaaatacactggcctgtcggactcctacctgtctgtcataaaggctcttttgcatgcatcagttgctatggaaagaaaacttgtagtcgagtgggttccttcctgcgatctggaagattcttcagctaaagagacccctgaagcccataaaaaagcatggaaattgctgaagggtgcagatggtgtactcgttcctggaggattcggagataggggagtccagggcaaaattcttgccgcaaaatatgcacgcgagaacaatgttccttatcttggcatttgcttgggaatgcaaattgcagtgattgagtttgcccgttcggtgatgaaactacgaggtgccaatagcacggaattcgatccagctacaacatcaccctgtgtcatcttcatgccagagggctcaaaaacccagatgggagctacaatgaggcttggatcgaggagaacctatttccatgtcagtggctgcaaatctgcaaagctgtatgccaatgccagctctgtagatgaaagacatcgccacagatacgaggtgaaccctgatatggtcccagacttcgagagggccgggcttcaattcgtgggcaaagatgaaagtggaaaacgcatggggatcattgagcttccctctcacaagttcttcatcggtgcacaattccatcctgaattcaagtcgagaccaggaaaaccatctccgcttttcttagggctgatagccgcggcatctggacagctagagcctttgcttcaacgcagcaatccgacaacaaaagcatgtcctatgagtaaagtcccgaaactgaaactgtacccaactggacctgtgaataatccactgaacagcttggtaaatgggtactacccaaatggcactggcatccacacctagaagcataatgcttagcgatggtctatttgatgtttgttcctatggttttgcttgtacccctttttatgtttgtttttcagtttgtatttgtctctgatcaactgggaaggctaagattcagcaagccccagctccagcaacacatggttccgacattttaacgaggaacgtcctccggtccgttggagcaaactagctatagagtggtgaggtctagtgtgatttttttgagccctggaattaagcgcgggaagtgttttggtagcgttagtagagcctggaatctcaactatttgtacattatggaagaacttatctaaggactgaatacacaaatgcttggccatgatttgctttgttgccacaatattaacaaccacaatcagatgtagaaaaaaaaacctctaacaaa

SEQ ID NO: 74007 - DNA, 3149 bp, Zea Mays
ctcgtctcccccgctcattccagcctaaaaacttgcccagagcgcctgaacctgcctccgctccactcttgccccccccctggcaccacactagcctagtgagtagtgcagcagtcttgctcggttgctcctacctgtcctgcacagcacaggagcagagcccaggaccgtcggcaaaaggggagcggccatgaagtacgtgctggtgaccggaggggtggtgagcggcctcggcaagggcgtgacggccagcagcatcggcgtcgtgctcaaggcctgcggcctccgcgtcaccaccatcaagatcgatccatacctcaacactgatgctggaaccatgtctccattcgagcatggagaggtgtttgttttggacgatggtggagaggtggatttggaccttggaaattatgagcgttttctggatatcaaattgacccgtgacaataatataaccacaggaaagatctatcaggctgtcattaacaaagaaaggagaggtgactacctaggaaaaaccgtccaggtagtgccacatattacagacgaaatacaagattggattgaacgcgtcgcagtgattccagtcgacggcaaagaaggacctcctgatgtttgtgtcattgaacttgggggcactataggggatatcgagtcaatgcctttcattgaagcattaggtcaattttcataccgtgttggacctggaaacttctgtctcgttcatgtcagtcttgttccggttataaatgtagtcggtgaacagaaaactaagcctacacaacatagtgttcgagggcttagaggacttgggctagcaccggatgttttagcatgtcgcagtactgagccactggaggaacatgtgaagatcaagctttcacaattttgtcatgttccgatctcaaatatagtgaacctccatgacgtgacaaacatttggcacatccccttgctgctaagggtagggtatttcttttcccatggagtgttcaccataaattcgaaactcaacttatttaaccatccacaatggaacttttttataggaccagaagacccatgaagctattctgaaagttttagatcttcagtatgatggaaaagtacctcgggaacctgagttagggatgtggactaaaagagccaccaagttggacaaattgaagacttcggtcaagattgccatggttggtaaatacactggcctgtcggactcctacctgtctgtcataaaggtgacattattactatttgaattttaaaatgaaaacttggccaacgaggaggaactgggtggtaatataaataagaagaaaataggtggacaaattttgatctgaaaacgaacatgggtggtgggggtgtacatccatacctcccaccaacccaatgtttgattatgaattgatgaaaaataacttactagaccgaaatgaatcgcatgcttttttcagttcctcgaccatgactctaccctatcttactgaaaataaaggccagagcaacgttgagatggcactgccttataaacttaccataaacaggtgcaaatgagaattgaggaattgagaagagactggaacctgcttgaagagtttcagttttcttacatggtgctgttttcagtttgaagcttgtttaaattgtggttatgctcttaattgaatggagttgtgtctggaatactctttcttgctagcagaacaaacaactaagttgcacaccatgacaatcttactcttcctgctgactaacttgtcgaaattaaccttattacaggctcttttgcatgcatcagttgctatggaaagaaaacttgtagtcgagtgggttccttcctgcgatctggaagattcttcagctaaagagacccctgaagcccataaaaaagcatggaaattgctgaagggtgcagatggtgtactcgttcctggaggattcggagataggggagtccagggcaaaattcttgccgcaaaatatgcacgcgagaacaatgttccttatcttggcatttgcttgggaatgcaaattgcagtgattgagtttgcccgttcggtgatgaaactacgaggtgccaatagcacggaattcgatccagctacaacatcaccctgtgtcatcttcatgccagagggctcaaaaacccagatgggagctacaatgaggcttggatcgaggagaacctatttccatgtcagtggctgcaaatctgcaaagctgtatgccaatgccagctctgtagatgaaagacatcgccacagatacgaggttccctgattgaattgtctattagccatatcgaataatgtatgccactgttaatctttttgcatagtgacgtttttgttgttgttgttgttgttttccctttcaggtgaaccctgatatggtcccagacttcgagagggccgggcttcaattcgtgggcaaagatgaaagtggaaaacgcatggggatcattgagcttccctctcacaagttcttcatcggtgcacaattccatcctgaattcaagtcgagaccaggaaaaccatctccgcttttcttagggctgatagccgcggcatctggacagctagagcctttgcttcaacgcagcaatccgacaacaaaagcatgtcctatgagtaaagtcccgaaactgaaactgtacccaactggacctgtgaataatccactgaacagcttggtaaatgggtactacccaaatggcactggcatccacacctagaagcataatgcttagcgatggtctatttgatgtttgttcctatggttttgcttgtacccctttttatgtttgtttttcagtttgtatttgtctctgatcaactgggaaggctaagattcagcaagccccagctccagcaacacatggttccgacattttaacgaggaacgtcctccggtccgttggagcaaactagctatagagtggtgaggtctagtgtgatttttttgagccctggaattaagcgcgggaagtgttttggtagcgttagtagagcctggaatctcaactatttgtacattatggaagaacttatctaaggactgaatacacaaatgcttggccatgatttgctttgttgccacaatattaacaaccacaatcagatgtagaaaaaaaaacctctaacaaa

SEQ ID NO: 74008 - DNA, 2199 bp, Zea Mays
ggctgatattattcctcactcaaaacggccttgaaatgaaattccttgaaccaaatatactgtcaaatgagagattcagattcctactgtcaaatccatacctcaacactgatgctggaaccatgtctccattcgagcatggagaggtgtttgttttggacgatggtggagaggtggatttggaccttggaaattatgagcgttttctggatatcaaattgacccgtgacaataatataaccacaggaaagatctatcaggctgtcattaacaaagaaaggagaggtgactacctaggaaaaaccgtccaggtagtgccacatattacagacgaaatacaagattggattgaacgcgtcgcagtgattccagtcgacggcaaagaaggacctcctgatgtttgtgtcattgaacttgggggcactataggggatatcgagtcaatgcctttcattgaagcattaggtcaattttcataccgtgttggacctggaaacttctgtctcgttcatgtcagtcttgttccggttataaatgtagtcggtgaacagaaaactaagcctacacaacatagtgttcgagggcttagaggacttgggctagcaccggatgttttagcatgtcgcagtactgagccactggaggaacatgtgaagatcaagctttcacaattttgtcatgttccgatctcaaatatagtgaacctccatgacgtgacaaacatttggcacatccccttgctgctaagggaccagaagacccatgaagctattctgaaagttttagatcttcagtatgatggaaaagtacctcgggaacctgagttagggatgtggactaaaagagccaccaagttggacaaattgaagacttcggtcaagattgccatggttggtaaatacactggcctgtcggactcctacctgtctgtcataaaggctcttttgcatgcatcagttgctatggaaagaaaacttgtagtcgagtgggttccttcctgcgatctggaagattcttcagctaaagagacccctgaagcccataaaaaagcatggaaattgctgaagggtgcagatggtgtactcgttcctggaggattcggagataggggagtccagggcaaaattcttgccgcaaaatatgcacgcgagaacaatgttccttatcttggcatttgcttgggaatgcaaattgcagtgattgagtttgcccgttcggtgatgaaactacgaggtgccaatagcacggaattcgatccagctacaacatcaccctgtgtcatcttcatgccagagggctcaaaaacccagatgggagctacaatgaggcttggatcgaggagaacctatttccatgtcagtggctgcaaatctgcaaagctgtatgccaatgccagctctgtagatgaaagacatcgccacagatacgaggtgaaccctgatatggtcccagacttcgagagggccgggcttcaattcgtgggcaaagatgaaagtggaaaacgcatggggatcattgagcttccctctcacaagttcttcatcggtgcacaattccatcctgaattcaagtcgagaccaggaaaaccatctccgcttttcttagggctgatagccgcggcatctggacagctagagcctttgcttcaacgcagcaatccgacaacaaaagcatgtcctatgagtaaagtcccgaaactgaaactgtacccaactggacctgtgaataatccactgaacagcttggtaaatgggtactacccaaatggcactggcatccacacctagaagcataatgcttagcgatggtctatttgatgtttgttcctatggttttgcttgtacccctttttatgtttgtttttcagtttgtatttgtctctgatcaactgggaaggctaagattcagcaagccccagctccagcaacacatggttccgacattttaacgaggaacgtcctccggtccgttggagcaaactagctatagagtggtgaggtctagtgtgatttttttgagccctggaattaagcgcgggaagtgttttggtagcgttagtagagcctggaatctcaactatttgtacattatggaagaacttatctaaggactgaatacacaaatgcttggccatgatttgctttgttgccacaatattaacaaccacaatcagatgtagaaaaaaaaacctctaacaaa

SEQ ID NO: 74009 - DNA, 4005 bp, Zea Mays
gaacgatgaaagaacagaacacgaaacaaagggagggaaataaaaaccgaaaattctatcggaaatcgagaaaaaaatctatcttcgcttgcatcgggcatgtaataatcagactccgcctacctgccgacgctcctcgtgacatcacccatcatcccacacggtcgacggaaagtggtacgctgccgctccaaaacttgttcatatccgtctctctctcctccaagaccatgcccaaatcaccacgatcctaagccagcccagaccgctctcaaaagccgaatttctcaagcaacagctcgttccaatcgcttcgaaacctaaatccactgctcaaatcatacacacattgaacgacacctcccaccaaacacacacacacacacaaatttcggaaagagaactgccagcgcagatcgccatccgaccacgaggctaccaaaatgcagcgcccagactcgtgccagccagccagccatcactcctgctccatctccatggatgcacacaccaccgcggccggccaccatcagcgaccacagatagaatcgagagggcaaccgcacgagcaccagctctgctctcacggcggagacgacgacgacgacttccatgtcacgacccacccccctatccgatcccaaatcgcacgaggaaacttcgggaggaaaaaaaaaacgcacctccctggccacccgggcgcgttcccttgtctatcccccctgtgcttggaagcccatgagagcacaccaagaacaagcacaggagacgagagagaaagagagagagagagataggaaaaaaaaatccccaaaatccaaggccgatttatcttcgccaacatctggccagctccatccgaggccgttcccgctgcctccgcgaggtctcgggagggggagaggagctccccgactgaccgaattcgcgaggcaggcaggcacgcaggcttagggtttgccaaggtgctccggcgccctgactcgccggggcgatctagcggccggttcctcggttccggatgatcttcaagcggagtcagcggtcggagatccttgcgccgcggcgctgcaatgccgcggacagcggaggcgaggacgaggggggaggcggcccccgcccgaggaagaggcggaggggcgacgagttcttccccgtcgacctgctcggcgacgtcccagcctccagcatcccgtacgctgccttcgggctccggtggagcgaggcgcccgaggcaccgccagaggccgcgcaaccgccgcccgcggcgaggccgccggtggtgcgctcgtcgcggggccgcaccctggtgctgccctctaggttcaatgactcggtacttaccgacccctggaagaaggagaagccggccaggccgccgcctcctgtcaagacagagcacttggcgcgcagaaacgagctgctgcacaagaaaggtgcaaattttgacagcagcgttgcattgtccgaggtagatgacgacgatgaggaggaggccatggtggaacgttaccgagcacgccgcagtttcggtgcctccaggaagcacttagcctcttggagcacgcttacctcggtacatgatgaaccatacagcaatcaccacaggaaggaagtaaagcttaggcattactatgaggaagacgaggaggaggaagaggagaaagaagatatttttcactgtaccgaagaattggtgtatggggacattgtgtgggcaaagcttggcaaacgccagccaatgtggccaggagtggtggtcgacccaactcagcaggccgctgccgatgcaatgccaccacaacctcgcggtgtcgctgtgctttgtgtgatgctatttggctggcgcacagagttcagtggcgagaagaagtacgtgtgggtgaggcaggggttgatatttccattttcagactacatgaaccgatttcaagggcagacagaactaagcagttgcaaacctgctgatttccggagggcagtagaagaggcctttttggctgatcagggattctcagaagtagtggtacattgcagcaccaagggccaatctgtgcagtgcagaagagtgctgcagtgtgagagttgtggaaactgctttcccaacaaggatacaaacaagatggtgtatgtgatggagcaacttgcttgcagactttgtgccaggatcttagcattaaaaaagtactgtgggatttgtttaaaaaatttgcaacataaatatggcggaagaagggtttgctgtcatggctgtgaaagttgggttcatgcagaatgcgatgaaaactgcagcaacctcaaggatctacaagacaagaaatatcactgtccttactgtagagttaaaatgaattcaactctccccgggaagaacacaaaaatttctgatgtgagaaaagatagttctgcacagaaaggaagcaagcctgacaaagttgcactggtctgttttgacatggaaggaacatacgaaccagatctcgaattaatttcttgccattgtggcccttgcaagggacagaaatttttgttcaatgaatgggagcggcatgctggctgtagaagtaaaaattggagatccagtattaagcttaagggctcgttgatgccatttgggaaatggatagatcgacatcagccaggcgtgtgccctactaatcctccaaaacgctcatctcagaaaatgaagaaacagaagttaattgatttactgaatgacccatatgatcctgtaaatgtaaaatggacgacagaaagatgtgcagtctgtagatgggttgaagattgggattacaacaaaattgtgatttgtaatagatgtcagatagcagttcatcaggaatgttatggtgtgaggggtaagcaagactttacttcatgggtttgtcgggcttgtgaaaaacctgagcaaaagagggagtgctgtctttgccctgtaaaaggtggtgctttgaagccaacaaatgttgataacttgtgggttcacgtgacatgtgcatggtttcagtcacaggttgcttttgctagtgatgagctcatggaacctgctattgggatattgaacattcaacctttgttatttatgaagatgtgtgtgatttgtaagcaaatacatggttcatgtactcaatgctacaggtgctctacttactaccatgccatttgtgcatcaagggcaggctatcgaatggagcttcactgcttggaaaaaaatggcagacagacaacaaagaagatttcttactgtgcccaacatcggagccctaaccctgataatgttttgataattcaaactcctgctgggactttctcatcaaaaaagcttgttcatagcaatggcaaggtagctgcatcgaggctgatcaggaaagatattcccttggatttgccatcagaagttaaaatttcagagaacttatcagcggcgagatgtcgggtttatgttaggaaagatctaaaggatactaatgtttggtctttcagcaagtttcacttaagtatgcatggttcactgaacgataggaataatcctctcatatttggtcctcgtatgagatgagtgggctgtatggggatcattttattctctaatgcaagtatgagatgagtgggctgtatggggaccatttattctctaatgcaatgaagctcagctctcctgctttctctaaaaaagatagcaatgtaccaatagtagataaagttattgactactaagcatgctacatgagaataactacaaaaaaggtgcaaccattcagaatgctgcttgcacctcttgtaagtatccaatatgccaaagaaggtatgtttggaccatgggggatacaattgatgatttgatgtttatattttatgtttgatctccaaaatgtacaacaatttttgcatgtaccccacctgatgttacctgttgtactttaaaattagttttatccatttggacagggactatggttagaaattattgttgcaattcaaccaatgctagaaaagttgtttgac

SEQ ID NO: 74010 - DNA, 4491 bp, Zea Mays
gaacgatgaaagaacagaacacgaaacaaagggagggaaataaaaaccgaaaattctatcggaaatcgagaaaaaaatctatcttcgcttgcatcgggcatgtaataatcagactccgcctacctgccgacgctcctcgtgacatcacccatcatcccacacggtcgacggaaagtggtacgctgccgctccaaaacttgttcatatccgtctctctctcctccaagaccatgcccaaatcaccacgatcctaagccagcccagaccgctctcaaaagccgaatttctcaagcaacagctcgttccaatcgcttcgaaacctaaatccactgctcaaatcatacacacattgaacgacacctcccaccaaacacacacacacacacaaatttcggaaagagaactgccagcgcagatcgccatccgaccacgaggctaccaaaatgcagcgcccagactcgtgccagccagccagccatcactcctgctccatctccatggatgcacacaccaccgcggccggccaccatcagcgaccacagatagaatcgagagggcaaccgcacgagcaccagctctgctctcacggcggagacgacgacgacgacttccatgtcacgacccacccccctatccgatcccaaatcgcacgaggaaacttcgggaggaaaaaaaaaacgcacctccctggccacccgggcgcgttcccttgtctatcccccctgtgcttggaagcccatgagagcacaccaagaacaagcacaggagacgagagagaaagagagagagagagataggaaaaaaaaatccccaaaatccaaggccgatttatcttcgccaacatctggccagctccatccgaggccgttcccgctgcctccgcgaggtctcgggagggggagaggagctccccgactgaccgaattcgcgaggcaggcaggcacgcaggcttagggtttgccaaggtgctccggcgccctgactcgccggggcgatctagcggccggttcctcggttccggatgatcttcaagcggagtcagcggtcggagatccttgcgccgcggcgctgcaatgccgcggacagcggaggcgaggacgaggggggaggcggcccccgcccgaggaagaggcggaggggcgacgagttcttccccgtcgacctgctcggcgacgtcccagcctccagcatcccgtacgctgccttcgggctccggtggagcgaggcgcccgaggcaccgccagaggccgcgcaaccgccgcccgcggcgaggccgccggtggtgcgctcgtcgcggggccgcaccctggtgctgccctctaggttcaatgactcggtacttaccgacccctggaagaaggagaagccggccaggccgccgcctcctgtcaagacagagcacttggcgcgcagaaacgagctgctgcacaagaaaggtgcaaattttgacagcagcgttgcattgtccgaggtagatgacgacgatgaggaggaggccatggtggaacgttaccgagcacgccgcagtttcggtgcctccaggaagcacttagcctcttggagcacgcttacctcggtacatgatgaaccatacagcaatcaccacaggaaggaagtaaagcttaggcattactatgaggaagacgaggaggaggaagaggagaaagaagatatttttcactgtaccgaagaattggtgtatggggacattgtgtgggcaaagcttggcaaacgccagccaatgtggccaggagtggtggtcgacccaactcagcaggccgctgccgatgcaatgccaccacaacctcgcggtgtcgctgtgctttgtgtgatgctatttggctggcgcacagagttcagtggcgagaagaagtacgtgtgggtgaggcaggggttgatatttccattttcagactacatgaaccgatttcaagggcagacagaactaagcagttgcaaacctgctgatttccggagggcagtagaagaggcctttttggctgatcagggattctcagaagtagtggtacattgcagcaccaagggccaatctgtggtgtgtcattctttcccagatgatttacatgaagtgactggttcaaatgaattggagtaccagccacagattaagcagtgcagaagagtgctgcagtgtgagagttgtggaaactgctttcccaacaaggatacaaacaagatggtgtatgtgatggagcaacttgcttgcagactttgtgccaggatcttagcattaaaaaagtactgtgggatttgtttaaaaaatttgcaacataaatatggcggaagaagggtttgctgtcatggctgtgaaagttgggttcatgcagaatgcgatgaaaactgcagcaacctcaaggatctacaagacaagaaatatcactgtccttactgtagagttaaaatgaattcaactctccccgggaagaacacaaaaatttctgatgtgagaaaagatagttctgcacagaaaggaagcaagcctgacaaagttgcactggtctgttttgacatggaaggaacatacgaaccagatctcgaattaatttcttgccattgtggcccttgcaagggacagaaatttttgttcaatgaatgggagcggcatgctggctgtagaagtaaaaattggagatccagtattaagcttaagggctcgttgatgccatttgggaaatggatagatcgacatcagccaggcgtgtgccctactaatcctccaaaacgctcatctcagaaaatgaagaaacagaagttaattgatttactgaatgacccatatgatcctgtaaatgtaaaatggacgacagaaagatgtgcagtctgtagatgggttgaagattgggattacaacaaaattgtgatttgtaatagatgtcagatagcagttcatcaggaatgttatggtgtgaggggtaagcaagactttacttcatgggtttgtcgggcttgtgaaaaacctgagcaaaagagggagtgctgtctttgccctgtaaaaggtaatccttgtgcatttgataactgttctgtaattcctttcttcggtaactgggtgcatttggaaagaaaaggcaatagtattggatgaacacattgatataactgggtgcatttgaaaagacaaggtaataccgtaataatactggatgaacacatttatacttctgtacagatattcgaatgttggtctgttaaattaacaggctttttacatgaacacatgtttggtatttgcttcccttctcaacttccatgactatttcagtagctaaaaattgaaccacaattggtgtcgtgtagaatgggtttatcaattctggatttcaatatctgggtgcagtttgctctctttttattgagtattttttaatcattaatcctggcacctggtgaactttgaactattgtaggtggtgctttgaagccaacaaatgttgataacttgtgggttcacgtgacatgtgcatggtttcagtcacaggttgcttttgctagtgatgagctcatggaacctgctattgggatattgaacattcaacctttgttatttatgaagatgtgtgtgatttgtaagcaaatacatggttcatgtactcaatgctacaggtgctctacttactaccatgccatttgtgcatcaagggcaggctatcgaatggagcttcactgcttggaaaaaaatggcagacagacaacaaagaagatttcttactgtgcccaacatcggagccctaaccctgataatgttttgataattcaaactcctgctgggactttctcatcaaaaaagcttgttcatagcaatggcaaggtagctgcatcgaggctgatcaggaaagatattcccttggatttgccatcagaagttaaaatttcagagaacttatcagcggcgagatgtcgggtttatgttaggaaagatctaaaggatactaatgtttggtctttcagcaagtttcacttaagtatgcatggttcactgaacgataggaataatcctctcatatttggtcctcgtatgagatgagtgggctgtatggggatcattttattctctaatgcaagtatgagatgagtgggctgtatggggaccatttattctctaatgcaatgaagctcagctctcctgctttctctaaaaaagatagcaatgtaccaatagtagataaagttattgactactaagcatgctacatgagaataactacaaaaaaggtgcaaccattcagaatgctgcttgcacctcttgtaagtatccaatatgccaaagaaggtatgtttggaccatgggggatacaattgatgatttgatgtttatattttatgtttgatctccaaaatgtacaacaatttttgcatgtaccccacctgatgttacctgttgtactttaaaattagttttatccatttggacagggactatggttagaaattattgttgcaattcaaccaatgctagaaaagttgtttgac

SEQ ID NO: 74011 - DNA, 4609 bp, Zea Mays
gaacgatgaaagaacagaacacgaaacaaagggagggaaataaaaaccgaaaattctatcggaaatcgagaaaaaaatctatcttcgcttgcatcgggcatgtaataatcagactccgcctacctgccgacgctcctcgtgacatcacccatcatcccacacggtcgacggaaagtggtacgctgccgctccaaaacttgttcatatccgtctctctctcctccaagaccatgcccaaatcaccacgatcctaagccagcccagaccgctctcaaaagccgaatttctcaagcaacagctcgttccaatcgcttcgaaacctaaatccactgctcaaatcatacacacattgaacgacacctcccaccaaacacacacacacacacaaatttcggaaagagaactgccagcgcagatcgccatccgaccacgaggctaccaaaatgcagcgcccagactcgtgccagccagccagccatcactcctgctccatctccatggatgcacacaccaccgcggccggccaccatcagcgaccacagatagaatcgagagggcaaccgcacgagcaccagctctgctctcacggcggagacgacgacgacgacttccatgtcacgacccacccccctatccgatcccaaatcgcacgaggaaacttcgggaggaaaaaaaaaacgcacctccctggccacccgggcgcgttcccttgtctatcccccctgtgcttggaagcccatgagagcacaccaagaacaagcacaggagacgagagagaaagagagagagagagataggaaaaaaaaatccccaaaatccaaggccgatttatcttcgccaacatctggccagctccatccgaggccgttcccgctgcctccgcgaggtctcgggagggggagaggagctccccgactgaccgaattcgcgaggcaggcaggcacgcaggcttagggtttgccaaggtgctccggcgccctgactcgccggggcgatctagcggccggttcctcggttccggatgatcttcaagcggagtcagcggtcggagatccttgcgccgcggcgctgcaatgccgcggacagcggaggcgaggacgaggggggaggcggcccccgcccgaggaagaggcggaggggcgacgagttcttccccgtcgacctgctcggcgacgtcccagcctccagcatcccgtacgctgccttcgggctccggtggagcgaggcgcccgaggcaccgccagaggccgcgcaaccgccgcccgcggcgaggccgccggtggtgcgctcgtcgcggggccgcaccctggtgctgccctctaggttcaatgactcggtacttaccgacccctggaagaaggagaagccggccaggccgccgcctcctgtcaagacagagcacttggcgcgcagaaacgagctgctgcacaagaaaggtgcaaattttgacagcagcgttgcattgtccgaggtagatgacgacgatgaggaggaggccatggtggaacgttaccgagcacgccgcagtttcggtgcctccaggaagcacttagcctcttggagcacgcttacctcggtacatgatgaaccatacagcaatcaccacaggaaggaagtaaagcttaggcattactatgaggaagacgaggaggaggaagaggagaaagaagatatttttcactgtaccgaagaattggtgtatggggacattgtgtgggcaaagcttggcaaacgccagccaatgtggccaggagtggtggtcgacccaactcagcaggccgctgccgatgcaatgccaccacaacctcgcggtgtcgctgtgctttgtgtgatgctatttggctggcgcacagagttcagtggcgagaagaagtacgtgtgggtgaggcaggggttgatatttccattttcagactacatgaaccgatttcaagggcagacagaactaagcagttgcaaacctgctgatttccggagggcagtagaagaggcctttttggctgatcagggattctcagaagtagtggtacattgcagcaccaagggccaatctgtggtgtgtcattctttcccagatgatttacatgaagtgactggttcaaatgaattggagtaccagccacagattaagtgcagaagagtgctgcagtgtgagagttgtggaaactgctttcccaacaaggatacaaacaagatggtgtatgtgatggagcaacttgcttgcagactttgtgccaggatcttagcattaaaaaagtactgtgggatttgtttaaaaaatttgcaacataaatatggcggaagaagggtttgctgtcatggctgtgaaagttgggttcatgcagaatgcgatgaaaactgcagcaacctcaaggatctacaagacaagaaatatcactgtccttactgtagagttaaaatgaattcaactctccccgggaagaacacaaaaatttctgatgtgagaaaagatagttctgcacagaaaggaagcaagcctgacaaagttgcactggtctgttttgacatggaaggaacatacgaaccagatctcgaattaatttcttgccattgtggcccttgcaagggacagaaatttttgttcaatgaatgggagcggcatgctggctgtagaagtaaaaattggagatccagtattaagcttaagggctcgttgatgccatttgggaaatggatagatcgacatcagccaggcgtgtgccctactaatcctccaaaacgctcatctcagaaaatgaagaaacagaagttaattgatttactgaatgacccatatgatcctgtaaatgtaaaatggacgacagaaagatgtgcagtctgtagatgggttgaagattgggattacaacaaaattgtgatttgtaatagatgtcagatagcagttcatcaggaatgttatggtgtgaggggtaagcaagactttacttcatgggtttgtcgggcttgtgaaaaacctgagcaaaagagggagtgctgtctttgccctgtaaaaggtaatccttgtgcatttgataactgttctgtaattcctttcttcggtaactgggtgcatttggaaagaaaaggcaatagtattggatgaacacattgatataactgggtgcatttgaaaagacaaggtaataccgtaataatactggatgaacacatttatacttctgtacagatattcgaatgttggtctgttaaattaacaggctttttacatgaacacatgtttggtatttgcttcccttctcaacttccatgactatttcagtagctaaaaattgaaccacaattggtgtcgtgtagaatgggtttatcaattctggatttcaatatctgggtgcagtttgctctctttttattgagtattttttaatcattaatcctggcacctggtgaactttgaactattgtaggtggtgctttgaagccaacaaatgttgataacttgtgggttcacgtgacatgtgcatggtttcagtcacaggttgcttttgctagtgatgagctcatggaacctgctattgggatattgaacattcaacctttgttatttatgaaggttgtttatctttcgtagtttcgtactataatttatgttgctcaagtggattgaccaacaagtaatacatttctgtgctgaagtatggcagtctatgctctatgctcatctatctctgcagatgtgtgtgatttgtaagcaaatacatggttcatgtactcaatgctacaggtgctctacttactaccatgccatttgtgcatcaagggcaggctatcgaatggagcttcactgcttggaaaaaaatggcagacagacaacaaagaagatttcttactgtgcccaacatcggagccctaaccctgataatgttttgataattcaaactcctgctgggactttctcatcaaaaaagcttgttcatagcaatggcaaggtagctgcatcgaggctgatcaggaaagatattcccttggatttgccatcagaagttaaaatttcagagaacttatcagcggcgagatgtcgggtttatgttaggaaagatctaaaggatactaatgtttggtctttcagcaagtttcacttaagtatgcatggttcactgaacgataggaataatcctctcatatttggtcctcgtatgagatgagtgggctgtatggggatcattttattctctaatgcaagtatgagatgagtgggctgtatggggaccatttattctctaatgcaatgaagctcagctctcctgctttctctaaaaaagatagcaatgtaccaatagtagataaagttattgactactaagcatgctacatgagaataactacaaaaaaggtgcaaccattcagaatgctgcttgcacctcttgtaagtatccaatatgccaaagaaggtatgtttggaccatgggggatacaattgatgatttgatgtttatattttatgtttgatctccaaaatgtacaacaatttttgcatgtaccccacctgatgttacctgttgtactttaaaattagttttatccatttggacagggactatggttagaaattattgttgcaattcaaccaatgctagaaaagttgtttgac

SEQ ID NO: 74012 - DNA, 4015 bp, Zea Mays
gaacgatgaaagaacagaacacgaaacaaagggagggaaataaaaaccgaaaattctatcggaaatcgagaaaaaaatctatcttcgcttgcatcgggcatgtaataatcagactccgcctacctgccgacgctcctcgtgacatcacccatcatcccacacggtcgacggaaagtggtacgctgccgctccaaaacttgttcatatccgtctctctctcctccaagaccatgcccaaatcaccacgatcctaagccagcccagaccgctctcaaaagccgaatttctcaagcaacagctcgttccaatcgcttcgaaacctaaatccactgctcaaatcatacacacattgaacgacacctcccaccaaacacacacacacacacaaatttcggaaagagaactgccagcgcagatcgccatccgaccacgaggctaccaaaatgcagcgcccagactcgtgccagccagccagccatcactcctgctccatctccatggatgcacacaccaccgcggccggccaccatcagcgaccacagatagaatcgagagggcaaccgcacgagcaccagctctgctctcacggcggagacgacgacgacgacttccatgtcacgacccacccccctatccgatcccaaatcgcacgaggaaacttcgggaggaaaaaaaaaacgcacctccctggccacccgggcgcgttcccttgtctatcccccctgtgcttggaagcccatgagagcacaccaagaacaagcacaggagacgagagagaaagagagagagagagataggaaaaaaaaatccccaaaatccaaggccgatttatcttcgccaacatctggccagctccatccgaggccgttcccgctgcctccgcgaggtctcgggagggggagaggagctccccgactgaccgaattcgcgaggcaggcaggcacgcaggcttagggtttgccaaggtgctccggcgccctgactcgccggggcgatctagcggccggttcctcggttccggatgatcttcaagcggagtcagcggtcggagatccttgcgccgcggcgctgcaatgccgcggacagcggaggcgaggacgaggggggaggcggcccccgcccgaggaagaggcggaggggcgacgagttcttccccgtcgacctgctcggcgacgtcccagcctccagcatcccgtacgctgccttcgggctccggtggagcgaggcgcccgaggcaccgccagaggccgcgcaaccgccgcccgcggcgaggccgccggtggtgcgctcgtcgcggggccgcaccctggtgctgccctctaggttcaatgactcggtacttaccgacccctggaagaaggagaagccggccaggccgccgcctcctgtcaagacagagcacttggcgcgcagaaacgagctgctgcacaagaaaggtgcaaattttgacagcagcgttgcattgtccgaggtagatgacgacgatgaggaggaggccatggtggaacgttaccgagcacgccgcagtttcggtgcctccaggaagcacttagcctcttggagcacgcttacctcggtacatgatgaaccatacagcaatcaccacaggaaggaagtaaagcttaggcattactatgaggaagacgaggaggaggaagaggagaaagaagatatttttcactgtaccgaagaattggtgtatggggacattgtgtgggcaaagcttggcaaacgccagccaatgtggccaggagtggtggtcgacccaactcagcaggccgctgccgatgcaatgccaccacaacctcgcggtgtcgctgtgctttgtgtgatgctatttggctggcgcacagagttcagtggcgagaagaagtacgtgtgggtgaggcaggggttgatatttccattttcagactacatgaaccgatttcaagggcagacagaactaagcagttgcaaacctgctgatttccggagggcagtagaagaggcctttttggctgatcagggattctcagaagtagtggtacattgcagcaccaagggccaatctgtggtgtgtcattctttcccagatgatttacatgaagtgactggttcaaatgaattggagtaccagccacagattaagcagtgcagaagagtgctgcagtgtgagagttgtggaaactgctttcccaacaaggatacaaacaagatggtgtatgtgatggagcaacttgcttgcagactttgtgccaggatcttagcattaaaaaagtactgtgggatttgtttaaaaaatttgcaacataaatatggcggaagaagggtttgctgtcatggctgtgaaagttgggttcatgcagaatgcgatgaaaactgcagcaacctcaaggatctacaagacaagaaatatcactgtccttactgtagagttaaaatgaattcaactctccccgggaagaacacaaaaatttctgatgtgagaaaagatagttctgcacagaaaggaagcaagcctgacaaagttgcactggtctgttttgacatggaaggaacatacgaaccagatctcgaattaatttcttgccattgtggcccttgcaagggacagaaatttttgttcaatgaatgggagcggcatgctggctgtagaagtaaaaattggagatccagtattaagcttaagggctcgttgatgccatttgggaaatggatagatcgacatcagccaggcgtgtgccctactaatcctccaaaacgctcatctcagaaaatgaagaaacagaagttaattgatttactgaatgacccatatgatcctgtaaatgtaaaatggacgacagaaagatgtgcagtctgtagatgggttgaagattgggattacaacaaaattgtgatttgtaatagatgtcagatagcagttcatcaggaatgttatggtgtgaggggtaagcaagactttacttcatgggtttgtcgggcttgtgaaaaacctgagcaaaagagggagtgctgtctttgccctgtaaaagtcacaggttgcttttgctagtgatgagctcatggaacctgctattgggatattgaacattcaacctttgttatttatgaagatgtgtgtgatttgtaagcaaatacatggttcatgtactcaatgctacaggtgctctacttactaccatgccatttgtgcatcaagggcaggctatcgaatggagcttcactgcttggaaaaaaatggcagacagacaacaaagaagatttcttactgtgcccaacatcggagccctaaccctgataatgttttgataattcaaactcctgctgggactttctcatcaaaaaagcttgttcatagcaatggcaaggtagctgcatcgaggctgatcaggaaagatattcccttggatttgccatcagaagttaaaatttcagagaacttatcagcggcgagatgtcgggtttatgttaggaaagatctaaaggatactaatgtttggtctttcagcaagtttcacttaagtatgcatggttcactgaacgataggaataatcctctcatatttggtcctcgtatgagatgagtgggctgtatggggatcattttattctctaatgcaagtatgagatgagtgggctgtatggggaccatttattctctaatgcaatgaagctcagctctcctgctttctctaaaaaagatagcaatgtaccaatagtagataaagttattgactactaagcatgctacatgagaataactacaaaaaaggtgcaaccattcagaatgctgcttgcacctcttgtaagtatccaatatgccaaagaaggtatgtttggaccatgggggatacaattgatgatttgatgtttatattttatgtttgatctccaaaatgtacaacaatttttgcatgtaccccacctgatgttacctgttgtactttaaaattagttttatccatttggacagggactatggttagaaattattgttgcaattcaaccaatgctagaaaagttgtttgac

SEQ ID NO: 74013 - DNA, 4196 bp, Zea Mays
gaacgatgaaagaacagaacacgaaacaaagggagggaaataaaaaccgaaaattctatcggaaatcgagaaaaaaatctatcttcgcttgcatcgggcatgtaataatcagactccgcctacctgccgacgctcctcgtgacatcacccatcatcccacacggtcgacggaaagtggtacgctgccgctccaaaacttgttcatatccgtctctctctcctccaagaccatgcccaaatcaccacgatcctaagccagcccagaccgctctcaaaagccgaatttctcaagcaacagctcgttccaatcgcttcgaaacctaaatccactgctcaaatcatacacacattgaacgacacctcccaccaaacacacacacacacacaaatttcggaaagagaactgccagcgcagatcgccatccgaccacgaggctaccaaaatgcagcgcccagactcgtgccagccagccagccatcactcctgctccatctccatggatgcacacaccaccgcggccggccaccatcagcgaccacagatagaatcgagagggcaaccgcacgagcaccagctctgctctcacggcggagacgacgacgacgacttccatgtcacgacccacccccctatccgatcccaaatcgcacgaggaaacttcgggaggaaaaaaaaaacgcacctccctggccacccgggcgcgttcccttgtctatcccccctgtgcttggaagcccatgagagcacaccaagaacaagcacaggagacgagagagaaagagagagagagagataggaaaaaaaaatccccaaaatccaaggccgatttatcttcgccaacatctggccagctccatccgaggccgttcccgctgcctccgcgaggtctcgggagggggagaggagctccccgactgaccgaattcgcgaggcaggcaggcacgcaggcttagggtttgccaaggtgctccggcgccctgactcgccggggcgatctagcggccggttcctcggttccggatgatcttcaagcggagtcagcggtcggagatccttgcgccgcggcgctgcaatgccgcggacagcggaggcgaggacgaggggggaggcggcccccgcccgaggaagaggcggaggggcgacgagttcttccccgtcgacctgctcggcgacgtcccagcctccagcatcccgtacgctgccttcgggctccggtggagcgaggcgcccgaggcaccgccagaggccgcgcaaccgccgcccgcggcgaggccgccggtggtgcgctcgtcgcggggccgcaccctggtgctgccctctaggttcaatgactcggtacttaccgacccctggaagaaggagaagccggccaggccgccgcctcctgtcaagacagagcacttggcgcgcagaaacgagctgctgcacaagaaaggtgcaaattttgacagcagcgttgcattgtccgaggtagatgacgacgatgaggaggaggccatggtggaacgttaccgagcacgccgcagtttcggtgcctccaggaagcacttagcctcttggagcacgcttacctcggtacatgatgaaccatacagcaatcaccacaggaaggaagtaaagcttaggcattactatgaggaagacgaggaggaggaagaggagaaagaagatatttttcactgtaccgaagaattggtgtatggggacattgtgtgggcaaagcttggcaaacgccagccaatgtggccaggagtggtggtcgacccaactcagcaggccgctgccgatgcaatgccaccacaacctcgcggtgtcgctgtgctttgtgtgatgctatttggctggcgcacagagttcagtggcgagaagaagtacgtgtgggtgaggcaggggttgatatttccattttcagactacatgaaccgatttcaagggcagacagaactaagcagttgcaaacctgctgatttccggagggcagtagaagaggcctttttggctgatcagggattctcagaagtagtggtacattgcagcaccaagggccaatctgtggtgtgtcattctttcccagatgatttacatgaagtgactggttcaaatgaattggagtaccagccacagattaagcagtgcagaagagtgctgcagtgtgagagttgtggaaactgctttcccaacaaggatacaaacaagatggtgtatgtgatggagcaacttgcttgcagactttgtgccaggatcttagcattaaaaaagtactgtgggatttgtttaaaaaatttgcaacataaatatggcggaagaagggtttgctgtcatggctgtgaaagttgggttcatgcagaatgcgatgaaaactgcagcaacctcaaggatctacaagacaagaaatatcactgtccttactgtagagttaaaatgaattcaactctccccgggaagaacacaaaaatttctgatgtgagatagttctgcacagaaaggaagcaagcctgacaaagttgcactggtctgttttgacatggaaggaacatacgaaccagatctcgaattaatttcttgccattgtggcccttgcaagggacagaaatttttgttcaatgaatgggagcggcatgctggctgtagaagtaaaaattggagatccagtattaagcttaagggctcgttgatgccatttgggaaatggatagatcgacatcagccaggcgtgtgccctactaatcctccaaaacgctcatctcagaaaatgaagaaacagaagttaattgatttactgaatgacccatatgatcctgtaaatgtaaaatggacgacagaaagatgtgcagtctgtagatgggttgaagattgggattacaacaaaattgtgatttgtaatagatgtcagatagcagttcatcaggaatgttatggtgtgaggggtaagcaagactttacttcatgggtttgtcgggcttgtgaaaaacctgagcaaaagagggagtgctgtctttgccctgtaaaaggtggtgctttgaagccaacaaatgttgataacttgtgggttcacgtgacatgtgcatggtttcagtcacaggttgcttttgctagtgatgagctcatggaacctgctattgggatattgaacattcaacctttgttatttatgaaggttgtttatctttcgtagtttcgtactataatttatgttgctcaagtggattgaccaacaagtaatacatttctgtgctgaagtatggcagtctatgctctatgctcatctatctctgcagatgtgtgtgatttgtaagcaaatacatggttcatgtactcaatgctacaggtgctctacttactaccatgccatttgtgcatcaagggcaggctatcgaatggagcttcactgcttggaaaaaaatggcagacagacaacaaagaagatttcttactgtgcccaacatcggagccctaaccctgataatgttttgataattcaaactcctgctgggactttctcatcaaaaaagcttgttcatagcaatggcaaggtagctgcatcgaggctgatcaggaaagatattcccttggatttgccatcagaagttaaaatttcagagaacttatcagcggcgagatgtcgggtttatgttaggaaagatctaaaggatactaatgtttggtctttcagcaagtttcacttaagtatgcatggttcactgaacgataggaataatcctctcatatttggtcctcgtatgagatgagtgggctgtatggggatcattttattctctaatgcaagtatgagatgagtgggctgtatggggaccatttattctctaatgcaatgaagctcagctctcctgctttctctaaaaaagatagcaatgtaccaatagtagataaagttattgactactaagcatgctacatgagaataactacaaaaaaggtgcaaccattcagaatgctgcttgcacctcttgtaagtatccaatatgccaaagaaggtatgtttggaccatgggggatacaattgatgatttgatgtttatattttatgtttgatctccaaaatgtacaacaatttttgcatgtaccccacctgatgttacctgttgtactttaaaattagttttatccatttggacagggactatggttagaaattattgttgcaattcaaccaatgctagaaaagttgtttgac

SEQ ID NO: 74014 - DNA, 4030 bp, Zea Mays
gaacgatgaaagaacagaacacgaaacaaagggagggaaataaaaaccgaaaattctatcggaaatcgagaaaaaaatctatcttcgcttgcatcgggcatgtaataatcagactccgcctacctgccgacgctcctcgtgacatcacccatcatcccacacggtcgacggaaagtggtacgctgccgctccaaaacttgttcatatccgtctctctctcctccaagaccatgcccaaatcaccacgatcctaagccagcccagaccgctctcaaaagccgaatttctcaagcaacagctcgttccaatcgcttcgaaacctaaatccactgctcaaatcatacacacattgaacgacacctcccaccaaacacacacacacacacaaatttcggaaagagaactgccagcgcagatcgccatccgaccacgaggctaccaaaatgcagcgcccagactcgtgccagccagccagccatcactcctgctccatctccatggatgcacacaccaccgcggccggccaccatcagcgaccacagatagaatcgagagggcaaccgcacgagcaccagctctgctctcacggcggagacgacgacgacgacttccatgtcacgacccacccccctatccgatcccaaatcgcacgaggaaacttcgggaggaaaaaaaaaacgcacctccctggccacccgggcgcgttcccttgtctatcccccctgtgcttggaagcccatgagagcacaccaagaacaagcacaggagacgagagagaaagagagagagagagataggaaaaaaaaatccccaaaatccaaggccgatttatcttcgccaacatctggccagctccatccgaggccgttcccgctgcctccgcgaggtctcgggagggggagaggagctccccgactgaccgaattcgcgaggcaggcaggcacgcaggcttagggtttgccaaggtgctccggcgccctgactcgccggggcgatctagcggccggttcctcggttccggatgatcttcaagcggagtcagcggtcggagatccttgcgccgcggcgctgcaatgccgcggacagcggaggcgaggacgaggggggaggcggcccccgcccgaggaagaggcggaggggcgacgagttcttccccgtcgacctgctcggcgacgtcccagcctccagcatcccgtacgctgccttcgggctccggtggagcgaggcgcccgaggcaccgccagaggccgcgcaaccgccgcccgcggcgaggccgccggtggtgcgctcgtcgcggggccgcaccctggtgctgccctctaggttcaatgactcggtacttaccgacccctggaagaaggagaagccggccaggccgccgcctcctgtcaagacagagcacttggcgcgcagaaacgagctgctgcacaagaaaggtgcaaattttgacagcagcgttgcattgtccgaggtagatgacgacgatgaggaggaggccatggtggaacgttaccgagcacgccgcagtttcggtgcctccaggaagcacttagcctcttggagcacgcttacctcggtacatgatgaaccatacagcaatcaccacaggaaggaagtaaagcttaggcattactatgaggaagacgaggaggaggaagaggagaaagaagatatttttcactgtaccgaagaattggtgtatggggacattgtgtgggcaaagcttggcaaacgccagccaatgtggccaggagtggtggtcgacccaactcagcaggccgctgccgatgcaatgccaccacaacctcgcggtgtcgctgtgctttgtgtgatgctatttggctggcgcacagagttcagtggcgagaagaagtacgtgtgggtgaggcaggggttgatatttccattttcagactacatgaaccgatttcaagggcagacagaactaagcagttgcaaacctgctgatttccggagggcagtagaagaggcctttttggctgatcagggattctcagaagtagtggtacattgcagcaccaagggccaatctgtggtgtgtcattctttcccagatgatttacatgaagtgactggttcaaatgaattggagtaccagccacagattaagcagtgcagaagagtgctgcagtgtgagagttgtggaaactgctttcccaacaaggatacaaacaagatggtgtatgtgatggagcaacttgcttgcagactttgtgccaggatcttagcattaaaaaagtactgtgggatttgtttaaaaaatttgcaacataaatatggcggaagaagggtttgctgtcatggctgtgaaagttgggttcatgcagaatgcgatgaaaactgcagcaacctcaaggatctacaagacaagaaatatcactgtccttactgtagagttaaaatgaattcaactctccccgggaagaacacaaaaatttctgatgtgagaaaagatagttctgcacagaaaggaagcaagcctgacaaagttgcactggtctgttttgacatggaaggaacatacgaaccagatctcgaattaatttcttgccattgtggcccttgcaagggacagaaatttttgttcaatgaatgggagcggcatgctggctgtagaagtaaaaattggagatccagtattaagcttaagggctcgttgatgccatttgggaaatggatagatcgacatcagccaggcgtgtgccctactaatcctccaaaacgctcatctcagaaaatgaagaaacagaagttaattgatttactgaatgacccatatgatcctgtaaatgtaaaatggacgacagaaagatgtgcagtctgtagatgggttgaagattgggattacaacaaaattgtgatttgtaatagatgtcagatagcagttcatcaggaatgttatggtgtgaggggtaagcaagactttacttcatgggtttgtcgggcttgtgaaaaacctgagcaaaagagggagtgctgtctttgccctgtaaaaggtggtgctttgaagccaacaaatgttgataacttgtgggttcacgtgacatgtgcatggtttcagtcacaggttgcttttgctagtgatgagctcatggaacctgctattgggatattgaacattcaacctttgttatttatgaaggtgctctacttactaccatgccatttgtgcatcaagggcaggctatcgaatggagcttcactgcttggaaaaaaatggcagacagacaacaaagaagatttcttactgtgcccaacatcggagccctaaccctgataatgttttgataattcaaactcctgctgggactttctcatcaaaaaagcttgttcatagcaatggcaaggtagctgcatcgaggctgatcaggaaagatattcccttggatttgccatcagaagttaaaatttcagagaacttatcagcggcgagatgtcgggtttatgttaggaaagatctaaaggatactaatgtttggtctttcagcaagtttcacttaagtatgcatggttcactgaacgataggaataatcctctcatatttggtcctcgtatgagatgagtgggctgtatggggatcattttattctctaatgcaagtatgagatgagtgggctgtatggggaccatttattctctaatgcaatgaagctcagctctcctgctttctctaaaaaagatagcaatgtaccaatagtagataaagttattgactactaagcatgctacatgagaataactacaaaaaaggtgcaaccattcagaatgctgcttgcacctcttgtaagtatccaatatgccaaagaaggtatgtttggaccatgggggatacaattgatgatttgatgtttatattttatgtttgatctccaaaatgtacaacaatttttgcatgtaccccacctgatgttacctgttgtactttaaaattagttttatccatttggacagggactatggttagaaattattgttgcaattcaaccaatgctagaaaagttgtttgac

SEQ ID NO: 74015 - DNA, 880 bp, Zea Mays
atcatcacctaaggtgacgattacacacatatgctattcatcattctaagtgaagcttcatctagccgcttcactgcttggaaaaaaatggcagacagacaacaaagaagatttcttactgtgcccaacatcggagccctaaccctgataatgttttgataattcaaactcctgctgggactttctcatcaaaaaagcttgttcatagcaatggcaaggtagctgcatcgaggctgatcaggaaagatattcccttggatttgccatcagaagttaaaatttcagagaacttatcagcggcgagatgtcgggtttatgttaggaaagatctaaaggatactaatgtttggtctttcagcaagtttcacttaagtatgcatggttcactgaacgataggaataatcctctcatatttggtcctcgtatgagatgagtgggctgtatggggatcattttattctctaatgcaagtatgagatgagtgggctgtatggggaccatttattctctaatgcaatgaagctcagctctcctgctttctctaaaaaagatagcaatgtaccaatagtagataaagttattgactactaagcatgctacatgagaataactacaaaaaaggtgcaaccattcagaatgctgcttgcacctcttgtaagtatccaatatgccaaagaaggtatgtttggaccatgggggatacaattgatgatttgatgtttatattttatgtttgatctccaaaatgtacaacaatttttgcatgtaccccacctgatgttacctgttgtactttaaaattagttttatccatttggacagggactatggttagaaattattgttgcaattcaaccaatgctagaaaagttgtttgac

SEQ ID NO: 74016 - DNA, 943 bp, Zea Mays
gcaggctggtctacacctggccggggccaaggcaaatggttccccgcggccgcgacgagcgtgttcggtcgcggttacccaattggctcgatgcaaagccagatcggcctgatgagttggaaagggtagaatcagccggtggcagggtcattaactggatggggtaccgtgtccttggtgtgcttgcgacgtcaaggtcaattggtgactattacatgaagccattcatatcagcggaaccagaggtgactgtcacagagcgcacgcacagggacgagttcatcatcctggcgagcgacgggctgtgggacgtcatgtccaacgaggtggcctgcagggtcgcgaagagctgtctgtgcgggcgcgcggcttccaagtgccctgacaccatccacgggagctcggccagcgatgccgccgcggtgctggtggagttcgccatgtcgcggggcagcactgacaacatcagcgtcgtggtggtggagctgaaacgtctcaagaggtggaagggtggtagtagacagaacggtcggacgtagcctggccctgtaggagtctccggctcgtcgcgaaatatatgcatggcgacggagctctagggaagcagccgagcatatgacggaatggtgtaaagaagaagaagaagaagagagggttctgactcttgagagctatacctatgctgtgaccaggtgagtgtagccgtgtaggagctgctcgtagctttgccgttgtattgcgttggttacttggttctttctttagttcaatcaatactaacaaaacggcattccggccgatggaagcagcaggaaataatgtaaaaaagccaaaacaaatatggaaaaaaataagaggaaaatggtattggcatatattgtgtcatcgctcgatcacaaacccatatgagtttacggagcaatgcatgtctttgatatcctct

SEQ ID NO: 74017 - DNA, 1307 bp, Zea Mays
gaaaactccaccagaatatgggctatcagatggacccattattgttgcctgccagtggaatatatcttcaccaacaggacctgccaaataagattatgttgtcaccaacaagggacgcaactgaatttctgagtcagggaaaatcaaggtcacaaactggactgatgccaccttatctgacgggcatatgttcagtaggaaacataactaactagacaggatagatctagtgttcgaggattctacatgattggggtaagacaacacccttgcactctataagagaaaaccttctcacataggccgagctcatgtgaggacgactggaaccattggaccaaggctgagaccttagacttgtgctttggcacgaggagtaaaacgcaggacctgagtagtgctactcaaaccaactcaactagatgccctttcataaaaaaagatagttttgccaataaataaaacatgttaatcattttctcagttatgactgttctgtcatcattctacctcacattgttgaatgatgtgtcgaactagactatagttcattcatgtaacttgatttgttccaatgaatatggcccaaagtatcattttatgaacagttttttatatagtttcatgaacaacttattctagttatgcaacagcactaacaccaattgcaagcatggaaaagacgaatcctacatgttagctgttcctcagtacaattataacattccttcaatgtttgtgtttatgttgctaacaactcgtctcatcaggtatcgaatggagaagtgaaaccattggaaatacccccctcaccttcgcatttttggtagggaaactaagcatggcacataaagaatccaaaagttactaactaaccctgttccttcgggagaaaaaagttaaaaccataaaaagatttgcacaacatagtaaaggccaagccctgcaggtcgtcaacggccatttatagtacctaaaagtgaggatggaaccaattcatttccatgtaacaacgtcataacatctcatatctaccccacccctcaagcacctaccaagaaaggggtcaagggttatcaggctggctgacttgtctagaaatctgttggtaaagttctatagcaaagggggcaagcatgtgaagctttggataagaggccgttcagaagcatgtgcacaaaatctgacacctacacactactgactacagagggtgagaggggtatggctcaaaaaaaatcgacagaggaacaggcaagaaagaaagcagtaggacctgcactgcacgaggtgggagggtccttctg

SEQ ID NO: 74018 - DNA, 1170 bp, Zea Mays
atcacatacagacaggcagcggcaaccaacccgatcacgttgcccccgcgcggctagacgcctagactagccccacgacctccacctcgaccagtctcgatcccgtggactcccgattgcctcctcagcaacttccatacccccagcgcggcggtgccggagcgagcagagcagccggagggcctgtcggatccgccgccgtcaagatgaatgacgccgatgtatccaagcagatccagcagatggtgcggttcatccgccaggaggccgacgagaaggccaacgagatctccgtctccgccgaggaggaattcaacattgagaagttgcagcttgttgaagctgagaaaaagaagatcaggcaagagtatgaacgcaaagagaagcaggttgaagtacgcaagaaaattgagtactctatgcagttgaatgcttctcgcatcaaagttcttcaagctcaggatgatctagttaacaaaatgaaagacgatgccatgaaggaacttctccttgtcagccacaaccaccatgaatacaagaaccttttgaaagacctaatcattcagggtttgctccgtttgaaagagccagcagtattgctccgttgccgcaaggatgatcaccatcatgtggaatcagtgctgcattcagcaaagcatgagtatgcatcaaaagcagatgtccatgaaccagagatatttgttgatcatgatgtatacctgccacctgccccaagccatcatgatgctcatggccagttttgatccggaagcttctttttggccagactgcagcctaatcgactcatctgccgatggtacggctgcttctatgtaatggttgccggctgcacgcctgcactgcagccataaggaactccgcctgtttttgtcaaattgattgtttaaggtattcatcccctatgtacaaactacctattggttcattattgtcgccgagagcaccgactgtttgtactctgtttgctccgaggaataagaataaagcaccgccagactttccatcgcgaagctgaataaacgttgtaaatgcatttgttgcgctgaacattccgtttatggtttctccatgtgtatatttagttaatgtcggatgtggttcttatggaaaatagtttgtttgggctgtcagttcgcctcctgtcatgct

SEQ ID NO: 74019 - DNA, 987 bp, Zea Mays
ggcttctacaatcatgcatattcatgaattcaacattgagaagttgcagcttgttgaagctgagaaaaagaagatcaggcaagagtatgaacgcaaagagaagcaggttgaagtacgcaagaaaattgagtactctatgcagttgaatgcttctcgcatcaaagttcttcaagctcaggatgatctagttaacaaaatgaaagacgatgccatgaaggaacttctccttgtcagccacaaccaccatgaatacaagaaccttttgaaagacctaatcattcagggtttgctccgtttgaaagagccagcagtattgctccgttgccgcaaggatgatcaccatcatgtggaatcagtgctgcattcagcaaagcatgagtatgcatcaaaagcagatgtccatgaaccagagatatttgttgatcatgatgtatacctgccacctgccccaagccatcatgatgctcatggccagttttgctctggaggtattgtattggcttctcgagatggaaagattgtgtttgagagtacacttgacgcaagactagaagttgttttccgcaagaaattgccagagatccggaagcttctttttggccagactgcagcctaatcgactcatctgccgatggtacggctgcttctatgtaatggttgccggctgcacgcctgcactgcagccataaggaactccgcctgtttttgtcaaattgattgtttaaggtattcatcccctatgtacaaactacctattggttcattattgtcgccgagagcaccgactgtttgtactctgtttgctccgaggaataagaataaagcaccgccagactttccatcgcgaagctgaataaacgttgtaaatgcatttgttgcgctgaacattccgtttatggtttctccatgtgtatatttagttaatgtcggatgtggttcttatggaaaatagtttgtttgggctgtcagttcgcctcctgtcatgct

SEQ ID NO: 74020 - DNA, 836 bp, Zea Mays
tctcaaatgctcaatgcgactctgtacgccaaaagcagcgacaaaccaggaacgcagtacatgactgtctgaataattctcctcgatcacagaaacccctacaaccttgtagcccgaaatgcagcaacaaccaaatctgaagtctgagcacactagcacaaattgtctggaagcaaagcgcaacgaactaagataggataggctaaggattaagcaacgggagtccacggcaaagtacaacaaactaagacaggatagagtaaggattaaacaacacagcacctcaccgcgtcgatcagtacgcgccgccaagcagcctgcgggcgacctcgaaagagacgaaggcgtcgatgcaggcgtacttgatctgctcgtagctgaggcaggacgcgtcccagcggctcatggtgaccctctgcggcttcacgaggttgacgcccatgacgacttgcacgagcgcacgcagccccgcctggcggaggtccgggcggttcatccgctccgcggcgcggccccgcaggtcctccgcgttggccaccaccagaccgtggtcgtcgctgagccgctccgcgtccgcctccacgccgacgccgacgaagcggatcccgcggtcgccgaggaactccgccagcgcgccggggacgtagtcggcgtagaggagctggaagatgaggcagctgtgtccgacgcagagctgcagtgtggccaccgggttctggtgcgggccgaagcttgggcgccactcaacgtcaagcccgacgatgatgctgtagccgttgctgccggggcggtgcaacgcgaggatctccgcgatccagcgctccacagcctcgtcg

SEQ ID NO: 74021 - DNA, 621 bp, Zea Mays
tgcaggctgaaattttggtgtccttgctcagccatgggtagtaggagatatgacattgatacgaggagatgtgggatccactcaagaccaaccaaatcaatgtatctggatgctcaacaaatcgtcagctgccaaactagagtgggagaccacgatgttggttcctgtgctgtgaagcatcacttcccgtctccaatcgtatcttggatagaagatctttccagctttggcaatgcttcttttaatcctgtctctgaatatgtggatgagcaagccagagcttcagtgggacagtcttcagcatcaagtaatttgcatgacatgcaaatatcagtgagattgacagccgaattcatggagcttgcaaaggagaatacaagcaataatctagagacttgtggaattcttggtgcttcatttagggatggaacttattttgtcacgatgttgattataccaaagcaagaaggaactgctcactcatgtcaggctgttagtgaggaggagatacatgccgtgttatcagagcagtcactttatcctgcagggtggattcatgagagctgcgtgtcatttcattaagatagaaagagtataaaacgagttggattttgaaagaag

SEQ ID NO: 74022 - DNA, 618 bp, Zea Mays
tgcaggctgaaattttggtgtccttgctcagccatgggtagtaggagatatgacattgatacgaggagatgtgggatccactcaagaccaaccaaatcaatgtatctggatgctcaacaaatcgtcagctgccaaactagagtgggagaccacgatgttggttcctgtgctgtgaagcatcacttcccgtctccaatcgtatcttggatagaagatctttccagctttggcaatgcttcttttaatcctgtctctgaatatgtggatgagcaagccagagcttcagtgggacagtcttcagcatcaagtaatttgcatgacatgcaaatatcagtgagattgacagccgaattcatggagcttgcaaaggagaatacaagcaataatctagagacttgtggaattcttggtgcttcatttagggatggaacttattttgtcacgatgttgattataccaaagcaagaaggaactgctcactcatgtcaggctgttagtgaggaggagatacatgccgtgttatcagagcagtcactttatcctgcagggtggattcatatgcatcttccatatccctagagcttgttgtgacttgtgagggcggcgcaggttgccgag

SEQ ID NO: 74023 - DNA, 1898 bp, Zea Mays
tgcaggctgaaattttggtgtccttgctcagccatgggtagtaggagatatgacattgatacgaggagatgtgggatccactcaagaccaaccaaatcaatgtatctggatgctcaacaaatcgtcagctgccaaactagagtgggagaccacgatgttggttcctgtgctgtgaagcatcacttcccgtctccaatcgtatcttggatagaagatctttccagctttggcaatgcttcttttaatcctgtctctgaatatgtggatgagcaagccagagcttcagtgggacagtcttcagcatcaagtaatttgcatgacatgcaaatatcagtgagattgacagccgaattcatggagcttgcaaaggagaatacaagcaataatctagagacttgtggaattcttggtgcttcatttagggatggaacttattttgtcacgatgttgattataccaaagcaagaaggaactgctcactcagtattgtcaggctgttagtgaggaggagatacatgccgtgttatcagagcagtcactttatcctgcagggtggattcatgtatatattctagcatttccctacttcatgaaatttctcttaaatgcacgtacaagttacatgcttcgtataatctgaaaagataaataagctgatacatgtgcaagatgatttccttgttgcagcatgtactgtgttagatgttttccttgttgcagcatgtaatctcattcatcatttacacttagttttctttcttttttattgcagttgagagccgagcctttttttcattttgtcttgctgcaattctttttttttgtgaatgaagcaggagagctgcgtgtcatttcattaagatagaaagagtataaaacgagttggattttgaaagaagcccaactcgccgtaaataaccgaacacactcccacccacactgaaaaaagggaggggtgggaagatacatgaccaggacctgaacaaactactccaaacactggactcatccttcacaaacatgctttctatcatcgatcgacttgcatactcaatactcttaccaggttatgttaccagaggctgttgcaattgtggtcgcacccacagatccaaccaggcaagtgttctttgctaataaatactacacttgtgttacttgtacataaaatggctggcatacatctgcagttcctttgttcttaatttcttttgctcctacattctggttctgggtaaacttatataacgtaatctgaaaatgccctatttgtttctcaaatttttcaggagttacggaatattcaggctgactgaacctggagggatggatgttcttagggagtgtgacgaaagtgggttccacactcaccgagagacaaccaacggcagcccaatctatgaaacctgctcgaaagtgcacttcaatcccaacttgcggtttgagattgtcgacctgcgctcggctcaatgatcaatgggactaaagctatggcagcacgtgctcccttgtgctccctcttggcagaagtatataccatagagcttgctgacgatgcgtgataggtatagtgacagcgccaagccggaaccaagatgctcatgttacttatctgacatctgcgctggtatttgtcaaagaaaaggagtaactgaaaactagcactggttatcttgtctgttcggccagcctttgagttggtattttaagtaatactgtatataacatacaactggggcaaaacacacacacacactattaacttggtctgggatgtgattgtaacgtagcgcaatagcgcttgactgtttctgtggcactgccaatttacttactaattgtcagtgactggagtatgaagaaatacattaatttggcagttccttactaaaccaatt

SEQ ID NO: 74024 - DNA, 760 bp, Zea Mays
gcaggctgaaattttggtgtccttgctcagccatgggtagtaggagatatgacattgatacgaggagatgtgggatccactcaagaccaaccaaatcaatgtatctggatgctcaacaaatcgtcagctgccaaactagagtgggagaccacgatgttggttcctgtgctgtgaagcatcacttcccgtctccaatcgtatcttggatagaagatctttccagctttggcaatgcttcttttaatcctgtctctgaatatgtggatgagcaagccagagcttcagtgggacagtcttcagcatcaagtaatttgcatgacatgcaaatatcagtgagattgacagccgaattcatggagcttgcaaaggagaatacaagcaataatctagagacttgtggaattcttggtgcttcatttagggatggaacttattttgtcacgatgttgattataccaaagcaagaaggaactgctcactcagctgttagtgaggaggagatacatgccgtgttatcagagcagtcactttatcctgcagggtggattcatgtatatattctagcatttccctacttcatgaaatttctcttaaatgcacgtacaagttacatgcttcgtataatctgaaaagataaataagctgatacatgtgcaagatgatttccttgttgcagcatgtactgtgttagatgttttccttgttgcagcatgtaatctcattcatcatttacacttagttttctttcttttttattgca

SEQ ID NO: 74025 - DNA, 1051 bp, Zea Mays
atggagccttggccggcgccccgtccttggctcgtccttgccggcgccctgttcggcggatcgtcgggcgccgtgtggagatcggtgccatactgccatggaacccaaggtgttcaaaaatacgctggtccacttcatgtacaccaacacgctggcacccatggagaaagaacagcagggcgtcgtcgcaatgatctaggatctgctcgcagcggcgcatcagtacaagctcaagatgctgaagttcttgagatgctgtgttagcacatcgagttggacatggttgccaggaccatggcgccatgagaagaatacacaaggagctatttttgccaaacgatttagaaaaagcaccggctcctatggataagctgctcttgtaaaggagtaggagcgagagccatatttccagaagccggagccctcccaaacgggccctaaagtgcatgtctgccacaagcctagaagtctggaactgaagtataagggttagagtacaagatattaactcttgttttgggccacggagattatttggttagggttaaaatctcacatggttaagcgacaatgtgactctaggtgcctaacattttgaacaagctatagagccaattccgcatacctagtgtagtggtaacatcgagctgtctcactgagtcactgggtcacatgttcttagcagcctcttcgtatttgcctgagaaaggcttgtccttgatttatcccttatgaagacccacttatgtaggagcctctagcactagcgcctacccttttttacagagccagttcctggggctgtgtacaaactgcaagccagcttggtcacacaccagcaggattggaggctactgcatgcatgatgacctgactgaatctcaaatatgtgtcgtcgtcgctatgtttaagttatttagtttctgtaatattacaagcgctctaatgttgcatccaacctaacgggcagaacagcaaattaaaggaaacgacacagtgttacccatctagggcatgatgcatggttgtaatggctgacaccttccttgtg

SEQ ID NO: 74026 - DNA, 1402 bp, Zea Mays
atccactccaaagtccaaacccccaccgagccacgcgacgagccgcgccgccatgtggccactctcctacctgccgccggcaccggcgcagcagttgcgagcgcaccccggtcccggctccggccgcgggcccaggccgcagccgtgcgggctgccgttccccgacgccctccgcacggctgcggctgcggccgccgtctccctttctctcatctatggcaacggcgtgggcgcggccttcgcggcatcagcggcgcaacccacggaggtgtgccggaacgggggcgcggagatggtagaggaggtgagggccgaggcggtgactaacgagcagctcgtggaggaggcgtgggaggtggtcaacgagagcttcctccccgacgccgccagccgtccgtggtcgccagagatgtggatgcaaaggaagcaggatgttctccaaggcacaattaaatctcgtgctagagcccatgatatcattcgcaagatgctagcgagcctcggtgacccttacactcggtttctatctccctccgaattctcaaagatgtcaaaatatgacatgacgggaattggattaaatctgcgggagattcctgatgaaaatggttcttttaagttgatggtattagggctgttgttagatgggcctgcttactctgctggtgttagacagggtgatgagcttttatcagtcaacggcattgatgtaaagggtaaatctgcatttgatgcttcatccatgctgcaaggtccaaaggagacgttcgttacgattaaggttaagcatggcgactgtggtcctgttgagtcaatgaaggtgcagaggcaactggttactcgaactccagttttctatcgtttggagaaaagagaaaacaatgattcatctgttgggtatattcacattacagagttcaatgcagtggccaaaaaagatttgaaatcaggcgcctcctattttgttctggatttgagggacaatcttggtggactagtgcaagctggaatcgagacagcaaagctctttctgaataaaggagacacggtcatttatactgctggccgggatcgcctagtccaaaaggcaattgttgctgaaagtggacctatgattgctactcccctcatggtatgtttgtgttgttgtggtacagctatttcaagcttcaagaagccgtaactcttaagaaatagagaaagcaaatgctagtttacactgttctgttaaactactcaatggaaagtgtgaagagtttcatttgcacattctcctagtgacaataaaattgttgcaagtccactttgatggatttttgacacttactactcaatttgacggtgaaacgacaagatttagagcatttgtaaatgtccgtggaccatggttcttctgatttta

SEQ ID NO: 74027 - DNA, 1426 bp, Zea Mays
atccactccaaagtccaaacccccaccgagccacgcgacgagccgcgccgccatgtggccactctcctacctgccgccggcaccggcgcagcagttgcgagcgcaccccggtcccggctccggccgcgggcccaggccgcagccgtgcgggctgccgttccccgacgccctccgcacggctgcggctgcggccgccgtctccctttctctcatctatggcaacggcgtgggcgcggccttcgcggcatcagcggcgcaacccacggaggtgtgccggaacgggggcgcggagatggtagaggaggtgagggccgaggcggtgactaacgagcagctcgtggaggaggcgtgggaggtggtcaacgagagcttcctccccgacgccgccagccgtccgtggtcgccagagatgtggatgcaaaggaagcaggatgttctccaaggcacaattaaatctcgtgctagagcccatgatatcattcgcaagatgctagcgagcctcggtgacccttacactcggtttctatctccctccgaattctcaaagatgtcaaaatatgacatgacgggaattggattaaatctgcgggagattcctgatgaaaatggttcttttaagttgatggtattagggctgttgttagatgggcctgcttactctgctggtgttagacagggtgatgagcttttatcagtcaacggcattgatgtaaagggtaaatctgcatttgatgcttcatccatgctgcaaggtccaaaggagacgttcgttacgattaaggttaagcatggcgactgtggtcctgttgagtcaatgaaggtgcagaggcaactggttactcgaactccagttttctatcgtttggagaaaagagaaaacaatgattcatctgttgggtatattcacattacagagttcaatgcagtggccaaaaaagatttggttagtgcgctaaaacgtctacagaaatcaggcgcctcctattttgttctggatttgagggacaatcttggtggactagtgcaagctggaatcgagacagcaaagctctttctgaataaaggagacacggtcatttatactgctggccgggatcgcctagtccaaaaggcaattgttgctgaaagtggacctatgattgctactcccctcatggtatgtttgtgttgttgtggtacagctatttcaagcttcaagaagccgtaactcttaagaaatagagaaagcaaatgctagtttacactgttctgttaaactactcaatggaaagtgtgaagagtttcatttgcacattctcctagtgacaataaaattgttgcaagtccactttgatggatttttgacacttactactcaatttgacggtgaaacgacaagatttagagcatttgtaaatgtccgtggaccatggttcttctgatttta

SEQ ID NO: 74028 - DNA, 1192 bp, Zea Mays
atccactccaaagtccaaacccccaccgagccacgcgacgagccgcgccgccatgtggccactctcctacctgccgccggcaccggcgcagcagttgcgagcgcaccccggtcccggctccggccgcgggcccaggccgcagccgtgcgggctgccgttccccgacgccctccgcacggctgcggctgcggccgccgtctccctttctctcatctatggcaacggcgtgggcgcggccttcgcggcatcagcggcgcaacccacggaggtgtgccggaacgggggcgcggagatggtagaggaggtgagggccgaggcggtgactaacgagcagctcgtggaggaggcgtgggaggtggtcaacgagagcttcctccccgacgccgccagccgtccgtggtcgccagagatgtggatgcaaaggaagcaggatgttctccaaggcacaattaaatctcgtgctagagcccatgatatcattcgcaagatgctagcgagcctcggtgacccttacactcggtttctatctccctccgaattctcaaagatgtcaaaatatgacatgacgggaattggattaaatctgcgggagattcctgatgaaaatggttcttttaagttgatggtattagggctgttgttagatgggcctgcttactctgctggtgttagacagggtgatgagcttttatcagtcaacggcattgatgtaaagggtaaatctgcatttgatgcttcatccatgctgcaaggtccaaaggagacgttcgttacgattaaggttaagcatggcgactgtggtcctgttgagtcaatgaaggtgcagaggcaactggttactcgaactccagttttctatcgtttggagaaaagagaaaacaatgattcatctgttgggtatattcacattacagagttcaatgcagtggccaaaaaagatttggttagtggtgtgttgctgcgctaaaacgtctacagaaatcaggcgcctcctattttgttctggatttgagggacaatcttggtggactagtgcaagctggaatcgagacagcaaagctctttctgaataaaggagacacggtcatttatactgctggccgggatcgcctagtccaaaaggcaattgttgctgaaagtggacctatgattgctactcccctcatgttgctggtgaataataggacagcac

SEQ ID NO: 74029 - DNA, 1740 bp, Zea Mays
atccactccaaagtccaaacccccaccgagccacgcgacgagccgcgccgccatgtggccactctcctacctgccgccggcaccggcgcagcagttgcgagcgcaccccggtcccggctccggccgcgggcccaggccgcagccgtgcgggctgccgttccccgacgccctccgcacggctgcggctgcggccgccgtctccctttctctcatctatggcaacggcgtgggcgcggccttcgcggcatcagcggcgcaacccacggaggtgtgccggaacgggggcgcggagatggtagaggaggtgagggccgaggcggtgactaacgagcagctcgtggaggaggcgtgggaggtggtcaacgagagcttcctccccgacgccgccagccgtccgtggtcgccagagatgtggatgcaaaggaagcaggatgttctccaaggcacaattaaatctcgtgctagagcccatgatatcattcgcaagatgctagcgagcctcggtgacccttacactcggtttctatctccctccgaattctcaaagatgtcaaaatatgacatgacgggaattggattaaatctgcgggagattcctgatgaaaatggttcttttaagttgatggtattagggctgttgttagatgggcctgcttactctgctggtgttagacagggtgatgagcttttatcagtcaacggcattgatgtaaagggtaaatctgcatttgatgcttcatccatgctgcaaggtccaaaggagacgttcgttacgattaaggttaagcatggcgactgtggtcctgttgagtcaatgaaggtgcagaggcaactggttactcgaactccagttttctatcgtttggagaaaagagaaaacaatgattcatctgttgggtatattcacattacagagttcaatgcagtggccaaaaaagatttggttagtgcgctaaaacgtctacagaaatcaggcgcctcctattttgttctggatttgagggacaatcttggtggactagtgcaagtatgccatccattttcttcccaattatacatcattgctatgcttgtctttggtctgctatactgcatgatgtgtgtagaggactagaggtatcatgcttttttttctttgatggtaaggaactgagcctatgggaggtatatgaccacatgagtgtaagtgtacagctccacccaggttcaaatctctttgatttgaatttgggtgtctatttcgtctttttacaatgccaactagtaccttcaaggttggtctgagttttttaattaatatattcattattcgcaagcctctcaatgcagtttgtagtttattcatatgcatcatggtagaaaataacgagacttttttgtatattgctgtgggcatctggcatgatgtttacttcaccttttatttttacttccttttgaaggctggaatcgagacagcaaagctctttctgaataaaggagacacggtcatttatactgctggccgggatcgcctagtccaaaaggcaattgttgctgaaagtggacctatgattgctactcccctcatgttgctggtgaataataggacagcacgcgccagtgaaatagttgcttcagcacttcatgacaattgcaaagctgttcttgttggcgaaaggacttttggcaaggtttgaaccacccaaaagaggatactgtgacgtttttctttctctgtgatcaacaggattatattat

SEQ ID NO: 74030 - DNA, 1733 bp, Zea Mays
atccactccaaagtccaaacccccaccgagccacgcgacgagccgcgccgccatgtggccactctcctacctgccgccggcaccggcgcagcagttgcgagcgcaccccggtcccggctccggccgcgggcccaggccgcagccgtgcgggctgccgttccccgacgccctccgcacggctgcggctgcggccgccgtctccctttctctcatctatggcaacggcgtgggcgcggccttcgcggcatcagcggcgcaacccacggaggtgtgccggaacgggggcgcggagatggtagaggaggtgagggccgaggcggtgactaacgagcagctcgtggaggaggcgtgggaggtggtcaacgagagcttcctccccgacgccgccagccgtccgtggtcgccagagatgtggatgcaaaggaagcaggatgttctccaaggcacaattaaatctcgtgctagagcccatgatatcattcgcaagatgctagcgagcctcggtgacccttacactcggtttctatctccctccgaattctcaaagatgtcaaaatatgacatgacgggaattggattaaatctgcgggagattcctgatgaaaatggttcttttaagttgatggtattagggctgttgttagatgggcctgcttactctgctggtgttagacagggtgatgagcttttatcagtcaacggcattgatgtaaagggtaaatctgcatttgatgcttcatccatgctgcaaggtccaaaggagacgttcgttacgattaaggttaagcatggcgactgtggtcctgttgagtcaatgaaggtgcagaggcaactggttactcgaactccagttttctatcgtttggagaaaagagaaaacaatgattcatctgttgggtatattcacattacagagttcaatgcagtggccaaaaaagatttgcgctaaaacgtctacagaaatcaggcgcctcctattttgttctggatttgagggacaatcttggtggactagtgcaagtatgccatccattttcttcccaattatacatcattgctatgcttgtctttggtctgctatactgcatgatgtgtgtagaggactagaggtatcatgcttttttttctttgatggtaaggaactgagcctatgggaggtatatgaccacatgagtgtaagtgtacagctccacccaggttcaaatctctttgatttgaatttgggtgtctatttcgtctttttacaatgccaactagtaccttcaaggttggtctgagttttttaattaatatattcattattcgcaagcctctcaatgcagtttgtagtttattcatatgcatcatggtagaaaataacgagacttttttgtatattgctgtgggcatctggcatgatgtttacttcaccttttatttttacttccttttgaaggctggaatcgagacagcaaagctctttctgaataaaggagacacggtcatttatactgctggccgggatcgcctagtccaaaaggcaattgttgctgaaagtggacctatgattgctactcccctcatgttgctggtgaataataggacagcacgcgccagtgaaatagttgcttcagcacttcatgacaattgcaaagctgttcttgttggcgaaaggacttttggcaaggtttgaaccacccaaaagaggatactgtgacgtttttctttctctgtgatcaacaggattatattat

SEQ ID NO: 74031 - DNA, 1383 bp, Zea Mays
atccactccaaagtccaaacccccaccgagccacgcgacgagccgcgccgccatgtggccactctcctacctgccgccggcaccggcgcagcagttgcgagcgcaccccggtcccggctccggccgcgggcccaggccgcagccgtgcgggctgccgttccccgacgccctccgcacggctgcggctgcggccgccgtctccctttctctcatctatggcaacggcgtgggcgcggccttcgcggcatcagcggcgcaacccacggaggtgtgccggaacgggggcgcggagatggtagaggaggtgagggccgaggcggtgactaacgagcagctcgtggaggaggcgtgggaggtggtcaacgagagcttcctccccgacgccgccagccgtccgtggtcgccagagatgtggatgcaaaggaagcaggatgttctccaaggcacaattaaatctcgtgctagagcccatgatatcattcgcaagatgctagcgagcctcggtgacccttacactcggtttctatctccctccgaattctcaaagatgtcaaaatatgacatgacgggaattggattaaatctgcgggagattcctgatgaaaatggttcttttaagttgatggtattagggctgttgttagatgggcctgcttactctgctggtgttagacagggcactcttgtttggtatatttgagtctggttgcttggactggccaataatgtagtagggtgatgagcttttatcagtcaacggcattgatgtaaagggtaaatctgcatttgatgcttcatccatgctgcaaggtccaaaggagacgttcgttacgattaaggttaagcatggcgactgtggtcctgttgagtcaatgaaggtgcagaggcaactggttactcgaactccagttttctatcgtttggagaaaagagaaaacaatgattcatctgttgggtatattcacattacagagttcaatgcagtggccaaaaaagatttggttagtgcgctaaaacgtctacagaaatcaggcgcctcctattttgttctggatttgagggacaatcttggtggactagtgcaagctggaatcgagacagcaaagctctttctgaataaaggagacacggtcatttatactgctggccgggatcgcctagtccaaaaggcaattgttgctgaaagtggacctatgattgctactcccctcatgttgctggtgaataataggacagcacgcgccagtgaaatagttgcttcagcacttcatgacaattgcaaagctgttcttgttggcgaaaggacttttggcaaggtttgaaccacccaaaagaggatactgtgacgtttttctttctctgtgatcaacaggattatattat

SEQ ID NO: 74032 - DNA, 1716 bp, Zea Mays
atccactccaaagtccaaacccccaccgagccacgcgacgagccgcgccgccatgtggccactctcctacctgccgccggcaccggcgcagcagttgcgagcgcaccccggtcccggctccggccgcgggcccaggccgcagccgtgcgggctgccgttccccgacgccctccgcacggctgcggctgcggccgccgtctccctttctctcatctatggcaacggcgtgggcgcggccttcgcggcatcagcggcgcaacccacggaggtgtgccggaacgggggcgcggagatggtagaggaggtgagggccgaggcggtgactaacgagcagctcgtggaggaggcgtgggaggtggtcaacgagagcttcctccccgacgccgccagccgtccgtggtcgccagagatgtggatgcaaaggaagcaggatgttctccaaggcacaattaaatctcgtgctagagcccatgatatcattcgcaagatgctagcgagcctcggtgacccttacactcggtttctatctccctccgaattctcaaagatgtcaaaatatgacatgacgggaattggattaaatctgcgggagattcctgatgaaaatggttcttttaagttgatggtattagggctgttgttagatgggcctgcttactctgctggtgttagacagggtgatgagcttttatcagtcaacggcattgatgtaaagggtaaatctgcatttgatgcttcatccatgctgcaaggtccaaaggagacgttcgttacgattaaggttaagcatggcgactgtggtcctgttgagtcaatgaaggtgcagaggcaactggttactcgaactccagttttctatcgtttggagaaaagagaaaacaatgattcatctgttgggtatattcacattacagagttcaatgcagtggccaaaaaagatttggttagtgcgctaaaacgtctacagaaatcaggcgcctcctattttgttctggatttgagggacaatcttggtggactagtgcaagctggaatcgagacagcaaagctctttctgaataaaggagacacggtcatttatactgctggccgggatcgcctagtccaaaaggcaattgttgctgaaagtggacctatgattgctactcccctcatgttgctggtgaataataggacagcacgcgccagtgaaatagttgcttcagcacttcatgacaattgcaaagctgttcttgttggcgaaaggacttttggcaaggtttgaaccacccaaaagaggatactgtgacgtttttctttctctgtgatcaacaggattatattatgccctttttgtgtctggtaactcatgtctagggaaatgcaggagcttaatccaatctgtatttgaacttcatgatggttctggtattgtcgtcacagttggcaaatacgtgacaccaaaccacaaggatatcaatgggaatggaatagaaccggattacaatcgtcttcctgatttcaatgaagccaaagatttcctttcacgatgcggaattaaagaattaagctgacagacgtttgtggcagatttcaatgaagcattatattctgaaggttctctcacggtaagaagcttttatttactgttgcatagttggttgttactgctctgcatacattggattatccaagtaacaacaaagaaataaagaacaaggcagaaattttgtatgg

SEQ ID NO: 74033 - DNA, 1709 bp, Zea Mays
atccactccaaagtccaaacccccaccgagccacgcgacgagccgcgccgccatgtggccactctcctacctgccgccggcaccggcgcagcagttgcgagcgcaccccggtcccggctccggccgcgggcccaggccgcagccgtgcgggctgccgttccccgacgccctccgcacggctgcggctgcggccgccgtctccctttctctcatctatggcaacggcgtgggcgcggccttcgcggcatcagcggcgcaacccacggaggtgtgccggaacgggggcgcggagatggtagaggaggtgagggccgaggcggtgactaacgagcagctcgtggaggaggcgtgggaggtggtcaacgagagcttcctccccgacgccgccagccgtccgtggtcgccagagatgtggatgcaaaggaagcaggatgttctccaaggcacaattaaatctcgtgctagagcccatgatatcattcgcaagatgctagcgagcctcggtgacccttacactcggtttctatctccctccgaattctcaaagatgtcaaaatatgacatgacgggaattggattaaatctgcgggagattcctgatgaaaatggttcttttaagttgatggtattagggctgttgttagatgggcctgcttactctgctggtgttagacagggtgatgagcttttatcagtcaacggcattgatgtaaagggtaaatctgcatttgatgcttcatccatgctgcaaggtccaaaggagacgttcgttacgattaaggttaagcatggcgactgtggtcctgttgagtcaatgaaggtgcagaggcaactggttactcgaactccagttttctatcgtttggagaaaagagaaaacaatgattcatctgttgggtatattcacattacagagttcaatgcagtggccaaaaaagatttgcgctaaaacgtctacagaaatcaggcgcctcctattttgttctggatttgagggacaatcttggtggactagtgcaagctggaatcgagacagcaaagctctttctgaataaaggagacacggtcatttatactgctggccgggatcgcctagtccaaaaggcaattgttgctgaaagtggacctatgattgctactcccctcatgttgctggtgaataataggacagcacgcgccagtgaaatagttgcttcagcacttcatgacaattgcaaagctgttcttgttggcgaaaggacttttggcaaggtttgaaccacccaaaagaggatactgtgacgtttttctttctctgtgatcaacaggattatattatgccctttttgtgtctggtaactcatgtctagggaaatgcaggagcttaatccaatctgtatttgaacttcatgatggttctggtattgtcgtcacagttggcaaatacgtgacaccaaaccacaaggatatcaatgggaatggaatagaaccggattacaatcgtcttcctgatttcaatgaagccaaagatttcctttcacgatgcggaattaaagaattaagctgacagacgtttgtggcagatttcaatgaagcattatattctgaaggttctctcacggtaagaagcttttatttactgttgcatagttggttgttactgctctgcatacattggattatccaagtaacaacaaagaaataaagaacaaggcagaaattttgtatgg

SEQ ID NO: 74034 - DNA, 2935 bp, Zea Mays
ctttgtccccccctaatccgtgagttgggccttcgggttcggcttccatggcgcgggcgcgaggccggctacgccgttgctgctttgttcgtgagtcgtgaatctggatcaaggcgattcgaaaaaaaaaagaatctggatcaaggcatcaagctcaggttctcccgttcttgctgtccagaccagagatattgctcactgacttcggcctcggcgtttgaagccgccaccggtggggtgacgccgatggcttggaggatacctacggcggcggcggcggcgtgcagcaggttagcgagcgtgagccgaatgcctggagccgttcgtcgcgaaacgagctgaagctagtcgtctcgactcccacgtcctagcaagcggttgtcggccgtcggtcgtcggatcaagaatgagtccacgcgtcagtaatctgctagtatgcacgggagggagtttgggttggggaccggatccaccaatttttcttccggcgatgggaaaacgaaagagacctgcatctgattccattctggaagcaccccactccaatccactctacatgtcccacgctcagacccgggtccctcaccgccgtctctcgcgctccggtaaccgcctccacctccgcacctgacccctccgcctccgcctccttgaaaattccttttgctgctccaacctgcgaagctagttcactgtactcttgcttgcttataacgtagcgtgcggtggacggggtttgccagcgacttcaagaaaggctgctacgttttgccatcataagggtcgttaggagatggtagaattgaggcttcctatgttcagtatacaataatacggccctgttgtttccatgaacgcttgctacctcgtccagaagtccctggaacagtagtttggacctttgaatccagttcctcaatagattgccccatgtttgaagagatgagtcatattcagtaatcagtattcagtacccactaaattttccaacgagtttaaatatcttttatccattcacaggtagatataatttgatgggaagatgaatggtgcagaggaggaggagccgcctcacgtcagcagcatgcccaagacacaagacggtgttaccaagcccagtctagggaaagagcccatcccagggagcgagctctggacggatgggctcatctgtgcttttgagctggtcaagagtcacaggaagcctgttcagcacaaatcatggctggcaactgagcagatacaggagaagggccccactatgtgcacgaggaagcactcaagaaggaatgggcaccagatcactgagccgaaagtggatgagagcattgtgttggaaaacccccagcagactgatttcagtaacgatccttcagtgctcaaagataggccattgtatgctggggagattttggatcataaatgggtgcctattggatggaataggatcgccgagctggtcctgagggttcagtcagactccagctgggagaatgagttgatggagatgagtgatagcgaggatgattacaccgtggctgatcttgcagctccatactggcagcgccctgtgggacctacttggtggtgtcatgtcaccgcaggccatccttcaatagatgcatggttgaatagcgctcactggatgcatcctgccatcagaattgcactgagagatgagagcaaactgataagcgaccggatgaagtacctgctctacgaggtcccagttagagttgcaggagggctgttatttgagcttcttggccagtcaataggagacccaaatcatgaagaggaagatatacctattgtgcttaggtcttggcaagcacaaaattttcttgttacaacaatgcatgtcaaaggcccttcatccaatataaatgtgttaggagtgactgaagtgcaggagttgcttcttgctggtggaagccaaacacctagatcagtgcatgaagtaattgcacatttggtcagccgtctttcacgttgggatgacagattattccggaaatatgtatttggggaagcagatgaaattgaattgaaatttgtgaataggagaaatcatgaagatcttaatcttgttagcatcatactgaatcaggaaatcagaaggttagcaacacaggtaatcagggttaaatggtcacttcatgcaagggaagagatattaattgagcttctcagacatttgaggggtaatgccacaagagctattctagagagtattagaaagtgtacgagggacatgttggaagagcaggaagctgtgcgcgggcgcttgttcactattcaggatgttatgcagagcactgtccgtgcatggctacaagatagaagcctcagagttacacataatctggcaatttttggcggcggtggcatggttttatccataatcactggccttttcggaatcaacgtcgatggcatacctggagcgcagaacaccccctacgcttttggtttgttcgcgggacttctcttctttgtagggatcgtcctaatcggcatggggatgctgtatcttgggttacagaatccagttaacagtgagaaggtgaaggtgaggaagctggagctccagcacctggtttcgatgttccagcacgaagcggagcagcatggcaaggtcagggaaggtgttagccggcatggcgcctcgccgagttcatccacggcctctgatgaagggtacattcttatctcctgagatgggagatttatttgctgacgtgcaaggtcttgttttgaaaggctggaactgaagagaagtcgggtaaatggtatacttacacgtgtcttaagaattgtaattgggggatttgacatcgaaacgttggatatgataattgtagcagcagattggctttcctctgttgcttgagatcgcggctgtgatcgtttcttatcgaattttcagtaggag

SEQ ID NO: 74035 - DNA, 1981 bp, Zea Mays
gggccttcgggttcggcttccatggcgcgggcgcgaggccggctacgccgttgctgctttgttcgtgagtcgtgaatctggatcaaggcgattcgaaaaaaaaaagaatctggatcaaggcatcaagctcaggtagatataatttgatgggaagatgaatggtgcagaggaggaggagccgcctcacgtcagcagcatgcccaagacacaagacggtgttaccaagcccagtctagggaaagagcccatcccagggagcgagctctggacggatgggctcatctgtgcttttgagctggtcaagagtcacaggaagcctgttcagcacaaatcatggctggcaactgagcagatacaggagaagggccccactatgtgcacgaggaagcactcaagaaggaatgggcaccagatcactgagccgaaagtggatgagagcattgtgttggaaaacccccagcagactgatttcagtaacgatccttcagtgctcaaagataggccattgtatgctggggagattttggatcataaatgggtgcctattggatggaataggatcgccgagctggtcctgagggttcagtcagactccagctgggagaatgagttgatggagatgagtgatagcgaggatgattacaccgtggctgatcttgcagctccatactggcagcgccctgtgggacctacttggtggtgtcatgtcaccgcaggccatccttcaatagatgcatggttgaatagcgctcactggatgcatcctgccatcagaattgcactgagagatgagagcaaactgataagcgaccggatgaagtacctgctctacgagtttttcaggtcccagttagagttgcaggagggctgttatttgagcttcttggccagtcaataggagacccaaatcatgaagaggaagatatacctattgtgcttaggtcttggcaagcacaaaattttcttgttacaacaatgcatgtcaaaggcccttcatccaatataaatgtgttaggagtgactgaagtgcaggagttgcttcttgctggtggaagccaaacacctagatcagtgcatgaagtaattgcacatttggtcagccgtctttcacgttgggatgacagattattccggaaatatgtatttggggaagcagatgaaattgaattgaaatttgtgaataggagaaatcatgaagatcttaatcttgttagcatcatactgaatcaggaaatcagaaggttagcaacacaggtaatcagggttaaatggtcacttcatgcaagggaagagatattaattgagcttctcagacatttgaggggtaatgccacaagagctattctagagagtattagaaagtgtacgagggacatgttggaagagcaggaagctgtgcgcgggcgcttgttcactattcaggatgttatgcagagcactgtccgtgcatggctacaagatagaagcctcagagttacacataatctggcaatttttggcggcggtggcatggttttatccataatcactggccttttcggaatcaacgtcgatggcatacctggagcgcagaacaccccctacgcttttgaatccagttaacagtgagaaggtgaaggtgaggaagctggagctccagcacctggtttcgatgttccagcacgaagcggagcagcatggcaaggtcagggaaggtgttagccggcatggcgcctcgccgagttcatccacggcctctgatgaagggtacattcttatctcctgagatgggagatttatttgctgacgtgcaaggtcttgttttgaaaggctggaactgaagagaagtcgggtaaatggtatacttacacgtgtcttaagaattgtaattgggggatttgacatcgaaacgttggatatgataattgtagcagcagattggctttcctctgttgcttgagatcgcggctgtgatcgtttcttatcgaattttcagtaggag

SEQ ID NO: 74036 - DNA, 2156 bp, Zea Mays
gtcggtcgtcggatcaagaatgagtccacgcgtcagtaatctgctagtatgcacgggagggagtttgggttggggaccggatccaccaatttttcttccggcgatgggaaaacgaaagagacctgcatctgattccattctggaagcaccccactccaatccactctacatgtcccacgctcagacccgggtccctcaccgccgtctctcgcgctccggtagatataatttgatgggaagatgaatggtgcagaggaggaggagccgcctcacgtcagcagcatgcccaagacacaagacggtgttaccaagcccagtctagggaaagagcccatcccagggagcgagctctggacggatgggctcatctgtgcttttgagctggtcaagagtcacaggaagcctgttcagcacaaatcatggctggcaactgagcagatacaggagaagggccccactatgtgcacgaggaagcactcaagaaggaatgggcaccagatcactgagccgaaagtggatgagagcattgtgttggaaaacccccagcagactgatttcagtaacgatccttcagtgctcaaagataggccattgtatgctggggagattttggatcataaatgggtgcctattggatggaataggatcgccgagctggtcctgagggttcagtcagactccagctgggagaatgagttgatggagatgagtgatagcgaggatgattacaccgtggctgatcttgcagctccatactggcagcgccctgtgggacctacttggtggtgtcatgtcaccgcaggccatccttcaatagatgcatggttgaatagcgctcactggatgcatcctgccatcagaattgcactgagagatgagagcaaactgataagcgaccggatgaagtacctgctctacgagtttttcaggtcccagttagagttgcaggagggctgttatttgagcttcttggccagtcaataggagacccaaatcatgaagaggaagatatacctattgtgcttaggtcttggcaagcacaaaattttcttgttacaacaatgcatgtcaaaggcccttcatccaatataaatgtgttaggagtgactgaagtgcaggagttgcttcttgctggtggaagccaaacacctagatcagtgcatgaagtaattgcacatttggtcagccgtctttcacgttgggatgacagattattccggaaatatgtatttggggaagcagatgaaattgaattgaaatttgtgaataggagaaatcatgaagatcttaatcttgttagcatcatactgaatcaggaaatcagaaggttagcaacacagacatccctgctgtaggtaatcagggttaaatggtcacttcatgcaagggaagagatattaattgagcttctcagacatttgaggggtaatgccacaagagctattctagagagtattagaaagtgtacgagggacatgttggaagagcaggaagctgtgcgcgggcgcttgttcactattcaggatgttatgcagagcactgtccgtgcatggctacaagatagaagcctcagagttacacataatctggcaatttttggcggcggtggcatggttttatccataatcactggccttttcggaatcaacgtcgatggcatacctggagcgcagaacaccccctacgcttttggtttgttcgcgggacttctcttctttgtagggatcgtcctaatcggcatggggatgctgtatcttgggttacagaatccagttaacagtgagaaggtgaaggtgaggaagctggagctccagcacctggtttcgatgttccagcacgaagcggagcagcatggcaaggtcagggaaggtgttagccggcatggcgcctcgccgagttcatccacggcctctgatgaagggtacattcttatctcctgagatgggagatttatttgctgacgtgcaaggtcttgttttgaaaggctggaactgaagagaagtcgggtaaatggtatacttacacgtgtcttaagaattgtaattgggggatttgacatcgaaacgttggatatgataattgtagcagcagattggctttcctctgttgcttgagatcgcggctgtgatcgtttcttatcgaattttcagtaggag

SEQ ID NO: 74037 - DNA, 2047 bp, Zea Mays
cacgggagggagtttgggttggggaccggatccaccaatttttcttccggcgatgggaaaacgaaagagacctgcatctgattccattctggaagcaccccactccaatccactctacatgtcccacgctcagacccgggtccctcaccgccgtctctcgcgctccgaggaggaggagccgcctcacgtcagcagcatgcccaagacacaagacggtgttaccaagcccagtctagggaaagagcccatcccagggagcgagctctggacggatgggctcatctgtgcttttgagctggtcaagagtcacaggaagcctgttcagcacaaatcatggctggcaactgagcagatacaggagaagggccccactatgtgcacgaggaagcactcaagaaggaatgggcaccagatcactgagccgaaagtggatgagagcattgtgttggaaaacccccagcagactgatttcagtaacgatccttcagtgctcaaagataggccattgtatgctggggagattttggatcataaatgggtgcctattggatggaataggatcgccgagctggtcctgagggttcagtcagactccagctgggagaatgagttgatggagatgagtgatagcgaggatgattacaccgtggctgatcttgcagctccatactggcagcgccctgtgggacctacttggtggtgtcatgtcaccgcaggccatccttcaatagatgcatggttgaatagcgctcactggatgcatcctgccatcagaattgcactgagagatgagagcaaactgataagcgaccggatgaagtacctgctctacgaggtcccagttagagttgcaggagggctgttatttgagcttcttggccagtcaataggagacccaaatcatgaagaggaagatatacctattgtgcttaggtcttggcaagcacaaaattttcttgttacaacaatgcatgtcaaaggcccttcatccaatataaatgtgttaggagtgactgaagtgcaggagttgcttcttgctggtggaagccaaacacctagatcagtgcatgaagtaattgcacatttggtcagccgtctttcacgttgggatgacagattattccggaaatatgtatttggggaagcagatgaaattgaattgaaatttgtgaataggagaaatcatgaagatcttaatcttgttagcatcatactgaatcaggaaatcagaaggttagcaacacaggtaatcagggttaaatggtcacttcatgcaagggaagagatattaattgagcttctcagacatttgaggggtaatgccacaagagctattctagagagtattagaaagtgtacgagggacatgttggaagagcaggaagctgtgcgcgggcgcttgttcactattcaggatgttatgcagagcactgtccgtgcatggctacaagatagaagcctcagagttacacataatctggcaatttttggcggcggtggcatggttttatccataatcactggccttttcggaatcaacgtcgatggcatacctggagcgcagaacaccccctacgcttttggtttgttcgcgggacttctcttctttgtagggatcgtcctaatcggcatggggatgctgtatcttgggttacagaatccagttaacagtgagaaggtgaaggtgaggaagctggagctccagcacctggtttcgatgttccagcacgaagcggagcagcatggcaaggtcagggaaggtgttagccggcatggcgcctcgccgagttcatccacggcctctgatgaagggtacattcttatctcctgagatgggagatttatttgctgacgtgcaaggtcttgttttgaaaggctggaactgaagagaagtcgggtaaatggtatacttacacgtgtcttaagaattgtaattgggggatttgacatcgaaacgttggatatgataattgtagcagcagattggctttcctctgttgcttgagatcgcggctgtgatcgtttcttatcgaattttcagtaggag

SEQ ID NO: 74038 - DNA, 2090 bp, Zea Mays
cacgggagggagtttgggttggggaccggatccaccaatttttcttccggcgatgggaaaacgaaagagacctgcatctgattccattctggaagcaccccactccaatccactctacatgtcccacgctcagacccgggtccctcaccgccgtctctcgcgctccggtagatataatttgatgggaagatgaatggtgcagaggaggaggagccgcctcacgtcagcagcatgcccaagacacaagacggtgttaccaagcccagtctagggaaagagcccatcccagggagcgagctctggacggatgggctcatctgtgcttttgagctggtcaagagtcacaggaagcctgttcagcacaaatcatggctggcaactgagcagatacaggagaagggccccactatgtgcacgaggaagcactcaagaaggaatgggcaccagatcactgagccgaaagtggatgagagcattgtgttggaaaacccccagcagactgatttcagtaacgatccttcagtgctcaaagataggccattgtatgctggggagattttggatcataaatgggtgcctattggatggaataggatcgccgagctggtcctgagggttcagtcagactccagctgggagaatgagttgatggagatgagtgatagcgaggatgattacaccgtggctgatcttgcagctccatactggcagcgccctgtgggacctacttggtggtgtcatgtcaccgcaggccatccttcaatagatgcatggttgaatagcgctcactggatgcatcctgccatcagaattgcactgagagatgagagcaaactgataagcgaccggatgaagtacctgctctacgagtttttcaggtcccagttagagttgcaggagggctgttatttgagcttcttggccagtcaataggagacccaaatcatgaagaggaagatatacctattgtgcttaggtcttggcaagcacaaaattttcttgttacaacaatgcatgtcaaaggcccttcatccaatataaatgtgttaggagtgactgaagtgcaggagttgcttcttgctggtggaagccaaacacctagatcagtgcatgaagtaattgcacatttggtcagccgtctttcacgttgggatgacagattattccggaaatatgtatttggggaagcagatgaaattgaattgaaatttgtgaataggagaaatcatgaagatcttaatcttgttagcatcatactgaatcaggaaatcagaaggttagcaacacaggtaatcagggttaaatggtcacttcatgcaagggaagagatattaattgagcttctcagacatttgaggggtaatgccacaagagctattctagagagtattagaaagtgtacgagggacatgttggaagagcaggaagctgtgcgcgggcgcttgttcactattcaggatgttatgcagagcactgtccgtgcatggctacaagatagaagcctcagagttacacataatctggcaatttttggcggcggtggcatggttttatccataatcactggccttttcggaatcaacgtcgatggcatacctggagcgcagaacaccccctacgcttttggtttgttcgcgggacttctcttctttgtagggatcgtcctaatcggcatggggatgctgtatcttgggttacagaatccagttaacagtgagaaggtgaaggtgaggaagctggagctccagcacctggtttcgatgttccagcacgaagcggagcagcatggcaaggtcagggaaggtgttagccggcatggcgcctcgccgagttcatccacggcctctgatgaagggtacattcttatctcctgagatgggagatttatttgctgacgtgcaaggtcttgttttgaaaggctggaactgaagagaagtcgggtaaatggtatacttacacgtgtcttaagaattgtaattgggggatttgacatcgaaacgttggatatgataattgtagcagcagattggctttcctctgttgcttgagatcgcggctgtgatcgtttcttatcgaattttcagtaggag

SEQ ID NO: 74039 - DNA, 2008 bp, Zea Mays
cacgggagggagtttgggttggggaccggatccaccaatttttcttccggcgatgggaaaacgaaagagacctgcatctgattccattctggaagcaccccactccaatccactctacatgtcccacgctcagacccgggtccctcaccgccgtctctcgcgctccggtagatataatttgatgggaagatgaatggtgcagaggaggaggagccgcctcacgtcagcagcatgcccaagacacaagacggtgttaccaagcccagtctagggaaagagcccatcccagggagcgagctctggacggatgggctcatctgtgcttttgagctggtcaagagtcacaggaagcctgttcagcacaaatcatggctggcaactgagcagatacaggagaagggccccactatgtgcacgaggaagcactcaagaaggaatgggcaccagatcactgagccgaaagtggatgagagcattgtgttggaaaacccccagcagactgatttcagtaacgatccttcagtgctcaaagataggccattgtatgctggggagattttggatcataaatgggtgcctattggatggaataggatcgccgagctggtcctgagggttcagtcagactccagctgggagaatgagttgatggagatgagtgatagcgaggatgattacaccgtggctgatcttgcagctccatactggcagcgccctgtgggacctacttggtggtgtcatgtcaccgcaggccatccttcaatagatgcatggttgaatagcgctcactggatgcatcctgccatcagaattgcactgagagatgagagcaaactgataagcgaccggatgaagtacctgctctacgaggtcccagttagagttgcaggagggctgttatttgagcttcttggccagtcaataggagacccaaatcatgaagaggaagatatacctattgtgcttaggtcttggcaagcacaaaattttcttgttacaacaatgcatgtcaaaggcccttcatccaatataaatgtgttaggagtgactgaagtgcaggagttgcttcttgctggtggaagccaaacacctagatcagtgcatgaagtaattgcacatttggtcagccgtctttcacgttgggatgacagattattccggaaatatgtatttggggaagcagatgaaattgaattgaaatttgtgaataggagaaatcatgaagatcttaatcttgttagcatcatactgaatcaggaaatcagaaggttagcaacacaggtaatcagggttaaatggtcacttcatgcaagggaagagatattaattgagcttctcagacatttgaggggtaatgccacaagagctattctagagagtattagaaagtgtacgagggacatgttggaagagcaggaagctgtgcgcgggcgcttgttcactattcaggatgttatgcagagcactgtccgtgcatggctacaagatagaagcctcagagttacacataatctggcaatttttggcggcggtggcatggttttatccataatcactggccttttcggaatcaacgtcgatggcatacctggagcgcagaacaccccctacgcttttgaatccagttaacagtgagaaggtgaaggtgaggaagctggagctccagcacctggtttcgatgttccagcacgaagcggagcagcatggcaaggtcagggaaggtgttagccggcatggcgcctcgccgagttcatccacggcctctgatgaagggtacattcttatctcctgagatgggagatttatttgctgacgtgcaaggtcttgttttgaaaggctggaactgaagagaagtcgggtaaatggtatacttacacgtgtcttaagaattgtaattgggggatttgacatcgaaacgttggatatgataattgtagcagcagattggctttcctctgttgcttgagatcgcggctgtgatcgtttcttatcgaattttcagtaggag

SEQ ID NO: 74040 - DNA, 2055 bp, Zea Mays
cacgggagggagtttgggttggggaccggatccaccaatttttcttccggcgatgggaaaacgaaagagacctgcatctgattccattctggaagcaccccactccaatccactctacatgtcccacgctcagacccgggtccctcaccgccgtctctcgcgctccgaggaggaggagccgcctcacgtcagcagcatgcccaagacacaagacggtgttaccaagcccagtctagggaaagagcccatcccagggagcgagctctggacggatgggctcatctgtgcttttgagctggtcaagagtcacaggaagcctgttcagcacaaatcatggctggcaactgagcagatacaggagaagggccccactatgtgcacgaggaagcactcaagaaggaatgggcaccagatcactgagccgaaagtggatgagagcattgtgttggaaaacccccagcagactgatttcagtaacgatccttcagtgctcaaagataggccattgtatgctggggagattttggatcataaatgggtgcctattggatggaataggatcgccgagctggtcctgagggttcagtcagactccagctgggagaatgagttgatggagatgagtgatagcgaggatgattacaccgtggctgatcttgcagctccatactggcagcgccctgtgggacctacttggtggtgtcatgtcaccgcaggccatccttcaatagatgcatggttgaatagcgctcactggatgcatcctgccatcagaattgcactgagagatgagagcaaactgataagcgaccggatgaagtacctgctctacgagtttttcaggtcccagttagagttgcaggagggctgttatttgagcttcttggccagtcaataggagacccaaatcatgaagaggaagatatacctattgtgcttaggtcttggcaagcacaaaattttcttgttacaacaatgcatgtcaaaggcccttcatccaatataaatgtgttaggagtgactgaagtgcaggagttgcttcttgctggtggaagccaaacacctagatcagtgcatgaagtaattgcacatttggtcagccgtctttcacgttgggatgacagattattccggaaatatgtatttggggaagcagatgaaattgaattgaaatttgtgaataggagaaatcatgaagatcttaatcttgttagcatcatactgaatcaggaaatcagaaggttagcaacacaggtaatcagggttaaatggtcacttcatgcaagggaagagatattaattgagcttctcagacatttgaggggtaatgccacaagagctattctagagagtattagaaagtgtacgagggacatgttggaagagcaggaagctgtgcgcgggcgcttgttcactattcaggatgttatgcagagcactgtccgtgcatggctacaagatagaagcctcagagttacacataatctggcaatttttggcggcggtggcatggttttatccataatcactggccttttcggaatcaacgtcgatggcatacctggagcgcagaacaccccctacgcttttggtttgttcgcgggacttctcttctttgtagggatcgtcctaatcggcatggggatgctgtatcttgggttacagaatccagttaacagtgagaaggtgaaggtgaggaagctggagctccagcacctggtttcgatgttccagcacgaagcggagcagcatggcaaggtcagggaaggtgttagccggcatggcgcctcgccgagttcatccacggcctctgatgaagggtacattcttatctcctgagatgggagatttatttgctgacgtgcaaggtcttgttttgaaaggctggaactgaagagaagtcgggtaaatggtatacttacacgtgtcttaagaattgtaattgggggatttgacatcgaaacgttggatatgataattgtagcagcagattggctttcctctgttgcttgagatcgcggctgtgatcgtttcttatcgaattttcagtaggag

SEQ ID NO: 74041 - DNA, 2022 bp, Zea Mays
cacgggagggagtttgggttggggaccggatccaccaatttttcttccggcgatgggaaaacgaaagagacctgcatctgattccattctggaagcaccccactccaatccactctacatgtcccacgctcagacccgggtccctcaccgccgtctctcgcgctccggtagatataatttgatgggaagatgaatggtgcagaggaggaggagccgcctcacgtcagcagcatgcccaagacacaagacggtgttaccaagcccagtctagggaaagagcccatcccagggagcgagctctggacggatgggctcatctgtgcttttgagctggtcaagagtcacaggaagcctgttcagcacaaatcatggctggcaactgagcagatacaggagaagggccccactatgtgcacgaggaagcactcaagaaggaatgggcaccagatcactgagccgaaagtggatgagagcattgtgttggaaaacccccagcagactgatttcagtaacgatccttcagtgctcaaagataggccattgtatgctggggagattttggatcataaatgggtgcctattggatggaataggatcgccgagctggtcctgagggttcagtcagactccagctgggagaatgagttgatggagatgagtgatagcgaggatgattacaccgtggctgatcttgcagctccatactggcagcgccctgtgggacctacttggtggtgtcatgtcaccgcaggccatccttcaatagatgcatggttgaatagcgctcactggatgcatcctgccatcagaattgcactgagagatgagagcaaactgataagcgaccggatgaagtacctgctctacgaggtcccagttagagttgcaggagggctgttatttgagcttcttggccagtcaataggagacccaaatcatgaagaggaagatatacctattgtgcttaggtcttggcaagcacaaaattttcttgttacaacaatgcatgtcaaaggcccttcatccaatataaatgtgttaggagtgactgaagtgcaggagttgcttcttgctggtggaagccaaacacctagatcagtgcatgaagtaattgcacatttggtcagccgtctttcacgttgggatgacaggagaaatcatgaagatcttaatcttgttagcatcatactgaatcaggaaatcagaaggttagcaacacaggtaatcagggttaaatggtcacttcatgcaagggaagagatattaattgagcttctcagacatttgaggggtaatgccacaagagctattctagagagtattagaaagtgtacgagggacatgttggaagagcaggaagctgtgcgcgggcgcttgttcactattcaggatgttatgcagagcactgtccgtgcatggctacaagatagaagcctcagagttacacataatctggcaatttttggcggcggtggcatggttttatccataatcactggccttttcggaatcaacgtcgatggcatacctggagcgcagaacaccccctacgcttttggtttgttcgcgggacttctcttctttgtagggatcgtcctaatcggcatggggatgctgtatcttgggttacagaatccagttaacagtgagaaggtgaaggtgaggaagctggagctccagcacctggtttcgatgttccagcacgaagcggagcagcatggcaaggtcagggaaggtgttagccggcatggcgcctcgccgagttcatccacggcctctgatgaagggtacattcttatctcctgagatgggagatttatttgctgacgtgcaaggtcttgttttgaaaggctggaactgaagagaagtcgggtaaatggtatacttacacgtgtcttaagaattgtaattgggggatttgacatcgaaacgttggatatgataattgtagcagcagattggctttcctctgttgcttgagatcgcggctgtgatcgtttcttatcgaattttcagtaggag

SEQ ID NO: 74042 - DNA, 2120 bp, Zea Mays
cacgggagggagtttgggttggggaccggatccaccaatttttcttccggcgatgggaaaacgaaagagacctgcatctgattccattctggaagcaccccactccaatccactctacatgtcccacgctcagacccgggtccctcaccgccgtctctcgcgctccgcgtgcggtggacggggtttgccagcgacttcaagaaaggtagatataatttgatgggaagatgaatggtgcagaggaggaggagccgcctcacgtcagcagcatgcccaagacacaagacggtgttaccaagcccagtctagggaaagagcccatcccagggagcgagctctggacggatgggctcatctgtgcttttgagctggtcaagagtcacaggaagcctgttcagcacaaatcatggctggcaactgagcagatacaggagaagggccccactatgtgcacgaggaagcactcaagaaggaatgggcaccagatcactgagccgaaagtggatgagagcattgtgttggaaaacccccagcagactgatttcagtaacgatccttcagtgctcaaagataggccattgtatgctggggagattttggatcataaatgggtgcctattggatggaataggatcgccgagctggtcctgagggttcagtcagactccagctgggagaatgagttgatggagatgagtgatagcgaggatgattacaccgtggctgatcttgcagctccatactggcagcgccctgtgggacctacttggtggtgtcatgtcaccgcaggccatccttcaatagatgcatggttgaatagcgctcactggatgcatcctgccatcagaattgcactgagagatgagagcaaactgataagcgaccggatgaagtacctgctctacgaggtcccagttagagttgcaggagggctgttatttgagcttcttggccagtcaataggagacccaaatcatgaagaggaagatatacctattgtgcttaggtcttggcaagcacaaaattttcttgttacaacaatgcatgtcaaaggcccttcatccaatataaatgtgttaggagtgactgaagtgcaggagttgcttcttgctggtggaagccaaacacctagatcagtgcatgaagtaattgcacatttggtcagccgtctttcacgttgggatgacagattattccggaaatatgtatttggggaagcagatgaaattgaattgaaatttgtgaataggagaaatcatgaagatcttaatcttgttagcatcatactgaatcaggaaatcagaaggttagcaacacaggtaatcagggttaaatggtcacttcatgcaagggaagagatattaattgagcttctcagacatttgaggggtaatgccacaagagctattctagagagtattagaaagtgtacgagggacatgttggaagagcaggaagctgtgcgcgggcgcttgttcactattcaggatgttatgcagagcactgtccgtgcatggctacaagatagaagcctcagagttacacataatctggcaatttttggcggcggtggcatggttttatccataatcactggccttttcggaatcaacgtcgatggcatacctggagcgcagaacaccccctacgcttttggtttgttcgcgggacttctcttctttgtagggatcgtcctaatcggcatggggatgctgtatcttgggttacagaatccagttaacagtgagaaggtgaaggtgaggaagctggagctccagcacctggtttcgatgttccagcacgaagcggagcagcatggcaaggtcagggaaggtgttagccggcatggcgcctcgccgagttcatccacggcctctgatgaagggtacattcttatctcctgagatgggagatttatttgctgacgtgcaaggtcttgttttgaaaggctggaactgaagagaagtcgggtaaatggtatacttacacgtgtcttaagaattgtaattgggggatttgacatcgaaacgttggatatgataattgtagcagcagattggctttcctctgttgcttgagatcgcggctgtgatcgtttcttatcgaattttcagtaggag

SEQ ID NO: 74043 - DNA, 906 bp, Zea Mays
ctgtatctggtctacaagggctctactgatcatctaatgtgtagctcaacactcaacagcctaccagatgtagtattatattcttttcttgcttcacaaaataatgtaatcagggttaaatggtcacttcatgcaagggaagagatattaattgagcttctcagacatttgaggggtaatgccacaagagctattctagagagtattagaaagtgtacgagggacatgttggaagagcaggaagctgtgcgcgggcgcttgttcactattcaggatgttatgcagagcactgtccgtgcatggctacaagatagaagcctcagagttacacataatctggcaatttttggcggcggtggcatggttttatccataatcactggccttttcggaatcaacgtcgatggcatacctggagcgcagaacaccccctacgcttttggtttgttcgcgggacttctcttctttgtagggatcgtcctaatcggcatggggatgctgtatcttgggttacagaatccagttaacagtgagaaggtgaaggtgaggaagctggagctccagcacctggtttcgatgttccagcacgaagcggagcagcatggcaaggtcagggaaggtgttagccggcatggcgcctcgccgagttcatccacggcctctgatgaagggtacattcttatctcctgagatgggagatttatttgctgacgtgcaaggtcttgttttgaaaggctggaactgaagagaagtcgggtaaatggtatacttacacgtgtcttaagaattgtaattgggggatttgacatcgaaacgttggatatgataattgtagcagcagattggctttcctctgttgcttgagatcgcggctgtgatcgtttcttatcgaattttcagtaggag

SEQ ID NO: 74044 - DNA, 2674 bp, Zea Mays
aaccccaagtccccaccgctgctgtgcggcaccatcaccattcaccacaccatcaggaatcgggcgccacaccacccacaactctccaccccaccctcgccgcgcgttgctcagtcgcagcgagcgaggcggggccacaggccacagcgcgagcggggcggggcggggcggggcggggcggggcgggagggagggccagggatctctactctcgtccgtgcgggggcgtgggcgtcgcatgcggcggcgcgccggggcaaatgcgggtaacctcacggtcggaggagcgctgacgcggcggcggcagccagggagcgatgcaggcgccggagcagcagcagcagcaccagcagcggcagaggaagggttcatcagagatggacttcttcagtgaatacggtgatgctaacagatacaaaatccaagaggtcattggcaaaggaagttatggcgttgtttgctcagctgttgaccaacatactggcgacaaagtggcaatcaagaaaatacacaatatcttcgagcacttatctgatgctgcacggatcctacgtgagatcaaactacttcggctattacgccatcctgatatagttgagatcaagcatataatgctgcctccatcaaggagggacttcaaagatatctatgttgtatttgagctgatggatacagatctccaccaagtcatcaaggcaaatgatgatttaaccagagagcatcatcagttctttctctatcagatgctccgtgcactgaaatacattcatactgctaatgtttatcatcgtgatttgaagccaaagaatatattggccaatgctaactgtaaacttaaaatatgtgattttggattggcaagagtggcattcaatgacactcctacaacagtattctggacggattatgttgctacaagatggtatagggcccctgaactgtgtggatctttcttttctaagtattcaccagctattgacatatggagtatcggttgcatttttgcggaagtcttaactgggaagcctttgtttcctggaaaaaatgtggtccaccagttggatttgatgactgatctcttgggtactccatcacttgatacagtttctcgaattcggaatgagaaggcaaggaggtatttgaatagcatgaggaaaaaacagccagtatcatttcccggaaggttccctaaagcagatcctgccgcgctcaaacttttgcagaggcttttggcatttgatcccaaggataggccaactcctgaagaggcattggctgatccgtattttaaaggcctcgcgaaagtagagagagaaccatcatgccagccaataacaaaaatggagttcgagtttgagcgaagaaaggtgaccaaagaggatgtcaaggaacttatattcagggagatattagagtatcatcctcaacttctcaaggattacatgaatggaactgagaaaacaaactttatatatcctagtgctgttgacaatttccgaaggcaatttgctaacttggaggaaaatggaggaaagagtgtggcgcacaccgcttcatcagacaggaagcatgtttcgctcccaaggacaaccacagttcattctaatccaatccctccaaatggaacctcccaagttccccgaaagattcccacagaccaggaagagtggttggttcagtaataccatttgagaacgcaactgctgttgatccatacagccaacgcagggtggtgaggaatccagtgcttcctccagccacctcaaacctgtcagcatacacctatcaccggaagtcagacaactcagatggagaactccaacaggagctggaaaaggaccgcatgaagtaccagccagcacagcgattcatggacagcaagctagtatcacacatgtcccctgacctgaggtcttcctactacataccaaaagctttcccaaaagccgacgcggcagatagagctgctttgcattcaaacatgattcatggaatcgccccttttagtggcatcgctgctgcaggtggaggtggctacaacaaggttaatggggttcagtatggagtttctaggatttactagttctagttgcattgaccatctccagaacacctgatctgagttgaagtaataacatggcgaacagtgaaaagatttaggtgccaaagaactgccatgttgactccgagccgaagatacggagcatgaagagtatggtctccgatctcggatcaaggaggaagtgtgacgtcagattgaaaaacagataatattgggcaacagtcatggttctgttcattggacatagcttttcggaaagcaatgccatcaccccgcggcaacggtaaaataaaaggagagaaaaaaaggcagtgccgtcagttggttgctgcttataagagtcaaaggggagcagagacaattattacatggaaaattatgtactttgcaagaacggaaacattggggaataaaaaatagttagtctacgtttacctctctgtatataaaaaaagtgacttgattttatgtattacggctggtgagacccgcttctttaattcaaagctgtgaagttttggcctatattttgctctataataaagttcagattggtacattgagcctgtttggtatccgggactaaagattagtcactctattttagttcta

SEQ ID NO: 74045 - DNA, 1624 bp, Zea Mays
aaaaaatgtggtccaccagttggatttgatgactgatctcttgggtactccatcacttgatacagtttctcgagcaaggaggtatttgaatagcatgaggaaaaaacagccagtatcatttcccggaaggttccctaaagcagatcctgccgcgctcaaacttttgcagaggcttttggcatttgatcccaaggataggccaactcctgaagaggcattggctgatccgtattttaaaggcctcgcgaaagtagagagagaaccatcatgccagccaataacaaaaatggagttcgagtttgagcgaagaaaggtgaccaaagaggatgtcaaggaacttatattcagggagatattagagtatcatcctcaacttctcaaggattacatgaatggaactgagaaaacaaactttatatatcctagtgctgttgacaatttccgaaggcaatttgctaacttggaggaaaatggaggaaagagtgtggcgcacaccgcttcatcagacaggaagcatgtttcgctcccaaggacaaccacagttcattctaatccaatccctccaaatggaacctcccaagttccccgaaagattcccacaggtagaccaggaagagtggttggttcagtaataccatttgagaacgcaactgctgttgatccatacagccaacgcagggtggtgaggaatccagtgcttcctccagccacctcaaacctgtcagcatacacctatcaccggaagtcagacaactcagatggagaactccaacaggagctggaaaaggaccgcatgaagtaccagccagcacagcgattcatggacagcaagctagtatcacacatgtcccctgacctgaggtcttcctactacataccaaaagctttcccaaaagccgacgcggcagatagagctgctttgcattcaaacatgattcatggaatcgccccttttagtggcatcgctgctgcaggtggaggtggctacaacaaggttaatggggttcagtatggagtttctaggatttactagttctagttgcattgaccatctccagaacacctgatctgagttgaagtaataacatggcgaacagtgaaaagatttaggtgccaaagaactgccatgttgactccgagccgaagatacggagcatgaagagtatggtctccgatctcggatcaaggaggaagtgtgacgtcagattgaaaaacagataatattgggcaacagtcatggttctgttcattggacatagcttttcggaaagcaatgccatcaccccgcggcaacggtaaaataaaaggagagaaaaaaaggcagtgccgtcagttggttgctgcttataagagtcaaaggggagcagagacaattattacatggaaaattatgtactttgcaagaacggaaacattggggaataaaaaatagttagtctacgtttacctctctgtatataaaaaaagtgacttgattttatgtattacggctggtgagacccgcttctttaattcaaagctgtgaagttttggcctatattttgctctataataaagttcagattggtacattgagcctgtttggtatccgggactaaagattagtcactctattttagttcta

SEQ ID NO: 74046 - DNA, 1598 bp, Zea Mays
tggcactaggcctggtcagtggtcacgcccggttcccacatgtcagcgccaaacccgtcgtaactcgaggcccgccccgaccccgagtccacctctttcacccagcccggcgaccccgccgcgctcctgcctcgcctcgcctcgccgtcggcgaccgaccccacgtctgcccggcgatgtcctcctccgtatccattgcggcagagtgggatctcctctccgatcgcttctaccgccggctcacactctactcacctctcccatggtccaccccagccgcggccggcgcgacctcgtcctcctccggcgtcagcggtgctgtgatcggtcgccttgacctgtccacccacatcgtcgccgccgcgccctttggaggcccgatcgccgccgtccgcgacgactctaagatcgtgcagctccactccgagccatcccgccgccgcgtcctcctcttctcctcctccggccacccaattgcctccgcgccctggccaccccttctcccacgcctccactcgctcggtttctccagctccctcagcctcctcgcacttctctccgacggctcgctcctccgcttccgcctccccgatctgcaacccagcccttgctccagtcccgttcccctgctcccgccggcctccggcggcgtcgccgacgctctattctggggcggcggtgtagccatcctcacggaagacaaccgcgtcgtggtggccactgacatcgaggtcgacgatcctcacccccgtcacctcgccgacccaggcatcggtgatgaggaacatgttctgtgtatggccgtggtggaggcacagtttgtcatgtcagggagcccagaagtgctgcttgctgttggcgaccgggtcattgcggttgacgaggatggcgtacaagtgcttggggaagagctggagattggacccgtgcagaagatggcagtttcacccaatggcaagctcctcgcagcatttgcacatgatggtcgccttctcgttattcccaccgatttctctaggatcatattcgagtatgagtgcgaatctgcattgccaccagagcaaatagcttggtgtggactagacagtgtactcgtctactggcctgaagtgcttttgatggttggtccaaatggagatcctgtccaatacaattatgatgaacccataaaactgattcctgagtgcgatggtgtaaggatcctatctaactcaagtatggaatttctacaccgagtctcagactctaccacgtcaatttttggcattggaagcatgtccccagcggcattactgtatgatgctcgtgatcactatgacaggcaaagtgcaaaggcttatgacaactatcaattaatatcatcttcattgcctgaggcaattgaggcttgcatcgacgctgctggccatgagtttgatgtttcacgccagcgcacattgctgagagctgctacatatggcctagctttctgcagtcgatttccacatgaacgctttcaagaaatgtgcaaaatgttgagagttctaaatgctgttcgtgatcctgagattgggatgccactgaccattcatcagtacaaggggcataactagtgccag

SEQ ID NO: 74047 - DNA, 2372 bp, Zea Mays
tggcactaggcctggtcagtggtcacgcccggttcccacatgtcagcgccaaacccgtcgtaactcgaggcccgccccgaccccgagtccacctctttcacccagcccggcgaccccgccgcgctcctgcctcgcctcgcctcgccgtcggcgaccgaccccacgtctgcccggcgatgtcctcctccgtatccattgcggcagagtgggatctcctctccgatcgcttctaccgccggctcacactctactcacctctcccatggtccaccccagccgcggccggcgcgacctcgtcctcctccggcgtcagcggtgctgtgatcggtcgccttgacctgtccacccacatcgtcgccgccgcgccctttggaggcccgatcgccgccgtccgcgacgactctaagatcgtgcagctccactccgagccatcccgccgccgcgtcctcctcttctcctcctccggccacccaattgcctccgcgccctggccaccccttctcccacgcctccactcgctcggtttctccagctccctcagcctcctcgcacttctctccgacggctcgctcctccgcttccgcctccccgatctgcaacccagcccttgctccagtcccgttcccctgctcccgccggcctccggcggcgtcgccgacgctctattctggggcggcggtgtagccatcctcacggaagacaaccgcgtcgtggtggccactgacatcgaggtcgacgatcctcacccccgtcacctcgccgacccaggcatcggtgatgaggaacatgttctgtgtatggccgtggtggaggcacagtttgtcatgtcagggagcccagaagtgctgcttgctgttggcgaccgggtcattgcggttgacgaggatggcgtacaagtgcttggggaagagctggagattggacccgtgcagaagatggcagtttcacccaatggcaagctcctcgcagcatttgcacatgatggtcgccttctcgttattcccaccgatttctctaggatcatattcgagtatgagtgcgaatctgcattgccaccagagcaaatagcttggtgtggactagacagtgtactcgtctactggcctgaagtgcttttgatggttggtccaaatggagatcctgtccaatacaattatgatgaacccataaaactgattcctgagtgcgatggtgtaaggatcctatctaactcaagtatggaatttctacaccgagtctcagactctaccacgtcaatttttggcattggaagcatgtccccagcggcattactgtatgatgctcgtgatcactatgacaggcaaagtgcaaaggcttatgacaactatcaattaatatcatcttcattgcctgaggcaattgaggcttgcatcgacgctgctggccatgagtttgatgtttcacgccagcgcacattgctgagagctgctacatatggcctagctttctgcagtcgatttccacatgaacgctttcaagaaatgtgcaaaatgttgagagttctaaatgctgttcgtgatcctgagattgggatgccactgaccattcatcagtacaagctgcttactacatcggtgctcattggacgtctcattaatgctaatcagcaccttttggcccttcgcatctctgagtaccttaacctgaacccggaggttgtgataatgcattgggcatgtgagaagataacagcatcaacaactcttccagatacagtccttcttgatggtctgcttgataagctcaggctatgtaaagggatatcatatgctgcagtggcagctcatgcagataacagtggtcgacgaaggttggctgcaatgctcgttgatcatgagtcacagtcctctaagcagcatcgatgaacaagacaaagcattatcaaaggcaattgaaagtggcgataccgatcttgtgtaccttgtgctattccatatttggcagaaggtagctgtagagaagaaagctcctttggatttttttggtgttataaatgcaaggcctgtggctagagatttgtttatggcatatgcaagacattctaagcatgaagaattgaaggacttctttttatcgactgggagacttcaagatgccgcctttcttttgttgaaggaatcatgggaattggagaagaaccccatggcaagcaaggggtctcctctccatggtccacaagtgaggctcattgagcaggcccatagactttttgctgaaaccaaggaacatgtttttgagtccaaagcttctgaagagcatgccaaattgctaaggtatttgatgctttattatgattatgatgccaaatttgtcatgtgagtattgtagaaagagggaagaatggattgaat

SEQ ID NO: 74048 - DNA, 2383 bp, Zea Mays
tggcactaggcctggtcagtggtcacgcccggttcccacatgtcagcgccaaacccgtcgtaactcgaggcccgccccgaccccgagtccacctctttcacccagcccggcgaccccgccgcgctcctgcctcgcctcgcctcgccgtcggcgaccgaccccacgtctgcccggcgatgtcctcctccgtatccattgcggcagagtgggatctcctctccgatcgcttctaccgccggctcacactctactcacctctcccatggtccaccccagccgcggccggcgcgacctcgtcctcctccggcgtcagcggtgctgtgatcggtcgccttgacctgtccacccacatcgtcgccgccgcgccctttggaggcccgatcgccgccgtccgcgacgactctaagatcgtgcagctccactccgagccatcccgccgccgcgtcctcctcttctcctcctccggccacccaattgcctccgcgccctggccaccccttctcccacgcctccactcgctcggtttctccagctccctcagcctcctcgcacttctctccgacggctcgctcctccgcttccgcctccccgatctgcaacccagcccttgctccagtcccgttcccctgctcccgccggcctccggcggcgtcgccgacgctctattctggggcggcggtgtagccatcctcacggaagacaaccgcgtcgtggtggccactgacatcgaggtcgacgatcctcacccccgtcacctcgccgacccaggcatcggtgatgaggaacatgttctgtgtatggccgtggtggaggcacagtttgtcatgtcagggagcccagaagtgctgcttgctgttggcgaccgggtcattgcggttgacgaggatggcgtacaagtgcttggggaagagctggagattggacccgtgcagaagatggcagtttcacccaatggcaagctcctcgcagcatttgcacatgatggtcgccttctcgttattcccaccgatttctctaggatcatattcgagtatgagtgcgaatctgcattgccaccagagcaaatagcttggtgtggactagacagtgtactcgtctactggcctgaagtgcttttgatggttggtccaaatggagatcctgtccaatacaattatgatgaacccataaaactgattcctgagtgcgatggtgtaaggatcctatctaactcaagtatggaatttctacaccgagtctcagactctaccacgtcaatttttggcattggaagcatgtccccagcggcattactgtatgatgctcgtgatcactatgacaggcaaagtgcaaaggcttatgacaactatcaattaatatcatcttcattgcctgaggcaattgaggcttgcatcgacgctgctggccatgagtttgatgtttcacgccagcgcacattgctgagagctgctacatatggcctagctttctgcagtcgatttccacatgaacgctttcaagaaatgtgcaaaatgttgagagttctaaatgctgttcgtgatcctgagattgggatgccactgaccattcatcagtacaagctgcttactacatcggtgctcattggacgtctcattaatgctaatcagcaccttttggcccttcgcatctctgagtaccttaacctgaacccggaggttgtgataatgcattgggcatgtgagaagataacagcatcaacaactcttccagatacagtccttcttgatggtctgcttgataaggctatgtaaagggatatcatatgctgcagtggcagctcatgcagataacagtggtcgacgaaggttggctgcaatgctcgttgatcatgagtcacagtcctctaagcagatccccttgttgctcagcatcgatgaacaagacaaagcattatcaaaggcaattgaaagtggcgataccgatcttgtgtaccttgtgctattccatatttggcagaaggtagctgtagagaagaagctcctttggatttttttggtgttataaatgcaaggcctgtggctagagatttgtttatggcatatgcaagacattctaagcatgaagaattgaaggacttctttttatcgactgggagacttcaagatgccgcctttcttttgttgaaggaatcatgggaattggagaagaaccccatggcaagcaaggggtctcctctccatggtccacaagtgaggctcattgagcaggcccatagactttttgctgaaaccaaggaacatgtttttgagtccaaagcttctgaagagcatgccaaattgctaaggtatttgatgctttattatgattatgatgccaaatttgtcatgtgagtattgtagaaagagggaagaatggattgaat

SEQ ID NO: 74049 - DNA, 3220 bp, Zea Mays
tggcactaggcctggtcagtggtcacgcccggttcccacatgtcagcgccaaacccgtcgtaactcgaggcccgccccgaccccgagtccacctctttcacccagcccggcgaccccgccgcgctcctgcctcgcctcgcctcgccgtcggcgaccgaccccacgtctgcccggcgatgtcctcctccgtatccattgcggcagagtgggatctcctctccgatcgcttctaccgccggctcacactctactcacctctcccatggtccaccccagccgcggccggcgcgacctcgtcctcctccggcgtcagcggtgctgtgatcggtcgccttgacctgtccacccacatcgtcgccgccgcgccctttggaggcccgatcgccgccgtccgcgacgactctaagatcgtgcagctccactccgagccatcccgccgccgcgtcctcctcttctcctcctccggccacccaattgcctccgcgccctggccaccccttctcccacgcctccactcgctcggtttctccagctccctcagcctcctcgcacttctctccgacggctcgctcctccgcttccgcctccccgatctgcaacccagcccttgctccagtcccgttcccctgctcccgccggcctccggcggcgtcgccgacgctctattctggggcggcggtgtagccatcctcacggaagacaaccgcgtcgtggtggccactgacatcgaggtcgacgatcctcacccccgtcacctcgccgacccaggcatcggtgatgaggaacatgttctgtgtatggccgtggtggaggcacagtttgtcatgtcagggagcccagaagtgctgcttgctgttggcgaccgggtcattgcggttgacgaggatggcgtacaagtgcttggggaagagctggagattggacccgtgcagaagatggcagtttcacccaatggcaagctcctcgcagcatttgcacatgatggtcgccttctcgttattcccaccgatttctctaggatcatattcgagtatgagtgcgaatctgcattgccaccagagcaaatagcttggtgtggactagacagtgtactcgtctactggcctgaagtgcttttgatggttggtccaaatggagatcctgtccaatacaattatgatgaacccataaaactgattcctgagtgcgatggtgtaaggatcctatctaactcaagtatggaatttctacaccgagtctcagactctaccacgtcaatttttggcattggaagcatgtccccagcggcattactgtatgatgctcgtgatcactatgacaggcaaagtgcaaaggcttatgacaactatcaattaatatcatcttcattgcctgaggcaattgaggcttgcatcgacgctgctggccatgagtttgatgtttcacgccagcgcacattgctgagagctgctacatatggcctagctttctgcagtcgatttccacatgaacgctttcaagaaatgtgcaaaatgttgagagttctaaatgctgttcgtgatcctgagattgggatgccactgaccattcatcagtacaagctgcttactacatcggtgctcattggacgtctcattaatgctaatcagcaccttttggcccttcgcatctctgagtaccttaacctgaacccggaggttgtgataatgcattgggcatgtgagaagataacagcatcaacaactcttccagatacagtccttcttgatggtctgcttgataaggctatgtaaagggatatcatatgctgcagtggcagctcatgcagataacagtggtcgacgaaggttggctgcaatgctcgttgatcatgagtcacagtcctctaagcagatccccttgttgctcagcatcgatgaacaagacaaagcattatcaaaggcaattgaaagtggcgataccgatcttgtgtaccttgtgctattccatatttggcagaaggtagctgtagagaagaaagctcctttggatttttttggtgttataaatgcaaggcctgtggctagagatttgtttatggcatatgcaagacattctaagcatgaagaattgaaggacttctttttatcgactgggagacttcaagatgccgcctttcttttgttgaaggaatcatgggaattggagaagaaccccatggcaagcaaggggtctcctctccatggtccacaagtgaggctcattgagcaggcccatagactttttgctgaaaccaaggaacatgtttttgagtccaaagcttctgaagagcatgccaaattgctaagatcacagcatgaacttgaagtttccacaaagcagccaatatttgtgggttctagtgttagtgatacaataaaaacctgtattgcaatgggaaacgagcgtgctgcactcagagtgaagtccgaattcaaggttcctgataagaggtggtactggcttaaaacgtgcgctttagccacagttggaaactgggatggtttggaaaaattttcaagggagaaaaggccaccgggaggctataaaccttttgtggaagcatgcattgatgctggtcaaaaaaatgaagctgtcaaatatattccaaagttaacagatcctcgtgaaagatctgaggcatatgctcggatgggcatggcgaaggaggcccaagatgcagcctcacaagctaaagatagtgatgagctatttggccgcctaaagattacacttgcacagagcagtgctgccgcctccattttcgatacattgcgggatcggctatcctttcaaggagcatattgatcaacgtgattttgtcgtaggcccggatgtgcacctcgatgttttgaacagaccggcaatttatttatttatttgttttctgctctgttgtatgtatgaagaattaacctcagtgtgaatacatgtccatggaaatttacggtcacagaactgtgcagccagtgcacgtgtggttcacctgtgacattttggatttctagggtatatggggacacgaagtggagtagctctgtctgtggtgcttgagtgggaggtgcatctgaatagaacctcctctcccatccctctcactagcgtgcttttgcgatagctatcatcatgctgatctcaatctagtcactttgcacggctggggtatgtttggttctatttgtgaaacctgcttctaccctaaactgaagaggtttaaattttc

SEQ ID NO: 74050 - DNA, 3233 bp, Zea Mays
tggcactaggcctggtcagtggtcacgcccggttcccacatgtcagcgccaaacccgtcgtaactcgaggcccgccccgaccccgagtccacctctttcacccagcccggcgaccccgccgcgctcctgcctcgcctcgcctcgccgtcggcgaccgaccccacgtctgcccggcgatgtcctcctccgtatccattgcggcagagtgggatctcctctccgatcgcttctaccgccggctcacactctactcacctctcccatggtccaccccagccgcggccggcgcgacctcgtcctcctccggcgtcagcggtgctgtgatcggtcgccttgacctgtccacccacatcgtcgccgccgcgccctttggaggcccgatcgccgccgtccgcgacgactctaagatcgtgcagctccactccgagccatcccgccgccgcgtcctcctcttctcctcctccggccacccaattgcctccgcgccctggccaccccttctcccacgcctccactcgctcggtttctccagctccctcagcctcctcgcacttctctccgacggctcgctcctccgcttccgcctccccgatctgcaacccagcccttgctccagtcccgttcccctgctcccgccggcctccggcggcgtcgccgacgctctattctggggcggcggtgtagccatcctcacggaagacaaccgcgtcgtggtggccactgacatcgaggtcgacgatcctcacccccgtcacctcgccgacccaggcatcggtgatgaggaacatgttctgtgtatggccgtggtggaggcacagtttgtcatgtcagggagcccagaagtgctgcttgctgttggcgaccgggtcattgcggttgacgaggatggcgtacaagtgcttggggaagagctggagattggacccgtgcagaagatggcagtttcacccaatggcaagctcctcgcagcatttgcacatgatggtcgccttctcgttattcccaccgatttctctaggatcatattcgagtatgagtgcgaatctgcattgccaccagagcaaatagcttggtgtggactagacagtgtactcgtctactggcctgaagtgcttttgatggttggtccaaatggagatcctgtccaatacaattatgatgaacccataaaactgattcctgagtgcgatggtgtaaggatcctatctaactcaagtatggaatttctacaccgagtctcagactctaccacgtcaatttttggcattggaagcatgtccccagcggcattactgtatgatgctcgtgatcactatgacaggcaaagtgcaaaggcttatgacaactatcaattaatatcatcttcattgcctgaggcaattgaggcttgcatcgacgctgctggccatgagtttgatgtttcacgccagcgcacattgctgagagctgctacatatggcctagctttctgcagttggctttggcagtcgatttccacatgaacgctttcaagaaatgtgcaaaatgttgagagttctaaatgctgttcgtgatcctgagattgggatgccactgaccattcatcagtacaagctgcttactacatcggtgctcattggacgtctcattaatgctaatcagcaccttttggcccttcgcatctctgagtaccttaacctgaacccggaggttgtgataatgcattgggcatgtgagaagataacagcatcaacaactcttccagatacagtccttcttgatggtctgcttgataaggctatgtaaagggatatcatatgctgcagtggcagctcatgcagataacagtggtcgacgaaggttggctgcaatgctcgttgatcatgagtcacagtcctctaagcagatccccttgttgctcagcatcgatgaacaagacaaagcattatcaaaggcaattgaaagtggcgataccgatcttgtgtaccttgtgctattccatatttggcagaaggtagctgtagagaagaaagctcctttggatttttttggtgttataaatgcaaggcctgtggctagagatttgtttatggcatatgcaagacattctaagcatgaagaattgaaggacttctttttatcgactgggagacttcaagatgccgcctttcttttgttgaaggaatcatgggaattggagaagaaccccatggcaagcaaggggtctcctctccatggtccacaagtgaggctcattgagcaggcccatagactttttgctgaaaccaaggaacatgtttttgagtccaaagcttctgaagagcatgccaaattgctaagatcacagcatgaacttgaagtttccacaaagcagccaatatttgtgggttctagtgttagtgatacaataaaaacctgtattgcaatgggaaacgagcgtgctgcactcagagtgaagtccgaattcaaggttcctgataagaggtggtactggcttaaaacgtgcgctttagccacagttggaaactgggatggtttggaaaaattttcaagggagaaaaggccaccgggaggctataaaccttttgtggaagcatgcattgatgctggtcaaaaaaatgaagctgtcaaatatattccaaagttaacagatcctcgtgaaagatctgaggcatatgctcggatgggcatggcgaaggaggcccaagatgcagcctcacaagctaaagatagtgatgagctatttggccgcctaaagattacacttgcacagagcagtgctgccgcctccattttcgatacattgcgggatcggctatcctttcaaggagcatattgatcaacgtgattttgtcgtaggcccggatgtgcacctcgatgttttgaacagaccggcaatttatttatttatttgttttctgctctgttgtatgtatgaagaattaacctcagtgtgaatacatgtccatggaaatttacggtcacagaactgtgcagccagtgcacgtgtggttcacctgtgacattttggatttctagggtatatggggacacgaagtggagtagctctgtctgtggtgcttgagtgggaggtgcatctgaatagaacctcctctcccatccctctcactagcgtgcttttgcgatagctatcatcatgctgatctcaatctagtcactttgcacggctggggtatgtttggttctatttgtgaaacctgcttctaccctaaactgaagaggtttaaattttc

SEQ ID NO: 74051 - DNA, 3225 bp, Zea Mays
tggcactaggcctggtcagtggtcacgcccggttcccacatgtcagcgccaaacccgtcgtaactcgaggcccgccccgaccccgagtccacctctttcacccagcccggcgaccccgccgcgctcctgcctcgcctcgcctcgccgtcggcgaccgaccccacgtctgcccggcgatgtcctcctccgtatccattgcggcagagtgggatctcctctccgatcgcttctaccgccggctcacactctactcacctctcccatggtccaccccagccgcggccggcgcgacctcgtcctcctccggcgtcagcggtgctgtgatcggtcgccttgacctgtccacccacatcgtcgccgccgcgccctttggaggcccgatcgccgccgtccgcgacgactctaagatcgtgcagctccactccgagccatcccgccgccgcgtcctcctcttctcctcctccggccacccaattgcctccgcgccctggccaccccttctcccacgcctccactcgctcggtttctccagctccctcagcctcctcgcacttctctccgacggctcgctcctccgcttccgcctccccgatctgcaacccagcccttgctccagtcccgttcccctgctcccgccggcctccggcggcgtcgccgacgctctattctggggcggcggtgtagccatcctcacggaagacaaccgcgtcgtggtggccactgacatcgaggtcgacgatcctcacccccgtcacctcgccgacccaggcatcggtgatgaggaacatgttctgtgtatggccgtggtggaggcacagtttgtcatgtcagggagcccagaagtgctgcttgctgttggcgaccgggtcattgcggttgacgaggatggcgtacaagtgcttggggaagagctggagattggacccgtgcagaagatggcagtttcacccaatggcaagctcctcgcagcatttgcacatgatggtcgccttctcgttattcccaccgatttctctaggatcatattcgagtatgagtgcgaatctgcattgccaccagagcaaatagcttggtgtggactagacagtgtactcgtctactggcctgaagtgcttttgatggttggtccaaatggagatcctgtccaatacaattatgatgaacccataaaactgattcctgagtgcgatggtgtaaggatcctatctaactcaagtatggaatttctacaccgagtctcagactctaccacgtcaatttttggcattggaagcatgtccccagcggcattactgtatgatgctcgtgatcactatgacaggcaaagtgcaaaggcttatgacaactatcaattaatatcatcttcattgcctgaggcaattgaggcttgcatcgacgctgctggccatgagtttgatgtttcacgccagcgcacattgctgagagctgctacatatggcctagctttctgcagtcgatttccacatgaacgctttcaagaaatgtgcaaaatgttgagagttctaaatgctgttcgtgatcctgagattgggatgccactgaccattcatcagtacaagctgcttactacatcggtgctcattggacgtctcattaatgctaatcagcaccttttggcccttcgcatctctgagtaccttaacctgaacccggaggttgtgataatgcattgggcatgtgagaagataacagcatcaacaactcttccagatacagtccttcttgatggtctgcttgataagctcaggctatgtaaagggatatcatatgctgcagtggcagctcatgcagataacagtggtcgacgaaggttggctgcaatgctcgttgatcatgagtcacagtcctctaagcagatccccttgttgctcagcatcgatgaacaagacaaagcattatcaaaggcaattgaaagtggcgataccgatcttgtgtaccttgtgctattccatatttggcagaaggtagctgtagagaagaaagctcctttggatttttttggtgttataaatgcaaggcctgtggctagagatttgtttatggcatatgcaagacattctaagcatgaagaattgaaggacttctttttatcgactgggagacttcaagatgccgcctttcttttgttgaaggaatcatgggaattggagaagaaccccatggcaagcaaggggtctcctctccatggtccacaagtgaggctcattgagcaggcccatagactttttgctgaaaccaaggaacatgtttttgagtccaaagcttctgaagagcatgccaaattgctaagatcacagcatgaacttgaagtttccacaaagcagccaatatttgtgggttctagtgttagtgatacaataaaaacctgtattgcaatgggaaacgagcgtgctgcactcagagtgaagtccgaattcaaggttcctgataagaggtggtactggcttaaaacgtgcgctttagccacagttggaaactgggatggtttggaaaaattttcaagggagaaaaggccaccgggaggctataaaccttttgtggaagcatgcattgatgctggtcaaaaaaatgaagctgtcaaatatattccaaagttaacagatcctcgtgaaagatctgaggcatatgctcggatgggcatggcgaaggaggcccaagatgcagcctcacaagctaaagatagtgatgagctatttggccgcctaaagattacacttgcacagagcagtgctgccgcctccattttcgatacattgcgggatcggctatcctttcaaggagcatattgatcaacgtgattttgtcgtaggcccggatgtgcacctcgatgttttgaacagaccggcaatttatttatttatttgttttctgctctgttgtatgtatgaagaattaacctcagtgtgaatacatgtccatggaaatttacggtcacagaactgtgcagccagtgcacgtgtggttcacctgtgacattttggatttctagggtatatggggacacgaagtggagtagctctgtctgtggtgcttgagtgggaggtgcatctgaatagaacctcctctcccatccctctcactagcgtgcttttgcgatagctatcatcatgctgatctcaatctagtcactttgcacggctggggtatgtttggttctatttgtgaaacctgcttctaccctaaactgaagaggtttaaattttc

SEQ ID NO: 74052 - DNA, 1564 bp, Zea Mays
tctcatcactgcaccgggaggttgtgataatgcattgggcatgtgagaagataacagcatcaacaactcttccagatacagtccttcttgatggtctgcttgataaggctatgtaaagggatatcatatgctgcagtggcagctcatgcagataacagtggtcgacgaaggttggctgcaatgctcgttgatcatgagtcacagtcctctaagcagatccccttgttgctcagcatcgatgaacaagacaaagcattatcaaaggcaattgaaagtggcgataccgatcttgtgtaccttgtgctattccatatttggcagaaggtagctgtagagaagaaagctcctttggatttttttggtgttataaatgcaaggcctgtggctagagatttgtttatggcatatgcaagacattctaagcatgaagaattgaaggacttctttttatcgactgggagacttcaagatgccgcctttcttttgttgaaggaatcatgggaattggagaagaaccccatggcaagcaaggggtctcctctccatggtccacaagtgaggctcattgagcaggcccatagactttttgctgaaaccaaggaacatgtttttgagtccaaagcttctgaagagcatgccaaattgctaagatcacagcatgaacttgaagtttccacaaagcagccaatatttgtgggttctagtgttagtgatacaataaaaacctgtattgcaatgggaaacgagcgtgctgcactcagagtgaagtccgaattcaaggttcctgataagaggtggtactggcttaaaacgtgcgctttagccacagttggaaactgggatggtttggaaaaattttcaagggagaaaaggccaccgggaggctataaaccttttgtggaagcatgcattgatgctggtcaaaaaaatgaagctgtcaaatatattccaaagttaacagatcctcgtgaaagatctgaggcatatgctcggatgggcatggcgaaggaggcccaagatgcagcctcacaagctaaagatagtgatgagctatttggccgcctaaagattacacttgcacagagcagtgctgccgcctccattttcgatacattgcgggatcggctatcctttcaaggagcatattgatcaacgtgattttgtcgtaggcccggatgtgcacctcgatgttttgaacagaccggcaatttatttatttatttgttttctgctctgttgtatgtatgaagaattaacctcagtgtgaatacatgtccatggaaatttacggtcacagaactgtgcagccagtgcacgtgtggttcacctgtgacattttggatttctagggtatatggggacacgaagtggagtagctctgtctgtggtgcttgagtgggaggtgcatctgaatagaacctcctctcccatccctctcactagcgtgcttttgcgatagctatcatcatgctgatctcaatctagtcactttgcacggctggggtatgtttggttctatttgtgaaacctgcttctaccctaaactgaagaggtttaaattttc

SEQ ID NO: 74053 - DNA, 1568 bp, Zea Mays
ctcatcactgcaccgggaggttgtgataatgcattgggcatgtgagaagataacagcatcaacaactcttccagatacagtccttcttgatggtctgcttgataagctcaggctatgtaaagggatatcatatgctgcagtggcagctcatgcagataacagtggtcgacgaaggttggctgcaatgctcgttgatcatgagtcacagtcctctaagcagatccccttgttgctcagcatcgatgaacaagacaaagcattatcaaaggcaattgaaagtggcgataccgatcttgtgtaccttgtgctattccatatttggcagaaggtagctgtagagaagaaagctcctttggatttttttggtgttataaatgcaaggcctgtggctagagatttgtttatggcatatgcaagacattctaagcatgaagaattgaaggacttctttttatcgactgggagacttcaagatgccgcctttcttttgttgaaggaatcatgggaattggagaagaaccccatggcaagcaaggggtctcctctccatggtccacaagtgaggctcattgagcaggcccatagactttttgctgaaaccaaggaacatgtttttgagtccaaagcttctgaagagcatgccaaattgctaagatcacagcatgaacttgaagtttccacaaagcagccaatatttgtgggttctagtgttagtgatacaataaaaacctgtattgcaatgggaaacgagcgtgctgcactcagagtgaagtccgaattcaaggttcctgataagaggtggtactggcttaaaacgtgcgctttagccacagttggaaactgggatggtttggaaaaattttcaagggagaaaaggccaccgggaggctataaaccttttgtggaagcatgcattgatgctggtcaaaaaaatgaagctgtcaaatatattccaaagttaacagatcctcgtgaaagatctgaggcatatgctcggatgggcatggcgaaggaggcccaagatgcagcctcacaagctaaagatagtgatgagctatttggccgcctaaagattacacttgcacagagcagtgctgccgcctccattttcgatacattgcgggatcggctatcctttcaaggagcatattgatcaacgtgattttgtcgtaggcccggatgtgcacctcgatgttttgaacagaccggcaatttatttatttatttgttttctgctctgttgtatgtatgaagaattaacctcagtgtgaatacatgtccatggaaatttacggtcacagaactgtgcagccagtgcacgtgtggttcacctgtgacattttggatttctagggtatatggggacacgaagtggagtagctctgtctgtggtgcttgagtgggaggtgcatctgaatagaacctcctctcccatccctctcactagcgtgcttttgcgatagctatcatcatgctgatctcaatctagtcactttgcacggctggggtatgtttggttctatttgtgaaacctgcttctaccctaaactgaagaggtttaaattttc

SEQ ID NO: 74054 - DNA, 960 bp, Zea Mays
caggcttcctagggtttgtggcggggcggcagctgcagctggaatgccggcgacacatccccttttccggccatttgcacactgggatctaatacaatggctagcgatggtgatgcttcaccttcacggaagcatatgttgttggagttgccttgtgatgaagaaggtgcaaatgtgagccaaaatgttggtgtgtccgcatcatcagccacgacccacacctgccgctgccagagcttctcatgaacaaggtgaaaatctagaaggtggaagtaatgttgatggggatgattcttcaaaggaaaagcaatcaaagaagtccacttcagatgtttagcagtaattttaagaatattagagcatttgtgctagctgttaaggggtatccattgcaatgggaggagtttcaaaaatgtgctactgaatgtggtgtggacacaaaggttggactctctattgatgttgctactaggtgtaattcaacatattgcatgttgagggatgcactacataacagggctgcctttgaaaggcttatgtcatatgaacgtcacaggatgaagacctagatgatgatcatgatgatggacgtgaggcatcgttgtaagcttgttgatgatgacctagatgatgataatgcgacatgaatgctttgaatgtttcttactgtacttattgccaacttgggacttgttatattgtgaacttgtgatcaactttttatgttgtgaacttgtgatctttgtggtcaacttgttatattgtgatctttgtggtcaacttgttatattgtgaacttgtgatctgtgtgatcaacttgttatattatgaacttatgatctcaatgatcaacttgttatattgtgaattgtgaacttgtgatctgtgtgatcaacttgttatattatgaacttatgatctcaatgatcaacttgttatattgtgaattgtgaacttgtg

SEQ ID NO: 74055 - DNA, 1964 bp, Zea Mays
ggtttgtggcggggcggcagctgcagctggaatgccggcgacacatccccttttccggccatttgcacactgggatctaatacaatggctagcgatggtgatgcttcaccttcacggaagcatatgttgttggagttgccttgtgatgaagaaggtgcaaatgtgagccaaaatgttggtgtgtccgcatcatcagccacgacccacacctgccgctgccagagcttctcatgaacaaggtgaaaatctagaaggtggaagtaatgttgatggggatgattcttcaaaggaaaagcaatcaaagaagtccacttcagatgtttagcagtaattttaagaatattagagcatttgtgctagctgttaaggggtatccattgcaatgggaggagtttcaaaaatgtgctactgaatgtggtgtggacacaaaggttggactctctattgatgttgctactaggtgtaattcaacatattgcatgttgagggatgcactacataacagggctgcctttgaaaggcttatgtcatatgaacgtcacaggtatgagaaaattgcaccttcctttgaagaatgggatttggcaaagactcttaccatgtttgagaaaattctttgacttgactgcgttattttacagtacattatatcccactaccaacttgcttttagagggttttgtgagattaagtttttacttgttgattggtgtgatagcatccattccactattagtaacatggcaaacactatgatggtcaagtttgacaagtactggaataagtcaaatattgctcttatcgtggctagtgtccttgatcctagatataagaggaaaattgtagaattttacttgaagaaggtgtacccatatacatatcaaagtgaactggataaattcaatgatgtcatgaaaaagatgtatcaatgttatgcatctactacaccctcaacgtcacatgagcttgatagctacatatttgatggacaaggtcatggtcatgatgattgtattgacacaagtgacttagaaaaatatttggcagatccaatattcaaggttggtaaaagtaatcatcacacttttgacatattagcatggtggaaagcacacaaagaagaatatcctatcttgggccagcttgctcgtgatgtcttagctatgcaagtgtctacgatagctttagaatctgcttttagtgctggtgatcgtgtacttgatccatttcgtactcgccttgaccctaccatggtagaagcacttgtttgcaccaaagattggataactagagcaagaaaaggttatatagaagtaacttatatttatttacaatttaattagtcattatatttttactaatgcactaatggatctttgtattcccatgttccaaggctaaaagagtgttgctattcccaatatggtttgtgaaatggaggaacttgagactcttgctagaaatctttcacttgagattaatttacctttattttgtattctatttttggcataaaacattagctatgatttaaccatatattcctttaacaaaatgtaggatgaagacctagatgatgatcatgatgatggacgtgaggcatcgttgtaagcttgttgatgatgacctagatgatgataatgcgacatgaatgctttgaatgtttcttactgtacttattgccaacttgggacttgttatattgtgaacttgtgatcaactttttatgttgtgaacttgtgatctttgtggtcaacttgttatattgtgatctttgtggtcaacttgttatattgtgaacttgtgatctgtgtgatcaacttgttatattatgaacttatgatctcaatgatcaacttgttatattgtgaattgtgaacttgtgatctgtgtgatcaacttgttatattatgaacttatgatctcaatgatcaacttgttatattgtgaattgtgaacttgtg

SEQ ID NO: 74056 - DNA, 974 bp, Zea Mays
gtccatctggcctgctctgctcagcagtggcaaggagccaaggatcgtccgtccagcctgctctgctcggtagtgacaaggagccaagttgcacactgggatctaatacaatggctagcgatggtgatgcttcaccttcacggaagcatatgttgttggagttgccttgtgatgaagaaggtgcaaatgtgagccaaaatgttggtgtgtccgcatcatcagccacgacccacacctgccgctgccagagcttctcatgaacaaggtgaaaatctagaaggtggaagtaatgttgatggggatgattcttcaaaggaaaagcaatcaaagaagtccacttcagatgtttagcagtaattttaagaatattagagcatttgtgctagctgttaaggggtatccattgcaatgggaggagtttcaaaaatgtgctactgaatgtggtgtggacacaaaggttggactctctattgatgttgctactaggtgtaattcaacatattgcatgttgagggatgcactacataacagggctgcctttgaaaggcttatgtcatatgaacgtcacaggatgaagacctagatgatgatcatgatgatggacgtgaggcatcgttgtaagcttgttgatgatgacctagatgatgataatgcgacatgaatgctttgaatgtttcttactgtacttattgccaacttgggacttgttatattgtgaacttgtgatcaactttttatgttgtgaacttgtgatctttgtggtcaacttgttatattgtgatctttgtggtcaacttgttatattgtgaacttgtgatctgtgtgatcaacttgttatattatgaacttatgatctcaatgatcaacttgttatattgtgaattgtgaacttgtgatctgtgtgatcaacttgttatattatgaacttatgatctcaatgatcaacttgttatattgtgaattgtgaacttgtg

SEQ ID NO: 74057 - DNA, 1697 bp, Zea Mays
cacaagatgtataaatgtattgcaaaaaaacaatcaaagccataacctgctattgacactagtgacatgtgttcccatcatcccatgtcaaaagtacgaaaaggtctcaacggtactcatggatatattgtcgaccagactaccataacatggtggcattccagtaaattttacatcaaatgattaatgagggtgtgcattcatgctactccgtttgtcaaatgtatatgtccaactacaaataggagcatacatcattttcgttacaccctatcctttgtacgcacaacacatgtacaacacaggtaacaaagtagccgagcaacggacatttacattaaccggactgctggtaattgaaggcataatgctcaccacacctccgctccttttgtggcgccaagcagcacagcaattgcagcaagcgaggcctgtccatggcaccaaaaaagtttgggggcaaagttagcgcaacctttgtgcattaatttggaagagaaggcacaggtctacagtaacaatggctactaaacatcacatcacatggtcagatagtaacaaacactttcaccatgtagtgccaagctaaatttatgcagcgcattccatagaattgtatttagttgaactgacatatgcttcccatccaagtaagagatgataccaaaagcttccatcgggaaaaaaaagagataccaaaagctatgttgaaatccattaaacccttacaaagttctttttttgtctttttggaaacataaagagcatgcacttcttcaactatacgatgtggtaagtctttttatttgaatatccatctccaatagctttataggggctattgaaatgcaatggtgtagtttagtgacaggagttgactctgtatttgcagcagcagttcgtgtgtgtaaaactgttaaataaccctgatattggccctaaattctcacatgcttaatggatgttttgcatctaaaatccattaacaaatagctggcggaaacatatgagcaatgcatacattgctaggaaggacttacagcaatagtgcaagcaacatatcctggtttctccctgtaatcacgtactcggacacaaatcagcacaaaagctccaagataccatggaatggcagcaaagaagaacccaattataaacctaaaccaccccatgccaaggccacaacatggaagaggacggattctaacaggccttccttcaacaacaggaatataaccttgagcgatctggtagccttgggcgtagtacggcgcggcggccgagtagggttgctgcgggggtgggtagacggcatacgacgccggaggaggctgcgggtagtgctgcatcccaggcggcgccgccggctgggggaacccgaccgccggctgcggaaactccccggaggctccggatgggggaccaaaggtgccgtactggtgctgcggcggcgccgacggcgggtacccgtaagaggacgaggagtccgccgagcgggccttcccgtcggcgtccggcatctggccacccatggtggctcccgcggtggcaaaggttagttaggtttggggaattgcccagttgggacgcaggagaggagggaaggcggtcacgagagaactagggaattgcgcgttgtttgtttgtttgttgatgaagacgattaacgtgtgcctccagcctggacggcggtgttg

SEQ ID NO: 74058 - DNA, 394 bp, Zea Mays
atgctgagggaagattattgtcatggctacccagactggatcaattccctctttgacgatgacaagtattacaacggtgaggacgatcacgatgagcttcatgcccttgataatcccgaggagccatcggtcatcgagatcataaggaccaatagggaggttgaaggtctggagttcaacgtggaggatgacatcgatgaggcttgtgacatgttcattaggagggtccgtagccagatgaacctgcagatattttagtgatattcatatggttttggagattactgagtactgactgacacattgtgtgtgactatgtctgcatatatatataaaaggatggataagccaggatatgaacccatttttcgaacacaagcgtgcatgttctgga

SEQ ID NO: 74059 - DNA, 1584 bp, Zea Mays
atcaattcacatacgtatctcagttttcatttgcttcactgctgtatgcccttcaacatgtgcgatccagccaccagaaaattgtccccatgctcgcttgagcagcagcgctcggccacgccgtctgctactcccctgctcagccacggcaagtcgtcgacctagtgctgcaccctccctgctcgtcggccaccaggacgacatctccacgcgccgagttcctcccatggctatcccaaaccctagccgagatcccctcctgtgtcggccactatctccttcaccaggcgctctcctccacctacagctcgcccccgaccacagccgcacgccaacctcgcccttggtcatggagcagcaacaaccatggaaccccttcgtgtcgcgccctcgatgtgctcgatgaaataccgcagcgagctccacctcgatctgtgcagccctagtgtgacctcgccgaaccccaatgagaacccgttgttttccttgtgtttattcctctccggtacatgtattcgacgccgattaattaaatgctaaccatgtgtatatgtgtatgcttatgtgtgggatgtgaggaaaaatctcatatgtgtgaagcgagacaagccgtgcgatgattgtttggtgttcagtgttatgcttaaactggaaatcattatctactcgagaaatccctggaggtttggttcaatatgaaagcgaagtcccgaggtgtcgttcattaggtgctcgacgtatgggctaaagtgtagctcgacgttgtgcttatagtctccgagtcgaatttaattttgggtgagttccttcgctatctataatagtcagcttgaatggtgcgctaaatatttaggtggtcgatgattctttgcgattagcataggtgctttgtggtgatgtttgcttagggaatctgattgtccctgagctgaattttgctgcacacattctctctgttgtggtaataattgagtgaattagatcatattttctgtagaagtgttatatataaaacttgtagataatctctttatcttacttgtgtataaatttcatgaccatagtcttagcagtttaggagttatgattttctcaagtccagtttcagaatctgtccagattctgtacagatttcgaaaatgaccttgtttgcccaagttaaactgagaatcagctcttagtaattctaggagaattgtagtactttgcttaagctttccaacaaattttggatcaccctttttggtgatctagaagtcaagttatggctgttttaaatggaatgtttgaatctgtcaacagtctggacaacaatgtttgtttgtattaagtgactttaatccacattgaatcaacctgaaatgtttataaacgaattgtagacaattgtattagctttctaaaaagtctaggatcacctgttttggatacctaaatctccagttatggagttttgatttgaataaccaaattctgtccaaatctggacagcattattgttttgtactgtttgacctttctaagtgtcaaatttcgttgtgatgaaaataccaaagttgtagagttatgagcaaaaccgttgac

SEQ ID NO: 74060 - DNA, 1639 bp, Zea Mays
atttgcttcactgctgtatgcccttcaacatgtgcgatccagccaccagaaaattgtccccatgctcgcttgagcagcagcgctcggccacgccgtctgctactcccctgctcagccacggcaagtcgtcgacctagtgctgcaccctccctgctcgtcggccaccaggacgacatctccacgcgccgagttcctcccatggctatcccaaaccctagccgagatcccctcctgtgtcggccactatctccttcaccaggcgctctcctccacctacagctcgcccccgaccacagccgcacgccaacctcgcccttggtcatggagcagcaacaaccatggaaccccttcgtgtcgcgccctcgatgtgctcgatgaaataccgcagcgagctccacctcgatctgtgcagccctagtgtgacctcgccgaaccccaatgagaacccgttgttttccttgtgtttattcctctccggtacatgtattcgacgccgattaattaaatgctaaccatgtgtatatgtgtatgcttatgtgtgggatgtgaggaaaaatctcatatgtgtgaagcgagacaagccgtgcgatgattgtttggtgttcagtgttatgcttaaactggaaatcattatctactcgagaaatccctggaggtttggttcaatatgaaagcgaagtcccgaggtgtcgttcattaggtgctcgacgtatgggctaaagtgtagctcgacgttgtgcttatagtctccgagtcgaatttaattttgggtacgttaattgatcacgtgctatggaagacgagtggaattgatctccaagtgatgctgatggacgaagctaaaatggatgaatcaaccaagtgccaggatagaagatgctcaccaagtggtcgtcaattaacaacactaacttagtgttatcccaggcaagccccggtgcatttgccaccaccttctgttttaaaaacttttatcacttacctgttgcattaggtgataggagttgtgtgaataaacaattgatgcattaccattccttggaatttgattatcctccttgctatttgttttataaagagaactaatgaggcttagccctgcctagagaactaaaacttgattctttttaaaagaatgttgtgtaacactgggtatgggtttgttttatgaaaaaggacttgtaatggtgagagcatcatctgcagtgatgaattcatcattcaagtatggtacctctgtcaggtacatggttttgggaaggaaataataatatgagaccagacgttgagcaggaaaggtcgcccgtctgtgtcgattaaggaccgtaccgaaagtaggcttgctgatctaggaccctttaactggccacatgcctcgtcatgggtaagcttagccttggctagaccaataccagaaaggccggcccgcaatgggagtggagagatggcgagagtatcgtatatccacctgacaagaggctggatggtggggtactgagctctcggttggcggagacccgttctggtcttgagaaacccgtgggcgagttgacatatgcaagggttaagtgctacatatgtcgtgtggttggagatcctcagctgagtattaatcgatttggatcgccgttacttctcg

SEQ ID NO: 74061 - DNA, 1654 bp, Zea Mays
caaagcagccctcccttgcaagccaatggataacagtggtgtaagtaacgacgtggagcattatccgtccgaagctaagcggctggagctgtcagcgaagatagggctttcggacaggcagctgcaaatgtggttctgccaccgccgcctcaaggaccgcaagccaccatcgaagcggcaacggcgggatgaagagtccgcactagcaccagtgatgcctccaccgccggtgttaccagcacctgtgatgccagtggcaagcagtgaccttatggtgggcgctcctgggccgtatgataagctgctgcagccggttcacttgcgaaggggtgctgggcggtcctcagcagtccctaggatttccatgccggatctcgggaggaggtattatgagccaccaccagttatgataacgccgttgatgcagctcacacaatatgagctccgtgtgattaattctgtggagtcacagctcggggaaccgttgagggaggatggtccagcacttggcattaattttgatccccttcctcctggcgcctttggtgcaccgattgttccagagcaacaaaagcagcctgtgcaatcttatgatacagatatattttctaggcatgatcaaaagctcttaaaggcttcagcatttttacctactatagaatccccatttgttccaaattcgtttaccgggaagagaaaatcaactgttggtaattctcccgtagtccaacctcatgttggatcacgggctgtccatgagtaccagttccttcctgagcaaccaagtgatacatatgagagggcaagtcctcactactatgacactccagtggaagcttcaaattccaggataccttctctcacatcaggatcacaacttctccatggatctgaggaggctgcgcctagttatgcttttcaaggtcacacatctggttctagcctgttgcctccttccagcaggccccaggtgtttccagtagcaccaacagattatgagatgacccagtttaatagcaaccttagttctgttcctgttgaaggccagtttgatacgtctcaggttgctgcatttgaagacccacctgtatcgtctgaaagaagagcttatcatgatgaagatacttctcgagtggaaagaaaacgaaaacataatgaagaagcaaagattgcaaaagaagttgaagctcacgaaagacgaattaggaaggagcttgagaaacaagattttttgaatagaaagagagaggagcaaaggcacaaggaaatggagagacttgagcgtgagagaagaaaagaagaggagagattactgcgtgagaggcagagagaagaagagaggttccaaagagagcaaagacgtgaaaatgagcgcatggagaagtttttgcagaagcaatctagacgagaagagaaacaaagacaaaaggagcaactccgaaaagagaaagaggcagcaaggcaaaaggctgccaatgaaagggctgctgcacgtagaattgcacgggactatatggaactggtggaagatgagcgtttggaattaatggaattagctgcacaaaacaaagggttgccctcaatgctgtatcttgacagcgacacattacagcagcttgattcttttcgagaagtaatatttcatttcaaatga

SEQ ID NO: 74062 - DNA, 2619 bp, Zea Mays
cctccttcccgaacaggatgtctcgcgaagttcacgccgcagaggatccgaacaagttcaagcgcgcttcgtccaatggcttctccctcgtacaggaggaacagtcctatgaacgcatccgcgggcaccacgaaaagtccaaatccatccgccccagcaccggaacgcagctagtcaatcaaaagcacaaaaagcccaccaccactccgcaagtccgcaaagatcaaacccaagaaatctgagcaccagctacgctgctaattattccatcccatccatctctctccatctatccaaatattccatttaatttcttttcctcgctgctcagcagcagctgccgccgcacaaacacaaaacacactccactctgccacggaagaaaacaaaagaaatacaaagcctgagcgaaaagggaaggcggggtttggtttttattagctgcacacaatggcagcagcgatccaaacccaatccccagcgccgcagcgcgtgggtaataatcgtcccagttcgagcagttgcccttcccgttgctgttcctggcttgcggcttccccaatctctcctccacatccctatccttgccctcttcttcttcgtcgccttttacccacccatccgtcgcggcggtgttcgtggtgttcaagttattgtttgtgtcagtgttcctttcctcctcccggttcggtcatcggtgctggtattcttcgccacggagatccggccacacatcgattcgccttctttttcctcgctccgcgacgcggggtacaatatcgactggactgcgaggcatttggtgcgggcaggcgctacgaggtggggcgacaaaagttgtgaagtttatgcgccttgctttgcagaaggtgctcggatctaggtttccaggccgtcgatcgccgccatggacgccggcagggacggggacggtgccgggaaggcgccgccgaagggccccgccgatgccacgaccgtgcctccggcgccagtggcggcttctgcgcctgggtcgagcgcggggacctcagggtcgggggagaagccggtgaagcgggtgatgaaaaccccctaccagctcgaggttctggagtacacctatgcggtggagcattatccgtccgaagctaagcggctggagctgtcagcgaagatagggctttcggacaggcagctgcaaatgtggttctgccaccgccgcctcaaggaccgcaagccaccatcgaagcggcaacggcgggatgaagagtccgcactagcaccagtgatgcctccaccgccggtgttaccagcacctgtgatgccagtggcaagcagtgaccttatggtgggcgctcctgggccgtatgataagctgctgcagccggttcacttgcgaaggggtgctgggcggtcctcagcagtccctaggatttccatgccggatctcgggaggagctcggggaaccgttgagggaggatggtccagcacttggcattaattttgatccccttcctcctggcgcctttggtgcaccgattgttccagagcaacaaaagcagcctgtgcaatcttatgatacagatatattttctaggcatgatcaaaagctcttaaaggcttcagcatttttacctactatagaatccccatttgttccaaattcgtttaccgggaagagaaaatcaactgttggtaattctcccgtagtccaacctcatgttggatcacgggctgtccatgagtaccagttccttcctgagcaaccaagtgatacatatgagagggcaagtcctcactactatgacactccagtggaagcttcaaattccaggataccttctctcacatcaggatcacaacttctccatggatctgaggaggctgcgcctagttatgcttttcaaggtcacacatctggttctagcctgttgcctccttccagcaggccccaggtgtttccagtagcaccaacagattatgagatgacccagtttaatagcaaccttagttctgttcctgttgaaggccagtttgatacgtctcaggttgctgcatttgaagacccacctgtatcgtctgaaagaagagcttatcatgatgaagatacttctcgagtggaaagaaaacgaaaacataatgaagaagcaaagattgcaaaagaagttgaagctcacgaaagacgaattaggaaggagcttgagaaacaagattttttgaatagaaagagagaggagcaaaggcacaaggaaatggagagacttgagcgtgagagaagaaaagaagaggagagattactgcgtgagaggcagagagaagaagagaggttccaaagagagcaaagacgtgaaaatgagcgcatggagaagtttttgcagaagcaatctagacgagaagagaaacaaagacaaaaggagcaactccgaaaagagaaagaggcagcaaggcaaaaggctgccaatgaaagggctgctgcacgtagaattgcacgggactatatggaactggtggaagatgagcgtttggaattaatggaattagctgcacaaaacaaagggttgccctcaatgctgtatcttgacagcgacacattacagcagcttgattcttttcgagaagtaatatttcatttcaaatga

SEQ ID NO: 74063 - DNA, 6727 bp, Zea Mays
tggcttctccctcgtacaggaggaacagtcctatgaacgcatccgcgggcaccacgaaaagtccaaatccatccgccccagcaccggaacgcagctagtcaatcaaaagcacaaaaagcccaccaccactccgcaagtccgcaaagatcaaacccaagaaatctgagcaccagctacgctgctaattattccatcccatccatctctctccatctatccaaatattccatttaatttcttttcctcgctgctcagcagcagctgccgccgcacaaacacaaaacacactccactctgccacggaagaaaacaaaagaaatacaaagcctgagcgaaaagggaaggcggggtttggtttttattagctgcacacaatggcagcagcgatccaaacccaatccccagcgccgcagcgcgtgggtaataatcgtcccagttcgagcagttgcccttcccgttgctgttcctggcttgcggcttccccaatctctcctccacatccctatccttgccctcttcttcttcgtcgccttttacccacccatccgtcgcggcggtgttcgtggtgttcaagttattgtttgtgtcagtgttcctttcctcctcccggttcggtcatcggtgctggtattcttcgccacggagatccggccacacatcgattcgccttctttttcctcgctccgcgacgcggggtacaatatcgactggactgcgaggcatttggtgcgggcaggcgctacgaggtggggcgacaaaagttgtgaagtttatgcgccttgctttgcagaaggtgctcggatctaggtttccaggccgtcgatcgccgccatggacgccggcagggacggggacggtgccgggaaggcgccgccgaagggccccgccgatgccacgaccgtgcctccggcgccagtggcggcttctgcgcctgggtcgagcgcggggacctcagggtcgggggagaagccggtgaagcgggtgatgaaaaccccctaccagctcgaggttctggagtacacctatgcggtggagcattatccgtccgaagctaagcggctggagctgtcagcgaagatagggctttcggacaggcagctgcaaatgtggttctgccaccgccgcctcaaggaccgcaagccaccatcgaagcggcaacggcgggatgaagagtccgcactagcaccagtgatgcctccaccgccggtgttaccagcacctgtgatgccagtggcaagcagtgaccttatggtgggcgctcctgggccgtatgataagctgctgcagccggttcacttgcgaaggggtgctgggcggtcctcagcagtccctaggatttccatgccggatctcgggaggagctcggggaaccgttgagggaggatggtccagcacttggcattaattttgatccccttcctcctggcgcctttggtgcaccgattgttccagagcaacaaaagcagcctgtgcaatcttatgatacagatatattttctaggcatgatcaaaagctcttaaaggcttcagcatttttacctactatagaatccccatttgttccaaattcgtttaccgggaagagaaaatcaactgttggtaattctcccgtagtccaacctcatgttggatcacgggctgtccatgagtaccagttccttcctgagcaaccaagtgatacatatgagagggcaagtcctcactactatgacactccagtggaagcttcaaattccaggataccttctctcacatcaggatcacaacttctccatggatctgaggaggctgcgcctagttatgcttttcaaggtcacacatctggttctagcctgttgcctccttccagcaggccccaggtgtttccagtagcaccaacagattatgagatgacccagtttaatagcaaccttagttctgttcctgttgaaggccagtttgatacgtctcaggttgctgcatttgaagacccacctgtatcgtctgaaagaagagcttatcatgatgaagatacttctcgagtggaaagaaaacgaaaacataatgaagaagcaaagattgcaaaagaagttgaagctcacgaaagacgaattaggaaggagcttgagaaacaagattttttgaatagaaagagagaggagcaaaggcacaaggaaatggagagacttgagcgtgagagaagaaaagaagaggagagattactgcgtgagaggcagagagaagaagagaggttccaaagagagcaaagacgtgaaaatgagcgcatggagaagtttttgcagaagcaatctagacgagaagagaaacaaagacaaaaggagcaactccgaaaagagaaagaggcagcaaggcaaaaggctgccaatgaaagggctgctgcacgtagaattgcacgggactatatggaactggtggaagatgagcgtttggaattaatggaattagctgcacaaaacaaagggttgccctcaatgctgtatcttgacagcgacacattacagcagcttgattcttttcgaggcatggtaagtcaatttcctcctgcaacagtgaaaatgaagttgccattttctataaagccttggactggatctgaggataacattggaaagcttttgatggtgtggaaattcttaattactttcactgatgttctgggtctttgtccagttacacttgatgagtttgttcagtctcttcatgattatgattcaaggcttttgggagaactgcatgttgctctgttgaaatccattatcaaggatattgaggatgttgctagaactccatcaattgcactaggggtgaatccaggaggtggtcatccacaaattgttgaaggggcatattcctggggattcgatatacgtagctggcaacgtcatcttaatcttcttacatggcctgagatattaagacagtttgctttatctgctggttctggaccccaattaaagaaaaggactgtggaagattctcactatcattatgataatgagggtcatgatggtgagaatgttatattggcacttcgaaatggtacagcagcagtgaatgctgttgctaagatgaaggaaagaggttacaccaatcgccgtagatcccgccaccgtctgactcctggaactgtgaaatttgccgctttccatgtgctctcgcttgaaggaagtaatggtctcacaatattggatgtagcagaaaaaattcagaaatctggattgagagacctcacaacaagcaagacacctgaggcatccatagctgctgctttgtctagggatgcaaaactttttgagagaactgctccttcaacatattgtttgaagtcgccttatagaaaagatccagctgattctgaggccgtgttgtcagcagcgcgtgaaaaaattagggcctttcagaatgtgctttctgactctgaagctgaaaaggaggcagatgaagctgagagggatgatgattctgactgtgatgatgctgatgatgaccctgatggtgatgatgtgaatattgaggtggaagaagacaaggatcctcttcttgccgtcaaggcacaagacgaagtaccgagtacaactacagttattggcataaagaccaagttagatagtgtaggtaatgcattgaactcatcaagtagttttactaaatcagcaaaaggtgctcctctcccttatttaggcaggtccagtgcagcagatacttctaatgattcacctcttggaggcccatcagctaatcatgaagtaacccctggcgattctgaaaatactcaaattgatgaaagcaatcaaattgagccttgggtatgtgcactagcagaaggagactactgcgatcttagtgttgaagaacgccttaacgcactggttgctcttgttggtgttgccactgaagggaactctattcgtggtgtacttgaggaacgtttggaattagcaaatgccttaaagaagcaaatgtgggcagaagtgcaacttgacaagaggcgtttcaaggaagaatttgctagcagagtacaatataactctggcatgagttttaagcctgatatatatcaagaaaacaacatgacagagattacttcaactcgagcctgtgatgcttacaaagaaaacgatggacatgttgggacaatcaacaattgtgagatgcttgatcagcatagtcagggtaatgctggtggtataacttatgatagaaatgtcgtaggccaggaaatccatgcaaccccagatacttcgtatgttcagcagtatgcttatgctgataaaacacgatctcagttgaaatcgtacattggtcaccgggcagagcagctctatgtttacagatccctgcccctaggtcaggatcggaggcgaaacaggtattggcagtttacaacttcagcatcaccaaatgaccctggctcaggaagaatcttttttgaatcggaagatggatgttggagagttatcgactcagaggattcctttgattctttagtggctgcccttgatacacgtggcacccgggaagcacagctgcgttcaatgttgcaaatgatcgagacaacctttaaggaagctattaaaaggagaagtgcaagtatagaattatctgctacagtgtatccaaagaatggagctactgacatgataagggcaaattatcatagagaggttggaagctcaagcagtactccttttaatgatacatctgatagtgtaacagcatattctgattcttttaaagtagagcttgggcgtaatgattttgagaaggcagctatatcaaaaagggcagatatatttttaaaatggatgtggagggaatgctacaatcaggaagagacatgtgccatgagatacggcaagaaaagatgctctgaattgttgcattcttgtaattgctgctatcagatttacctagccgaagaaagacactgttcttcttgccataagactttcaaatccatttacaatttttctgatcatacaacacaatgcgaagagaaatggagaactgacccttactggaagatgcaaatcgctgattattctgttccaataggaatggtattactcaagcttcagttagttttgattgaggcatatataccatcagaagcacttcaaccattttggactgatgtgtatcggaaatcttggagtgtgaagctttatgctaccaaatctattgctgagacattccagcttttgactgttctggaaggtgcaataataccagatcgcctctcttctgattttgaaacaacaagcgaatgtctaaactcacaggttatcgcaccccaaaatcctgtgttaccagctggatttgcttctgtccttccatgggttcctgacactacttctgctgttatgctccgagtgttagaccttgactcagctattttgtatgtgcaaaatcaaaagatggagagggatgatggaggttttatgaaatttccatcaaggtatacagttgttaagagcaaacaagaaacaattccactcgaaccaactggtatggatttgtatgatggaaggtggcttcctggtagtggccgtaggggacgtggccgtggaagtagaggaggtagcaggggaggcaggggccgaagtcgaggtggaaggatcccaagaggtgttagcagctcatcaaggatcgagttcaaggatggcattgctgcttctggtagagcgccaaggaagaatgcacgtcgaggtcgaggtcgaggtcgaggtcgtgggcgtcgaactgtcagacctcggcagccatctgtgggcagaggcagatcaattccaaaggaaaatttgatgggaagctttagcatgcttaccagctcaaaggctgccgacattgaggagtctccacgaagctctggcgcagatgagtggggcttggagaccagaatgacatacactgagcgtgacgagaacagttctggatcacgctatgaagataacgaggaaaacggccagcccatggacgaggattatgaagagcaggttccagattactcaatagactattctagtgggtcgaggcaccatgaaatgatgtccatgatggatcacgagactgacgaggaagatgaagatgctgaaggtgatgagaatgtggaagaagatgatgcagaccacgcagttgacgatgccgatgttgagatggacgaaggtgatgatgaaattggtgatgacggagaggatggcggcgttggcggggagatgactccggatgaggatccagatgctacttcatattcatctgactacagcgaataagaaagcagaaataagtgaccttatcctagagatcctccctcagcgtccctttgtgaaccaaaaggaaaagctaaggagcgatagatgtgcatactgtttttttaggcaccgcaggttctaatagatttcctgacgtatgcctactcattcgatgagtggttgtatcttgctaggtatgtgcatgtcactgtagaattccccgagctatacagtgtctaaggagagatgatatcatatcgcaatttgctaatttggttcccatgcgtcatcccgatcctaatctgatccttaaatagagcccattgtccccttaagtagaagtgatcttttatcatgagttttaccatctcttaaaagtaaatatgaaattggagtctgctttctaaccgagaacatggcaggcgcatcgtaggcatcctcgttggcgttgagcatcgtgtagagataacaactttcac

SEQ ID NO: 74064 - DNA, 6621 bp, Zea Mays
ctcgaaaacgcaggagagctgcgtctcattatattaagaagaagaataagggtctggaacagaccaaatacaaaggactccttacggaggcgggaggccgaaaacaaaggaacctaaaaggactcatctaggatacaaaacaatagaggacctttaccacattacataacagttatggccaaagaccacgcagccctgctgctccagccaaacaccaaagagaagcctcatctctgacttcctggatgatcttggcaatgcttggtggagccttatcaaagacacatgcattccgatgtttccacatcatccaagccacaagtgaaaccagggtgttaaatcctttcctttgtatgggtggcacttgtacctctgccagtttctaccaattttggaatacctttccgtgaagccttgctgcagtcctaccattgatagcggcatataccaaacttctctagaaaaaacacaactgagaagaatgtgctcaattctttcttcctcctgatcacaaaaaaggcagtgttctggatgttccaatccctgccgagccagacggtcagcagtccaacatctgttcaaggctgccagccataaaaagaatctgcatttaggtggaggccaactcttctagatacgagaagtgggttcaaaatctgttgtccccaagcagaaacgctcatatgcagacttggaagtgtagatccccgtagatgatggaagccatctatgttgatcatgagtttttgagcataattgaatctgttgtaattgatcccaaatctgaaaatatttaaagaatgcttgtggagagagctcaccccttatgtcagtaatccaatgcaatgatttcaagtcgagcgacttgctagtcgacacacctgggcgactaggcgactaatcgcgattaggacgacgactaggtcgactaatcgtggctaaggcagcagcagattgaagaggggattcaagagggggggacagatcaagagaaaggtgcagaggggattcaagagggggcacagatcaaaagaaaggtgcagtgattgaagttaccgtcggttgatgtactcatcttggtgctaatggctgctgggccgccgccgctgcagactgctgctgggccgccgccgtcgaggacggtgagatgctgacaccgaggaggaaggtgcagggctgccgccaccgaggaaaagggtgagcaggtgagcacattgaggaacaaggagggggcagagggtacccaccggtgttggacagggagaggtgagccgccgcacaggcacagccacctgaacaggagagaagagcaaaaagccgccggaacaggagaggagaagttccagagcaacaaaagcagcctgtgcaatcttatgatacagatatattttctaggcatgatcaaaagctcttaaaggcttcagcatttttacctactatagaatccccatttgttccaaattcgtttaccgggaagagaaaatcaactgttggtaattctcccgtagtccaacctcatgttggatcacgggctgtccatgagtaccagttccttcctgagcaaccaagtgatacatatgagagggcaagtcctcactactatgacactccagtggaagcttcaaattccaggataccttctctcacatcaggatcacaacttctccatggatctgaggaggctgcgcctagttatgcttttcaaggtcacacatctggttctagcctgttgcctccttccagcaggccccaggtgtttccagtagcaccaacagattatgagatgacccagtttaatagcaaccttagttctgttcctgttgaaggccagtttgatacgtctcaggttgctgcatttgaagacccacctgtatcgtctgaaagaagagcttatcatgatgaagatacttctcgagtggaaagaaaacgaaaacataatgaagaagcaaagattgcaaaagaagttgaagctcacgaaagacgaattaggaaggagcttgagaaacaagattttttgaatagaaagagagaggagcaaaggcacaaggaaatggagagacttgagcgtgagagaagaaaagaagaggagagattactgcgtgagaggcagagagaagaagagaggttccaaagagagcaaagacgtgaaaatgagcgcatggagaagtttttgcagaagcaatctagacgagaagagaaacaaagacaaaaggagcaactccgaaaagagaaagaggcagcaaggcaaaaggctgccaatgaaagggctgctgcacgtagaattgcacgggactatatggaactggtggaagatgagcgtttggaattaatggaattagctgcacaaaacaaagggttgccctcaatgctgtatcttgacagcgacacattacagcagcttgattcttttcgaggcatggtaagtcaatttcctcctgcaacagtgaaaatgaagttgccattttctataaagccttggactggatctgaggataacattggaaagcttttgatggtgtggaaattcttaattactttcactgatgttctgggtctttgtccagttacacttgatgagtttgttcagtctcttcatgattatgattcaaggcttttgggagaactgcatgttgctctgttgaaatccattatcaaggatattgaggatgttgctagaactccatcaattgcactaggggtgaatccaggaggtggtcatccacaaattgttgaaggggcatattcctggggattcgatatacgtagctggcaacgtcatcttaatcttcttacatggcctgagatattaagacagtttgctttatctgctggttctggaccccaattaaagaaaaggactgtggaagattctcactatcattatgataatgagggtcatgatggtgagaatgttatattggcacttcgaaatggtacagcagcagtgaatgctgttgctaagatgaaggaaagaggttacaccaatcgccgtagatcccgccaccgtctgactcctggaactgtgaaatttgccgctttccatgtgctctcgcttgaaggaagtaatggtctcacaatattggatgtagcagaaaaaattcagaaatctggattgagagacctcacaacaagcaagacacctgaggcatccatagctgctgctttgtctagggatgcaaaactttttgagagaactgctccttcaacatattgtttgaagtcgccttatagaaaagatccagctgattctgaggccgtgttgtcagcagcgcgtgaaaaaattagggcctttcagaatgtgctttctgactctgaagctgaaaaggaggcagatgaagctgagagggatgatgattctgactgtgatgatgctgatgatgaccctgatggtgatgatgtgaatattgaggtggaagaagacaaggatcctcttcttgccgtcaaggcacaagacgaagtaccgagtacaactacagttattggcataaagaccaagttagatagtgtaggtaatgcattgaactcatcaagtagttttactaaatcagcaaaaggtgctcctctcccttatttaggcaggtccagtgcagcagatacttctaatgattcacctcttggaggcccatcagctaatcatgaagtaacccctggcgattctgaaaatactcaaattgatgaaagcaatcaaattgagccttgggtatgtgcactagcagaaggagactactgcgatcttagtgttgaagaacgccttaacgcactggttgctcttgttggtgttgccactgaagggaactctattcgtggtgtacttgaggaacgtttggaattagcaaatgccttaaagaagcaaatgtgggcagaagtgcaacttgacaagaggcgtttcaaggaagaatttgctagcagagtacaatataactctggcatgagttttaagcctgatatatatcaagaaaacaacatgacagagattacttcaactcgagcctgtgatgcttacaaagaaaacgatggacatgttgggacaatcaacaattgtgagatgcttgatcagcatagtcagggtaatgctggtggtataacttatgatagaaatgtcgtaggccaggaaatccatgcaaccccagatacttcgtatgttcagcagtatgcttatgctgataaaacacgatctcagttgaaatcgtacattggtcaccgggcagagcagctctatgtttacagatccctgcccctaggtcaggatcggaggcgaaacaggtattggcagtttacaacttcagcatcaccaaatgaccctggctcaggaagaatcttttttgaatcggaagatggatgttggagagttatcgactcagaggattcctttgattctttagtggctgcccttgatacacgtggcacccgggaagcacagctgcgttcaatgttgcaaatgatcgagacaacctttaaggaagctattaaaaggagaagtgcaagtatagaattatctgctacagtgtatccaaagaatggagctactgacatgataagggcaaattatcatagagaggttggaagctcaagcagtactccttttaatgatacatctgatagtgtaacagcatattctgattcttttaaagtagagcttgggcgtaatgattttgagaaggcagctatatcaaaaagggcagatatatttttaaaatggatgtggagggaatgctacaatcaggaagagacatgtgccatgagatacggcaagaaaagatgctctgaattgttgcattcttgtaattgctgctatcagatttacctagccgaagaaagacactgttcttcttgccataagactttcaaatccatttacaatttttctgatcatacaacacaatgcgaagagaaatggagaactgacccttactggaagatgcaaatcgctgattattctgttccaataggaatggtattactcaagcttcagttagttttgattgaggcatatataccatcagaagcacttcaaccattttggactgatgtgtatcggaaatcttggagtgtgaagctttatgctaccaaatctattgctgagacattccagcttttgactgttctggaaggtgcaataataccagatcgcctctcttctgattttgaaacaacaagcgaatgtctaaactcacaggttatcgcaccccaaaatcctgtgttaccagctggatttgcttctgtccttccatgggttcctgacactacttctgctgttatgctccgagtgttagaccttgactcagctattttgtatgtgcaaaatcaaaagatggagagggatgatggaggttttatgaaatttccatcaaggtatacagttgttaagagcaaacaagaaacaattccactcgaaccaactggtatggatttgtatgatggaaggtggcttcctggtagtggccgtaggggacgtggccgtggaagtagaggaggtagcaggggaggcaggggccgaagtcgaggtggaaggatcccaagaggtgttagcagctcatcaaggatcgagttcaaggatggcattgctgcttctggtagagcgccaaggaagaatgcacgtcgaggtcgaggtcgaggtcgaggtcgtgggcgtcgaactgtcagacctcggcagccatctgtgggcagaggcagatcaattccaaaggaaaatttgatgggaagctttagcatgcttaccagctcaaaggctgccgacattgaggagtctccacgaagctctggcgcagatgagtggggcttggagaccagaatgacatacactgagcgtgacgagaacagttctggatcacgctatgaagataacgaggaaaacggccagcccatggacgaggattatgaagagcaggttccagattactcaatagactattctagtgggtcgaggcaccatgaaatgatgtccatgatggatcacgagactgacgaggaagatgaagatgctgaaggtgatgagaatgtggaagaagatgatgcagaccacgcagttgacgatgccgatgttgagatggacgaaggtgatgatgaaattggtgatgacggagaggatggcggcgttggcggggagatgactccggatgaggatccagatgctacttcatattcatctgactacagcgaataagaaagcagaaataagtgaccttatcctagagatcctccctcagcgtccctttgtgaaccaaaaggaaaagctaaggagcgatagatgtgcatactgtttttttaggcaccgcaggttctaatagatttcctgacgtatgcctactcattcgatgagtggttgtatcttgctaggtatgtgcatgtcactgtagaattccccgagctatacagtgtctaaggagagatgatatcatatcgcaatttgctaatttggttcccatgcgtcatcccgatcctaatctgatccttaaatagagcccattgtccccttaagtagaagtgatcttttatcatgagttttaccatctcttaaaagtaaatatgaaattggagtctgctttctaaccgagaacatggcaggcgcatcgtaggcatcctcgttggcgttgagcatcgtgtagagataacaactttcac

SEQ ID NO: 74065 - DNA, 5357 bp, Zea Mays
atggccctcatccaaagcctcctgaaccataccacattagaaactgataccgtcctattcaaacttgttaccgctgttccagagcaacaaaagcagcctgtgcaatcttatgatacagatatattttctaggcatgatcaaaagctcttaaaggcttcagcatttttacctactatagaatccccatttgttccaaattcgtttaccgggaagagaaaatcaactgttggtaattctcccgtagtccaacctcatgttggatcacgggctgtccatgagtaccagttccttcctgagcaaccaagtgatacatatgagagggcaagtcctcactactatgacactccagtggaagcttcaaattccaggataccttctctcacatcaggatcacaacttctccatggatctgaggaggctgcgcctagttatgcttttcaaggtcacacatctggttctagcctgttgcctccttccagcaggccccaggtgtttccagtagcaccaacagattatgagatgacccagtttaatagcaaccttagttctgttcctgttgaaggccagtttgatacgtctcaggttgctgcatttgaagacccacctgtatcgtctgaaagaagagcttatcatgatgaagatacttctcgagtggaaagaaaacgaaaacataatgaagaagcaaagattgcaaaagaagttgaagctcacgaaagacgaattaggaaggagcttgagaaacaagattttttgaatagaaagagagaggagcaaaggcacaaggaaatggagagacttgagcgtgagagaagaaaagaagaggagagattactgcgtgagaggcagagagaagaagagaggttccaaagagagcaaagacgtgaaaatgagcgcatggagaagtttttgcagaagcaatctagacgagaagagaaacaaagacaaaaggagcaactccgaaaagagaaagaggcagcaaggcaaaaggctgccaatgaaagggctgctgcacgtagaattgcacgggactatatggaactggtggaagatgagcgtttggaattaatggaattagctgcacaaaacaaagggttgccctcaatgctgtatcttgacagcgacacattacagcagcttgattcttttcgaggcatggtaagtcaatttcctcctgcaacagtgaaaatgaagttgccattttctataaagccttggactggatctgaggataacattggaaagcttttgatggtgtggaaattcttaattactttcactgatgttctgggtctttgtccagttacacttgatgagtttgttcagtctcttcatgattatgattcaaggcttttgggagaactgcatgttgctctgttgaaatccattatcaaggatattgaggatgttgctagaactccatcaattgcactaggggtgaatccaggaggtggtcatccacaaattgttgaaggggcatattcctggggattcgatatacgtagctggcaacgtcatcttaatcttcttacatggcctgagatattaagacagtttgctttatctgctggttctggaccccaattaaagaaaaggactgtggaagattctcactatcattatgataatgagggtcatgatggtgagaatgttatattggcacttcgaaatggtacagcagcagtgaatgctgttgctaagatgaaggaaagaggttacaccaatcgccgtagatcccgccaccgtctgactcctggaactgtgaaatttgccgctttccatgtgctctcgcttgaaggaagtaatggtctcacaatattggatgtagcagaaaaaattcagaaatctggattgagagacctcacaacaagcaagacacctgaggcatccatagctgctgctttgtctagggatgcaaaactttttgagagaactgctccttcaacatattgtttgaagtcgccttatagaaaagatccagctgattctgaggccgtgttgtcagcagcgcgtgaaaaaattagggcctttcagaatgtgctttctgactctgaagctgaaaaggaggcagatgaagctgagagggatgatgattctgactgtgatgatgctgatgatgaccctgatggtgatgatgtgaatattgaggtggaagaagacaaggatcctcttcttgccgtcaaggcacaagacgaagtaccgagtacaactacagttattggcataaagaccaagttagatagtgtaggtaatgcattgaactcatcaagtagttttactaaatcagcaaaaggtgctcctctcccttatttaggcaggtccagtgcagcagatacttctaatgattcacctcttggaggcccatcagctaatcatgaagtaacccctggcgattctgaaaatactcaaattgatgaaagcaatcaaattgagccttgggtatgtgcactagcagaaggagactactgcgatcttagtgttgaagaacgccttaacgcactggttgctcttgttggtgttgccactgaagggaactctattcgtggtgtacttgaggaacgtttggaattagcaaatgccttaaagaagcaaatgtgggcagaagtgcaacttgacaagaggcgtttcaaggaagaatttgctagcagagtacaatataactctggcatgagttttaagcctgatatatatcaagaaaacaacatgacagagattacttcaactcgagcctgtgatgcttacaaagaaaacgatggacatgttgggacaatcaacaattgtgagatgcttgatcagcatagtcagggtaatgctggtggtataacttatgatagaaatgtcgtaggccaggaaatccatgcaaccccagatacttcgtatgttcagcagtatgcttatgctgataaaacacgatctcagttgaaatcgtacattggtcaccgggcagagcagctctatgtttacagatccctgcccctaggtcaggatcggaggcgaaacaggtattggcagtttacaacttcagcatcaccaaatgaccctggctcaggaagaatcttttttgaatcggaagatggatgttggagagttatcgactcagaggattcctttgattctttagtggctgcccttgatacacgtggcacccgggaagcacagctgcgttcaatgttgcaaatgatcgagacaacctttaaggaagctattaaaaggagaagtgcaagtatagaattatctgctacagtgtatccaaagaatggagctactgacatgataagggcaaattatcatagagaggttggaagctcaagcagtactccttttaatgatacatctgatagtgtaacagcatattctgattcttttaaagtagagcttgggcgtaatgattttgagaaggcagctatatcaaaaagggcagatatatttttaaaatggatgtggagggaatgctacaatcaggaagagacatgtgccatgagatacggcaagaaaagatgctctgaattgttgcattcttgtaattgctgctatcagatttacctagccgaagaaagacactgttcttcttgccataagactttcaaatccatttacaatttttctgatcatacaacacaatgcgaagagaaatggagaactgacccttactggaagatgcaaatcgctgattattctgttccaataggaatggtattactcaagcttcagttagttttgattgaggcatatataccatcagaagcacttcaaccattttggactgatgtgtatcggaaatcttggagtgtgaagctttatgctaccaaatctattgctgagacattccagcttttgactgttctggaaggtgcaataataccagatcgcctctcttctgattttgaaacaacaagcgaatgtctaaactcacaggttatcgcaccccaaaatcctgtgttaccagctggatttgcttctgtccttccatgggttcctgacactacttctgctgttatgctccgagtgttagaccttgactcagctattttgtatgtgcaaaatcaaaagatggagagggatgatggaggttttatgaaatttccatcaaggtatacagttgttaagagcaaacaagaaacaattccactcgaaccaactggtatggatttgtatgatggaaggtggcttcctggtagtggccgtaggggacgtggccgtggaagtagaggaggtagcaggggaggcaggggccgaagtcgaggtggaaggatcccaagaggtgttagcagctcatcaaggatcgagttcaaggatggcattgctgcttctggtagagcgccaaggaagaatgcacgtcgaggtcgaggtcgaggtcgaggtcgtgggcgtcgaactgtcagacctcggcagccatctgtgggcagaggcagatcaattccaaaggaaaatttgatgggaagctttagcatgcttaccagctcaaaggctgccgacattgaggagtctccacgaagctctggcgcagatgagtggggcttggagaccagaatgacatacactgagcgtgacgagaacagttctggatcacgctatgaagataacgaggaaaacggccagcccatggacgaggattatgaagagcaggttccagattactcaatagactattctagtgggtcgaggcaccatgaaatgatgtccatgatggatcacgagactgacgaggaagatgaagatgctgaaggtgatgagaatgtggaagaagatgatgcagaccacgcagttgacgatgccgatgttgagatggacgaaggtgatgatgaaattggtgatgacggagaggatggcggcgttggcggggagatgactccggatgaggatccagatgctacttcatattcatctgactacagcgaataagaaagcagaaataagtgaccttatcctagagatcctccctcagcgtccctttgtgaaccaaaaggaaaagctaaggagcgatagatgtgcatactgtttttttaggcaccgcaggttctaatagatttcctgacgtatgcctactcattcgatgagtggttgtatcttgctaggtatgtgcatgtcactgtagaattccccgagctatacagtgtctaaggagagatgatatcatatcgcaatttgctaatttggttcccatgcgtcatcccgatcctaatctgatccttaaatagagcccattgtccccttaagtagaagtgatcttttatcatgagttttaccatctcttaaaagtaaatatgaaattggagtctgctttctaaccgagaacatggcaggcgcatcgtaggcatcctcgttggcgttgagcatcgtgtagagataacaactttcac

SEQ ID NO: 74066 - DNA, 4710 bp, Zea Mays
atggccctcatccaaagcctcctgaaccataccacattagaaactgataccgtcctattcaaacttgttaccgctgttccagagcaacaaaagcagcctgtgcaatcttatgatacagatatattttctaggcatgatcaaaagctcttaaaggcttcagcatttttacctactatagaatccccatttgttccaaattcgtttaccgggaagagaaaatcaactgttggtaattctcccgtagtccaacctcatgttggatcacgggctgtccatgagtaccagttccttcctgagcaaccaagtgatacatatgagagggcaagtcctcactactatgacactccagtggaagcttcaaattccaggataccttctctcacatcaggatcacaacttctccatggatctgaggaggctgcgcctagttatgcttttcaaggtcacacatctggttctagcctgttgcctccttccagcaggccccaggtgtttccagtagcaccaacagattatgagatgacccagtttaatagcaaccttagttctgttcctgttgaaggccagtttgatacgtctcaggttgctgcatttgaagacccacctgtatcgtctgaaagaagagcttatcatgatgaagatacttctcgagtggaaagaaaacgaaaacataatgaagaagcaaagattgcaaaagaagttgaagctcacgaaagacgaattaggaaggagcttgagaaacaagattttttgaatagaaagagagaggagcaaaggcacaaggaaatggagagacttgagcgtgagagaagaaaagaagaggagagattactgcgtgagaggcagagagaagaagagaggttccaaagagagcaaagacgtgaaaatgagcgcatggagaagtttttgcagaagcaatctagacgagaagagaaacaaagacaaaaggagcaactccgaaaagagaaagaggcagcaaggcaaaaggctgccaatgaaagggctgctgcacgtagaattgcacgggactatatggaactggtggaagatgagcgtttggaattaatggaattagctgcacaaaacaaagggttgccctcaatgctgtatcttgacagcgacacattacagcagcttgattcttttcgaggcatggtaagtcaatttcctcctgcaacagtgaaaatgaagttgccattttctataaagccttggactggatctgaggataacattggaaagcttttgatggtgtggaaattcttaattactttcactgatgttctgggtctttgtccagttacacttgatgagtttgttcagtctcttcatgattatgattcaaggcttttgggagaactgcatgttgctctgttgaaatccattatcaaggatattgaggatgttgctagaactccatcaattgcactaggggtgaatccaggaggtggtcatccacaaattgttgaaggggcatattcctggggattcgatatacgtagctggcaacgtcatcttaatcttcttacatggcctgagatattaagacagtttgctttatctgctggttctggaccccaattaaagaaaaggactgtggaagattctcactatcattatgataatgagggtcatgatggtgagaatgttatattggcacttcgaaatggtacagcagcagtgaatgctgttgctaagatgaaggaaagaggttacaccaatcgccgtagatcccgccaccgtctgactcctggaactgtgaaatttgccgctttccatgtgctctcgcttgaaggaagtaatggtctcacaatattggatgtagcagaaaaaattcagaaatctggattgagagacctcacaacaagcaagacacctgaggcatccatagctgctgctttgtctagggatgcaaaactttttgagagaactgctccttcaacatattgtttgaagtcgccttatagaaaagatccagctgattctgaggccgtgttgtcagcagcgcgtgaaaaaattagggcctttcagaatgtgctttctgactctgaagctgaaaaggaggcagatgaagctgagagggatgatgattctgactgtgatgatgctgatgatgaccctgatggtgatgatgtgaatattgaggtggaagaagacaaggatcctcttcttgccgtcaaggcacaagacgaagtaccgagtacaactacagttattggcataaagaccaagttagatagtgtaggtaatgcattgaactcatcaagtagttttactaaatcagcaaaaggtgctcctctcccttatttaggcaggtccagtgcagcagatacttctaatgattcacctcttggaggcccatcagctaatcatgaagtaacccctggcgattctgaaaatactcaaattgatgaaagcaatcaaattgagccttgggtatgtgcactagcagaaggagactactgcgatcttagtgttgaagaacgccttaacgcactggttgctcttgttggtgttgccactgaagggaactctattcgtggtgtacttgaggtatatattatgatcctgctaaactactcttctatcttgtcattcctaattgggaaacaactgatcaagagtcttgcaggaacgtttggaattagcaaatgccttaaagaagcaaatgtgggcagaagtgcaacttgacaagaggcgtttcaaggaagaatttgctagcagagtacaatataactctggcatgagttttaagcctgatatatatcaagaaaacaacatgacagagattacttcaactcgagcctgtgatgcttacaaagaaaacgatggacatgttgggacaatcaacaattgtgagatgcttgatcagcatagtcagggtaatgctggtggtataacttatgatagaaatgtcgtaggccaggaaatccatgcaaccccagatacttcgtatgttcagcagtatgcttatgctgataaaacacgatctcagttgaaatcgtacattggtcaccgggcagagcagctctatgtttacagatccctgcccctaggtcaggatcggaggcgaaacaggtattggcagtttacaacttcagcatcaccaaatgaccctggctcaggaagaatcttttttgaatcggaagatggatgttggagagttatcgactcagaggatcttttgactgttctggaaggtgcaataataccagatcgcctctcttctgattttgaaacaacaagcgaatgtctaaactcacaggttatcgcaccccaaaatcctgtgttaccagctggatttgcttctgtccttccatgggttcctgacactacttctgctgttatgctccgagtgttagaccttgactcagctattttgtatgtgcaaaatcaaaagatggagagggatgatggaggttttatgaaatttccatcaaggtatacagttgttaagagcaaacaagaaacaattccactcgaaccaactggtatggatttgtatgatggaaggtggcttcctggtagtggccgtaggggacgtggccgtggaagtagaggaggtagcaggggaggcaggggccgaagtcgaggtggaaggatcccaagaggtgttagcagctcatcaaggatcgagttcaaggatggcattgctgcttctggtagagcgccaaggaagaatgcacgtcgaggtcgaggtcgaggtcgaggtcgtgggcgtcgaactgtcagacctcggcagccatctgtgggcagaggcagatcaattccaaaggaaaatttgatgggaagctttagcatgcttaccagctcaaaggctgccgacattgaggagtctccacgaagctctggcgcagatgagtggggcttggagaccagaatgacatacactgagcgtgacgagaacagttctggatcacgctatgaagataacgaggaaaacggccagcccatggacgaggattatgaagagcaggttccagattactcaatagactattctagtgggtcgaggcaccatgaaatgatgtccatgatggatcacgagactgacgaggaagatgaagatgctgaaggtgatgagaatgtggaagaagatgatgcagaccacgcagttgacgatgccgatgttgagatggacgaaggtgatgatgaaattggtgatgacggagaggatggcggcgttggcggggagatgactccggatgaggatccagatgctacttcatattcatctgactacagcgaataagaaagcagaaataagtgaccttatcctagagatcctccctcagcgtccctttgtgaaccaaaaggaaaagctaaggagcgatagatgtgcatactgtttttttaggcaccgcaggttctaatagatttcctgacgtatgcctactcattcgatgagtggttgtatcttgctaggtatgtgcatgtcactgtagaattccccgagctatacagtgtctaaggagagatgatatcatatcgcaatttgctaatttggttcccatgcgtcatcccgatcctaatctgatccttaaatagagcccattgtccccttaagtagaagtgatcttttatcatgagttttaccatctcttaaaagtaaatatgaaattggagtctgctttctaaccgagaacatggcaggcgcatcgtaggcatcctcgttggcgttgagcatcgtgtagagataacaactttcac

SEQ ID NO: 74067 - DNA, 2049 bp, Zea Mays
atggagcagagtgtgagagggggcagaggcggaggcttaggcatggtaagtcaatttcctcctgcaacagtgaaaatgaagttgccattttctataaagccttggactggatctgaggataacattggaaagcttttgatggtgtggaaattcttaattactttcactgatgttctgggtctttgtccagttacacttgatgagtttgttcagtctcttcatgattatgattcaaggcttttgggagaactgcatgttgctctgttgaaatccattatcaaggatattgaggatgttgctagaactccatcaattgcactaggggtgaatccaggaggtggtcatccacaaattgttgaaggggcatattcctggggattcgatatacgtagctggcaacgtcatcttaatcttcttacatggcctgagatattaagacagtttgctttatctgctggttctggaccccaattaaagaaaaggactgtggaagattctcactatcattatgataatgagggtcatgatggtgagaatgttatattggcacttcgaaatggtacagcagcagtgaatgctgttgctaagatgaaggaaagaggttacaccaatcgccgtagatcccgccaccgtctgactcctggaactgtgaaatttgccgctttccatgtgctctcgcttgaaggaagtaatggtctcacaatattggatgtagcagaaaaaattcagaaatctggattgagagacctcacaacaagcaagacacctgaggcatccatagctgctgctttgtctagggatgcaaaactttttgagagaactgctccttcaacatattgtttgaagtcgccttatagaaaagatccagctgattctgaggccgtgttgtcagcagcgcgtgaaaaaattagggcctttcagaatgtgctttctgactctgaagctgaaaaggaggcagatgaagctgagagggatgatgattctgactgtgatgatgctgatgatgaccctgatggtgatgatgtgaatattgaggtggaagaagacaaggatcctcttcttgccgtcaaggcacaagacgaagtaccgagtacaactacagttattggcataaagaccaagttagatagtgtaggtaatgcattgaactcatcaagtagttttactaaatcagcaaaaggtgctcctctcccttatttaggcaggtccagtgcagcagatacttctaatgattcacctcttggaggcccatcagctaatcatgaagtaacccctggcgattctgaaaatactcaaattgatgaaagcaatcaaattgagccttgggtatgtgcactagcagaaggagactactgcgatcttagtgttgaagaacgccttaacgcactggttgctcttgttggtgttgccactgaagggaactctattcgtggtgtacttgaggaacgtttggaattagcaaatgccttaaagaagcaaatgtgggcagaagtgcaacttgacaagaggcgtttcaaggaagaatttgctagcagagtacaatataactctggcatgagttttaagcctgatatatatcaagaaaacaacatgacagagattacttcaactcgagcctgtgatgcttacaaagaaaacgatggacatgttgggacaatcaacaattgtgagatgcttgatcagcatagtcagggtaatgctggtggtataacttatgatagaaatgtcgtaggccaggaaatccatgcaaccccagatacttcgtatgttcagcagtatgcttatgctgataaaacacgatctcagttgaaatcgtacattggtcaccgggcagagcagctctatgtttacagatccctgcccctaggtcaggatcggaggcgaaacaggtattggcagtttacaacttcagcatcaccaaatgaccctggctcaggaagaatcttttttgaatcggaagatggatgttggagagttatcgactcagaggatggcacatgcgcgagggagaggaggcagcagactgcgcgacgaagagaaggaaacgac

SEQ ID NO: 74068 - DNA, 4231 bp, Zea Mays
atggagcagagtgtgagagggggcagaggcggaggcttaggcatggtaagtcaatttcctcctgcaacagtgaaaatgaagttgccattttctataaagccttggactggatctgaggataacattggaaagcttttgatggtgtggaaattcttaattactttcactgatgttctgggtctttgtccagttacacttgatgagtttgttcagtctcttcatgattatgattcaaggcttttgggagaactgcatgttgctctgttgaaatccattatcaaggatattgaggatgttgctagaactccatcaattgcactaggggtgaatccaggaggtggtcatccacaaattgttgaaggggcatattcctggggattcgatatacgtagctggcaacgtcatcttaatcttcttacatggcctgagatattaagacagtttgctttatctgctggttctggaccccaattaaagaaaaggactgtggaagattctcactatcattatgataatgagggtcatgatggtgagaatgttatattggcacttcgaaatggtacagcagcagtgaatgctgttgctaagatgaaggaaagaggttacaccaatcgccgtagatcccgccaccgtctgactcctggaactgtgaaatttgccgctttccatgtgctctcgcttgaaggaagtaatggtctcacaatattggatgtagcagaaaaaattcagaaatctggattgagagacctcacaacaagcaagacacctgaggcatccatagctgctgctttgtctagggatgcaaaactttttgagagaactgctccttcaacatattgtttgaagtcgccttatagaaaagatccagctgattctgaggccgtgttgtcagcagcgcgtgaaaaaattagggcctttcagaatgtgctttctgactctgaagctgaaaaggaggcagatgaagctgagagggatgatgattctgactgtgatgatgctgatgatgaccctgatggtgatgatgtgaatattgaggtggaagaagacaaggatcctcttcttgccgtcaaggcacaagacgaagtaccgagtacaactacagttattggcataaagaccaagttagatagtgtaggtaatgcattgaactcatcaagtagttttactaaatcagcaaaaggtgctcctctcccttatttaggcaggtccagtgcagcagatacttctaatgattcacctcttggaggcccatcagctaatcatgaagtaacccctggcgattctgaaaatactcaaattgatgaaagcaatcaaattgagccttgggtatgtgcactagcagaaggagactactgcgatcttagtgttgaagaacgccttaacgcactggttgctcttgttggtgttgccactgaagggaactctattcgtggtgtacttgaggaacgtttggaattagcaaatgccttaaagaagcaaatgtgggcagaagtgcaacttgacaagaggcgtttcaaggaagaatttgctagcagagtacaatataactctggcatgagttttaagcctgatatatatcaagaaaacaacatgacagagattacttcaactcgagcctgtgatgcttacaaagaaaacgatggacatgttgggacaatcaacaattgtgagatgcttgatcagcatagtcagggtaatgctggtggtataacttatgatagaaatgtcgtaggccaggaaatccatgcaaccccagatacttcgtatgttcagcagtatgcttatgctgataaaacacgatctcagttgaaatcgtacattggtcaccgggcagagcagctctatgtttacagatccctgcccctaggtcaggatcggaggcgaaacaggtattggcagtttacaacttcagcatcaccaaatgaccctggctcaggaagaatcttttttgaatcggaagatggatgttggagagttatcgactcagaggattcctttgattctttagtggctgcccttgatacacgtggcacccgggaagcacagctgcgttcaatgttgcaaatgatcgagacaacctttaaggaagctattaaaaggagaagtgcaagtatagaattatctgctacagtgtatccaaagaatggagctactgacatgataagggcaaattatcatagagaggttggaagctcaagcagtactccttttaatgatacatctgatagtgtaacagcatattctgattcttttaaagtagagcttgggcgtaatgattttgagaaggcagctatatcaaaaagggcagatatatttttaaaatggatgtggagggaatgctacaatcaggaagagacatgtgccatgagatacggcaagaaaagatgctctgaattgttgcattcttgtaattgctgctatcagatttacctagccgaagaaagacactgttcttcttgccataagactttcaaatccatttacaatttttctgatcatacaacacaatgcgaagagaaatggagaactgacccttactggaagatgcaaatcgctgattattctgttccaataggaatggtattactcaagcttcagttagttttgattgagaagcacttcaaccattttggactgatgtgtatcggaaatcttggagtgtgaagctttatgctaccaaatctattgctgagacattccagcttttgactgttctggaaggtgcaataataccagatcgcctctcttctgattttgaaacaacaagcgaatgtctaaactcacaggttatcgcaccccaaaatcctgtgttaccagctggatttgcttctgtccttccatgggttcctgacactacttctgctgttatgctccgagtgttagaccttgactcagctattttgtatgtgcaaaatcaaaagatggagagggatgatggaggttttatgaaatttccatcaaggtatacagttgttaagagcaaacaagaaacaattccactcgaaccaactggtatggatttgtatgatggaaggtggcttcctggtagtggccgtaggggacgtggccgtggaagtagaggaggtagcaggggaggcaggggccgaagtcgaggtggaaggatcccaagaggtgttagcagctcatcaaggatcgagttcaaggatggcattgctgcttctggtagagcgccaaggaagaatgcacgtcgaggtcgaggtcgaggtcgaggtcgtgggcgtcgaactgtcagacctcggcagccatctgtgggcagaggcagatcaattccaaaggaaaatttgatgggaagctttagcatgcttaccagctcaaaggctgccgacattgaggagtctccacgaagctctggcgcagatgagtggggcttggagaccagaatgacatacactgagcgtgacgagaacagttctggatcacgctatgaagataacgaggaaaacggccagcccatggacgaggattatgaagagcaggttccagattactcaatagactattctagtgggtcgaggcaccatgaaatgatgtccatgatggatcacgagactgacgaggaagatgaagatgctgaaggtgatgagaatgtggaagaagatgatgcagaccacgcagttgacgatgccgatgttgagatggacgaaggtgatgatgaaattggtgatgacggagaggatggcggcgttggcggggagatgactccggatgaggatccagatgctacttcatattcatctgactacagcgaataagaaagcagaaataagtgaccttatcctagagatcctccctcagcgtccctttgtgaaccaaaaggaaaagctaaggagcgatagatgtgcatactgtttttttaggcaccgcaggttctaatagatttcctgacgtatgcctactcattcgatgagtggttgtatcttgctaggtatgtgcatgtcactgtagaattccccgagctatacagtgtctaaggagagatgatatcatatcgcaatttgctaatttggttcccatgcgtcatcccgatcctaatctgatccttaaatagagcccattgtccccttaagtagaagtgatcttttatcatgagttttaccatctcttaaaagtaaatatgaaattggagtctgctttctaaccgagaacatggcaggcgcatcgtaggcatcctcgttggcgttgagcatcgtgtagagataacaactttcac

SEQ ID NO: 74069 - DNA, 3840 bp, Zea Mays
atggagcagagtgtgagagggggcagaggcggaggcttaggcatggtaagtcaatttcctcctgcaacagtgaaaatgaagttgccattttctataaagccttggactggatctgaggataacattggaaagcttttgatggtgtggaaattcttaattactttcactgatgttctgggtctttgtccagttacacttgatgagtttgttcagtctcttcatgattatgattcaaggcttttgggagaactgcatgttgctctgttgaaatccattatcaaggatattgaggatgttgctagaactccatcaattgcactaggggtgaatccaggaggtggtcatccacaaattgttgaaggggcatattcctggggattcgatatacgtagctggcaacgtcatcttaatcttcttacatggcctgagatattaagacagtttgctttatctgctggttctggaccccaattaaagaaaaggactgtggaagattctcactatcattatgataatgagggtcatgatggtgagaatgttatattggcacttcgaaatggtacagcagcagtgaatgctgttgctaagatgaaggaaagaggttacaccaatcgccgtagatcccgccaccgtctgactcctggaactgtgaaatttgccgctttccatgtgctctcgcttgaaggaagtaatggtctcacaatattggatgtagcagaaaaaattcagaaatctggattgagagacctcacaacaagcaagacacctgaggcatccatagctgctgctttgtctagggatgcaaaactttttgagagaactgctccttcaacatattgtttgaagtcgccttatagaaaagatccagctgattctgaggccgtgttgtcagcagcgcgtgaaaaaattagggcctttcagaatgtgctttctgactctgaagctgaaaaggaggcagatgaagctgagagggatgatgattctgactgtgatgatgctgatgatgaccctgatggtgatgatgtgaatattgaggtggaagaagacaaggatcctcttcttgccgtcaaggcacaagacgaagtaccgagtacaactacagttattggcataaagaccaagttagatagtgtaggtaatgcattgaactcatcaagtagttttactaaatcagcaaaaggtgctcctctcccttatttaggcaggtccagtgcagcagatacttctaatgattcacctcttggaggcccatcagctaatcatgaagtaacccctggcgattctgaaaatactcaaattgatgaaagcaatcaaattgagccttgggtatgtgcactagcagaaggagactactgcgatcttagtgttgaagaacgccttaacgcactggttgctcttgttggtgttgccactgaagggaactctattcgtggtgtacttgaggaacgtttggaattagcaaatgccttaaagaagcaaatgtgggcagaagtgcaacttgacaagaggcgtttcaaggaagaatttgctagcagagtacaatataactctggcatgagttttaagcctgatatatatcaagaaaacaacatgacagagattacttcaactcgagcctgtgatgcttacaaagaaaacgatggacatgttgggacaatcaacaattgtgagatgcttgatcagcatagtcagggtaatgctggtggtataacttatgatagaaatgtcgtaggccaggaaatccatgcaaccccagatacttcgtatgttcagcagtatgcttatgctgataaaacacgatctcagttgaaatcgtacattggtcaccgggcagagcagctctatgtttacagatccctgcccctaggtcaggatcggaggcgaaacaggtattggcagtttacaacttcagcatcaccaaatgaccctggctcaggaagaatcttttttgaatcggaagatggatgttggagagttatcgactcagaggattcctttgattctttagtggctgcccttgatacacgtggcacccgggaagcacagctgcgttcaatgttgcaaatgatcgagacaacctttaaggaagctattaaaaggagaagtgcaagtatagaattatctgctacagtgtatccaaagaatggagctactgacatgataagggcaaattatcatagagaggttggaagctcaagcagtactccttttaatgatacatctgatagtgtaacagcatattctgattcttttaaagtagagcttgggcgtaatgattttgagaaggcagctatatcaaaaagggcagatatatttttaaaatggatgtggagggaatgctacaatcaggaagagacatgtgccatgagatacggcaagaaaagatgctctgaattgttgcattcttgtaattgctgctatcagatttacctagccgaagaaagacactgttcttcttgccataagactttcaaatccatttacaatttttctgatcatacaacacaatgcgaagagaaatggagaactgacccttactggaagatgcaaatcgctgattattctgttccaataggaatggtattactcaagcttcagttagttttgattgaggcatatataccatcagaagcacttcaaccattttggactgatgtgtatcggaaatcttggagtgtgaagctttatgctaccaaatctattgctgagacattccagcttttgactgttctggaaggtgcaataataccagatcgcctctcttctgattttgaaacaacaagcgaatgtctaaactcacaggttatcgcaccccaaaatcctgtgttaccagctggatttgcttctgtccttccatgggttcctgacactacttctgctgttatgctccgagtgttagaccttgactcagctattttgtatgtgcaaaatcaaaagatggagagggatgatggaggttttatggtccacgacgcttccatctatgattgttgagtttgtgatccaaattctgaagaaggcgaccaagttggcgagcgaagcggaggcccgtcgccaggaggcttgggtcggatcgttccctactcaccttagggttttgcctctataatacacttgtaatccacaggaaatcgtcacctcattgtaaatcttctgcaatctataaccacccaaaaataatgatattgttgatggccgacgtccatggtttttccccttcgctttggaggggtttttcacgttaaatctatgtcttctctgtgtttaatctactttgtgtcgtattgattcataacagcgactgctgctccaagaccaaggtcgagctcacacttcgaccacaacgacaccatgaacgtcgttgttgcttgtagtcacctatagggggtaaataggtgacgctagaaattcacaacttaaaacaagacttgatccaaattggaggttagcacaaaaataattcaaggcaaagtgagagggaagagaagttctttcacttaattgctctttagatgcagaattataacttggagcaatactgcaagtataatcaagaacttagagtaagggagaaaaatattttttttggaaagaagcaaaaaagcacacaagacacaataattcttaccgtagttcagccaagcaccaaaatcttgcctatatccacgttgtggtgtccaaacgatgagggttgccaccaatccttctcaagtgatctagtgatcaacttgaggccatggttcttatattttctcctcgcaaggatctccacatatcatagtctctatcagccgtacatagttgatgggacttacaactccaaataacaacaagagagag

SEQ ID NO: 74070 - DNA, 4265 bp, Zea Mays
cattattaccaaaggaacagacatgtgacaatatgatagcttgttttggttttacatggcatggtaagtcaatttcctcctgcaacagtgaaaatgaagttgccattttctataaagccttggactggatctgaggataacattggaaagcttttgatggtgtggaaattcttaattactttcactgatgttctgggtctttgtccagttacacttgatgagtttgttcagtctcttcatgattatgattcaaggcttttgggagaactgcatgttgctctgttgaaatccattatcaaggatattgaggatgttgctagaactccatcaattgcactaggggtgaatccaggaggtggtcatccacaaattgttgaaggggcatattcctggggattcgatatacgtagctggcaacgtcatcttaatcttcttacatggcctgagatattaagacagtttgctttatctgctggttctggaccccaattaaagaaaaggactgtggaagattctcactatcattatgataatgagggtcatgatggtgagaatgttatattggcacttcgaaatggtacagcagcagtgaatgctgttgctaagatgaaggaaagaggttacaccaatcgccgtagatcccgccaccgtctgactcctggaactgtgaaatttgccgctttccatgtgctctcgcttgaaggaagtaatggtctcacaatattggatgtagcagaaaaaattcagaaatctggattgagagacctcacaacaagcaagacacctgaggcatccatagctgctgctttgtctagggatgcaaaactttttgagagaactgctccttcaacatattgtttgaagtcgccttatagaaaagatccagctgattctgaggccgtgttgtcagcagcgcgtgaaaaaattagggcctttcagaatgtgctttctgactctgaagctgaaaaggaggcagatgaagctgagagggatgatgattctgactgtgatgatgctgatgatgaccctgatggtgatgatgtgaatattgaggtggaagaagacaaggatcctcttcttgccgtcaaggcacaagacgaagtaccgagtacaactacagttattggcataaagaccaagttagatagtgtaggtaatgcattgaactcatcaagtagttttactaaatcagcaaaaggtgctcctctcccttatttaggcaggtccagtgcagcagatacttctaatgattcacctcttggaggcccatcagctaatcatgaagtaacccctggcgattctgaaaatactcaaattgatgaaagcaatcaaattgagccttgggtatgtgcactagcagaaggagactactgcgatcttagtgttgaagaacgccttaacgcactggttgctcttgttggtgttgccactgaagggaactctattcgtggtgtacttgaggaacgtttggaattagcaaatgccttaaagaagcaaatgtgggcagaagtgcaacttgacaagaggcgtttcaaggaagaatttgctagcagagtacaatataactctggcatgagttttaagcctgatatatatcaagaaaacaacatgacagagattacttcaactcgagcctgtgatgcttacaaagaaaacgatggacatgttgggacaatcaacaattgtgagatgcttgatcagcatagtcagggtaatgctggtggtataacttatgatagaaatgtcgtaggccaggaaatccatgcaaccccagatacttcgtatgttcagcagtatgcttatgctgataaaacacgatctcagttgaaatcgtacattggtcaccgggcagagcagctctatgtttacagatccctgcccctaggtcaggatcggaggcgaaacaggtattggcagtttacaacttcagcatcaccaaatgaccctggctcaggaagaatcttttttgaatcggaagatggatgttggagagttatcgactcagaggattcctttgattctttagtggctgcccttgatacacgtggcacccgggaagcacagctgcgttcaatgttgcaaatgatcgagacaacctttaaggaagctattaaaaggagaagtgcaagtatagaattatctgctacagtgtatccaaagaatggagctactgacatgataagggcaaattatcatagagaggttggaagctcaagcagtactccttttaatgatacatctgatagtgtaacagcatattctgattcttttaaagtagagcttgggcgtaatgattttgagaaggcagctatatcaaaaagggcagatatatttttaaaatggatgtggagggaatgctacaatcaggaagagacatgtgccatgagatacggcaagaaaagatgctctgaattgttgcattcttgtaattgctgctatcagatttacctagccgaagaaagacactgttcttcttgccataagactttcaaatccatttacaatttttctgatcatacaacacaatgcgaagagaaatggagaactgacccttactggaagatgcaaatcgctgattattctgttccaataggaatggtattactcaagcttcagttagttttgattgaggcatatataccatcagaagcacttcaaccattttggactgatgtgtatcggaaatcttggagtgtgaagctttatgctaccaaatctattgctgagacattccagcttttgactgttctggaaggtgcaataataccagatcgcctctcttctgattttgaaacaacaagcgaatgtctaaactcacaggttatcgcaccccaaaatcctgtgttaccagctggatttgcttctgtccttccatgggttcctgacactacttctgctgttatgctccgagtgttagaccttgactcagctattttgtatgtgcaaaatcaaaagatggagagggatgatggaggttttatgaaatttccatcaaggtatacagttgttaagagcaaacaagaaacaattccactcgaaccaactggtatggatttgtatgatggaaggtggcttcctggtagtggccgtaggggacgtggccgtggaagtagaggaggtagcaggggaggcaggggccgaagtcgaggtggaaggatcccaagaggtgttagcagctcatcaaggatcgagttcaaggatggcattgctgcttctggtagagcgccaaggaagaatgcacgtcgaggtcgaggtcgaggtcgaggtcgtgggcgtcgaactgtcagacctcggcagccatctgtgggcagaggcagatcaattccaaaggaaaatttgatgggaagctttagcatgcttaccagctcaaaggctgccgacattgaggagtctccacgaagctctggcgcagatgagtggggcttggagaccagaatgacatacactgagcgtgacgagaacagttctggatcacgctatgaagataacgaggaaaacggccagcccatggacgaggattatgaagagcaggttccagattactcaatagactattctagtgggtcgaggcaccatgaaatgatgtccatgatggatcacgagactgacgaggaagatgaagatgctgaaggtgatgagaatgtggaagaagatgatgcagaccacgcagttgacgatgccgatgttgagatggacgaaggtgatgatgaaattggtgatgacggagaggatggcggcgttggcggggagatgactccggatgaggatccagatgctacttcatattcatctgactacagcgaataagaaagcagaaataagtgaccttatcctagagatcctccctcagcgtccctttgtgaaccaaaaggaaaagctaaggagcgatagatgtgcatactgtttttttaggcaccgcaggttctaatagatttcctgacgtatgcctactcattcgatgagtggttgtatcttgctaggtatgtgcatgtcactgtagaattccccgagctatacagtgtctaaggagagatgatatcatatcgcaatttgctaatttggttcccatgcgtcatcccgatcctaatctgatccttaaatagagcccattgtccccttaagtagaagtgatcttttatcatgagttttaccatctcttaaaagtaaatatgaaattggagtctgctttctaaccgagaacatggcaggcgcatcgtaggcatcctcgttggcgttgagcatcgtgtagagataacaactttcac

SEQ ID NO: 74071 - DNA, 2404 bp, Zea Mays
taaacttcggagttcagacttcagagcacagttcagacttcttcacagttcagacttcctaaccactctagagaacatcagacttcttcagagttcacggttcataatctgttctgaactctagaccgagatgagcacctcttcagacgtcctttgattctttagtggctgcccttgatacacgtggcacccgggaagcacagctgcgttcaatgttgcaaatgatcgagacaacctttaaggaagctattaaaaggagaagtgcaagtatagaattatctgctacagtgtatccaaagaatggagctactgacatgataagggcaaattatcatagagaggttggaagctcaagcagtactccttttaatgatacatctgatagtgtaacagcatattctgattcttttaaagtagagcttgggcgtaatgattttgagaaggcagctatatcaaaaagggcagatatatttttaaaatggatgtggagggaatgctacaatcaggaagagacatgtgccatgagatacggcaagaaaagatgctctgaattgttgcattcttgtaattgctgctatcagatttacctagccgaagaaagacactgttcttcttgccataagactttcaaatccatttacaatttttctgatcatacaacacaatgcgaagagaaatggagaactgacccttactggaagatgcaaatcgctgattattctgttccaataggaatggtattactcaagcttcagttagttttgattgaggcatatataccatcagaagcacttcaaccattttggactgatgtgtatcggaaatcttggagtgtgaagctttatgctaccaaatctattgctgagacattccagcttttgactgttctggaaggtgcaataataccagatcgcctctcttctgattttgaaacaacaagcgaatgtctaaactcacaggttatcgcaccccaaaatcctgtgttaccagctggatttgcttctgtccttccatgggttcctgacactacttctgctgttatgctccgagtgttagaccttgactcagctattttgtatgtgcaaaatcaaaagatggagagggatgatggaggttttatgaaatttccatcaaggtatacagttgttaagagcaaacaagaaacaattccactcgaaccaactggtatggatttgtatgatggaaggtggcttcctggtagtggccgtaggggacgtggccgtggaagtagaggaggtagcaggggaggcaggggccgaagtcgaggtggaaggatcccaagaggtgttagcagctcatcaaggatcgagttcaaggatggcattgctgcttctggtagagcgccaaggaagaatgcacgtcgaggtcgaggtcgaggtcgaggtcgtgggcgtcgaactgtcagacctcggcagccatctgtgggcagaggcagatcaattccaaaggaaaatttgatgggaagctttagcatgcttaccagctcaaaggctgccgacattgaggagtctccacgaagctctggcgcagatgagtggggcttggagaccagaatgacatacactgagcgtgacgagaacagttctggatcacgctatgaagataacgaggaaaacggccagcccatggacgaggattatgaagagcaggttccagattactcaatagactattctagtgggtcgaggcaccatgaaatgatgtccatgatggatcacgagactgacgaggaagatgaagatgctgaaggtgatgagaatgtggaagaagatgatgcagaccacgcagttgacgatgccgatgttgagatggacgaaggtgatgatgaaattggtgatgacggagaggatggcggcgttggcggggagatgactccggatgaggatccagatgctacttcatattcatctgactacagcgaataagaaagcagaaataagtgaccttatcctagagatcctccctcagcgtccctttgtgaaccaaaaggaaaagctaaggagcgatagatgtgcatactgtttttttaggcaccgcaggttctaatagatttcctgacgtatgcctactcattcgatgagtggttgtatcttgctaggtatgtgcatgtcactgtagaattccccgagctatacagtgtctaaggagagatgatatcatatcgcaatttgctaatttggttcccatgcgtcatcccgatcctaatctgatccttaaatagagcccattgtccccttaagtagaagtgatcttttatcatgagttttaccatctcttaaaagtaaatatgaaattggagtctgctttctaaccgagaacatggcaggcgcatcgtaggcatcctcgttggcgttgagcatcgtgtagagataacaactttcac

SEQ ID NO: 74072 - DNA, 1956 bp, Zea Mays
aaaatgatattttatagtggttgtggggtatagggggagtatttagggggaaccgctgcgggagatgaaaaaatagggggaaaaataggggggaaaagtgatataggggaaaaaatttagtagtaacggttgcggatagcctcacccgcttcctcccctttcggccctctctctcgctctaggcccctacccataagaaacttcgtcacggtctactctttctccgtcctagcaaaatcctccccgtactgagagccaaagaaacaacaaaggcaggaggccggcgaactacgcgaggaaaatttcgtttcccgggaggaagtcgggagtcgagacacgcgcgggtcaaaatcgcctccgtcgctgctgttgctgtcggaggcgagcaggaaggggaaagaacgagcttggagccttggacagctcaagaagaggggacggggaggcggcagcctgtgagaaggcacgtgacacgtgaaggagcccaagcgagggtagggaggaaccgaatcgagacatggactcggagcactggatctcgcgcctggccgccgccaagcgttactacgcggcgcagctcggccacgtcgacgatgtgcccgggatagggacggaggaggtggagatggagattgaggacgacgggggcttggagatggagatggagatggcgctggggctcggggacgcgacgtggccggatgtcgcctgcccctactgctacgaggaccatgacgtcgcgtccctctgcgtccacctcgaggaggaccacccctatgagccccactccgcgccctgccccatttgctcccaaagggttacaagagatatgcttaaccatatgaccatgcagcatggttacctgttcaagaacggtcacaggtctcgcagatacattattcccgagagccatgcaatttctgcattgagccgagatctacggggtactcatttacgggctcttctagggggtggtcatggccacagatcaagcaatgcagtgactacaaacatttccagcgatcctcttctttcgtcgtttggcctgggcttctcaccatcagatgcaccagaaccatcaaaatcggcgtcttctattccagatggcgcctcaatacgtaaggagacaccggttcagccttgggagtcgagtattgattcatctctcacaagcgaggaaagggagcaaaagcggaaacaggccaccggcagagcaacctttgtgcaaggcctagtgctctccactctatttggagactgattgttcgaaacagctctaggttcttgcacatgctagttcggcgcttactcctgcctggtccgcatagtcagatagtgctccgcccggtttggtgcatctaactctgatggcggggaaagttcgcctcaggaaacttagccgcgttcttctttgtttcagaaaactcacatgattcaaagtgtcttggactaaggcaccgaaggcaccgaggaaaaacacctcaaaagaagacaatagaagattcatataagacttttaagtattcagcacaagtccaaaacacacttgaagagtccaagcgagaaagattgaagaaaatgaagagggctgcttctgggtgcacccgaccagtttgccagagagcacttttcaggcactcgaccagttgacgcgccggaccttggccaaccagtggcgaagctagagtaaaatagaggagggtgtatggtaataaccggtagagggtacatatatggtaaaaatctggtatgaatcactaattttgtaaaatttcgtgggtgcatatgcacccccctaccttctacctagcttcgcccttgtggccaacagtcggcaacggctagctctaacgatcatctggtcaccgcaccgagccggtggtgcaccaaacctcgtggacggtaaagcatgccaacggcagaaaagtctacttttctccaacgactactttggag

SEQ ID NO: 74073 - DNA, 3221 bp, Zea Mays
aaaatgatattttatagtggttgtggggtatagggggagtatttagggggaaccgctgcgggagatgaaaaaatagggggaaaaataggggggaaaagtgatataggggaaaaaatttagtagtaacggttgcggatagcctcacccgcttcctcccctttcggccctctctctcgctctaggcccctacccataagaaacttcgtcacggtctactctttctccgtcctagcaaaatcctccccgtactgagagccaaagaaacaacaaaggcaggaggccggcgaactacgcgaggaaaatttcgtttcccgggaggaagtcgggagtcgagacacgcgcgggtcaaaatcgcctccgtcgctgctgttgctgtcggaggcgagcaggaaggggaaagaacgagcttggagccttggacagctcaagaagaggggacggggaggcggcagcctgtgagaaggcacgtgacacgtgaaggagcccaagcgagggtagggaggaaccgaatcgagacatggactcggagcactggatctcgcgcctggccgccgccaagcgttactacgcggcgcagctcggccacgtcgacgatgtgcccgggatagggacggaggaggtggagatggagattgaggacgacgggggcttggagatggagatggagatggcgctggggctcggggacgcgacgtggccggatgtcgcctgcccctactgctacgaggaccatgacgtcgcgtccctctgcgtccacctcgaggaggaccacccctatgagccccactccgcgccctgccccatttgctcccaaagggttacaagagatatgcttaaccatatgaccatgcagcatggttacctgttcaagaacggtcacaggtctcgcagatacattattcccgagagccatgcaatttctgcattgagccgagatctacggggtactcatttacgggctcttctagggggtggtcatggccacagatcaagcaatgcagtgactacaaacatttccagcgatcctcttctttcgtcgtttggcctgggcttctcaccatcagatgcaccagaaccatcaaaatcggcgtcttctattccagatggcgcctcaatacgtaaggagacaccggttcagccttgggagtcgaggtatatataactcctggtataaatttgctagattcttttatgggcgacaagtgttctctataaatttgaagctattttattaatcgcttgcatgtctgctcaaaacattcctcattatgattcatgaacctattgcgccttctgttctcctttgcactatccaattaccatgttgtttcctgaggtttggaattgcgctacgatagcccactcttccacaaccgacaaactattctctttcaatggaaatagtcttagccttgaattgaactaattgagctagcggttcttaatatttccagcacctctgcattaaaaccaagttacaagaagcgtacactgacagataatcccctttgctgttaaaaggggtttcacttcctagatgtttgtgtttttttttaacttctcatctacgtttgctgtcaagcaatgtgctttagtgcttgcaagtttcaagggtctgcttcgttacgtatgagatacaggaacttcaacttgtgtttcttttcgatggcagtattgattcatctctcacaagcgaggaaagggagcaaaagcggaaacaggccaccggcagagcaacctttgtgcaaggcctagtgctctccactctatttggagactgattgttcgaaacagctctaggttcttgcacatgctagttcggcgcttactcctgcctggtccgcatagtcagatagtgctccgcccggtttggtgcatctaactctgatggcggggaaagttcgcctcaggaaacttagccgcgttcttctttgtttcagaaaagtgcgcagttgattctatcgtgatatagcttgatttaagctagctgttgtaccgttgtttttaccaatttaccagccagtaattcttatctgttagctcactggcagatcgtgtttgcaccaacatacataataacctgtaacatgtacttacacaaagcaagaaaggcgcttgttcgagcgcacattcttcttgttgtaagaccagttaagtattctcaggtatgcataatggagacgaatggtgcggttggactgaggttgtaacttgacctgtgtggaagttcatgttgacggacttcggctgtcgtcgtcgaagtagcactctggacagtaccttaggtacagaattagcattcccttcacagcaaaagagtagggaagaaaccacggcatacattgcacccaagatgaagttttgtacagcctttactacaaaatctgtagtaacgaatacgggactgaatggacacatctgcattagattgagtgactatcatctctaccatgaaaaatcttacatcaagttaagaagaatcggtgaaaaatagattgcatgtagagggaagagctagcatccatctactctacgccgtaaatcttgcataaagctgcagaacaatgttgatgttaggcatccattttctaatgaaaatagatctgatccatttgactaaatgattttgttgtttgatgatcaacataacatgtgtactaatggttttgcaagtgtttgtgttctgtagctcacatgattcaaagtgtcttggactaaggcaccgaaggcaccgaggaaaaacacctcaaaagaagacaatagaagattcatataagacttttaagtattcagcacaagtccaaaacacacttgaagagtccaagcgagaaagattgaagaaaatgaagagggctgcttctgggtgcacccgaccagtttgccagagagcacttttcaggcactcgaccagttgacgcgccggaccttggccaaccagtggcgaagctagagtaaaatagaggagggtgtatggtaataaccggtagagggtacatatatggtaaaaatctggtatgaatcactaattttgtaaaatttcgtgggtgcatatgcacccccctaccttctacctagcttcgcccttgtggccaacagtcggcaacggctagctctaacgatcatctggtcaccgcaccgagccggtggtgcaccaaacctcgtggacggtaaagcatgccaacggcagaaaagtctacttttctccaacgactactttggag

SEQ ID NO: 74074 - DNA, 1684 bp, Zea Mays
aaaatgatattttatagtggttgtggggtatagggggagtatttagggggaaccgctgcgggagatgaaaaaatagggggaaaaataggggggaaaagtgatataggggaaaaaatttagtagtaacggttgcggatagcctcacccgcttcctcccctttcggccctctctctcgctctaggcccctacccataagaaacttcgtcacggtctactctttctccgtcctagcaaaatcctccccgtactgagagccaaagaaacaacaaaggcaggaggccggcgaactacgcgaggaaaatttcgtttcccgggaggaagtcgggagtcgagacacgcgcgggtcaaaatcgcctccgtcgctgctgttgctgtcggaggcgagcaggaaggggaaagaacgagcttggagccttggacagctcaagaagaggggacggggaggcggcagcctgtgagaaggcacgtgacacgtgaaggagcccaagcgagggtagggaggaaccgaatcgagacatggactcggagcactggatctcgcgcctggccgccgccaagcgttactacgcggcgcagctcggccacgtcgacgatgtgcccgggatagggacggaggaggtggagatggagattgaggacgacgggggcttggagatggagatggagatggcgctggggctcggggacgcgacgtggccggatgtcgcctgcccctactgctacgaggaccatgacgtcgcgtccctctgcgtccacctcgaggaggaccacccctatgagccccactccgcgccctgccccatttgctcccaaagggttacaagagatatgcttaaccatatgaccatgcagcatggttacctgttcaagaacggtcacaggtctcgcagatacattattcccgagagccatgcaatttctgcattgagccgagatctacggggtactcatttacgggctcttctagggggtggtcatggccacagatcaagcaatgcagtgactacaaacatttccagcgatcctcttctttcgtcgtttggcctgggcttctcaccatcagatgcaccagaaccatcaaaatcggcgtcttctattccagatggcgcctcaatacgtaaggagacaccggttcagccttgggagtcgagctcacatgattcaaagtgtcttggactaaggcaccgaaggcaccgaggaaaaacacctcaaaagaagacaatagaagattcatataagacttttaagtattcagcacaagtccaaaacacacttgaagagtccaagcgagaaagattgaagaaaatgaagagggctgcttctgggtgcacccgaccagtttgccagagagcacttttcaggcactcgaccagttgacgcgccggaccttggccaaccagtggcgaagctagagtaaaatagaggagggtgtatggtaataaccggtagagggtacatatatggtaaaaatctggtatgaatcactaattttgtaaaatttcgtgggtgcatatgcacccccctaccttctacctagcttcgcccttgtggccaacagtcggcaacggctagctctaacgatcatctggtcaccgcaccgagccggtggtgcaccaaacctcgtggacggtaaagcatgccaacggcagaaaagtctacttttctccaacgactactttggag

SEQ ID NO: 74075 - DNA, 2297 bp, Zea Mays
aaaatgatattttatagtggttgtggggtatagggggagtatttagggggaaccgctgcgggagatgaaaaaatagggggaaaaataggggggaaaagtgatataggggaaaaaatttagtagtaacggttgcggatagcctcacccgcttcctcccctttcggccctctctctcgctctaggcccctacccataagaaacttcgtcacggtctactctttctccgtcctagcaaaatcctccccgtactgagagccaaagaaacaacaaaggcaggaggccggcgaactacgcgaggaaaatttcgtttcccgggaggaagtcgggagtcgagacacgcgcgggtcaaaatcgcctccgtcgctgctgttgctgtcggaggcgagcaggaaggggaaagaacgagcttggagccttggacagctcaagaagaggggacggggaggcggcagcctgtgagaaggcacgtgacacgtgaaggagcccaagcgagggtagggaggaaccgaatcgagacatggactcggagcactggatctcgcgcctggccgccgccaagcgttactacgcggcgcagctcggccacgtcgacgatgtgcccgggatagggacggaggaggtggagatggagattgaggacgacgggggcttggagatggagatggagatggcgctggggctcggggacgcgacgtggccggatgtcgcctgcccctactgctacgaggaccatgacgtcgcgtccctctgcgtccacctcgaggaggaccacccctatgagccccactccgcgccctgccccatttgctcccaaagggttacaagagatatgcttaaccatatgaccatgcagcatggttacctgttcaagaacggtcacaggtctcgcagatacattattcccgagagccatgcaatttctgcattgagccgagatctacggggtactcatttacgggctcttctagggggtggtcatggccacagatcaagcaatgcagtgactacaaacatttccagcgatcctcttctttcgtcgtttggcctgggcttctcaccatcagatgcaccagaaccatcaaaatcggcgtcttctattccagatggcgcctcaatacgtaaggagacaccggttcagccttgggagtcgagtattgattcatctctcacaagcgaggaaagggagcaaaagcggaaacaggccaccggcagagcaacctttgtgcaaggcctagtgctctccactctatttggagactgattgttcgaaacagctctaggttcttgcacatgctagttcggcgcttactcctgcctggtccgcatagtcagatagtgctccgcccggtttggtgcatctaactctgatggcggggaaagttcgcctcaggaaacttagccgcgttcttctttgtttcagaaaagtgcgcagttgattctatcgtgatatagcttgatttaagctagctgttgtaccgttgtttttaccaatttaccagccagtaattcttatctgttagctcactggcagatcgtgtttgcaccaacatacataataacctgtaacatgtacttacacaaagcaagaaaggcgcttgttcgagcgcacattcttcttgttgtaagaccagttaagtattctcaggtatgcataatggagacgaatggtgcggttggactgaggttgtaacttgacctgtgtggaagttcatgttgacggacttcggctgtcgtcgtcgaagtagcactctggacagtaccttagctcacatgattcaaagtgtcttggactaaggcaccgaaggcaccgaggaaaaacacctcaaaagaagacaatagaagattcatataagacttttaagtattcagcacaagtccaaaacacacttgaagagtccaagcgagaaagattgaagaaaatgaagagggctgcttctgggtgcacccgaccagtttgccagagagcacttttcaggcactcgaccagttgacgcgccggaccttggccaaccagtggcgaagctagagtaaaatagaggagggtgtatggtaataaccggtagagggtacatatatggtaaaaatctggtatgaatcactaattttgtaaaatttcgtgggtgcatatgcacccccctaccttctacctagcttcgcccttgtggccaacagtcggcaacggctagctctaacgatcatctggtcaccgcaccgagccggtggtgcaccaaacctcgtggacggtaaagcatgccaacggcagaaaagtctacttttctccaacgactactttggag

SEQ ID NO: 74076 - DNA, 1621 bp, Zea Mays
atgcttgccagcgcgacgagagcagggacgtcgtcgacgaccaagcccgaccacgcggcgggcgccgtccacggagccggagccggagccggcggcacccccatcgtcgtcaccgacggcgggcaggaggtcaccgtctctcagttcgtcgcgcagctaggtttcagctgtgttttgacagatgaggcggcgcggcggaggctggacagcatccaccagaggttgaggctgctggagcagcagatggagacgctggaggccgagtagcattagcagatgaagaggcggaatattcttcttgggatagtgacgacgagtaccagaaattcatccaaaacatcaatcgattcctgacttaacctccaagattgcgaggcttgggctgagaagttaatttagctgctctttttttacgtgatggcccggttcagagacagtaatggaggaggcctcgctcgggacgatggcggagccactgctggtgagagcaatcagagggaaaaaggtcgagagggcaccaatctggctcctgaggcaagccgggaggtacatgaagatggcaaggacacagaagaacaaagccactgctcaccatcttggtcttctgaaggtatgaagaagttctccaactggcccactgttcctcaactctactgcaaaggcgagcttcttggtggatgtgatattgttattgctatgcatgacagtggtgaattgaaggatgtttttgaggagcacaatattcccctcaaaccacagggtagcaaaaatgaagaagcaggtcagcccgagtctgcaactgagaagggtggtgcagttgctgaaccaatcgggcttactgatgctcagaaagctcgtttggaaagccttattaattccagcccagtgatggtattcatcaaaggtacaccagaggaaccaaggtgtgggttcagtgggaagttggtccacatacttaagcaagagaatattcctttctcaagttttgacatcctttcagatgatgaggttagacaggggctgaaagtgctctcaaactggcccagttaccctcaactgtacataaaaggtgagctggttggcggctcagacatagtgatggagatgcacaagagtggtgagctgaagaaggttctgtctgagaaaggggttattccaaaggaaagcctggaggacagattgaagtccctggtttcctctgcaccggtgatgcttttaatgaagggcactccagatgctcctcgttgcggcttcagttcgaaggttgtgaacgccttgaagaaggaaggggttagctttgggtccttcgacatcttatctgacgaggaagttaggcaaggtttgaagacgtactccaactggcctaccttcccccagctctactacaaatcggagctgattgggggatgtgatatcgttcttgagatggagaagagcggagacctgaagtcgaccctgtcagagtagacacctagctagcattcttgcttcgctggcatttttaccatattgcctgcattggatcactctactctggtattcgtagatccacgttggtacttgtctgcagtaccacattgctagaattgtgacacatctgcagaaggaataactcacgctt

SEQ ID NO: 74077 - DNA, 3733 bp, Zea Mays
gttccttctctgcatctcgggacttctttcgctgctctctctctctccgagcacagctgggggtggtgttcacggtaggcagcagcgcactgcgcacgggcgcagtggtgaggcgcctaagggagagtggcagtagtgacgcctggcgccggtgcaggagtgcaagggagacggtggcggcagcggctcgtgtcgacggccggagcccggaggcagcggggcggcggaggcgtcagtgtacgcgggcggggcggaggaggcactgaagcagctcgcggcggcgggcttgagccagcgttgcggcactctcgggccggtggcttcgggagttgggaggcactggcctgtgcaagaagggcttccgagaagaaacggtagaagagaagttggggatacgaatgttttttatcgagtccttgtttatccgaatccacagggattcaaagttcaaacggggtccaaaccttcccgacttccagtacagtcttcctcagacgaggccgcaagacaggaggagacaacgccgaggcagccagctagggcgcggtcaaccgcagtaagccaataagcaatgcagtagtgggcgcagctccggaggagtggaatgacggcgccaccgaatgctagcatgggaccgctcagtttgggtggctgcggggctctcctctccactcctcagcctaattcgtggcattgccgcgggttctcgattcctgagaggagcgtctttatgttgccactgcgccggggtttgtcaaggaagaggggctgggttcttgattcaagaagtaacggtgctgtggctcgtgatgaggtcggtgccgggtcgtcagagcttcggcacatcgagaaggagctgacgttcagcccgactttcactgactatgttaaaatcatggagtcggtgaagttggacaggagcaagaatttacatggcgccgatggccagagtttgaggagaaggttcgcgggtgatggccgacaaaggaataggaggtctggtgatgcaaggaataaatcatttgaaaggaatcaggggcctcagagggacttggcgaaggatgagaatcagaaggatgttacaggctttgtggataaaagagcaactggtcatgtaaaaagtagcaatcgcaggcaaggggaggttgaagactatgcacagagaagaataattcgtggtggtacaagaggaaatggagacaatgggcagttctcatcacctgtgaaggctaaagatactaggggtagtatgtctgttcataggttggtgacgaacaaacagactcagtcagttgcagggaacgatttacaagggcgagcaacttatactccatctcggacttctgcccttccaaatagcagtattccatcaaagaatgctaaggttcaaatgagaaaatacgactatactatgacaagtagcagaatagacttaaaatatcctagagagacatttcccaatactgaggtcaacgctgacagtaatgttcaaagaaatcagcaaagagtggagaccttagggagaaactttgtagtacgtaggtttggggagattggcaccgactctaagaagtctaccgtaagcaaaatttatgggagtacacaggcaatgcctgagcatgatagccattcaagtgataatttggagagtgatgaacgtaggacagttcaattgcatagaggagcaaatgttaaaatggggaaatttgttagtagggatgctgaaactacagattttgatgatagagctgctttcaaaacttttgaggtatttactgatgtcaggaataggccacggatccttcgaatggaaatggaagagagaatccagaagttagctagtcgatgtaaatactccagagtggaaattctccaaaatgattcatgatgcaaaaattaaattctctgatcattctatcctaaggattgttcaaatgttgggtcgatatggaaattggaaatgtgttttgcaagtggttgaatggctccagtcacatgaaaggttcaaatcctacaagagcaggtatatttacacaacagttctcgatgttctagggaaggcaaagagaccattcgaggcgttgaatgtattttataccatgcagaaccaattgtcatcttatcctgacatggcagcttatcattgtattgctgttactcttgggcaagctggtcttataaaagaattatttgatgtgattgattgcatgtgttctcctcctaggaagaagttcaaattgagccctcttcagaattgggatcctcgcttggaaccagaccttattgtatacaatgcagttttgaatgcttgtgtgcaacaaaagcaatgggaaggggcattttgggtactgcaacagttgaaagagaagaacatttgtccaacaaattcaacatatggtcttgttatggaggtaatgcttgtctgtggaaagtacaatttggtttatgagttcttcaataaggtggataaatcatcaatacctggtgctctgaactataaagttcttgtaaatgcactttggagagaaggaaagattgatgaagcagtgatggctgtgaaggatatggaaagtcgtggaattgttggttctgctagtctgtattatgacctagctcgatgcctttgcagtggtggacggtgcaaagaagcacttctccaggttgaaaagatatgcaaggttgccaacaaaccgctggttgttacctacacaggactcattcagacttgcatagacaatggtggcatggaagatgctaaatacatattcaaccacatgtgcaactactgttcacctaattctgttacttgcaacatcatgatgaagtcatatattaaacatggaatgcttgaagacgcgaaagacctgctccatgatattctgaattgcaggataaggagtaaagcggattctaatcaagtggcaaccgctgacaagtttactttcaatactttcatggaggcctgtgctgcagcaaaaaggtggaatgacttcgagtatgcgtttcgtgagatgttattgaatgggtaccatttcgatgagcgaagacaccttcggatggtacttgacgcttttaggcatgggaaggaacagctgttggatgatctatggcactacctgtgccgtcacagccgtgtcccgccctcccctgtcataatggaaagattctgcctaaaactgatgcagggagatacactggcggcgatctcctgcgtcagcagcttccatgagggcaagatatgcaacgtctcctccatgtcatggctcaatctgctgagccgcaatgcagataggctgaaggaggagcatgttaccaagttagctcatgaactcaacagcctcattagcttgaggagttcctctgatagcattagtcttagcctgtaccaaaaaattattagtagctgtacggcattcctctctggagccacagttgtagaaaaggcaccttctggccaataggtggtgttacagaaattataataaccacagttagtaaattctagtactccaaatcataattaccacgactgatggagtgtattgcattcaacgtttggttatcggtacaaagttagaaatggaaaattttcacgtaaggaattagttctttttttagtataatacaaaggctgatttgggagcataagcgataaagcttgctttgtttgattaattttatactggttactttcaaattcacaagtcataataccatgagcatcatttattga

SEQ ID NO: 74078 - DNA, 3743 bp, Zea Mays
gttccttctctgcatctcgggacttctttcgctgctctctctctctccgagcacagctgggggtggtgttcacggtaggcagcagcgcactgcgcacgggcgcagtggtgaggcgcctaagggagagtggcagtagtgacgcctggcgccggtgcaggagtgcaagggagacggtggcggcagcggctcgtgtcgacggccggagcccggaggcagcggggcggcggaggcgtcagtgtacgcgggcggggcggaggaggcactgaagcagctcgcggcggcgggcttgagccagcgttgcggcactctcgggccggtggcttcgggagttgggaggcactggcctgtgcaagaagggcttccgagaagaaacggtagaagagaagttggggatacgaatgttttttatcgagtccttgtttatccgaatccacagggattcaaagttcaaacggggtccaaaccttcccgacttccagtacagtcttcctcagacgaggccgcaagacaggaggagacaacgccgaggcagccagctagggcgcggtcaaccgcagccaataagcaatgcagtagtgggcgcagctccggaggagtggaatgacggcgccaccgaatgctagcatgggaccgctcagtttgggtggctgcggggctctcctctccactcctcagcctaattcgtggcattgccgcgggttctcgattcctgagaggagcgtctttatgttgccactgcgccggggtttgtcaaggaagaggggctgggttcttgattcaagaagtaacggtgctgtggctcgtgatgaggtcggtgccgggtcgtcagagcttcggcacatcgagaaggagctgacgttcagcccgactttcactgactatgttaaaatcatggagtcggtgaagttggacaggagcaagaatttacatggcgccgatggccagagtttgaggagaaggttcgcgggtgatggccgacaaaggaataggaggtctggtgatgcaaggaataaatcatttgaaaggaatcaggggcctcagagggacttggcgaaggatgagaatcagaaggatgttacaggctttgtggataaaagagcaactggtcatgtaaaaagtagcaatcgcaggcaaggggaggttgaagactatgcacagagaagaataattcgtggtggtacaagaggaaatggagacaatgggcagttctcatcacctgtgaaggctaaagatactaggggtagtatgtctgttcataggttggtgacgaacaaacagactcagtcagttgcagggaacgatttacaagggcgagcaacttatactccatctcggacttctgcccttccaaatagcagtattccatcaaagaatgctaaggttcaaatgagaaaatacgactatactatgacaagtagcagaatagacttaaaatatcctagagagacatttcccaatactgaggtcaacgctgacagtaatgttcaaagaaatcagcaaagagtggagaccttagggagaaactttgtagtacgtaggtttggggagattggcaccgactctaagaagtctaccgtaagcaaaatttatgggagtacacaggcaatgcctgagcatgatagccattcaagtgataatttggagagtgatgaacgtaggacagttcaattgcatagaggagcaaatgttaaaatggggaaatttgttagtagggatgctgaaactacagattttgatgatagagctgctttcaaaacttttgaggtatttactgatgtcaggaataggccacggatccttcgaatggaaatggaagagagaatccagaagttagctagtcggctcaatgctacagatgtaaatactccagagtggaaattctccaaaatgattcatgatgcaaaaattaaattctctgatcattctatcctaaggattgttcaaatgttgggtcgatatggaaattggaaatgtgttttgcaagtggttgaatggctccagtcacatgaaaggttcaaatcctacaagagcaggtatatttacacaacagttctcgatgttctagggaaggcaaagagaccattcgaggcgttgaatgtattttataccatgcagaaccaattgtcatcttatcctgacatggcagcttatcattgtattgctgttactcttgggcaagctggtcttataaaagaattatttgatgtgattgattgcatgtgttctcctcctaggaagaagttcaaattgagccctcttcagaattgggatcctcgcttggaaccagaccttattgtatacaatgcagttttgaatgcttgtgtgcaacaaaagcaatgggaaggggcattttgggtactgcaacagttgaaagagaagaacatttgtccaacaaattcaacatatggtcttgttatggaggtaatgcttgtctgtggaaagtacaatttggtttatgagttcttcaataaggtggataaatcatcaatacctggtgctctgaactataaagttcttgtaaatgcactttggagagaaggaaagattgatgaagcagtgatggctgtgaaggatatggaaagtcgtggaattgttggttctgctagtctgtattatgacctagctcgatgcctttgcagtggtggacggtgcaaagaagcacttctccaggttgaaaagatatgcaaggttgccaacaaaccgctggttgttacctacacaggactcattcagacttgcatagacaatggtggcatggaagatgctaaatacatattcaaccacatgtgcaactactgttcacctaattctgttacttgcaacatcatgatgaagtcatatattaaacatggaatgcttgaagacgcgaaagacctgctccatgatattctgaattgcaggataaggagtaaagcggattctaatcaagtggcaaccgctgacaagtttactttcaatactttcatggaggcctgtgctgcagcaaaaaggtggaatgacttcgagtatgcgtttcgtgagatgttattgaatgggtaccatttcgatgagcgaagacaccttcggatggtacttgacgcttttaggcatgggaaggaacagctgttggatgatctatggcactacctgtgccgtcacagccgtgtcccgccctcccctgtcataatggaaagattctgcctaaaactgatgcagggagatacactggcggcgatctcctgcgtcagcagcttccatgagggcaagatatgcaacgtctcctccatgtcatggctcaatctgctgagccgcaatgcagataggctgaaggaggagcatgttaccaagttagctcatgaactcaacagcctcattagcttgaggagttcctctgatagcattagtcttagcctgtaccaaaaaattattagtagctgtacggcattcctctctggagccacagttgtagaaaaggcaccttctggccaataggtggtgttacagaaattataataaccacagttagtaaattctagtactccaaatcataattaccacgactgatggagtgtattgcattcaacgtttggttatcggtacaaagttagaaatggaaaattttcacgtaaggaattagttctttttttagtataatacaaaggctgatttgggagcataagcgataaagcttgctttgtttgattaattttatactggttactttcaaattcacaagtcataataccatgagcatcatttattga

SEQ ID NO: 74079 - DNA, 3694 bp, Zea Mays
gttccttctctgcatctcgggacttctttcgctgctctctctctctccgagcacagctgggggtggtgttcacggtaggcagcagcgcactgcgcacgggcgcagtggtgaggcgcctaagggagagtggcagtagtgacgcctggcgccggtgcaggagtgcaagggagacggtggcggcagcggctcgtgtcgacggccggagcccggaggcagcggggcggcggaggcgtcagtgtacgcgggcggggcggaggaggcactgaagcagctcgcggcggcgggcttgagccagcgttgcggcactctcgggccggtggcttcgggagttgggaggcactggcctgtgcaagaagggcttccgagaagaaacgaatccacagggattcaaagttcaaacggggtccaaaccttcccgacttccagtacagtcttcctcagacgaggccgcaagacaggaggagacaacgccgaggcagccagctagggcgcggtcaaccgcagtaagccaataagcaatgcagtagtgggcgcagctccggaggagtggaatgacggcgccaccgaatgctagcatgggaccgctcagtttgggtggctgcggggctctcctctccactcctcagcctaattcgtggcattgccgcgggttctcgattcctgagaggagcgtctttatgttgccactgcgccggggtttgtcaaggaagaggggctgggttcttgattcaagaagtaacggtgctgtggctcgtgatgaggtcggtgccgggtcgtcagagcttcggcacatcgagaaggagctgacgttcagcccgactttcactgactatgttaaaatcatggagtcggtgaagttggacaggagcaagaatttacatggcgccgatggccagagtttgaggagaaggttcgcgggtgatggccgacaaaggaataggaggtctggtgatgcaaggaataaatcatttgaaaggaatcaggggcctcagagggacttggcgaaggatgagaatcagaaggatgttacaggctttgtggataaaagagcaactggtcatgtaaaaagtagcaatcgcaggcaaggggaggttgaagactatgcacagagaagaataattcgtggtggtacaagaggaaatggagacaatgggcagttctcatcacctgtgaaggctaaagatactaggggtagtatgtctgttcataggttggtgacgaacaaacagactcagtcagttgcagggaacgatttacaagggcgagcaacttatactccatctcggacttctgcccttccaaatagcagtattccatcaaagaatgctaaggttcaaatgagaaaatacgactatactatgacaagtagcagaatagacttaaaatatcctagagagacatttcccaatactgaggtcaacgctgacagtaatgttcaaagaaatcagcaaagagtggagaccttagggagaaactttgtagtacgtaggtttggggagattggcaccgactctaagaagtctaccgtaagcaaaatttatgggagtacacaggcaatgcctgagcatgatagccattcaagtgataatttggagagtgatgaacgtaggacagttcaattgcatagaggagcaaatgttaaaatggggaaatttgttagtagggatgctgaaactacagattttgatgatagagctgctttcaaaacttttgaggtatttactgatgtcaggaataggccacggatccttcgaatggaaatggaagagagaatccagaagttagctagtcggctcaatgctacagatgtaaatactccagagtggaaattctccaaaatgattcatgatgcaaaaattaaattctctgatcattctatcctaaggattgttcaaatgttgggtcgatatggaaattggaaatgtgttttgcaagtggttgaatggctccagtcacatgaaaggttcaaatcctacaagagcaggtatatttacacaacagttctcgatgttctagggaaggcaaagagaccattcgaggcgttgaatgtattttataccatgcagaaccaattgtcatcttatcctgacatggcagcttatcattgtattgctgttactcttgggcaagctggtcttataaaagaattatttgatgtgattgattgcatgtgttctcctcctaggaagaagttcaaattgagccctcttcagaattgggatcctcgcttggaaccagaccttattgtatacaatgcagttttgaatgcttgtgtgcaacaaaagcaatgggaaggggcattttgggtactgcaacagttgaaagagaagaacatttgtccaacaaattcaacatatggtcttgttatggaggtaatgcttgtctgtggaaagtacaatttggtttatgagttcttcaataaggtggataaatcatcaatacctggtgctctgaactataaagttcttgtaaatgcactttggagagaaggaaagattgatgaagcagtgatggctgtgaaggatatggaaagtcgtggaattgttggttctgctagtctgtattatgacctagctcgatgcctttgcagtggtggacggtgcaaagaagcacttctccaggttgaaaagatatgcaaggttgccaacaaaccgctggttgttacctacacaggactcattcagacttgcatagacaatggtggcatggaagatgctaaatacatattcaaccacatgtgcaactactgttcacctaattctgttacttgcaacatcatgatgaagtcatatattaaacatggaatgcttgaagacgcgaaagacctgctccatgatattctgaattgcaggataaggagtaaagcggattctaatcaagtggcaaccgctgacaagtttactttcaatactttcatggaggcctgtgctgcagcaaaaaggtggaatgacttcgagtatgcgtttcgtgagatgttattgaatgggtaccatttcgatgagcgaagacaccttcggatggtacttgacgcttttaggcatgggaaggaacagctgttggatgatctatggcactacctgtgccgtcacagccgtgtcccgccctcccctgtcataatggaaagattctgcctaaaactgatgcagggagatacactggcggcgatctcctgcgtcagcagcttccatgagggcaagatatgcaacgtctcctccatgtcatggctcaatctgctgagccgcaatgcagataggctgaaggaggagcatgttaccaagttagctcatgaactcaacagcctcattagcttgaggagttcctctgatagcattagtcttagcctgtaccaaaaaattattagtagctgtacggcattcctctctggagccacagttgtagaaaaggcaccttctggccaataggtggtgttacagaaattataataaccacagttagtaaattctagtactccaaatcataattaccacgactgatggagtgtattgcattcaacgtttggttatcggtacaaagttagaaatggaaaattttcacgtaaggaattagttctttttttagtataatacaaaggctgatttgggagcataagcgataaagcttgctttgtttgattaattttatactggttactttcaaattcacaagtcataataccatgagcatcatttattga

SEQ ID NO: 74080 - DNA, 3977 bp, Zea Mays
gttccttctctgcatctcgggacttctttcgctgctctctctctctccgagcacagctgggggtggtgttcacggtaggcagcagcgcactgcgcacgggcgcagtggtgaggcgcctaagggagagtggcagtagtgacgcctggcgccggtgcaggagtgcaagggagacggtggcggcagcggctcgtgtcgacggccggagcccggaggcagcggggcggcggaggcgtcagtgtacgcgggcggggcggaggaggcactgaagcagctcgcggcggcgggcttgagccagcgttgcggcactctcgggccggtggcttcgggagttgggaggcactggcctgtgcaagaagggcttccgagaagaaacggtagaagagaagttggggatacgaatgttttttatcgagtccttgtttatccggtaggagagggattcggagatttcaagaatctggctcttaattttttcttgtaatctctctctttatccctaccgtttggaagacatcgtgattttttaatcgcgattttcagaatccacagggattcaaagttcaaacggggtccaaaccttcccgacttccagtacagtcttcctcagacgaggccgcaagacaggaggagacaacgccgaggcagccagctagggcgcggtcaaccgcaggtacacgcgcttcttccgattggtcgagcctcagaattcccgcctgatcgttctggcctgctaagtttcttggttagaacattttctgtaataagccaataagcaagaaccttttctgcagtaagccaataagcaatgcagtagtgggcgcagctccggaggagtggaatgacggcgccaccgaatgctagcatgggaccgctcagtttgggtggctgcggggctctcctctccactcctcagcctaattcgtggcattgccgcgggttctcgattcctgagaggagcgtctttatgttgccactgcgccggggtttgtcaaggaagaggggctgggttcttgattcaagaagtaacggtgctgtggctcgtgatgaggtcggtgccgggtcgtcagagcttcggcacatcgagaaggagctgacgttcagcccgactttcactgactatgttaaaatcatggagtcggtgaagttggacaggagcaagaatttacatggcgccgatggccagagtttgaggagaaggttcgcgggtgatggccgacaaaggaataggaggtctggtgatgcaaggaataaatcatttgaaaggaatcaggggcctcagagggacttggcgaaggatgagaatcagaaggatgttacaggctttgtggataaaagagcaactggtcatgtaaaaagtagcaatcgcaggcaaggggaggttgaagactatgcacagagaagaataattcgtggtggtacaagaggaaatggagacaatgggcagttctcatcacctgtgaaggctaaagatactaggggtagtatgtctgttcataggttggtgacgaacaaacagactcagtcagttgcagggaacgatttacaagggcgagcaacttatactccatctcggacttctgcccttccaaatagcagtattccatcaaagaatgctaaggttcaaatgagaaaatacgactatactatgacaagtagcagaatagacttaaaatatcctagagagacatttcccaatactgaggtcaacgctgacagtaatgttcaaagaaatcagcaaagagtggagaccttagggagaaactttgtagtacgtaggtttggggagattggcaccgactctaagaagtctaccgtaagcaaaatttatgggagtacacaggcaatgcctgagcatgatagccattcaagtgataatttggagagtgatgaacgtaggacagttcaattgcatagaggagcaaatgttaaaatggggaaatttgttagtagggatgctgaaactacagattttgatgatagagctgctttcaaaacttttgaggtatttactgatgtcaggaataggccacggatccttcgaatggaaatggaagagagaatccagaagttagctagtcggctcaatgctacagatgtaaatactccagagtggaaattctccaaaatgattcatgatgcaaaaattaaattctctgatcattctatcctaaggattgttcaaatgttgggtcgatatggaaattggaaatgtgttttgcaagtggttgaatggctccagtcacatgaaaggttcaaatcctacaagagcaggtatatttacacaacagttctcgatgttctagggaaggcaaagagaccattcgaggcgttgaatgtattttataccataaccaattgtcatcttatcctgacatggcagcttatcattgtattgctgttactcttgggcaagctggtcttataaaagaattatttgatgtgattgattgcatgtgttctcctcctaggaagaagttcaaattgagccctcttcagaattgggatcctcgcttggaaccagaccttattgtatacaatgcagttttgaatgcttgtgtgcaacaaaagcaatgggaaggggcattttgggtactgcaacagttgaaagagaagaacatttgtccaacaaattcaacatatggtcttgttatggaggtaatgcttgtctgtggaaagtacaatttggtttatgagttcttcaataaggtggataaatcatcaatacctggtgctctgaactataaagttcttgtaaatgcactttggagagaaggaaagattgatgaagcagtgatggctgtgaaggatatggaaagtcgtggaattgttggttctgctagtctgtattatgacctagctcgatgcctttgcagtggtggacggtgcaaagaagcacttctccaggttgaaaagatatgcaaggttgccaacaaaccgctggttgttacctacacaggactcattcagacttgcatagacaatggtggcatggaagatgctaaatacatattcaaccacatgtgcaactactgttcacctaattctgttacttgcaacatcatgatgaagtcatatattaaacatggaatgcttgaagacgcgaaagacctgctccatgatattctgaattgcaggataaggagtaaagcggattctaatcaagtggcaaccgctgacaagtttactttcaatactttcatggaggcctgtgctgcagcaaaaaggtggaatgacttcgagtatgcgtttcgtgagatgttattgaatgggtaccatttcgatgagcgaagacaccttcggatggtacttgacgcttttaggcatgggaaggaacagctgttggatgatctatggcactacctgtgccgtcacagccgtgtcccgccctcccctgtcataatggaaagattctgcctaaaactgatgcagggagatacactggcggcgatctcctgcgtcagcagcttccatgagggcaagatatgcaacgtctcctccatgtcatggctcaatctgctgagccgcaatgcagataggctgaaggaggagcatgttaccaagttagctcatgaactcaacagcctcattagcttgaggagttcctctgatagcattagtcttagcctgtaccaaaaaattattagtagctgtacggcattcctctctggagccacagttgtagaaaaggcaccttctggccaataggtggtgttacagaaattataataaccacagttagtaaattctagtactccaaatcataattaccacgactgatggagtgtattgcattcaacgtttggttatcggtacaaagttagaaatggaaaattttcacgtaaggaattagttctttttttagtataatacaaaggctgatttgggagcataagcgataaagcttgctttgtttgattaattttatactggttactttcaaattcacaagtcataataccatgagcatcatttattga

SEQ ID NO: 74081 - DNA, 3862 bp, Zea Mays
gttccttctctgcatctcgggacttctttcgctgctctctctctctccgagcacagctgggggtggtgttcacggtaggcagcagcgcactgcgcacgggcgcagtggtgaggcgcctaagggagagtggcagtagtgacgcctggcgccggtgcaggagtgcaagggagacggtggcggcagcggctcgtgtcgacggccggagcccggaggcagcggggcggcggaggcgtcagtgtacgcgggcggggcggaggaggcactgaagcagctcgcggcggcgggcttgagccagcgttgcggcactctcgggccggtggcttcgggagttgggaggcactggcctgtgcaagaagggcttccgagaagaaacggtagaagagaagttggggatacgaatgttttttatcgagtccttgtttatccggtaggagagggattcggagatttcaagaatctggctcttaattttttcttgtaatctctctctttatccctaccgtttggaagacatcgtgattttttaatcgcgattttcagaatccacagggattcaaagttcaaacggggtccaaaccttcccgacttccagtacagtcttcctcagacgaggccgcaagacaggaggagacaacgccgaggcagccagctagggcgcggtcaaccgcaggtacacgcgcttcttccgattggtcgagcctcagaattcccgcctgatcgttctggcctgctaagtttcttggttagaacattttctgtaataagccaataagcaagaaccttttctgcagtaagccaataagcaatgcagtagtgggcgcagctccggaggagtggaatgacggcgccaccgaatgctagcatgggaccgctcagtttgggtggctgcggggctctcctctccactcctcagcctaattcgtggcattgccgcgggttctcgattcctgagaggagcgtctttatgttgccactgcgccggggtttgtcaaggaagaggggctgggttcttgattcaagaagtaacggtgctgtggctcgtgatgaggtcggtgccgggtcgtcagagcttcggcacatcgagaaggagctgacgttcagcccgactttcactgactatgttaaaatcatggagtcggtgaagttggacaggagcaagaatttacatggcgccgatggccagagtttgaggagaaggttcgcgggtgatggccgacaaaggaataggaggtctggtgatgcaaggaataaatcatttgaaaggaatcaggggcctcagagggacttggcgaaggatgagaatcagaaggatgttacaggctttgtggataaaagagcaactggtcatgtaaaaagtagcaatcgcaggcaaggggaggttgaagactatgcacagagaagaataattcgtggtggtacaagaggaaatggagacaatgggcagttctcatcacctgtgaaggctaaagatactaggggtagtatgtctgttcataggttggtgacgaacaaacagactcagtcagttgcagggaacgatttacaagggcgagcaacttatactccatctcggacttctgcccttccaaatagcagtattccatcaaagaatgctaaggttcaaatgagaaaatacgactatactatgacaagtagcagaatagacttaaaatatcctagagagacatttcccaatactgaggtcaacgctgacagtaatgttcaaagaaatcagcaaagagtggagaccttagggagaaactttgtagtacgtaggtttggggagattggcaccgactctaagaagtctaccgtaagcaaaatttatgggagtacacaggcaatgcctgagcatgatagccattcaagtgataatttggagagtgatgaacgtaggacagttcaattgcatagaggagcaaatgttaaaatggggaaatttgttagtagggatgctgaaactacagattttgatgatagagctgctttcaaaacttttgaggtatttactgatgtcaggaataggccacggatccttcgaatggaaatggaagagagaatccagaagttagctagtcggctcaatgctacagatgtaaatactccagagtggaaattctccaaaatgattcatgatgcaaaaattaaattctctgatcattctatcctaaggattgttcaaatgttgggtcgatatggaaattggaaatgtgttttgcaagtggttgaatggctccagtcacatgaaaggttcaaatcctacaagagcaggtatatttacacaacagttctcgatgttctagggaaggcaaagagaccattcgaggcgttgaatgtattttataccatgcaggaagaagttcaaattgagccctcttcagaattgggatcctcgcttggaaccagaccttattgtatacaatgcagttttgaatgcttgtgtgcaacaaaagcaatgggaaggggcattttgggtactgcaacagttgaaagagaagaacatttgtccaacaaattcaacatatggtcttgttatggaggtaatgcttgtctgtggaaagtacaatttggtttatgagttcttcaataaggtggataaatcatcaatacctggtgctctgaactataaagttcttgtaaatgcactttggagagaaggaaagattgatgaagcagtgatggctgtgaaggatatggaaagtcgtggaattgttggttctgctagtctgtattatgacctagctcgatgcctttgcagtggtggacggtgcaaagaagcacttctccaggttgaaaagatatgcaaggttgccaacaaaccgctggttgttacctacacaggactcattcagacttgcatagacaatggtggcatggaagatgctaaatacatattcaaccacatgtgcaactactgttcacctaattctgttacttgcaacatcatgatgaagtcatatattaaacatggaatgcttgaagacgcgaaagacctgctccatgatattctgaattgcaggataaggagtaaagcggattctaatcaagtggcaaccgctgacaagtttactttcaatactttcatggaggcctgtgctgcagcaaaaaggtggaatgacttcgagtatgcgtttcgtgagatgttattgaatgggtaccatttcgatgagcgaagacaccttcggatggtacttgacgcttttaggcatgggaaggaacagctgttggatgatctatggcactacctgtgccgtcacagccgtgtcccgccctcccctgtcataatggaaagattctgcctaaaactgatgcagggagatacactggcggcgatctcctgcgtcagcagcttccatgagggcaagatatgcaacgtctcctccatgtcatggctcaatctgctgagccgcaatgcagataggctgaaggaggagcatgttaccaagttagctcatgaactcaacagcctcattagcttgaggagttcctctgatagcattagtcttagcctgtaccaaaaaattattagtagctgtacggcattcctctctggagccacagttgtagaaaaggcaccttctggccaataggtggtgttacagaaattataataaccacagttagtaaattctagtactccaaatcataattaccacgactgatggagtgtattgcattcaacgtttggttatcggtacaaagttagaaatggaaaattttcacgtaaggaattagttctttttttagtataatacaaaggctgatttgggagcataagcgataaagcttgctttgtttgattaattttatactggttactttcaaattcacaagtcataataccatgagcatcatttattga

SEQ ID NO: 74082 - DNA, 3975 bp, Zea Mays
gttccttctctgcatctcgggacttctttcgctgctctctctctctccgagcacagctgggggtggtgttcacggtaggcagcagcgcactgcgcacgggcgcagtggtgaggcgcctaagggagagtggcagtagtgacgcctggcgccggtgcaggagtgcaagggagacggtggcggcagcggctcgtgtcgacggccggagcccggaggcagcggggcggcggaggcgtcagtgtacgcgggcggggcggaggaggcactgaagcagctcgcggcggcgggcttgagccagcgttgcggcactctcgggccggtggcttcgggagttgggaggcactggcctgtgcaagaagggcttccgagaagaaacggtagaagagaagttggggatacgaatgttttttatcgagtccttgtttatccggtaggagagggattcggagatttcaagaatctggctcttaattttttcttgtaatctctctctttatccctaccgtttggaagacatcgtgattttttaatcgcgattttcagaatccacagggattcaaagttcaaacggggtccaaaccttcccgacttccagtacagtcttcctcagacgaggccgcaagacaggaggagacaacgccgaggcagccagctagggcgcggtcaaccgcaggtacacgcgcttcttccgattggtcgagcctcagaattcccgcctgatcgttctggcctgctaagtttcttggttagaacattttctgtaataagccaataagcaagaaccttttctgcagtaagccaataagcaatgcagtagtgggcgcagctccggaggagtggaatgacggcgccaccgaatgctagcatgggaccgctcagtttgggtggctgcggggctctcctctccactcctcagcctaattcgtggcattgccgcgggttctcgattcctgagaggagcgtctttatgttgccactgcgccggggtttgtcaaggaagaggggctgggttcttgattcaagaagtaacggtgctgtggctcgtgatgaggtcggtgccgggtcgtcagagcttcggcacatcgagaaggagctgacgttcagcccgactttcactgactatgttaaaatcatggagtcggtgaagttggacaggagcaagaatttacatggcgccgatggccagagtttgaggagaaggttcgcgggtgatggccgacaaaggaataggaggtctggtgatgcaaggaataaatcatttgaaaggaatcaggggcctcagagggacttggcgaaggatgagaatcagaaggatgttacaggctttgtggataaaagagcaactggtcatgtaaaaagtagcaatcgcaggcaaggggaggttgaagactatgcacagagaagaataattcgtggtggtacaagaggaaatggagacaatgggcagttctcatcacctgtgaaggctaaagatactaggggtagtatgtctgttcataggttggtgacgaacaaacagactcagtcagttgcagggaacgatttacaagggcgagcaacttatactccatctcggacttctgcccttccaaatagcagtattccatcaaagaatgctaaggttcaaatgagaaaatacgactatactatgacaagtagcagaatagacttaaaatatcctagagagacatttcccaatactgaggtcaacgctgacagtaatgttcaaagaaatcagcaaagagtggagaccttagggagaaactttgtagtacgtaggtttggggagattggcaccgactctaagaagtctaccgtaagcaaaatttatgggagtacacaggcaatgcctgagcatgatagccattcaagtgataatttggagagtgatgaacgtaggacagttcaattgcatagaggagcaaatgttaaaatggggaaatttgttagtagggatgctgaaactacagattttgatgatagagctgctttcaaaacttttgaggtatttactgatgtcaggaataggccacggatccttcgaatggaaatggaagagagaatccagaagttagctagtcggctcaatgctacagatgtaaatactccagagtggaaattctccaaaatgattcatgatgcaaaaattaaattctctgatcattctatcctaaggattgttcaaatgttgggtcgatatggaaattggaaatgtgttttgcaagtggttgaatggctccagtcacatgaaaggttcaaatcctacaagagcaggtatatttacacaacagttctcgatgttctagggaaggcaaagagaccattcgaggcgttgaatgtattttataccatgcagaaccaattgtcatcttatcctgacatggcagcttatcattgtattgctgttactcttgggcaagctggtcttataaaagaattatttgatgtgattgattgcatgtgttctcctcctaggaagaagttcaaattgagccctcttcagaattgggatcctcgcttggaaccagaccttattgtatacaatgcagttttgaatgcttgtgtgcaacaaaagcaatgggaaggggcattttgggtactgcaacagttgaaagagaagaacatttgtccaacaaattcaacatatggtcttgttatggaggtaatgcttgtctgtggaaagtacaatttggtttatgagttcttcaataaggtggataaatcatcaatacctggtgctctgaactataaagttcttgtaaatgcactttggagagaaggaaagattgatgaagcagtgatggctgtgaaggatatggaaagtcgtggaattgttggttctgctagtctgtattatgacctagctcgatgcctttgcagtggtggacggtgcaaagaagcacttctccaggttgaaaagatatgcaaggttgccaacaaaccgctggttgttacctacacaggactcattcagacttgcatagacaatggtggcatggaagatgctaaatacatattcaaccacatgtgcaactactgttcacctaattctgttacttgcaacatcatgatgaagtcatatattaaacatggaatgcttgaagacgcgaaagacctgctccatgatattctgaattgcaggataaggagtaaagcggattctaatcaagtggcaaccgctgacaagtttactttcaatactttcatggaggcctgtgctgcagcaaaaaggtggaatgacttcgagtatgcgtttcgtgagatgttattgaatgggtaccatttcgatgagcgaagacaccttcggatggtacttgacgcttttaggcatgggaagctgttggatgatctatggcactacctgtgccgtcacagccgtgtcccgccctcccctgtcataatggaaagattctgcctaaaactgatgcagggagatacactggcggcgatctcctgcgtcagcagcttccatgagggcaagatatgcaacgtctcctccatgtcatggctcaatctgctgagccgcaatgcagataggctgaaggaggagcatgttaccaagttagctcatgaactcaacagcctcattagcttgaggagttcctctgatagcattagtcttagcctgtaccaaaaaattattagtagctgtacggcattcctctctggagccacagttgtagaaaaggcaccttctggccaataggtggtgttacagaaattataataaccacagttagtaaattctagtactccaaatcataattaccacgactgatggagtgtattgcattcaacgtttggttatcggtacaaagttagaaatggaaaattttcacgtaaggaattagttctttttttagtataatacaaaggctgatttgggagcataagcgataaagcttgctttgtttgattaattttatactggttactttcaaattcacaagtcataataccatgagcatcatttattga

SEQ ID NO: 74083 - DNA, 3738 bp, Zea Mays
gttccttctctgcatctcgggacttctttcgctgctctctctctctccgagcacagctgggggtggtgttcacggtaggcagcagcgcactgcgcacgggcgcagtggtgaggcgcctaagggagagtggcagtagtgacgcctggcgccggtgcaggagtgcaagggagacggtggcggcagcggctcgtgtcgacggccggagcccggaggcagcggggcggcggaggcgtcagtgtacgcgggcggggcggaggaggcactgaagcagctcgcggcggcgggcttgagccagcgttgcggcactctcgggccggtggcttcgggagttgggaggcactggcctgtgcaagaagggcttccgagaagaaacggtagaagagaagttggggatacgaatgttttttatcgagtccttgtttatccgggattcaaagttcaaacggggtccaaaccttcccgacttccagtacagtcttcctcagacgaggccgcaagacaggaggagacaacgccgaggcagccagctagggcgcggtcaaccgcagtaagccaataagcaatgcagtagtgggcgcagctccggaggagtggaatgacggcgccaccgaatgctagcatgggaccgctcagtttgggtggctgcggggctctcctctccactcctcagcctaattcgtggcattgccgcgggttctcgattcctgagaggagcgtctttatgttgccactgcgccggggtttgtcaaggaagaggggctgggttcttgattcaagaagtaacggtgctgtggctcgtgatgaggtcggtgccgggtcgtcagagcttcggcacatcgagaaggagctgacgttcagcccgactttcactgactatgttaaaatcatggagtcggtgaagttggacaggagcaagaatttacatggcgccgatggccagagtttgaggagaaggttcgcgggtgatggccgacaaaggaataggaggtctggtgatgcaaggaataaatcatttgaaaggaatcaggggcctcagagggacttggcgaaggatgagaatcagaaggatgttacaggctttgtggataaaagagcaactggtcatgtaaaaagtagcaatcgcaggcaaggggaggttgaagactatgcacagagaagaataattcgtggtggtacaagaggaaatggagacaatgggcagttctcatcacctgtgaaggctaaagatactaggggtagtatgtctgttcataggttggtgacgaacaaacagactcagtcagttgcagggaacgatttacaagggcgagcaacttatactccatctcggacttctgcccttccaaatagcagtattccatcaaagaatgctaaggttcaaatgagaaaatacgactatactatgacaagtagcagaatagacttaaaatatcctagagagacatttcccaatactgaggtcaacgctgacagtaatgttcaaagaaatcagcaaagagtggagaccttagggagaaactttgtagtacgtaggtttggggagattggcaccgactctaagaagtctaccgtaagcaaaatttatgggagtacacaggcaatgcctgagcatgatagccattcaagtgataatttggagagtgatgaacgtaggacagttcaattgcatagaggagcaaatgttaaaatggggaaatttgttagtagggatgctgaaactacagattttgatgatagagctgctttcaaaacttttgaggtatttactgatgtcaggaataggccacggatccttcgaatggaaatggaagagagaatccagaagttagctagtcggctcaatgctacagatgtaaatactccagagtggaaattctccaaaatgattcatgatgcaaaaattaaattctctgatcattctatcctaaggattgttcaaatgttgggtcgatatggaaattggaaatgtgttttgcaagtggttgaatggctccagtcacatgaaaggttcaaatcctacaagagcaggtatatttacacaacagttctcgatgttctagggaaggcaaagagaccattcgaggcgttgaatgtattttataccatgcagaaccaattgtcatcttatcctgacatggcagcttatcattgtattgctgttactcttgggcaagctggtcttataaaagaattatttgatgtgattgattgcatgtgttctcctcctaggaagaagttcaaattgagccctcttcagaattgggatcctcgcttggaaccagaccttattgtatacaatgcagttttgaatgcttgtgtgcaacaaaagcaatgggaaggggcattttgggtactgcaacagttgaaagagaagaacatttgtccaacaaattcaacatatggtcttgttatggaggtaatgcttgtctgtggaaagtacaatttggtttatgagttcttcaataaggtggataaatcatcaatacctggtgctctgaactataaagttcttgtaaatgcactttggagagaaggaaagattgatgaagcagtgatggctgtgaaggatatggaaagtcgtggaattgttggttctgctagtctgtattatgacctagctcgatgcctttgcagtggtggacggtgcaaagaagcacttctccaggttgaaaagatatgcaaggttgccaacaaaccgctggttgttacctacacaggactcattcagacttgcatagacaatggtggcatggaagatgctaaatacatattcaaccacatgtgcaactactgttcacctaattctgttacttgcaacatcatgatgaagtcatatattaaacatggaatgcttgaagacgcgaaagacctgctccatgatattctgaattgcaggataaggagtaaagcggattctaatcaagtggcaaccgctgacaagtttactttcaatactttcatggaggcctgtgctgcagcaaaaaggtggaatgacttcgagtatgcgtttcgtgagatgttattgaatgggtaccatttcgatgagcgaagacaccttcggatggtacttgacgcttttaggcatgggaaggaacagctgttggatgatctatggcactacctgtgccgtcacagccgtgtcccgccctcccctgtcataatggaaagattctgcctaaaactgatgcagggagatacactggcggcgatctcctgcgtcagcagcttccatgagggcaagatatgcaacgtctcctccatgtcatggctcaatctgctgagccgcaatgcagataggctgaaggaggagcatgttaccaagttagctcatgaactcaacagcctcattagcttgaggagttcctctgatagcattagtcttagcctgtaccaaaaaattattagtagctgtacggcattcctctctggagccacagttgtagaaaaggcaccttctggccaataggtggtgttacagaaattataataaccacagttagtaaattctagtactccaaatcataattaccacgactgatggagtgtattgcattcaacgtttggttatcggtacaaagttagaaatggaaaattttcacgtaaggaattagttctttttttagtataatacaaaggctgatttgggagcataagcgataaagcttgctttgtttgattaattttatactggttactttcaaattcacaagtcataataccatgagcatcatttattga

SEQ ID NO: 74084 - DNA, 2296 bp, Zea Mays
gcactggcctgtgcaagaagggcttccgagaagaaacggtagaagagaagttggggatacgaatgttttttatcgagtccttgtttatccggtaggagagggattcggagatttcaagaatctggctcttaattttttcttgtaatctctctctttatccctaccgtttggaagacatcgtgattttttaatcgcgattttcagaatccacagggattcaaagttcaaacggggtccaaaccttcccgacttccagtacagtcttcctcagacgaggccgcaagacaggaggagacaacgccgaggcagccagctagggcgcggtcaaccgcaggaataggccacggatccttcgaatggaaatggaagagagaatccagaagttagctagtcggctcaatgctacagatgtaaatactccagagtggaaattctccaaaatgattcatgatgcaaaaattaaattctctgatcattctatcctaaggattgttcaaatgttgggtcgatatggaaattggaaatgtgttttgcaagtggttgaatggctccagtcacatgaaaggttcaaatcctacaagagcaggtatatttacacaacagttctcgatgttctagggaaggcaaagagaccattcgaggcgttgaatgtattttataccatgcagaaccaattgtcatcttatcctgacatggcagcttatcattgtattgctgttactcttgggcaagctggtcttataaaagaattatttgatgtgattgattgcatgtgttctcctcctaggaagaagttcaaattgagccctcttcagaattgggatcctcgcttggaaccagaccttattgtatacaatgcagttttgaatgcttgtgtgcaacaaaagcaatgggaaggggcattttgggtactgcaacagttgaaagagaagaacatttgtccaacaaattcaacatatggtcttgttatggaggtaatgcttgtctgtggaaagtacaatttggtttatgagttcttcaataaggtggataaatcatcaatacctggtgctctgaactataaagttcttgtaaatgcactttggagagaaggaaagattgatgaagcagtgatggctgtgaaggatatggaaagtcgtggaattgttggttctgctagtctgtattatgacctagctcgatgcctttgcagtggtggacggtgcaaagaagcacttctccaggttgaaaagatatgcaaggttgccaacaaaccgctggttgttacctacacaggactcattcagacttgcatagacaatggtggcatggaagatgctaaatacatattcaaccacatgtgcaactactgttcacctaattctgttacttgcaacatcatgatgaagtcatatattaaacatggaatgcttgaagacgcgaaagacctgctccatgatattctgaattgcaggataaggagtaaagcggattctaatcaagtggcaaccgctgacaagtttactttcaatactttcatggaggcctgtgctgcagcaaaaaggtggaatgacttcgagtatgcgtttcgtgagatgttattgaatgggtaccatttcgatgagcgaagacaccttcggatggtacttgacgcttttaggcatgggaaggaacagctgttggatgatctatggcactacctgtgccgtcacagccgtgtcccgccctcccctgtcataatggaaagattctgcctaaaactgatgcagggagatacactggcggcgatctcctgcgtcagcagcttccatgagggcaagatatgcaacgtctcctccatgtcatggctcaatctgctgagccgcaatgcagataggctgaaggaggagcatgttaccaagttagctcatgaactcaacagcctcattagcttgaggagttcctctgatagcattagtcttagcctgtaccaaaaaattattagtagctgtacggcattcctctctggagccacagttgtagaaaaggcaccttctggccaataggtggtgttacagaaattataataaccacagttagtaaattctagtactccaaatcataattaccacgactgatggagtgtattgcattcaacgtttggttatcggtacaaagttagaaatggaaaattttcacgtaaggaattagttctttttttagtataatacaaaggctgatttgggagcataagcgataaagcttgctttgtttgattaattttatactggttactttcaaattcacaagtcataataccatgagcatcatttattga

SEQ ID NO: 74085 - DNA, 1969 bp, Zea Mays
ctagggcgcggtcaaccgcaggaataggccacggatccttcgaatggaaatggaagagagaatccagaagttagctagtcgatgtaaatactccagagtggaaattctccaaaatgattcatgatgcaaaaattaaattctctgatcattctatcctaaggattgttcaaatgttgggtcgatatggaaattggaaatgtgttttgcaagtggttgaatggctccagtcacatgaaaggttcaaatcctacaagagcaggtatatttacacaacagttctcgatgttctagggaaggcaaagagaccattcgaggcgttgaatgtattttataccatgcagaaccaattgtcatcttatcctgacatggcagcttatcattgtattgctgttactcttgggcaagctggtcttataaaagaattatttgatgtgattgattgcatgtgttctcctcctaggaagaagttcaaattgagccctcttcagaattgggatcctcgcttggaaccagaccttattgtatacaatgcagttttgaatgcttgtgtgcaacaaaagcaatgggaaggggcattttgggtactgcaacagttgaaagagaagaacatttgtccaacaaattcaacatatggtcttgttatggaggtaatgcttgtctgtggaaagtacaatttggtttatgagttcttcaataaggtggataaatcatcaatacctggtgctctgaactataaagttcttgtaaatgcactttggagagaaggaaagattgatgaagcagtgatggctgtgaaggatatggaaagtcgtggaattgttggttctgctagtctgtattatgacctagctcgatgcctttgcagtggtggacggtgcaaagaagcacttctccaggttgaaaagatatgcaaggttgccaacaaaccgctggttgttacctacacaggactcattcagacttgcatagacaatggtggcatggaagatgctaaatacatattcaaccacatgtgcaactactgttcacctaattctgttacttgcaacatcatgatgaagtcatatattaaacatggaatgcttgaagacgcgaaagacctgctccatgatattctgaattgcaggataaggagtaaagcggattctaatcaagtggcaaccgctgacaagtttactttcaatactttcatggaggcctgtgctgcagcaaaaaggtggaatgacttcgagtatgcgtttcgtgagatgttattgaatgggtaccatttcgatgagcgaagacaccttcggatggtacttgacgcttttaggcatgggaaggaacagctgttggatgatctatggcactacctgtgccgtcacagccgtgtcccgccctcccctgtcataatggaaagattctgcctaaaactgatgcagggagatacactggcggcgatctcctgcgtcagcagcttccatgagggcaagatatgcaacgtctcctccatgtcatggctcaatctgctgagccgcaatgcagataggctgaaggaggagcatgttaccaagttagctcatgaactcaacagcctcattagcttgaggagttcctctgatagcattagtcttagcctgtaccaaaaaattattagtagctgtacggcattcctctctggagccacagttgtagaaaaggcaccttctggccaataggtggtgttacagaaattataataaccacagttagtaaattctagtactccaaatcataattaccacgactgatggagtgtattgcattcaacgtttggttatcggtacaaagttagaaatggaaaattttcacgtaaggaattagttctttttttagtataatacaaaggctgatttgggagcataagcgataaagcttgctttgtttgattaattttatactggttactttcaaattcacaagtcataataccatgagcatcatttattga

SEQ ID NO: 74086 - DNA, 2600 bp, Zea Mays
cgcgtctcttcgaacccaagccaaccaggcaaccagccgtgagcccgtgattcgcctcggctcgccgccggccgccggccaccggcccccacaccacgacagatcgcaagcttgtgaggagctccgcgcgactaaagcgatctaatcacctagccgccggccgccaggccgcggcgctgaaccacgggcgcgaagcgtacgcgaggctgccgcgcctgggtctgggtggagctcgcgtcgtccctgcagctaccgcgggcgcaatgcctgccccccgcgcctgaccatgcatcccaggcggctcaagaggctggcgaagaggatcacgtgacgacgcctcgccgtcgtctaggtcgtcgctcgcgcgcctgcggaacggaaaaaaggacgcgcaggatggatggctccatttcatcggcgctggcgcttctcgtgctggcgcttcacctcgccgtggacggctgctcggcggtcaacttcgaagggtcggtactgctcaagttccagtcaagggtggaggaggatctgtatggcgccatggtgagctggagcccgggcgacggcgacccctgcagttggaacggcgtgcgctgcgccgatggcagagtcgtgatgctaaacctgaaggatctctcgttaaaaggcaccctaggtcctgagctaggaactctaagccatctaagggctctagaactctccaataactttttcagtggagcaatacctaaggaattgagtgctcttgcaatgttggagatactggatttaagcaacaacaacttgagtggggaagttccacaagagattgcagaaatgccatcacttaggcagttatcgctttccaataactgctttcagtggcctctgatccaacattcctatgggaactttgatcaggaaaatggtttcaatatttatgataatctcgggagaggtaatatgaatcaaagagctgagaatgggttggaatcaggttcttcttcacatgagaacaaaaaggacactagcaacctttctgctcgacttcattcacaatacgaagcaataaatccagcagcacatcttagccagcgcagattacttcaagatagcaatcttgctgcaccttcttctgcaaatgatcttgttccagctgctgttcctgttccttccactggaactggttcgttttcagcatttagtcccaacaatgcacctgcaccagctgtaaatcccccaagtaggccaccaacggtccccagtactaccgctggagaagttcaggaaaggaggtcaatgaaatggctttatttcattgtgctgccactggtcgtgcttcttattggcatcgcatgcatgcttttgctatgccgcaccaagtcagggacaacaataggtccatggaagacagggctcagtggtcagctccaaaaggcatttgtaacaggagtaccaaagttgcaacgctctgagctggaaggtgcgtgtgaagacttcagtaacattgtgtcaagctatccacagtacactgtctacaaggggaccttatcaagtggtgttgagatagctgttgtatcaaccatggttatctctagcaaagattggtcaaaacattcagaagggcgattcaggaagaagatagactcactctcgcgaatcaatcataagaactacatcaacctgcttggatactgtgaggaggaagaacctttcactaggatgatggtgatggaatatgctcccaatggaacactatatgaacacctccatgtcgagggatttgatcctattgattggaatggtaggatgaggataattatgggggtagcatactgcaccctacacatgcatgagcttagccctcctgtaacacacccagacataaagtcaagtgctatattgctatctgaggatggagctgcaaagatagtagacatgagcgtttggcatgaagtatatttcagaggaaacatgcccaaggatggcgacctagttgatcaccaggaacgagtagctgcagatccagctgggaatgtctacagttttggtctactcatgctggagatcatctcagggaagcctccgtactccgaagaaaagggttccctttcagacttgcttgaaggatcacaaggaaaaggacctagaaaccatatgtgatctggtccaggactgcatccaaagcgatccaaagaagagaccagccatgagggaggtcaccactagactgcgagaagtactgtcaatttcgcctgaggctgcgacgccccggttatctccactctggtgggcagagcttgagatcctttcagttgaagcaagctagcgaaaatgtgctttgtttgcagcaacaccgaggtacttgtgcatactgtaatgcaaccctgtacatccctgttgtatttttccatcctgtgttgtaactttggtggtgtctgcgtgctacatttccccctccccggtgaattcagctgcctggtttgtttttctcatctgtatactaaacatacatggtgtgagagcagaatgctttataccatcctaggactgattgtaatcaggaaatgtgtagtgttccatggttttacagaaatatacattctttgattgttgatgtgaaa

SEQ ID NO: 74087 - DNA, 2607 bp, Zea Mays
agccaaccaggcaaccagccgtgagcccgtgattcgcctcggctcgccgccggccgccggccaccggcccccacaccacgacagatcgcaagcttgtgaggagctccgcgcgactaaagcgatctaatcacctagccgccggccgccaggccgcggcgctgaaccacgggcgcgaagcgtacgcgaggctgccgcgcctgggtctgggtggagctcgcgtcgtccctgcagctaccgcgggcgcaatgcctgccccccgcgcctgaccatgcatcccaggcggctcaagaggctggcgaagaggatcacgtgacgacgcctcgccgtcgtctaggtcgtcgctcgcgcgcctgcggaacggaaaaaaggacgcgcaggatggatggctccatttcatcggcgctggcgcttctcgtgctggcgcttcacctcgccgtggacggctgctcggcggtcaacttcgaagggtcggtactgctcaagttccagtcaagggtggaggaggatctgtatggcgccatggtgagctggagcccgggcgacggcgacccctgcagttggaacggcgtgcgctgcgccgatggcagagtcgtgatgctaaacctgaaggatctctcgttaaaaggcaccctaggtcctgagctaggaactctaagccatctaagggctctagaactctccaataactttttcagtggagcaatacctaaggaattgagtgctcttgcaatgttggagatactggatttaagcaacaacaacttgagtggggaagttccacaagagattgcagaaatgccatcacttaggcagttatcgctttccaataactgctttcagtggcctctgatccaacattcctatgggaactttgatcaggaaaatggtttcaatatttatgataatctcgggagaggttggaatcaggttcttcttcacatgagaacaaaaaggacactagcaacctttctgctcgacttcattcacaatacgaagcaataaatccagcagcacatcttagccagcgcagattacttcaagatagcaatcttgctgcaccttcttctgcaaatgatcttgttccagctgctgttcctgttccttccactggaactggttcgttttcagcatttagtcccaacaatgcacctgcaccagctgtaaatcccccaagtaggccaccaacggtccccagtactaccgctggagaagttcaggaaaggaggtcaatgaaatggctttatttcattgtgctgccactggtcgtgcttcttattggcatcgcatgcatgcttttgctatgccgcaccaagtcagggacaacaataggtccatggaagacagggctcagtggtcagctccaaaaggcatttgtaacaggagtaccaaagttgcaacgctctgagctggaaggtgcgtgtgaagacttcagtaacattgtgtcaagctatccacagtacactgtctacaaggggaccttatcaagtggtgttgagatagctgttgtatcaaccatggttatctctagcaaagattggtcaaaacattcagaagggcgattcaggaagaagatagactcactctcgcgaatcaatcataagaactacatcaacctgcttggatactgtgaggaggaagaacctttcactaggatgatggtgatggaatatgctcccaatggaacactatatgaacacctccatgtcgagggatttgatcctattgattggaatggtaggatgaggataattatgggggtagcatactgcaccctacacatgcatgagcttagccctcctgtaacacacccagacataaagtcaagtgctatattgctatctgaggatggagctgcaaagatagtagacatgagcgtttggcatgaagtatatttcagaggaaacatgcccaaggatggcgacctagttgatcaccaggaacgagtagctgcagatccagctgggaatgtctacagttttggtctactcatgctggagatcatctcagggaagcctccgtactccgaagaaaagggttccctttcagacttggctttggagtgcattagggataaccggagcatgtcttgtttgcttgatcctagcttgaaggatcacaaggaaaaggacctagaaaccatatgtgatctggtccaggactgcatccaaagcgatccaaagaagagaccagccatgagggaggtcaccactagactgcgagaagtactgtcaatttcgcctgaggctgcgacgccccggttatctccactctggtgggcagagcttgagatcctttcagttgaagcaagctagcgaaaatgtgctttgtttgcagcaacaccgaggtacttgtgcatactgtaatgcaaccctgtacatccctgttgtatttttccatcctgtgttgtaactttggtggtgtctgcgtgctacatttccccctccccggtgaattcagctgcctggtttgtttttctcatctgtatactaaacatacatggtgtgagagcagaatgctttataccatcctaggactgattgtaatcaggaaatgtgtagtgttccatggttttacagaaatatacattctttgattgttgatgtgaaa

SEQ ID NO: 74088 - DNA, 1406 bp, Zea Mays
gaaattaagaaaaaagggaagaaaggttatcttctccggttctccctcccctccctgtccggctgtcccctcgctgtacacagggtgtctgtcaccgagcagcgggcagccggcaggcaatgcgatgatagtagctgctgctgcccctgcgccgccagttccagcaccgccgggcaaaccgcccttttctctctcctcctccagctcctccttctccctccgccgccgctccttcagcttgtggttctcaaacggcaacgcgcatggaagagacagcgccaccgccaccacgagcagcagggcgacgaggaggtggtggtggtccgatcccggcggcagccgagaagactacggctcctcttctctagaggaggaggacgtttacgattacgaggatgaggctgcgttccccagatttggaggggccgcggaactgttcgatgagccctggttctccaagggccaaaggcctttctaatggccatggtgatcccactcagtcagtcggccatatcgtttctgcttgacgctgtatggggaaggaggaaaggcaaccgcgacgacaggaggagaccattccaagaggaagattaccctgaggacgccgctggctttgcggcaggtggtcgaggcaatggataccgcagccgcagcagcagcagcagcaactattatgaggggagaaggaggacgagcaactaccagtcaagtgtttctaacaattttgctggtgctgcctcaactggtgttggagctgacgataacaccaagagcagcagcagtggatatggaggatgggatgagcttctggacaacgacactgctgctcaggagacaaagaggaggagctcattctcagctggcaccactgatcgaagcacaaaatcgcagccttcagcgactggggaggaagatgcagattatactgccactccttcaacaagaacgagaatgagacgacggcggacgccaggaacgatggggttgggcagtaccatgtacaagcaggcaccactcgtgatgcgcttgttggtggcagtcttcccgttcctgggatcatggttcaggctgctctgaattgattgttatatattcgtccacggtggttcgtttatgatttcagaaaaaaaaagatatatatatataagtggccagtggcattaagcaaaggattatgattgtgaaaaatatataagcgtagtgaagaagatcgattggttcaggcagtgtgcctgcagcatcagctctgtactgctgcatccgccattgcgaagggaaagaatcacagcatctgacttgctggtgcatgtgtgaacctttgcttcctcgcgcttgtgcagctgataatatgtttgtggtctcggtgaacattaactaattgtgtaagtggccagcgtaaaaaaaaa

SEQ ID NO: 74089 - DNA, 900 bp, Zea Mays
cgcagaagccacggccctccaccccctccacctcggtgatgagcggcgcctccacttccgtcatcgctccaccttgagggctcctttggttgcccgggatcccgggagtatccaggtcgattccctgggtctgaaatccacaggccgaatcgtcccagggaaaaataaaaagttgtttggtgacccacgctccccgatctgatccgcgggggaggacagtgctttggtccccggcctcccagggtcgggaagggcttccccgcgtcccctcccgtgcaagccgtcgcctcctcctctcgctcgtgaagcctcctctccctcgcgcacggtaccgccacccaccgcctccacctctccctcgcactcgcgcacccaccgtcgcccgccacccccgctcttcctcactccctcctctgcctcgcgcaaagcgcaccgctaccacaggcggtaggaccgcacaacttgccccagatccagaacagtctcctatctcctcaactcacgcatgacgacctcctcagctcccccatccgcatctcgcgaagagaacagaagctggtgagcgatccagaattcggtcgtgaactgaagtgtgatgttggccatgaggagacaagggatggaactcttgagcactaaacacaagttggtcgaaggaaaatcatgatgagcaaagtcattgttgtgttaacgttttgggcatgccaagaactatttttttggttatgagtttgtcaaacatatgttgagtttgtcgctcatttcttaagagctatttctgtgatcgaagaaatttgtttattttagtggcatgaataaaaaaaccaagcaaatccatggtagaaacttgtttgtgtgcatattttgagggctttgttttactggaactgtttgattttg

SEQ ID NO: 74090 - DNA, 882 bp, Zea Mays
cgcagaagccacggccctccaccccctccacctcggtgatgagcggcgcctccacttccgtcatcgctccaccttgagggctcctttggttgcccgggatcccgggagtatccaggtcgattccctgggtctgaaatccacaggccgaatcgtcccagggaaaaataaaaagttgtttggtgacccacgctccccgatctgatccgcgggggaggacagtgctttggtccccggcctcccagggtcgggaagggcttccccgcgtcccctcccgtgcaagccgtcgcctcctcctctcgctcgtgaagcctcctctccctcgcgcacggtaccgccacccaccgcctccacctctccctcgcactcgcgcacccaccgtcgcccgccacccccgctcttcctcactccctcctctgcctcgcgcaaagcgcaccgctaccacaggcggtaggaccgcacaacttgccccagatccagaacagtctcctatctcctcaactcacgcatgacgacctcctcagctcccccatccgcatctcgcgaagagaacagaagctggtgagcgatccagaattcggtcgtgaactgaaggagacaagggatggaactcttgagcactaaacacaagttggtcgaaggaaaatcatgatgagcaaagtcattgttgtgttaacgttttgggcatgccaagaactatttttttggttatgagtttgtcaaacatatgttgagtttgtcgctcatttcttaagagctatttctgtgatcgaagaaatttgtttattttagtggcatgaataaaaaaaccaagcaaatccatggtagaaacttgtttgtgtgcatattttgagggctttgttttactggaactgtttgattttg

SEQ ID NO: 74091 - DNA, 1276 bp, Zea Mays
cctccaccccctccacctcggtgatgagcggcgcctccacttccgtcatcgctccaccttgagggctcctttggttgcccgggatcccgggagtatccaggtcgattccctgggtctgaaatccacaggccgaatcgtcccagggaaaaataaaaagttgtttggtgacccacgctccccgatctgatccgcgggggaggacagtgctttggtccccggcctcccagggtcgggaagggcttccccgcgtcccctcccgtgcaagccgtcgcctcctcctctcgctcgtgaagcctcctctccctcgcgcacggtaccgccacccaccgcctccacctctccctcgcactcgcgcacccaccgtcgcccgccacccccgctcttcctcactccctcctctgcctcgcgcaaagcgcaccgctaccacaggcggtaggaccgcacaacttgccccagatccagaacagtctcctatctcctcaactcacgcatgacgacctcctcagctcccccatccgcatctcgcgaaggtacgcctacgcgctcgcacaagggggtggtgctggcagctggccgcctggccgtaaccagaccacgctctgcacgacctgtccctagttggtgtggtagctagctagtgtacctcagcatggaattgggagcaggtttctcttccagttccactgcaaaattgagattctaggctcttggtgtggacgtcgatctgcacctacattcgaagcatatttcataggatgtctagagctatctcaaatttattattattttattattatctcagtgtttctagttgagctgagcatcagtgtacattatcaatatctcagtgactcaaaaaggctttgaatttaggggaaaaagtacacaaagaggtcaattatttgttcttttattttgcagagaacagaagctggtgagcgatccagaattcggtcgtgaactgaagtgtgatgttggccatgaggagacaagggatggaactcttgagcactaaacacaagttggtcgaaggaaaatcatgatgagcaaagtcattgttgtgttaacgttttgggcatgccaagaactatttttttggttatgagtttgtcaaacatatgttgagtttgtcgctcatttcttaagagctatttctgtgatcgaagaaatttgtttattttagtggcatgaataaaaaaaccaagcaaatccatggtagaaacttgtttgtgtgcatattttgagggctttgttttactggaactgtttgattttg

SEQ ID NO: 74092 - DNA, 1248 bp, Zea Mays
ctccacctcggtgatgagcggcgcctccacttccgtcatcgctccaccttgagggctcctttggttgcccgggatcccgggagtatccaggtcgattccctgggtctgaaatccacaggccgaatcgtcccagggaaaaataaaaagttgtttggtgacccacgctccccgatctgatccgcgggggaggacagtgctttggtccccggcctcccagggtcgggaagggcttccccgcgtcccctcccgtgcaagccgtcgcctcctcctctcgctcgtgaagcctcctctccctcgcgcacggtaccgccacccaccgcctccacctctccctcgcactcgcgcacccaccgtcgcccgccacccccgctcttcctcactccctcctctgcctcgcgcaaagcgcaccgctaccacaggcggtaggaccgcacaacttgccccagatccagaacagtctcctatctcctcaactcacgcatgacgacctcctcagctcccccatccgcatctcgcgaaggtacgcctacgcgctcgcacaagggggtggtgctggcagctggccgcctggccgtaaccagaccacgctctgcacgacctgtccctagttggtgtggtagctagctagtgtacctcagcatggaattgggagcaggtttctcttccagttccactgcaaaattgagattctaggctcttggtgtggacgtcgatctgcacctacattcgaagcatatttcataggatgtctagagctatctcaaatttattattattttattattatctcagtgtttctagttgagctgagcatcagtgtacattatcaatatctcagtgactcaaaaaggctttgaatttaggggaaaaagtacacaaagaggtcaattatttgttcttttattttgcagagaacagaagctggtgagcgatccagaattcggtcgtgaactgaaggagacaagggatggaactcttgagcactaaacacaagttggtcgaaggaaaatcatgatgagcaaagtcattgttgtgttaacgttttgggcatgccaagaactatttttttggttatgagtttgtcaaacatatgttgagtttgtcgctcatttcttaagagctatttctgtgatcgaagaaatttgtttattttagtggcatgaataaaaaaaccaagcaaatccatggtagaaacttgtttgtgtgcatattttgagggctttgttttactggaactgtttgattttg

SEQ ID NO: 74093 - DNA, 825 bp, Zea Mays
ctccacctcggtgatgagcggcgcctccacttccgtcatcgctccaccttgagggctcctttggttgcccgggatcccgggagtatccaggtcgattccctgggtctgaaatccacaggccgaatcgtcccagggaaaaataaaaagttgtttggtgacccacgctccccgatctgatccgcgggggaggacagtgctttggtccccggcctcccagggtcgggaagggcttccccgcgtcccctcccgtgcaagccgtcgcctcctcctctcgctcgtgaagcctcctctccctcgcgcacggtaccgccacccaccgcctccacctctccctcgcactcgcgcacccaccgtcgcccgccacccccgctcttcctcactccctcctctgcctcgcgcaaagcgcaccgctaccacaggcggtaggaccgcacaacttgccccagatccagaacagtctcctatctcctcaactcacgcatgacgacctcctcagctcccccatccgcatctcgcgaagagaacagaagctgggagacaagggatggaactcttgagcactaaacacaagttggtcgaaggaaaatcatgatgagcaaagtcattgttgtgttaacgttttgggcatgccaagaactatttttttggttatgagtttgtcaaacatatgttgagtttgtcgctcatttcttaagagctatttctgtgatcgaagaaatttgtttattttagtggcatgaataaaaaaaccaagcaaatccatggtagaaacttgtttgtgtgcatattttgagggctttgttttactggaactgtttgattttg

SEQ ID NO: 74094 - DNA, 590 bp, Zea Mays
cctcggtgatgagcggcgcctccacttccgtcatcgctccaccttgagggctcctttggttgcccgggatcccgggagtatccaggtcgattccctgggtctgaaatccacaggccgaatcgtcccagggaaaaataaaaagttgtttggtgacccacgctccccgatctgatccgcgggggaggacagtgctttggtccccggcctcccagggtcgggaagggcttccccgcgtcccctcccgtgcaagccgtcgcctcctcctctcgctcgtgaagcctcctctccctcgcgcacgggagacaagggatggaactcttgagcactaaacacaagttggtcgaaggaaaatcatgatgagcaaagtcattgttgtgttaacgttttgggcatgccaagaactatttttttggttatgagtttgtcaaacatatgttgagtttgtcgctcatttcttaagagctatttctgtgatcgaagaaatttgtttattttagtggcatgaataaaaaaaccaagcaaatccatggtagaaacttgtttgtgtgcatattttgagggctttgttttactggaactgtttgattttg

SEQ ID NO: 74095 - DNA, 1037 bp, Zea Mays
ctcgagtattttctgattgagcaatgcaccccgttccgccttcataccttgctcgtcagcccggataagataacgcccatctgcacgggccacgcgaagcgttcgagctcctcccacggcagccatggtcaccgccaccacctccccgctcttctccctctcctccctccgcgcctccctcccttcccccacccgatttcacacgtctctctcgctccgagccctctccccacgtgctcgtctctctgccgccctccctttcgcctccccactcggcgggtacgggacctgggcggcgacttcaatctcgtccgcgggaaggttgagacggcgggggctggaggtggtgtgcgaggccacgaccgggcggcggccggactcggttaagaagagggagcgccagaacgacaagcaccgcatccgcaatcacgcgcgcaaggccgagatgcgcactaggatgaaaaaggtcttaagagctcttgaaaagcttaggaagaaacctgacgcgcagcctgaagaaataattgagatagagaagctgatcgctgaggcatacaaagccatcgacaagacggtgaaggttggcgccatgcataggaacacggcgaaccatcggaagtctcgactggcaaggaggaagaaggccatcgagatactccgtggttggtatgtcccaaacgctgaacctgtcgctgccacctaggattcttgagaaatcgctatcatgtgtcagcttttcatttttgggcgactatgctattcacgggtctcaacagcttgccaggttctctattgaaatggtctgttcataccttttctgctatgcgtttgctctgtactagcagtttgactactggctagaatgggcagctcttctcccctgtttctgttgttattcgcctcaacgttgtaaaactgaattcagaaaattttaaatatagctgtcatctggtaagtcttgatttgttcagctgaacaaattgtatcagtagtcagtatgcatagtgaaaacagagtgcagatgatgttttcgattg

SEQ ID NO: 74096 - DNA, 809 bp, Zea Mays
ctcgagtattttctgattgagcaatgcaccccgttccgccttcataccttgctcgtcagcccggataagataacgcccatctgcacgggccacgcgaagcgttcgagctcctcccacggcagccatggccacgaccgggcggcggccggactcggttaagaagagggagcgccagaacgacaagcaccgcatccgcaatcacgcgcgcaaggccgagatgcgcactaggatgaaaaaggtcttaagagctcttgaaaagcttaggaagaaacctgacgcgcagcctgaagaaataattgagatagagaagctgatcgctgaggcatacaaagccatcgacaagacggtgaaggttggcgccatgcataggaacacggcgaaccatcggaagtctcgactggcaaggaggaagaaggccatcgagatactccgtggttggtatgtcccaaacgctgaacctgtcgctgccacctaggattcttgagaaatcgctatcatgtgtcagcttttcatttttgggcgactatgctattcacgggtctcaacagcttgccaggttctctattgaaatggtctgttcataccttttctgctatgcgtttgctctgtactagcagtttgactactggctagaatgggcagctcttctcccctgtttctgttgttattcgcctcaacgttgtaaaactgaattcagaaaattttaaatatagctgtcatctggtaagtcttgatttgttcagctgaacaaattgtatcagtagtcagtatgcatagtgaaaacagagtgcagatgatgttttcgattg

SEQ ID NO: 74097 - DNA, 1638 bp, Zea Mays
ccggcctcgcgcaatagccgtcgcacatgccagccccggcgccgtccccgccaccggcctcgcgcaacagccgccgcgccatcccgaccctgacccttgcccctgccgtccatgccaccggcctggcgtaagagccgccgcacattccgcacatgccagccccggcctcgcgcccgcggcattcgcgcccgactgttgtgggaggcaccgtcccatccgaatctcctcccctctccctcagatataagggttcgtcctcctcagcactatctcaagattgtgcgtagacgttcaacgacggtggggacacgccgctgcaggtgtgcgcccgccatctacgacgaggccatgtttcttcaatagatccgtcgtcgtgggctactacaagaaccgcgtcaagtagcggaaggtcgcagtcaaagtttttggttttgccggcattcagatctgaagcgagtacaagtgcatacacgcctaccaaccttggattcctctactggttatgtatcgaaagcccttaaatcttcctttggtataaaacgaagattaccataattgtcagattcttaattgttgtgcttgattgcttgttataattgcgtttgcactcccatgtaattacttgtatgcaacagaggccaaggagaatgctacaactatgatatttatctatggtccatgactataagaaaaaaataatgaatgagctaggggatgtggaggagcttgtgtctatgatgaccaatgggacaccaaggggacaaaaggacgtagtgatggcattgtccaacctctcaacacacccgaaaagcttaggttggatgctcgagtcatctgcggttgtagctttaattgagtcactatggaatgacatcgagtcggaggaagctgctagtgctctagctctgctgatgaagtagtctagcagcatgcatcttgttgggagctctgaaacagtgatcactggccttgttgggttaatgaggcgtggaacttcaaagggcaaggagaatgcaagtgtcagctttatatgagatacgccagagaggtggatcaacattagcacagcgcgtggtaaggatacctgggttgaacaaagtaatgcagaacatcacgctcacaggaacaaagcgtgccaagaagaaggcaagcttgattgtcaagatgtgccagagaatccaaatgacatcagcactagcactaggatgtaccttgacagtggtggatcattcaatggtagggaacaacacattaaggtgcgctacaagctttggcagcggggagttgttgaagcctgtgtcaattttagtgcctatgccgtagacggagaggaaaaatccattccagagcccacataattgtcacattcaatgagttttgtccctaaaattctttcattccatcctcaaatgaaggtatacgaatttaaactaaagtatcaaatataccagatatgtttgtgtgtatatgactgtgaataactgtgcaaatataggtttataggtagaattctagcttgacgtttccttggcaagctcagaaattaattgtttttttgttcagtttcggaaagacatgatatgtacgcgacttgttgtaaactgttctcataatttagtactcgacgaatttcaaaat

SEQ ID NO: 74098 - DNA, 1783 bp, Zea Mays
ccggcctcgcgcaatagccgtcgcacatgccagccccggcgccgtccccgccaccggcctcgcgcaacagccgccgcgccatcccgaccctgacccttgcccctgccgtccatgccaccggcctggcgtaagagccgccgcacattccgcacatgccagccccggcctcgcgcccgcggcattcgcgcccgactgttgtgggaggcaccgtcccatccgaatctcctcccctctccctcagatataagggttcgtcctcctcagcactatctcaagattgtgcgtagacgttcaacgacggtggggacacgccgctgcaggtgtgcgcccgccatctacgacgaggccatgtttcttcaatagatccgtcgtcgtgggctactacaagaaccgcgtcaaggtagagtatcccgcttgttgctttatgctaccgctgcatgcagtctaggtgttcagtgaaatgtcaatgcaattttgctattgttttgcgattgattgctatgtgctagcgtctgttgtatggtggtgagttacgaggccattgagttccttctgtcgcggaaggttacagtcaaagttttgtgattgactgctatgtgctagcttctgttgggtctgatcaaaatgaacaataactgattttgtcagtagcggaaggtcgcagtcaaagtttttggttttgccggcattcagatctgaagcgagtacaagtgcatacacgcctaccaaccttggattcctctactggttatgtatcgaaagcccttaaatcttcctttgaggccaaggagaatgctacaactatgatatttatctatggtccatgactataagaaaaaaataatgaatgagctaggggatgtggaggagcttgtgtctatgatgaccaatgggacaccaaggggacaaaaggacgtagtgatggcattgtccaacctctcaacacacccgaaaagcttaggttggatgctcgagtcatctgcggttgtagctttaattgagtcactatggaatgacatcgagtcggaggaagctgctagtgctctagctctgctgatgaagtagtctagcagcatgcatcttgttgggagctctgaaacagtgatcactggccttgttgggttaatgaggcgtggaacttcaaagggcaaggagaatgcaagtgtcagctttatatgagatacgccagagaggtggatcaacattagcacagcgcgtggtaaggatacctgggttgaacaaagtaatgcagaacatcacgctcacaggaacaaagcgtgccaagaagaaggcaagcttgattgtcaagatgtgccagagaatccaaatgacatcagcactagcactaggatgtaccttgacagtggtggatcattcaatggtagggaacaacacattaaggtgcgctacaagctttggcagcggggagttgttgaagcctgtgtcaattttagtgcctatgccgtagacggagaggaaaaatccattccagagcccacataattgtcacattcaatgagttttgtccctaaaattctttcattccatcctcaaatgaaggtatacgaatttaaactaaagtatcaaatataccagatatgtttgtgtgtatatgactgtgaataactgtgcaaatataggtttataggtagaattctagcttgacgtttccttggcaagctcagaaattaattgtttttttgttcagtttcggaaagacatgatatgtacgcgacttgttgtaaactgttctcataatttagtactcgacgaatttcaaaat

SEQ ID NO: 74099 - DNA, 1586 bp, Zea Mays
gcgccctccagcctcatgaacacatagagaactcctcatcacctacaacaacatgggttcgaaaaccctgagtacggagtgtactttcgcaagtcttacccgactaaggaaaaatgactgtcaaggatatgccggttaaataggaatcaaggaaaaggctttagcaagaatcaacttagatacttttgcagaaatagcttactaaagtgagtccttactttcaatattttaacgccagattaaatattaatagactctgtttgcatctagtctaatctcaccatctcatcaatacaacatcatttttattcatgaggttcacatcctgacttaggttgcagggcagcgatcaagtctccactctccggggatataacggcgatccgaatcgatttactcagctgaggatctctaaccacacgacatatgtagcacttaacccttgcatatgtctaccgttcccacggatcctctactgcatgaacaggtccgcgccacccgagagcgcaccaccccttttaggcggtcctttgccaagagggtacgtgccactctcgccatctctccactcccagtgcgcgattgtcttttcatgtatggaataaccgggttcaagcttaccctgtcccatatccagggcatgtggccagttaagatagtccttgatcatacaggcctacatacgcatccaatccttaattaacctgggtagaacatcacttgttcctagcccaagtcccgatttaagtacttccatccttagaattgtttgtgttccttaggatgaaaagagcacattatagagaactttgcagtaagatcccaccatgctcccaatgaaaatattcttgcaggtagaagccatccttcctcatgataacccctgagctaggcattaatgcaaaagacaacctctatccacaagatctaagcagagctaagcatttttgtaaatcatattttgatacttcaccagaagtatctataaaggtatggatatcaaggtaggcaatgcatccaataatttccaagcaactcctataaacttaatgctcatttcactagacttaaatgtataaaagtctttttaaaaatacaaggaaggggtaaatgcaccggggcttgcctttgttgcagagacggaggtctaaatccctctattaaaccccagttagatggctcccatcacttgatgagcaggcactgaagcagactcctcttcagaaaccacttcttgaattttatcatcttcttctgggaattctaaactttggtgctcacaaggaatcgaccggagaaagcgtgagttgttcggtcaacgcagaggctgttcacggctccggtctgcggtggcacaactccgttctgggtaacaaacttctcgagatactctgaccatggcgaggtggaaggatggttgctgtggcaccagagtaccagacaatggaatggcacttgatgaactgaacaaagccgacgcggaggctaaggagatgaactcaggcttgtacacaccttcacagagatgcccaaggatccaactaaagcttgagacaacagggctccctggacaaacacttaaataa

SEQ ID NO: 74100 - DNA, 4311 bp, Zea Mays
gcccatctaggaaaaaccctagagacgcccgcaggcagtcgctctcgcgcggcggctctccccgcctcgttcgcccctaccgcgccatcaacgtgcctccccgccgcccctgtcctccccatgcccgccgctcccacccgagatggttagcgcccctcctccttccggtcccttcccctgcctcggccggccagccatggattcaccaagcgggctctggtggcggccggcgccgtcgtcgtgtcctccattcccgtcaaccccctcgatgtcgccaagatatgtttaccagacgaattgatatctaggctatttatgtggttactaattttgactcctctaagacatatttacacagggttggtcgttatgggagatatgggcaccttggtttggcagtgaacttgaccacttacaaagattgtttcaacttatatagtattgataaaaaaaacttggaacggaaattaagacaatacccccacaaattgacctgtttgtatactgccaatgatgatagcgacagcttcatgagcgtcaggcacattttatttattttgacctgtttgtatactaacttaacacaagcttttttgtcaataacgtgggattcggaattttctgagctttgtgtagtggaggaggaggagaggcccatgtcggtggagctggaacccatcgccagcgagcagcagcttaactaggtccttggagaggcgtagcagctccagctcctcatcgtcctgctctggtaaccccactttcctagatcggtttgtgcctgtagggtgttcttgttaaagtttgcttgtaatgtctgtgagattgcaatcatggtcgtgtatgattgcggtgttcacagattttgtttgcttgttcctagatagtcatttatgtggtgcaaatttagcatcttggatgaagtgaaaatggacaattttgttcatttgttattaggttctggcacttggacttggtatttagtaactgagaatttacttatttagtagttatacagcccgtgtcattgtcgttgggcgaatgaatttcatcgtcagtctattgcatgaatgataaatgcatgtcggtggccttttgccgaatctaccattttgtttgttcctcatctccattcctatctgcttgtttattggtagtagaagtagaactgctatttatggctgaggcctgagggaaaaaataatcaaatgttcaaccaacttcatttttttcttgagtgcatgggttgcagcctttggctagcttatgatctcgtgtggtctatttaccatataaataaatagcagcattagttcaatttgatgttcatagttctctctctctaaagagtcatatgttagattcatgggaaatacttgaactatacatttttttaatgtatcagatgtgtgaattatcatgtccggatcaatttcaaccaaccaacagttcctttagcaaatttgtcaggcatatttatgcacttgttcgcataactgagactatattatttttataagactaaggtcagactattgatggtttggtttgggtggcaccttgttcttcgttccttgccatttccatgccatccttttattatatacatacatttatttggagataaaatttgatgtcaagagaaacttgtctttctttcactctccaactcatcttcgtagtttgattctcatgggaggaccctgtttccatcatgctgcatctttttatctgataaagtgatatttcttagagcatcaaggttcgacaaccaacatattctcgtgtgaggaaatggaaaagtgatgtcttgaggacattttttatcttttgatgttgataattgttcatattattatggttcaacaactcctagcaccaagtcattctgtatgatctgttaacttgatagaagttaacatcatttgattttaagaaatgtaatcatatttcctgattgctcagaattgacttgttcatcatttttcaatgtccctaattggtattagatttttgtgatcttgtgtcatattctgtgatcaacaatgtacaatttgttgaataggctgttgttgaaaaagctgtatattatgctcttgtatggatcaataggctgttggctgtcggtcatgacatcgccatcaagacagataggaaagttatattttttcctaactatatatgctcttacctattcctgttctccatagtacaaaagatgatattgattttgtggctggtttcatttgttggaatgctcttcaactttcttacgctcatttacattggtgagttctctgtccatgttaattttaagtgagtatgtaactatatgctctcatacgctttagggatccgctacgagcagcctacacatttatcatctgttcccatgcttatttttccttttttttattagtgatgggaatcgtatatccataaatagatctggagactggagcagtttttgttgggataaactttgtactggaccggagcatcttatctctggatgtgagtgccatgaaagtgatacccaacaaacaactaactctggaacacctttggtatgtcgggtaggcgcaaagccagcaagacaacaactgcttgagcagctttggccagttttgcttgccaccatgaatagccatatgttggccatcacatggtaccttgttcgtcccaaactagaccagagcattacaagcaatgactgccatatctaaaattgaaaacatgtgcggcttataagtatcctaaatttgctccacttctaagtatccaagatctactggttttgatgcgttccattgcttgcagcttttctctgcggtaaattgctggcttaaatgcatgctgcttgaaccctataatcagatagaccatcccgaatgcaagtcaaggcctgatagtggtctttctgcaattacagagctggaccctggttatataacaggtaaaacgtatggcttactttctttttcttagcactgacttcacaaagttgtagccatgagttgtaatatctagagactctaatatctattacatgataattttagattatatcatactccatgttgagtgaaaagttcattttggaaaacatttttgcaagttctgagctgaagtggctgaaacatggctgaaacagaaaatgtttttttacacgagatcatcaaactaatgaccataggtgctacaacaaagtattgattaggagagaatcatgttctttattcatgtctaagctgaacaatgtggaataatttgtgcaggtacagttatctgtatctcactcacactactgcttctttcaaagtaatctacgttcatctgtttccaaatggcaactccccatatttgctttgatattagcattgtgttctacgcttcagaatagtcctgttagacagggtgcattcagtactcatgtttgttagtgcattctgaagctacccatttcatttattcatgaagagagaaagggaagggaaaacaccttgcactgatattattttattgggcaaggtttcaggtcctctctcttcagtatggaaagaatgggtcaaatggtgtgtagagtttggcattgaagctaatgcaattatcgctgttccgtatgattggagactgcccccatcaatgcttgaggagagagatctgtactttcacaaattaaagtttgtaacacttgcctcaacttgttatgaagcaaccaaatgctatacatctgttaggatcagtaagagttaatggcccagtgacggattcaaggtatcctgctcaccaacagatcccacaagcatacggttaccgccaaatgcctgcaaggttggacagtaccaacccatcacaggccatgggaggttacacgctgcagtcacagaaggaaacattatttgaagagttgccattttgaagagttactcgaatccaatattttgctcttttgaattccttggtgtacactggcaaatattagcatatttgaagagttgccatttcgatcatcatcttcatttgtactttttgggtcagatctaataaagcatcagcattaaatttacaatgatcacctaaatccatggtttttattgcctagagctggtaatgtttctctggttttgcattagttgcttgaaaattgaaagtatctgtatacttctctattgtattttactgcacataatggatttgtttgatgtgtagggattttaaggtatgtaaaatatcttaacttttaaaagatgtgaataagaacataaaatagtaattagtattttgaattttaatgtatcttatcgtaac

SEQ ID NO: 74101 - DNA, 1458 bp, Zea Mays
gcccatctaggaaaaaccctagagacgcccgcaggcagtcgctctcgcgcggcggctctccccgcctcgttcgcccctaccgcgccatcaacgtgcctccccgccgcccctgtcctccccatgcccgccgctcccacccgagatggttagcgcccctcctccttccggtcccttcccctgcctcggccggccagccatggattcaccaagcgggctctggtggcggccggcgccgtcgtcgtgtcctccattcccgtcaaccccctcgatgtcgccaagatatgtttaccagacgaattgatatctaggctatttatgtggttactaattttgactcctctaagacatatttacacagggttggtcgttatgggagatatgggcaccttggtttggcagtgaacttgaccacttacaaagattgtttcaacttatatagtattgataaaaaaaacttggaacggaaattaagacaatacccccacaaattgacctgtttgtatactgccaatgatgatagcgacagcttcatgagcgtcaggcacattttatttattttgacctgtttgtatactaacttaacacaagcttttttgtcaataacgtgggattcggaattttctgagctttgtgtagtggaggaggaggagaggcccatgtcggtggagctggaacccatcgccagcgagcagcagcttaactaggtccttggagaggcgtagcagctccagctcctcatcgtcctgctctgcttttctctgcggtaaattgctggcttaaatgcatgctgcttgaaccctataatcagatagaccatcccgaatgcaagtcaaggcctgatagtggtctttctgcaattacagagctggaccctggttatataacaggatcagtaagagttaatggcccagtgacggattcaaggtatcctgctcaccaacagatcccacaagcatacggttaccgccaaatgcctgcaaggttggacagtaccaacccatcacaggccatgggaggttacacgctgcagtcacagaaggaaacattatttgaagagttgccattttgaagagttactcgaatccaatattttgctcttttgaattccttggtgtacactggcaaatattagcatatttgaagagttgccatttcgatcatcatcttcatttgtactttttgggtcagatctaataaagcatcagcattaaatttacaatgatcacctaaatccatggtttttattgcctagagctggtaatgtttctctggttttgcattagttgcttgaaaattgaaagtatctgtatacttctctattgtattttactgcacataatggatttgtttgatgtgtagggattttaaggtatgtaaaatatcttaacttttaaaagatgtgaataagaacataaaatagtaattagtattttgaattttaatgtatcttatcgtaac

SEQ ID NO: 74102 - DNA, 3194 bp, Zea Mays
gaaaaaccctagagacgcccgcaggcagtcgctctcgcgcggcggctctccccgcctcgttcgcccctaccgcgccatcaacgtgcctccccgccgcccctgtcctccccatgcccgccgctcccacccgagatggttagcgcccctcctccttccggtcccttcccctgcctcggccggccagccatggattcaccaagcgggctctggtggcggccggcgccgtcgtcgtgtcctccattcccgtcaaccccctcgatgtcgccaagatatgtttaccagacgaattgatatctaggctatttatgtggttactaattttgactcctctaagacatatttacacagggttggtcgttatgggagatatgggcaccttggtttggcagtgaacttgaccacttacaaagattgtttcaacttatatagtattgataaaaaaaacttggaacggaaattaagacaatacccccacaaattgacctgtttgtatactgccaatgatgatagcgacagcttcatgagcgtcaggcacattttatttattttgacctgtttgtatactaacttaacacaagcttttttgtcaataacgtgggattcggaattttctgagctttgtgtagtggaggaggaggagaggcccatgtcggtggagctggaacccatcgccagcgagcagcagcttaactaggtccttggagaggcgtagcagctccagctcctcatcgtcctgctctggtaaccccactttcctagatcggtttgtgcctgtagggtgttcttgttaaagtttgcttgtaatgtctgtgagattgcaatcatggtcgtgtatgattgcggtgttcacagattttgtttgcttgttcctagatagtcatttatgtggtgcaaatttagcatcttggatgaagtgaaaatggacaattttgttcatttgttattaggttctggcacttggacttggtatttagtaactgagaatttacttatttagtagttatacagcccgtgtcattgtcgttgggcgaatgaatttcatcgtcagtctattgcatgaatgataaatgcatgtcggtggccttttgccgaatctaccattttgtttgttcctcatctccattcctatctgcttgtttattggtagtagaagtagaactgctatttatggctgaggcctgagggaaaaaataatcaaatgttcaaccaacttcatttttttcttgagtgcatgggttgcagcctttggctagcttatgatctcgtgtggtctatttaccatataaataaatagcagcattagttcaatttgatgttcatagttctctctctctaaagagtcatatgttagattcatgggaaatacttgaactatacatttttttaatgtatcagatgtgtgaattatcatgtccggatcaatttcaaccaaccaacagttcctttagcaaatttgtcaggcatatttatgcacttgttcgcataactgagactatattatttttataagactaaggtcagactattgatggtttggtttgggtggcaccttgttcttcgttccttgccatttccatgccatccttttattatatacatacatttatttggagataaaatttgatgtcaagagaaacttgtctttctttcactctccaactcatcttcgtagtttgattctcatgggaggaccctgtttccatcatgctgcatctttttatctgataaagtgatatttcttagagcatcaaggttcgacaaccaacatattctcgtgtgaggaaatggaaaagtgatgtcttgaggacattttttatcttttgatgttgataattgttcatattattatggttcaacaactcctagcaccaagtcattctgtatgatctgttaacttgatagaagttaacatcatttgattttaagaaatgtaatcatatttcctgattgctcagaattgacttgttcatcatttttcaatgtccctaattggtattagatttttgtgatcttgtgtcatattctgtgatcaacaatgtacaatttgttgaataggctgttgttgaaaaagctgtatattatgctcttgtatggatcaataggctgttggctgtcggtcatgacatcgccatcaagacagataggaaagttatattttttcctaactatatatgctcttacctattcctgttctccatagtacaaaagatgatattgattttgtggctggtttcatttgttggaatgctcttcaactttcttacgctcatttacattgcttttctctgcggtaaattgctggcttaaatgcatgctgcttgaaccctataatcagatagaccatcccgaatgcaagtcaaggcctgatagtggtctttctgcaattacagagctggaccctggttatataacaggtttcaggtcctctctcttcagtatggaaagaatgggtcaaatggtgtgtagagtttggcattgaagctaatgcaattatcgctgttccgtatgattggagactgcccccatcaatgcttgaggagagagatctgtactttcacaaattaaagtttgtaacacttgcctcaacttgttatgaagcaaccaaatgctatacatctgttaggatcagtaagagttaatggcccagtgacggattcaaggtatcctgctcaccaacagatcccacaagcatacggttaccgccaaatgcctgcaaggttggacagtaccaacccatcacaggccatgggaggttacacgctgcagtcacagaaggaaacattatttgaagagttgccattttgaagagttactcgaatccaatattttgctcttttgaattccttggtgtacactggcaaatattagcatatttgaagagttgccatttcgatcatcatcttcatttgtactttttgggtcagatctaataaagcatcagcattaaatttacaatgatcacctaaatccatggtttttattgcctagagctggtaatgtttctctggttttgcattagttgcttgaaaattgaaagtatctgtatacttctctattgtattttactgcacataatggatttgtttgatgtgtagggattttaaggtatgtaaaatatcttaacttttaaaagatgtgaataagaacataaaatagtaattagtattttgaattttaatgtatcttatcgtaac

SEQ ID NO: 74103 - DNA, 3956 bp, Zea Mays
gaaaaaccctagagacgcccgcaggcagtcgctctcgcgcggcggctctccccgcctcgttcgcccctaccgcgccatcaacgtgcctccccgccgcccctgtcctccccatgcccgccgctcccacccgagatggttagcgcccctcctccttccggtcccttcccctgcctcggccggccagccatggattcaccaagcgggctctggtggcggccggcgccgtcgtcgtgtcctccattcccgtcaaccccctcgatgtcgccaaggagcaggacgatgcagtggggcagcatctctaatcatttaagcttcaaattaaccagtccattatattatgcaactctgtgaatagaattgagctactggctaagaaaataactgaactcggttattcatgcttcacattcatgctaagagcctaagatgttgcaagacaacagaaactgagtgtttcatgagtttcataatggtgcttgcagaaaccttttgtgcacagatatgtttaccagacgaattgatatctaggctatttatgtggttactaattttgactcctctaagacatatttacacagggttggtcgttatgggagatatgggcaccttggtttggcagtgaacttgaccacttacaaagattgtttcaacttatatagtattgataaaaaaaacttggaacggaaattaagacaatacccccacaaattgacctgtttgtatactgccaatgatgatagcgacagcttcatgagcgtcaggcacattttatttattttgacctgtttgtatactaacttaacacaagcttttttgtcaataacgtgggattcggaattttctgagctttgtgtagtggaggaggaggagaggcccatgtcggtggagctggaacccatcgccagcgagcagcagcttaactaggtccttggagaggcgtagcagctccagctcctcatcgtcctgctctggtaaccccactttcctagatcggtttgtgcctgtagggtgttcttgttaaagtttgcttgtaatgtctgtgagattgcaatcatggtcgtgtatgattgcggtgttcacagattttgtttgcttgttcctagatagtcatttatgtggtgcaaatttagcatcttggatgaagtgaaaatggacaattttgttcatttgttattaggttctggcacttggacttggtatttagtaactgagaatttacttatttagtagttatacagcccgtgtcattgtcgttgggcgaatgaatttcatcgtcagtctattgcatgaatgataaatgcatgtcggtggccttttgccgaatctaccattttgtttgttcctcatctccattcctatctgcttgtttattggtagtagaagtagaactgctatttatggctgaggcctgagggaaaaaataatcaaatgttcaaccaacttcatttttttcttgagtgcatgggttgcagcctttggctagcttatgatctcgtgtggtctatttaccatataaataaatagcagcattagttcaatttgatgttcatagttctctctctctaaagagtcatatgttagattcatgggaaatacttgaactatacatttttttaatgtatcagatgtgtgaattatcatgtccggatcaatttcaaccaaccaacagttcctttagcaaatttgtcaggcatatttatgcacttgttcgcataactgagactatattatttttataagactaaggtcagactattgatggtttggtttgggtggcaccttgttcttcgttccttgccatttccatgccatccttttattatatacatacatttatttggagataaaatttgatgtcaagagaaacttgtctttctttcactctccaactcatcttcgtagtttgattctcatgggaggaccctgtttccatcatgctgcatctttttatctgataaagtgatatttcttagagcatcaaggttcgacaaccaacatattctcgtgtgaggaaatggaaaagtgatgtcttgaggacattttttatcttttgatgttgataattgttcatattattatggttcaacaactcctagcaccaagtcattctgtatgatctgttaacttgatagaagttaacatcatttgattttaagaaatgtaatcatatttcctgattgctcagaattgacttgttcatcatttttcaatgtccctaattggtattagatttttgtgatcttgtgtcatattctgtgatcaacaatgtacaatttgttgaataggctgttgttgaaaaagctgtatattatgctcttgtatggatcaataggctgttggctgtcggtcatgacatcgccatcaagacagataggaaagttatattttttcctaactatatatgctcttacctattcctgttctccatagtacaaaagatgatattgattttgtggctggtttcatttgttggaatgctcttcaactttcttacgctcatttacattggtgagttctctgtccatgttaattttaagtgagtatgtaactatatgctctcatacgctttagggatccgctacgagcagcctacacatttatcatctgttcccatgcttatttttccttttttttattagtgatgggaatcgtatatccataaatagatctggagactggagcagtttttgttgggataaactttgtactggaccggagcatcttatctctggatgtgagtgccatgaaagtgatacccaacaaacaactaactctggaacacctttggtatgtcgggtaggcgcaaagccagcaagacaacaactgcttgagcagctttggccagttttgcttgccaccatgaatagccatatgttggccatcacatggtaccttgttcgtcccaaactagaccagagcattacaagcaatgactgccatatctaaaattgaaaacatgtgcggcttataagtatcctaaatttgctccacttctaagtatccaagatctactggttttgatgcgttccattgcttgcagcttttctctgcggtaaattgctggcttaaatgcatgctgcttgaaccctataatcagatagaccatcccgaatgcaagtcaaggcctgatagtggtctttctgcaattacagagctggaccctggttatataacaggtttcaggtcctctctcttcagtatggaaagaatgggtcaaatggtgtgtagagtttggcattgaagctaatgcaattatcgctgttccgtatgattggagactgcccccatcaatgcttgaggagagagatctgtactttcacaaattaaagtttgtaacacttgcctcaacttgttatgaagcaaccaaatgctatacatctgttaggatcagtaagagttaatggcccagtgacggattcaaggtatcctgctcaccaacagatcccacaagcatacggttaccgccaaatgcctgcaaggttggacagtaccaacccatcacaggccatgggaggttacacgctgcagtcacagaaggaaacattatttgaagagttgccattttgaagagttactcgaatccaatattttgctcttttgaattccttggtgtacactggcaaatattagcatatttgaagagttgccatttcgatcatcatcttcatttgtactttttgggtcagatctaataaagcatcagcattaaatttacaatgatcacctaaatccatggtttttattgcctagagctggtaatgtttctctggttttgcattagttgcttgaaaattgaaagtatctgtatacttctctattgtattttactgcacataatggatttgtttgatgtgtagggattttaaggtatgtaaaatatcttaacttttaaaagatgtgaataagaacataaaatagtaattagtattttgaattttaatgtatcttatcgtaac

SEQ ID NO: 74104 - DNA, 1633 bp, Zea Mays
gaaaaaccctagagacgcccgcaggcagtcgctctcgcgcggcggctctccccgcctcgttcgcccctaccgcgccatcaacgtgcctccccgccgcccctgtcctccccatgcccgccgctcccacccgagatggttagcgcccctcctccttccggtcccttcccctgcctcggccggccagccatggattcaccaagcgggctctggtggcggccggcgccgtcgtcgtgtcctccattcccgtcaaccccctcgatgtcgccaagatatgtttaccagacgaattgatatctaggctatttatgtggttactaattttgactcctctaagacatatttacacagggttggtcgttatgggagatatgggcaccttggtttggcagtgaacttgaccacttacaaagattgtttcaacttatatagtattgataaaaaaaacttggaacggaaattaagacaatacccccacaaattgacctgtttgtatactgccaatgatgatagcgacagcttcatgagcgtcagtggaggaggaggagaggcccatgtcggtggagctggaacccatcgccagcgagcagcagcttaactaggtccttggagaggcgtagcagctccagctcctcatcgtcctgctctgtacaaaagatgatattgattttgtggctggtttcatttgttggaatgctcttcaactttcttacgctcatttacattgcttttctctgcggtaaattgctggcttaaatgcatgctgcttgaaccctataatcagatagaccatcccgaatgcaagtcaaggcctgatagtggtctttctgcaattacagagctggaccctggttatataacaggtcctctctcttcagtatggaaagaatgggtcaaatggtgtgtagagtttggcattgaagctaatgcaattatcgctgttccgtatgattggagactgcccccatcaatgcttgaggagagagatctgtactttcacaaattaaagtttgtaacacttgcctcaacttgttatgaagcaaccaaatgctatacatctgttaggatcagtaagagttaatggcccagtgacggattcaaggtatcctgctcaccaacagatcccacaagcatacggttaccgccaaatgcctgcaaggttggacagtaccaacccatcacaggccatgggaggttacacgctgcagtcacagaaggaaacattatttgaagagttgccattttgaagagttactcgaatccaatattttgctcttttgaattccttggtgtacactggcaaatattagcatatttgaagagttgccatttcgatcatcatcttcatttgtactttttgggtcagatctaataaagcatcagcattaaatttacaatgatcacctaaatccatggtttttattgcctagagctggtaatgtttctctggttttgcattagttgcttgaaaattgaaagtatctgtatacttctctattgtattttactgcacataatggatttgtttgatgtgtagggattttaaggtatgtaaaatatcttaacttttaaaagatgtgaataagaacataaaatagtaattagtattttgaattttaatgtatcttatcgtaac

SEQ ID NO: 74105 - DNA, 1650 bp, Zea Mays
gaaaaaccctagagacgcccgcaggcagtcgctctcgcgcggcggctctccccgcctcgttcgcccctaccgcgccatcaacgtgcctccccgccgcccctgtcctccccatgcccgccgctcccacccgagatggttagcgcccctcctccttccggtcccttcccctgcctcggccggccagccatggattcaccaagcgggctctggtggcggccggcgccgtcgtcgtgtcctccattcccgtcaaccccctcgatgtcgccaagatatgtttaccagacgaattgatatctaggctatttatgtggttactaattttgactcctctaagacatatttacacagggttggtcgttatgggagatatgggcaccttggtttggcagtgaacttgaccacttacaaagattgtttcaacttatatagtattgataaaaaaaacttggaacggaaattaagacaatacccccacaaattgacctgtttgtatactgccaatgatgatagcgacagcttcatgagcgtcaggcacattttatttattttgacctgtttgtatactaacttaacacaagcttttttgtcaataacgtgggattcggaattttctgagctttgtgtagtggaggaggaggagaggcccatgtcggtggagctggaacccatcgccagcgagcagcagcttaactaggtccttggagaggcgtagcagctccagctcctcatcgtcctgctctgcttttctctgcggtaaattgctggcttaaatgcatgctgcttgaaccctataatcagatagaccatcccgaatgcaagtcaaggcctgatagtggtctttctgcaattacagagctggaccctggttatataacaggtcctctctcttcagtatggaaagaatgggtcaaatggtgtgtagagtttggcattgaagctaatgcaattatcgctgttccgtatgattggagactgcccccatcaatgcttgaggagagagatctgtactttcacaaattaaagtttgtaacacttgcctcaacttgttatgaagcaaccaaatgctatacatctgttaggatcagtaagagttaatggcccagtgacggattcaaggtatcctgctcaccaacagatcccacaagcatacggttaccgccaaatgcctgcaaggttggacagtaccaacccatcacaggccatgggaggttacacgctgcagtcacagaaggaaacattatttgaagagttgccattttgaagagttactcgaatccaatattttgctcttttgaattccttggtgtacactggcaaatattagcatatttgaagagttgccatttcgatcatcatcttcatttgtactttttgggtcagatctaataaagcatcagcattaaatttacaatgatcacctaaatccatggtttttattgcctagagctggtaatgtttctctggttttgcattagttgcttgaaaattgaaagtatctgtatacttctctattgtattttactgcacataatggatttgtttgatgtgtagggattttaaggtatgtaaaatatcttaacttttaaaagatgtgaataagaacataaaatagtaattagtattttgaattttaatgtatcttatcgtaac

SEQ ID NO: 74106 - DNA, 1770 bp, Zea Mays
ctagagacgcccgcaggcagtcgctctcgcgcggcggctctccccgcctcgttcgcccctaccgcgccatcaacgtgcctccccgccgcccctgtcctccccatgcccgccgctcccacccgagatggttagcgcccctcctccttccggtcccttcccctgcctcggccggccagccatggattcaccaagcgggctctggtggcggccggcgccgtcgtcgtgtcctccattcccgtcaaccccctcgatgtcgccaagatatgtttaccagacgaattgatatctaggctatttatgtggttactaattttgactcctctaagacatatttacacagggttggtcgttatgggagatatgggcaccttggtttggcagtgaacttgaccacttacaaagattgtttcaacttatatagtattgataaaaaaaacttggaacggaaattaagacaatacccccacaaattgacctgtttgtatactgccaatgatgatagcgacagcttcatgagcgtcagtggaggaggaggagaggcccatgtcggtggagctggaacccatcgccagcgagcagcagcttaactaggtccttggagaggcgtagcagctccagctcctcatcgtcctgctctggctgttgttgaaaaagctgtatattatgctcttgtatggatcaataggctgttggctgtcggtcatgacatcgccatcaagacagataggaaagttatattttttcctaactatatatgctcttacctattcctgttctccatagtacaaaagatgatattgattttgtggctggtttcatttgttggaatgctcttcaactttcttacgctcatttacattgcttttctctgcggtaaattgctggcttaaatgcatgctgcttgaaccctataatcagatagaccatcccgaatgcaagtcaaggcctgatagtggtctttctgcaattacagagctggaccctggttatataacaggtcctctctcttcagtatggaaagaatgggtcaaatggtgtgtagagtttggcattgaagctaatgcaattatcgctgttccgtatgattggagactgcccccatcaatgcttgaggagagagatctgtactttcacaaattaaagtttgtaacacttgcctcaacttgttatgaagcaaccaaatgctatacatctgttaggatcagtaagagttaatggcccagtgacggattcaaggtatcctgctcaccaacagatcccacaagcatacggttaccgccaaatgcctgcaaggttggacagtaccaacccatcacaggccatgggaggttacacgctgcagtcacagaaggaaacattatttgaagagttgccattttgaagagttactcgaatccaatattttgctcttttgaattccttggtgtacactggcaaatattagcatatttgaagagttgccatttcgatcatcatcttcatttgtactttttgggtcagatctaataaagcatcagcattaaatttacaatgatcacctaaatccatggtttttattgcctagagctggtaatgtttctctggttttgcattagttgcttgaaaattgaaagtatctgtatacttctctattgtattttactgcacataatggatttgtttgatgtgtagggattttaaggtatgtaaaatatcttaacttttaaaagatgtgaataagaacataaaatagtaattagtattttgaattttaatgtatcttatcgtaac

SEQ ID NO: 74107 - DNA, 2396 bp, Zea Mays
gcccgcaggcagtcgctctcgcgcggcggctctccccgcctcgttcgcccctaccgcgccatcaacgtgcctccccgccgcccctgtcctccccatgcccgccgctcccacccgagatggttagcgcccctcctccttccggtcccttcccctgcctcggccggccagccatggattcaccaagcgggctctggtggcggccggcgccgtcgtcgtgtcctccattcccgtcaaccccctcgatgtcgccaagatatgtttaccagacgaattgatatctaggctatttatgtggttactaattttgactcctctaagacatatttacacagggttggtcgttatgggagatatgggcaccttggtttggcagtgaacttgaccacttacaaagattgtttcaacttatatagtattgataaaaaaaacttggaacggaaattaagacaatacccccacaaattgacctgtttgtatactgccaatgatgatagcgacagcttcatgagcgtcaggcacattttatttattttgacctgtttgtatactaacttaacacaagcttttttgtcaataacgtgggattcggaattttctgagctttgtgtagtggaggaggaggagaggcccatgtcggtggagctggaacccatcgccagcgagcagcagcttaactaggtccttggagaggcgtagcagctccagctcctcatcgtcctgctctggctgttgttgaaaaagctgtatattatgctcttgtatggatcaataggctgttggctgtcggtcatgacatcgccatcaagacagataggaaagttatattttttcctaactatatatgctcttacctattcctgttctccatagtacaaaagatgatattgattttgtggctggtttcatttgttggaatgctcttcaactttcttacgctcatttacattggtgagttctctgtccatgttaattttaagtgagtatgtaactatatgctctcatacgctttagggatccgctacgagcagcctacacatttatcatctgttcccatgcttatttttccttttttttattagtgatgggaatcgtatatccataaatagatctggagactggagcagtttttgttgggataaactttgtactggaccggagcatcttatctctggatgtgagtgccatgaaagtgatacccaacaaacaactaactctggaacacctttggtatgtcgggtaggcgcaaagccagcaagacaacaactgcttgagcagctttggccagttttgcttgccaccatgaatagccatatgttggccatcacatggtaccttgttcgtcccaaactagaccagagcattacaagcaatgactgccatatctaaaattgaaaacatgtgcggcttataagtatcctaaatttgctccacttctaagtatccaagatctactggttttgatgcgttccattgcttgcagcttttctctgcggtaaattgctggcttaaatgcatgctgcttgaaccctataatcagatagaccatcccgaatgcaagtcaaggcctgatagtggtctttctgcaattacagagctggaccctggttatataacaggtttcaggtcctctctcttcagtatggaaagaatgggtcaaatggtgtgtagagtttggcattgaagctaatgcaattatcgctgttccgtatgattggagactgcccccatcaatgcttgaggagagagatctgtactttcacaaattaaagtttgtaacacttgcctcaacttgttatgaagcaaccaaatgctatacatctgttaggatcagtaagagttaatggcccagtgacggattcaaggtatcctgctcaccaacagatcccacaagcatacggttaccgccaaatgcctgcaaggttggacagtaccaacccatcacaggccatgggaggttacacgctgcagtcacagaaggaaacattatttgaagagttgccattttgaagagttactcgaatccaatattttgctcttttgaattccttggtgtacactggcaaatattagcatatttgaagagttgccatttcgatcatcatcttcatttgtactttttgggtcagatctaataaagcatcagcattaaatttacaatgatcacctaaatccatggtttttattgcctagagctggtaatgtttctctggttttgcattagttgcttgaaaattgaaagtatctgtatacttctctattgtattttactgcacataatggatttgtttgatgtgtagggattttaaggtatgtaaaatatcttaacttttaaaagatgtgaataagaacataaaatagtaattagtattttgaattttaatgtatcttatcgtaac

SEQ ID NO: 74108 - DNA, 1661 bp, Zea Mays
cccgcaggcagtcgctctcgcgcggcggctctccccgcctcgttcgcccctaccgcgccatcaacgtgcctccccgccgcccctgtcctccccatgcccgccgctcccacccgagatggttagcgcccctcctccttccggtcccttcccctgcctcggccggccagccatggattcaccaagcgggctctggtggcggccggcgccgtcgtcgtgtcctccattcccgtcaaccccctcgatgtcgccaaggagcaggacgatgcagtggggcagcatctctaatcatttaagcttcaaattaaccagtccattatattatgcaactctgtgaatagaattgagctactggctaagaaaataactgaactcggttattcatgcttcacattcatgctaagagcctaagatgttgcaagacaacagaaactgagtgtttcatgagtttcataatggtgcttgcagaaaccttttgtgcacagatatgtttaccagacgaattgatatctaggctatttatgtggttactaattttgactcctctaagacatatttacacagggttggtcgttatgggagatatgggcaccttggtttggcagtgaacttgaccacttacaaagattgtttcaacttatatagtattgataaaaaaaacttggaacggaaattaagacaatacccccacaaattgacctgtttgtatactgccaatgatgatagcgacagcttcatgagcgtcaggcacattttatttattttgacctgtttgtatactaacttaacacaagcttttttgtcaataacgtgggattcggaattttctgagctttgtgtagtggaggaggaggagaggcccatgtcggtggagctggaacccatcgccagcgagcagcagcttaactaggtccttggagaggcgtagcagctccagctcctcatcgtcctgctctgcttttctctgcggtaaattgctggcttaaatgcatgctgcttgaaccctataatcagatagaccatcccgaatgcaagtcaaggcctgatagtggtctttctgcaattacagagctggaccctggttatataacaggatcagtaagagttaatggcccagtgacggattcaaggtatcctgctcaccaacagatcccacaagcatacggttaccgccaaatgcctgcaaggttggacagtaccaacccatcacaggccatgggaggttacacgctgcagtcacagaaggaaacattatttgaagagttgccattttgaagagttactcgaatccaatattttgctcttttgaattccttggtgtacactggcaaatattagcatatttgaagagttgccatttcgatcatcatcttcatttgtactttttgggtcagatctaataaagcatcagcattaaatttacaatgatcacctaaatccatggtttttattgcctagagctggtaatgtttctctggttttgcattagttgcttgaaaattgaaagtatctgtatacttctctattgtattttactgcacataatggatttgtttgatgtgtagggattttaaggtatgtaaaatatcttaacttttaaaagatgtgaataagaacataaaatagtaattagtattttgaattttaatgtatcttatcgtaac

SEQ ID NO: 74109 - DNA, 2884 bp, Zea Mays
caggcagtcgctctcgcgcggcggctctccccgcctcgttcgcccctaccgcgccatcaacgtgcctccccgccgcccctgtcctccccatgcccgccgctcccacccgagatggttagcgcccctcctccttccggtcccttcccctgcctcggccggccagccatggattcaccaagcgggctctggtggcggccggcgccgtcgtcgtgtcctccattcccgtcaaccccctcgatgtcgccaagatatgtttaccagacgaattgatatctaggctatttatgtggttactaattttgactcctctaagacatatttacacagggttggtcgttatgggagatatgggcaccttggtttggcagtgaacttgaccacttacaaagattgtttcaacttatatagtattgataaaaaaaacttggaacggaaattaagacaatacccccacaaattgacctgtttgtatactgccaatgatgatagcgacagcttcatgagcgtcaggcacattttatttattttgacctgtttgtatactaacttaacacaagcttttttgtcaataacgtgggattcggaattttctgagctttgtgtagtggaggaggaggagaggcccatgtcggtggagctggaacccatcgccagcgagcagcagcttaactaggtccttggagaggcgtagcagctccagctcctcatcgtcctgctctggctgttgttgaaaaagctgtatattatgctcttgtatggatcaataggctgttggctgtcggtcatgacatcgccatcaagacagataggaaagttatattttttcctaactatatatgctcttacctattcctgttctccatagtacaaaagatgatattgattttgtggctggtttcatttgttggaatgctcttcaactttcttacgctcatttacattggtgagttctctgtccatgttaattttaagtgagtatgtaactatatgctctcatacgctttagggatccgctacgagcagcctacacatttatcatctgttcccatgcttatttttccttttttttattagtgatgggaatcgtatatccataaatagatctggagactggagcagtttttgttgggataaactttgtactggaccggagcatcttatctctggatgtgagtgccatgaaagtgatacccaacaaacaactaactctggaacacctttggtatgtcgggtaggcgcaaagccagcaagacaacaactgcttgagcagctttggccagttttgcttgccaccatgaatagccatatgttggccatcacatggtaccttgttcgtcccaaactagaccagagcattacaagcaatgactgccatatctaaaattgaaaacatcttttctctgcggtaaattgctggcttaaatgcatgctgcttgaaccctataatcagatagaccatcccgaatgcaagtcaaggcctgatagtggtctttctgcaattacagagctggaccctggttatataacaggtaaaacgtatggcttactttctttttcttagcactgacttcacaaagttgtagccatgagttgtaatatctagagactctaatatctattacatgataattttagattatatcatactccatgttgagtgaaaagttcattttggaaaacatttttgcaagttctgagctgaagtggctgaaacatggctgaaacagaaaatgtttttttacacgagatcatcaaactaatgaccataggtgctacaacaaagtattgattaggagagaatcatgttctttattcatgtctaagctgaacaatgtggaataatttgtgcaggtacagttatctgtatctcactcacactactgcttctttcaaagtaatctacgttcatctgtttccaaatggcaactccccatatttgctttgatattagcattgtgttctacgcttcagaatagtcctgttagacagggtgcattcagtactcatgtttgttagtgcattctgaagctacccatttcatttattcatgaagagagaaagggaagggaaaacaccttgcactgatattattttattgggcaaggtttcaggtcctctctcttcagtatggaaagaatgggtcaaatggtgtgtagagtttggcattgaagctaatgcaattatcgctgttccgtatgattggagactgcccccatcaatgcttgaggagagagatctgtactttcacaaattaaagtttgtaacacttgcctcaacttgttatgaagcaaccaaatgctatacatctgttaggatcagtaagagttaatggcccagtgacggattcaaggtatcctgctcaccaacagatcccacaagcatacggttaccgccaaatgcctgcaaggttggacagtaccaacccatcacaggccatgggaggttacacgctgcagtcacagaaggaaacattatttgaagagttgccattttgaagagttactcgaatccaatattttgctcttttgaattccttggtgtacactggcaaatattagcatatttgaagagttgccatttcgatcatcatcttcatttgtactttttgggtcagatctaataaagcatcagcattaaatttacaatgatcacctaaatccatggtttttattgcctagagctggtaatgtttctctggttttgcattagttgcttgaaaattgaaagtatctgtatacttctctattgtattttactgcacataatggatttgtttgatgtgtagggattttaaggtatgtaaaatatcttaacttttaaaagatgtgaataagaacataaaatagtaattagtattttgaattttaatgtatcttatcgtaac

SEQ ID NO: 74110 - DNA, 1539 bp, Zea Mays
agtcgctctcgcgcggcggctctccccgcctcgttcgcccctaccgcgccatcaacgtgcctccccgccgcccctgtcctccccatgcccgccgctcccacccgagatggttagcgcccctcctccttccggtcccttcccctgcctcggccggccagccatggattcaccaagcgggctctggtggcggccggcgccgtcgtcgtgtcctccattcccgtcaaccccctcgatgtcgccaagatatgtttaccagacgaattgatatctaggctatttatgtggttactaattttgactcctctaagacatatttacacagggttggtcgttatgggagatatgggcaccttggtttggcagtgaacttgaccacttacaaagattgtttcaacttatatagtattgataaaaaaaacttggaacggaaattaagacaatacccccacaaattgacctgtttgtatactgccaatgatgatagcgacagcttcatgagcgtcagtggaggaggaggagaggcccatgtcggtggagctggaacccatcgccagcgagcagcagcttaactaggtccttggagaggcgtagcagctccagctcctcatcgtcctgctctgcttttctctgcggtaaattgctggcttaaatgcatgctgcttgaaccctataatcagatagaccatcccgaatgcaagtcaaggcctgatagtggtctttctgcaattacagagctggaccctggttatataacaggtttcaggtcctctctcttcagtatggaaagaatgggtcaaatggtgtgtagagtttggcattgaagctaatgcaattatcgctgttccgtatgattggagactgcccccatcaatgcttgaggagagagatctgtactttcacaaattaaagtttgtaacacttgcctcaacttgttatgaagcaaccaaatgctatacatctgttagcaggatcagtaagagttaatggcccagtgacggattcaaggtatcctgctcaccaacagatcccacaagcatacggttaccgccaaatgcctgcaaggttggacagtaccaacccatcacaggccatgggaggttacacgctgcagtcacagaaggaaacattatttgaagagttgccattttgaagagttactcgaatccaatattttgctcttttgaattccttggtgtacactggcaaatattagcatatttgaagagttgccatttcgatcatcatcttcatttgtactttttgggtcagatctaataaagcatcagcattaaatttacaatgatcacctaaatccatggtttttattgcctagagctggtaatgtttctctggttttgcattagttgcttgaaaattgaaagtatctgtatacttctctattgtattttactgcacataatggatttgtttgatgtgtagggattttaaggtatgtaaaatatcttaacttttaaaagatgtgaataagaacataaaatagtaattagtattttgaattttaatgtatcttatcgtaac

SEQ ID NO: 74111 - DNA, 4504 bp, Zea Mays
gtcgctctcgcgcggcggctctccccgcctcgttcgcccctaccgcgccatcaacgtgcctccccgccgcccctgtcctccccatgcccgccgctcccacccgagatggttagcgcccctcctccttccggtcccttcccctgcctcggccggccagccatggattcaccaagcgggctctggtggcggccggcgccgtcgtcgtgtcctccattcccgtcaaccccctcgatgtcgccaaggagcaggacgatgcagtggggcagcatctctaatcatttaagcttcaaattaaccagtccattatattatgcaactctgtgaatagaattgagctactggctaagaaaataactgaactcggttattcatgcttcacattcatgctaagagcctaagatgttgcaagacaacagaaactgagtgtttcatgagtttcataatggtgcttgcagaaaccttttgtgcacagatatgtttaccagacgaattgatatctaggctatttatgtggttactaattttgactcctctaagacatatttacacagggttggtcgttatgggagatatgggcaccttggtttggcagtgaacttgaccacttacaaagattgtttcaacttatatagtattgataaaaaaaacttggaacggaaattaagacaatacccccacaaattgacctgtttgtatactgccaatgatgatagcgacagcttcatgagcgtcaggcacattttatttattttgacctgtttgtatactaacttaacacaagcttttttgtcaataacgtgggattcggaattttctgagctttgtgtagtggaggaggaggagaggcccatgtcggtggagctggaacccatcgccagcgagcagcagcttaactaggtccttggagaggcgtagcagctccagctcctcatcgtcctgctctggtaaccccactttcctagatcggtttgtgcctgtagggtgttcttgttaaagtttgcttgtaatgtctgtgagattgcaatcatggtcgtgtatgattgcggtgttcacagattttgtttgcttgttcctagatagtcatttatgtggtgcaaatttagcatcttggatgaagtgaaaatggacaattttgttcatttgttattaggttctggcacttggacttggtatttagtaactgagaatttacttatttagtagttatacagcccgtgtcattgtcgttgggcgaatgaatttcatcgtcagtctattgcatgaatgataaatgcatgtcggtggccttttgccgaatctaccattttgtttgttcctcatctccattcctatctgcttgtttattggtagtagaagtagaactgctatttatggctgaggcctgagggaaaaaataatcaaatgttcaaccaacttcatttttttcttgagtgcatgggttgcagcctttggctagcttatgatctcgtgtggtctatttaccatataaataaatagcagcattagttcaatttgatgttcatagttctctctctctaaagagtcatatgttagattcatgggaaatacttgaactatacatttttttaatgtatcagatgtgtgaattatcatgtccggatcaatttcaaccaaccaacagttcctttagcaaatttgtcaggcatatttatgcacttgttcgcataactgagactatattatttttataagactaaggtcagactattgatggtttggtttgggtggcaccttgttcttcgttccttgccatttccatgccatccttttattatatacatacatttatttggagataaaatttgatgtcaagagaaacttgtctttctttcactctccaactcatcttcgtagtttgattctcatgggaggaccctgtttccatcatgctgcatctttttatctgataaagtgatatttcttagagcatcaaggttcgacaaccaacatattctcgtgtgaggaaatggaaaagtgatgtcttgaggacattttttatcttttgatgttgataattgttcatattattatggttcaacaactcctagcaccaagtcattctgtatgatctgttaacttgatagaagttaacatcatttgattttaagaaatgtaatcatatttcctgattgctcagaattgacttgttcatcatttttcaatgtccctaattggtattagatttttgtgatcttgtgtcatattctgtgatcaacaatgtacaatttgttgaataggctgttgttgaaaaagctgtatattatgctcttgtatggatcaataggctgttggctgtcggtcatgacatcgccatcaagacagataggaaagttatattttttcctaactatatatgctcttacctattcctgttctccatagtacaaaagatgatattgattttgtggctggtttcatttgttggaatgctcttcaactttcttacgctcatttacattggtgagttctctgtccatgttaattttaagtgagtatgtaactatatgctctcatacgctttagggatccgctacgagcagcctacacatttatcatctgttcccatgcttatttttccttttttttattagtgatgggaatcgtatatccataaatagatctggagactggagcagtttttgttgggataaactttgtactggaccggagcatcttatctctggatgtgagtgccatgaaagtgatacccaacaaacaactaactctggaacacctttggtatgtcgggtaggcgcaaagccagcaagacaacaactgcttgagcagctttggccagttttgcttgccaccatgaatagccatatgttggccatcacatggtaccttgttcgtcccaaactagaccagagcattacaagcaatgactgccatatctaaaattgaaaacatgtgcggcttataagtatcctaaatttgctccacttctaagtatccaagatctactggttttgatgcgttccattgcttgcagcttttctctgcggtaaattgctggcttaaatgcatgctgcttgaaccctataatcagatagaccatcccgaatgcaagtcaaggcctgatagtggtctttctgcaattacagagctggaccctggttatataacaggtaaaacgtatggcttactttctttttcttagcactgacttcacaaagttgtagccatgagttgtaatatctagagactctaatatctattacatgataattttagattatatcatactccatgttgagtgaaaagttcattttggaaaacatttttgcaagttctgagctgaagtggctgaaacatggctgaaacagaaaatgtttttttacacgagatcatcaaactaatgaccataggtgctacaacaaagtattgattaggagagaatcatgttctttattcatgtctaagctgaacaatgtggaataatttgtgcaggtacagttatctgtatctcactcacactactgcttctttcaaagtaatctacgttcatctgtttccaaatggcaactccccatatttgctttgatattagcattgtgttctacgcttcagaatagtcctgttagacagggtgcattcagtactcatgtttgttagtgcattctgaagctacccatttcatttattcatgaagagagaaagggaagggaaaacaccttgcactgatattattttattgggcaaggtttcaggtcctctctcttcagtatggaaagaatgggtcaaatggtgtgtagagtttggcattgaagctaatgcaattatcgctgttccgtatgattggagactgcccccatcaatgcttgaggagagagatctgtactttcacaaattaaagtttgtaacacttgcctcaacttgttatgaagcaaccaaatgctatacatctgttaggatcagtaagagttaatggcccagtgacggattcaaggtatcctgctcaccaacagatcccacaagcatacggttaccgccaaatgcctgcaaggttggacagtaccaacccatcacaggccatgggaggttacacgctgcagtcacagaaggaaacattatttgaagagttgccattttgaagagttactcgaatccaatattttgctcttttgaattccttggtgtacactggcaaatattagcatatttgaagagttgccatttcgatcatcatcttcatttgtactttttgggtcagatctaataaagcatcagcattaaatttacaatgatcacctaaatccatggtttttattgcctagagctggtaatgtttctctggttttgcattagttgcttgaaaattgaaagtatctgtatacttctctattgtattttactgcacataatggatttgtttgatgtgtagggattttaaggtatgtaaaatatcttaacttttaaaagatgtgaataagaacataaaatagtaattagtattttgaattttaatgtatcttatcgtaac

SEQ ID NO: 74112 - DNA, 1704 bp, Zea Mays
gtcgctctcgcgcggcggctctccccgcctcgttcgcccctaccgcgccatcaacgtgcctccccgccgcccctgtcctccccatgcccgccgctcccacccgagatggttagcgcccctcctccttccggtcccttcccctgcctcggccggccagccatggattcaccaagcgggctctggtggcggccggcgccgtcgtcgtgtcctccattcccgtcaaccccctcgatgtcgccaagatatgtttaccagacgaattgatatctaggctatttatgtggttactaattttgactcctctaagacatatttacacagggttggtcgttatgggagatatgggcaccttggtttggcagtgaacttgaccacttacaaagattgtttcaacttatatagtattgataaaaaaaacttggaacggaaattaagacaatacccccacaaattgacctgtttgtatactgccaatgatgatagcgacagcttcatgagcgtcaggcacattttatttattttgacctgtttgtatactaacttaacacaagcttttttgtcaataacgtgggattcggaattttctgagctttgtgtagtggaggaggaggagaggcccatgtcggtggagctggaacccatcgccagcgagcagcagcttaactaggtccttggagaggcgtagcagctccagctcctcatcgtcctgctctgtacaaaagatgatattgattttgtggctggtttcatttgttggaatgctcttcaactttcttacgctcatttacattgcttttctctgcggtaaattgctggcttaaatgcatgctgcttgaaccctataatcagatagaccatcccgaatgcaagtcaaggcctgatagtggtctttctgcaattacagagctggaccctggttatataacaggtcctctctcttcagtatggaaagaatgggtcaaatggtgtgtagagtttggcattgaagctaatgcaattatcgctgttccgtatgattggagactgcccccatcaatgcttgaggagagagatctgtactttcacaaattaaagtttgtaacacttgcctcaacttgttatgaagcaaccaaatgctatacatctgttagcaggatcagtaagagttaatggcccagtgacggattcaaggtatcctgctcaccaacagatcccacaagcatacggttaccgccaaatgcctgcaaggttggacagtaccaacccatcacaggccatgggaggttacacgctgcagtcacagaaggaaacattatttgaagagttgccattttgaagagttactcgaatccaatattttgctcttttgaattccttggtgtacactggcaaatattagcatatttgaagagttgccatttcgatcatcatcttcatttgtactttttgggtcagatctaataaagcatcagcattaaatttacaatgatcacctaaatccatggtttttattgcctagagctggtaatgtttctctggttttgcattagttgcttgaaaattgaaagtatctgtatacttctctattgtattttactgcacataatggatttgtttgatgtgtagggattttaaggtatgtaaaatatcttaacttttaaaagatgtgaataagaacataaaatagtaattagtattttgaattttaatgtatcttatcgtaac

SEQ ID NO: 74113 - DNA, 1709 bp, Zea Mays
cgctctcgcgcggcggctctccccgcctcgttcgcccctaccgcgccatcaacgtgcctccccgccgcccctgtcctccccatgcccgccgctcccacccgagatggttagcgcccctcctccttccggtcccttcccctgcctcggccggccagccatggattcaccaagcgggctctggtggcggccggcgccgtcgtcgtgtcctccattcccgtcaaccccctcgatgtcgccaagatatgtttaccagacgaattgatatctaggctatttatgtggttactaattttgactcctctaagacatatttacacagggttggtcgttatgggagatatgggcaccttggtttggcagtgaacttgaccacttacaaagattgtttcaacttatatagtattgataaaaaaaacttggaacggaaattaagacaatacccccacaaattgacctgtttgtatactgccaatgatgatagcgacagcttcatgagcgtcaggcacattttatttattttgacctgtttgtatactaacttaacacaagcttttttgtcaataacgtgggattcggaattttctgagctttgtgtagtggaggaggaggagaggcccatgtcggtggagctggaacccatcgccagcgagcagcagcttaactaggtccttggagaggcgtagcagctccagctcctcatcgtcctgctctgtacaaaagatgatattgattttgtggctggtttcatttgttggaatgctcttcaactttcttacgctcatttacattgcttttctctgcggtaaattgctggcttaaatgcatgctgcttgaaccctataatcagatagaccatcccgaatgcaagtcaaggcctgatagtggtctttctgcaattacagagctggaccctggttatataacaggtttcaggtcctctctcttcagtatggaaagaatgggtcaaatggtgtgtagagtttggcattgaagctaatgcaattatcgctgttccgtatgattggagactgcccccatcaatgcttgaggagagagatctgtactttcacaaattaaagtttgtaacacttgcctcaacttgttatgaagcaaccaaatgctatacatctgttagcaggatcagtaagagttaatggcccagtgacggattcaaggtatcctgctcaccaacagatcccacaagcatacggttaccgccaaatgcctgcaaggttggacagtaccaacccatcacaggccatgggaggttacacgctgcagtcacagaaggaaacattatttgaagagttgccattttgaagagttactcgaatccaatattttgctcttttgaattccttggtgtacactggcaaatattagcatatttgaagagttgccatttcgatcatcatcttcatttgtactttttgggtcagatctaataaagcatcagcattaaatttacaatgatcacctaaatccatggtttttattgcctagagctggtaatgtttctctggttttgcattagttgcttgaaaattgaaagtatctgtatacttctctattgtattttactgcacataatggatttgtttgatgtgtagggattttaaggtatgtaaaatatcttaacttttaaaagatgtgaataagaacataaaatagtaattagtattttgaattttaatgtatcttatcgtaac

SEQ ID NO: 74114 - DNA, 1971 bp, Zea Mays
ggcggctctccccgcctcgttcgcccctaccgcgccatcaacgtgcctccccgccgcccctgtcctccccatgcccgccgctcccacccgagatggttagcgcccctcctccttccggtcccttcccctgcctcggccggccagccatggattcaccaagcgggctctggtggcggccggcgccgtcgtcgtgtcctccattcccgtcaaccccctcgatgtcgccaaggagcaggacgatgcagtggggcagcatctctaatcatttaagcttcaaattaaccagtccattatattatgcaactctgtgaatagaattgagctactggctaagaaaataactgaactcggttattcatgcttcacattcatgctaagagcctaagatgttgcaagacaacagaaactgagtgtttcatgagtttcataatggtgcttgcagaaaccttttgtgcacagatatgtttaccagacgaattgatatctaggctatttatgtggttactaattttgactcctctaagacatatttacacagggttggtcgttatgggagatatgggcaccttggtttggcagtgaacttgaccacttacaaagattgtttcaacttatatagtattgataaaaaaaacttggaacggaaattaagacaatacccccacaaattgacctgtttgtatactgccaatgatgatagcgacagcttcatgagcgtcagtggaggaggaggagaggcccatgtcggtggagctggaacccatcgccagcgagcagcagcttaactaggtccttggagaggcgtagcagctccagctcctcatcgtcctgctctggctgttgttgaaaaagctgtatattatgctcttgtatggatcaataggctgttggctgtcggtcatgacatcgccatcaagacagataggaaagttatattttttcctaactatatatgctcttacctattcctgttctccatagtacaaaagatgatattgattttgtggctggtttcatttgttggaatgctcttcaactttcttacgctcatttacattgcttttctctgcggtaaattgctggcttaaatgcatgctgcttgaaccctataatcagatagaccatcccgaatgcaagtcaaggcctgatagtggtctttctgcaattacagagctggaccctggttatataacaggtcctctctcttcagtatggaaagaatgggtcaaatggtgtgtagagtttggcattgaagctaatgcaattatcgctgttccgtatgattggagactgcccccatcaatgcttgaggagagagatctgtactttcacaaattaaagtttgtaacacttgcctcaacttgttatgaagcaaccaaatgctatacatctgttagcaggatcagtaagagttaatggcccagtgacggattcaaggtatcctgctcaccaacagatcccacaagcatacggttaccgccaaatgcctgcaaggttggacagtaccaacccatcacaggccatgggaggttacacgctgcagtcacagaaggaaacattatttgaagagttgccattttgaagagttactcgaatccaatattttgctcttttgaattccttggtgtacactggcaaatattagcatatttgaagagttgccatttcgatcatcatcttcatttgtactttttgggtcagatctaataaagcatcagcattaaatttacaatgatcacctaaatccatggtttttattgcctagagctggtaatgtttctctggttttgcattagttgcttgaaaattgaaagtatctgtatacttctctattgtattttactgcacataatggatttgtttgatgtgtagggattttaaggtatgtaaaatatcttaacttttaaaagatgtgaataagaacataaaatagtaattagtattttgaattttaatgtatcttatcgtaac

SEQ ID NO: 74115 - DNA, 1513 bp, Zea Mays
ggcggctctccccgcctcgttcgcccctaccgcgccatcaacgtgcctccccgccgcccctgtcctccccatgcccgccgctcccacccgagatggttagcgcccctcctccttccggtcccttcccctgcctcggccggccagccatggattcaccaagcgggctctggtggcggccggcgccgtcgtcgtgtcctccattcccgtcaaccccctcgatgtcgccaagatatgtttaccagacgaattgatatctaggctatttatgtggttactaattttgactcctctaagacatatttacacagggttggtcgttatgggagatatgggcaccttggtttggcagtgaacttgaccacttacaaagattgtttcaacttatatagtattgataaaaaaaacttggaacggaaattaagacaatacccccacaaattgacctgtttgtatactgccaatgatgatagcgacagcttcatgagctggaggaggaggagaggcccatgtcggtggagctggaacccatcgccagcgagcagcagcttaactaggtccttggagaggcgtagcagctccagctcctcatcgtcctgctctgcttttctctgcggtaaattgctggcttaaatgcatgctgcttgaaccctataatcagatagaccatcccgaatgcaagtcaaggcctgatagtggtctttctgcaattacagagctggaccctggttatataacaggtcctctctcttcagtatggaaagaatgggtcaaatggtgtgtagagtttggcattgaagctaatgcaattatcgctgttccgtatgattggagactgcccccatcaatgcttgaggagagagatctgtactttcacaaattaaagtttgtaacacttgcctcaacttgttatgaagcaaccaaatgctatacatctgttagcaggatcagtaagagttaatggcccagtgacggattcaaggtatcctgctcaccaacagatcccacaagcatacggttaccgccaaatgcctgcaaggttggacagtaccaacccatcacaggccatgggaggttacacgctgcagtcacagaaggaaacattatttgaagagttgccattttgaagagttactcgaatccaatattttgctcttttgaattccttggtgtacactggcaaatattagcatatttgaagagttgccatttcgatcatcatcttcatttgtactttttgggtcagatctaataaagcatcagcattaaatttacaatgatcacctaaatccatggtttttattgcctagagctggtaatgtttctctggttttgcattagttgcttgaaaattgaaagtatctgtatacttctctattgtattttactgcacataatggatttgtttgatgtgtagggattttaaggtatgtaaaatatcttaacttttaaaagatgtgaataagaacataaaatagtaattagtattttgaattttaatgtatcttatcgtaac

SEQ ID NO: 74116 - DNA, 1518 bp, Zea Mays
ggcggctctccccgcctcgttcgcccctaccgcgccatcaacgtgcctccccgccgcccctgtcctccccatgcccgccgctcccacccgagatggttagcgcccctcctccttccggtcccttcccctgcctcggccggccagccatggattcaccaagcgggctctggtggcggccggcgccgtcgtcgtgtcctccattcccgtcaaccccctcgatgtcgccaagatatgtttaccagacgaattgatatctaggctatttatgtggttactaattttgactcctctaagacatatttacacagggttggtcgttatgggagatatgggcaccttggtttggcagtgaacttgaccacttacaaagattgtttcaacttatatagtattgataaaaaaaacttggaacggaaattaagacaatacccccacaaattgacctgtttgtatactgccaatgatgatagcgacagcttcatgagcgtcagtggaggaggaggagaggcccatgtcggtggagctggaacccatcgccagcgagcagcagcttaactaggtccttggagaggcgtagcagctccagctcctcatcgtcctgctctgcttttctctgcggtaaattgctggcttaaatgcatgctgcttgaaccctataatcagatagaccatcccgaatgcaagtcaaggcctgatagtggtctttctgcaattacagagctggaccctggttatataacaggtcctctctcttcagtatggaaagaatgggtcaaatggtgtgtagagtttggcattgaagctaatgcaattatcgctgttccgtatgattggagactgcccccatcaatgcttgaggagagagatctgtactttcacaaattaaagtttgtaacacttgcctcaacttgttatgaagcaaccaaatgctatacatctgttagcaggatcagtaagagttaatggcccagtgacggattcaaggtatcctgctcaccaacagatcccacaagcatacggttaccgccaaatgcctgcaaggttggacagtaccaacccatcacaggccatgggaggttacacgctgcagtcacagaaggaaacattatttgaagagttgccattttgaagagttactcgaatccaatattttgctcttttgaattccttggtgtacactggcaaatattagcatatttgaagagttgccatttcgatcatcatcttcatttgtactttttgggtcagatctaataaagcatcagcattaaatttacaatgatcacctaaatccatggtttttattgcctagagctggtaatgtttctctggttttgcattagttgcttgaaaattgaaagtatctgtatacttctctattgtattttactgcacataatggatttgtttgatgtgtagggattttaaggtatgtaaaatatcttaacttttaaaagatgtgaataagaacataaaatagtaattagtattttgaattttaatgtatcttatcgtaac

SEQ ID NO: 74117 - DNA, 3569 bp, Zea Mays
ggcggctctccccgcctcgttcgcccctaccgcgccatcaacgtgcctccccgccgcccctgtcctccccatgcccgccgctcccacccgagatggttagcgcccctcctccttccggtcccttcccctgcctcggccggccagccatggattcaccaagcgggctctggtggcggccggcgccgtcgtcgtgtcctccattcccgtcaaccccctcgatgtcgccaaggagcaggacgatgcagtggggcagcatctctaatcatttaagcttcaaattaaccagtccattatattatgcaactctgtgaatagaattgagctactggctaagaaaataactgaactcggttattcatgcttcacattcatgctaagagcctaagatgttgcaagacaacagaaactgagtgtttcatgagtttcataatggtgcttgcagaaaccttttgtgcacaggtctgtattgatgttttcctaccttattagtctttttagaatttagtagtttaattctcagcatctgtttggcatttatcaattgtcatttatgaaggtttctttataaaagtatcatggctctgtttcttagtctcgcatctaggctgtttatttataaaagtgtcatggctctttttttgcagatatgtttaccagacgaattgatatctaggctatttatgtggttactaattttgactcctctaagacatatttacacagggttggtcgttatgggagatatgggcaccttggtttggcagtgaacttgaccacttacaaagattgtttcaacttatatagtattgataaaaaaaacttggaacggaaattaagacaatacccccacaaattgacctgtttgtatactgccaatgatgatagcgacagcttcatgagcgtcaggcacattttatttattttgacctgtttgtatactaacttaacacaagcttttttgtcaataacgtgggattcggaattttctgagctttgtgtagtggaggaggaggagaggcccatgtcggtggagctggaacccatcgccagcgagcagcagcttaactaggtccttggagaggcgtagcagctccagctcctcatcgtcctgctctggtaaccccactttcctagatcggtttgtgcctgtagggtgttcttgttaaagtttgcttgtaatgtctgtgagattgcaatcatggtcgtgtatgattgcggtgttcacagattttgtttgcttgttcctagatagtcatttatgtggtgcaaatttagcatcttggatgaagtgaaaatggacaattttgttcatttgttattaggttctggcacttggacttggtatttagtaactgagaatttacttatttagtagttatacagcccgtgtcattgtcgttgggcgaatgaatttcatcgtcagtctattgcatgaatgataaatgcatgtcggtggccttttgccgaatctaccattttgtttgttcctcatctccattcctatctgcttgtttattggtagtagaagtagaactgctatttatggctgaggcctgagggaaaaaataatcaaatgttcaaccaacttcatttttttcttgagtgcatgggttgcagcctttggctagcttatgatctcgtgtggtctatttaccatataaataaatagcagcattagttcaatttgatgttcatagttctctctctctaaagagtcatatgttagattcatgggaaatacttgaactatacatttttttaatgtatcagatgtgtgaattatcatgtccggatcaatttcaaccaaccaacagttcctttagcaaatttgtcaggcatatttatgcacttgttcgcataactgagactatattatttttataagactaaggtcagactattgatggtttggtttgggtggcaccttgttcttcgttccttgccatttccatgccatccttttattatatacatacatttatttggagataaaatttgatgtcaagagaaacttgtctttctttcactctccaactcatcttcgtagtttgattctcatgggaggaccctgtttccatcatgctgcatctttttatctgataaagtgatatttcttagagcatcaaggttcgacaaccaacatattctcgtgtgaggaaatggaaaagtgatgtcttgaggacattttttatcttttgatgttgataattgttcatattattatggttcaacaactcctagcaccaagtcattctgtatgatctgttaacttgatagaagttaacatcatttgattttaagaaatgtaatcatatttcctgattgctcagaattgacttgttcatcatttttcaatgtccctaattggtattagatttttgtgatcttgtgtcatattctgtgatcaacaatgtacaatttgttgaataggctgttgttgaaaaagctgtatattatgctcttgtatggatcaataggctgttggctgtcggtcatgacatcgccatcaagacagataggaaagttatattttttcctaactatatatgctcttacctattcctgttctccatagtacaaaagatgatattgattttgtggctggtttcatttgttggaatgctcttcaactttcttacgctcatttacattgcttttctctgcggtaaattgctggcttaaatgcatgctgcttgaaccctataatcagatagaccatcccgaatgcaagtcaaggcctgatagtggtctttctgcaattacagagctggaccctggttatataacaggtttcaggtcctctctcttcagtatggaaagaatgggtcaaatggtgtgtagagtttggcattgaagctaatgcaattatcgctgttccgtatgattggagactgcccccatcaatgcttgaggagagagatctgtactttcacaaattaaagtttgtaacacttgcctcaacttgttatgaagcaaccaaatgctatacatctgttaggatcagtaagagttaatggcccagtgacggattcaaggtatcctgctcaccaacagatcccacaagcatacggttaccgccaaatgcctgcaaggttggacagtaccaacccatcacaggccatgggaggttacacgctgcagtcacagaaggaaacattatttgaagagttgccattttgaagagttactcgaatccaatattttgctcttttgaattccttggtgtacactggcaaatattagcatatttgaagagttgccatttcgatcatcatcttcatttgtactttttgggtcagatctaataaagcatcagcattaaatttacaatgatcacctaaatccatggtttttattgcctagagctggtaatgtttctctggttttgcattagttgcttgaaaattgaaagtatctgtatacttctctattgtattttactgcacataatggatttgtttgatgtgtagggattttaaggtatgtaaaatatcttaacttttaaaagatgtgaataagaacataaaatagtaattagtattttgaattttaatgtatcttatcgtaac

SEQ ID NO: 74118 - DNA, 2162 bp, Zea Mays
ggcggctctccccgcctcgttcgcccctaccgcgccatcaacgtgcctccccgccgcccctgtcctccccatgcccgccgctcccacccgagatggttagcgcccctcctccttccggtcccttcccctgcctcggccggccagccatggattcaccaagcgggctctggtggcggccggcgccgtcgtcgtgtcctccattcccgtcaaccccctcgatgtcgccaagatatgtttaccagacgaattgatatctaggctatttatgtggttactaattttgactcctctaagacatatttacacagggttggtcgttatgggagatatgggcaccttggtttggcagtgaacttgaccacttacaaagattgtttcaacttatatagtattgataaaaaaaacttggaacggaaattaagacaatacccccacaaattgacctgtttgtatactgccaatgatgatagcgacagcttcatgagcgtcaggcacattttatttattttgacctgtttgtatactaacttaacacaagcttttttgtcaataacgtgggattcggaattttctgagctttgtgtagtggaggaggaggagaggcccatgtcggtggagctggaacccatcgccagcgagcagcagcttaactaggtccttggagaggcgtagcagctccagctcctcatcgtcctgctctggctgttgttgaaaaagctgtatattatgctcttgtatggatcaataggctgttggctgtcggtcatgacatcgccatcaagacagataggaaagttatattttttcctaactatatatgctcttacctattcctgttctccatagtacaaaagatgatattgattttgtggctggtttcatttgttggaatgctcttcaactttcttacgctcatttacattgtgatgggaatcgtatatccataaatagatctggagactggagcagtttttgttgggataaactttgtactggaccggagcatcttatctctggatgtgagtgccatgaaagtgatacccaacaaacaactaactctggaacacctttggtatgtcgggtaggcgcaaagccagcaagacaacaactgcttgagcagctttggccagttttgcttgccaccatgaatagccatatgttggccatcacatggtaccttgttcgtcccaaactagaccagagcattacaagcaatgactgccatatctaaaattgaaaacatcttttctctgcggtaaattgctggcttaaatgcatgctgcttgaaccctataatcagatagaccatcccgaatgcaagtcaaggcctgatagtggtctttctgcaattacagagctggaccctggttatataacaggtttcaggtcctctctcttcagtatggaaagaatgggtcaaatggtgtgtagagtttggcattgaagctaatgcaattatcgctgttccgtatgattggagactgcccccatcaatgcttgaggagagagatctgtactttcacaaattaaagtttgtaacacttgcctcaacttgttatgaagcaaccaaatgctatacatctgttagcaggatcagtaagagttaatggcccagtgacggattcaaggtatcctgctcaccaacagatcccacaagcatacggttaccgccaaatgcctgcaaggttggacagtaccaacccatcacaggccatgggaggttacacgctgcagtcacagaaggaaacattatttgaagagttgccattttgaagagttactcgaatccaatattttgctcttttgaattccttggtgtacactggcaaatattagcatatttgaagagttgccatttcgatcatcatcttcatttgtactttttgggtcagatctaataaagcatcagcattaaatttacaatgatcacctaaatccatggtttttattgcctagagctggtaatgtttctctggttttgcattagttgcttgaaaattgaaagtatctgtatacttctctattgtattttactgcacataatggatttgtttgatgtgtagggattttaaggtatgtaaaatatcttaacttttaaaagatgtgaataagaacataaaatagtaattagtattttgaattttaatgtatcttatcgtaac

SEQ ID NO: 74119 - DNA, 1588 bp, Zea Mays
ggcggctctccccgcctcgttcgcccctaccgcgccatcaacgtgcctccccgccgcccctgtcctccccatgcccgccgctcccacccgagatggttagcgcccctcctccttccggtcccttcccctgcctcggccggccagccatggattcaccaagcgggctctggtggcggccggcgccgtcgtcgtgtcctccattcccgtcaaccccctcgatgtcgccaagatatgtttaccagacgaattgatatctaggctatttatgtggttactaattttgactcctctaagacatatttacacagggttggtcgttatgggagatatgggcaccttggtttggcagtgaacttgaccacttacaaagattgtttcaacttatatagtattgataaaaaaaacttggaacggaaattaagacaatacccccacaaattgacctgtttgtatactgccaatgatgatagcgacagcttcatgagctggaggaggaggagaggcccatgtcggtggagctggaacccatcgccagcgagcagcagcttaactaggtccttggagaggcgtagcagctccagctcctcatcgtcctgctctgtacaaaagatgatattgattttgtggctggtttcatttgttggaatgctcttcaactttcttacgctcatttacattgcttttctctgcggtaaattgctggcttaaatgcatgctgcttgaaccctataatcagatagaccatcccgaatgcaagtcaaggcctgatagtggtctttctgcaattacagagctggaccctggttatataacaggtcctctctcttcagtatggaaagaatgggtcaaatggtgtgtagagtttggcattgaagctaatgcaattatcgctgttccgtatgattggagactgcccccatcaatgcttgaggagagagatctgtactttcacaaattaaagtttgtaacacttgcctcaacttgttatgaagcaaccaaatgctatacatctgttaggatcagtaagagttaatggcccagtgacggattcaaggtatcctgctcaccaacagatcccacaagcatacggttaccgccaaatgcctgcaaggttggacagtaccaacccatcacaggccatgggaggttacacgctgcagtcacagaaggaaacattatttgaagagttgccattttgaagagttactcgaatccaatattttgctcttttgaattccttggtgtacactggcaaatattagcatatttgaagagttgccatttcgatcatcatcttcatttgtactttttgggtcagatctaataaagcatcagcattaaatttacaatgatcacctaaatccatggtttttattgcctagagctggtaatgtttctctggttttgcattagttgcttgaaaattgaaagtatctgtatacttctctattgtattttactgcacataatggatttgtttgatgtgtagggattttaaggtatgtaaaatatcttaacttttaaaagatgtgaataagaacataaaatagtaattagtattttgaattttaatgtatcttatcgtaac

SEQ ID NO: 74120 - DNA, 1522 bp, Zea Mays
ggcggctctccccgcctcgttcgcccctaccgcgccatcaacgtgcctccccgccgcccctgtcctccccatgcccgccgctcccacccgagatggttagcgcccctcctccttccggtcccttcccctgcctcggccggccagccatggattcaccaagcgggctctggtggcggccggcgccgtcgtcgtgtcctccattcccgtcaaccccctcgatgtcgccaagatatgtttaccagacgaattgatatctaggctatttatgtggttactaattttgactcctctaagacatatttacacagggttggtcgttatgggagatatgggcaccttggtttggcagtgaacttgaccacttacaaagattgtttcaacttatatagtattgataaaaaaaacttggaacggaaattaagacaatacccccacaaattgacctgtttgtatactgccaatgatgatagcgacagcttcatgagcgtcagtggaggaggaggagaggcccatgtcggtggagctggaacccatcgccagcgagcagcagcttaactaggtccttggagaggcgtagcagctccagctcctcatcgtcctgctctgcttttctctgcggtaaattgctggcttaaatgcatgctgcttgaaccctataatcagatagaccatcccgaatgcaagtcaaggcctgatagtggtctttctgcaattacagagctggaccctggttatataacaggtttcaggtcctctctcttcagtatggaaagaatgggtcaaatggtgtgtagagtttggcattgaagctaatgcaattatcgctgttccgtatgattggagactgcccccatcaatgcttgaggagagagatctgtactttcacaaattaaagtttgtaacacttgcctcaacttgttatgaagcaaccaaatgctatacatctgttaggatcagtaagagttaatggcccagtgacggattcaaggtatcctgctcaccaacagatcccacaagcatacggttaccgccaaatgcctgcaaggttggacagtaccaacccatcacaggccatgggaggttacacgctgcagtcacagaaggaaacattatttgaagagttgccattttgaagagttactcgaatccaatattttgctcttttgaattccttggtgtacactggcaaatattagcatatttgaagagttgccatttcgatcatcatcttcatttgtactttttgggtcagatctaataaagcatcagcattaaatttacaatgatcacctaaatccatggtttttattgcctagagctggtaatgtttctctggttttgcattagttgcttgaaaattgaaagtatctgtatacttctctattgtattttactgcacataatggatttgtttgatgtgtagggattttaaggtatgtaaaatatcttaacttttaaaagatgtgaataagaacataaaatagtaattagtattttgaattttaatgtatcttatcgtaac

SEQ ID NO: 74121 - DNA, 2538 bp, Zea Mays
ggcggctctccccgcctcgttcgcccctaccgcgccatcaacgtgcctccccgccgcccctgtcctccccatgcccgccgctcccacccgagatggttagcgcccctcctccttccggtcccttcccctgcctcggccggccagccatggattcaccaagcgggctctggtggcggccggcgccgtcgtcgtgtcctccattcccgtcaaccccctcgatgtcgccaaggagcaggacgatgcagtggggcagcatctctaatcatttaagcttcaaattaaccagtccattatattatgcaactctgtgaatagaattgagctactggctaagaaaataactgaactcggttattcatgcttcacattcatgctaagagcctaagatgttgcaagacaacagaaactgagtgtttcatgagtttcataatggtgcttgcagaaaccttttgtgcacagatatgtttaccagacgaattgatatctaggctatttatgtggttactaattttgactcctctaagacatatttacacagggttggtcgttatgggagatatgggcaccttggtttggcagtgaacttgaccacttacaaagattgtttcaacttatatagtattgataaaaaaaacttggaacggaaattaagacaatacccccacaaattgacctgtttgtatactgccaatgatgatagcgacagcttcatgagcgtcaggcacattttatttattttgacctgtttgtatactaacttaacacaagcttttttgtcaataacgtgggattcggaattttctgagctttgtgtagtggaggaggaggagaggcccatgtcggtggagctggaacccatcgccagcgagcagcagcttaactaggtccttggagaggcgtagcagctccagctcctcatcgtcctgctctggctgttgttgaaaaagctgtatattatgctcttgtatggatcaataggctgttggctgtcggtcatgacatcgccatcaagacagataggaaagttatattttttcctaactatatatgctcttacctattcctgttctccatagtacaaaagatgatattgattttgtggctggtttcatttgttggaatgctcttcaactttcttacgctcatttacattggtgagttctctgtccatgttaattttaagtgagtatgtaactatatgctctcatacgctttagggatccgctacgagcagcctacacatttatcatctgttcccatgcttatttttccttttttttattagtgatgggaatcgtatatccataaatagatctggagactggagcagtttttgttgggataaactttgtactggaccggagcatcttatctctggatgtgagtgccatgaaagtgatacccaacaaacaactaactctggaacacctttggtatgtcgggtaggcgcaaagccagcaagacaacaactgcttgagcagctttggccagttttgcttgccaccatgaatagccatatgttggccatcacatggtaccttgttcgtcccaaactagaccagagcattacaagcaatgactgccatatctaaaattgaaaacatgtgcggcttataagtatcctaaatttgctccacttctaagtatccaagatctactggttttgatgcgttccattgcttgcagcttttctctgcggtaaattgctggcttaaatgcatgctgcttgaaccctataatcagatagaccatcccgaatgcaagtcaaggcctgatagtggtctttctgcaattacagagctggaccctggttatataacaggtcctctctcttcagtatggaaagaatgggtcaaatggtgtgtagagtttggcattgaagctaatgcaattatcgctgttccgtatgattggagactgcccccatcaatgcttgaggagagagatctgtactttcacaaattaaagatcagtaagagttaatggcccagtgacggattcaaggtatcctgctcaccaacagatcccacaagcatacggttaccgccaaatgcctgcaaggttggacagtaccaacccatcacaggccatgggaggttacacgctgcagtcacagaaggaaacattatttgaagagttgccattttgaagagttactcgaatccaatattttgctcttttgaattccttggtgtacactggcaaatattagcatatttgaagagttgccatttcgatcatcatcttcatttgtactttttgggtcagatctaataaagcatcagcattaaatttacaatgatcacctaaatccatggtttttattgcctagagctggtaatgtttctctggttttgcattagttgcttgaaaattgaaagtatctgtatacttctctattgtattttactgcacataatggatttgtttgatgtgtagggattttaaggtatgtaaaatatcttaacttttaaaagatgtgaataagaacataaaatagtaattagtattttgaattttaatgtatcttatcgtaac

SEQ ID NO: 74122 - DNA, 1461 bp, Zea Mays
ggcggctctccccgcctcgttcgcccctaccgcgccatcaacgtgcctccccgccgcccctgtcctccccatgcccgccgctcccacccgagatggttagcgcccctcctccttccggtcccttcccctgcctcggccggccagccatggattcaccaagcgggctctggtggcggccggcgccgtcgtcgtgtcctccattcccgtcaaccccctcgatgtcgccaagatatgtttaccagacgaattgatatctaggctatttatgtggttactaattttgactcctctaagacatatttacacagggttggtcgttatgggagatatgggcaccttggtttggcagtgaacttgaccacttacaaagattgtttcaacttatatagtattgataaaaaaaacttggaacggaaattaagacaatacccccacaaattgacctgtttgtatactgccaatgatgatagcgacagcttcatgagcgtcagtggaggaggaggagaggcccatgtcggtggagctggaacccatcgccagcgagcagcagcttaactaggtccttggagaggcgtagcagctccagctcctcatcgtcctgctctgcttttctctgcggtaaattgctggcttaaatgcatgctgcttgaaccctataatcagatagaccatcccgaatgcaagtcaaggcctgatagtggtctttctgcaattacagagctggaccctggttatataacaggtcctctctcttcagtatggaaagaatgggtcaaatggtgtgtagagtttggcattgaagctaatgcaattatcgctgttccgtatgattggagactgcccccatcaatgcttgaggagagagatctgtactttcacaaattaaacaggatcagtaagagttaatggcccagtgacggattcaaggtatcctgctcaccaacagatcccacaagcatacggttaccgccaaatgcctgcaaggttggacagtaccaacccatcacaggccatgggaggttacacgctgcagtcacagaaggaaacattatttgaagagttgccattttgaagagttactcgaatccaatattttgctcttttgaattccttggtgtacactggcaaatattagcatatttgaagagttgccatttcgatcatcatcttcatttgtactttttgggtcagatctaataaagcatcagcattaaatttacaatgatcacctaaatccatggtttttattgcctagagctggtaatgtttctctggttttgcattagttgcttgaaaattgaaagtatctgtatacttctctattgtattttactgcacataatggatttgtttgatgtgtagggattttaaggtatgtaaaatatcttaacttttaaaagatgtgaataagaacataaaatagtaattagtattttgaattttaatgtatcttatcgtaac

SEQ ID NO: 74123 - DNA, 2142 bp, Zea Mays
ggcggctctccccgcctcgttcgcccctaccgcgccatcaacgtgcctccccgccgcccctgtcctccccatgcccgccgctcccacccgagatggttagcgcccctcctccttccggtcccttcccctgcctcggccggccagccatggattcaccaagcgggctctggtggcggccggcgccgtcgtcgtgtcctccattcccgtcaaccccctcgatgtcgccaaggagcaggacgatgcagtggggcagcatctctaatcatttaagcttcaaattaaccagtccattatattatgcaactctgtgaatagaattgagctactggctaagaaaataactgaactcggttattcatgcttcacattcatgctaagagcctaagatgttgcaagacaacagaaactgagtgtttcatgagtttcataatggtgcttgcagaaaccttttgtgcacagatatgtttaccagacgaattgatatctaggctatttatgtggttactaattttgactcctctaagacatatttacacagggttggtcgttatgggagatatgggcaccttggtttggcagtgaacttgaccacttacaaagattgtttcaacttatatagtattgataaaaaaaacttggaacggaaattaagacaatacccccacaaattgacctgtttgtatactgccaatgatgatagcgacagcttcatgagcgtcagtggaggaggaggagaggcccatgtcggtggagctggaacccatcgccagcgagcagcagcttaactaggtccttggagaggcgtagcagctccagctcctcatcgtcctgctctgtacaaaagatgatattgattttgtggctggtttcatttgttggaatgctcttcaactttcttacgctcatttacattgtgatgggaatcgtatatccataaatagatctggagactggagcagtttttgttgggataaactttgtactggaccggagcatcttatctctggatgtgagtgccatgaaagtgatacccaacaaacaactaactctggaacacctttggtatgtcgggtaggcgcaaagccagcaagacaacaactgcttgagcagctttggccagttttgcttgccaccatgaatagccatatgttggccatcacatggtaccttgttcgtcccaaactagaccagagcattacaagcaatgactgccatatctaaaattgaaaacatcttttctctgcggtaaattgctggcttaaatgcatgctgcttgaaccctataatcagatagaccatcccgaatgcaagtcaaggcctgatagtggtctttctgcaattacagagctggaccctggttatataacaggtcctctctcttcagtatggaaagaatgggtcaaatggtgtgtagagtttggcattgaagctaatgcaattatcgctgttccgtatgattggagactgcccccatcaatgcttgaggagagagatctgtactttcacaaattaaagtttgtaacacttgcctcaacttgttatgaagcaaccaaatgctatacatctgttaggatcagtaagagttaatggcccagtgacggattcaaggtatcctgctcaccaacagatcccacaagcatacggttaccgccaaatgcctgcaaggttggacagtaccaacccatcacaggccatgggaggttacacgctgcagtcacagaaggaaacattatttgaagagttgccattttgaagagttactcgaatccaatattttgctcttttgaattccttggtgtacactggcaaatattagcatatttgaagagttgccatttcgatcatcatcttcatttgtactttttgggtcagatctaataaagcatcagcattaaatttacaatgatcacctaaatccatggtttttattgcctagagctggtaatgtttctctggttttgcattagttgcttgaaaattgaaagtatctgtatacttctctattgtattttactgcacataatggatttgtttgatgtgtagggattttaaggtatgtaaaatatcttaacttttaaaagatgtgaataagaacataaaatagtaattagtattttgaattttaatgtatcttatcgtaac

SEQ ID NO: 74124 - DNA, 2014 bp, Zea Mays
ggcggctctccccgcctcgttcgcccctaccgcgccatcaacgtgcctccccgccgcccctgtcctccccatgcccgccgctcccacccgagatggttagcgcccctcctccttccggtcccttcccctgcctcggccggccagccatggattcaccaagcgggctctggtggcggccggcgccgtcgtcgtgtcctccattcccgtcaaccccctcgatgtcgccaagatatgtttaccagacgaattgatatctaggctatttatgtggttactaattttgactcctctaagacatatttacacagggttggtcgttatgggagatatgggcaccttggtttggcagtgaacttgaccacttacaaagattgtttcaacttatatagtattgataaaaaaaacttggaacggaaattaagacaatacccccacaaattgacctgtttgtatactgccaatgatgatagcgacagcttcatgagcgtcaggcacattttatttattttgacctgtttgtatactaacttaacacaagcttttttgtcaataacgtgggattcggaattttctgagctttgtgtagtggaggaggaggagaggcccatgtcggtggagctggaacccatcgccagcgagcagcagcttaactaggtccttggagaggcgtagcagctccagctcctcatcgtcctgctctgtgatgggaatcgtatatccataaatagatctggagactggagcagtttttgttgggataaactttgtactggaccggagcatcttatctctggatgtgagtgccatgaaagtgatacccaacaaacaactaactctggaacacctttggtatgtcgggtaggcgcaaagccagcaagacaacaactgcttgagcagctttggccagttttgcttgccaccatgaatagccatatgttggccatcacatggtaccttgttcgtcccaaactagaccagagcattacaagcaatgactgccatatctaaaattgaaaacatgtgcggcttataagtatcctaaatttgctccacttctaagtatccaagatctactggttttgatgcgttccattgcttgcagcttttctctgcggtaaattgctggcttaaatgcatgctgcttgaaccctataatcagatagaccatcccgaatgcaagtcaaggcctgatagtggtctttctgcaattacagagctggaccctggttatataacaggtcctctctcttcagtatggaaagaatgggtcaaatggtgtgtagagtttggcattgaagctaatgcaattatcgctgttccgtatgattggagactgcccccatcaatgcttgaggagagagatctgtactttcacaaattaaagtttgtaacacttgcctcaacttgttatgaagcaaccaaatgctatacatctgttagcaggatcagtaagagttaatggcccagtgacggattcaaggtatcctgctcaccaacagatcccacaagcatacggttaccgccaaatgcctgcaaggttggacagtaccaacccatcacaggccatgggaggttacacgctgcagtcacagaaggaaacattatttgaagagttgccattttgaagagttactcgaatccaatattttgctcttttgaattccttggtgtacactggcaaatattagcatatttgaagagttgccatttcgatcatcatcttcatttgtactttttgggtcagatctaataaagcatcagcattaaatttacaatgatcacctaaatccatggtttttattgcctagagctggtaatgtttctctggttttgcattagttgcttgaaaattgaaagtatctgtatacttctctattgtattttactgcacataatggatttgtttgatgtgtagggattttaaggtatgtaaaatatcttaacttttaaaagatgtgaataagaacataaaatagtaattagtattttgaattttaatgtatcttatcgtaac

SEQ ID NO: 74125 - DNA, 1745 bp, Zea Mays
ggcggctctccccgcctcgttcgcccctaccgcgccatcaacgtgcctccccgccgcccctgtcctccccatgcccgccgctcccacccgagatggttagcgcccctcctccttccggtcccttcccctgcctcggccggccagccatggattcaccaagcgggctctggtggcggccggcgccgtcgtcgtgtcctccattcccgtcaaccccctcgatgtcgccaaggagcaggacgatgcagtggggcagcatctctaatcatttaagcttcaaattaaccagtccattatattatgcaactctgtgaatagaattgagctactggctaagaaaataactgaactcggttattcatgcttcacattcatgctaagagcctaagatgttgcaagacaacagaaactgagtgtttcatgagtttcataatggtgcttgcagaaaccttttgtgcacagatatgtttaccagacgaattgatatctaggctatttatgtggttactaattttgactcctctaagacatatttacacagggttggtcgttatgggagatatgggcaccttggtttggcagtgaacttgaccacttacaaagattgtttcaacttatatagtattgataaaaaaaacttggaacggaaattaagacaatacccccacaaattgacctgtttgtatactgccaatgatgatagcgacagcttcatgagcgtcagtggaggaggaggagaggcccatgtcggtggagctggaacccatcgccagcgagcagcagcttaactaggtccttggagaggcgtagcagctccagctcctcatcgtcctgctctgcttttctctgcggtaaattgctggcttaaatgcatgctgcttgaaccctataatcagatagaccatcccgaatgcaagtcaaggcctgatagtggtctttctgcaattacagagctggaccctggttatataacaggtcctctctcttcagtatggaaagaatgggtcaaatggtgtgtagagtttggcattgaagctaatgcaattatcgctgttccgtatgattggagactgcccccatcaatgcttgaggagagagatctgtactttcacaaattaaagtttgtaacacttgcctcaacttgttatgaagcaaccaaatgctatacatctgttaggatcagtaagagttaatggcccagtgacggattcaaggtatcctgctcaccaacagatcccacaagcatacggttaccgccaaatgcctgcaaggttggacagtaccaacccatcacaggccatgggaggttacacgctgcagtcacagaaggaaacattatttgaagagttgccattttgaagagttactcgaatccaatattttgctcttttgaattccttggtgtacactggcaaatattagcatatttgaagagttgccatttcgatcatcatcttcatttgtactttttgggtcagatctaataaagcatcagcattaaatttacaatgatcacctaaatccatggtttttattgcctagagctggtaatgtttctctggttttgcattagttgcttgaaaattgaaagtatctgtatacttctctattgtattttactgcacataatggatttgtttgatgtgtagggattttaaggtatgtaaaatatcttaacttttaaaagatgtgaataagaacataaaatagtaattagtattttgaattttaatgtatcttatcgtaac

SEQ ID NO: 74126 - DNA, 2004 bp, Zea Mays
ggcggctctccccgcctcgttcgcccctaccgcgccatcaacgtgcctccccgccgcccctgtcctccccatgcccgccgctcccacccgagatggttagcgcccctcctccttccggtcccttcccctgcctcggccggccagccatggattcaccaagcgggctctggtggcggccggcgccgtcgtcgtgtcctccattcccgtcaaccccctcgatgtcgccaagatatgtttaccagacgaattgatatctaggctatttatgtggttactaattttgactcctctaagacatatttacacagggttggtcgttatgggagatatgggcaccttggtttggcagtgaacttgaccacttacaaagattgtttcaacttatatagtattgataaaaaaaacttggaacggaaattaagacaatacccccacaaattgacctgtttgtatactgccaatgatgatagcgacagcttcatgagcgtcagtggaggaggaggagaggcccatgtcggtggagctggaacccatcgccagcgagcagcagcttaactaggtccttggagaggcgtagcagctccagctcctcatcgtcctgctctgtacaaaagatgatattgattttgtggctggtttcatttgttggaatgctcttcaactttcttacgctcatttacattgtgatgggaatcgtatatccataaatagatctggagactggagcagtttttgttgggataaactttgtactggaccggagcatcttatctctggatgtgagtgccatgaaagtgatacccaacaaacaactaactctggaacacctttggtatgtcgggtaggcgcaaagccagcaagacaacaactgcttgagcagctttggccagttttgcttgccaccatgaatagccatatgttggccatcacatggtaccttgttcgtcccaaactagaccagagcattacaagcaatgactgccatatctaaaattgaaaacatgtgcggcttataagtatcctaaatttgctccacttctaagtatccaagatctactggttttgatgcgttccattgcttgcagcttttctctgcggtaaattgctggcttaaatgcatgctgcttgaaccctataatcagatagaccatcccgaatgcaagtcaaggcctgatagtggtctttctgcaattacagagctggaccctggttatataacaggtttcaggtcctctctcttcagtatggaaagaatgggtcaaatggtgtgtagagtttggcattgaagctaatgcaattatcgctgttccgtatgattggagactgcccccatcaatgcttgaggagagagatctgtactttcacaaattaaagtttgtaacacttgcctcaacttgttatgaagcaaccaaatgctatacatctgttagcaggatcagtaagagttaatggcccagtgacggattcaaggtatcctgctcaccaacagatcccacaagcatacggttaccgccaaatgcctgcaaggttggacagtaccaacccatcacaggccatgggaggttacacgctgcagtcacagaaggaaacattatttgaagagttgccattttgaagagttactcgaatccaatattttgctcttttgaattccttggtgtacactggcaaatattagcatatttgaagagttgccatttcgatcatcatcttcatttgtactttttgggtcagatctaataaagcatcagcattaaatttacaatgatcacctaaatccatggtttttattgcctagagctggtaatgtttctctggttttgcattagttgcttgaaaattgaaagtatctgtatacttctctattgtattttactgcacataatggatttgtttgatgtgtagggattttaaggtatgtaaaatatcttaacttttaaaagatgtgaataagaacataaaatagtaattagtattttgaattttaatgtatcttatcgtaac

SEQ ID NO: 74127 - DNA, 2166 bp, Zea Mays
ggcggctctccccgcctcgttcgcccctaccgcgccatcaacgtgcctccccgccgcccctgtcctccccatgcccgccgctcccacccgagatggttagcgcccctcctccttccggtcccttcccctgcctcggccggccagccatggattcaccaagcgggctctggtggcggccggcgccgtcgtcgtgtcctccattcccgtcaaccccctcgatgtcgccaagatatgtttaccagacgaattgatatctaggctatttatgtggttactaattttgactcctctaagacatatttacacagggttggtcgttatgggagatatgggcaccttggtttggcagtgaacttgaccacttacaaagattgtttcaacttatatagtattgataaaaaaaacttggaacggaaattaagacaatacccccacaaattgacctgtttgtatactgccaatgatgatagcgacagcttcatgagcgtcaggcacattttatttattttgacctgtttgtatactaacttaacacaagcttttttgtcaataacgtgggattcggaattttctgagctttgtgtagtggaggaggaggagaggcccatgtcggtggagctggaacccatcgccagcgagcagcagcttaactaggtccttggagaggcgtagcagctccagctcctcatcgtcctgctctgtacaaaagatgatattgattttgtggctggtttcatttgttggaatgctcttcaactttcttacgctcatttacattggtgagttctctgtccatgttaattttaagtgagtatgtaactatatgctctcatacgctttagggatccgctacgagcagcctacacatttatcatctgttcccatgcttatttttccttttttttattagtgatgggaatcgtatatccataaatagatctggagactggagcagtttttgttgggataaactttgtactggaccggagcatcttatctctggatgtgagtgccatgaaagtgatacccaacaaacaactaactctggaacacctttggtatgtcgggtaggcgcaaagccagcaagacaacaactgcttgagcagctttggccagttttgcttgccaccatgaatagccatatgttggccatcacatggtaccttgttcgtcccaaactagaccagagcattacaagcaatgactgccatatctaaaattgaaaacatgtgcggcttataagtatcctaaatttgctccacttctaagtatccaagatctactggttttgatgcgttccattgcttgcagcttttctctgcggtaaattgctggcttaaatgcatgctgcttgaaccctataatcagatagaccatcccgaatgcaagtcaaggcctgatagtggtctttctgcaattacagagctggaccctggttatataacaggtcctctctcttcagtatggaaagaatgggtcaaatggtgtgtagagtttggcattgaagctaatgcaattatcgctgttccgtatgattggagactgcccccatcaatgcttgaggagagagatctgtactttcacaaattaaacaggatcagtaagagttaatggcccagtgacggattcaaggtatcctgctcaccaacagatcccacaagcatacggttaccgccaaatgcctgcaaggttggacagtaccaacccatcacaggccatgggaggttacacgctgcagtcacagaaggaaacattatttgaagagttgccattttgaagagttactcgaatccaatattttgctcttttgaattccttggtgtacactggcaaatattagcatatttgaagagttgccatttcgatcatcatcttcatttgtactttttgggtcagatctaataaagcatcagcattaaatttacaatgatcacctaaatccatggtttttattgcctagagctggtaatgtttctctggttttgcattagttgcttgaaaattgaaagtatctgtatacttctctattgtattttactgcacataatggatttgtttgatgtgtagggattttaaggtatgtaaaatatcttaacttttaaaagatgtgaataagaacataaaatagtaattagtattttgaattttaatgtatcttatcgtaac

SEQ ID NO: 74128 - DNA, 1823 bp, Zea Mays
ggcggctctccccgcctcgttcgcccctaccgcgccatcaacgtgcctccccgccgcccctgtcctccccatgcccgccgctcccacccgagatggttagcgcccctcctccttccggtcccttcccctgcctcggccggccagccatggattcaccaagcgggctctggtggcggccggcgccgtcgtcgtgtcctccattcccgtcaaccccctcgatgtcgccaaggagcaggacgatgcagtggggcagcatctctaatcatttaagcttcaaattaaccagtccattatattatgcaactctgtgaatagaattgagctactggctaagaaaataactgaactcggttattcatgcttcacattcatgctaagagcctaagatgttgcaagacaacagaaactgagtgtttcatgagtttcataatggtgcttgcagaaaccttttgtgcacagatatgtttaccagacgaattgatatctaggctatttatgtggttactaattttgactcctctaagacatatttacacagggttggtcgttatgggagatatgggcaccttggtttggcagtgaacttgaccacttacaaagattgtttcaacttatatagtattgataaaaaaaacttggaacggaaattaagacaatacccccacaaattgacctgtttgtatactgccaatgatgatagcgacagcttcatgagcgtcagtggaggaggaggagaggcccatgtcggtggagctggaacccatcgccagcgagcagcagcttaactaggtccttggagaggcgtagcagctccagctcctcatcgtcctgctctgtacaaaagatgatattgattttgtggctggtttcatttgttggaatgctcttcaactttcttacgctcatttacattgcttttctctgcggtaaattgctggcttaaatgcatgctgcttgaaccctataatcagatagaccatcccgaatgcaagtcaaggcctgatagtggtctttctgcaattacagagctggaccctggttatataacaggtcctctctcttcagtatggaaagaatgggtcaaatggtgtgtagagtttggcattgaagctaatgcaattatcgctgttccgtatgattggagactgcccccatcaatgcttgaggagagagatctgtactttcacaaattaaagtttgtaacacttgcctcaacttgttatgaagcaaccaaatgctatacatctgttaggatcagtaagagttaatggcccagtgacggattcaaggtatcctgctcaccaacagatcccacaagcatacggttaccgccaaatgcctgcaaggttggacagtaccaacccatcacaggccatgggaggttacacgctgcagtcacagaaggaaacattatttgaagagttgccattttgaagagttactcgaatccaatattttgctcttttgaattccttggtgtacactggcaaatattagcatatttgaagagttgccatttcgatcatcatcttcatttgtactttttgggtcagatctaataaagcatcagcattaaatttacaatgatcacctaaatccatggtttttattgcctagagctggtaatgtttctctggttttgcattagttgcttgaaaattgaaagtatctgtatacttctctattgtattttactgcacataatggatttgtttgatgtgtagggattttaaggtatgtaaaatatcttaacttttaaaagatgtgaataagaacataaaatagtaattagtattttgaattttaatgtatcttatcgtaac

SEQ ID NO: 74129 - DNA, 1755 bp, Zea Mays
ggcggctctccccgcctcgttcgcccctaccgcgccatcaacgtgcctccccgccgcccctgtcctccccatgcccgccgctcccacccgagatggttagcgcccctcctccttccggtcccttcccctgcctcggccggccagccatggattcaccaagcgggctctggtggcggccggcgccgtcgtcgtgtcctccattcccgtcaaccccctcgatgtcgccaaggagcaggacgatgcagtggggcagcatctctaatcatttaagcttcaaattaaccagtccattatattatgcaactctgtgaatagaattgagctactggctaagaaaataactgaactcggttattcatgcttcacattcatgctaagagcctaagatgttgcaagacaacagaaactgagtgtttcatgagtttcataatggtgcttgcagaaaccttttgtgcacagatatgtttaccagacgaattgatatctaggctatttatgtggttactaattttgactcctctaagacatatttacacagggttggtcgttatgggagatatgggcaccttggtttggcagtgaacttgaccacttacaaagattgtttcaacttatatagtattgataaaaaaaacttggaacggaaattaagacaatacccccacaaattgacctgtttgtatactgccaatgatgatagcgacagcttcatgagcgtcagtggaggaggaggagaggcccatgtcggtggagctggaacccatcgccagcgagcagcagcttaactaggtccttggagaggcgtagcagctccagctcctcatcgtcctgctctgcttttctctgcggtaaattgctggcttaaatgcatgctgcttgaaccctataatcagatagaccatcccgaatgcaagtcaaggcctgatagtggtctttctgcaattacagagctggaccctggttatataacaggtttcaggtcctctctcttcagtatggaaagaatgggtcaaatggtgtgtagagtttggcattgaagctaatgcaattatcgctgttccgtatgattggagactgcccccatcaatgcttgaggagagagatctgtactttcacaaattaaagtttgtaacacttgcctcaacttgttatgaagcaaccaaatgctatacatctgttagcaggatcagtaagagttaatggcccagtgacggattcaaggtatcctgctcaccaacagatcccacaagcatacggttaccgccaaatgcctgcaaggttggacagtaccaacccatcacaggccatgggaggttacacgctgcagtcacagaaggaaacattatttgaagagttgccattttgaagagttactcgaatccaatattttgctcttttgaattccttggtgtacactggcaaatattagcatatttgaagagttgccatttcgatcatcatcttcatttgtactttttgggtcagatctaataaagcatcagcattaaatttacaatgatcacctaaatccatggtttttattgcctagagctggtaatgtttctctggttttgcattagttgcttgaaaattgaaagtatctgtatacttctctattgtattttactgcacataatggatttgtttgatgtgtagggattttaaggtatgtaaaatatcttaacttttaaaagatgtgaataagaacataaaatagtaattagtattttgaattttaatgtatcttatcgtaac

SEQ ID NO: 74130 - DNA, 2707 bp, Zea Mays
ggcggctctccccgcctcgttcgcccctaccgcgccatcaacgtgcctccccgccgcccctgtcctccccatgcccgccgctcccacccgagatggttagcgcccctcctccttccggtcccttcccctgcctcggccggccagccatggattcaccaagcgggctctggtggcggccggcgccgtcgtcgtgtcctccattcccgtcaaccccctcgatgtcgccaagatatgtttaccagacgaattgatatctaggctatttatgtggttactaattttgactcctctaagacatatttacacagggttggtcgttatgggagatatgggcaccttggtttggcagtgaacttgaccacttacaaagattgtttcaacttatatagtattgataaaaaaaacttggaacggaaattaagacaatacccccacaaattgacctgtttgtatactgccaatgatgatagcgacagcttcatgagcgtcagtggaggaggaggagaggcccatgtcggtggagctggaacccatcgccagcgagcagcagcttaactaggtccttggagaggcgtagcagctccagctcctcatcgtcctgctctgtacaaaagatgatattgattttgtggctggtttcatttgttggaatgctcttcaactttcttacgctcatttacattggtgagttctctgtccatgttaattttaagtgagtatgtaactatatgctctcatacgctttagggatccgctacgagcagcctacacatttatcatctgttcccatgcttatttttccttttttttattagtgatgggaatcgtatatccataaatagatctggagactggagcagtttttgttgggataaactttgtactggaccggagcatcttatctctggatgtgagtgccatgaaagtgatacccaacaaacaactaactctggaacacctttggtatgtcgggtaggcgcaaagccagcaagacaacaactgcttgagcagctttggccagttttgcttgccaccatgaatagccatatgttggccatcacatggtaccttgttcgtcccaaactagaccagagcattacaagcaatgactgccatatctaaaattgaaaacatgtgcggcttataagtatcctaaatttgctccacttctaagtatccaagatctactggttttgatgcgttccattgcttgcagcttttctctgcggtaaattgctggcttaaatgcatgctgcttgaaccctataatcagatagaccatcccgaatgcaagtcaaggcctgatagtggtctttctgcaattacagagctggaccctggttatataacaggtaaaacgtatggcttactttctttttcttagcactgacttcacaaagttgtagccatgagttgtaatatctagagactctaatatctattacatgataattttagattatatcatactccatgttgagtgaaaagttcattttggaaaacatttttgcaagttctgagctgaagtggctgaaacatggctgaaacagaaaatgtttttttacacgagatcatcaaactaatgaccataggtgctacaacaaagtattgattaggagagaatcatgttctttattcatgtctaagctgaacaatgtggaataatttgtgcaggtacagttatctgtatctcactcacactactgcttctttcaaagtaatctacgttcatctgtttccaaatggcaactccccatatttgctttgatattagcattgtgttctacgcttcagaatagtcctgttagacagggtgcattcagtactcatgtttgttagtgcattctgaagctacccatttcatttattcatgaagagagaaagggaagggaaaacaccttgcactgatattattttattgggcaaggtttcaggtcctctctcttcagtatggaaagaatgggtcaaatggtgtgtagagtttggcattgaagctaatgcaattatcgctgttccgtatgattggagactgcccccatcaatgcttgaggagagagatctgtactttcacaaattaaagtttgtaacacttgcctcaacttgttatgaagcaaccaaatgctatacatctgttaggatcagtaagagttaatggcccagtgacggattcaaggtatcctgctcaccaacagatcccacaagcatacggttaccgccaaatgcctgcaaggttggacagtaccaacccatcacaggccatgggaggttacacgctgcagtcacagaaggaaacattatttgaagagttgccattttgaagagttactcgaatccaatattttgctcttttgaattccttggtgtacactggcaaatattagcatatttgaagagttgccatttcgatcatcatcttcatttgtactttttgggtcagatctaataaagcatcagcattaaatttacaatgatcacctaaatccatggtttttattgcctagagctggtaatgtttctctggttttgcattagttgcttgaaaattgaaagtatctgtatacttctctattgtattttactgcacataatggatttgtttgatgtgtagggattttaaggtatgtaaaatatcttaacttttaaaagatgtgaataagaacataaaatagtaattagtattttgaattttaatgtatcttatcgtaac

SEQ ID NO: 74131 - DNA, 1486 bp, Zea Mays
ggcggctctccccgcctcgttcgcccctaccgcgccatcaacgtgcctccccgccgcccctgtcctccccatgcccgccgctcccacccgagatggttagcgcccctcctccttccggtcccttcccctgcctcggccggccagccatggattcaccaagcgggctctggtggcggccggcgccgtcgtcgtgtcctccattcccgtcaaccccctcgatgtcgccaagatatgtttaccagacgaattgatatctaggctatttatgtggttactaattttgactcctctaagacatatttacacagggttggtcgttatgggagatatgggcaccttggtttggcagtgaacttgaccacttacaaagattgtttcaacttatatagtattgataaaaaaaacttggaacggaaattaagacaatacccccacaaattgacctgtttgtatactgccaatgatgatagcgacagcttcatgagcgtcaggcacattttatttattttgacctgtttgtatactaacttaacacaagcttttttgtcaataacgtgggattcggaattttctgagctttgtgtagtggaggaggaggagaggcccatgtcggtggagctggaacccatcgccagcgagcagcagcttaactaggtccttggagaggcgtagcagctccagctcctcatcgtcctgctctgtacaaaagatgatattgattttgtggctggtttcatttgttggaatgctcttcaactttcttacgctcatttacattgcttttctctgcggtaaattgctggcttaaatgcatgctgcttgaaccctataatcagatagaccatcccgaatgcaagtcaaggcctgatagtggtctttctgcaattacagagctggaccctggttatataacaggatcagtaagagttaatggcccagtgacggattcaaggtatcctgctcaccaacagatcccacaagcatacggttaccgccaaatgcctgcaaggttggacagtaccaacccatcacaggccatgggaggttacacgctgcagtcacagaaggaaacattatttgaagagttgccattttgaagagttactcgaatccaatattttgctcttttgaattccttggtgtacactggcaaatattagcatatttgaagagttgccatttcgatcatcatcttcatttgtactttttgggtcagatctaataaagcatcagcattaaatttacaatgatcacctaaatccatggtttttattgcctagagctggtaatgtttctctggttttgcattagttgcttgaaaattgaaagtatctgtatacttctctattgtattttactgcacataatggatttgtttgatgtgtagggattttaaggtatgtaaaatatcttaacttttaaaagatgtgaataagaacataaaatagtaattagtattttgaattttaatgtatcttatcgtaac

SEQ ID NO: 74132 - DNA, 3282 bp, Zea Mays
ggcggctctccccgcctcgttcgcccctaccgcgccatcaacgtgcctccccgccgcccctgtcctccccatgcccgccgctcccacccgagatggttagcgcccctcctccttccggtcccttcccctgcctcggccggccagccatggattcaccaagcgggctctggtggcggccggcgccgtcgtcgtgtcctccattcccgtcaaccccctcgatgtcgccaaggagcaggacgatgcagtggggcagcatctctaatcatttaagcttcaaattaaccagtccattatattatgcaactctgtgaatagaattgagctactggctaagaaaataactgaactcggttattcatgcttcacattcatgctaagagcctaagatgttgcaagacaacagaaactgagtgtttcatgagtttcataatggtgcttgcagaaaccttttgtgcacagatatgtttaccagacgaattgatatctaggctatttatgtggttactaattttgactcctctaagacatatttacacagggttggtcgttatgggagatatgggcaccttggtttggcagtgaacttgaccacttacaaagattgtttcaacttatatagtattgataaaaaaaacttggaacggaaattaagacaatacccccacaaattgacctgtttgtatactgccaatgatgatagcgacagcttcatgagcgtcagtggaggaggaggagaggcccatgtcggtggagctggaacccatcgccagcgagcagcagcttaactaggtccttggagaggcgtagcagctccagctcctcatcgtcctgctctggtaaccccactttcctagatcggtttgtgcctgtagggtgttcttgttaaagtttgcttgtaatgtctgtgagattgcaatcatggtcgtgtatgattgcggtgttcacagattttgtttgcttgttcctagatagtcatttatgtggtgcaaatttagcatcttggatgaagtgaaaatggacaattttgttcatttgttattaggttctggcacttggacttggtatttagtaactgagaatttacttatttagtagttatacagcccgtgtcattgtcgttgggcgaatgaatttcatcgtcagtctattgcatgaatgataaatgcatgtcggtggccttttgccgaatctaccattttgtttgttcctcatctccattcctatctgcttgtttattggtagtagaagtagaactgctatttatggctgaggcctgagggaaaaaataatcaaatgttcaaccaacttcatttttttcttgagtgcatgggttgcagcctttggctagcttatgatctcgtgtggtctatttaccatataaataaatagcagcattagttcaatttgatgttcatagttctctctctctaaagagtcatatgttagattcatgggaaatacttgaactatacatttttttaatgtatcagatgtgtgaattatcatgtccggatcaatttcaaccaaccaacagttcctttagcaaatttgtcaggcatatttatgcacttgttcgcataactgagactatattatttttataagactaaggtcagactattgatggtttggtttgggtggcaccttgttcttcgttccttgccatttccatgccatccttttattatatacatacatttatttggagataaaatttgatgtcaagagaaacttgtctttctttcactctccaactcatcttcgtagtttgattctcatgggaggaccctgtttccatcatgctgcatctttttatctgataaagtgatatttcttagagcatcaaggttcgacaaccaacatattctcgtgtgaggaaatggaaaagtgatgtcttgaggacattttttatcttttgatgttgataattgttcatattattatggttcaacaactcctagcaccaagtcattctgtatgatctgttaacttgatagaagttaacatcatttgattttaagaaatgtaatcatatttcctgattgctcagaattgacttgttcatcatttttcaatgtccctaattggtattagatttttgtgatcttgtgtcatattctgtgatcaacaatgtacaatttgttgaataggctgttgttgaaaaagctgtatattatgctcttgtatggatcaataggctgttggctgtcggtcatgacatcgccatcaagacagataggaaagttatattttttcctaactatatatgctcttacctattcctgttctccatagtacaaaagatgatattgattttgtggctggtttcatttgttggaatgctcttcaactttcttacgctcatttacattgcttttctctgcggtaaattgctggcttaaatgcatgctgcttgaaccctataatcagatagaccatcccgaatgcaagtcaaggcctgatagtggtctttctgcaattacagagctggaccctggttatataacaggtcctctctcttcagtatggaaagaatgggtcaaatggtgtgtagagtttggcattgaagctaatgcaattatcgctgttccgtatgattggagactgcccccatcaatgcttgaggagagagatctgtactttcacaaattaaagtttgtaacacttgcctcaacttgttatgaagcaaccaaatgctatacatctgttaggatcagtaagagttaatggcccagtgacggattcaaggtatcctgctcaccaacagatcccacaagcatacggttaccgccaaatgcctgcaaggttggacagtaccaacccatcacaggccatgggaggttacacgctgcagtcacagaaggaaacattatttgaagagttgccattttgaagagttactcgaatccaatattttgctcttttgaattccttggtgtacactggcaaatattagcatatttgaagagttgccatttcgatcatcatcttcatttgtactttttgggtcagatctaataaagcatcagcattaaatttacaatgatcacctaaatccatggtttttattgcctagagctggtaatgtttctctggttttgcattagttgcttgaaaattgaaagtatctgtatacttctctattgtattttactgcacataatggatttgtttgatgtgtagggattttaaggtatgtaaaatatcttaacttttaaaagatgtgaataagaacataaaatagtaattagtattttgaattttaatgtatcttatcgtaac

SEQ ID NO: 74133 - DNA, 2192 bp, Zea Mays
ggcggctctccccgcctcgttcgcccctaccgcgccatcaacgtgcctccccgccgcccctgtcctccccatgcccgccgctcccacccgagatggttagcgcccctcctccttccggtcccttcccctgcctcggccggccagccatggattcaccaagcgggctctggtggcggccggcgccgtcgtcgtgtcctccattcccgtcaaccccctcgatgtcgccaagatatgtttaccagacgaattgatatctaggctatttatgtggttactaattttgactcctctaagacatatttacacagggttggtcgttatgggagatatgggcaccttggtttggcagtgaacttgaccacttacaaagattgtttcaacttatatagtattgataaaaaaaacttggaacggaaattaagacaatacccccacaaattgacctgtttgtatactgccaatgatgatagcgacagcttcatgagcgtcaggcacattttatttattttgacctgtttgtatactaacttaacacaagcttttttgtcaataacgtgggattcggaattttctgagctttgtgtagtggaggaggaggagaggcccatgtcggtggagctggaacccatcgccagcgagcagcagcttaactaggtccttggagaggcgtagcagctccagctcctcatcgtcctgctctgcttttctctgcggtaaattgctggcttaaatgcatgctgcttgaaccctataatcagatagaccatcccgaatgcaagtcaaggcctgatagtggtctttctgcaattacagagctggaccctggttatataacaggtaaaacgtatggcttactttctttttcttagcactgacttcacaaagttgtagccatgagttgtaatatctagagactctaatatctattacatgataattttagattatatcatactccatgttgagtgaaaagttcattttggaaaacatttttgcaagttctgagctgaagtggctgaaacatggctgaaacagaaaatgtttttttacacgagatcatcaaactaatgaccataggtgctacaacaaagtattgattaggagagaatcatgttctttattcatgtctaagctgaacaatgtggaataatttgtgcaggtacagttatctgtatctcactcacactactgcttctttcaaagtaatctacgttcatctgtttccaaatggcaactccccatatttgctttgatattagcattgtgttctacgcttcagaatagtcctgttagacagggtgcattcagtactcatgtttgttagtgcattctgaagctacccatttcatttattcatgaagagagaaagggaagggaaaacaccttgcactgatattattttattgggcaaggtttcaggtcctctctcttcagtatggaaagaatgggtcaaatggtgtgtagagtttggcattgaagctaatgcaattatcgctgttccgtatgattggagactgcccccatcaatgcttgaggagagagatctgtactttcacaaattaaagtttgtaacacttgcctcaacttgttatgaagcaaccaaatgctatacatctgttaggatcagtaagagttaatggcccagtgacggattcaaggtatcctgctcaccaacagatcccacaagcatacggttaccgccaaatgcctgcaaggttggacagtaccaacccatcacaggccatgggaggttacacgctgcagtcacagaaggaaacattatttgaagagttgccattttgaagagttactcgaatccaatattttgctcttttgaattccttggtgtacactggcaaatattagcatatttgaagagttgccatttcgatcatcatcttcatttgtactttttgggtcagatctaataaagcatcagcattaaatttacaatgatcacctaaatccatggtttttattgcctagagctggtaatgtttctctggttttgcattagttgcttgaaaattgaaagtatctgtatacttctctattgtattttactgcacataatggatttgtttgatgtgtagggattttaaggtatgtaaaatatcttaacttttaaaagatgtgaataagaacataaaatagtaattagtattttgaattttaatgtatcttatcgtaac

SEQ ID NO: 74134 - DNA, 1843 bp, Zea Mays
ggcggctctccccgcctcgttcgcccctaccgcgccatcaacgtgcctccccgccgcccctgtcctccccatgcccgccgctcccacccgagatggttagcgcccctcctccttccggtcccttcccctgcctcggccggccagccatggattcaccaagcgggctctggtggcggccggcgccgtcgtcgtgtcctccattcccgtcaaccccctcgatgtcgccaaggagcaggacgatgcagtggggcagcatctctaatcatttaagcttcaaattaaccagtccattatattatgcaactctgtgaatagaattgagctactggctaagaaaataactgaactcggttattcatgcttcacattcatgctaagagcctaagatgttgcaagacaacagaaactgagtgtttcatgagtttcataatggtgcttgcagaaaccttttgtgcacagatatgtttaccagacgaattgatatctaggctatttatgtggttactaattttgactcctctaagacatatttacacagggttggtcgttatgggagatatgggcaccttggtttggcagtgaacttgaccacttacaaagattgtttcaacttatatagtattgataaaaaaaacttggaacggaaattaagacaatacccccacaaattgacctgtttgtatactgccaatgatgatagcgacagcttcatgagcgtcaggcacattttatttattttgacctgtttgtatactaacttaacacaagcttttttgtcaataacgtgggattcggaattttctgagctttgtgtagtggaggaggaggagaggcccatgtcggtggagctggaacccatcgccagcgagcagcagcttaactaggtccttggagaggcgtagcagctccagctcctcatcgtcctgctctgcttttctctgcggtaaattgctggcttaaatgcatgctgcttgaaccctataatcagatagaccatcccgaatgcaagtcaaggcctgatagtggtctttctgcaattacagagctggaccctggttatataacaggtcctctctcttcagtatggaaagaatgggtcaaatggtgtgtagagtttggcattgaagctaatgcaattatcgctgttccgtatgattggagactgcccccatcaatgcttgaggagagagatctgtactttcacaaattaaagtttgtaacacttgcctcaacttgttatgaagcaaccaaatgctatacatctgttagcaggatcagtaagagttaatggcccagtgacggattcaaggtatcctgctcaccaacagatcccacaagcatacggttaccgccaaatgcctgcaaggttggacagtaccaacccatcacaggccatgggaggttacacgctgcagtcacagaaggaaacattatttgaagagttgccattttgaagagttactcgaatccaatattttgctcttttgaattccttggtgtacactggcaaatattagcatatttgaagagttgccatttcgatcatcatcttcatttgtactttttgggtcagatctaataaagcatcagcattaaatttacaatgatcacctaaatccatggtttttattgcctagagctggtaatgtttctctggttttgcattagttgcttgaaaattgaaagtatctgtatacttctctattgtattttactgcacataatggatttgtttgatgtgtagggattttaaggtatgtaaaatatcttaacttttaaaagatgtgaataagaacataaaatagtaattagtattttgaattttaatgtatcttatcgtaac

SEQ ID NO: 74135 - DNA, 1691 bp, Zea Mays
ggcggctctccccgcctcgttcgcccctaccgcgccatcaacgtgcctccccgccgcccctgtcctccccatgcccgccgctcccacccgagatggttagcgcccctcctccttccggtcccttcccctgcctcggccggccagccatggattcaccaagcgggctctggtggcggccggcgccgtcgtcgtgtcctccattcccgtcaaccccctcgatgtcgccaaggagcaggacgatgcagtggggcagcatctctaatcatttaagcttcaaattaaccagtccattatattatgcaactctgtgaatagaattgagctactggctaagaaaataactgaactcggttattcatgcttcacattcatgctaagagcctaagatgttgcaagacaacagaaactgagtgtttcatgagtttcataatggtgcttgcagaaaccttttgtgcacagatatgtttaccagacgaattgatatctaggctatttatgtggttactaattttgactcctctaagacatatttacacagggttggtcgttatgggagatatgggcaccttggtttggcagtgaacttgaccacttacaaagattgtttcaacttatatagtattgataaaaaaaacttggaacggaaattaagacaatacccccacaaattgacctgtttgtatactgccaatgatgatagcgacagcttcatgagcgtcagtggaggaggaggagaggcccatgtcggtggagctggaacccatcgccagcgagcagcagcttaactaggtccttggagaggcgtagcagctccagctcctcatcgtcctgctctgcttttctctgcggtaaattgctggcttaaatgcatgctgcttgaaccctataatcagatagaccatcccgaatgcaagtcaaggcctgatagtggtctttctgcaattacagagctggaccctggttatataacaggtcctctctcttcagtatggaaagaatgggtcaaatggtgtgtagagtttggcattgaagctaatgcaattatcgctgttccgtatgattggagactgcccccatcaatgcttgaggagagagatctgtactttcacaaattaaacaggatcagtaagagttaatggcccagtgacggattcaaggtatcctgctcaccaacagatcccacaagcatacggttaccgccaaatgcctgcaaggttggacagtaccaacccatcacaggccatgggaggttacacgctgcagtcacagaaggaaacattatttgaagagttgccattttgaagagttactcgaatccaatattttgctcttttgaattccttggtgtacactggcaaatattagcatatttgaagagttgccatttcgatcatcatcttcatttgtactttttgggtcagatctaataaagcatcagcattaaatttacaatgatcacctaaatccatggtttttattgcctagagctggtaatgtttctctggttttgcattagttgcttgaaaattgaaagtatctgtatacttctctattgtattttactgcacataatggatttgtttgatgtgtagggattttaaggtatgtaaaatatcttaacttttaaaagatgtgaataagaacataaaatagtaattagtattttgaattttaatgtatcttatcgtaac

SEQ ID NO: 74136 - DNA, 1836 bp, Zea Mays
ggcggctctccccgcctcgttcgcccctaccgcgccatcaacgtgcctccccgccgcccctgtcctccccatgcccgccgctcccacccgagatggttagcgcccctcctccttccggtcccttcccctgcctcggccggccagccatggattcaccaagcgggctctggtggcggccggcgccgtcgtcgtgtcctccattcccgtcaaccccctcgatgtcgccaagatatgtttaccagacgaattgatatctaggctatttatgtggttactaattttgactcctctaagacatatttacacagggttggtcgttatgggagatatgggcaccttggtttggcagtgaacttgaccacttacaaagattgtttcaacttatatagtattgataaaaaaaacttggaacggaaattaagacaatacccccacaaattgacctgtttgtatactgccaatgatgatagcgacagcttcatgagcgtcaggcacattttatttattttgacctgtttgtatactaacttaacacaagcttttttgtcaataacgtgggattcggaattttctgagctttgtgtagtggaggaggaggagaggcccatgtcggtggagctggaacccatcgccagcgagcagcagcttaactaggtccttggagaggcgtagcagctccagctcctcatcgtcctgctctggctgttgttgaaaaagctgtatattatgctcttgtatggatcaataggctgttggctgtcggtcatgacatcgccatcaagacagataggaaagttatattttttcctaactatatatgctcttacctattcctgttctccatagtacaaaagatgatattgattttgtggctggtttcatttgttggaatgctcttcaactttcttacgctcatttacattgcttttctctgcggtaaattgctggcttaaatgcatgctgcttgaaccctataatcagatagaccatcccgaatgcaagtcaaggcctgatagtggtctttctgcaattacagagctggaccctggttatataacaggtcctctctcttcagtatggaaagaatgggtcaaatggtgtgtagagtttggcattgaagctaatgcaattatcgctgttccgtatgattggagactgcccccatcaatgcttgaggagagagatctgtactttcacaaattaaagtttgtaacacttgcctcaacttgttatgaagcaaccaaatgctatacatctgttagcaggatcagtaagagttaatggcccagtgacggattcaaggtatcctgctcaccaacagatcccacaagcatacggttaccgccaaatgcctgcaaggttggacagtaccaacccatcacaggccatgggaggttacacgctgcagtcacagaaggaaacattatttgaagagttgccattttgaagagttactcgaatccaatattttgctcttttgaattccttggtgtacactggcaaatattagcatatttgaagagttgccatttcgatcatcatcttcatttgtactttttgggtcagatctaataaagcatcagcattaaatttacaatgatcacctaaatccatggtttttattgcctagagctggtaatgtttctctggttttgcattagttgcttgaaaattgaaagtatctgtatacttctctattgtattttactgcacataatggatttgtttgatgtgtagggattttaaggtatgtaaaatatcttaacttttaaaagatgtgaataagaacataaaatagtaattagtattttgaattttaatgtatcttatcgtaac

SEQ ID NO: 74137 - DNA, 3622 bp, Zea Mays
ggcggctctccccgcctcgttcgcccctaccgcgccatcaacgtgcctccccgccgcccctgtcctccccatgcccgccgctcccacccgagatggttagcgcccctcctccttccggtcccttcccctgcctcggccggccagccatggattcaccaagcgggctctggtggcggccggcgccgtcgtcgtgtcctccattcccgtcaaccccctcgatgtcgccaagatatgtttaccagacgaattgatatctaggctatttatgtggttactaattttgactcctctaagacatatttacacagggttggtcgttatgggagatatgggcaccttggtttggcagtgaacttgaccacttacaaagattgtttcaacttatatagtattgataaaaaaaacttggaacggaaattaagacaatacccccacaaattgacctgtttgtatactgccaatgatgatagcgacagcttcatgagcgtcaggcacattttatttattttgacctgtttgtatactaacttaacacaagcttttttgtcaataacgtgggattcggaattttctgagctttgtgtagtggaggaggaggagaggcccatgtcggtggagctggaacccatcgccagcgagcagcagcttaactaggtccttggagaggcgtagcagctccagctcctcatcgtcctgctctggtaaccccactttcctagatcggtttgtgcctgtagggtgttcttgttaaagtttgcttgtaatgtctgtgagattgcaatcatggtcgtgtatgattgcggtgttcacagattttgtttgcttgttcctagatagtcatttatgtggtgcaaatttagcatcttggatgaagtgaaaatggacaattttgttcatttgttattaggttctggcacttggacttggtatttagtaactgagaatttacttatttagtagttatacagcccgtgtcattgtcgttgggcgaatgaatttcatcgtcagtctattgcatgaatgataaatgcatgtcggtggccttttgccgaatctaccattttgtttgttcctcatctccattcctatctgcttgtttattggtagtagaagtagaactgctatttatggctgaggcctgagggaaaaaataatcaaatgttcaaccaacttcatttttttcttgagtgcatgggttgcagcctttggctagcttatgatctcgtgtggtctatttaccatataaataaatagcagcattagttcaatttgatgttcatagttctctctctctaaagagtcatatgttagattcatgggaaatacttgaactatacatttttttaatgtatcagatgtgtgaattatcatgtccggatcaatttcaaccaaccaacagttcctttagcaaatttgtcaggcatatttatgcacttgttcgcataactgagactatattatttttataagactaaggtcagactattgatggtttggtttgggtggcaccttgttcttcgttccttgccatttccatgccatccttttattatatacatacatttatttggagataaaatttgatgtcaagagaaacttgtctttctttcactctccaactcatcttcgtagtttgattctcatgggaggaccctgtttccatcatgctgcatctttttatctgataaagtgatatttcttagagcatcaaggttcgacaaccaacatattctcgtgtgaggaaatggaaaagtgatgtcttgaggacattttttatcttttgatgttgataattgttcatattattatggttcaacaactcctagcaccaagtcattctgtatgatctgttaacttgatagaagttaacatcatttgattttaagaaatgtaatcatatttcctgattgctcagaattgacttgttcatcatttttcaatgtccctaattggtattagatttttgtgatcttgtgtcatattctgtgatcaacaatgtacaatttgttgaataggctgttgttgaaaaagctgtatattatgctcttgtatggatcaataggctgttggctgtcggtcatgacatcgccatcaagacagataggaaagttatattttttcctaactatatatgctcttacctattcctgttctccatagtacaaaagatgatattgattttgtggctggtttcatttgttggaatgctcttcaactttcttacgctcatttacattggtgagttctctgtccatgttaattttaagtgagtatgtaactatatgctctcatacgctttagggatccgctacgagcagcctacacatttatcatctgttcccatgcttatttttccttttttttattagtgatgggaatcgtatatccataaatagatctggagactggagcagtttttgttgggataaactttgtactggaccggagcatcttatctctggatgtgagtgccatgaaagtgatacccaacaaacaactaactctggaacacctttggtatgtcgggtaggcgcaaagccagcaagacaacaactgcttgagcagctttggccagttttgcttgccaccatgaatagccatatgttggccatcacatggtaccttgttcgtcccaaactagaccagagcattacaagcaatgactgccatatctaaaattgaaaacatgtgcggcttataagtatcctaaatttgctccacttctaagtatccaagatctactggttttgatgcgttccattgcttgcagcttttctctgcggtaaattgctggcttaaatgcatgctgcttgaaccctataatcagatagaccatcccgaatgcaagtcaaggcctgatagtggtctttctgcaattacagagctggaccctggttatataacaggtcctctctcttcagtatggaaagaatgggtcaaatggtgtgtagagtttggcattgaagctaatgcaattatcgctgttccgtatgattggagactgcccccatcaatgcttgaggagagagatctgtactttcacaaattaaagatcagtaagagttaatggcccagtgacggattcaaggtatcctgctcaccaacagatcccacaagcatacggttaccgccaaatgcctgcaaggttggacagtaccaacccatcacaggccatgggaggttacacgctgcagtcacagaaggaaacattatttgaagagttgccattttgaagagttactcgaatccaatattttgctcttttgaattccttggtgtacactggcaaatattagcatatttgaagagttgccatttcgatcatcatcttcatttgtactttttgggtcagatctaataaagcatcagcattaaatttacaatgatcacctaaatccatggtttttattgcctagagctggtaatgtttctctggttttgcattagttgcttgaaaattgaaagtatctgtatacttctctattgtattttactgcacataatggatttgtttgatgtgtagggattttaaggtatgtaaaatatcttaacttttaaaagatgtgaataagaacataaaatagtaattagtattttgaattttaatgtatcttatcgtaac

SEQ ID NO: 74138 - DNA, 3180 bp, Zea Mays
ggcggctctccccgcctcgttcgcccctaccgcgccatcaacgtgcctccccgccgcccctgtcctccccatgcccgccgctcccacccgagatggttagcgcccctcctccttccggtcccttcccctgcctcggccggccagccatggattcaccaagcgggctctggtggcggccggcgccgtcgtcgtgtcctccattcccgtcaaccccctcgatgtcgccaaggagcaggacgatgcagtggggcagcatctctaatcatttaagcttcaaattaaccagtccattatattatgcaactctgtgaatagaattgagctactggctaagaaaataactgaactcggttattcatgcttcacattcatgctaagagcctaagatgttgcaagacaacagaaactgagtgtttcatgagtttcataatggtgcttgcagaaaccttttgtgcacagatatgtttaccagacgaattgatatctaggctatttatgtggttactaattttgactcctctaagacatatttacacagggttggtcgttatgggagatatgggcaccttggtttggcagtgaacttgaccacttacaaagattgtttcaacttatatagtattgataaaaaaaacttggaacggaaattaagacaatacccccacaaattgacctgtttgtatactgccaatgatgatagcgacagcttcatgagcgtcaggcacattttatttattttgacctgtttgtatactaacttaacacaagcttttttgtcaataacgtgggattcggaattttctgagctttgtgtagtggaggaggaggagaggcccatgtcggtggagctggaacccatcgccagcgagcagcagcttaactaggtccttggagaggcgtagcagctccagctcctcatcgtcctgctctggctgttgttgaaaaagctgtatattatgctcttgtatggatcaataggctgttggctgtcggtcatgacatcgccatcaagacagataggaaagttatattttttcctaactatatatgctcttacctattcctgttctccatagtacaaaagatgatattgattttgtggctggtttcatttgttggaatgctcttcaactttcttacgctcatttacattggtgagttctctgtccatgttaattttaagtgagtatgtaactatatgctctcatacgctttagggatccgctacgagcagcctacacatttatcatctgttcccatgcttatttttccttttttttattagtgatgggaatcgtatatccataaatagatctggagactggagcagtttttgttgggataaactttgtactggaccggagcatcttatctctggatgtgagtgccatgaaagtgatacccaacaaacaactaactctggaacacctttggtatgtcgggtaggcgcaaagccagcaagacaacaactgcttgagcagctttggccagttttgcttgccaccatgaatagccatatgttggccatcacatggtaccttgttcgtcccaaactagaccagagcattacaagcaatgactgccatatctaaaattgaaaacatgtgcggcttataagtatcctaaatttgctccacttctaagtatccaagatctactggttttgatgcgttccattgcttgcagcttttctctgcggtaaattgctggcttaaatgcatgctgcttgaaccctataatcagatagaccatcccgaatgcaagtcaaggcctgatagtggtctttctgcaattacagagctggaccctggttatataacaggtaaaacgtatggcttactttctttttcttagcactgacttcacaaagttgtagccatgagttgtaatatctagagactctaatatctattacatgataattttagattatatcatactccatgttgagtgaaaagttcattttggaaaacatttttgcaagttctgagctgaagtggctgaaacatggctgaaacagaaaatgtttttttacacgagatcatcaaactaatgaccataggtgctacaacaaagtattgattaggagagaatcatgttctttattcatgtctaagctgaacaatgtggaataatttgtgcaggtacagttatctgtatctcactcacactactgcttctttcaaagtaatctacgttcatctgtttccaaatggcaactccccatatttgctttgatattagcattgtgttctacgcttcagaatagtcctgttagacagggtgcattcagtactcatgtttgttagtgcattctgaagctacccatttcatttattcatgaagagagaaagggaagggaaaacaccttgcactgatattattttattgggcaaggtttcaggtcctctctcttcagtatggaaagaatgggtcaaatggtgtgtagagtttggcattgaagctaatgcaattatcgctgttccgtatgattggagactgcccccatcaatgcttgaggagagagatctgtactttcacaaattaaagtttgtaacacttgcctcaacttgttatgaagcaaccaaatgctatacatctgttagcaggatcagtaagagttaatggcccagtgacggattcaaggtatcctgctcaccaacagatcccacaagcatacggttaccgccaaatgcctgcaaggttggacagtaccaacccatcacaggccatgggaggttacacgctgcagtcacagaaggaaacattatttgaagagttgccattttgaagagttactcgaatccaatattttgctcttttgaattccttggtgtacactggcaaatattagcatatttgaagagttgccatttcgatcatcatcttcatttgtactttttgggtcagatctaataaagcatcagcattaaatttacaatgatcacctaaatccatggtttttattgcctagagctggtaatgtttctctggttttgcattagttgcttgaaaattgaaagtatctgtatacttctctattgtattttactgcacataatggatttgtttgatgtgtagggattttaaggtatgtaaaatatcttaacttttaaaagatgtgaataagaacataaaatagtaattagtattttgaattttaatgtatcttatcgtaac

SEQ ID NO: 74139 - DNA, 2220 bp, Zea Mays
ggcggctctccccgcctcgttcgcccctaccgcgccatcaacgtgcctccccgccgcccctgtcctccccatgcccgccgctcccacccgagatggttagcgcccctcctccttccggtcccttcccctgcctcggccggccagccatggattcaccaagcgggctctggtggcggccggcgccgtcgtcgtgtcctccattcccgtcaaccccctcgatgtcgccaagatatgtttaccagacgaattgatatctaggctatttatgtggttactaattttgactcctctaagacatatttacacagggttggtcgttatgggagatatgggcaccttggtttggcagtgaacttgaccacttacaaagattgtttcaacttatatagtattgataaaaaaaacttggaacggaaattaagacaatacccccacaaattgacctgtttgtatactgccaatgatgatagcgacagcttcatgagcgtcaggcacattttatttattttgacctgtttgtatactaacttaacacaagcttttttgtcaataacgtgggattcggaattttctgagctttgtgtagtggaggaggaggagaggcccatgtcggtggagctggaacccatcgccagcgagcagcagcttaactaggtccttggagaggcgtagcagctccagctcctcatcgtcctgctctgtacaaaagatgatattgattttgtggctggtttcatttgttggaatgctcttcaactttcttacgctcatttacattggtgagttctctgtccatgttaattttaagtgagtatgtaactatatgctctcatacgctttagggatccgctacgagcagcctacacatttatcatctgttcccatgcttatttttccttttttttattagtgatgggaatcgtatatccataaatagatctggagactggagcagtttttgttgggataaactttgtactggaccggagcatcttatctctggatgtgagtgccatgaaagtgatacccaacaaacaactaactctggaacacctttggtatgtcgggtaggcgcaaagccagcaagacaacaactgcttgagcagctttggccagttttgcttgccaccatgaatagccatatgttggccatcacatggtaccttgttcgtcccaaactagaccagagcattacaagcaatgactgccatatctaaaattgaaaacatgtgcggcttataagtatcctaaatttgctccacttctaagtatccaagatctactggttttgatgcgttccattgcttgcagcttttctctgcggtaaattgctggcttaaatgcatgctgcttgaaccctataatcagatagaccatcccgaatgcaagtcaaggcctgatagtggtctttctgcaattacagagctggaccctggttatataacaggtcctctctcttcagtatggaaagaatgggtcaaatggtgtgtagagtttggcattgaagctaatgcaattatcgctgttccgtatgattggagactgcccccatcaatgcttgaggagagagatctgtactttcacaaattaaagtttgtaacacttgcctcaacttgttatgaagcaaccaaatgctatacatctgttaggatcagtaagagttaatggcccagtgacggattcaaggtatcctgctcaccaacagatcccacaagcatacggttaccgccaaatgcctgcaaggttggacagtaccaacccatcacaggccatgggaggttacacgctgcagtcacagaaggaaacattatttgaagagttgccattttgaagagttactcgaatccaatattttgctcttttgaattccttggtgtacactggcaaatattagcatatttgaagagttgccatttcgatcatcatcttcatttgtactttttgggtcagatctaataaagcatcagcattaaatttacaatgatcacctaaatccatggtttttattgcctagagctggtaatgtttctctggttttgcattagttgcttgaaaattgaaagtatctgtatacttctctattgtattttactgcacataatggatttgtttgatgtgtagggattttaaggtatgtaaaatatcttaacttttaaaagatgtgaataagaacataaaatagtaattagtattttgaattttaatgtatcttatcgtaac

SEQ ID NO: 74140 - DNA, 2371 bp, Zea Mays
ggcggctctccccgcctcgttcgcccctaccgcgccatcaacgtgcctccccgccgcccctgtcctccccatgcccgccgctcccacccgagatggttagcgcccctcctccttccggtcccttcccctgcctcggccggccagccatggattcaccaagcgggctctggtggcggccggcgccgtcgtcgtgtcctccattcccgtcaaccccctcgatgtcgccaaggagcaggacgatgcagtggggcagcatctctaatcatttaagcttcaaattaaccagtccattatattatgcaactctgtgaatagaattgagctactggctaagaaaataactgaactcggttattcatgcttcacattcatgctaagagcctaagatgttgcaagacaacagaaactgagtgtttcatgagtttcataatggtgcttgcagaaaccttttgtgcacagatatgtttaccagacgaattgatatctaggctatttatgtggttactaattttgactcctctaagacatatttacacagggttggtcgttatgggagatatgggcaccttggtttggcagtgaacttgaccacttacaaagattgtttcaacttatatagtattgataaaaaaaacttggaacggaaattaagacaatacccccacaaattgacctgtttgtatactgccaatgatgatagcgacagcttcatgagcgtcaggcacattttatttattttgacctgtttgtatactaacttaacacaagcttttttgtcaataacgtgggattcggaattttctgagctttgtgtagtggaggaggaggagaggcccatgtcggtggagctggaacccatcgccagcgagcagcagcttaactaggtccttggagaggcgtagcagctccagctcctcatcgtcctgctctgtacaaaagatgatattgattttgtggctggtttcatttgttggaatgctcttcaactttcttacgctcatttacattggtgagttctctgtccatgttaattttaagtgagtatgtaactatatgctctcatacgctttagggatccgctacgagcagcctacacatttatcatctgttcccatgcttatttttccttttttttattagtgatgggaatcgtatatccataaatagatctggagactggagcagtttttgttgggataaactttgtactggaccggagcatcttatctctggatgtgagtgccatgaaagtgatacccaacaaacaactaactctggaacacctttggtatgtcgggtaggcgcaaagccagcaagacaacaactgcttgagcagctttggccagttttgcttgccaccatgaatagccatatgttggccatcacatggtaccttgttcgtcccaaactagaccagagcattacaagcaatgactgccatatctaaaattgaaaacatcttttctctgcggtaaattgctggcttaaatgcatgctgcttgaaccctataatcagatagaccatcccgaatgcaagtcaaggcctgatagtggtctttctgcaattacagagctggaccctggttatataacaggtcctctctcttcagtatggaaagaatgggtcaaatggtgtgtagagtttggcattgaagctaatgcaattatcgctgttccgtatgattggagactgcccccatcaatgcttgaggagagagatctgtactttcacaaattaaagtttgtaacacttgcctcaacttgttatgaagcaaccaaatgctatacatctgttagcaggatcagtaagagttaatggcccagtgacggattcaaggtatcctgctcaccaacagatcccacaagcatacggttaccgccaaatgcctgcaaggttggacagtaccaacccatcacaggccatgggaggttacacgctgcagtcacagaaggaaacattatttgaagagttgccattttgaagagttactcgaatccaatattttgctcttttgaattccttggtgtacactggcaaatattagcatatttgaagagttgccatttcgatcatcatcttcatttgtactttttgggtcagatctaataaagcatcagcattaaatttacaatgatcacctaaatccatggtttttattgcctagagctggtaatgtttctctggttttgcattagttgcttgaaaattgaaagtatctgtatacttctctattgtattttactgcacataatggatttgtttgatgtgtagggattttaaggtatgtaaaatatcttaacttttaaaagatgtgaataagaacataaaatagtaattagtattttgaattttaatgtatcttatcgtaac

SEQ ID NO: 74141 - DNA, 2805 bp, Zea Mays
ggcggctctccccgcctcgttcgcccctaccgcgccatcaacgtgcctccccgccgcccctgtcctccccatgcccgccgctcccacccgagatggttagcgcccctcctccttccggtcccttcccctgcctcggccggccagccatggattcaccaagcgggctctggtggcggccggcgccgtcgtcgtgtcctccattcccgtcaaccccctcgatgtcgccaagatatgtttaccagacgaattgatatctaggctatttatgtggttactaattttgactcctctaagacatatttacacagggttggtcgttatgggagatatgggcaccttggtttggcagtgaacttgaccacttacaaagattgtttcaacttatatagtattgataaaaaaaacttggaacggaaattaagacaatacccccacaaattgacctgtttgtatactgccaatgatgatagcgacagcttcatgagcgtcaggcacattttatttattttgacctgtttgtatactaacttaacacaagcttttttgtcaataacgtgggattcggaattttctgagctttgtgtagtggaggaggaggagaggcccatgtcggtggagctggaacccatcgccagcgagcagcagcttaactaggtccttggagaggcgtagcagctccagctcctcatcgtcctgctctgtacaaaagatgatattgattttgtggctggtttcatttgttggaatgctcttcaactttcttacgctcatttacattggtgagttctctgtccatgttaattttaagtgagtatgtaactatatgctctcatacgctttagggatccgctacgagcagcctacacatttatcatctgttcccatgcttatttttccttttttttattagtgatgggaatcgtatatccataaatagatctggagactggagcagtttttgttgggataaactttgtactggaccggagcatcttatctctggatgtgagtgccatgaaagtgatacccaacaaacaactaactctggaacacctttggtatgtcgggtaggcgcaaagccagcaagacaacaactgcttgagcagctttggccagttttgcttgccaccatgaatagccatatgttggccatcacatggtaccttgttcgtcccaaactagaccagagcattacaagcaatgactgccatatctaaaattgaaaacatgtgcggcttataagtatcctaaatttgctccacttctaagtatccaagatctactggttttgatgcgttccattgcttgcagcttttctctgcggtaaattgctggcttaaatgcatgctgcttgaaccctataatcagatagaccatcccgaatgcaagtcaaggcctgatagtggtctttctgcaattacagagctggaccctggttatataacaggtaaaacgtatggcttactttctttttcttagcactgacttcacaaagttgtagccatgagttgtaatatctagagactctaatatctattacatgataattttagattatatcatactccatgttgagtgaaaagttcattttggaaaacatttttgcaagttctgagctgaagtggctgaaacatggctgaaacagaaaatgtttttttacacgagatcatcaaactaatgaccataggtgctacaacaaagtattgattaggagagaatcatgttctttattcatgtctaagctgaacaatgtggaataatttgtgcaggtacagttatctgtatctcactcacactactgcttctttcaaagtaatctacgttcatctgtttccaaatggcaactccccatatttgctttgatattagcattgtgttctacgcttcagaatagtcctgttagacagggtgcattcagtactcatgtttgttagtgcattctgaagctacccatttcatttattcatgaagagagaaagggaagggaaaacaccttgcactgatattattttattgggcaaggtttcaggtcctctctcttcagtatggaaagaatgggtcaaatggtgtgtagagtttggcattgaagctaatgcaattatcgctgttccgtatgattggagactgcccccatcaatgcttgaggagagagatctgtactttcacaaattaaagtttgtaacacttgcctcaacttgttatgaagcaaccaaatgctatacatctgttagcaggatcagtaagagttaatggcccagtgacggattcaaggtatcctgctcaccaacagatcccacaagcatacggttaccgccaaatgcctgcaaggttggacagtaccaacccatcacaggccatgggaggttacacgctgcagtcacagaaggaaacattatttgaagagttgccattttgaagagttactcgaatccaatattttgctcttttgaattccttggtgtacactggcaaatattagcatatttgaagagttgccatttcgatcatcatcttcatttgtactttttgggtcagatctaataaagcatcagcattaaatttacaatgatcacctaaatccatggtttttattgcctagagctggtaatgtttctctggttttgcattagttgcttgaaaattgaaagtatctgtatacttctctattgtattttactgcacataatggatttgtttgatgtgtagggattttaaggtatgtaaaatatcttaacttttaaaagatgtgaataagaacataaaatagtaattagtattttgaattttaatgtatcttatcgtaac

SEQ ID NO: 74142 - DNA, 2173 bp, Zea Mays
ggcggctctccccgcctcgttcgcccctaccgcgccatcaacgtgcctccccgccgcccctgtcctccccatgcccgccgctcccacccgagatggttagcgcccctcctccttccggtcccttcccctgcctcggccggccagccatggattcaccaagcgggctctggtggcggccggcgccgtcgtcgtgtcctccattcccgtcaaccccctcgatgtcgccaagatatgtttaccagacgaattgatatctaggctatttatgtggttactaattttgactcctctaagacatatttacacagggttggtcgttatgggagatatgggcaccttggtttggcagtgaacttgaccacttacaaagattgtttcaacttatatagtattgataaaaaaaacttggaacggaaattaagacaatacccccacaaattgacctgtttgtatactgccaatgatgatagcgacagcttcatgagcgtcaggcacattttatttattttgacctgtttgtatactaacttaacacaagcttttttgtcaataacgtgggattcggaattttctgagctttgtgtagtggaggaggaggagaggcccatgtcggtggagctggaacccatcgccagcgagcagcagcttaactaggtccttggagaggcgtagcagctccagctcctcatcgtcctgctctgtacaaaagatgatattgattttgtggctggtttcatttgttggaatgctcttcaactttcttacgctcatttacattggtgagttctctgtccatgttaattttaagtgagtatgtaactatatgctctcatacgctttagggatccgctacgagcagcctacacatttatcatctgttcccatgcttatttttccttttttttattagtgatgggaatcgtatatccataaatagatctggagactggagcagtttttgttgggataaactttgtactggaccggagcatcttatctctggatgtgagtgccatgaaagtgatacccaacaaacaactaactctggaacacctttggtatgtcgggtaggcgcaaagccagcaagacaacaactgcttgagcagctttggccagttttgcttgccaccatgaatagccatatgttggccatcacatggtaccttgttcgtcccaaactagaccagagcattacaagcaatgactgccatatctaaaattgaaaacatgtgcggcttataagtatcctaaatttgctccacttctaagtatccaagatctactggttttgatgcgttccattgcttgcagcttttctctgcggtaaattgctggcttaaatgcatgctgcttgaaccctataatcagatagaccatcccgaatgcaagtcaaggcctgatagtggtctttctgcaattacagagctggaccctggttatataacaggtttcaggtcctctctcttcagtatggaaagaatgggtcaaatggtgtgtagagtttggcattgaagctaatgcaattatcgctgttccgtatgattggagactgcccccatcaatgcttgaggagagagatctgtactttcacaaattaaacaggatcagtaagagttaatggcccagtgacggattcaaggtatcctgctcaccaacagatcccacaagcatacggttaccgccaaatgcctgcaaggttggacagtaccaacccatcacaggccatgggaggttacacgctgcagtcacagaaggaaacattatttgaagagttgccattttgaagagttactcgaatccaatattttgctcttttgaattccttggtgtacactggcaaatattagcatatttgaagagttgccatttcgatcatcatcttcatttgtactttttgggtcagatctaataaagcatcagcattaaatttacaatgatcacctaaatccatggtttttattgcctagagctggtaatgtttctctggttttgcattagttgcttgaaaattgaaagtatctgtatacttctctattgtattttactgcacataatggatttgtttgatgtgtagggattttaaggtatgtaaaatatcttaacttttaaaagatgtgaataagaacataaaatagtaattagtattttgaattttaatgtatcttatcgtaac

SEQ ID NO: 74143 - DNA, 1924 bp, Zea Mays
ggcggctctccccgcctcgttcgcccctaccgcgccatcaacgtgcctccccgccgcccctgtcctccccatgcccgccgctcccacccgagatggttagcgcccctcctccttccggtcccttcccctgcctcggccggccagccatggattcaccaagcgggctctggtggcggccggcgccgtcgtcgtgtcctccattcccgtcaaccccctcgatgtcgccaagatatgtttaccagacgaattgatatctaggctatttatgtggttactaattttgactcctctaagacatatttacacagggttggtcgttatgggagatatgggcaccttggtttggcagtgaacttgaccacttacaaagattgtttcaacttatatagtattgataaaaaaaacttggaacggaaattaagacaatacccccacaaattgacctgtttgtatactgccaatgatgatagcgacagcttcatgagcgtcaggcacattttatttattttgacctgtttgtatactaacttaacacaagcttttttgtcaataacgtgggattcggaattttctgagctttgtgtagtggaggaggaggagaggcccatgtcggtggagctggaacccatcgccagcgagcagcagcttaactaggtccttggagaggcgtagcagctccagctcctcatcgtcctgctctgtacaaaagatgatattgattttgtggctggtttcatttgttggaatgctcttcaactttcttacgctcatttacattggtgagttctctgtccatgttaattttaagtgagtatgtaactatatgctctcatacgctttagggatccgctacgagcagcctacacatttatcatctgttcccatgcttatttttccttttttttattagtgatgggaatcgtatatccataaatagatctggagactggagcagtttttgttgggataaactttgtactggaccggagcatcttatctctggatcttttctctgcggtaaattgctggcttaaatgcatgctgcttgaaccctataatcagatagaccatcccgaatgcaagtcaaggcctgatagtggtctttctgcaattacagagctggaccctggttatataacaggtttcaggtcctctctcttcagtatggaaagaatgggtcaaatggtgtgtagagtttggcattgaagctaatgcaattatcgctgttccgtatgattggagactgcccccatcaatgcttgaggagagagatctgtactttcacaaattaaagtttgtaacacttgcctcaacttgttatgaagcaaccaaatgctatacatctgttagcaggatcagtaagagttaatggcccagtgacggattcaaggtatcctgctcaccaacagatcccacaagcatacggttaccgccaaatgcctgcaaggttggacagtaccaacccatcacaggccatgggaggttacacgctgcagtcacagaaggaaacattatttgaagagttgccattttgaagagttactcgaatccaatattttgctcttttgaattccttggtgtacactggcaaatattagcatatttgaagagttgccatttcgatcatcatcttcatttgtactttttgggtcagatctaataaagcatcagcattaaatttacaatgatcacctaaatccatggtttttattgcctagagctggtaatgtttctctggttttgcattagttgcttgaaaattgaaagtatctgtatacttctctattgtattttactgcacataatggatttgtttgatgtgtagggattttaaggtatgtaaaatatcttaacttttaaaagatgtgaataagaacataaaatagtaattagtattttgaattttaatgtatcttatcgtaac

SEQ ID NO: 74144 - DNA, 1543 bp, Zea Mays
cccctgtcctccccatgcccgccgctcccacccgagatggttagcgcccctcctccttccggtcccttcccctgcctcggccggccagccatggattcaccaagcgggctctggtggcggccggcgccgtcgtcgtgtcctccattcccgtcaaccccctcgatgtcgccaagcttcaaattaaccagtccattatattatgcaactctgtgaatagaattgagctactggctaagaaaataactgaactcggttattcatgcttcacattcatgctaagagcctaagatgttgcaagacaacagaaactgagtgtttcatgagtttcataatggtgcttgcagaaaccttttgtgcacagatatgtttaccagacgaattgatatctaggctatttatgtggttactaattttgactcctctaagacatatttacacagggttggtcgttatgggagatatgggcaccttggtttggcagtgaacttgaccacttacaaagattgtttcaacttatatagtattgataaaaaaaacttggaacggaaattaagacaatacccccacaaattgacctgtttgtatactgccaatgatgatagcgacagcttcatgagcgtcaggcacattttatttattttgacctgtttgtatactaacttaacacaagcttttttgtcaataacgtgggattcggaattttctgagctttgtgtagtggaggaggaggagaggcccatgtcggtggagctggaacccatcgccagcgagcagcagcttaactaggtccttggagaggcgtagcagctccagctcctcatcgtcctgctctgcttttctctgcggtaaattgctggcttaaatgcatgctgcttgaaccctataatcagatagaccatcccgaatgcaagtcaaggcctgatagtggtctttctgcaattacagagctggaccctggttatataacagcaggatcagtaagagttaatggcccagtgacggattcaaggtatcctgctcaccaacagatcccacaagcatacggttaccgccaaatgcctgcaaggttggacagtaccaacccatcacaggccatgggaggttacacgctgcagtcacagaaggaaacattatttgaagagttgccattttgaagagttactcgaatccaatattttgctcttttgaattccttggtgtacactggcaaatattagcatatttgaagagttgccatttcgatcatcatcttcatttgtactttttgggtcagatctaataaagcatcagcattaaatttacaatgatcacctaaatccatggtttttattgcctagagctggtaatgtttctctggttttgcattagttgcttgaaaattgaaagtatctgtatacttctctattgtattttactgcacataatggatttgtttgatgtgtagggattttaaggtatgtaaaatatcttaacttttaaaagatgtgaataagaacataaaatagtaattagtattttgaattttaatgtatcttatcgtaac

SEQ ID NO: 74145 - DNA, 1685 bp, Zea Mays
cccctgtcctccccatgcccgccgctcccacccgagatggttagcgcccctcctccttccggtcccttcccctgcctcggccggccagccatggattcaccaagcgggctctggtggcggccggcgccgtcgtcgtgtcctccattcccgtcaaccccctcgatgtcgccaagcttcaaattaaccagtccattatattatgcaactctgtgaatagaattgagctactggctaagaaaataactgaactcggttattcatgcttcacattcatgctaagagcctaagatgttgcaagacaacagaaactgagtgtttcatgagtttcataatggtgcttgcagaaaccttttgtgcacagatatgtttaccagacgaattgatatctaggctatttatgtggttactaattttgactcctctaagacatatttacacagggttggtcgttatgggagatatgggcaccttggtttggcagtgaacttgaccacttacaaagattgtttcaacttatatagtattgataaaaaaaacttggaacggaaattaagacaatacccccacaaattgacctgtttgtatactgccaatgatgatagcgacagcttcatgagcgtcaggcacattttatttattttgacctgtttgtatactaacttaacacaagcttttttgtcaataacgtgggattcggaattttctgagctttgtgtagtggaggaggaggagaggcccatgtcggtggagctggaacccatcgccagcgagcagcagcttaactaggtccttggagaggcgtagcagctccagctcctcatcgtcctgctctgcttttctctgcggtaaattgctggcttaaatgcatgctgcttgaaccctataatcagatagaccatcccgaatgcaagtcaaggcctgatagtggtctttctgcaattacagagctggaccctggttatataacaggtcctctctcttcagtatggaaagaatgggtcaaatggtgtgtagagtttggcattgaagctaatgcaattatcgctgttccgtatgattggagactgcccccatcaatgcttgaggagagagatctgtactttcacaaattaaagatcagtaagagttaatggcccagtgacggattcaaggtatcctgctcaccaacagatcccacaagcatacggttaccgccaaatgcctgcaaggttggacagtaccaacccatcacaggccatgggaggttacacgctgcagtcacagaaggaaacattatttgaagagttgccattttgaagagttactcgaatccaatattttgctcttttgaattccttggtgtacactggcaaatattagcatatttgaagagttgccatttcgatcatcatcttcatttgtactttttgggtcagatctaataaagcatcagcattaaatttacaatgatcacctaaatccatggtttttattgcctagagctggtaatgtttctctggttttgcattagttgcttgaaaattgaaagtatctgtatacttctctattgtattttactgcacataatggatttgtttgatgtgtagggattttaaggtatgtaaaatatcttaacttttaaaagatgtgaataagaacataaaatagtaattagtattttgaattttaatgtatcttatcgtaac

SEQ ID NO: 74146 - DNA, 1635 bp, Zea Mays
cagtggggcagcatctctaatcatttaagaattgagctactggctaagaaaataactgaactcggttattcatgcttcacattcatgctaagagcctaagatgttgcaagacaacagaaactgagtgtttcatgagtttcataatggtgcttgcagaaaccttttgtgcacagatatgtttaccagacgaattgatatctaggctatttatgtggttactaattttgactcctctaagacatatttacacagggttggtcgttatgggagatatgggcaccttggtttggcagtgaacttgaccacttacaaagattgtttcaacttatatagtattgataaaaaaaacttggaacggaaattaagacaatacccccacaaattgacctgtttgtatactgccaatgatgatagcgacagcttcatgagcgtcaggcacattttatttattttgacctgtttgtatactaacttaacacaagcttttttgtcaataacgtgggattcggaattttctgagctttgtgtagtggaggaggaggagaggcccatgtcggtggagctggaacccatcgccagcgagcagcagcttaactaggtccttggagaggcgtagcagctccagctcctcatcgtcctgctctgtacaaaagatgatattgattttgtggctggtttcatttgttggaatgctcttcaactttcttacgctcatttacattgcttttctctgcggtaaattgctggcttaaatgcatgctgcttgaaccctataatcagatagaccatcccgaatgcaagtcaaggcctgatagtggtctttctgcaattacagagctggaccctggttatataacaggtcctctctcttcagtatggaaagaatgggtcaaatggtgtgtagagtttggcattgaagctaatgcaattatcgctgttccgtatgattggagactgcccccatcaatgcttgaggagagagatctgtactttcacaaattaaagtttgtaacacttgcctcaacttgttatgaagcaaccaaatgctatacatctgttagcaggatcagtaagagttaatggcccagtgacggattcaaggtatcctgctcaccaacagatcccacaagcatacggttaccgccaaatgcctgcaaggttggacagtaccaacccatcacaggccatgggaggttacacgctgcagtcacagaaggaaacattatttgaagagttgccattttgaagagttactcgaatccaatattttgctcttttgaattccttggtgtacactggcaaatattagcatatttgaagagttgccatttcgatcatcatcttcatttgtactttttgggtcagatctaataaagcatcagcattaaatttacaatgatcacctaaatccatggtttttattgcctagagctggtaatgtttctctggttttgcattagttgcttgaaaattgaaagtatctgtatacttctctattgtattttactgcacataatggatttgtttgatgtgtagggattttaaggtatgtaaaatatcttaacttttaaaagatgtgaataagaacataaaatagtaattagtattttgaattttaatgtatcttatcgtaac

SEQ ID NO: 74147 - DNA, 2920 bp, Zea Mays
ccccactttcctagatcggtttgtgcctgtagggtgttcttgttaaagtttgcttgtaatgtctgtgagattgcaatcatggtcgtgtatgattgcggtgttcacagattttgtttgcttgttcctagatagtcatttatgtggtgcaaatttagcatcttggatgaagtgaaaatggacaattttgttcatttgttattaggttctggcacttggacttggtatttagtaactgagaatttacttatttagtagttatacagcccgtgtcattgtcgttgggcgaatgaatttcatcgtcagtctattgcatgaatgataaatgcatgtcggtggccttttgccgaatctaccattttgtttgttcctcatctccattcctatctgcttgtttattggtagtagaagtagaactgctatttatggctgaggcctgagggaaaaaataatcaaatgttcaaccaacttcatttttttcttgagtgcatgggttgcagcctttggctagcttatgatctcgtgtggtctatttaccatataaataaatagcagcattagttcaatttgatgttcatagttctctctctctaaagagtcatatgttagattcatgggaaatacttgaactatacatttttttaatgtatcagatgtgtgaattatcatgtccggatcaatttcaaccaaccaacagttcctttagcaaatttgtcaggcatatttatgcacttgttcgcataactgagactatattatttttataagactaaggtcagactattgatggtttggtttgggtggcaccttgttcttcgttccttgccatttccatgccatccttttattatatacatacatttatttggagataaaatttgatgtcaagagaaacttgtctttctttcactctccaactcatcttcgtagtttgattctcatgggaggaccctgtttccatcatgctgcatctttttatctgataaagtgatatttcttagagcatcaaggttcgacaaccaacatattctcgtgtgaggaaatggaaaagtgatgtcttgaggacattttttatcttttgatgttgataattgttcatattattatggttcaacaactcctagcaccaagtcattctgtatgatctgttaacttgatagaagttaacatcatttgattttaagaaatgtaatcatatttcctgattgctcagaattgacttgttcatcatttttcaatgtccctaattggtattagatttttgtgatcttgtgtcatattctgtgatcaacaatgtacaatttgttgaataggctgttgttgaaaaagctgtatattatgctcttgtatggatcaataggctgttggctgtcggtcatgacatcgccatcaagacagataggaaagttatattttttcctaactatatatgctcttacctattcctgttctccatagtacaaaagatgatattgattttgtggctggtttcatttgttggaatgctcttcaactttcttacgctcatttacattggtgagttctctgtccatgttaattttaagtgagtatgtaactatatgctctcatacgctttagggatccgctacgagcagcctacacatttatcatctgttcccatgcttatttttccttttttttattagtgatgggaatcgtatatccataaatagatctggagactggagcagtttttgttgggataaactttgtactggaccggagcatcttatctctggatgtgagtgccatgaaagtgatacccaacaaacaactaactctggaacacctttggtatgtcgggtaggcgcaaagccagcaagacaacaactgcttgagcagctttggccagttttgcttgccaccatgaatagccatatgttggccatcacatggtaccttgttcgtcccaaactagaccagagcattacaagcaatgactgccatatctaaaattgaaaacatgtgcggcttataagtatcctaaatttgctccacttctaagtatccaagatctactggttttgatgcgttccattgcttgcagcttttctctgcggtaaattgctggcttaaatgcatgctgcttgaaccctataatcagatagaccatcccgaatgcaagtcaaggcctgatagtggtctttctgcaattacagagctggaccctggttatataacaggtcctctctcttcagtatggaaagaatgggtcaaatggtgtgtagagtttggcattgaagctaatgcaattatcgctgttccgtatgattggagactgcccccatcaatgcttgaggagagagatctgtactttcacaaattaaacaggatcagtaagagttaatggcccagtgacggattcaaggtatcctgctcaccaacagatcccacaagcatacggttaccgccaaatgcctgcaaggttggacagtaccaacccatcacaggccatgggaggttacacgctgcagtcacagaaggaaacattatttgaagagttgccattttgaagagttactcgaatccaatattttgctcttttgaattccttggtgtacactggcaaatattagcatatttgaagagttgccatttcgatcatcatcttcatttgtactttttgggtcagatctaataaagcatcagcattaaatttacaatgatcacctaaatccatggtttttattgcctagagctggtaatgtttctctggttttgcattagttgcttgaaaattgaaagtatctgtatacttctctattgtattttactgcacataatggatttgtttgatgtgtagggattttaaggtatgtaaaatatcttaacttttaaaagatgtgaataagaacataaaatagtaattagtattttgaattttaatgtatcttatcgtaac

SEQ ID NO: 74148 - DNA, 3559 bp, Zea Mays
ccccactttcctagatcggtttgtgcctgtagggtgttcttgttaaagtttgcttgtaatgtctgtgagattgcaatcatggtcgtgtatgattgcggtgttcacagattttgtttgcttgttcctagatagtcatttatgtggtgcaaatttagcatcttggatgaagtgaaaatggacaattttgttcatttgttattaggttctggcacttggacttggtatttagtaactgagaatttacttatttagtagttatacagcccgtgtcattgtcgttgggcgaatgaatttcatcgtcagtctattgcatgaatgataaatgcatgtcggtggccttttgccgaatctaccattttgtttgttcctcatctccattcctatctgcttgtttattggtagtagaagtagaactgctatttatggctgaggcctgagggaaaaaataatcaaatgttcaaccaacttcatttttttcttgagtgcatgggttgcagcctttggctagcttatgatctcgtgtggtctatttaccatataaataaatagcagcattagttcaatttgatgttcatagttctctctctctaaagagtcatatgttagattcatgggaaatacttgaactatacatttttttaatgtatcagatgtgtgaattatcatgtccggatcaatttcaaccaaccaacagttcctttagcaaatttgtcaggcatatttatgcacttgttcgcataactgagactatattatttttataagactaaggtcagactattgatggtttggtttgggtggcaccttgttcttcgttccttgccatttccatgccatccttttattatatacatacatttatttggagataaaatttgatgtcaagagaaacttgtctttctttcactctccaactcatcttcgtagtttgattctcatgggaggaccctgtttccatcatgctgcatctttttatctgataaagtgatatttcttagagcatcaaggttcgacaaccaacatattctcgtgtgaggaaatggaaaagtgatgtcttgaggacattttttatcttttgatgttgataattgttcatattattatggttcaacaactcctagcaccaagtcattctgtatgatctgttaacttgatagaagttaacatcatttgattttaagaaatgtaatcatatttcctgattgctcagaattgacttgttcatcatttttcaatgtccctaattggtattagatttttgtgatcttgtgtcatattctgtgatcaacaatgtacaatttgttgaataggctgttgttgaaaaagctgtatattatgctcttgtatggatcaataggctgttggctgtcggtcatgacatcgccatcaagacagataggaaagttatattttttcctaactatatatgctcttacctattcctgttctccatagtacaaaagatgatattgattttgtggctggtttcatttgttggaatgctcttcaactttcttacgctcatttacattggtgagttctctgtccatgttaattttaagtgagtatgtaactatatgctctcatacgctttagggatccgctacgagcagcctacacatttatcatctgttcccatgcttatttttccttttttttattagtgatgggaatcgtatatccataaatagatctggagactggagcagtttttgttgggataaactttgtactggaccggagcatcttatctctggatgtgagtgccatgaaagtgatacccaacaaacaactaactctggaacacctttggtatgtcgggtaggcgcaaagccagcaagacaacaactgcttgagcagctttggccagttttgcttgccaccatgaatagccatatgttggccatcacatggtaccttgttcgtcccaaactagaccagagcattacaagcaatgactgccatatctaaaattgaaaacatgtgcggcttataagtatcctaaatttgctccacttctaagtatccaagatctactggttttgatgcgttccattgcttgcagcttttctctgcggtaaattgctggcttaaatgcatgctgcttgaaccctataatcagatagaccatcccgaatgcaagtcaaggcctgatagtggtctttctgcaattacagagctggaccctggttatataacaggtaaaacgtatggcttactttctttttcttagcactgacttcacaaagttgtagccatgagttgtaatatctagagactctaatatctattacatgataattttagattatatcatactccatgttgagtgaaaagttcattttggaaaacatttttgcaagttctgagctgaagtggctgaaacatggctgaaacagaaaatgtttttttacacgagatcatcaaactaatgaccataggtgctacaacaaagtattgattaggagagaatcatgttctttattcatgtctaagctgaacaatgtggaataatttgtgcaggtacagttatctgtatctcactcacactactgcttctttcaaagtaatctacgttcatctgtttccaaatggcaactccccatatttgctttgatattagcattgtgttctacgcttcagaatagtcctgttagacagggtgcattcagtactcatgtttgttagtgcattctgaagctacccatttcatttattcatgaagagagaaagggaagggaaaacaccttgcactgatattattttattgggcaaggtttcaggtcctctctcttcagtatggaaagaatgggtcaaatggtgtgtagagtttggcattgaagctaatgcaattatcgctgttccgtatgattggagactgcccccatcaatgcttgaggagagagatctgtactttcacaaattaaagtttgtaacacttgcctcaacttgttatgaagcaaccaaatgctatacatctgttagcaggatcagtaagagttaatggcccagtgacggattcaaggtatcctgctcaccaacagatcccacaagcatacggttaccgccaaatgcctgcaaggttggacagtaccaacccatcacaggccatgggaggttacacgctgcagtcacagaaggaaacattatttgaagagttgccattttgaagagttactcgaatccaatattttgctcttttgaattccttggtgtacactggcaaatattagcatatttgaagagttgccatttcgatcatcatcttcatttgtactttttgggtcagatctaataaagcatcagcattaaatttacaatgatcacctaaatccatggtttttattgcctagagctggtaatgtttctctggttttgcattagttgcttgaaaattgaaagtatctgtatacttctctattgtattttactgcacataatggatttgtttgatgtgtagggattttaaggtatgtaaaatatcttaacttttaaaagatgtgaataagaacataaaatagtaattagtattttgaattttaatgtatcttatcgtaac

SEQ ID NO: 74149 - DNA, 2924 bp, Zea Mays
ccccactttcctagatcggtttgtgcctgtagggtgttcttgttaaagtttgcttgtaatgtctgtgagattgcaatcatggtcgtgtatgattgcggtgttcacagattttgtttgcttgttcctagatagtcatttatgtggtgcaaatttagcatcttggatgaagtgaaaatggacaattttgttcatttgttattaggttctggcacttggacttggtatttagtaactgagaatttacttatttagtagttatacagcccgtgtcattgtcgttgggcgaatgaatttcatcgtcagtctattgcatgaatgataaatgcatgtcggtggccttttgccgaatctaccattttgtttgttcctcatctccattcctatctgcttgtttattggtagtagaagtagaactgctatttatggctgaggcctgagggaaaaaataatcaaatgttcaaccaacttcatttttttcttgagtgcatgggttgcagcctttggctagcttatgatctcgtgtggtctatttaccatataaataaatagcagcattagttcaatttgatgttcatagttctctctctctaaagagtcatatgttagattcatgggaaatacttgaactatacatttttttaatgtatcagatgtgtgaattatcatgtccggatcaatttcaaccaaccaacagttcctttagcaaatttgtcaggcatatttatgcacttgttcgcataactgagactatattatttttataagactaaggtcagactattgatggtttggtttgggtggcaccttgttcttcgttccttgccatttccatgccatccttttattatatacatacatttatttggagataaaatttgatgtcaagagaaacttgtctttctttcactctccaactcatcttcgtagtttgattctcatgggaggaccctgtttccatcatgctgcatctttttatctgataaagtgatatttcttagagcatcaaggttcgacaaccaacatattctcgtgtgaggaaatggaaaagtgatgtcttgaggacattttttatcttttgatgttgataattgttcatattattatggttcaacaactcctagcaccaagtcattctgtatgatctgttaacttgatagaagttaacatcatttgattttaagaaatgtaatcatatttcctgattgctcagaattgacttgttcatcatttttcaatgtccctaattggtattagatttttgtgatcttgtgtcatattctgtgatcaacaatgtacaatttgttgaataggctgttgttgaaaaagctgtatattatgctcttgtatggatcaataggctgttggctgtcggtcatgacatcgccatcaagacagataggaaagttatattttttcctaactatatatgctcttacctattcctgttctccatagtacaaaagatgatattgattttgtggctggtttcatttgttggaatgctcttcaactttcttacgctcatttacattggtgagttctctgtccatgttaattttaagtgagtatgtaactatatgctctcatacgctttagggatccgctacgagcagcctacacatttatcatctgttcccatgcttatttttccttttttttattagtgatgggaatcgtatatccataaatagatctggagactggagcagtttttgttgggataaactttgtactggaccggagcatcttatctctggatgtgagtgccatgaaagtgatacccaacaaacaactaactctggaacacctttggtatgtcgggtaggcgcaaagccagcaagacaacaactgcttgagcagctttggccagttttgcttgccaccatgaatagccatatgttggccatcacatggtaccttgttcgtcccaaactagaccagagcattacaagcaatgactgccatatctaaaattgaaaacatgtgcggcttataagtatcctaaatttgctccacttctaagtatccaagatctactggttttgatgcgttccattgcttgcagcttttctctgcggtaaattgctggcttaaatgcatgctgcttgaaccctataatcagatagaccatcccgaatgcaagtcaaggcctgatagtggtctttctgcaattacagagctggaccctggttatataacaggtttcaggtcctctctcttcagtatggaaagaatgggtcaaatggtgtgtagagtttggcattgaagctaatgcaattatcgctgttccgtatgattggagactgcccccatcaatgcttgaggagagagatctgtactttcacaaattaaagatcagtaagagttaatggcccagtgacggattcaaggtatcctgctcaccaacagatcccacaagcatacggttaccgccaaatgcctgcaaggttggacagtaccaacccatcacaggccatgggaggttacacgctgcagtcacagaaggaaacattatttgaagagttgccattttgaagagttactcgaatccaatattttgctcttttgaattccttggtgtacactggcaaatattagcatatttgaagagttgccatttcgatcatcatcttcatttgtactttttgggtcagatctaataaagcatcagcattaaatttacaatgatcacctaaatccatggtttttattgcctagagctggtaatgtttctctggttttgcattagttgcttgaaaattgaaagtatctgtatacttctctattgtattttactgcacataatggatttgtttgatgtgtagggattttaaggtatgtaaaatatcttaacttttaaaagatgtgaataagaacataaaatagtaattagtattttgaattttaatgtatcttatcgtaac

SEQ ID NO: 74150 - DNA, 2974 bp, Zea Mays
ccccactttcctagatcggtttgtgcctgtagggtgttcttgttaaagtttgcttgtaatgtctgtgagattgcaatcatggtcgtgtatgattgcggtgttcacagattttgtttgcttgttcctagatagtcatttatgtggtgcaaatttagcatcttggatgaagtgaaaatggacaattttgttcatttgttattaggttctggcacttggacttggtatttagtaactgagaatttacttatttagtagttatacagcccgtgtcattgtcgttgggcgaatgaatttcatcgtcagtctattgcatgaatgataaatgcatgtcggtggccttttgccgaatctaccattttgtttgttcctcatctccattcctatctgcttgtttattggtagtagaagtagaactgctatttatggctgaggcctgagggaaaaaataatcaaatgttcaaccaacttcatttttttcttgagtgcatgggttgcagcctttggctagcttatgatctcgtgtggtctatttaccatataaataaatagcagcattagttcaatttgatgttcatagttctctctctctaaagagtcatatgttagattcatgggaaatacttgaactatacatttttttaatgtatcagatgtgtgaattatcatgtccggatcaatttcaaccaaccaacagttcctttagcaaatttgtcaggcatatttatgcacttgttcgcataactgagactatattatttttataagactaaggtcagactattgatggtttggtttgggtggcaccttgttcttcgttccttgccatttccatgccatccttttattatatacatacatttatttggagataaaatttgatgtcaagagaaacttgtctttctttcactctccaactcatcttcgtagtttgattctcatgggaggaccctgtttccatcatgctgcatctttttatctgataaagtgatatttcttagagcatcaaggttcgacaaccaacatattctcgtgtgaggaaatggaaaagtgatgtcttgaggacattttttatcttttgatgttgataattgttcatattattatggttcaacaactcctagcaccaagtcattctgtatgatctgttaacttgatagaagttaacatcatttgattttaagaaatgtaatcatatttcctgattgctcagaattgacttgttcatcatttttcaatgtccctaattggtattagatttttgtgatcttgtgtcatattctgtgatcaacaatgtacaatttgttgaataggctgttgttgaaaaagctgtatattatgctcttgtatggatcaataggctgttggctgtcggtcatgacatcgccatcaagacagataggaaagttatattttttcctaactatatatgctcttacctattcctgttctccatagtacaaaagatgatattgattttgtggctggtttcatttgttggaatgctcttcaactttcttacgctcatttacattggtgagttctctgtccatgttaattttaagtgagtatgtaactatatgctctcatacgctttagggatccgctacgagcagcctacacatttatcatctgttcccatgcttatttttccttttttttattagtgatgggaatcgtatatccataaatagatctggagactggagcagtttttgttgggataaactttgtactggaccggagcatcttatctctggatgtgagtgccatgaaagtgatacccaacaaacaactaactctggaacacctttggtatgtcgggtaggcgcaaagccagcaagacaacaactgcttgagcagctttggccagttttgcttgccaccatgaatagccatatgttggccatcacatggtaccttgttcgtcccaaactagaccagagcattacaagcaatgactgccatatctaaaattgaaaacatgtgcggcttataagtatcctaaatttgctccacttctaagtatccaagatctactggttttgatgcgttccattgcttgcagcttttctctgcggtaaattgctggcttaaatgcatgctgcttgaaccctataatcagatagaccatcccgaatgcaagtcaaggcctgatagtggtctttctgcaattacagagctggaccctggttatataacaggtcctctctcttcagtatggaaagaatgggtcaaatggtgtgtagagtttggcattgaagctaatgcaattatcgctgttccgtatgattggagactgcccccatcaatgcttgaggagagagatctgtactttcacaaattaaagtttgtaacacttgcctcaacttgttatgaagcaaccaaatgctatacatctgttaggatcagtaagagttaatggcccagtgacggattcaaggtatcctgctcaccaacagatcccacaagcatacggttaccgccaaatgcctgcaaggttggacagtaccaacccatcacaggccatgggaggttacacgctgcagtcacagaaggaaacattatttgaagagttgccattttgaagagttactcgaatccaatattttgctcttttgaattccttggtgtacactggcaaatattagcatatttgaagagttgccatttcgatcatcatcttcatttgtactttttgggtcagatctaataaagcatcagcattaaatttacaatgatcacctaaatccatggtttttattgcctagagctggtaatgtttctctggttttgcattagttgcttgaaaattgaaagtatctgtatacttctctattgtattttactgcacataatggatttgtttgatgtgtagggattttaaggtatgtaaaatatcttaacttttaaaagatgtgaataagaacataaaatagtaattagtattttgaattttaatgtatcttatcgtaac

SEQ ID NO: 74151 - DNA, 2845 bp, Zea Mays
ccccactttcctagatcggtttgtgcctgtagggtgttcttgttaaagtttgcttgtaatgtctgtgagattgcaatcatggtcgtgtatgattgcggtgttcacagattttgtttgcttgttcctagatagtcatttatgtggtgcaaatttagcatcttggatgaagtgaaaatggacaattttgttcatttgttattaggttctggcacttggacttggtatttagtaactgagaatttacttatttagtagttatacagcccgtgtcattgtcgttgggcgaatgaatttcatcgtcagtctattgcatgaatgataaatgcatgtcggtggccttttgccgaatctaccattttgtttgttcctcatctccattcctatctgcttgtttattggtagtagaagtagaactgctatttatggctgaggcctgagggaaaaaataatcaaatgttcaaccaacttcatttttttcttgagtgcatgggttgcagcctttggctagcttatgatctcgtgtggtctatttaccatataaataaatagcagcattagttcaatttgatgttcatagttctctctctctaaagagtcatatgttagattcatgggaaatacttgaactatacatttttttaatgtatcagatgtgtgaattatcatgtccggatcaatttcaaccaaccaacagttcctttagcaaatttgtcaggcatatttatgcacttgttcgcataactgagactatattatttttataagactaaggtcagactattgatggtttggtttgggtggcaccttgttcttcgttccttgccatttccatgccatccttttattatatacatacatttatttggagataaaatttgatgtcaagagaaacttgtctttctttcactctccaactcatcttcgtagtttgattctcatgggaggaccctgtttccatcatgctgcatctttttatctgataaagtgatatttcttagagcatcaaggttcgacaaccaacatattctcgtgtgaggaaatggaaaagtgatgtcttgaggacattttttatcttttgatgttgataattgttcatattattatggttcaacaactcctagcaccaagtcattctgtatgatctgttaacttgatagaagttaacatcatttgattttaagaaatgtaatcatatttcctgattgctcagaattgacttgttcatcatttttcaatgtccctaattggtattagatttttgtgatcttgtgtcatattctgtgatcaacaatgtacaatttgttgaataggctgttgttgaaaaagctgtatattatgctcttgtatggatcaataggctgttggctgtcggtcatgacatcgccatcaagacagataggaaagttatattttttcctaactatatatgctcttacctattcctgttctccatagtacaaaagatgatattgattttgtggctggtttcatttgttggaatgctcttcaactttcttacgctcatttacattggtgagttctctgtccatgttaattttaagtgagtatgtaactatatgctctcatacgctttagggatccgctacgagcagcctacacatttatcatctgttcccatgcttatttttccttttttttattagtgatgggaatcgtatatccataaatagatctggagactggagcagtttttgttgggataaactttgtactggaccggagcatcttatctctggatgtgagtgccatgaaagtgatacccaacaaacaactaactctggaacacctttggtatgtcgggtaggcgcaaagccagcaagacaacaactgcttgagcagctttggccagttttgcttgccaccatgaatagccatatgttggccatcacatggtaccttgttcgtcccaaactagaccagagcattacaagcaatgactgccatatctaaaattgaaaacatcttttctctgcggtaaattgctggcttaaatgcatgctgcttgaaccctataatcagatagaccatcccgaatgcaagtcaaggcctgatagtggtctttctgcaattacagagctggaccctggttatataacaggtttcaggtcctctctcttcagtatggaaagaatgggtcaaatggtgtgtagagtttggcattgaagctaatgcaattatcgctgttccgtatgattggagactgcccccatcaatgcttgaggagagagatctgtactttcacaaattaaacaggatcagtaagagttaatggcccagtgacggattcaaggtatcctgctcaccaacagatcccacaagcatacggttaccgccaaatgcctgcaaggttggacagtaccaacccatcacaggccatgggaggttacacgctgcagtcacagaaggaaacattatttgaagagttgccattttgaagagttactcgaatccaatattttgctcttttgaattccttggtgtacactggcaaatattagcatatttgaagagttgccatttcgatcatcatcttcatttgtactttttgggtcagatctaataaagcatcagcattaaatttacaatgatcacctaaatccatggtttttattgcctagagctggtaatgtttctctggttttgcattagttgcttgaaaattgaaagtatctgtatacttctctattgtattttactgcacataatggatttgtttgatgtgtagggattttaaggtatgtaaaatatcttaacttttaaaagatgtgaataagaacataaaatagtaattagtattttgaattttaatgtatcttatcgtaac

SEQ ID NO: 74152 - DNA, 2984 bp, Zea Mays
ccccactttcctagatcggtttgtgcctgtagggtgttcttgttaaagtttgcttgtaatgtctgtgagattgcaatcatggtcgtgtatgattgcggtgttcacagattttgtttgcttgttcctagatagtcatttatgtggtgcaaatttagcatcttggatgaagtgaaaatggacaattttgttcatttgttattaggttctggcacttggacttggtatttagtaactgagaatttacttatttagtagttatacagcccgtgtcattgtcgttgggcgaatgaatttcatcgtcagtctattgcatgaatgataaatgcatgtcggtggccttttgccgaatctaccattttgtttgttcctcatctccattcctatctgcttgtttattggtagtagaagtagaactgctatttatggctgaggcctgagggaaaaaataatcaaatgttcaaccaacttcatttttttcttgagtgcatgggttgcagcctttggctagcttatgatctcgtgtggtctatttaccatataaataaatagcagcattagttcaatttgatgttcatagttctctctctctaaagagtcatatgttagattcatgggaaatacttgaactatacatttttttaatgtatcagatgtgtgaattatcatgtccggatcaatttcaaccaaccaacagttcctttagcaaatttgtcaggcatatttatgcacttgttcgcataactgagactatattatttttataagactaaggtcagactattgatggtttggtttgggtggcaccttgttcttcgttccttgccatttccatgccatccttttattatatacatacatttatttggagataaaatttgatgtcaagagaaacttgtctttctttcactctccaactcatcttcgtagtttgattctcatgggaggaccctgtttccatcatgctgcatctttttatctgataaagtgatatttcttagagcatcaaggttcgacaaccaacatattctcgtgtgaggaaatggaaaagtgatgtcttgaggacattttttatcttttgatgttgataattgttcatattattatggttcaacaactcctagcaccaagtcattctgtatgatctgttaacttgatagaagttaacatcatttgattttaagaaatgtaatcatatttcctgattgctcagaattgacttgttcatcatttttcaatgtccctaattggtattagatttttgtgatcttgtgtcatattctgtgatcaacaatgtacaatttgttgaataggctgttgttgaaaaagctgtatattatgctcttgtatggatcaataggctgttggctgtcggtcatgacatcgccatcaagacagataggaaagttatattttttcctaactatatatgctcttacctattcctgttctccatagtacaaaagatgatattgattttgtggctggtttcatttgttggaatgctcttcaactttcttacgctcatttacattggtgagttctctgtccatgttaattttaagtgagtatgtaactatatgctctcatacgctttagggatccgctacgagcagcctacacatttatcatctgttcccatgcttatttttccttttttttattagtgatgggaatcgtatatccataaatagatctggagactggagcagtttttgttgggataaactttgtactggaccggagcatcttatctctggatgtgagtgccatgaaagtgatacccaacaaacaactaactctggaacacctttggtatgtcgggtaggcgcaaagccagcaagacaacaactgcttgagcagctttggccagttttgcttgccaccatgaatagccatatgttggccatcacatggtaccttgttcgtcccaaactagaccagagcattacaagcaatgactgccatatctaaaattgaaaacatgtgcggcttataagtatcctaaatttgctccacttctaagtatccaagatctactggttttgatgcgttccattgcttgcagcttttctctgcggtaaattgctggcttaaatgcatgctgcttgaaccctataatcagatagaccatcccgaatgcaagtcaaggcctgatagtggtctttctgcaattacagagctggaccctggttatataacaggtttcaggtcctctctcttcagtatggaaagaatgggtcaaatggtgtgtagagtttggcattgaagctaatgcaattatcgctgttccgtatgattggagactgcccccatcaatgcttgaggagagagatctgtactttcacaaattaaagtttgtaacacttgcctcaacttgttatgaagcaaccaaatgctatacatctgttagcaggatcagtaagagttaatggcccagtgacggattcaaggtatcctgctcaccaacagatcccacaagcatacggttaccgccaaatgcctgcaaggttggacagtaccaacccatcacaggccatgggaggttacacgctgcagtcacagaaggaaacattatttgaagagttgccattttgaagagttactcgaatccaatattttgctcttttgaattccttggtgtacactggcaaatattagcatatttgaagagttgccatttcgatcatcatcttcatttgtactttttgggtcagatctaataaagcatcagcattaaatttacaatgatcacctaaatccatggtttttattgcctagagctggtaatgtttctctggttttgcattagttgcttgaaaattgaaagtatctgtatacttctctattgtattttactgcacataatggatttgtttgatgtgtagggattttaaggtatgtaaaatatcttaacttttaaaagatgtgaataagaacataaaatagtaattagtattttgaattttaatgtatcttatcgtaac

SEQ ID NO: 74153 - DNA, 2844 bp, Zea Mays
ccactttcctagatcggtttgtgcctgtagggtgttcttgttaaagtttgcttgtaatgtctgtgagattgcaatcatggtcgtgtatgattgcggtgttcacagattttgtttgcttgttcctagatagtcatttatgtggtgcaaatttagcatcttggatgaagtgaaaatggacaattttgttcatttgttattaggttctggcacttggacttggtatttagtaactgagaatttacttatttagtagttatacagcccgtgtcattgtcgttgggcgaatgaatttcatcgtcagtctattgcatgaatgataaatgcatgtcggtggccttttgccgaatctaccattttgtttgttcctcatctccattcctatctgcttgtttattggtagtagaagtagaactgctatttatggctgaggcctgagggaaaaaataatcaaatgttcaaccaacttcatttttttcttgagtgcatgggttgcagcctttggctagcttatgatctcgtgtggtctatttaccatataaataaatagcagcattagttcaatttgatgttcatagttctctctctctaaagagtcatatgttagattcatgggaaatacttgaactatacatttttttaatgtatcagatgtgtgaattatcatgtccggatcaatttcaaccaaccaacagttcctttagcaaatttgtcaggcatatttatgcacttgttcgcataactgagactatattatttttataagactaaggtcagactattgatggtttggtttgggtggcaccttgttcttcgttccttgccatttccatgccatccttttattatatacatacatttatttggagataaaatttgatgtcaagagaaacttgtctttctttcactctccaactcatcttcgtagtttgattctcatgggaggaccctgtttccatcatgctgcatctttttatctgataaagtgatatttcttagagcatcaaggttcgacaaccaacatattctcgtgtgaggaaatggaaaagtgatgtcttgaggacattttttatcttttgatgttgataattgttcatattattatggttcaacaactcctagcaccaagtcattctgtatgatctgttaacttgatagaagttaacatcatttgattttaagaaatgtaatcatatttcctgattgctcagaattgacttgttcatcatttttcaatgtccctaattggtattagatttttgtgatcttgtgtcatattctgtgatcaacaatgtacaatttgttgaataggctgttgttgaaaaagctgtatattatgctcttgtatggatcaataggctgttggctgtcggtcatgacatcgccatcaagacagataggaaagttatattttttcctaactatatatgctcttacctattcctgttctccatagtacaaaagatgatattgattttgtggctggtttcatttgttggaatgctcttcaactttcttacgctcatttacattgtgatgggaatcgtatatccataaatagatctggagactggagcagtttttgttgggataaactttgtactggaccggagcatcttatctctggatgtgagtgccatgaaagtgatacccaacaaacaactaactctggaacacctttggtatgtcgggtaggcgcaaagccagcaagacaacaactgcttgagcagctttggccagttttgcttgccaccatgaatagccatatgttggccatcacatggtaccttgttcgtcccaaactagaccagagcattacaagcaatgactgccatatctaaaattgaaaacatgtgcggcttataagtatcctaaatttgctccacttctaagtatccaagatctactggttttgatgcgttccattgcttgcagcttttctctgcggtaaattgctggcttaaatgcatgctgcttgaaccctataatcagatagaccatcccgaatgcaagtcaaggcctgatagtggtctttctgcaattacagagctggaccctggttatataacaggtcctctctcttcagtatggaaagaatgggtcaaatggtgtgtagagtttggcattgaagctaatgcaattatcgctgttccgtatgattggagactgcccccatcaatgcttgaggagagagatctgtactttcacaaattaaagtttgtaacacttgcctcaacttgttatgaagcaaccaaatgctatacatctgttagcaggatcagtaagagttaatggcccagtgacggattcaaggtatcctgctcaccaacagatcccacaagcatacggttaccgccaaatgcctgcaaggttggacagtaccaacccatcacaggccatgggaggttacacgctgcagtcacagaaggaaacattatttgaagagttgccattttgaagagttactcgaatccaatattttgctcttttgaattccttggtgtacactggcaaatattagcatatttgaagagttgccatttcgatcatcatcttcatttgtactttttgggtcagatctaataaagcatcagcattaaatttacaatgatcacctaaatccatggtttttattgcctagagctggtaatgtttctctggttttgcattagttgcttgaaaattgaaagtatctgtatacttctctattgtattttactgcacataatggatttgtttgatgtgtagggattttaaggtatgtaaaatatcttaacttttaaaagatgtgaataagaacataaaatagtaattagtattttgaattttaatgtatcttatcgtaac

SEQ ID NO: 74154 - DNA, 1900 bp, Zea Mays
ttgccgaatctaccattttgtttgttcctcatctccattcctatctgcttgtttattggtagtagaagtagaactgctatttatggctgaggcctgagggaaaaaataatcaaatgttcaaccaacttcatttttttcttgagtgcatgggttgcagcctttggctagcttatgatctcgtgtggtctatttaccatataaataaatagcagcattagttcaatttgatgttcatagttctctctctctaaagagtcatatgttagattcatgggaaatacttgaactatacatttttttaatgtatcagatgtgtgaattatcatgtccggatcaatttcaaccaaccaacagttcctttagcaaatttgtcaggcatatttatgcacttgttcgcataactgagactatattatttttataagactaaggtcagactattgatggtttggtttgggtggcaccttgttcttcgttccttgccatttccatgccatccttttattatatacatacatttatttggagataaaatttgatgtcaagagaaacttgtctttctttcactctccaactcatcttcgtagtttgattctcatgggaggaccctgtttccatcatgctgcatctttttatctgataaagtgatatttcttagagcatcaaggttcgacaaccaacatattctcgtgtgaggaaatggaaaagtgatgtcttgaggacattttttatcttttgatgttgataattgttcatattattatggttcaacaactcctagcaccaagtcattctgtatgatctgttaacttgatagaagttaacatcatttgattttaagaaatgtaatcatatttcctgattgctcagaattgacttgttcatcatttttcaatgtccctaattggtattagatttttgtgatcttgtgtcatattctgtgatcaacaatgtacaatttgttgaataggctgttgttgaaaaagctgtatattatgctcttgtatggatcaataggctgttggctgtcggtcatgacatcgccatcaagacagataggaaagttatattttttcctaactatatatgctcttacctattcctgttctccatagtacaaaagatgatattgattttgtggctggtttcatttgttggaatgctcttcaactttcttacgctcatttacattgcttttctctgcggtaaattgctggcttaaatgcatgctgcttgaaccctataatcagatagaccatcccgaatgcaagtcaaggcctgatagtggtctttctgcaattacagagctggaccctggttatataacaggatcagtaagagttaatggcccagtgacggattcaaggtatcctgctcaccaacagatcccacaagcatacggttaccgccaaatgcctgcaaggttggacagtaccaacccatcacaggccatgggaggttacacgctgcagtcacagaaggaaacattatttgaagagttgccattttgaagagttactcgaatccaatattttgctcttttgaattccttggtgtacactggcaaatattagcatatttgaagagttgccatttcgatcatcatcttcatttgtactttttgggtcagatctaataaagcatcagcattaaatttacaatgatcacctaaatccatggtttttattgcctagagctggtaatgtttctctggttttgcattagttgcttgaaaattgaaagtatctgtatacttctctattgtattttactgcacataatggatttgtttgatgtgtagggattttaaggtatgtaaaatatcttaacttttaaaagatgtgaataagaacataaaatagtaattagtattttgaattttaatgtatcttatcgtaac

SEQ ID NO: 74155 - DNA, 2780 bp, Zea Mays
agcaacccacactcgtctccatctacaggatcaaaagtttaaaactgcagagaccaaaaatcgccatccacgccagggaaacaaaagcttccacccaaacaaactcccctcgctgaaactcgccgccgtctcctcgccttccgcctcagcacaggccccgtcgcggtctcctaggccacgcttccgcctctcctcgtcggctgcccgcctccgcccggcggccggagcaggctaggttaccagcgccccccacttcgcggtcgagctggaggacacgcgtagcaacgccgggttcttctgcggcgacctgtggtgtggcctcatggagcccaagggcgagtcaggccagaagcctattgaagaagcaatcgacagcttgaagactgatgctagcatgaaggcaaacaatgtcaacttgcctgctaagaaagacgcaagttcttctgatgcagtatcttgcatttcctccggcgatgcagctagtactgtgaaggatagagaaatgaaccaagaaacttcttttggcgaccaagggatgcattactatggatattattatcctggtgcatacggaggatgggatgagaatggctactttgttggatataatggcctagaggtggttcaagctgacaatggttcatatctgtgttatcctctggggtatgaaaatggatatgcttcttatattccggttgttcctggaggcattgccagtgtggatggtcagtatgtcagcaaagaaccatattactccagtgcacttccaattcaggatcctagcacacctggcatttttgctcagccaattgcatatggaactgaactagtacctgcctactcatgggacccttttgttcttctggatggggttcagggacatccagttggtgtgcatcatacaaattatgctccaagaccaaaatattcttctaataagcatgttgttccttctttgaaagcttcccacagtgcaaaatccacagcagatactgtcaaaggatcatcatcagctctagaaactgtaccaaatgctgccaatagcagcacatcatcaaagggtgcaaataaggcacctggtgcttccataacaaaaggatatcttccatctagcaagtttgtgatgcacagtaataaccaagcaaaaagcagtgtttatcaaagcaaaggcatcaatctgaaagaaagtggtagaagctggcacagcagtgagaagcttaaagcgagaagtaagctaaatggacatggcgattctgaatctaatgagaacaaccacactgataactcgaaatatagtttgagctctcaatctgatgttgttggattgtcaagtgtaggggatgctaacgccagcataccttcacctgtcgtaataagaaaaactgcatacaatctttcagattttgttacaaagtatgagcaagctctattctttgtaattaagtcctacagtgaagatgatattcacaagagtattaagtacaatgtttgggcaagtactcctaatggaaataaaaggcttgacaatgcctataggcttgcacaggaaaggatggcagaaaaaggaaccaaatgtcctgttttccttttcttctcagttaatgcaagtggtcagttctgtggcgtggctgagatggttggcccagtagatttcaacaggaacatgaacttctggcaacaggacaagtggaatggtttcttctctgtaaaatggcacattattaaggatgttcccaatccacaatttcgccatataattttggagaataatgagaataaacctgtgacaaacagcagggacacgcaagaggtcaaattttcacaaggtacagagatgttgaacattttcaagaacttcacgtgtaaagcatcaatactggatgactttgacttctacgaaaatcggcagaaagtaatgcaggatagaagaggcaagccacttacatcgtttggtcacccattgccaaaagctgaaaaaactgcagaagttaaaaggcaaacacaattgataagtgccacggaagttggtagagccgatacaaccaaggaaaatgaggagaagagcagcagtgttccagaaatactcaacgcagcatgtagtaacaaggagaaacccaacaaaatcgcaacagacggatgatgccttggctagttgactgggaaaatgagatagcttctggaacggacttcaacttgaattcctgaaatcataagttcgatgtgcgcaatgtcaagaaaccacaattggtcatgggttctcttgcattttctcatggaagtgaagaaacgaaaaaagtgaagcaacggaactgtcttcccacgagaaatgttcaatgactgggaaaaaggttctaggacgcatttaggttgaggcccctggtgctaaggcattagagcgccctccttgtctgtttttcccccatattggagggtcgtttcttttcttttgtcgtgcccctttttcccctcttcttttgcctattattctgcagctgagattttgggaagcagtttgcacttaggtccaaagaaagggaatgtctgttgctttgtgggttgtcctctaggatgtggtaggtgttgactgttttttagaatctgtgcacgttctagaaactgacagaaaaaaagagaaaaaaggattgtgagggattagaaataaaaaggatcttaaaaagatacatggtatcttatgtttactgcttcttccattatcaagaaaactaacaatgggtctagatgctttcaatagtaagactatatttatataaagttcaatt

SEQ ID NO: 74156 - DNA, 2608 bp, Zea Mays
agcaacccacactcgtctccatctacaggatcaaaagtttaaaactgcagagaccaaaaatcgccatccacgccagggaaacaaaagcttccacccaaacaaactcccctcgctgaaactcgccgccgtctcctcgccttccgcctcagcacaggccccgtcgcggtctcctaggccacgcttccgcctctcctcgtcggctgcccgcctccgcccggcggccggagcaggctaggttaccagcgccccccacttcgcggtcgagctggaggacacgcgtagcaacgccgggttcttctgcggcgacctgtggtgtggcctcatggagcccaagggcgagtcaggccagaagcctattgaagaagcaatcgacagcttgaagactgatgctagcatgaaggcaaacaatgtcaacttgcctgctaagaaagacgcaagttcttctgatgcagtatcttgcatttcctccggcgatgcagctagtactgtgaaggatagagaaatgaaccaagaaacttcttttggcgaccaagggatgcattactatggatattattatcctggtgcatacggaggatgggatgagaatggctactttgttggatataatggcctagaggtgcacccagcagtggttcaagctgacaatggttcatatctgtgttatcctctggggtatgaaaatggatatgcttcttatattccggttgttcctggaggcattgccagtgtggatgggacatccagttggtgtgcatcatacaaattatgctccaagaccaaaatattcttctaataagcatgttgttccttctttgaaagcttcccacagtgcaaaatccacagcagatactgtcaaaggatcatcatcagctctagaaactgtaccaaatgctgccaatagcagcacatcatcaaagggtgcaaataaggcacctggtgcttccataacaaaaggatatcttccatctagcaagtttgtgatgcacagtaataaccaagcaaaaagcagtgtttatcaaagcaaaggcatcaatctgaaagaaagtggtagaagctggcacagcagtgagaagcttaaagcgagaagtaagctaaatggacatggcgattctgaatctaatgagaacaaccacactgataactcgaaatatagtttgagctctcaatctgatgttgttggattgtcaagtgtaggggatgctaacgccagcataccttcacctgtcgtaataagaaaaactgcatacaatctttcagattttgttacaaagtatgagcaagctctattctttgtaattaagtcctacagtgaagatgatattcacaagagtattaagtacaatgtttgggcaagtactcctaatggaaataaaaggcttgacaatgcctataggcttgcacaggaaaggatggcagaaaaaggaaccaaatgtcctgttttccttttcttctcagttaatgcaagtggtcagttctgtggcgtggctgagatggttggcccagtagatttcaacaggaacatgaacttctggcaacaggacaagtggaatggtttcttctctgtaaaatggcacattattaaggatgttcccaatccacaatttcgccatataattttggagaataatgagaataaacctgtgacaaacagcagggacacgcaagaggtcaaattttcacaaggtacagagatgttgaacattttcaagaacttcacgtgtaaagcatcaatactggatgactttgacttctacgaaaatcggcagaaagtaatgcaggatagaagagccaaaagctgaaaaaactgcagaagttaaaaggcaaacacaattgataagtgccacggaagttggtagagccgatacaaccaaggaaaatgaggagaagagcagcagtgttccagaaatactcaacgcagcatgtagtaacaaggagaaacccaacaaaatcgcaacagacggatgatgccttggctagttgactgggaaaatgagatagcttctggaacggacttcaacttgaattcctgaaatcataagttcgatgtgcgcaatgtcaagaaaccacaattggtcatgggttctcttgcattttctcatggaagtgaagaaacgaaaaaagtgaagcaacggaactgtcttcccacgagaaatgttcaatgactgggaaaaaggttctaggacgcatttaggttgaggcccctggtgctaaggcattagagcgccctccttgtctgtttttcccccatattggagggtcgtttcttttcttttgtcgtgcccctttttcccctcttcttttgcctattattctgcagctgagattttgggaagcagtttgcacttaggtccaaagaaagggaatgtctgttgctttgtgggttgtcctctaggatgtggtaggtgttgactgttttttagaatctgtgcacgttctagaaactgacagaaaaaaagagaaaaaaggattgtgagggattagaaataaaaaggatcttaaaaagatacatggtatcttatgtttactgcttcttccattatcaagaaaactaacaatgggtctagatgctttcaatagtaagactatatttatataaagttcaatt

SEQ ID NO: 74157 - DNA, 2720 bp, Zea Mays
ctcgtctccatctacaggatcaaaagtttaaaactgcagagaccaaaaatcgccatccacgccagggaaacaaaagcttccacccaaacaaactcccctcgctgaaactcgccgccgtctcctcgccttccgcctcagcacaggccccgtcgcggtctcctaggccacgcttccgcctctcctcgtcggctgcccgcctccgcccggcggccggagcaggctaggttaccagcgccccccacttcgcggtcgagctggaggacacgcgtagcaacgccgggttcttctgcggcgacctgtggtgtggcctcatggagcccaagggcgagtcaggccagaagcctattgaagaagcaatcgacagcttgaagactgatgctagcatgaaggcaaacaatgtcaacttgctagtactgtgaaggatagagaaatgaaccaagaaacttcttttggcgaccaagggatgcattactatggatattattatcctggtgcatacggaggatgggatgagaatggctactttgttggatataatggcctagaggtgcacccagcagtggttcaagctgacaatggttcatatctgtgttatcctctggggtatgaaaatggatatgcttcttatattccggttgttcctggaggcattgccagtgtggatggtcagtatgtcagcaaagaaccatattactccagtgcacttccaattcaggatcctagcacacctggcatttttgctcagccaattgcatatggaactgaactagtacctgcctactcatgggacccttttgttcttctggatggggttcagggacatccagttggtgtgcatcatacaaattatgctccaagaccaaaatattcttctaataagcatgttgttccttctttgaaagcttcccacagtgcaaaatccacagcagatactgtcaaaggatcatcatcagctctagaaactgtaccaaatgctgccaatagcagcacatcatcaaagggtgcaaataaggcacctggtgcttccataacaaaaggatatcttccatctagcaagtttgtgatgcacagtaataaccaagcaaaaagcagtgtttatcaaagcaaaggcatcaatctgaaagaaagtggtagaagctggcacagcagtgagaagcttaaagcgagaagtaagctaaatggacatggcgattctgaatctaatgagaacaaccacactgataactcgaaatatagtttgagctctcaatctgatgttgttggattgtcaagtgtaggggatgctaacgccagcataccttcacctgtcgtaataagaaaaactgcatacaatctttcagattttgttacaaagtatgagcaagctctattctttgtaattaagtcctacagtgaagatgatattcacaagagtattaagtacaatgtttgggcaagtactcctaatggaaataaaaggcttgacaatgcctataggcttgcacaggaaaggatggcagaaaaaggaaccaaatgtcctgttttccttttcttctcagttaatgcaagtggtcagttctgtggcgtggctgagatggttggcccagtagatttcaacaggaacatgaacttctggcaacaggacaagtggaatggtttcttctctgtaaaatggcacattattaaggatgttcccaatccacaatttcgccatataattttggagaataatgagaataaacctgtgacaaacagcagggacacgcaagaggtcaaattttcacaaggtacagagatgttgaacattttcaagaacttcacgtgtaaagcatcaatactggatgactttgacttctacgaaaatcggcagaaagtaatgcaggatagaagaggcaagccacttacatcgtttggtcacccattgccaaaagctgaaaaaactgcagaagttaaaaggcaaacacaattgataagtgccacggaagttggtagagccgatacaaccaaggaaaatgaggagaagagcagcagtgttccagaaatactcaacgcagcatgtagtaacaaggagaaacccaacaaaatcgcaacagacggatgatgccttggctagttgactgggaaaatgagatagcttctggaacggacttcaacttgaattcctgaaatcataagttcgatgtgcgcaatgtcaagaaaccacaattggtcatgggttctcttgcattttctcatggaagtgaagaaacgaaaaaagtgaagcaacggaactgtcttcccacgagaaatgttcaatgactgggaaaaaggttctaggacgcatttaggttgaggcccctggtgctaaggcattagagcgccctccttgtctgtttttcccccatattggagggtcgtttcttttcttttgtcgtgcccctttttcccctcttcttttgcctattattctgcagctgagattttgggaagcagtttgcacttaggtccaaagaaagggaatgtctgttgctttgtgggttgtcctctaggatgtggtaggtgttgactgttttttagaatctgtgcacgttctagaaactgacagaaaaaaagagaaaaaaggattgtgagggattagaaataaaaaggatcttaaaaagatacatggtatcttatgtttactgcttcttccattatcaagaaaactaacaatgggtctagatgctttcaatagtaagactatatttatataaagttcaatt

SEQ ID NO: 74158 - DNA, 2778 bp, Zea Mays
caaaagtttaaaactgcagagaccaaaaatcgccatccacgccagggaaacaaaagcttccacccaaacaaactcccctcgctgaaactcgccgccgtctcctcgccttccgcctcagcacaggccccgtcgcggtctcctaggccacgcttccgcctctcctcgtcggctgcccgcctccgcccggcggccggagcaggctaggttaccagcgccccccacttcgcggtcgagctggaggacacgcgtagcaacgccgggttcttctgcggcgacctgtggtgtggcctcatggagcccaagggcgagtcaggccagaagcctattgaagaagcaatcgacagcttgaagactgatgctagcatgaaggcaaacaatgtcaacttgcctgctaagaaagacgcaagttcttctgatgcagtatcttgcatttcctccggcgatgcagctagtactgtgaaggatagagaaatgaaccaagaaacttcttttggcgaccaagggatgcattactatggatattattatcctggtgcatacggaggatgggatgagaatggctactttgttggatataatggcctagaggtgcacccagcagtggttcaagctgacaatggttcatatctgtgttatcctctggggtatgaaaatggatatgcttcttatattccggttgttcctggaggcattgccagtgtggatggtcagtatgtcagcaaagaaccatattactccagtgcacttccaattcaggatcctagcacacctggcatttttgctcagccaattgcatatggaactgaactagtacctgcctactcatgggacccttttgttcttctggatggggttcagggacatccagttggtgtgcatcatacaaattatgctccaagaccaaaatattcttctaataagcatgttgttccttctttgaaagcttcccacagtgcaaaatccacagcagatactgtcaaaggatcatcatcagctctagaaactgtaccaaatgctgccaatagcagcacatcatcaaagggtgcaaataaggtacttgagaagtcctataaaacattgaccttgccagcttagcccttgcttcataaagcaagtttgtgatgcacagtaataaccaagcaaaaagcagtgtttatcaaagcaaaggcatcaatctgaaagaaagtggtagaagctggcacagcagtgagaagcttaaagcgagaagtaagctaaatggacatggcgattctgaatctaatgagaacaaccacactgataactcgaaatatagtttgagctctcaatctgatgttgttggattgtcaagtgtaggggatgctaacgccagcataccttcacctgtcgtaataagaaaaactgcatacaatctttcagattttgttacaaagtatgagcaagctctattctttgtaattaagtcctacagtgaagatgatattcacaagagtattaagtacaatgtttgggcaagtactcctaatggaaataaaaggcttgacaatgcctataggcttgcacaggaaaggatggcagaaaaaggaaccaaatgtcctgttttccttttcttctcagttaatgcaagtggtcagttctgtggcgtggctgagatggttggcccagtagatttcaacaggaacatgaacttctggcaacaggacaagtggaatggtttcttctctgtaaaatggcacattattaaggatgttcccaatccacaatttcgccatataattttggagaataatgagaataaacctgtgacaaacagcagggacacgcaagaggtcaaattttcacaaggtacagagatgttgaacattttcaagaacttcacgtgtaaagcatcaatactggatgactttgacttctacgaaaatcggcagaaagtaatgcaggatagaagaggcaagccacttacatcgtttggtcacccattgccaaaagctgaaaaaactgcagaagttaaaaggcaaacacaattgataagtgccacggaagttggtagagccgatacaaccaaggaaaatgaggagaagagcagcagtgttccagaaatactcaacgcagcatgtagtaacaaggagaaacccaacaaaatcgcaacagacggatgatgccttggctagttgactgggaaaatgagatagcttctggaacggacttcaacttgaattcctgaaatcataagttcgatgtgcgcaatgtcaagaaaccacaattggtcatgggttctcttgcattttctcatggaagtgaagaaacgaaaaaagtgaagcaacggaactgtcttcccacgagaaatgttcaatgactgggaaaaaggttctaggacgcatttaggttgaggcccctggtgctaaggcattagagcgccctccttgtctgtttttcccccatattggagggtcgtttcttttcttttgtcgtgcccctttttcccctcttcttttgcctattattctgcagctgagattttgggaagcagtttgcacttaggtccaaagaaagggaatgtctgttgctttgtgggttgtcctctaggatgtggtaggtgttgactgttttttagaatctgtgcacgttctagaaactgacagaaaaaaagagaaaaaaggattgtgagggattagaaataaaaaggatcttaaaaagatacatggtatcttatgtttactgcttcttccattatcaagaaaactaacaatgggtctagatgctttcaatagtaagactatatttatataaagttcaatt

SEQ ID NO: 74159 - DNA, 2477 bp, Zea Mays
gtttaaaactgcagagaccaaaaatcgccatccacgccagggaaacaaaagcttccacccaaacaaactcccctcgctgaaactcgccgccgtctcctcgccttccgcctcagcacaggccccgtcgcggtctcctaggccacgcttccgcctctcctcgtcggctgcccgcctccgcccggcggccggagcaggctaggttaccagcgccccccacttcgcggtcgagctggaggacacgcgtagcaacgccgggttcttctgcggcgacctgtggtgtggcctcatggagcccaagggcgagtcaggccagaagcctattgaagaagcaatcgacagcttgaagactgatgctagcatgaaggcaaacaatgtcaacttgcctgctaagaaagacgcaagttcttctgatgcagtatcttgcatttcctccggcgatgcagctagtactgtgaaggatagagaaatgaaccaagaaacttcttttggcgaccaagggatgcattactatggatattattatcctggtgcatacggaggatgggatgagaatggctactttgttggatataatggcctagaggtgcacccagcagtggttcaagctgacaatggttcatatctgtgttatcctctggggtatgaaaatggatatgcttcttatattccggttgttcctggaggcattgccagtgtggatgtgcaaaatccacagcagatactgtcaaaggatcatcatcagctctagaaactgtaccaaatgctgccaatagcagcacatcatcaaagggtgcaaataaggcacctggtgcttccataacaaaaggatatcttccatctagcaagtttgtgatgcacagtaataaccaagcaaaaagcagtgtttatcaaagcaaaggcatcaatctgaaagaaagtggtagaagctggcacagcagtgagaagcttaaagcgagaagtaagctaaatggacatggcgattctgaatctaatgagaacaaccacactgataactcgaaatatagtttgagctctcaatctgatgttgttggattgtcaagtgtaggggatgctaacgccagcataccttcacctgtcgtaataagaaaaactgcatacaatctttcagattttgttacaaagtatgagcaagctctattctttgtaattaagtcctacagtgaagatgatattcacaagagtattaagtacaatgtttgggcaagtactcctaatggaaataaaaggcttgacaatgcctataggcttgcacaggaaaggatggcagaaaaaggaaccaaatgtcctgttttccttttcttctcagttaatgcaagtggtcagttctgtggcgtggctgagatggttggcccagtagatttcaacaggaacatgaacttctggcaacaggacaagtggaatggtttcttctctgtaaaatggcacattattaaggatgttcccaatccacaatttcgccatataattttggagaataatgagaataaacctgtgacaaacagcagggacacgcaagaggtcaaattttcacaaggtacagagatgttgaacattttcaagaacttcacgtgtaaagcatcaatactggatgactttgacttctacgaaaatcggcagaaagtaatgcaggatagaagagccaaaagctgaaaaaactgcagaagttaaaaggcaaacacaattgataagtgccacggaagttggtagagccgatacaaccaaggaaaatgaggagaagagcagcagtgttccagaaatactcaacgcagcatgtagtaacaaggagaaacccaacaaaatcgcaacagacggatgatgccttggctagttgactgggaaaatgagatagcttctggaacggacttcaacttgaattcctgaaatcataagttcgatgtgcgcaatgtcaagaaaccacaattggtcatgggttctcttgcattttctcatggaagtgaagaaacgaaaaaagtgaagcaacggaactgtcttcccacgagaaatgttcaatgactgggaaaaaggttctaggacgcatttaggttgaggcccctggtgctaaggcattagagcgccctccttgtctgtttttcccccatattggagggtcgtttcttttcttttgtcgtgcccctttttcccctcttcttttgcctattattctgcagctgagattttgggaagcagtttgcacttaggtccaaagaaagggaatgtctgttgctttgtgggttgtcctctaggatgtggtaggtgttgactgttttttagaatctgtgcacgttctagaaactgacagaaaaaaagagaaaaaaggattgtgagggattagaaataaaaaggatcttaaaaagatacatggtatcttatgtttactgcttcttccattatcaagaaaactaacaatgggtctagatgctttcaatagtaagactatatttatataaagttcaatt

SEQ ID NO: 74160 - DNA, 2761 bp, Zea Mays
gtttaaaactgcagagaccaaaaatcgccatccacgccagggaaacaaaagcttccacccaaacaaactcccctcgctgaaactcgccgccgtctcctcgccttccgcctcagcacaggccccgtcgcggtctcctaggccacgcttccgcctctcctcgtcggctgcccgcctccgcccggcggccggagcaggctaggttaccagcgccccccacttcgcggtcgagctggaggacacgcgtagcaacgccgggttcttctgcggcgacctgtggtgtggcctcatggagcccaagggcgagtcaggccagaagcctattgaagaagcaatcgacagcttgaagactgatgctagcatgaaggcaaacaatgtcaacttgcctgctaagaaagacgcaagttcttctgatgcagtatcttgcatttcctccggcgatgcagctagtactgtgaaggatagagaaatgaaccaagaaacttcttttggcgaccaagggatgcattactatggatattattatcctgtgcaggtgcatacggaggatgggatgagaatggctactttgttggatataatggcctagaggtgcacccagcagtggttcaagctgacaatggttcatatctgtgttatcctctggggtatgaaaatggatatgcttcttatattccggttgttcctggaggcattgccagtgtggatggtcagtatgtcagcaaagaaccatattactccagtgcacttccaattcaggatcctagcacacctggcatttttgctcagccaattgcatatggaactgaactagtacctgcctactcatgggacccttttgttcttctggatggggttcagggacatccagttggtgtgcatcatacaaattatgctccaagaccaaaatattcttctaataagcatgttgttccttctttgaaagcttcccacagtgcaaaatccacagcagatactgtcaaaggatcatcatcagctctagaaactgtaccaaatgctgccaatagcagcacatcatcaaagggtgcaaataaggcacctggtgcttccataacaaaaggatatcttccatctagcaagtttgtgatgcacagtaataaccaagcaaaaagcagtgtttatcaaagcaaaggcatcaatctgaaagaaagtggtagaagctggcacagcagtgagaagcttaaagcgagaagtaagctaaatggacatggcgattctgaatctaatgagaacaaccacactgataactcgaaatatagtttgagctctcaatctgatgttgttggattgtcaagtgtaggggatgctaacgccagcataccttcacctgtcgtaataagaaaaactgcatacaatctttcagattttgttacaaagtatgagcaagctctattctttgtaattaagtcctacagtgaagatgatattcacaagagtattaagtacaatgtttgggcaagtactcctaatggaaataaaaggcttgacaatgcctataggcttgcacaggaaaggatggcagaaaaaggaaccaaatgtcctgttttccttttcttctcagttaatgcaagtggtcagttctgtggcgtggctgagatggttggcccagtagatttcaacaggaacatgaacttctggcaacaggacaagtggaatggtttcttctctgtaaaatggcacattattaaggatgttcccaatccacaatttcgccatataattttggagaataatgagaataaacctgtgacaaacagcagggacacgcaagaggtcaaattttcacaaggtacagagatgttgaacattttcaagaacttcacgtgtaaagcatcaatactggatgactttgacttctacgaaaatcggcagaaagtaatgcaggatagaagaggcaagccacttacatcgtttggtcacccattgccaaaagctgaaaaaactgcagaagttaaaaggcaaacacaattgataagtgccacggaagttggtagagccgatacaaccaaggaaaatgaggagaagagcagcagtgttccagaaatactcaacgcagcatgtagtaacaaggagaaacccaacaaaatcgcaacagacggatgatgccttggctagttgactgggaaaatgagatagcttctggaacggacttcaacttgaattcctgaaatcataagttcgatgtgcgcaatgtcaagaaaccacaattggtcatgggttctcttgcattttctcatggaagtgaagaaacgaaaaaagtgaagcaacggaactgtcttcccacgagaaatgttcaatgactgggaaaaaggttctaggacgcatttaggttgaggcccctggtgctaaggcattagagcgccctccttgtctgtttttcccccatattggagggtcgtttcttttcttttgtcgtgcccctttttcccctcttcttttgcctattattctgcagctgagattttgggaagcagtttgcacttaggtccaaagaaagggaatgtctgttgctttgtgggttgtcctctaggatgtggtaggtgttgactgttttttagaatctgtgcacgttctagaaactgacagaaaaaaagagaaaaaaggattgtgagggattagaaataaaaaggatcttaaaaagatacatggtatcttatgtttactgcttcttccattatcaagaaaactaacaatgggtctagatgctttcaatagtaagactatatttatataaagttcaatt

SEQ ID NO: 74161 - DNA, 2777 bp, Zea Mays
gtttaaaactgcagagaccaaaaatcgccatccacgccagggaaacaaaagcttccacccaaacaaactcccctcgctgaaactcgccgccgtctcctcgccttccgcctcagcacaggccccgtcgcggtctcctaggccacgcttccgcctctcctcgtcggctgcccgcctccgcccggcggccggagcaggctaggttaccagcgccccccacttcgcggtcgagctggaggacacgcgtagcaacgccgggttcttctgcggcgacctgtggtgtggcctcatggagcccaagggcgagtcaggccagaagcctattgaagaagcaatcgacagcttgaagactgatgctagcatgaaggcaaacaatgtcaacttgcctgctaagaaagacgcaagttcttctgatgcagtatcttgcatttcctccggcgatgcagctagtactgtgaaggatagagaaatgaaccaagaaacttcttttggcgaccaagggatgcattactatggatattattatcctggtgcatacggaggatgggatgagaatggctactttgttggatataatggcctagaggtgcacccagcagtggttcaagctgacaatggttcatatctgtgttatcctctggggtatgaaaatggatatgcttcttatattccggttgttcctggaggcattgccagtgtggatggtcagtatgtcagcaaagaaccatattactccagtgcacttccaattcaggatcctagcacacctggcatttttgctcagccaattgcatatggaactgaactagtacctgcctactcatgggacccttttgttcttctggatggggttcagggacatccagttggtgtgcatcatacaaattatgctccaagaccaaaatattcttctaataagcatgttgttccttctttgaaagcttcccacagtgcaaaatccacagcagatactgtcaaaggatcatcatcagctctagaaactgtaccaaatgctgccaatagcagcacatcatcaaagggtgcaaataaggcacctggtgcttccataacaaaaggatatcttccatctagcaagtttgtgatgcacagtaataaccaagcaaaaagcagtgtttatcaaagcaaaggcatcaatctgaaagaaagtggtagaagctggcacagcagtgagaagcttaaagcgagaagtaagctaaatggacatggcgattctgaatctaatgagaacaaccacactgataactcgaaatatagtttgagctctcaatctgatgttgttggattgtcaagtgtaggggatgctaacgccagcataccttcacctgtcgtaataagaaaaactgcatacaatctttcagattttgttacaaagtatgagcaagctctattctttgtaattaagtcctacagtgaagatgatattcacaagagtattaagtacaatgtttgggcaagtactcctaatggaaataaaaggcttgacaatgcctataggcttgcacaggaaaggatggcagaaaaaggaaccaaatgtcctgttttccttttcttctcagttaatgcaagtggtcagttctgtggcgtggctgagatggttggcccagtagatttcaacaggaacatgaacttctggcaacaggacaagtggaatggtttcttctctgtaaaatggcacattattaaggatgttcccaatccacaatttcgccatataattttggagaataatgagaataaacctgtgacaaacagcagggacacgcaagaggtattccttccaatacctagcaagagtgtctgtggtattttttacagcaagaggtcaaattttcacaaggtacagagatgttgaacattttcaagaacttcacgtgtaaagcatcaatactggatgactttgacttctacgaaaatcggcagaaagtaatgcaggatagaagagccaaaagctgaaaaaactgcagaagttaaaaggcaaacacaattgataagtgccacggaagttggtagagccgatacaaccaaggaaaatgaggagaagagcagcagtgttccagaaatactcaacgcagcatgtagtaacaaggagaaacccaacaaaatcgcaacagacggatgatgccttggctagttgactgggaaaatgagatagcttctggaacggacttcaacttgaattcctgaaatcataagttcgatgtgcgcaatgtcaagaaaccacaattggtcatgggttctcttgcattttctcatggaagtgaagaaacgaaaaaagtgaagcaacggaactgtcttcccacgagaaatgttcaatgactgggaaaaaggttctaggacgcatttaggttgaggcccctggtgctaaggcattagagcgccctccttgtctgtttttcccccatattggagggtcgtttcttttcttttgtcgtgcccctttttcccctcttcttttgcctattattctgcagctgagattttgggaagcagtttgcacttaggtccaaagaaagggaatgtctgttgctttgtgggttgtcctctaggatgtggtaggtgttgactgttttttagaatctgtgcacgttctagaaactgacagaaaaaaagagaaaaaaggattgtgagggattagaaataaaaaggatcttaaaaagatacatggtatcttatgtttactgcttcttccattatcaagaaaactaacaatgggtctagatgctttcaatagtaagactatatttatataaagttcaatt

SEQ ID NO: 74162 - DNA, 2663 bp, Zea Mays
gtttaaaactgcagagaccaaaaatcgccatccacgccagggaaacaaaagcttccacccaaacaaactcccctcgctgaaactcgccgccgtctcctcgccttccgcctcagcacaggccccgtcgcggtctcctaggccacgcttccgcctctcctcgtcggctgcccgcctccgcccggcggccggagcaggctaggttaccagcgccccccacttcgcggtcgagctggaggacacgcgtagcaacgccgggttcttctgcggcgacctgtggtgtggcctcatggagcccaagggcgagtcaggccagaagcctattgaagaagcaatcgacagcttgaagactgatgctagcatgaaggcaaacaatgtcaacttgctagtactgtgaaggatagagaaatgaaccaagaaacttcttttggcgaccaagggatgcattactatggatattattatcctggtgcatacggaggatgggatgagaatggctactttgttggatataatggcctagaggtgcacccagcagtggttcaagctgacaatggttcatatctgtgttatcctctggggtatgaaaatggatatgcttcttatattccggttgttcctggaggcattgccagtgtggatggtcagtatgtcagcaaagaaccatattactccagtgcacttccaattcaggatcctagcacacctggcatttttgctcagccaattgcatatggaactgaactagtacctgcctactcatgggacccttttgttcttctggatggggttcagggacatccagttggtgtgcatcatacaaattatgctccaagaccaaaatattcttctaataagcatgttgttccttctttgaaagcttcccacagtgcaaaatccacagcagatactgtcaaaggatcatcatcagctctagaaactgtaccaaatgctgccaatagcagcacatcatcaaagggtgcaaataaggcacctggtgcttccataacaaaaggatatcttccatctagcaagtttgtgatgcacagtaataaccaagcaaaaagcagtgtttatcaaagcaaaggcatcaatctgaaagaaagtggtagaagctggcacagcagtgagaagcttaaagcgagaagtaagctaaatggacatggcgattctgaatctaatgagaacaaccacactgataactcgaaatatagtttgagctctcaatctgatgttgttggattgtcaagtgtaggggatgctaacgccagcataccttcacctgtcgtaataagaaaaactgcatacaatctttcagattttgttacaaagtatgagcaagctctattctttgtaattaagtcctacagtgaagatgatattcacaagagtattaagtacaatgtttgggcaagtactcctaatggaaataaaaggcttgacaatgcctataggcttgcacaggaaaggatggcagaaaaaggaaccaaatgtcctgttttccttttcttctcagttaatgcaagtggtcagttctgtggcgtggctgagatggttggcccagtagatttcaacaggaacatgaacttctggcaacaggacaagtggaatggtttcttctctgtaaaatggcacattattaaggatgttcccaatccacaatttcgccatataattttggagaataatgagaataaacctgtgacaaacagcagggacacgcaagaggtcaaattttcacaaggtacagagatgttgaacattttcaagaacttcacgtgtaaagcatcaatactggatgactttgacttctacgaaaatcggcagaaagtaatgcaggatagaagagccaaaagctgaaaaaactgcagaagttaaaaggcaaacacaattgataagtgccacggaagttggtagagccgatacaaccaaggaaaatgaggagaagagcagcagtgttccagaaatactcaacgcagcatgtagtaacaaggagaaacccaacaaaatcgcaacagacggatgatgccttggctagttgactgggaaaatgagatagcttctggaacggacttcaacttgaattcctgaaatcataagttcgatgtgcgcaatgtcaagaaaccacaattggtcatgggttctcttgcattttctcatggaagtgaagaaacgaaaaaagtgaagcaacggaactgtcttcccacgagaaatgttcaatgactgggaaaaaggttctaggacgcatttaggttgaggcccctggtgctaaggcattagagcgccctccttgtctgtttttcccccatattggagggtcgtttcttttcttttgtcgtgcccctttttcccctcttcttttgcctattattctgcagctgagattttgggaagcagtttgcacttaggtccaaagaaagggaatgtctgttgctttgtgggttgtcctctaggatgtggtaggtgttgactgttttttagaatctgtgcacgttctagaaactgacagaaaaaaagagaaaaaaggattgtgagggattagaaataaaaaggatcttaaaaagatacatggtatcttatgtttactgcttcttccattatcaagaaaactaacaatgggtctagatgctttcaatagtaagactatatttatataaagttcaatt

SEQ ID NO: 74163 - DNA, 2564 bp, Zea Mays
ccttccttctcatttcgctccccgtgcggtttctttctcttctcgttcttcttacgccgagaggtggatccattggatggattactggcggtcatgcgtctgctattgctgccttctgatttgaactattgaagaagcaatcgacagcttgaagactgatgctagcatgaaggcaaacaatgtcaacttgcctgctaagaaagacgcaagttcttctgatgcagtatcttgcatttcctccggcgatgcagctagtactgtgaaggatagagaaatgaaccaagaaacttcttttggcgaccaagggatgcattactatggatattattatcctggtgcatacggaggatgggatgagaatggctactttgttggatataatggcctagaggtgcacccagcagtggttcaagctgacaatggttcatatctgtgttatcctctggggtatgaaaatggatatgcttcttatattccggttgttcctggaggcattgccagtgtggatggtcagtatgtcagcaaagaaccatattactccagtgcacttccaattcaggatcctagcacacctggcatttttgctcagccaattgcatatggaactgaactagtacctgcctactcatgggacccttttgttcttctggatggggttcagggacatccagttggtgtgcatcatacaaattatgctccaagaccaaaatattcttctaataagcatgttgttccttctttgaaagcttcccacagtgcaaaatccacagcagatactgtcaaaggatcatcatcagctctagaaactgtaccaaatgctgccaatagcagcacatcatcaaagggtgcaaataaggcacctggtgcttccataacaaaaggatatcttccatctagcaagtttgtgatgcacagtaataaccaagcaaaaagcagtgtttatcaaagcaaaggcatcaatctgaaagaaagtggtagaagctggcacagcagtgagaagcttaaagcgagaagtaagctaaatggacatggcgattctgaatctaatgagaacaaccacactgataactcgaaatatagtttgagctctcaatctgatgttgttggattgtcaagtgtaggggatgctaacgccagcataccttcacctgtcgtaataagaaaaactgcatacaatctttcagattttgttacaaagtatgagcaagctctattctttgtaattaagtcctacagtgaagatgatattcacaagagtattaagtacaatgtttgggcaagtactcctaatggaaataaaaggcttgacaatgcctataggcttgcacaggaaaggatggcagaaaaaggaaccaaatgtcctgttttccttttcttctcagttaatgcaagtggtcagttctgtggcgtggctgagatggttggcccagtagatttcaacaggaacatgaacttctggcaacaggacaagtggaatggtttcttctctgtaaaatggcacattattaaggatgttcccaatccacaatttcgccatataattttggagaataatgagaataaacctgtgacaaacagcagggacacgcaagaggtcaaattttcacaaggtacagagatgttgaacattttcaagaacttcacgtgtaaagcatcaatactggatgactttgacttctacgaaaatcggcagaaagtaatgcaggatagaagaggcaagccacttacatcgtttggtcacccattgccaaaagctgaaaaaactgcagaagttaaaaggcaaacacaattgataagtgccacggaagttggtagagccgatacaaccaaggaaaatgaggagaagagcagcagtgttccagaaatactcaacgcagcatgtagtaacaaggagaaacccaacaaaatcgcaacagacggatgatgccttggctagttgactgggaaaatgagatagcttctggaacggacttcaacttgaattcctgaaatcataagttcgatgtgcgcaatgtcaagaaaccacaattggtcatgggttctcttgcattttctcatggaagtgaagaaacgaaaaaagtgaagcaacggaactgtcttcccacgagaaatgttcaatgactgggaaaaaggttctaggacgcatttaggttgaggcccctggtgctaaggcattagagcgccctccttgtctgtttttcccccatattggagggtcgtttcttttcttttgtcgtgcccctttttcccctcttcttttgcctattattctgcagctgagattttgggaagcagtttgcacttaggtccaaagaaagggaatgtctgttgctttgtgggttgtcctctaggatgtggtaggtgttgactgttttttagaatctgtgcacgttctagaaactgacagaaaaaaagagaaaaaaggattgtgagggattagaaataaaaaggatcttaaaaagatacatggtatcttatgtttactgcttcttccattatcaagaaaactaacaatgggtctagatgctttcaatagtaagactatatttatataaagttcaatt

SEQ ID NO: 74164 - DNA, 1003 bp, Zea Mays
caagagtgtctgtggtattttttacagcaagaggtcaaattttcacaaggtacagagatgttgaacattttcaagaacttcacgtgtaaagcatcaatactggatgactttgacttctacgaaaatcggcagaaagtaatgcaggatagaagaggcaagccacttacatcgtttggtcacccattgccaaaagctgaaaaaactgcagaagttaaaaggcaaacacaattgataagtgccacggaagttggtagagccgatacaaccaaggaaaatgaggagaagagcagcagtgttccagaaatactcaacgcagcatgtagtaacaaggagaaacccaacaaaatcgcaacagacggatgatgccttggctagttgactgggaaaatgagatagcttctggaacggacttcaacttgaattcctgaaatcataagttcgatgtgcgcaatgtcaagaaaccacaattggtcatgggttctcttgcattttctcatggaagtgaagaaacgaaaaaagtgaagcaacggaactgtcttcccacgagaaatgttcaatgactgggaaaaaggttctaggacgcatttaggttgaggcccctggtgctaaggcattagagcgccctccttgtctgtttttcccccatattggagggtcgtttcttttcttttgtcgtgcccctttttcccctcttcttttgcctattattctgcagctgagattttgggaagcagtttgcacttaggtccaaagaaagggaatgtctgttgctttgtgggttgtcctctaggatgtggtaggtgttgactgttttttagaatctgtgcacgttctagaaactgacagaaaaaaagagaaaaaaggattgtgagggattagaaataaaaaggatcttaaaaagatacatggtatcttatgtttactgcttcttccattatcaagaaaactaacaatgggtctagatgctttcaatagtaagactatatttatataaagttcaatt

SEQ ID NO: 74165 - DNA, 1413 bp, Zea Mays
acgtactctgtcaaacgatacgccgcgatgcttccagacgagcgccatccccttcctcgcctcacacgccgtcctgttggtcgtgcctctcttcaacctttttttcttgagcattagcgagagccccttacatggtgcagtgctagcatcgttgctggcgacctcggtgaggtcggatctgcaaaggttgcagctagcgcgcctacactacatcaacatggtgtggcatctcctttcgcagatccccaacatgctacgccgccggctgcctcattggaactcctgtgcaccgcttgcctttcttctcccattcaacccgcaggcgttccctggctcaatagcgcaactaggggatgtccgccgctacctccatataggaaacgacagatttagattttcaggtgatgcgtggtcgggatcccggatcaatcaaaataagtgtgaaataagtgtgaaatttgagaggctgttgaacttccagatcaggtaccaaccaaaaaaagtgacccttttgacggcgtattgcgtgggcaaggcatgccagtgcgacaatagagaaactaacggggagctctgttcgttctgctgattgcttatgattaggctcgcagtggtggtagctgggagagcttgggactggccagacgcgaccaactcacccatgtaataagacaacttttatacatagccgacagtacgcaacctcatgcgcaagatccttaatgaaaccaaagagctgcagcagataaccaacgacaagcagaaaaatcaggttgtacgcatccaacattttactttcatatttgctgaagatgtcaacaaacaaaatagacaagcagcccagacaatggagatgatgtatacgataattgcagatgagttcaagtcaatggacaataaggacatgcgccctgaagattacttgaacttcttttgtcttggaaaccgggaagaaccaccatctaatggcagcccagaatcagagaaatctacatataaaagtgcagagatagtctgtttttgcattttccttattcttaaggaagcatttgaagacgcagaaattactcatgttgacgatacagtagatcctgttagagacatggaaactattagtgaagagctcagactaaagttttcgttggattttgttgatttacaagatcagctgtacaacacttaaaccttttttcgacactattctgtttctattttctgcaggatatagagttcatgaaaaagaaacttgaggaccttgataagccaatgaagaggaggaatgataagctgctcaaaattgagcatgaattatattgatccagcacaatgccgaggagactggagactaaacttggaggtgctactgaaggatgtgactttgagtcaaagggtaaaagtgataatgagattaac

SEQ ID NO: 74166 - DNA, 2458 bp, Zea Mays
acgtactctgtcaaacgatacgccgcgatgcttccagacgagcgccatccccttcctcgcctcacacgccgtcctgttggtcgtgcctctcttcaacctttttttcttgagcattagcgagagccccttacatggtgcagtgctagcatcgttgctggcgacctcggtgaggtcggatctgcaaaggttgcagctagcgcgcctacactacatcaacatggtgtggcatctcctttcgcagatccccaacatgctacgccgccggctgcctcattggaactcctgtgcaccgcttgcctttcttctcccattcaacccgcaggcgttccctggctcaatagcgcaactaggggatgtccgccgctacctccatataggaaacgacagatttagattttcaggtgatgcgtggtcgggatcccggatcaatcaaaataagtgtgaaataagtgtgaaatttgagaggctgttgaacttccagatcaggtaccaaccaaaaaaagtgacccttttgacggcgtattgcgtgggcaaggcatgccagtgcgacaatagagaaactaacggggagctctgttcgttctgctgattgcttatgattaggctcgcagtggtggtagctgggagagcttgggactggccagacgcgaccaactcacccatgtaataagacaacttttatacatagccgacagtacgcaacctcatgcgcaagatccttaatgaaaccaaagagctgcagcagataaccaacgacaagcagaaaaatcaggttgtacgcatccaacattttactttcatatttgctgaagatgtcaacaaacaaaatagacaagcagcccagacaatggagatgatgtatacgataattgcagatgagttcaagtcaatggacaataaggacatgcgccctgaagattacttgaacttcttttgtcttggaaaccgggaagaaccaccatctaatggcagcccagaatcagagaaatctacatataaaagtgcagagatagtctgtttttgcattttccttattcttaagggtatggcttagctcaacccttctgattacaccaaaactgaatatggttttggcgcacggaccttatgggaagctagagaagcatttgaagacgcagaaattactcatgttgacgatacagtagatcctgttagagacatggaaactattagtgaagagctcagactaaagttttcgttggattttgttgatttacaagatcagctgtacaacacttaaaccttttttcgacactattctgtttctattttctgcaggatatagagttcatgaaaaagaaacttgaggaccttgataagccaatgaagaggaggaatgataagctgctcaaaattgagcatgaattatattgatccagcacaatgccgaggagactggagactaaacttggaggtgctactgaaggatgtgactttgagtcaaagggtagcacatggagagcttgaattgaattcaagcttggatatgattggaaaatatttgtattagatcacctagaagggtgattgatgcttgttattggccaagcagccaaaatctatagtgggaactcctgcatacattgctcatgaggttcttctgaagaaggaatacaatggaaaggttttatgcgtagtgtcgttaattattctacacttgacatactgtttttgtttagtgtgcatgttattattctccacttgaacaacatgtttgtttgtcaaaacattttatacacgcacgatttgtagtcatgcataacagggaactatgttggaaggttcgaatgctaaattagtcactaactctttgttactgaactaaggttgctgatgtgtggtcatgcggagtgatgccatacgtgatgctgacgatcaccatccctgagataagaaaccatccatggttcttgaaaaacctcctagctgaccaaatggatgacaatacgatgagtaagcagtacgaggagcctgaacaaccgatgcagagcatgaatgagttcatgcagatcctggttgaggcgaccattccagcagttggttcacgtggactcaatcagtttctgaatgatgacattgacctcgacgatgacatggaggacctagactcagatgccggtcttgacctggaaagcagtggggagatcgtgtatgctatttgacaacattgaatactttgttgtgtcgtaggttaccaagataattagagacaaggggcaggttgttgtgcttgcaagtatctgttgcagctgttgttcatgcctgatgttgatgcctcttttcatactgttgtgtttggatggtgtaccaccagtgttttacaacagtttggcccttggaattgctattgctaaaacttggttcctctgagaagaccttttgtttttgtattcccagtcgagggacggtgaagtacttatattattacaaaattgtt

SEQ ID NO: 74167 - DNA, 2116 bp, Zea Mays
acgtactctgtcaaacgatacgccgcgatgcttccagacgagcgccatccccttcctcgcctcacacgccgtcctgttggtcgtgcctctcttcaacctttttttcttgagcattagcgagagccccttacatggtgcagtgctagcatcgttgctggcgacctcggtgaggtcggatctgcaaaggttgcagctagcgcgcctacactacatcaacatggtgtggcatctcctttcgcagatccccaacatgctacgccgccggctgcctcattggaactcctgtgcaccgcttgcctttcttctcccattcaacccgcaggcgttccctggctcaatagcgcaactaggggatgtccgccgctacctccatataggaaacgacagatttagattttcaggtgatgcgtggtcgggatcccggatcaatcaaaataagtgtgaaataagtgtgaaatttgagaggctgttgaacttccagatcaggtaccaaccaaaaaaagtgacccttttgacggcgtattgcgtgggcaaggcatgccagtgcgacaatagagaaactaacggggagctctgttcgttctgctgattgcttatgattaggctcgcagtggtggtagctgggagagcttgggactggccagacgcgaccaactcacccatgtaataagacaacttttatacatagccgacagtacgcaacctcatgcgcaagatccttaatgaaaccaaagagctgcagcagataaccaacgacaagcagaaaaatcaggttgtacgcatccaacattttactttcatatttgctgaagatgtcaacaaacaaaatagacaagcagcccagacaatggagatgatgtatacgataattgcagatgagttcaagtcaatggacaataaggacatgcgccctgaagattacttgaacttcttttgtcttggaaaccgggaagaaccaccatctaatggcagcccagaatcagagaaatctacatataaaagtgcagagatagatatagagttcatgaaaaagaaacttgaggaccttgataagccaatgaagaggaggaatgataagctgctcaaaattgagcatgaattatgtgagaggattactgaattagaaatgcagattgatccagcacaatgccgaggagactggagactaaacttggaggtgctactgaaggatgtgactttgagtcaaaggacaatagttctatactcgcagccaaaatctatagtgggaactcctgcatacattgctcatgaggttcttctgaagaaggaatacaatggaaaggttttatgcgtagtgtcgttaattattctacacttgacatactgtttttgtttagtgtgcatgttattattctccacttgaacaacatgtttgtttgtcaaaacattttatacacgcacgatttgtagtcatgcataacagggaactatgttggaaggttcgaatgctaaattagtcactaactctttgttactgaactaaggttgctgatgtgtggtcatgcggagtgatgccatacgtgatgctgacgatcaccatccctgagataagaaaccatccatggttcttgaaaaacctcctagctgaccaaatggatgacaatacgatgagtaagcagtacgaggagcctgaacaaccgatgcagagcatgaatgagttcatgcagatcctggttgaggcgaccattccagcagttggttcacgtggactcaatcagtttctgaatgatgacattgacctcgacgatgacatggaggacctagactcagatgccggtcttgacctggaaagcagtggggagatcgtgtatgctatttgacaacattgaatactttgttgtgtcgtaggttaccaagataattagagacaaggggcaggttgttgtgcttgcaagtatctgttgcagctgttgttcatgcctgatgttgatgcctcttttcatactgttgtgtttggatggtgtaccaccagtgttttacaacagtttggcccttggaattgctattgctaaaacttggttcctctgagaagaccttttgtttttgtattcccagtcgagggacggtgaagtacttatattattacaaaattgtt

SEQ ID NO: 74168 - DNA, 3716 bp, Zea Mays
acgtactctgtcaaacgatacgccgcgatgcttccagacgagcgccatccccttcctcgcctcacacgccgtcctgttggtcgtgcctctcttcaacctttttttcttgagcattagcgagagccccttacatggtgcagtgctagcatcgttgctggcgacctcggtgaggtcggatctgcaaaggttgcagctagcgcgcctacactacatcaacatggtgtggcatctcctttcgcagatccccaacatgctacgccgccggctgcctcattggaactcctgtgcaccgcttgcctttcttctcccattcaacccgcaggcgttccctggctcaatagcgcaactaggggatgtccgccgctacctccatataggaaacgacagatttagattttcaggtgatgcgtggtcgggatcccggatcaatcaaaataagtgtgaaataagtgtgaaatttgagaggctgttgaacttccagatcaggtaccaaccaaaaaaagtgacccttttgacggcgtattgcgtgggcaaggcatgccagtgcgacaatagagaaactaacggggagctctgttcgttctgctgattgcttatgattaggctcgcagtggtggtagctgggagagcttgggactggccagacgcgaccaactcacccatgtaataagacaacttttatacatagccgacagtacgcaacctcatgcgcaagatccttaatgaaaccaaagagctgcagcagataaccaacgacaagcagaaaaatcaggttgtacgcatccaacattttactttcatatttgctgaagatgtcaacaaacaaaatagacaagcagcccagacaatggagatgatgtatacgataattgcagatgagttcaagtcaatggacaataaggacatgcgccctgaagattacttgaacttcttttgtcttggaaaccgggaagaaccaccatctaatggcagcccagaatcagagaaatctacatataaaagtgcagagatagtctgtttttgcattttccttattcttaaggaagcatttgaagacgcagaaattactcatgttgacgatacagtagatcctgttagagacatggaaactattagtgaagagctcagactaaagttttcgttggattttgttgatttacaagatcagctgtacaacacttaaaccttttttcgacactattctgtttctattttctgcaggatatagagttcatgaaaaagaaacttgaggaccttgataagccaatgaagaggaggaatgataagctgctcaaaattgagcatgaattatattgatccagcacaatgccgaggagactggagactaaacttggaggtgctactgaaggatgtgactttgagtcaaagggtagcacatggagagcttgaattgaattcaagcttggatatgattggaaaatatttgtattagatcacctagaagggtgattgatgcttgttattggccaagcagacaataggtagtcagatgaagattgtaaaaaacaagcatgcttaacccttcaagaatgcacagtttgagcttgaatttggaaaggggatatgccacagttcagagttttttgaacagaatttctggagcagttgttcctataaaataatattttaggtcttgaagccaccaccgtttggattgacatgatctgtggtattctggtgatctcattatagcagacttcatttcttattgtgcttatacagtagtgtagcgggaagagaattcacattgcatgaaatcatgttgatagctaagaggtggaagttgaagtaagccgggaagggtgaggtattgggaactgtggcatttaaagttcagtaggcagcagtaaactgtagtggtgtggtcgtgtacataagatgtgcacattttgaactcaggcattctttattgagtgctgctagaattacattgagctccctccacttctgatacttgcctggttttgcgtcaattggatctgtttgtccgtcctcaacactgttgtctgtttttgctaatttgggcattatctatgacagaagaagaacgattatgaattatagattaaattgaacataatgttgttctaagaacaaaaacagattatttcactgaatattttctcatcgcaagatgtactaaatagtaggttcactacagtcttacagaagccaataacccacttgatcttgctataatgatgttcttagaatacttatagatgtgttggctggaacattagctctgacaagatagaagcttgtttgttctgttatttagtcatgtctgcccctcaaactactgaaacctaaaatctgaaactgaaaatctgaaaatataaaactaaaaatatgaaactgaatattgtatgtcatgtttgtgtcatgttttcttagactgcattgaactccaacagagactgagaaacatggaattatagctagaacttggatctatggctgtgatattcttgcttgcggaaactgggaattatagagagacggaaatactttttaaattagaatctaactacaattcgatttagttcaagtcaatattcagagttctactttctggaattattcagagttcagttattcaaagttattaatagctatacttagccacccatgatgtagtcaagaaaaaaataactgaactcttctgcttataatttcaactatattaatagatattgttatcaggtgtttaaaaagaatgtggtcatcttgtgtgacatttgtgttcttaaattgttgctctgcttataaccttttttacaatgtactcatcagttctatactcgcagccaaaatctatagtgggaactcctgcatacattgctcatgaggttcttctgaagaaggaatacaatggaaaggttttatgcgtagtgtcgttaattattctacacttgacatactgtttttgtttagtgtgcatgttattattctccacttgaacaacatgtttgtttgtcaaaacattttatacacgcacgatttgtagtcatgcataacagggaactatgttggaaggttcgaatgctaaattagtcactaactctttgttactgaactaaggttgctgatgtgtggtcatgcggagtgatgccatacgtgatgctgacgatcaccatccctgagataagaaaccatccatggttcttgaaaaacctcctagctgaccaaatggatgacaatacgatgagtaagcagtacgaggagcctgaacaaccgatgcagagcatgaatgagttcatgcagatcctggttgaggcgaccattccagcagttggttcacgtggactcaatcagtttctgaatgatgacattgacctcgacgatgacatggaggacctagactcagatgccggtcttgacctggaaagcagtggggagatcgtgtatgctatttgacaacattgaatactttgttgtgtcgtaggttaccaagataattagagacaaggggcaggttgttgtgcttgcaagtatctgttgcagctgttgttcatgcctgatgttgatgcctcttttcatactgttgtgtttggatggtgtaccaccagtgttttacaacagtttggcccttggaattgctattgctaaaacttggttcctctgagaagaccttttgtttttgtattcccagtcgagggacggtgaagtacttatattattacaaaattgtt

SEQ ID NO: 74169 - DNA, 4419 bp, Zea Mays
acgtactctgtcaaacgatacgccgcgatgcttccagacgagcgccatccccttcctcgcctcacacgccgtcctgttggtcgtgcctctcttcaacctttttttcttgagcattagcgagagccccttacatggtgcagtgctagcatcgttgctggcgacctcggtgaggtcggatctgcaaaggttgcagctagcgcgcctacactacatcaacatggtgtggcatctcctttcgcagatccccaacatgctacgccgccggctgcctcattggaactcctgtgcaccgcttgcctttcttctcccattcaacccgcaggcgttccctggctcaatagcgcaactaggggatgtccgccgctacctccatataggaaacgacagatttagattttcaggtgatgcgtggtcgggatcccggatcaatcaaaataagtgtgaaataagtgtgaaatttgagaggctgttgaacttccagatcaggtaccaaccaaaaaaagtgacccttttgacggcgtattgcgtgggcaaggcatgccagtgcgacaatagagaaactaacggggagctctgttcgttctgctgattgcttatgattaggctcgcagtggtggtagctgggagagcttgggactggccagacgcgaccaactcacccatgtaataagacaacttttatacatagccgacagtacgcaacctcatgcgcaagatccttaatgaaaccaaagagctgcagcagataaccaacgacaagcagaaaaatcaggcccagacaatggagatgatgtatacgataattgcagatgagttcaagtcaatggacaataaggacatgcgccctgaagattacttgaacttcttttgtcttggaaaccgggaagaaccaccatctaatggcagcccagaatcagagaaatctacatataaaagtgcagagatagtctgtttttgcattttccttattcttaagggtatggcttagctcaacccttctgattacaccaaaactgaatatggttttggcgcacggaccttatgggaagctagagaagcatttgaagacgcagaaattactcatgttgacgatacagtagatcctgttagagacatggaaactattagtgaagagctcagactaaagttttcgttggattttgttgatttacaagatcagctgtacaacacttaaaccttttttcgacactattctgtttctattttctgcaggatatagagttcatgaaaaagaaacttgaggaccttgataagccaatgaagaggaggaatgataagctgctcaaaattgagcatgaattatattgatccagcacaatgccgaggagactggagactaaacttggaggtgctactgaaggatgtgactttgagtcaaagggtagcacatggagagcttgaattgaattcaagcttggatatgattggaaaatatttgtattagatcacctagaagggtgattgatgcttgttattggccaagcaggtaggtatcacatttgtctttcttttgctgttgtaggttttttagttgtaactgtcttttgtgttgcttgtttgaatctgggctggaagaaaaaggtgcaaaattgaatatgaattggtcttggaaaattcaaacacattgattttaaatattatgagatccttatgtttcttgttctttagaacaactgcatcctatatgattactcatatgggctttagtttcaagtggattatgtaattcttttgtttcagttcattgctgcacatcttggcatgactgcattgtgggctacaatgtctctcttcatgctttggtgatgaacatttgacgcttagtttcataatagaagtattgtattaaacatataaggtagtgagtgaaccagctctttagttgtctacttctatgagtgtaatgaccatctctgctaattcttagtttggtggttcagtggtactatctgatttcatagtgtaactttgatttaacagagatatatatgtctgcatgagacctatttaactgagccagtactagacacatgtaataggaatctacatgtgttgtcactcgacaatcgtaaatgattagtgaatttaaaataactgactctacatatgccatatgggctttgtagtagtgagattcgatgttccctgaaacaatatgcactttatgtagcttttgaatgatgattccttccatttgcagacaataggtagtcagatgaagattgtaaaaaacaagcatgcttaacccttcaagaatgcacagtttgagcttgaatttggaaaggggatatgccacagttcagagttttttgaacagaatttctggagcagttgttcctataaaataatattttaggtcttgaagccaccaccgtttggattgacatgatctgtggtattctggtgatctcattatagcagacttcatttcttattgtgcttatacagtagtgtagcgggaagagaattcacattgcatgaaatcatgttgatagctaagaggtggaagttgaagtaagccgggaagggtgaggtattgggaactgtggcatttaaagttcagtaggcagcagtaaactgtagtggtgtggtcgtgtacataagatgtgcacattttgaactcaggcattctttattgagtgctgctagaattacattgagctccctccacttctgatacttgcctggttttgcgtcaattggatctgtttgtccgtcctcaacactgttgtctgtttttgctaatttgggcattatctatgacagaagaagaacgattatgaattatagattaaattgaacataatgttgttctaagaacaaaaacagattatttcactgaatattttctcatcgcaagatgtactaaatagtaggttcactacagtcttacagaagccaataacccacttgatcttgctataatgatgttcttagaatacttatagatgtgttggctggaacattagctctgacaagatagaagcttgtttgttctgttatttagtcatgtctgcccctcaaactactgaaacctaaaatctgaaactgaaaatctgaaaatataaaactaaaaatatgaaactgaatattgtatgtcatgtttgtgtcatgttttcttagactgcattgaactccaacagagactgagaaacatggaattatagctagaacttggatctatggctgtgatattcttgcttgcggaaactgggaattatagagagacggaaatactttttaaattagaatctaactacaattcgatttagttcaagtcaatattcagagttctactttctggaattattcagagttcagttattcaaagttattaatagctatacttagccacccatgatgtagtcaagaaaaaaataactgaactcttctgcttataatttcaactatattaatagatattgttatcaggtgtttaaaaagaatgtggtcatcttgtgtgacatttgtgttcttaaattgttgctctgcttataaccttttttacaatgtactcatcagttctatactcgcagccaaaatctatagtgggaactcctgcatacattgctcatgaggttcttctgaagaaggaatacaatggaaaggttttatgcgtagtgtcgttaattattctacacttgacatactgtttttgtttagtgtgcatgttattattctccacttgaacaacatgtttgtttgtcaaaacattttatacacgcacgatttgtagtcatgcataacagggaactatgttggaaggttcgaatgctaaattagtcactaactctttgttactgaactaaggttgctgatgtgtggtcatgcggagtgatgccatacgtgatgctgaaaccatccatggttcttgaaaaacctcctagctgaccaaatggatgacaatacgatgagtaagcagtacgaggagcctgaacaaccgatgcagagcatgaatgagttcatgcagatcctggttgaggcgaccattccagcagttggttcacgtggactcaatcagtttctgaatgatgacattgacctcgacgatgacatggaggacctagactcagatgccggtcttgacctggaaagcagtggggagatcgtgtatgctatttgacaacattgaatactttgttgtgtcgtaggttaccaagataattagagacaaggggcaggttgttgtgcttgcaagtatctgttgcagctgttgttcatgcctgatgttgatgcctcttttcatactgttgtgtttggatggtgtaccaccagtgttttacaacagtttggcccttggaattgctattgctaaaacttggttcctctgagaagaccttttgtttttgtattcccagtcgagggacggtgaagtacttatattattacaaaattgtt

SEQ ID NO: 74170 - DNA, 2392 bp, Zea Mays
acgtactctgtcaaacgatacgccgcgatgcttccagacgagcgccatccccttcctcgcctcacacgccgtcctgttggtcgtgcctctcttcaacctttttttcttgagcattagcgagagccccttacatggtgcagtgctagcatcgttgctggcgacctcggtgaggtcggatctgcaaaggttgcagctagcgcgcctacactacatcaacatggtgtggcatctcctttcgcagatccccaacatgctacgccgccggctgcctcattggaactcctgtgcaccgcttgcctttcttctcccattcaacccgcaggcgttccctggctcaatagcgcaactaggggatgtccgccgctacctccatataggaaacgacagatttagattttcaggtgatgcgtggtcgggatcccggatcaatcaaaataagtgtgaaataagtgtgaaatttgagaggctgttgaacttccagatcaggtaccaaccaaaaaaagtgacccttttgacggcgtattgcgtgggcaaggcatgccagtgcgacaatagagaaactaacggggagctctgttcgttctgctgattgcttatgattaggctcgcagtggtggtagctgggagagcttgggactggccagacgcgaccaactcacccatgtaataagacaacttttatacatagccgacagtacgcaacctcatgcgcaagatccttaatgaaaccaaagagctgcagcagataaccaacgacaagcagaaaaatcaggcccagacaatggagatgatgtatacgataattgcagatgagttcaagtcaatggacaataaggacatgcgccctgaagattacttgaacttcttttgtcttggaaaccgggaagaaccaccatctaatggcagcccagaatcagagaaatctacatataaaagtgcagagatagtctgtttttgcattttccttattcttaagggtatggcttagctcaacccttctgattacaccaaaactgaatatggttttggcgcacggaccttatgggaagctagagaagcatttgaagacgcagaaattactcatgttgacgatacagtagatcctgttagagacatggaaactattagtgaagagctcagactaaagttttcgttggattttgttgatttacaagatcagctgtacaacacttaaaccttttttcgacactattctgtttctattttctgcaggatatagagttcatgaaaaagaaacttgaggaccttgataagccaatgaagaggaggaatgataagctgctcaaaattgagcatgaattatattgatccagcacaatgccgaggagactggagactaaacttggaggtgctactgaaggatgtgactttgagtcaaagggtagcacatggagagcttgaattgaattcaagcttggatatgattggaaaatatttgtattagatcacctagaagggtgattgatgcttgttattggccaagcagccaaaatctatagtgggaactcctgcatacattgctcatgaggttcttctgaagaaggaatacaatggaaaggttttatgcgtagtgtcgttaattattctacacttgacatactgtttttgtttagtgtgcatgttattattctccacttgaacaacatgtttgtttgtcaaaacattttatacacgcacgatttgtagtcatgcataacagggaactatgttggaaggttcgaatgctaaattagtcactaactctttgttactgaactaaggttgctgatgtgtggtcatgcggagtgatgccatacgtgatgctgacgatcaccatccctgagataagaaaccatccatggttcttgaaaaacctcctagctgaccaaatggatgacaatacgatgagtaagcagtacgaggagcctgaacaaccgatgcagagcatgaatgagttcatgcagatcctggttgaggcgaccattccagcagttggttcacgtggactcaatcagtttctgaatgatgacattgacctcgacgatgacatggaggacctagactcagatgccggtcttgacctggaaagcagtggggagatcgtgtatgctatttgacaacattgaatactttgttgtgtcgtaggttaccaagataattagagacaaggggcaggttgttgtgcttgcaagtatctgttgcagctgttgttcatgcctgatgttgatgcctcttttcatactgttgtgtttggatggtgtaccaccagtgttttacaacagtttggcccttggaattgctattgctaaaacttggttcctctgagaagaccttttgtttttgtattcccagtcgagggacggtgaagtacttatattattacaaaattgtt

SEQ ID NO: 74171 - DNA, 2014 bp, Zea Mays
acgtactctgtcaaacgatacgccgcgatgcttccagacgagcgccatccccttcctcgcctcacacgccgtcctgttggtcgtgcctctcttcaacctttttttcttgagcattagcgagagccccttacatggtgcagtgctagcatcgttgctggcgacctcggtgagatccccaacatgctacgccgccggctgcctcattggaactcctgtgcaccgcttgcctttcttctcccattcaacccgcaggcgttccctggctcaatagcgcaactaggggatgtccgccgctacctccatataggaaacgacagatttagattttcaggtgatgcgtggtcgggatcccggatcaatcaaaataagtgtgaaataagtgtgaaatttgagaggctgttgaacttccagatcaggtaccaaccaaaaaaagtgacccttttgacggcgtattgcgtgggcaaggcatgccagtgcgacaatagagaaactaacggggagctctgttcgttctgctgattgcttatgattaggctcgcagtggtggtagctgggagagcttgggactggccagacgcgaccaactcacccatgtaataagacaacttttatacatagccgacagtacgcaacctcatgcgcaagatccttaatgaaaccaaagagctgcagcagataaccaacgacaagcagaaaaatcaggcccagacaatggagatgatgtatacgataattgcagatgagttcaagtcaatggacaataaggacatgcgccctgaagattacttgaacttcttttgtcttggaaaccgggaagaaccaccatctaatggcagcccagaatcagagaaatctacatataaaagtgcagagatagtctgtttttgcattttccttattcttaagggtatggcttagctcaacccttctgattacaccaaaactgaatatggttttggcgcacggaccttatgggaagctagagaagcatttgaagacgcagaaattactcatgttgacgatacagtagatcctgttagagacatggaaactattagatatagagttcatgaaaaagaaacttgaggaccttgataagccaatgaagaggaggaatgataagctgctcaaaattgagcatgaattatattgatccagcacaatgccgaggagactggagactaaacttggaggtgctactgaaggatgtgactttgagtcaaagggtagcacatggagagcttgaattgaattcaagcttggatatgattggaaaatatttgtattagatcacctagaagggtgattgatgcttgttattggccaagcagccaaaatctatagtgggaactcctgcatacattgctcatgaggttcttctgaagaaggaatacaatggaaaggttgctgatgtgtggtcatgcggagtgatgccatacgtgatgctgacgatcaccatccctgagataagaaaccatccatggttcttgaaaaacctcctagctgaccaaatggatgacaatacgatgagtaagcagtacgaggagcctgaacaaccgatgcagagcatgaatgagttcatgcagatcctggttgaggcgaccattccagcagttggttcacgtggactcaatcagtttctgaatgatgacattgacctcgacgatgacatggaggacctagactcagatgccggtcttgacctggaaagcagtggggagatcgtgtatgctatttgacaacattgaatactttgttgtgtcgtaggttaccaagataattagagacaaggggcaggttgttgtgcttgcaagtatctgttgcagctgttgttcatgcctgatgttgatgcctcttttcatactgttgtgtttggatggtgtaccaccagtgttttacaacagtttggcccttggaattgctattgctaaaacttggttcctctgagaagaccttttgtttttgtattcccagtcgagggacggtgaagtacttatattattacaaaattgtt

SEQ ID NO: 74172 - DNA, 3057 bp, Zea Mays
acgtactctgtcaaacgatacgccgcgatgcttccagacgagcgccatccccttcctcgcctcacacgccgtcctgttggtcgtgcctctcttcaacctttttttcttgagcattagcgagagccccttacatggtgcagtgctagcatcgttgctggcgacctcggtgaggtcggatctgcaaaggttgcagctagcgcgcctacactacatcaacatggtgtggcatctcctttcgcagatccccaacatgctacgccgccggctgcctcattggaactcctgtgcaccgcttgcctttcttctcccattcaacccgcaggcgttccctggctcaatagcgcaactaggggatgtccgccgctacctccatataggaaacgacagatttagattttcaggtgatgcgtggtcgggatcccggatcaatcaaaataagtgtgaaataagtgtgaaatttgagaggctgttgaacttccagatcaggtaccaaccaaaaaaagtgacccttttgacggcgtattgcgtgggcaaggcatgccagtgcgacaatagagaaactaacggggagctctgttcgttctgctgattgcttatgattaggctcgcagtggtggtagctgggagagcttgggactggccagacgcgaccaactcacccatgtaataagacaacttttatacatagccgacagtacgcaacctcatgcgcaagatccttaatgaaaccaaagagctgcagcagataaccaacgacaagcagaaaaatcaggttgtacgcatccaacattttactttcatatttgctgaagatgtcaacaaacaaaatagacaagcagcccagacaatggagatgatgtatacgataattgcagatgagttcaagtcaatggacaataaggacatgcgccctgaagattacttgaacttcttttgtcttggaaaccgggaagaaccaccatctaatggcagcccagaatcagagaaatctacatataaaagtgcagagatagatatagagttcatgaaaaagaaacttgaggaccttgataagccaatgaagaggaggaatgataagctgctcaaaattgagcatgaattatattgatccagcacaatgccgaggagactggagactaaacttggaggtgctactgaaggatgtgactttgagtcaaagggtagcacatggagagcttgaattgaattcaagcttggatatgattggaaaatatttgtattagatcacctagaagggtgattgatgcttgttattggccaagcagtagtgtagcgggaagagaattcacattgcatgaaatcatgttgatagctaagaggtggaagttgaagtaagccgggaagggtgaggtattgggaactgtggcatttaaagttcagtaggcagcagtaaactgtagtggtgtggtcgtgtacataagatgtgcacattttgaactcaggcattctttattgagtgctgctagaattacattgagctccctccacttctgatacttgcctggttttgcgtcaattggatctgtttgtccgtcctcaacactgttgtctgtttttgctaatttgggcattatctatgacagaagaagaacgattatgaattatagattaaattgaacataatgttgttctaagaacaaaaacagattatttcactgaatattttctcatcgcaagatgtactaaatagtaggttcactacagtcttacagaagccaataacccacttgatcttgctataatgatgttcttagaatacttatagatgtgttggctggaacattagctctgacaagatagaagcttgtttgttctgttatttagtcatgtctgcccctcaaactactgaaacctaaaatctgaaactgaaaatctgaaaatataaaactaaaaatatgaaactgaatattgtatgtcatgtttgtgtcatgttttcttagactgcattgaactccaacagagactgagaaacatggaattatagctagaacttggatctatggctgtgatattcttgcttgcggaaactgggaattatagagagacggaaatactttttaaattagaatctaactacaattcgatttagttcaagtcaatattcagagttctactttctggaattattcagagttcagttattcaaagttattaatagctatacttagccacccatgatgtagtcaagaaaaaaataactgaactcttctgcttataatttcaactatattaatagatattgttatcaggtgtttaaaaagaatgtggtcatcttgtgtgacatttgtgttcttaaattgttgctctgcttataaccttttttacaatgtactcatcagttctatactcgcagccaaaatctatagtgggaactcctgcatacattgctcatgaggttcttctgaagaaggaatacaatggaaaggttgctgatgtgtggtcatgcggagtgatgccatacgtgatgctgacgatcaccatccctgagataagaaaccatccatggttcttgaaaaacctcctagctgaccaaatggatgacaatacgatgagtaagcagtacgaggagcctgaacaaccgatgcagagcatgaatgagttcatgcagatcctggttgaggcgaccattccagcagttggttcacgtggactcaatcagtttctgaatgatgacattgacctcgacgatgacatggaggacctagactcagatgccggtcttgacctggaaagcagtggggagatcgtgtatgctatttgacaacattgaatactttgttgtgtcgtaggttaccaagataattagagacaaggggcaggttgttgtgcttgcaagtatctgttgcagctgttgttcatgcctgatgttgatgcctcttttcatactgttgtgtttggatggtgtaccaccagtgttttacaacagtttggcccttggaattgctattgctaaaacttggttcctctgagaagaccttttgtttttgtattcccagtcgagggacggtgaagtacttatattattacaaaattgtt

SEQ ID NO: 74173 - DNA, 2239 bp, Zea Mays
acgtactctgtcaaacgatacgccgcgatgcttccagacgagcgccatccccttcctcgcctcacacgccgtcctgttggtcgtgcctctcttcaacctttttttcttgagcattagcgagagccccttacatggtgcagtgctagcatcgttgctggcgacctcggtgaggtcggatctgcaaaggttgcagctagcgcgcctacactacatcaacatggtgtggcatctcctttcgcagatccccaacatgctacgccgccggctgcctcattggaactcctgtgcaccgcttgcctttcttctcccattcaacccgcaggcgttccctggctcaatagcgcaactaggggatgtccgccgctacctccatataggaaacgacagatttagattttcaggtgatgcgtggtcgggatcccggatcaatcaaaataagtgtgaaataagtgtgaaatttgagaggctgttgaacttccagatcaggtaccaaccaaaaaaagtgacccttttgacggcgtattgcgtgggcaaggcatgccagtgcgacaatagagaaactaacggggagctctgttcgttctgctgattgcttatgattaggctcgcagtggtggtagctgggagagcttgggactggccagacgcgaccaactcacccatgtaataagacaacttttatacatagccgacagtacgcaacctcatgcgcaagatccttaatgaaaccaaagagctgcagcagataaccaacgacaagcagaaaaatcaggttgtacgcatccaacattttactttcatatttgctgaagatgtcaacaaacaaaatagacaagcagcccagacaatggagatgatgtatacgataattgcagatgagttcaagtcaatggacaataaggacatgcgccctgaagattacttgaacttcttttgtcttggaaaccgggaagaaccaccatctaatggcagcccagaatcagagaaatctacatataaaagtgcagagatagtctgtttttgcattttccttattcttaagggtatggcttagctcaacccttctgattacaccaaaactgaatatggttttggcgcacggaccttatgggaagctagagaagcatttgaagacgcagaaattactcatgttgacgatacagtagatcctgttagagacatggaaactattagtgaagagctcagactaaagttttcgttggattttgttgatttacaagatcagctgtacaacacttaaaccttttttcgacactattctgtttctattttctgcaggatatagagttcatgaaaaagaaacttgaggaccttgataagccaatgaagaggaggaatgataagctgctcaaaattgagcatgaattatattgatccagcacaatgccgaggagactggagactaaacttggaggtgctactgaaggatgtgactttgagtcaaaggtaacaggtagcacatggagagcttgaattgaattcaagcttggatatgattggaaaatatttgtattagatcacctagaagggtgattgatgcttgttattggccaagcagccaaaatctatagtgggaactcctgcatacattgctcatgaggttcttctgaagaaggaatacaatggaaaggttgctgatgtgtggtcatgcggagtgatgccatacgtgatgctgaaaccatccatggttcttgaaaaacctcctagctgaccaaatggatgacaatacgatgagtaagcagtacgaggagcctgaacaaccgatgcagagcatgaatgagttcatgcagatcctggttgaggcgaccattccagcagttggttcacgtggactcaatcagtttctgaatgatgacattgacctcgacgatgacatggaggacctagactcagatgccggtcttgacctggaaagcagtggggagatcgtgtatgctatttgacaacattgaatactttgttgtgtcgtaggttaccaagataattagagacaaggggcaggttgttgtgcttgcaagtatctgttgcagctgttgttcatgcctgatgttgatgcctcttttcatactgttgtgtttggatggtgtaccaccagtgttttacaacagtttggcccttggaattgctattgctaaaacttggttcctctgagaagaccttttgtttttgtattcccagtcgagggacggtgaagtacttatattattacaaaattgtt
